United States Patent Application Publication US 2025/0327063 A1 - sequence listing, part 9

SEQ ID NO: 122805 - DNA, 80 bp, synthetic construct
  misc_feature 1..80: note = Artificially Synthesized Probe
  source 1..80: mol_type = other DNA
cccggagagggaaaggatggcatggccagcccctggggagagtaggggcttgagggatcaggagaatcctagtgtagtga

SEQ ID NO: 122806 - DNA, 80 bp, synthetic construct
  misc_feature 1..80: note = Artificially Synthesized Probe
  source 1..80: mol_type = other DNA
gtccatctggaccaacttttccagccgcttccacataccccaggtggctgagttctacggggccacagagtgcaactgta

SEQ ID NO: 122807 - DNA, 80 bp, synthetic construct
  misc_feature 1..80: note = Artificially Synthesized Probe
  source 1..80: mol_type = other DNA
gcccatggtgagagagcccaggcccaagtcttggccttcgcaggtgggggcctgtggtttcaatagccgcatcctgtcct

SEQ ID NO: 122808 - DNA, 80 bp, synthetic construct; identical to SEQ ID NO: 39632
  misc_feature 1..80: note = Artificially Synthesized Probe
  source 1..80: mol_type = other DNA

SEQ ID NO: 122809 - DNA, 80 bp, synthetic construct
  misc_feature 1..80: note = Artificially Synthesized Probe
  source 1..80: mol_type = other DNA
cacgccattctcctgcctcagcctcccaagtagctgggactacaggcgcccgccactacgcccggctaattttttgtatt

SEQ ID NO: 122810 - DNA, 80 bp, synthetic construct
  misc_feature 1..80: note = Artificially Synthesized Probe
  source 1..80: mol_type = other DNA
tagctggaattacaggcaaaccccaccatgcccggctagtttttctattttcaatagagatggggtttcaccatgttgtc

SEQ ID NO: 122811 - DNA, 80 bp, synthetic construct
  misc_feature 1..80: note = Artificially Synthesized Probe
  source 1..80: mol_type = other DNA
ctaatttttgtatttttagtagagacagggtttcaccatcttggtcagggtggtctcgaactcctgacgtcatgatccgc

SEQ ID NO: 122812 - DNA, 80 bp, synthetic construct; identical to SEQ ID NO: 39633
  misc_feature 1..80: note = Artificially Synthesized Probe
  source 1..80: mol_type = other DNA

SEQ ID NO: 122813 - DNA, 80 bp, synthetic construct
  misc_feature 1..80: note = Artificially Synthesized Probe
  source 1..80: mol_type = other DNA
tcccatcagtttcgagaacaaacatcactggctcagtgtgtccgacctgccaagatgagctcctgggctgggggagggtg

SEQ ID NO: 122814 - DNA, 80 bp, synthetic construct
  misc_feature 1..80: note = Artificially Synthesized Probe
  source 1..80: mol_type = other DNA
acaggatgaaacccatctttactaaaaaataaaaaaaaaaaattagctgggcctgttggcgtgtgcctgtaatctcagct

SEQ ID NO: 122815 - DNA, 80 bp, synthetic construct
  misc_feature 1..80: note = Artificially Synthesized Probe
  source 1..80: mol_type = other DNA
gtgacaggacgggtgggagaggctgcctagggcagatctgaccctgccttccccaccccaggtgagccgggccagctggt

SEQ ID NO: 122816 - DNA, 80 bp, synthetic construct
  misc_feature 1..80: note = Artificially Synthesized Probe
  source 1..80: mol_type = other DNA
gagggttgggggaggaggggaccttctcccacctccagaggacaccttcccaggactcccccagtcctggcccttgtggt

SEQ ID NO: 122817 - DNA, 80 bp, synthetic construct; identical to SEQ ID NO: 39634
  misc_feature 1..80: note = Artificially Synthesized Probe
  source 1..80: mol_type = other DNA

SEQ ID NO: 122818 - DNA, 80 bp, synthetic construct
  misc_feature 1..80: note = Artificially Synthesized Probe
  source 1..80: mol_type = other DNA
gccagccccactggcaactgtgacctggagcgctttgctcaggtcttggagaaggaactgcccctgtatgcgcgccccat

SEQ ID NO: 122819 - DNA, 80 bp, synthetic construct
  misc_feature 1..80: note = Artificially Synthesized Probe
  source 1..80: mol_type = other DNA
aagtgacctgcctgtgtagaggtgagcagacggggctggcagagaagacacacattgttccttagtagaacacatattag

SEQ ID NO: 122820 - DNA, 80 bp, synthetic construct; identical to SEQ ID NO: 39635
  misc_feature 1..80: note = Artificially Synthesized Probe
  source 1..80: mol_type = other DNA

SEQ ID NO: 122821 - DNA, 80 bp, synthetic construct
  misc_feature 1..80: note = Artificially Synthesized Probe
  source 1..80: mol_type = other DNA
caaggctggagccaagtgagaggggcaggcagtggcatgaagtgggagagaaaccagcaggggccagaagcccagggcct

SEQ ID NO: 122822 - DNA, 80 bp, synthetic construct
  misc_feature 1..80: note = Artificially Synthesized Probe
  source 1..80: mol_type = other DNA
tggctagaaaagcctcttagaacacgtctcaggacaactcggtggtggccactgcgcagaccagacttcgctcgttctcg

SEQ ID NO: 122823 - DNA, 80 bp, synthetic construct
  misc_feature 1..80: note = Artificially Synthesized Probe
  source 1..80: mol_type = other DNA
tgcccaacatggcaaaaccccgtctccactaaacatataaaaattagctggctgggcgtggtggctcacgcctgtaatcc

SEQ ID NO: 122824 - DNA, 80 bp, synthetic construct
  misc_feature 1..80: note = Artificially Synthesized Probe
  source 1..80: mol_type = other DNA
gaggccaaggcagatggattgcctgagctcaggagtttgagaccatccagggcaacatgatgaaaccccgtctctaccaa

SEQ ID NO: 122825 - DNA, 80 bp, synthetic construct
  misc_feature 1..80: note = Artificially Synthesized Probe
  source 1..80: mol_type = other DNA
tcaaaaaaaaaaaaaaaaaaattagccaggcatggtggtgggcgcctgtaatcccagctacttgggaggctgaggcatga

SEQ ID NO: 122826 - DNA, 80 bp, synthetic construct; identical to SEQ ID NO: 39636
  misc_feature 1..80: note = Artificially Synthesized Probe
  source 1..80: mol_type = other DNA

SEQ ID NO: 122827 - DNA, 80 bp, synthetic construct
  misc_feature 1..80: note = Artificially Synthesized Probe
  source 1..80: mol_type = other DNA
gcagttgtccaggtgggaggtgggcagcgggcccgcagtcgcccacaaggcagcaccatctttctatctgttggcccatt

SEQ ID NO: 122828 - DNA, 80 bp, synthetic construct
  misc_feature 1..80: note = Artificially Synthesized Probe
  source 1..80: mol_type = other DNA
cgtcatatcagtcctgccttgatggtgggcactccctagccaatgtggcttctgccagagagtgggtacctggagtgcct

SEQ ID NO: 122829 - DNA, 80 bp, synthetic construct; identical to SEQ ID NO: 39637
  misc_feature 1..80: note = Artificially Synthesized Probe
  source 1..80: mol_type = other DNA

SEQ ID NO: 122830 - DNA, 80 bp, synthetic construct
  misc_feature 1..80: note = Artificially Synthesized Probe
  source 1..80: mol_type = other DNA
tctgcagcactgtccaacagaactttctgcagcgatggaaatgttctaggtttctgctgtccaacacagtagccactagc

SEQ ID NO: 122831 - DNA, 80 bp, synthetic construct
  misc_feature 1..80: note = Artificially Synthesized Probe
  source 1..80: mol_type = other DNA
ggagtgcagtggtgcaatctcagctcactgcaacctttgcctcctgggttcaagtgattctcctgtctcagcgtccccag

SEQ ID NO: 122832 - DNA, 80 bp, synthetic construct
  misc_feature 1..80: note = Artificially Synthesized Probe
  source 1..80: mol_type = other DNA
caggcgtgagccaccatgcctggccttgtttaataatttaaatgtaaatagccacatgaggtcatattggacggcgccgg

SEQ ID NO: 122833 - DNA, 80 bp, synthetic construct; identical to SEQ ID NO: 39620
  misc_feature 1..80: note = Artificially Synthesized Probe
  source 1..80: mol_type = other DNA

SEQ ID NO: 122834 - DNA, 80 bp, synthetic construct; identical to SEQ ID NO: 39638
  misc_feature 1..80: note = Artificially Synthesized Probe
  source 1..80: mol_type = other DNA

SEQ ID NO: 122835 - DNA, 80 bp, synthetic construct
  misc_feature 1..80: note = Artificially Synthesized Probe
  source 1..80: mol_type = other DNA
ttgattgaaagatgcggccaggcgtggcagctcatgtttgtaatcctagcactttgggaggctgaggcaggtagctcgct

SEQ ID NO: 122836 - DNA, 80 bp, synthetic construct
  misc_feature 1..80: note = Artificially Synthesized Probe
  source 1..80: mol_type = other DNA
tgaccaacatggtgaaaccccgtctctactaaaaatacaaaaaattagctgggcgtggtggtgggtgcctgtaatcccag

SEQ ID NO: 122837 - DNA, 80 bp, synthetic construct
  misc_feature 1..80: note = Artificially Synthesized Probe
  source 1..80: mol_type = other DNA
gtgcacacctatagtcctggctacttgggaggctgaggtaggaggatcacttgaggtcggcaggtggaggttgcagtgag

SEQ ID NO: 122838 - DNA, 80 bp, synthetic construct; identical to SEQ ID NO: 39639
  misc_feature 1..80: note = Artificially Synthesized Probe
  source 1..80: mol_type = other DNA

SEQ ID NO: 122839 - DNA, 80 bp, synthetic construct
  misc_feature 1..80: note = Artificially Synthesized Probe
  source 1..80: mol_type = other DNA
caactttgccacagctgctgtatgaccattctttgcaaactgtaaagggctgtgcctcctcccccacttccctcccctgt

SEQ ID NO: 122840 - DNA, 80 bp, synthetic construct
  misc_feature 1..80: note = Artificially Synthesized Probe
  source 1..80: mol_type = other DNA
cggctattgtgaaagacccgctgttctatctagatgcccagaagggccgctacgtcccgctggaccaagaggcctacagc

SEQ ID NO: 122841 - DNA, 80 bp, synthetic construct
  misc_feature 1..80: note = Artificially Synthesized Probe
  source 1..80: mol_type = other DNA
catccaaaactgccaagtgactcattgccttcccaacccttccagaggctttctgtgaaagtctcatgtccaagttccgt

SEQ ID NO: 122842 - DNA, 80 bp, synthetic construct; identical to SEQ ID NO: 39640
  misc_feature 1..80: note = Artificially Synthesized Probe
  source 1..80: mol_type = other DNA

SEQ ID NO: 122843 - DNA, 80 bp, synthetic construct
  misc_feature 1..80: note = Artificially Synthesized Probe
  source 1..80: mol_type = other DNA
gttggtgaaggaagaagtggggtgggacgacagtgaaatctagagtaaaaccaggctggcccaaggtgtcctgcaggctg

SEQ ID NO: 122844 - DNA, 80 bp, synthetic construct
  misc_feature 1..80: note = Artificially Synthesized Probe
  source 1..80: mol_type = other DNA
gctgcctgattatccctcaggcagggcctctcagtccttgtgggtctgtgtcacctccatctcagtcttggcctggctat

SEQ ID NO: 122845 - DNA, 80 bp, synthetic construct
  misc_feature 1..80: note = Artificially Synthesized Probe
  source 1..80: mol_type = other DNA
cgcctcatctgttcattcacttatctaagctgagggtgtagcaggtaagatgccgcagcccctgcctccaatgtgctggt

SEQ ID NO: 122846 - DNA, 80 bp, synthetic construct
  misc_feature 1..80: note = Artificially Synthesized Probe
  source 1..80: mol_type = other DNA
tactaaggtctaaaatgtgaaaaggtcttgcccaaggtcacttggagaatggtgggcagagatgggactatgagacgaga

SEQ ID NO: 122847 - DNA, 80 bp, synthetic construct
  misc_feature 1..80: note = Artificially Synthesized Probe
  source 1..80: mol_type = other DNA
aatgcccctcacgctgtctacgctgctgcaaccgggccgcatctggacggggcgccgcgcggcggagccgacgccgggtg

SEQ ID NO: 122848 - DNA, 80 bp, synthetic construct
  misc_feature 1..80: note = Artificially Synthesized Probe
  source 1..80: mol_type = other DNA
gggctgggaggtaggagacctggagggttgggtgtttgggtccactaactgccctgtgtccgcaggccacaatgctgctt

SEQ ID NO: 122849 - DNA, 80 bp, synthetic construct; identical to SEQ ID NO: 39621
  misc_feature 1..80: note = Artificially Synthesized Probe
  source 1..80: mol_type = other DNA

SEQ ID NO: 122850 - DNA, 80 bp, synthetic construct
  misc_feature 1..80: note = Artificially Synthesized Probe
  source 1..80: mol_type = other DNA
ctaggacgtacattgaacaccaagtgtgttgagacatctgcaaggggtcctgaggactctgtaagtttatgaaagggtaa

SEQ ID NO: 122851 - DNA, 80 bp, synthetic construct
  misc_feature 1..80: note = Artificially Synthesized Probe
  source 1..80: mol_type = other DNA
taccagaaatatctattcccgcttgttctctactaggtgccaggctagctttggggtccagagaggaataaggcagaccc

SEQ ID NO: 122852 - DNA, 80 bp, synthetic construct; identical to SEQ ID NO: 39622
  misc_feature 1..80: note = Artificially Synthesized Probe
  source 1..80: mol_type = other DNA

SEQ ID NO: 122853 - DNA, 80 bp, synthetic construct
  misc_feature 1..80: note = Artificially Synthesized Probe
  source 1..80: mol_type = other DNA
ccagggctgggcgcagtggctcacacctgtgatcctagcactttgggaggccgaagtgggtggatcacttgacctcagga

SEQ ID NO: 122854 - DNA, 80 bp, synthetic construct
  misc_feature 1..80: note = Artificially Synthesized Probe
  source 1..80: mol_type = other DNA
tgagctgacattgcatcactgcactccaacctgggtgacagagtgtgacgccatctcaaaaaaaaaaacaaaaaaacaaa

SEQ ID NO: 122855 - DNA, 80 bp, synthetic construct
  misc_feature 1..80: note = Artificially Synthesized Probe
  source 1..80: mol_type = other DNA
ctcattcattatttactgtggtcatggtgggtcgagggagcagctggactgtgggaggccccaaacaaggagtttggact

SEQ ID NO: 122856 - DNA, 80 bp, synthetic construct; identical to SEQ ID NO: 39623
  misc_feature 1..80: note = Artificially Synthesized Probe
  source 1..80: mol_type = other DNA

SEQ ID NO: 122857 - DNA, 80 bp, synthetic construct
  misc_feature 1..80: note = Artificially Synthesized Probe
  source 1..80: mol_type = other DNA
ggcacgcgtgacccgggacaggggcccgagggaactagtcaccctcttctggcctcttcttgccccagccttccaggaca

SEQ ID NO: 122858 - DNA, 80 bp, synthetic construct
  misc_feature 1..80: note = Artificially Synthesized Probe
  source 1..80: mol_type = other DNA
cagtggcggcctggtcctcctgaaggtgaaggcaaaggtgcgacagtgcctgcaggagcggcggacagtgcccattttgt

SEQ ID NO: 122859 - DNA, 80 bp, synthetic construct
  misc_feature 1..80: note = Artificially Synthesized Probe
  source 1..80: mol_type = other DNA
ccatcttcatggagaaccgcaatgagttcgtgggcctatggctgggcatggccaagctcggtgtggaggcagccctcatc

SEQ ID NO: 122860 - DNA, 80 bp, synthetic construct
  misc_feature 1..80: note = Artificially Synthesized Probe
  source 1..80: mol_type = other DNA
atcttacacagaccacagctcccttccagccctgccaaggctgtgtgggtcagtggttaagggcacagagtggagtcaga

SEQ ID NO: 122861 - DNA, 80 bp, synthetic construct
  misc_feature 1..80: note = Artificially Synthesized Probe
  source 1..80: mol_type = other DNA
tgttgggaggccaaggcaggaggatcccttgagcccaggagtttgagaccagcctaggcaacatagtaagaccctgtctc

SEQ ID NO: 122862 - DNA, 80 bp, synthetic construct; identical to SEQ ID NO: 39624
  misc_feature 1..80: note = Artificially Synthesized Probe
  source 1..80: mol_type = other DNA

SEQ ID NO: 122863 - DNA, 80 bp, synthetic construct
  misc_feature 1..80: note = Artificially Synthesized Probe
  source 1..80: mol_type = other DNA
ggagtgcagtggcgtgatctcggctcactgcaacctccacctcccgggttcaagcaattctcctgcctcagcctcctgag

SEQ ID NO: 122864 - DNA, 80 bp, synthetic construct
  misc_feature 1..80: note = Artificially Synthesized Probe
  source 1..80: mol_type = other DNA
gcatgagccaccacgcccggcctaaaaaaagtttttaaaaaattagctaggcttggtgacatggacctgtagtcccagct

SEQ ID NO: 122865 - DNA, 80 bp, synthetic construct
  misc_feature 1..80: note = Artificially Synthesized Probe
  source 1..80: mol_type = other DNA
ctgtaaatcccagcactttaggaggtcgaggtgggcagctttgagatcaggagtttgagaccagcctggccaacatggtg

SEQ ID NO: 122866 - DNA, 80 bp, synthetic construct; identical to SEQ ID NO: 39625
  misc_feature 1..80: note = Artificially Synthesized Probe
  source 1..80: mol_type = other DNA

SEQ ID NO: 122867 - DNA, 80 bp, synthetic construct
  misc_feature 1..80: note = Artificially Synthesized Probe
  source 1..80: mol_type = other DNA
gttgctgctttccaagagcagctctaatctctataaagaccgagtgaggtagggatcttggttttatggatgatgagcct

SEQ ID NO: 122868 - DNA, 80 bp, synthetic construct
  misc_feature 1..80: note = Artificially Synthesized Probe
  source 1..80: mol_type = other DNA
gatgctgaaagggggcctggcatggtggctcacgcctgtaatcccagcacttttggaggccaaggagggcaggtcacctg

SEQ ID NO: 122869 - DNA, 80 bp, synthetic construct; identical to SEQ ID NO: 39619
  misc_feature 1..80: note = Artificially Synthesized Probe
  source 1..80: mol_type = other DNA

SEQ ID NO: 122870 - DNA, 80 bp, synthetic construct
  misc_feature 1..80: note = Artificially Synthesized Probe
  source 1..80: mol_type = other DNA
gatcatgccactgcactccagcctgggcgacagagtgaaactctgtcttaaaaaaaaaaaaaaaaagatgctgaaagggg

SEQ ID NO: 122871 - DNA, 80 bp, synthetic construct; identical to SEQ ID NO: 39626
  misc_feature 1..80: note = Artificially Synthesized Probe
  source 1..80: mol_type = other DNA

SEQ ID NO: 122872 - DNA, 80 bp, synthetic construct
  misc_feature 1..80: note = Artificially Synthesized Probe
  source 1..80: mol_type = other DNA
cactcctcccttctatctggtgcaccacagagtaagtagtgcgggatagtgggggggagcccagaccttgatgtgaggta

SEQ ID NO: 122873 - DNA, 80 bp, synthetic construct
  misc_feature 1..80: note = Artificially Synthesized Probe
  source 1..80: mol_type = other DNA
tactctgtggttagcccatggctaatagaaccattgccggtgcccctgtcaacactgaaggcccagttgcttcactgcct

SEQ ID NO: 122874 - DNA, 80 bp, synthetic construct
  misc_feature 1..80: note = Artificially Synthesized Probe
  source 1..80: mol_type = other DNA
cagcctcttctgctctggctcctgggagcccggtgcggtgcctccaagcacagaacacctggaccctctgctgaaagatg

SEQ ID NO: 122875 - DNA, 80 bp, synthetic construct; identical to SEQ ID NO: 39627
  misc_feature 1..80: note = Artificially Synthesized Probe
  source 1..80: mol_type = other DNA

SEQ ID NO: 122876 - DNA, 80 bp, synthetic construct
  misc_feature 1..80: note = Artificially Synthesized Probe
  source 1..80: mol_type = other DNA
ggttgggtgggagggtgggtgaggagcaagaccctttgtatattcatcaagtgcctcttcagtgcaggacacttcaggat

SEQ ID NO: 122877 - DNA, 80 bp, synthetic construct
  misc_feature 1..80: note = Artificially Synthesized Probe
  source 1..80: mol_type = other DNA
ccacattgcctggtggctcagagcttgggctgtcgagtcagatccgagtttatatcctggttctactgcttcctttgtgt

SEQ ID NO: 122878 - DNA, 80 bp, synthetic construct; identical to SEQ ID NO: 39628
  misc_feature 1..80: note = Artificially Synthesized Probe
  source 1..80: mol_type = other DNA

SEQ ID NO: 122879 - DNA, 80 bp, synthetic construct
  misc_feature 1..80: note = Artificially Synthesized Probe
  source 1..80: mol_type = other DNA
tcaagtctggtagggccgagcctcacatagaaactctaacgtggcaatccctgtcgagggctgcagagtgggacagatca

SEQ ID NO: 122880 - DNA, 80 bp, synthetic construct
  misc_feature 1..80: note = Artificially Synthesized Probe
  source 1..80: mol_type = other DNA
aagattcatccgagtggctgtgtgtgtctgtgtgatgggtggtggtgtcttcaaggtcctcctcgcctccctcaatcagc

SEQ ID NO: 122881 - DNA, 80 bp, synthetic construct
  misc_feature 1..80: note = Artificially Synthesized Probe
  source 1..80: mol_type = other DNA
gggtttcaacaggtcctgtgccctccctcggcacttgttgcttagtattggaattgcctgtgtcctcatctgactgttcc

SEQ ID NO: 122882 - DNA, 80 bp, synthetic construct
  misc_feature 1..80: note = Artificially Synthesized Probe
  source 1..80: mol_type = other DNA
caggaaatatttgttggaatggatgccggtgttagagctgaatggtatctgaggttatcagaacaggcttcctagcaagg

SEQ ID NO: 122883 - DNA, 80 bp, synthetic construct
  misc_feature 1..80: note = Artificially Synthesized Probe
  source 1..80: mol_type = other DNA
gccatcgtggtgcacagcaggtaaggggcaggtgcccagggtggggtaggcacaggcagggctggggagcctccttctgc

SEQ ID NO: 122884 - DNA, 80 bp, synthetic construct; identical to SEQ ID NO: 39641
  misc_feature 1..80: note = Artificially Synthesized Probe
  source 1..80: mol_type = other DNA

SEQ ID NO: 122885 - DNA, 80 bp, synthetic construct
  misc_feature 1..80: note = Artificially Synthesized Probe
  source 1..80: mol_type = other DNA
aacccttgtctcccgcacagctggctctgcgtgaattaccctttctctactgtaattcccccgtcttgagaaatcagctg

SEQ ID NO: 122886 - DNA, 80 bp, synthetic construct
  misc_feature 1..80: note = Artificially Synthesized Probe
  source 1..80: mol_type = other DNA
cctcccaggttcaagcaattcttgtgcctcagcctcccaagaagctggagtacaggcccacgccaccacgcctggctaat

SEQ ID NO: 122887 - DNA, 80 bp, synthetic construct
  misc_feature 1..80: note = Artificially Synthesized Probe
  source 1..80: mol_type = other DNA
gcaaagtggtagagtcatagctccctgcaacctagaactcctgggctcaagtgaccctcccacttcagcctccccagtag

SEQ ID NO: 122888 - DNA, 80 bp, synthetic construct; identical to SEQ ID NO: 39652
  misc_feature 1..80: note = Artificially Synthesized Probe
  source 1..80: mol_type = other DNA

SEQ ID NO: 122889 - DNA, 80 bp, synthetic construct
  misc_feature 1..80: note = Artificially Synthesized Probe
  source 1..80: mol_type = other DNA
taaaaatacaaaaattagccgggcatggtggcacgtgcctgtaatcccagctacttgggaggctgaggcaggagaattgc

SEQ ID NO: 122890 - DNA, 80 bp, synthetic construct
  misc_feature 1..80: note = Artificially Synthesized Probe
  source 1..80: mol_type = other DNA
ggtggatcacgaggtcaggagatcgagaccatcctggccaacatggtgaaaccccatctctactaaaaataaaaaaatta

SEQ ID NO: 122891 - DNA, 80 bp, synthetic construct; identical to SEQ ID NO: 39653
  misc_feature 1..80: note = Artificially Synthesized Probe
  source 1..80: mol_type = other DNA

SEQ ID NO: 122892 - DNA, 80 bp, synthetic construct
  misc_feature 1..80: note = Artificially Synthesized Probe
  source 1..80: mol_type = other DNA
cctgttggccgggctggtctcaaactcctggcctcaagggatctgtctgcctcaccttaccaaagtgttgggattacagg

SEQ ID NO: 122893 - DNA, 80 bp, synthetic construct
  misc_feature 1..80: note = Artificially Synthesized Probe
  source 1..80: mol_type = other DNA
gagaagtcctgcctaccagtgtccatcaccagctccattcctctgtagttggtgccatctgcaagaatcgagccccttcc

SEQ ID NO: 122894 - DNA, 80 bp, synthetic construct
  misc_feature 1..80: note = Artificially Synthesized Probe
  source 1..80: mol_type = other DNA
ggttccatgagcagccagacagcacagtccctcggggcctcggtgttctcggggcctggatacagcctctggggcaccag

SEQ ID NO: 122895 - DNA, 80 bp, synthetic construct
  misc_feature 1..80: note = Artificially Synthesized Probe
  source 1..80: mol_type = other DNA
ccgctgcttgtgagctccaagaccatctctccttctgtgggtgccccacttatctcactttttgacccctccccaggtct

SEQ ID NO: 122896 - DNA, 80 bp, synthetic construct
  misc_feature 1..80: note = Artificially Synthesized Probe
  source 1..80: mol_type = other DNA
ccagaaggttccttccaaccgcccttccgaaaaggccctctccatggccctcttgtcaatgactcactcccagcatggac

SEQ ID NO: 122897 - DNA, 80 bp, synthetic construct; identical to SEQ ID NO: 39654
  misc_feature 1..80: note = Artificially Synthesized Probe
  source 1..80: mol_type = other DNA

SEQ ID NO: 122898 - DNA, 80 bp, synthetic construct
  misc_feature 1..80: note = Artificially Synthesized Probe
  source 1..80: mol_type = other DNA
gtaagaaacgtcaccatctgagccatcgctacagcatctgcctgtatttctcacatgcttacatgaaaggcattatttat

SEQ ID NO: 122899 - DNA, 80 bp, synthetic construct
  misc_feature 1..80: note = Artificially Synthesized Probe
  source 1..80: mol_type = other DNA
gagatcgagaccatcctgggtaacacggtgaaacctcgtctgtactaaaaaatacaaaaaaaaaaaaattagccaggcgt

SEQ ID NO: 122900 - DNA, 80 bp, synthetic construct; identical to SEQ ID NO: 39655
  misc_feature 1..80: note = Artificially Synthesized Probe
  source 1..80: mol_type = other DNA

SEQ ID NO: 122901 - DNA, 80 bp, synthetic construct
  misc_feature 1..80: note = Artificially Synthesized Probe
  source 1..80: mol_type = other DNA
caagggtgcagtgagcgatgatggtgccactgcactccagcctgggtgacagagcgagaccctatctcaaaaaagaaaaa

SEQ ID NO: 122902 - DNA, 80 bp, synthetic construct
  misc_feature 1..80: note = Artificially Synthesized Probe
  source 1..80: mol_type = other DNA
aaatgggaaagagttctgacacatgactagctaagaaggttttgaaataaaagtaaagagtaggaattccgccaggtgca

SEQ ID NO: 122903 - DNA, 80 bp, synthetic construct
  misc_feature 1..80: note = Artificially Synthesized Probe
  source 1..80: mol_type = other DNA
actcaggaggctgaggtgggggaatcgcttcaacttgggaggcagaggttgcggtgaactgagatcaagccactgcactc

SEQ ID NO: 122904 - DNA, 80 bp, synthetic construct; identical to SEQ ID NO: 39656
  misc_feature 1..80: note = Artificially Synthesized Probe
  source 1..80: mol_type = other DNA

SEQ ID NO: 122905 - DNA, 80 bp, synthetic construct
  misc_feature 1..80: note = Artificially Synthesized Probe
  source 1..80: mol_type = other DNA
ttctatggctgaccagtgcctgtggggtgactgccaagcaccaggctccctccctccctgtgacatggcctgggctgaca

SEQ ID NO: 122906 - DNA, 80 bp, synthetic construct
  misc_feature 1..80: note = Artificially Synthesized Probe
  source 1..80: mol_type = other DNA
cacttgaacctgggaggcagaggttgcagtgagcccagattgtgcaactgtactccagcctgggtgacagagtgagacta

SEQ ID NO: 122907 - DNA, 80 bp, synthetic construct
  misc_feature 1..80: note = Artificially Synthesized Probe
  source 1..80: mol_type = other DNA
tgtggtagtgtgtgcctgtaatcccagctactcaggaggctgaggcaggagaatcacttggttccgggaggcggagtttg

SEQ ID NO: 122908 - DNA, 80 bp, synthetic construct
  misc_feature 1..80: note = Artificially Synthesized Probe
  source 1..80: mol_type = other DNA
catttcgccccaggaggccaaccctccctgatagtccaggatatttttggaaaaaaaaaaaaaaggtgcttttccgtctc

SEQ ID NO: 122909 - DNA, 80 bp, synthetic construct; identical to SEQ ID NO: 39657
  misc_feature 1..80: note = Artificially Synthesized Probe
  source 1..80: mol_type = other DNA

SEQ ID NO: 122910 - DNA, 80 bp, synthetic construct
  misc_feature 1..80: note = Artificially Synthesized Probe
  source 1..80: mol_type = other DNA
aggctggatggagtgcagcagcacaatgatagctcactgttacctcaaactcctgggcttaagccatcctcctgcctcag

SEQ ID NO: 122911 - DNA, 80 bp, synthetic construct
  misc_feature 1..80: note = Artificially Synthesized Probe
  source 1..80: mol_type = other DNA
gattacaagcatgagccactgcacccagccaaaaattatattattatttaaatttatttatttatttatttttattttat

SEQ ID NO: 122912 - DNA, 80 bp, synthetic construct
  misc_feature 1..80: note = Artificially Synthesized Probe
  source 1..80: mol_type = other DNA
tatttttagtagagacggggtttcaccatgttggccaggctggtctcgatctcttgacctcatgatccacccaccttggc

SEQ ID NO: 122913 - DNA, 80 bp, synthetic construct
  misc_feature 1..80: note = Artificially Synthesized Probe
  source 1..80: mol_type = other DNA
ctcctgagtagctgggattacaggcatgcaccaccacacctggctaattttttgtatttttagtagagacggggtttcac

SEQ ID NO: 122914 - DNA, 80 bp, synthetic construct; identical to SEQ ID NO: 39658
  misc_feature 1..80: note = Artificially Synthesized Probe
  source 1..80: mol_type = other DNA

SEQ ID NO: 122915 - DNA, 80 bp, synthetic construct
  misc_feature 1..80: note = Artificially Synthesized Probe
  source 1..80: mol_type = other DNA
tgagatatttctacaacatccacaccctctgatccaacacctgcaacaatgggcttggcaagtaactcatggggaaagca

SEQ ID NO: 122916 - DNA, 80 bp, synthetic construct
  misc_feature 1..80: note = Artificially Synthesized Probe
  source 1..80: mol_type = other DNA
ttagaattttaacataaattccactttcataatatggagtttctgaataagaatcctgatttctggcttctgctggtcgg

SEQ ID NO: 122917 - DNA, 80 bp, synthetic construct
  misc_feature 1..80: note = Artificially Synthesized Probe
  source 1..80: mol_type = other DNA
gatctagaccatcctggctaacacggtgaaaccccctctctactaaaaatacaaaaagaaagccgggcgtggtggcgggc

SEQ ID NO: 122918 - DNA, 80 bp, synthetic construct
  misc_feature 1..80: note = Artificially Synthesized Probe
  source 1..80: mol_type = other DNA
ccaggtgagtccacaagggttattcttctttttttcccactatactaacaaggacgtgagggttcttttttttttttttt

SEQ ID NO: 122919 - DNA, 80 bp, synthetic construct; identical to SEQ ID NO: 39659
  misc_feature 1..80: note = Artificially Synthesized Probe
  source 1..80: mol_type = other DNA

SEQ ID NO: 122920 - DNA, 80 bp, synthetic construct
  misc_feature 1..80: note = Artificially Synthesized Probe
  source 1..80: mol_type = other DNA
aagtggcccatagcctgatgaggaggctgaggcacgggagagcacagtattgtgccaaacccctactgactccaatgggg

SEQ ID NO: 122921 - DNA, 80 bp, synthetic construct
  misc_feature 1..80: note = Artificially Synthesized Probe
  source 1..80: mol_type = other DNA
catcctccccctggcaaccttcatttaactgaaagcaaaaggccaggatcccttataccaccagcattccatgggacagg

SEQ ID NO: 122922 - DNA, 80 bp, synthetic construct; identical to SEQ ID NO: 39660
  misc_feature 1..80: note = Artificially Synthesized Probe
  source 1..80: mol_type = other DNA

SEQ ID NO: 122923 - DNA, 80 bp, synthetic construct
  misc_feature 1..80: note = Artificially Synthesized Probe
  source 1..80: mol_type = other DNA
actaggcttcgggtagcaggtccaactcctgagactgtgcagactcccattttccagaggcctctgctcccactgctccc

SEQ ID NO: 122924 - DNA, 80 bp, synthetic construct
  misc_feature 1..80: note = Artificially Synthesized Probe
  source 1..80: mol_type = other DNA
atccactggcccagccaccgcctcagtggcccaccaaagacccacagatgagaatcagagttctcatctctctacctcag

SEQ ID NO: 122925 - DNA, 80 bp, synthetic construct
  misc_feature 1..80: note = Artificially Synthesized Probe
  source 1..80: mol_type = other DNA
acgcagacatacagacttctgtgaacacatctgagtttattctgccactgctacagggcccactgtcatttccagcccac

SEQ ID NO: 122926 - DNA, 80 bp, synthetic construct; identical to SEQ ID NO: 39661
  misc_feature 1..80: note = Artificially Synthesized Probe
  source 1..80: mol_type = other DNA

SEQ ID NO: 122927 - DNA, 80 bp, synthetic construct
  misc_feature 1..80: note = Artificially Synthesized Probe
  source 1..80: mol_type = other DNA
catcagtcccggcttgagagacacaaaggggatttcctttcgaagtacggctggacaagggggacctctgagaagagggg

SEQ ID NO: 122928 - DNA, 80 bp, synthetic construct
  misc_feature 1..80: note = Artificially Synthesized Probe
  source 1..80: mol_type = other DNA
gaaatggggggtagcgtaggcagggagccaagcgcgaacgtgctggtacaacttctccccgtcgaaagtctggccggggg

SEQ ID NO: 122929 - DNA, 80 bp, synthetic construct
  misc_feature 1..80: note = Artificially Synthesized Probe
  source 1..80: mol_type = other DNA
cctagcacttccccacctgtaaaatcagaataacgacccctccacccacaaagctgttggaagtttaaaatgagaaccct

SEQ ID NO: 122930 - DNA, 80 bp, synthetic construct
  misc_feature 1..80: note = Artificially Synthesized Probe
  source 1..80: mol_type = other DNA
tcttgcccccgccccgccccttttggggatcaggaggcccagtcagccccgccccctcgaaaatcgagaagccccgcctt

SEQ ID NO: 122931 - DNA, 80 bp, synthetic construct
  misc_feature 1..80: note = Artificially Synthesized Probe
  source 1..80: mol_type = other DNA
ggaagtagaggaagccttcgcggtccatggccagtacgtccccggtgttgtagtaaacgtcgcccgattgccgcacgttg

SEQ ID NO: 122932 - DNA, 80 bp, synthetic construct; identical to SEQ ID NO: 39662
  misc_feature 1..80: note = Artificially Synthesized Probe
  source 1..80: mol_type = other DNA

SEQ ID NO: 122933 - DNA, 80 bp, synthetic construct
  misc_feature 1..80: note = Artificially Synthesized Probe
  source 1..80: mol_type = other DNA
gacagacaaatggcagtgagaatagatatgaccaggaccttgcaaggccctgggagaagacactaacagaaggtacagga

SEQ ID NO: 122934 - DNA, 80 bp, synthetic construct
  misc_feature 1..80: note = Artificially Synthesized Probe
  source 1..80: mol_type = other DNA
ccactggctcagggtccagatgaaggctgcagacccctctagtgagcaccaacgtcaagcttttgagcagctcgttccag

SEQ ID NO: 122935 - DNA, 80 bp, synthetic construct
  misc_feature 1..80: note = Artificially Synthesized Probe
  source 1..80: mol_type = other DNA
ggagggtggagtgttgacataggtcctgtgggctcagcctcagggcagctgcacaccaggtacccgcacactcactcgga

SEQ ID NO: 122936 - DNA, 80 bp, synthetic construct; identical to SEQ ID NO: 39663
  misc_feature 1..80: note = Artificially Synthesized Probe
  source 1..80: mol_type = other DNA

SEQ ID NO: 122937 - DNA, 80 bp, synthetic construct
  misc_feature 1..80: note = Artificially Synthesized Probe
  source 1..80: mol_type = other DNA
gagctttgcctgggggacgttaccagaggtgactggaggcctcatctggggtctcacctaagagtagttacctagaactt

SEQ ID NO: 122938 - DNA, 80 bp, synthetic construct; identical to SEQ ID NO: 39643
  misc_feature 1..80: note = Artificially Synthesized Probe
  source 1..80: mol_type = other DNA

SEQ ID NO: 122939 - DNA, 80 bp, synthetic construct
  misc_feature 1..80: note = Artificially Synthesized Probe
  source 1..80: mol_type = other DNA
atctggggttcttgcatgaggtgtattatctgagggacttgagttcagtacctgaatctttacctgagacctttacctgg

SEQ ID NO: 122940 - DNA, 80 bp, synthetic construct
  misc_feature 1..80: note = Artificially Synthesized Probe
  source 1..80: mol_type = other DNA
aacacaggtggctcctgggagatgacaggagagggggtttcaggtcatgcttccaaattgttgtaagaagctgcttttag

SEQ ID NO: 122941 - DNA, 80 bp, synthetic construct; identical to SEQ ID NO: 39664
  misc_feature 1..80: note = Artificially Synthesized Probe
  source 1..80: mol_type = other DNA

SEQ ID NO: 122942 - DNA, 80 bp, synthetic construct
  misc_feature 1..80: note = Artificially Synthesized Probe
  source 1..80: mol_type = other DNA
ctgagttgctgggattacaagcacccgccaccacagctggctaatttttgtacttttttaagtacagacggggtttcacc

SEQ ID NO: 122943 - DNA, 80 bp, synthetic construct
  misc_feature 1..80: note = Artificially Synthesized Probe
  source 1..80: mol_type = other DNA
tggcttgtcactgactcgaagctcaaatcactcttgattacgataaatgaatgcccagctaagcagatgggtgggcaggt

SEQ ID NO: 122944 - DNA, 80 bp, synthetic construct
  misc_feature 1..80: note = Artificially Synthesized Probe
  source 1..80: mol_type = other DNA
tgagtgagtagatggatgggtggacagttagagtagtgagtgagtagatggatgggtgacagagtagtgagtgagtagat

SEQ ID NO: 122945 - DNA, 80 bp, synthetic construct
  misc_feature 1..80: note = Artificially Synthesized Probe
  source 1..80: mol_type = other DNA
agagtagtgagtgagaagatggatgtgtggacagttagagtagtgagtgagaagatggatgggtgaacagagtagtgagt

SEQ ID NO: 122946 - DNA, 80 bp, synthetic construct; identical to SEQ ID NO: 39665
  misc_feature 1..80: note = Artificially Synthesized Probe
  source 1..80: mol_type = other DNA

SEQ ID NO: 122947 - DNA, 80 bp, synthetic construct
  misc_feature 1..80: note = Artificially Synthesized Probe
  source 1..80: mol_type = other DNA
agatggatggctggacagttagagtagtgagtgagtagatggatgggtggacagttagagtagtgagtgagtagatggat

SEQ ID NO: 122948 - DNA, 80 bp, synthetic construct
  misc_feature 1..80: note = Artificially Synthesized Probe
  source 1..80: mol_type = other DNA
ctactgaaaatacaaaaaattagctgggcgtggtagcgggcgcctgtagtcccagctactcgggaggctgaggcaggaga

SEQ ID NO: 122949 - DNA, 80 bp, synthetic construct; identical to SEQ ID NO: 39666
  misc_feature 1..80: note = Artificially Synthesized Probe
  source 1..80: mol_type = other DNA

SEQ ID NO: 122950 - DNA, 80 bp, synthetic construct
  misc_feature 1..80: note = Artificially Synthesized Probe
  source 1..80: mol_type = other DNA
catggtgaaaccctatctctaccaaaaaatgcaaaaattagccaggcgtggtggcgcacacctgtagtcccagctactcg

SEQ ID NO: 122951 - DNA, 80 bp, synthetic construct
  misc_feature 1..80: note = Artificially Synthesized Probe
  source 1..80: mol_type = other DNA
ctgagtagctgggactacagacacccgccaccacgcccggctaatttttttgcatttttagtagagacggggtttcaccg

SEQ ID NO: 122952 - DNA, 80 bp, synthetic construct
  misc_feature 1..80: note = Artificially Synthesized Probe
  source 1..80: mol_type = other DNA
tctccctggggcctgcacccaccctgcagcaggcctagctgggcagggcctctgtgctaccagccctacccagctctccc

SEQ ID NO: 122953 - DNA, 80 bp, synthetic construct
  misc_feature 1..80: note = Artificially Synthesized Probe
  source 1..80: mol_type = other DNA
aaaactgaatctaacaacacctctagttaaagtttccaatttaacaagaaatgcagatgaaaggggaacagagacctaca

SEQ ID NO: 122954 - DNA, 80 bp, synthetic construct
  misc_feature 1..80: note = Artificially Synthesized Probe
  source 1..80: mol_type = other DNA
agactggccaacagggcgaaaccctgtctttactaaaaatacaaaaaaattagctgggcatggtggtccacacctgtaat

SEQ ID NO: 122955 - DNA, 80 bp, synthetic construct; identical to SEQ ID NO: 39667
  misc_feature 1..80: note = Artificially Synthesized Probe
  source 1..80: mol_type = other DNA

SEQ ID NO: 122956 - DNA, 80 bp, synthetic construct
  misc_feature 1..80: note = Artificially Synthesized Probe
  source 1..80: mol_type = other DNA
ccagcactttgggaggccgaggcaggtggatcacctgaggtcaggagtttgagaccagcctggccaacatggcgaaaccc

SEQ ID NO: 122957 - DNA, 80 bp, synthetic construct
  misc_feature 1..80: note = Artificially Synthesized Probe
  source 1..80: mol_type = other DNA
cagcctgggcgacagagcgagactctgtctcaaaaacaaacaaacaaacaaaaaagaaacagggaagtacatgtgaaatt

SEQ ID NO: 122958 - DNA, 80 bp, synthetic construct
  misc_feature 1..80: note = Artificially Synthesized Probe
  source 1..80: mol_type = other DNA
tcacttgtagtcccagctactccggagacttaggcaggagaatggcatgaacccaggaggcggagcttgccgtgagcaga

SEQ ID NO: 122959 - DNA, 80 bp, synthetic construct; identical to SEQ ID NO: 39668
  misc_feature 1..80: note = Artificially Synthesized Probe
  source 1..80: mol_type = other DNA

SEQ ID NO: 122960 - DNA, 80 bp, synthetic construct
  misc_feature 1..80: note = Artificially Synthesized Probe
  source 1..80: mol_type = other DNA
ccaaagtgctgggattacaggcgtgagccaccatgccccggtaatttttgtattttaggtagagacggattttgccatgt

SEQ ID NO: 122961 - DNA, 80 bp, synthetic construct
  misc_feature 1..80: note = Artificially Synthesized Probe
  source 1..80: mol_type = other DNA
actttgcgaggctgaggtgggcggatcacctgaggtcgggagtttgagacaagcctgaccaacatggagaaaccccatct

SEQ ID NO: 122962 - DNA, 80 bp, synthetic construct
  misc_feature 1..80: note = Artificially Synthesized Probe
  source 1..80: mol_type = other DNA
aaaccccgactcaaaaaaaaaaaaaaaaacatttggccgggcacggtagttcacacctgtaatcccagcactttgggagg

SEQ ID NO: 122963 - DNA, 80 bp, synthetic construct
  misc_feature 1..80: note = Artificially Synthesized Probe
  source 1..80: mol_type = other DNA
ttgccttttccagcttctagagtcagcccacgttcccccttttttttttcttggtccattcctccgtcttcaaagccagc

SEQ ID NO: 122964 - DNA, 80 bp, synthetic construct; identical to SEQ ID NO: 39669
  misc_feature 1..80: note = Artificially Synthesized Probe
  source 1..80: mol_type = other DNA

SEQ ID NO: 122965 - DNA, 80 bp, synthetic construct
  misc_feature 1..80: note = Artificially Synthesized Probe
  source 1..80: mol_type = other DNA
ctgaggtcaggagttcgagaccagcctggccaacatggcaaaaccccgtctctactaagaatacaaacattagccaggtg

SEQ ID NO: 122966 - DNA, 80 bp, synthetic construct
  misc_feature 1..80: note = Artificially Synthesized Probe
  source 1..80: mol_type = other DNA
aacagagaagtatatgcgaaattaaactggcaacatgttaacaattattgatgctgggcgaagatacatgagatgtcatc

SEQ ID NO: 122967 - DNA, 80 bp, synthetic construct
  misc_feature 1..80: note = Artificially Synthesized Probe
  source 1..80: mol_type = other DNA
cagggttttaccatgttggccaggctggtctcaaactcctgatttcaggtgatccagtggcctcagcttcccaaagtgct

SEQ ID NO: 122968 - DNA, 80 bp, synthetic construct; identical to SEQ ID NO: 39670
  misc_feature 1..80: note = Artificially Synthesized Probe
  source 1..80: mol_type = other DNA

SEQ ID NO: 122969 - DNA, 80 bp, synthetic construct
  misc_feature 1..80: note = Artificially Synthesized Probe
  source 1..80: mol_type = other DNA
caagtgctcaccactgttgcgggaagtcagggacccctaacagacggaccggctggagccacggcagaggaacataaatt

SEQ ID NO: 122970 - DNA, 80 bp, synthetic construct
  misc_feature 1..80: note = Artificially Synthesized Probe
  source 1..80: mol_type = other DNA
aaatgtgtgtttgaacaatgtgaaatcagcgcacattgaaaaagaacagaatgagagtgattttagggaacaagggaaga

SEQ ID NO: 122971 - DNA, 80 bp, synthetic construct
  misc_feature 1..80: note = Artificially Synthesized Probe
  source 1..80: mol_type = other DNA
tggggggaggtctataaatggccgctctgggaatgtctgtcctatgcagttgagataaggactgagatgcaccctggtct

SEQ ID NO: 122972 - DNA, 80 bp, synthetic construct; identical to SEQ ID NO: 39671
  misc_feature 1..80: note = Artificially Synthesized Probe
  source 1..80: mol_type = other DNA

SEQ ID NO: 122973 - DNA, 80 bp, synthetic construct
  misc_feature 1..80: note = Artificially Synthesized Probe
  source 1..80: mol_type = other DNA
ctggccagcacttacggaaaatagaaagaacctacatcgaggccgggcacagtggctcacacctgtaatcccagcacttt

SEQ ID NO: 122974 - DNA, 80 bp, synthetic construct
  misc_feature 1..80: note = Artificially Synthesized Probe
  source 1..80: mol_type = other DNA
gaatggggactccttgggggccttgattcagcactcttctccttcctactctgaaaacaaggggcattttcacaggggat

SEQ ID NO: 122975 - DNA, 80 bp, synthetic construct
  misc_feature 1..80: note = Artificially Synthesized Probe
  source 1..80: mol_type = other DNA
acccaggaggcagagcttgcagtgagctgagatcgcaccactgcactccagcctgggcgacagagcgagactccatctca

SEQ ID NO: 122976 - DNA, 80 bp, synthetic construct
  misc_feature 1..80: note = Artificially Synthesized Probe
  source 1..80: mol_type = other DNA
acccaaagtgcagggattataggcatgagcaaccacacatggccatgataatagctggaaaacacaaaaaggccgggcgt

SEQ ID NO: 122977 - DNA, 80 bp, synthetic construct
  misc_feature 1..80: note = Artificially Synthesized Probe
  source 1..80: mol_type = other DNA
atcccagctactcaggaggctgaggcaggaaaatcgcttgaacctggaaggcggagcttgcagtgagccgagatcatgcc

SEQ ID NO: 122978 - DNA, 80 bp, synthetic construct; identical to SEQ ID NO: 39672
  misc_feature 1..80: note = Artificially Synthesized Probe
  source 1..80: mol_type = other DNA

SEQ ID NO: 122979 - DNA, 80 bp, synthetic construct
  misc_feature 1..80: note = Artificially Synthesized Probe
  source 1..80: mol_type = other DNA
aaaagaacaagctatggagaggtccccatctagactctgaatcaagagtccagagagacagccctgtggagtgcttgaga

SEQ ID NO: 122980 - DNA, 80 bp, synthetic construct
  misc_feature 1..80: note = Artificially Synthesized Probe
  source 1..80: mol_type = other DNA
gtccaagcttctgtccatgcggccctggtagtcattggtgggtgtcccttctcaaaagtgagaacacagggtgctgggta

SEQ ID NO: 122981 - DNA, 80 bp, synthetic construct
  misc_feature 1..80: note = Artificially Synthesized Probe
  source 1..80: mol_type = other DNA
caagtcccatcacgtggtacagaggcaggaccgtgtaaaccacatcatcagctgtggccccagataaggacagcatcttg

SEQ ID NO: 122982 - DNA, 80 bp, synthetic construct; identical to SEQ ID NO: 39673
  misc_feature 1..80: note = Artificially Synthesized Probe
  source 1..80: mol_type = other DNA

SEQ ID NO: 122983 - DNA, 80 bp, synthetic construct
  misc_feature 1..80: note = Artificially Synthesized Probe
  source 1..80: mol_type = other DNA
tgaggtcaggggttagagaccagcctggctaacttggggaaaccctgtctctaccaaaaatacaaaaattagctgggcat

SEQ ID NO: 122984 - DNA, 80 bp, synthetic construct
  misc_feature 1..80: note = Artificially Synthesized Probe
  source 1..80: mol_type = other DNA
aaacaaatgtcaaaatcagagggtaaagtggtttcagaggtcaacactgagtcacaagtcaagtgtggggtcaggtcagc

SEQ ID NO: 122985 - DNA, 80 bp, synthetic construct
  misc_feature 1..80: note = Artificially Synthesized Probe
  source 1..80: mol_type = other DNA
tgggagagggaggctctcctcagaggcccatcttccccatccccttttatgagggccttctaacccgttgctcccatgtg

SEQ ID NO: 122986 - DNA, 80 bp, synthetic construct
  misc_feature 1..80: note = Artificially Synthesized Probe
  source 1..80: mol_type = other DNA
acccctggtgtaggggaggtatggctgaggtagaagcagcggatgttctcagcctgcagcttgggaaggatctcctccag

SEQ ID NO: 122987 - DNA, 80 bp, synthetic construct; identical to SEQ ID NO: 39674
  misc_feature 1..80: note = Artificially Synthesized Probe
  source 1..80: mol_type = other DNA

SEQ ID NO: 122988 - DNA, 80 bp, synthetic construct
  misc_feature 1..80: note = Artificially Synthesized Probe
  source 1..80: mol_type = other DNA
agaactactttctgctcataagtcttgattataattgcctgtgaaagtaggcaggtggggaccaagggcctctgccagtc

SEQ ID NO: 122989 - DNA, 80 bp, synthetic construct
  misc_feature 1..80: note = Artificially Synthesized Probe
  source 1..80: mol_type = other DNA
gggcagcccagcttggccagccccagccacatacacagggctggaacggcctgggaagccagcacaaggagggcagtagg

SEQ ID NO: 122990 - DNA, 80 bp, synthetic construct
  misc_feature 1..80: note = Artificially Synthesized Probe
  source 1..80: mol_type = other DNA
aaggcatctacaaaggtgtcaggcggctgccggctcaagcatcccctgatcttcaggcccaggtggaggatcttggccaa

SEQ ID NO: 122991 - DNA, 80 bp, synthetic construct; identical to SEQ ID NO: 39675
  misc_feature 1..80: note = Artificially Synthesized Probe
  source 1..80: mol_type = other DNA

SEQ ID NO: 122992 - DNA, 80 bp, synthetic construct
  misc_feature 1..80: note = Artificially Synthesized Probe
  source 1..80: mol_type = other DNA
gtcctctccccaggactttgcccccagcccttctcctctacgtttgtttgctctgcctggtcttgtgtgtgggtccagcc

SEQ ID NO: 122993 - DNA, 80 bp, synthetic construct
  misc_feature 1..80: note = Artificially Synthesized Probe
  source 1..80: mol_type = other DNA
accagacactcagagcacagaaatccctgcccttgggaacactccaatcaggccaaacagaaaagcaacaggacagcaag

SEQ ID NO: 122994 - DNA, 80 bp, synthetic construct; identical to SEQ ID NO: 39644
  misc_feature 1..80: note = Artificially Synthesized Probe
  source 1..80: mol_type = other DNA

SEQ ID NO: 122995 - DNA, 80 bp, synthetic construct
  misc_feature 1..80: note = Artificially Synthesized Probe
  source 1..80: mol_type = other DNA
ctgtctcatggcaatgcttactccagaagtttacatatagaagtggttgaatgtaaagtttcttttaaggcaacttatgt

SEQ ID NO: 122996 - DNA, 80 bp, synthetic construct
  misc_feature 1..80: note = Artificially Synthesized Probe
  source 1..80: mol_type = other DNA
ggagttcgacaccagcctggccaacatggtgaaacctcaactgtactaaaaaaaatacaaaaattagccaggtatggtga

SEQ ID NO: 122997 - DNA, 80 bp, synthetic construct
  misc_feature 1..80: note = Artificially Synthesized Probe
  source 1..80: mol_type = other DNA
catagtggcgcatacctgtagtcccagggagactgaggtgggagaatcacttgagcccaggaggttaaggctgcagtgag

SEQ ID NO: 122998 - DNA, 80 bp, synthetic construct; identical to SEQ ID NO: 39645
  misc_feature 1..80: note = Artificially Synthesized Probe
  source 1..80: mol_type = other DNA

SEQ ID NO: 122999 - DNA, 80 bp, synthetic construct
  misc_feature 1..80: note = Artificially Synthesized Probe
  source 1..80: mol_type = other DNA
tggctatttctgtagtataaatttctcaaaatgggattggtgagttacagggaacatgagatttatttttgccttaaaac

SEQ ID NO: 123000 - DNA, 80 bp, synthetic construct
  misc_feature 1..80: note = Artificially Synthesized Probe
  source 1..80: mol_type = other DNA
gaccagcctgggcaacagagtgagaccccatctctaaaaaaaaaaaaaaaaaaaaaaacacacaattaaaaaaaattttt

SEQ ID NO: 123001 - DNA, 80 bp, synthetic construct
  misc_feature 1..80: note = Artificially Synthesized Probe
  source 1..80: mol_type = other DNA
cgtctgcagaagcctgcgctcgggtgagtgccccacaccatccagcctgaatcacccctcctgtatcggtgggacctgag

SEQ ID NO: 123002 - DNA, 80 bp, synthetic construct; identical to SEQ ID NO: 39646
  misc_feature 1..80: note = Artificially Synthesized Probe
  source 1..80: mol_type = other DNA

SEQ ID NO: 123003 - DNA, 80 bp, synthetic construct
  misc_feature 1..80: note = Artificially Synthesized Probe
  source 1..80: mol_type = other DNA
aattttccccaagttaatctataaagtaaatgaaatgcaaataaaatataccacatttcagccgggtgcagtggttcact

SEQ ID NO: 123004 - DNA, 80 bp, synthetic construct
  misc_feature 1..80: note = Artificially Synthesized Probe
  source 1..80: mol_type = other DNA
ctgaggcaggaggatcacctgagccttgggaggcagaggctgcagtgagccatgatcgtgccagccggagcaacagagtg

SEQ ID NO: 123005 - DNA, 80 bp, synthetic construct
  misc_feature 1..80: note = Artificially Synthesized Probe
  source 1..80: mol_type = other DNA
gaagaattgtcatattgtaaataaaaacactgttaagttatataatattaaaatagtgtggtggctgggcacggtggctc

SEQ ID NO: 123006 - DNA, 80 bp, synthetic construct
  misc_feature 1..80: note = Artificially Synthesized Probe
  source 1..80: mol_type = other DNA
ctactcgggaggctgagacaagagaatcacttgaacccagaaggcagagattgcagtgagctgagatcatgccactgcac

SEQ ID NO: 123007 - DNA, 80 bp, synthetic construct; identical to SEQ ID NO: 39647
  misc_feature 1..80: note = Artificially Synthesized Probe
  source 1..80: mol_type = other DNA

SEQ ID NO: 123008 - DNA, 80 bp, synthetic construct
  misc_feature 1..80: note = Artificially Synthesized Probe
  source 1..80: mol_type = other DNA
cctgatatttatttttaaatatcaggaaaatgtaaaactttgttttgtttttgtttgttttgagacagagtctcgctctg

SEQ ID NO: 123009 - DNA, 80 bp, synthetic construct
  misc_feature 1..80: note = Artificially Synthesized Probe
  source 1..80: mol_type = other DNA
ggagtcttactctgtcacccaggctggaatgcagtggtgtgatctcggctcactgcaacctccgactcatgggttcaagt

SEQ ID NO: 123010 - DNA, 80 bp, synthetic construct; identical to SEQ ID NO: 39648
  misc_feature 1..80: note = Artificially Synthesized Probe
  source 1..80: mol_type = other DNA

SEQ ID NO: 123011 - DNA, 80 bp, synthetic construct
  misc_feature 1..80: note = Artificially Synthesized Probe
  source 1..80: mol_type = other DNA
ggggtttcaccatgttggccaggctggtctcaaactcctgacctcaggtgatccgcccacctcggcctccccaaagtgct

SEQ ID NO: 123012 - DNA, 80 bp, synthetic construct
  misc_feature 1..80: note = Artificially Synthesized Probe
  source 1..80: mol_type = other DNA
ggcagcctgggagggcttgtctggggctgccactcctgcccccactgtgcgcccagggacaccgccagtgcccactcagc

SEQ ID NO: 123013 - DNA, 80 bp, synthetic construct
  misc_feature 1..80: note = Artificially Synthesized Probe
  source 1..80: mol_type = other DNA
ctgtcgcccgggctagagtgcagtggtgcgatcttggctcactgcaagctccgcctcctgggttcacgccattctcctgc

SEQ ID NO: 123014 - DNA, 80 bp, synthetic construct
  misc_feature 1..80: note = Artificially Synthesized Probe
  source 1..80: mol_type = other DNA
cactgcgcctggccgaaaatgatttcttaaataataacacaaaaagtatacagacccctaaaaccctgccaataacaagt

SEQ ID NO: 123015 - DNA, 80 bp, synthetic construct
  misc_feature 1..80: note = Artificially Synthesized Probe
  source 1..80: mol_type = other DNA
aaaaagtatacagacccctaaaaccctgccaataacaagtattggttaggcagcacagaacaggacctgtgaatttgatg

SEQ ID NO: 123016 - DNA, 80 bp, synthetic construct; identical to SEQ ID NO: 39649
  misc_feature 1..80: note = Artificially Synthesized Probe
  source 1..80: mol_type = other DNA

SEQ ID NO: 123017 - DNA, 80 bp, synthetic construct
  misc_feature 1..80: note = Artificially Synthesized Probe
  source 1..80: mol_type = other DNA
tcaggagttcaagaccagcctggccaacatggtaaaaccccgtctctactaaaaatataaaaattagccagccgtgatgg

SEQ ID NO: 123018 - DNA, 80 bp, synthetic construct
  misc_feature 1..80: note = Artificially Synthesized Probe
  source 1..80: mol_type = other DNA
gaataggactaaaatatgatagaaacatggagaaaggccataaggcaggaatacacatcagaagaaactaggctgataga

SEQ ID NO: 123019 - DNA, 80 bp, synthetic construct
  misc_feature 1..80: note = Artificially Synthesized Probe
  source 1..80: mol_type = other DNA
ccagaaagaaaatatgcttagcattacatgcctagcagtaatcagagaaaccccagcactgtgaggacagggcttcacct

SEQ ID NO: 123020 - DNA, 80 bp, synthetic construct
  misc_feature 1..80: note = Artificially Synthesized Probe
  source 1..80: mol_type = other DNA
cttcacctgccttgcccgtgaccacacaccctgttcatggcactgtgaggacaggtcttcacctgccttgctcgtggcca

SEQ ID NO: 123021 - DNA, 80 bp, synthetic construct; identical to SEQ ID NO: 39650
  misc_feature 1..80: note = Artificially Synthesized Probe
  source 1..80: mol_type = other DNA

SEQ ID NO: 123022 - DNA, 80 bp, synthetic construct
  misc_feature 1..80: note = Artificially Synthesized Probe
  source 1..80: mol_type = other DNA
gtcaggagattgagaccatcctggctaacatggtggaaccccgtctctactaaaaatacaaaaaattagccgagcttggt

SEQ ID NO: 123023 - DNA, 80 bp, synthetic construct
  misc_feature 1..80: note = Artificially Synthesized Probe
  source 1..80: mol_type = other DNA
aagtgccaatagcaggtattggtgaggaaatgaataccaggacctgtgcatatgatgagctactgaaactgcctttgcaa

SEQ ID NO: 123024 - DNA, 80 bp, synthetic construct; identical to SEQ ID NO: 39651
  misc_feature 1..80: note = Artificially Synthesized Probe
  source 1..80: mol_type = other DNA

SEQ ID NO: 123025 - DNA, 80 bp, synthetic construct; identical to SEQ ID NO: 39642
  misc_feature 1..80: note = Artificially Synthesized Probe
  source 1..80: mol_type = other DNA

SEQ ID NO: 123026 - DNA, 80 bp, synthetic construct
  misc_feature 1..80: note = Artificially Synthesized Probe
  source 1..80: mol_type = other DNA
ggatattttgcagactctgcacttgatggatcagctggccccacccagatccataaaatggctcatctgatcttgtggcc

SEQ ID NO: 123027 - DNA, 80 bp, synthetic construct
  misc_feature 1..80: note = Artificially Synthesized Probe
  source 1..80: mol_type = other DNA
ctcctcttgtaaatagagagtacaaaggcttctccgagtagtgtgtatgccgggcagacgctgatgccacggggagaggc

SEQ ID NO: 123028 - DNA, 80 bp, synthetic construct
  misc_feature 1..80: note = Artificially Synthesized Probe
  source 1..80: mol_type = other DNA
caagccctgtaaacactggagttattaagccagtgtgcatgtcgttaaattttaactaaggggggacagggcaggaggcc

SEQ ID NO: 123029 - DNA, 80 bp, synthetic construct
  misc_feature 1..80: note = Artificially Synthesized Probe
  source 1..80: mol_type = other DNA
gtggcagctgcccactttgccgactaagccagaggggacagcagccgcctcctggctggatgccaagcacgtccgccttc

SEQ ID NO: 123030 - DNA, 80 bp, synthetic construct
  misc_feature 1..80: note = Artificially Synthesized Probe
  source 1..80: mol_type = other DNA
caggtggcaggaggagcatttgattgttgtagactgtcaccctgacaccatcccctttcctggctctgcaggctgaagaa

SEQ ID NO: 123031 - DNA, 80 bp, synthetic construct
  misc_feature 1..80: note = Artificially Synthesized Probe
  source 1..80: mol_type = other DNA
gccgccaccccaccccacccccaaccccccagctccagatgtggcaggacggccagggctgacgaggggcagtcagggga

SEQ ID NO: 123032 - DNA, 80 bp, synthetic construct; identical to SEQ ID NO: 39686
  misc_feature 1..80: note = Artificially Synthesized Probe
  source 1..80: mol_type = other DNA

SEQ ID NO: 123033 - DNA, 80 bp, synthetic construct
  misc_feature 1..80: note = Artificially Synthesized Probe
  source 1..80: mol_type = other DNA
gagcgcagtggctcatgcctataatcccagcactttgggaggccaaggcgagaagatcacttgagcccaggagttcaaga

SEQ ID NO: 123034 - DNA, 80 bp, synthetic construct
  misc_feature 1..80: note = Artificially Synthesized Probe
  source 1..80: mol_type = other DNA
cactccagccttggcaacaaagcgagactctgtctcagaaaaaaaaacaaaaaacaaaaaaatcaaggttcctctgggcc

SEQ ID NO: 123035 - DNA, 80 bp, synthetic construct
  misc_feature 1..80: note = Artificially Synthesized Probe
  source 1..80: mol_type = other DNA
tccctacgacgagcacagatcctttctgcattcagataaatgaatacacgttattagaaaaaaatcataggctggatgtg

SEQ ID NO: 123036 - DNA, 80 bp, synthetic construct
  misc_feature 1..80: note = Artificially Synthesized Probe
  source 1..80: mol_type = other DNA
ggcagggctgacgggaccgcggcctggggagggaccagaatctgcctggcctcactgtgtgacttgggtgagctcctcta

SEQ ID NO: 123037 - DNA, 80 bp, synthetic construct; identical to SEQ ID NO: 39687
  misc_feature 1..80: note = Artificially Synthesized Probe
  source 1..80: mol_type = other DNA

SEQ ID NO: 123038 - DNA, 80 bp, synthetic construct
  misc_feature 1..80: note = Artificially Synthesized Probe
  source 1..80: mol_type = other DNA
tctccatcacagatgacttagctccttcctttcctcccgaaggtcagggctggcagatccaaattgaagcaagaagcact

SEQ ID NO: 123039 - DNA, 80 bp, synthetic construct
  misc_feature 1..80: note = Artificially Synthesized Probe
  source 1..80: mol_type = other DNA
ctgtgagaccaaggggtttctcactttcctcagctgaaaaatgagtgataaaggcagcttcctcccagaggacactgcag

SEQ ID NO: 123040 - DNA, 80 bp, synthetic construct
  misc_feature 1..80: note = Artificially Synthesized Probe
  source 1..80: mol_type = other DNA
gtctctgagccattctcctcccctctgaccccttctccctagatagcagtgaggatgagcaccttgagacacaccaggtg

SEQ ID NO: 123041 - DNA, 80 bp, synthetic construct
  misc_feature 1..80: note = Artificially Synthesized Probe
  source 1..80: mol_type = other DNA
agaaattttttaaaattagccaggcatggtgtttcgaacctgtggtcccagctacttgggaggctgaatcaggaggatcc

SEQ ID NO: 123042 - DNA, 80 bp, synthetic construct; identical to SEQ ID NO: 39688
  misc_feature 1..80: note = Artificially Synthesized Probe
  source 1..80: mol_type = other DNA

SEQ ID NO: 123043 - DNA, 80 bp, synthetic construct
  misc_feature 1..80: note = Artificially Synthesized Probe
  source 1..80: mol_type = other DNA
ttatgggtcagtgcatgagccatggatccctcagccttcttccctcacctgctctctctgctttctccaaagcagaggct

SEQ ID NO: 123044 - DNA, 80 bp, synthetic construct
  misc_feature 1..80: note = Artificially Synthesized Probe
  source 1..80: mol_type = other DNA
tcacggatactagtaagtaggcgtgcgggcaaggtgcgggtcttgccccaaagcaggctgggctgtgtgacccccagtga

SEQ ID NO: 123045 - DNA, 80 bp, synthetic construct; identical to SEQ ID NO: 39689
  misc_feature 1..80: note = Artificially Synthesized Probe
  source 1..80: mol_type = other DNA

SEQ ID NO: 123046 - DNA, 80 bp, synthetic construct
  misc_feature 1..80: note = Artificially Synthesized Probe
  source 1..80: mol_type = other DNA
gccaccgtgcccagctaattttgtgtatttttagtagagacggggtttcaccgtggtctcgatctcctgacctcatgatc

SEQ ID NO: 123047 - DNA, 80 bp, synthetic construct
  misc_feature 1..80: note = Artificially Synthesized Probe
  source 1..80: mol_type = other DNA
tgaataggactggatgtgaggttcaaagacctgggttttcagcccagctgtgtgacgttaggcaagggcctaaacctctc

SEQ ID NO: 123048 - DNA, 80 bp, synthetic construct; identical to SEQ ID NO: 39677
  misc_feature 1..80: note = Artificially Synthesized Probe
  source 1..80: mol_type = other DNA

SEQ ID NO: 123049 - DNA, 80 bp, synthetic construct
  misc_feature 1..80: note = Artificially Synthesized Probe
  source 1..80: mol_type = other DNA
gtgaccctcggtgtcttcttctggaaaagggagatgatactgtgtcagtgtggttgcatcagaatccacagaatcttgct

SEQ ID NO: 123050 - DNA, 80 bp, synthetic construct; identical to SEQ ID NO: 39690
  misc_feature 1..80: note = Artificially Synthesized Probe
  source 1..80: mol_type = other DNA

SEQ ID NO: 123051 - DNA, 80 bp, synthetic construct
  misc_feature 1..80: note = Artificially Synthesized Probe
  source 1..80: mol_type = other DNA
ttggctgactaaagtgggagctagttaagccaggcaggcagtcaggaaggtcatggacagtctggaacccacgggcagga

SEQ ID NO: 123052 - DNA, 80 bp, synthetic construct
  misc_feature 1..80: note = Artificially Synthesized Probe
  source 1..80: mol_type = other DNA
tgtacttcagcttgtcaaggtgaccataaacagaccatcacggtcccccccttgccggtgtggctcccatagacagctcc

SEQ ID NO: 123053 - DNA, 80 bp, synthetic construct
  misc_feature 1..80: note = Artificially Synthesized Probe
  source 1..80: mol_type = other DNA
tttatttttttgaaaacagtctcgtgctcttgcccaggctggagtgcagtggcccaaccttggctcactgcaacctccac

SEQ ID NO: 123054 - DNA, 80 bp, synthetic construct; identical to SEQ ID NO: 39691
  misc_feature 1..80: note = Artificially Synthesized Probe
  source 1..80: mol_type = other DNA

SEQ ID NO: 123055 - DNA, 80 bp, synthetic construct
  misc_feature 1..80: note = Artificially Synthesized Probe
  source 1..80: mol_type = other DNA
tttagtagagatggggtttcaccatgttggccaggctggtctcgaactcctgagttcaggtgatctgcccgccttggcct

SEQ ID NO: 123056 - DNA, 80 bp, synthetic construct
  misc_feature 1..80: note = Artificially Synthesized Probe
  source 1..80: mol_type = other DNA
gtcacggtgatggacagtggctatggtgatggcggccggggtggtggacatcgccctgtgcggtgactgtagccatgcgt

SEQ ID NO: 123057 - DNA, 80 bp, synthetic construct
  misc_feature 1..80: note = Artificially Synthesized Probe
  source 1..80: mol_type = other DNA
aagtacccaggtgggtccctccacggtcacgcccagccactcagcatcctccatcatggcctggggcctcccagaaaccc

SEQ ID NO: 123058 - DNA, 80 bp, synthetic construct; identical to SEQ ID NO: 39692
  misc_feature 1..80: note = Artificially Synthesized Probe
  source 1..80: mol_type = other DNA

SEQ ID NO: 123059 - DNA, 80 bp, synthetic construct
  misc_feature 1..80: note = Artificially Synthesized Probe
  source 1..80: mol_type = other DNA
tgggattacaggcgcgcaccaccatgcctggctaatttttgtatttttggtagggacggggtttcgccacattggccagg

SEQ ID NO: 123060 - DNA, 80 bp, synthetic construct
  misc_feature 1..80: note = Artificially Synthesized Probe
  source 1..80: mol_type = other DNA
cgtctgtaaaatgggcacacttcctagggctgccctgaggtctggtgtaagacaccgtggtggggcctctgtaccccaag

SEQ ID NO: 123061 - DNA, 80 bp, synthetic construct
  misc_feature 1..80: note = Artificially Synthesized Probe
  source 1..80: mol_type = other DNA
ccctccttaaaggggaagggcagagaaagcctcagagcgactctgcaggaggggcgaggaggagggggaccccacccagt

SEQ ID NO: 123062 - DNA, 80 bp, synthetic construct
  misc_feature 1..80: note = Artificially Synthesized Probe
  source 1..80: mol_type = other DNA
ctgcacaggtaggaaccggggcccaagggggaggccttgagtgcccacttccgaccccatcccaccccagccctggtctc

SEQ ID NO: 123063 - DNA, 80 bp, synthetic construct; identical to SEQ ID NO: 39693
  misc_feature 1..80: note = Artificially Synthesized Probe
  source 1..80: mol_type = other DNA

SEQ ID NO: 123064 - DNA, 80 bp, synthetic construct
  misc_feature 1..80: note = Artificially Synthesized Probe
  source 1..80: mol_type = other DNA
gtagagacggggatctctctgtgttgcccaggctagtcttgaactcttagccccaagcaatcctcccacctcggtcttcc

SEQ ID NO: 123065 - DNA, 80 bp, synthetic construct
  misc_feature 1..80: note = Artificially Synthesized Probe
  source 1..80: mol_type = other DNA
gtctctctgtacttaaatttctccctaagtatatataaatataaaatacatattttcccttgcaccatttgagagttagt

SEQ ID NO: 123066 - DNA, 80 bp, synthetic construct
  misc_feature 1..80: note = Artificially Synthesized Probe
  source 1..80: mol_type = other DNA
ctgcaacctccgcctcccgggttcaagtgattctcctgtctcagcctcccaagtaactgggattacaggtgcccgccacc

SEQ ID NO: 123067 - DNA, 80 bp, synthetic construct; identical to SEQ ID NO: 39694
  misc_feature 1..80: note = Artificially Synthesized Probe
  source 1..80: mol_type = other DNA

SEQ ID NO: 123068 - DNA, 80 bp, synthetic construct
  misc_feature 1..80: note = Artificially Synthesized Probe
  source 1..80: mol_type = other DNA
ctccgtctcccaggttcaagggattctcctgcctcagcctcccgagtagctgggactgcaggcgcccgccaccacacctg

SEQ ID NO: 123069 - DNA, 80 bp, synthetic construct
  misc_feature 1..80: note = Artificially Synthesized Probe
  source 1..80: mol_type = other DNA
tttgaccatgacttccaggaagaaagcaatacattttatattacggccctgtaaacacgtgtgtgtatttataaatgatg

SEQ ID NO: 123070 - DNA, 80 bp, synthetic construct
  misc_feature 1..80: note = Artificially Synthesized Probe
  source 1..80: mol_type = other DNA
ttacggccctgtaaacacgtgtgtgtatttataaatgatgtcaagccttcgtgaactaatactcccaatactactgttct

SEQ ID NO: 123071 - DNA, 80 bp, synthetic construct
  misc_feature 1..80: note = Artificially Synthesized Probe
  source 1..80: mol_type = other DNA
ccggcaaaggcagacatggggctgacgcggaacggcccagggactctgatcctggggctcagcgagtttgcaaggggtgt

SEQ ID NO: 123072 - DNA, 80 bp, synthetic construct
  misc_feature 1..80: note = Artificially Synthesized Probe
  source 1..80: mol_type = other DNA
ggattacaggcacaggccactgcacccagctaatttttaaaaaatttttgtctccatgcatggtggctcatgcttgtaat

SEQ ID NO: 123073 - DNA, 80 bp, synthetic construct; identical to SEQ ID NO: 39695
  misc_feature 1..80: note = Artificially Synthesized Probe
  source 1..80: mol_type = other DNA

SEQ ID NO: 123074 - DNA, 80 bp, synthetic construct
  misc_feature 1..80: note = Artificially Synthesized Probe
  source 1..80: mol_type = other DNA
tttagttagacaaagactgcccctgaggctacttccagggctggatttgctagactccaaggtaggggcctgtgcacttc

SEQ ID NO: 123075 - DNA, 80 bp, synthetic construct
  misc_feature 1..80: note = Artificially Synthesized Probe
  source 1..80: mol_type = other DNA
taggatgagaggggttattgctgtataacaaatagcccagaaatctcagtggttccatagaacaagcctgacttctcact

SEQ ID NO: 123076 - DNA, 80 bp, synthetic construct
  misc_feature 1..80: note = Artificially Synthesized Probe
  source 1..80: mol_type = other DNA
ggaagaagaaaggttgaaagtccatgcagacttttcactgccttgcccagtagtgacgtgtcatttctgcagacgtttca

SEQ ID NO: 123077 - DNA, 80 bp, synthetic construct; identical to SEQ ID NO: 39696
  misc_feature 1..80: note = Artificially Synthesized Probe
  source 1..80: mol_type = other DNA

SEQ ID NO: 123078 - DNA, 80 bp, synthetic construct
  misc_feature 1..80: note = Artificially Synthesized Probe
  source 1..80: mol_type = other DNA
cagactgagctagggacagtgatcaccatctttcctggcctggctgggggtagaaaaggggtgcactcccacatgggagg

SEQ ID NO: 123079 - DNA, 80 bp, synthetic construct
  misc_feature 1..80: note = Artificially Synthesized Probe
  source 1..80: mol_type = other DNA
tgcacatcacaccatgcctacagcaccgcgctctccttgcagccacggacacacaagccaccccctggtcagcaccccat

SEQ ID NO: 123080 - DNA, 80 bp, synthetic construct
  misc_feature 1..80: note = Artificially Synthesized Probe
  source 1..80: mol_type = other DNA
ctgcagaggggcagcactggccccgggtaccggcactgtgtgcgtggaagcccctccctctcagggttcccaatcttcct

SEQ ID NO: 123081 - DNA, 80 bp, synthetic construct
  misc_feature 1..80: note = Artificially Synthesized Probe
  source 1..80: mol_type = other DNA
acgtgggaggtcctggttcctgtcgctggcaggtagattttgtggtgtggccgagcgagagagggtgcagaattgtgccg

SEQ ID NO: 123082 - DNA, 80 bp, synthetic construct
  misc_feature 1..80: note = Artificially Synthesized Probe
  source 1..80: mol_type = other DNA
cccccgcctcaccactcaccagctggctccctggtctgcaaaaggtggttcgctggtacccaggtccctgtgcgaatgag

SEQ ID NO: 123083 - DNA, 80 bp, synthetic construct; identical to SEQ ID NO: 39697
  misc_feature 1..80: note = Artificially Synthesized Probe
  source 1..80: mol_type = other DNA

SEQ ID NO: 123084 - DNA, 80 bp, synthetic construct
  misc_feature 1..80: note = Artificially Synthesized Probe
  source 1..80: mol_type = other DNA
tgaatcacgcaccatcttgttgcatccatcctcttcccaccctgcgcccgtgtgtcatcgtggccctactgcgtcctcag

SEQ ID NO: 123085 - DNA, 80 bp, synthetic construct
  misc_feature 1..80: note = Artificially Synthesized Probe
  source 1..80: mol_type = other DNA
cttagagggagcggcagggggtggggctgggaagggaggtggggtggggagtgagggagcgggtgggacggggctgggtg

SEQ ID NO: 123086 - DNA, 80 bp, synthetic construct
  misc_feature 1..80: note = Artificially Synthesized Probe
  source 1..80: mol_type = other DNA
ggcggggccggcggtgatgggcggggcctgtgggtgggggcagggcctgtggtggagggcggggcctgtgggtgggggca

SEQ ID NO: 123087 - DNA, 80 bp, synthetic construct; identical to SEQ ID NO: 39698
  misc_feature 1..80: note = Artificially Synthesized Probe
  source 1..80: mol_type = other DNA

SEQ ID NO: 123088 - DNA, 80 bp, synthetic construct
  misc_feature 1..80: note = Artificially Synthesized Probe
  source 1..80: mol_type = other DNA
ccacctctgttcccttctctgtccccttctctgtccccaccgcttcgtcgggaagtacctggggcccagcctctcacctg

SEQ ID NO: 123089 - DNA, 80 bp, synthetic construct
  misc_feature 1..80: note = Artificially Synthesized Probe
  source 1..80: mol_type = other DNA
tgtgccccacggcgtggggcgtgcatggcccctgtccttagtgacactccacatgatgtacactaaagtttccatccctg

SEQ ID NO: 123090 - DNA, 80 bp, synthetic construct
  misc_feature 1..80: note = Artificially Synthesized Probe
  source 1..80: mol_type = other DNA
taaccctggtttccctgagggaatgtggcggggcccccagaatttcccacagaagtcgccagccaggaaagggagtggtc

SEQ ID NO: 123091 - DNA, 80 bp, synthetic construct; identical to SEQ ID NO: 39699
  misc_feature 1..80: note = Artificially Synthesized Probe
  source 1..80: mol_type = other DNA

SEQ ID NO: 123092 - DNA, 80 bp, synthetic construct
  misc_feature 1..80: note = Artificially Synthesized Probe
  source 1..80: mol_type = other DNA
agtgagccagaaacaccatccccaggggagcccccagacccagagaggggcccaggatggaaggggacaagccagggcag

SEQ ID NO: 123093 - DNA, 80 bp, synthetic construct; identical to SEQ ID NO: 39678
  misc_feature 1..80: note = Artificially Synthesized Probe
  source 1..80: mol_type = other DNA

SEQ ID NO: 123094 - DNA, 80 bp, synthetic construct
  misc_feature 1..80: note = Artificially Synthesized Probe
  source 1..80: mol_type = other DNA
tggcctcaggccctctggcatcagttttctcatctgtgaaatgggcacgttaatgccaaaggcataaaacaggagctatt

SEQ ID NO: 123095 - DNA, 80 bp, synthetic construct
  misc_feature 1..80: note = Artificially Synthesized Probe
  source 1..80: mol_type = other DNA
taggggaccagatgctctggttggtttggtcagaggctggtagagggttcacaggaatgatgagatggaatttgctgcat

SEQ ID NO: 123096 - DNA, 80 bp, synthetic construct
  misc_feature 1..80: note = Artificially Synthesized Probe
  source 1..80: mol_type = other DNA
agaccctgtgtctacaaaaaagaaaacggcaaaaaagattggcctgggtgatggcgcatggctgtagtccctgttacttg

SEQ ID NO: 123097 - DNA, 80 bp, synthetic construct; identical to SEQ ID NO: 39700
  misc_feature 1..80: note = Artificially Synthesized Probe
  source 1..80: mol_type = other DNA

SEQ ID NO: 123098 - DNA, 80 bp, synthetic construct
  misc_feature 1..80: note = Artificially Synthesized Probe
  source 1..80: mol_type = other DNA
caagggtccagcgcagctggcccaccttcagaggtgagtgcggggagtcctctgctgccctggctctggcacccaggcag

SEQ ID NO: 123099 - DNA, 80 bp, synthetic construct
  misc_feature 1..80: note = Artificially Synthesized Probe
  source 1..80: mol_type = other DNA
cggcctcgagtctgagatccgccactgcatcctgggcgagtggctgcccatcctcatcatggctgtgttcaacctgtcag

SEQ ID NO: 123100 - DNA, 80 bp, synthetic construct
  misc_feature 1..80: note = Artificially Synthesized Probe
  source 1..80: mol_type = other DNA
tggacagtgtcctctggagggcggccctggcctgatcccactggggcgctccggagtgtcagctgcatctgggaggacag

SEQ ID NO: 123101 - DNA, 80 bp, synthetic construct
  misc_feature 1..80: note = Artificially Synthesized Probe
  source 1..80: mol_type = other DNA
gccagagatgggtagatcacttgaggccaggagttctagaccaaccttgccaacatggtgaaaccccgtgtctactgaaa

SEQ ID NO: 123102 - DNA, 80 bp, synthetic construct; identical to SEQ ID NO: 39701
  misc_feature 1..80: note = Artificially Synthesized Probe
  source 1..80: mol_type = other DNA

SEQ ID NO: 123103 - DNA, 80 bp, synthetic construct
  misc_feature 1..80: note = Artificially Synthesized Probe
  source 1..80: mol_type = other DNA
ggggtgcaggctgagctggacaggcccaggagtgtttagggatggggatgtggctagaggctgtcgggggtgtgaggcga

SEQ ID NO: 123104 - DNA, 80 bp, synthetic construct
  misc_feature 1..80: note = Artificially Synthesized Probe
  source 1..80: mol_type = other DNA
ccgccctccgtcaccccgcctggccctgcatcttctcactgctcatgggcatcagcaacggctacttcggcagcgtgccc

SEQ ID NO: 123105 - DNA, 80 bp, synthetic construct; identical to SEQ ID NO: 39702
  misc_feature 1..80: note = Artificially Synthesized Probe
  source 1..80: mol_type = other DNA

SEQ ID NO: 123106 - DNA, 80 bp, synthetic construct
  misc_feature 1..80: note = Artificially Synthesized Probe
  source 1..80: mol_type = other DNA
tctgtcactcaagctggagtaaagaggtatgatctcggctcacagcaacctctgcctcccgggttcaagtgactctcctg

SEQ ID NO: 123107 - DNA, 80 bp, synthetic construct
  misc_feature 1..80: note = Artificially Synthesized Probe
  source 1..80: mol_type = other DNA
tttggaagggcaaagcgggtggatcacttgagcccaggagttaaagaccagcctgggcaacacagtgagagcctctcctc

SEQ ID NO: 123108 - DNA, 80 bp, synthetic construct
  misc_feature 1..80: note = Artificially Synthesized Probe
  source 1..80: mol_type = other DNA
tgtctggggaaaaaaaaaaaaaaaatcccagatcggcgtgactggttgaatggcagtaagtcctatggggaaaaataaag

SEQ ID NO: 123109 - DNA, 80 bp, synthetic construct
  misc_feature 1..80: note = Artificially Synthesized Probe
  source 1..80: mol_type = other DNA
aggaagagggagcagcatgtgcaaagatcctgcggcactgaggccaggggatggagcagaagaggaacggggtttgatgg

SEQ ID NO: 123110 - DNA, 80 bp, synthetic construct
  misc_feature 1..80: note = Artificially Synthesized Probe
  source 1..80: mol_type = other DNA
ccggattccaggtcttgtttggacggcagcccacaggaccggctgatgggttgagaggtagggtgtgggagagggaaggg

SEQ ID NO: 123111 - DNA, 80 bp, synthetic construct; identical to SEQ ID NO: 39703
  misc_feature 1..80: note = Artificially Synthesized Probe
  source 1..80: mol_type = other DNA

SEQ ID NO: 123112 - DNA, 80 bp, synthetic construct
  misc_feature 1..80: note = Artificially Synthesized Probe
  source 1..80: mol_type = other DNA
atgccccccaccatacctggcgaatgtttgtatttttagtagaggtgagatttcaccatcttggccaggctggtctcgaa

SEQ ID NO: 123113 - DNA, 80 bp, synthetic construct
  misc_feature 1..80: note = Artificially Synthesized Probe
  source 1..80: mol_type = other DNA
acttgggaccagcctgggcagtatagcaagacggagtctctacaaaaaaatttttttaggttagccaggcacggtggtgc

SEQ ID NO: 123114 - DNA, 80 bp, synthetic construct
  misc_feature 1..80: note = Artificially Synthesized Probe
  source 1..80: mol_type = other DNA
ccttgtctttaaattttaaaaatgggggcttgggggactcagagaaggcaggcaaggcctggagtgcatagcagatggcc

SEQ ID NO: 123115 - DNA, 80 bp, synthetic construct; identical to SEQ ID NO: 39704
  misc_feature 1..80: note = Artificially Synthesized Probe
  source 1..80: mol_type = other DNA

SEQ ID NO: 123116 - DNA, 80 bp, synthetic construct
  misc_feature 1..80: note = Artificially Synthesized Probe
  source 1..80: mol_type = other DNA
cccacctcagtgcctgcggggccctgagcctccccctgtgccagcagccccactccctcagggtccagccatgccccacc

SEQ ID NO: 123117 - DNA, 80 bp, synthetic construct
  misc_feature 1..80: note = Artificially Synthesized Probe
  source 1..80: mol_type = other DNA
tacaggctgagccactgtgcccggcctctcctccccccaaacattttattatgttttattttaaagagatggggtctcgc

SEQ ID NO: 123118 - DNA, 80 bp, synthetic construct
  misc_feature 1..80: note = Artificially Synthesized Probe
  source 1..80: mol_type = other DNA
acacgcaccgtgtccccacccaggacagcagacacccgccagagtgtgcgcgcccagtgactgcaccccggccctcatca

SEQ ID NO: 123119 - DNA, 80 bp, synthetic construct
  misc_feature 1..80: note = Artificially Synthesized Probe
  source 1..80: mol_type = other DNA
cttctgtcctcattcttagagactgcttctcccaaacataacgcgttagccatgaaggagtcggagccctgggtccgaat

SEQ ID NO: 123120 - DNA, 80 bp, synthetic construct; identical to SEQ ID NO: 39705
  misc_feature 1..80: note = Artificially Synthesized Probe
  source 1..80: mol_type = other DNA

SEQ ID NO: 123121 - DNA, 80 bp, synthetic construct
  misc_feature 1..80: note = Artificially Synthesized Probe
  source 1..80: mol_type = other DNA
ccgcccccgcttccagatccccggccccggctgtgactgccctgtttcacccctgctgtgtcccatcccccgtctgtcca

SEQ ID NO: 123122 - DNA, 80 bp, synthetic construct
  misc_feature 1..80: note = Artificially Synthesized Probe
  source 1..80: mol_type = other DNA
aggtgggccgggtggatcagggagcaggagggtgtcctcacactgggtaggcttggtttgtgggcagcgctgggtagtgg

SEQ ID NO: 123123 - DNA, 80 bp, synthetic construct
  misc_feature 1..80: note = Artificially Synthesized Probe
  source 1..80: mol_type = other DNA
taggagtcagagcctcctggcttcgagcctcatcccttttgctgatttgtgcaatttggacaaaatcctgcactgttctg

SEQ ID NO: 123124 - DNA, 80 bp, synthetic construct; identical to SEQ ID NO: 39706
  misc_feature 1..80: note = Artificially Synthesized Probe
  source 1..80: mol_type = other DNA

SEQ ID NO: 123125 - DNA, 80 bp, synthetic construct
  misc_feature 1..80: note = Artificially Synthesized Probe
  source 1..80: mol_type = other DNA
gcagcctccacctcctgggctccagtgatcctcccacctcagcctcccaaatagctgtgaatacaggcgcgtgccaccac

SEQ ID NO: 123126 - DNA, 80 bp, synthetic construct
  misc_feature 1..80: note = Artificially Synthesized Probe
  source 1..80: mol_type = other DNA
cccaaggaatggggctggtccaggttttgatgtgggtcccgtaaaggagggcacgagggccacctatgctctggcaggca

SEQ ID NO: 123127 - DNA, 80 bp, synthetic construct; identical to SEQ ID NO: 39707
  misc_feature 1..80: note = Artificially Synthesized Probe
  source 1..80: mol_type = other DNA

SEQ ID NO: 123128 - DNA, 80 bp, synthetic construct
  misc_feature 1..80: note = Artificially Synthesized Probe
  source 1..80: mol_type = other DNA
gtgtcagtatgttgcccaggctggtctcgaactcctggcctcaagcaatcctcctacctcaccttactatgaaattttta

SEQ ID NO: 123129 - DNA, 80 bp, synthetic construct
  misc_feature 1..80: note = Artificially Synthesized Probe
  source 1..80: mol_type = other DNA
atggctcgatttcagctcactgcaacctctgcctgccgggttcaagcgattctcctgcctcagcctcccgagtagctggg

SEQ ID NO: 123130 - DNA, 80 bp, synthetic construct
  misc_feature 1..80: note = Artificially Synthesized Probe
  source 1..80: mol_type = other DNA
gcactggttttttgagatggaatctcgttatgtcaccccagctggagggcagtggcacgatctcagctcactgtaacctt

SEQ ID NO: 123131 - DNA, 80 bp, synthetic construct
  misc_feature 1..80: note = Artificially Synthesized Probe
  source 1..80: mol_type = other DNA
ctcccttggcctcccaaagtgctgggattacaggcgtgagccaccgtgcccatccaacttaacttttaattttttctcat

SEQ ID NO: 123132 - DNA, 80 bp, synthetic construct
  misc_feature 1..80: note = Artificially Synthesized Probe
  source 1..80: mol_type = other DNA
acaggtgtgggccaccacacccggctaatttttgtatttttagtagagacggggtttcaccacattgctcaggctggtct

SEQ ID NO: 123133 - DNA, 80 bp, synthetic construct; identical to SEQ ID NO: 39708
  misc_feature 1..80: note = Artificially Synthesized Probe
  source 1..80: mol_type = other DNA

SEQ ID NO: 123134 - DNA, 80 bp, synthetic construct
  misc_feature 1..80: note = Artificially Synthesized Probe
  source 1..80: mol_type = other DNA
tctttttttttatgaaaaaagatcacacagaatttgccaacaaacaaaattccaaaagaaacataaaaaaaaaaaccaat

SEQ ID NO: 123135 - DNA, 80 bp, synthetic construct; identical to SEQ ID NO: 39679
  misc_feature 1..80: note = Artificially Synthesized Probe
  source 1..80: mol_type = other DNA

SEQ ID NO: 123136 - DNA, 80 bp, synthetic construct
  misc_feature 1..80: note = Artificially Synthesized Probe
  source 1..80: mol_type = other DNA
ccagcctgggtgacagagcaagactccatctaaaaaaaaaaaaagaagaacaagaaggccaggaggtggcagctcaccct

SEQ ID NO: 123137 - DNA, 80 bp, synthetic construct
  misc_feature 1..80: note = Artificially Synthesized Probe
  source 1..80: mol_type = other DNA
tctgctctctgccttttctgatccctacctatccatctatgtagctccctatccacctgccaattccaaattttcacgca

SEQ ID NO: 123138 - DNA, 80 bp, synthetic construct
  misc_feature 1..80: note = Artificially Synthesized Probe
  source 1..80: mol_type = other DNA
gtagctccctatccacctgccaattccaaattttcacgcatttcaaagtcagtggcagacattagggcacttggccctta

SEQ ID NO: 123139 - DNA, 80 bp, synthetic construct; identical to SEQ ID NO: 39680
  misc_feature 1..80: note = Artificially Synthesized Probe
  source 1..80: mol_type = other DNA

SEQ ID NO: 123140 - DNA, 80 bp, synthetic construct
  misc_feature 1..80: note = Artificially Synthesized Probe
  source 1..80: mol_type = other DNA
ccagcaggaaagtagaaattctttaaccaatttccccatgccctttccattgttctatttagatttctttctttctgata

SEQ ID NO: 123141 - DNA, 80 bp, synthetic construct
  misc_feature 1..80: note = Artificially Synthesized Probe
  source 1..80: mol_type = other DNA
catattattctaaatcttcctaaccgcatagcctggtggtgacttcagatttctctgcagggttacatattatttcactg

SEQ ID NO: 123142 - DNA, 80 bp, synthetic construct; identical to SEQ ID NO: 39676
  misc_feature 1..80: note = Artificially Synthesized Probe
  source 1..80: mol_type = other DNA

SEQ ID NO: 123143 - DNA, 80 bp, synthetic construct
  misc_feature 1..80: note = Artificially Synthesized Probe
  source 1..80: mol_type = other DNA
cctcaggccagatttttctggaccaaaaggtaagcatgtcttttaagccagtttatgttccaaaagggttggtcccattt

SEQ ID NO: 123144 - DNA, 80 bp, synthetic construct
  misc_feature 1..80: note = Artificially Synthesized Probe
  source 1..80: mol_type = other DNA
ttttaagccagtttatgttccaaaagggttggtcccattttcagtcccaccagcaacccagcaatggggagatctggaaa

SEQ ID NO: 123145 - DNA, 80 bp, synthetic construct; identical to SEQ ID NO: 39681
  misc_feature 1..80: note = Artificially Synthesized Probe
  source 1..80: mol_type = other DNA

SEQ ID NO: 123146 - DNA, 80 bp, synthetic construct
  misc_feature 1..80: note = Artificially Synthesized Probe
  source 1..80: mol_type = other DNA
tgtccctgttcccacaacagtggccctcctgttcttgaattaaatgagctgtttccagactcagcactttgcattggctg

SEQ ID NO: 123147 - DNA, 80 bp, synthetic construct
  misc_feature 1..80: note = Artificially Synthesized Probe
  source 1..80: mol_type = other DNA
atgcttccgaaattactgtacctgtttattgccagcacccaccagttaagtgcaactccaggggagcagggaccccttga

SEQ ID NO: 123148 - DNA, 80 bp, synthetic construct
  misc_feature 1..80: note = Artificially Synthesized Probe
  source 1..80: mol_type = other DNA
caatcctcccgcctcagcctcccgagtagctgggattacaggcacacaccaccatgcccagcttattttcgctttttttt

SEQ ID NO: 123149 - DNA, 80 bp, synthetic construct; identical to SEQ ID NO: 39682
  misc_feature 1..80: note = Artificially Synthesized Probe
  source 1..80: mol_type = other DNA

SEQ ID NO: 123150 - DNA, 80 bp, synthetic construct
  misc_feature 1..80: note = Artificially Synthesized Probe
  source 1..80: mol_type = other DNA
ccaccaccacgcccagctaatttttgtatatttagtagagacggggtttcaccacgttggccaggctggtctcgggctcc

SEQ ID NO: 123151 - DNA, 80 bp, synthetic construct
  misc_feature 1..80: note = Artificially Synthesized Probe
  source 1..80: mol_type = other DNA
ggaaggagaggggtgtcccgccctaagagtgcgtcagcagcccccgccaccaggtgattccattcacctgggagaaaacg

SEQ ID NO: 123152 - DNA, 80 bp, synthetic construct
  misc_feature 1..80: note = Artificially Synthesized Probe
  source 1..80: mol_type = other DNA
ttcagggggctcccagtcctttagaagggatgggcaaggcctggagcaaaggtgctgaccccattggtggcggggcagaa

SEQ ID NO: 123153 - DNA, 80 bp, synthetic construct
  misc_feature 1..80: note = Artificially Synthesized Probe
  source 1..80: mol_type = other DNA
ggtctctcctgattcccatagacaggcccccacagagacccaggacaggtgtgattcccacctggttcctgatttcacct

SEQ ID NO: 123154 - DNA, 80 bp, synthetic construct
  misc_feature 1..80: note = Artificially Synthesized Probe
  source 1..80: mol_type = other DNA
tccttaccccttacagatgcatgggcatgattgggtgtggctggtgcttccagtggggggttgggtggggaggcacctca

SEQ ID NO: 123155 - DNA, 80 bp, synthetic construct; identical to SEQ ID NO: 39683
  misc_feature 1..80: note = Artificially Synthesized Probe
  source 1..80: mol_type = other DNA

SEQ ID NO: 123156 - DNA, 80 bp, synthetic construct
  misc_feature 1..80: note = Artificially Synthesized Probe
  source 1..80: mol_type = other DNA
aacctacccacccactggcggcgttgctggcctcccaggcgagtggatctgttgagggggagcagcctgggcaccaaggc

SEQ ID NO: 123157 - DNA, 80 bp, synthetic construct
  misc_feature 1..80: note = Artificially Synthesized Probe
  source 1..80: mol_type = other DNA
gagaaaggaagaaaggagatgggagcagaggggaggagggggaagatgggggagaggggagggaagaggaaggggaagga

SEQ ID NO: 123158 - DNA, 80 bp, synthetic construct
  misc_feature 1..80: note = Artificially Synthesized Probe
  source 1..80: mol_type = other DNA
aggaggagaaagggaggagggtggaggggaggggagaagggaggagagcaggaggagggtaatggaggactttggaggag

SEQ ID NO: 123159 - DNA, 80 bp, synthetic construct; identical to SEQ ID NO: 39684
  misc_feature 1..80: note = Artificially Synthesized Probe
  source 1..80: mol_type = other DNA

SEQ ID NO: 123160 - DNA, 80 bp, synthetic construct
  misc_feature 1..80: note = Artificially Synthesized Probe
  source 1..80: mol_type = other DNA
gagggaagagggaggaggaggggggaggaggagggaggggcggggccgggcgcggggggcgggcagaggcggggcgtggt

SEQ ID NO: 123161 - DNA, 80 bp, synthetic construct
  misc_feature 1..80: note = Artificially Synthesized Probe
  source 1..80: mol_type = other DNA
ccgcgggacgcggggagacgccggcggggacctgtcggagcctttgtctgcggcgcgcgcggcttcccccgccccctccc

SEQ ID NO: 123162 - DNA, 80 bp, synthetic construct
  misc_feature 1..80: note = Artificially Synthesized Probe
  source 1..80: mol_type = other DNA
cctgagcaccgcgcgggggtcctcccgcacgaagttcctccccggacccccccgcgccaccccatcgctcccctgccccc

SEQ ID NO: 123163 - DNA, 80 bp, synthetic construct
  misc_feature 1..80: note = Artificially Synthesized Probe
  source 1..80: mol_type = other DNA
cggcgacccgggccggggagggcggtgggcccggggggccagcctgtggcccctgcatgcatcggtccccggggggctgc

SEQ ID NO: 123164 - DNA, 80 bp, synthetic construct
  misc_feature 1..80: note = Artificially Synthesized Probe
  source 1..80: mol_type = other DNA
gggagtgcgagcccaggcccgctttccaagtggaattcggttcccctggtccttcctggctggccggaggagcgcggccc

SEQ ID NO: 123165 - DNA, 80 bp, synthetic construct
  misc_feature 1..80: note = Artificially Synthesized Probe
  source 1..80: mol_type = other DNA
tcctggagctgggccaggaggctcctcctgtcctgggcctgcctccagctgcggcccgcagtcccagaaagactttaccg

SEQ ID NO: 123166 - DNA, 80 bp, synthetic construct
  misc_feature 1..80: note = Artificially Synthesized Probe
  source 1..80: mol_type = other DNA
tggcctctctgtgcctcagtcgccctccctgcaaagtggtgaggggccttggccagaagcagtggctcactcctgtaatc

SEQ ID NO: 123167 - DNA, 80 bp, synthetic construct; identical to SEQ ID NO: 39685
  misc_feature 1..80: note = Artificially Synthesized Probe
  source 1..80: mol_type = other DNA

SEQ ID NO: 123168 - DNA, 80 bp, synthetic construct
  misc_feature 1..80: note = Artificially Synthesized Probe
  source 1..80: mol_type = other DNA
ctgttcctgttgctgccactgcggtgagggctgtggctggacgtccctcctggcactttgcctctgtcccctccatccgc

SEQ ID NO: 123169 - DNA, 80 bp, synthetic construct
  misc_feature 1..80: note = Artificially Synthesized Probe
  source 1..80: mol_type = other DNA
gagcaataaatttatgttgtttacaaattacacagtctaaggtatttgattgtaacagtaggaatggactaacccctgct

SEQ ID NO: 123170 - DNA, 80 bp, synthetic construct; identical to SEQ ID NO: 39719
  misc_feature 1..80: note = Artificially Synthesized Probe
  source 1..80: mol_type = other DNA

SEQ ID NO: 123171 - DNA, 80 bp, synthetic construct
  misc_feature 1..80: note = Artificially Synthesized Probe
  source 1..80: mol_type = other DNA
ccacaacctaccttcagattgcataaaatgaaaagtgttggagttttttcttactttaaaaatgtaccttggctgggctg

SEQ ID NO: 123172 - DNA, 80 bp, synthetic construct
  misc_feature 1..80: note = Artificially Synthesized Probe
  source 1..80: mol_type = other DNA
ggtggatcacgaggtcaggagatcgagaccatcctggctaacacggtgaaatcccatctctactaaaaatacaaaaaaaa

SEQ ID NO: 123173 - DNA, 80 bp, synthetic construct
  misc_feature 1..80: note = Artificially Synthesized Probe
  source 1..80: mol_type = other DNA
atctcaaaaaataaataaataaataaaaataataaaataaaataaaataaacttagctaagtgtaaatggtggagtcaag

SEQ ID NO: 123174 - DNA, 80 bp, synthetic construct
  misc_feature 1..80: note = Artificially Synthesized Probe
  source 1..80: mol_type = other DNA
agacggggtccaccacgttgcccaggttggacttgaacccctggcctcatgggatccactcacctcggcctcccgaagtg

SEQ ID NO: 123175 - DNA, 80 bp, synthetic construct; identical to SEQ ID NO: 39720
  misc_feature 1..80: note = Artificially Synthesized Probe
  source 1..80: mol_type = other DNA

SEQ ID NO: 123176 - DNA, 80 bp, synthetic construct
  misc_feature 1..80: note = Artificially Synthesized Probe
  source 1..80: mol_type = other DNA
tgaacttagtggctaaaacaacataaatttatgaccttacagttacagaggttagaagttctaaatgggtcttactgggc

SEQ ID NO: 123177 - DNA, 80 bp, synthetic construct
  misc_feature 1..80: note = Artificially Synthesized Probe
  source 1..80: mol_type = other DNA
catcttcaaatctaacaacgttgagtgaaatccttctcatgctgtcatctctgtggctatctcttctgattctgttttta

SEQ ID NO: 123178 - DNA, 80 bp, synthetic construct; identical to SEQ ID NO: 39721
  misc_feature 1..80: note = Artificially Synthesized Probe
  source 1..80: mol_type = other DNA

SEQ ID NO: 123179 - DNA, 80 bp, synthetic construct
  misc_feature 1..80: note = Artificially Synthesized Probe
  source 1..80: mol_type = other DNA
gagtggccaagccaagactcaattcctgtggccatgagctcagccacaatatcagtgattttctttttctttcctttctt

SEQ ID NO: 123180 - DNA, 80 bp, synthetic construct
  misc_feature 1..80: note = Artificially Synthesized Probe
  source 1..80: mol_type = other DNA
tgcccactttgcaggttagtaaacacttagaatgatgcccaggatatagtagatgcaatatgagtgtttattaaatatat

SEQ ID NO: 123181 - DNA, 80 bp, synthetic construct
  misc_feature 1..80: note = Artificially Synthesized Probe
  source 1..80: mol_type = other DNA
gaaatcatctgtactattgcaattgtttatgcttctttctattttgccaagtgagtgacaaaattgactgcagatttgat

SEQ ID NO: 123182 - DNA, 80 bp, synthetic construct
  misc_feature 1..80: note = Artificially Synthesized Probe
  source 1..80: mol_type = other DNA
gtgagaagaatgatgctaggatctggcatttgactggcatttgcccttcctcaggatccagaggtctcgttcaggaccat

SEQ ID NO: 123183 - DNA, 80 bp, synthetic construct; identical to SEQ ID NO: 39722
  misc_feature 1..80: note = Artificially Synthesized Probe
  source 1..80: mol_type = other DNA

SEQ ID NO: 123184 - DNA, 80 bp, synthetic construct
  misc_feature 1..80: note = Artificially Synthesized Probe
  source 1..80: mol_type = other DNA
tacagataaggaaacacaggcccaaataatttaagatcctcatcctgtaagttaggagagttagggttagaatccctgtc

SEQ ID NO: 123185 - DNA, 80 bp, synthetic construct
  misc_feature 1..80: note = Artificially Synthesized Probe
  source 1..80: mol_type = other DNA
cggctgccaggtagttaatttttaaatttttttttgtagaaatgggatctcagtatgttgcccaggctggtctcaaattc

SEQ ID NO: 123186 - DNA, 80 bp, synthetic construct
  misc_feature 1..80: note = Artificially Synthesized Probe
  source 1..80: mol_type = other DNA
tagccttctctccacaggtaaccaatattattagcttgttagtacataagcgtgtggttcaagtgtctttatgcaaatcc

SEQ ID NO: 123187 - DNA, 80 bp, synthetic construct; identical to SEQ ID NO: 39723
  misc_feature 1..80: note = Artificially Synthesized Probe
  source 1..80: mol_type = other DNA

SEQ ID NO: 123188 - DNA, 80 bp, synthetic construct
  misc_feature 1..80: note = Artificially Synthesized Probe
  source 1..80: mol_type = other DNA
ccaggcgcggtggctcacgcctgtaatcccagcactttgggaggcagaggtgggcagatcacttgaggccaggagtttga

SEQ ID NO: 123189 - DNA, 80 bp, synthetic construct
  misc_feature 1..80: note = Artificially Synthesized Probe
  source 1..80: mol_type = other DNA
cactgcactccagcctgggcgacagagtgagattccatctcaaaaaatatatataaaaaaattagccagacgtggtggtg

SEQ ID NO: 123190 - DNA, 80 bp, synthetic construct
  misc_feature 1..80: note = Artificially Synthesized Probe
  source 1..80: mol_type = other DNA
ttttcccttttttctttctttctttctttcttctctctcttttattatttatttcttcctttctttccctttctccttcc

SEQ ID NO: 123191 - DNA, 80 bp, synthetic construct
  misc_feature 1..80: note = Artificially Synthesized Probe
  source 1..80: mol_type = other DNA
actgtttgggagtgtagctataagataaattccctgcagcagaaatgcgtatattaaagaatatatgcatttgtgattat

SEQ ID NO: 123192 - DNA, 80 bp, synthetic construct; identical to SEQ ID NO: 39724
  misc_feature 1..80: note = Artificially Synthesized Probe
  source 1..80: mol_type = other DNA

SEQ ID NO: 123193 - DNA, 80 bp, synthetic construct
  misc_feature 1..80: note = Artificially Synthesized Probe
  source 1..80: mol_type = other DNA
ctcaatctcctgacctcgtgatccgcctgcctcggcctcccaaagtgctgggattacaggtgtgagccaccgcacccagc

SEQ ID NO: 123194 - DNA, 80 bp, synthetic construct
  misc_feature 1..80: note = Artificially Synthesized Probe
  source 1..80: mol_type = other DNA
ttttgtattaaggatattaacaactttgagataaaaggtcaggcacagtggctcacacctgtaatcccagcactttggga

SEQ ID NO: 123195 - DNA, 80 bp, synthetic construct
  misc_feature 1..80: note = Artificially Synthesized Probe
  source 1..80: mol_type = other DNA
gcagttcaaggttacagtgagccatgatcatgtcactgcactccagcctgagtgacagagtgagaaccagtctcaaaaaa

SEQ ID NO: 123196 - DNA, 80 bp, synthetic construct
  misc_feature 1..80: note = Artificially Synthesized Probe
  source 1..80: mol_type = other DNA
aagaagaagaaagaaaaagaaagaaaggaaggaagggagggaggaaggaagggagggaaaaggaagggaaggggcaggca

SEQ ID NO: 123197 - DNA, 80 bp, synthetic construct; identical to SEQ ID NO: 39725
  misc_feature 1..80: note = Artificially Synthesized Probe
  source 1..80: mol_type = other DNA

SEQ ID NO: 123198 - DNA, 80 bp, synthetic construct
  misc_feature 1..80: note = Artificially Synthesized Probe
  source 1..80: mol_type = other DNA
ttatagtagtgcaaagcagactgagacatgagcctcggtttcttcctttatcagattggcctaacgacacaaacctcata

SEQ ID NO: 123199 - DNA, 80 bp, synthetic construct
  misc_feature 1..80: note = Artificially Synthesized Probe
  source 1..80: mol_type = other DNA
agactcaaatgtctagggagaccaagtaggttatcataaaataaatgtttgtagcaacaagtggtaggagctttgttgac

SEQ ID NO: 123200 - DNA, 80 bp, synthetic construct; identical to SEQ ID NO: 39726
  misc_feature 1..80: note = Artificially Synthesized Probe
  source 1..80: mol_type = other DNA

SEQ ID NO: 123201 - DNA, 80 bp, synthetic construct
  misc_feature 1..80: note = Artificially Synthesized Probe
  source 1..80: mol_type = other DNA
ttttattttttgtacaaatggggtctccctgtgttgccttggctggtctcaatctcctgaactcaagcgattctcccgcc

SEQ ID NO: 123202 - DNA, 80 bp, synthetic construct
  misc_feature 1..80: note = Artificially Synthesized Probe
  source 1..80: mol_type = other DNA
ctcatgtcgtttggaagtcattgtctaaactagagaaggcttagctccagctcaaattcgtttaaacaacaacaaaaaaa

SEQ ID NO: 123203 - DNA, 80 bp, synthetic construct
  misc_feature 1..80: note = Artificially Synthesized Probe
  source 1..80: mol_type = other DNA
gtaatatatagttatataatatataatttatatatttatgtaatatatagttatataatatatatgatttatatattata

SEQ ID NO: 123204 - DNA, 80 bp, synthetic construct
  misc_feature 1..80: note = Artificially Synthesized Probe
  source 1..80: mol_type = other DNA
ttaaaaatgtgcttttctcctctggactcattcatgcagctgcatttagttggtgactaggctagacagaagtccaagat

SEQ ID NO: 123205 - DNA, 80 bp, synthetic construct; identical to SEQ ID NO: 39727
  misc_feature 1..80: note = Artificially Synthesized Probe
  source 1..80: mol_type = other DNA

SEQ ID NO: 123206 - DNA, 80 bp, synthetic construct
  misc_feature 1..80: note = Artificially Synthesized Probe
  source 1..80: mol_type = other DNA
aactctggggattaaccacatgctgcaataattcaggaagcatttattcaagaaaaacagctgggtctcagaaaaaaaca

SEQ ID NO: 123207 - DNA, 80 bp, synthetic construct
  misc_feature 1..80: note = Artificially Synthesized Probe
  source 1..80: mol_type = other DNA
agaggtcagaatgggattagaactctttcaaaactccattctctaaaaaaggtcactgttttacccgtcacctgttccct

SEQ ID NO: 123208 - DNA, 80 bp, synthetic construct
  misc_feature 1..80: note = Artificially Synthesized Probe
  source 1..80: mol_type = other DNA
agacaacttaaatagaaaagctgggaagtgagatgcacatagggtgctttgaaaaactcagacatatttctgggaatcta

SEQ ID NO: 123209 - DNA, 80 bp, synthetic construct; identical to SEQ ID NO: 39728
  misc_feature 1..80: note = Artificially Synthesized Probe
  source 1..80: mol_type = other DNA

SEQ ID NO: 123210 - DNA, 80 bp, synthetic construct
  misc_feature 1..80: note = Artificially Synthesized Probe
  source 1..80: mol_type = other DNA
ctttaacaagaaattataaggcatgcaaaaaaacccaagaaagtatggtccatacacaggggagaaaaagcagtcaatag

SEQ ID NO: 123211 - DNA, 80 bp, synthetic construct
  misc_feature 1..80: note = Artificially Synthesized Probe
  source 1..80: mol_type = other DNA
atagatttttttttaagtggaaattatggagttggaaagtaacaataagtgaaataacatactcactagaggggttcaac

SEQ ID NO: 123212 - DNA, 80 bp, synthetic construct
  misc_feature 1..80: note = Artificially Synthesized Probe
  source 1..80: mol_type = other DNA
aaaaaaacgaagagaaacagagtctcagagatctgtgggacatgattaagcataattaacatacacataattgaagttcc

SEQ ID NO: 123213 - DNA, 80 bp, synthetic construct; identical to SEQ ID NO: 39710
  misc_feature 1..80: note = Artificially Synthesized Probe
  source 1..80: mol_type = other DNA

SEQ ID NO: 123214 - DNA, 80 bp, synthetic construct; identical to SEQ ID NO: 39729
  misc_feature 1..80: note = Artificially Synthesized Probe
  source 1..80: mol_type = other DNA

SEQ ID NO: 123215 - DNA, 80 bp, synthetic construct
  misc_feature 1..80: note = Artificially Synthesized Probe
  source 1..80: mol_type = other DNA
aattagctgggcgtagtggttcatgcctgtaatcccagctactcaggaggctgaggcaggagaattgcttgaacctggga

SEQ ID NO: 123216 - DNA, 80 bp, synthetic construct
  misc_feature 1..80: note = Artificially Synthesized Probe
  source 1..80: mol_type = other DNA
aaccatggaagctcaaagtaccaaaagaaaaaggctaccaatcaaaactaatgttgagcaaaactatcctttgaaaaagg

SEQ ID NO: 123217 - DNA, 80 bp, synthetic construct
  misc_feature 1..80: note = Artificially Synthesized Probe
  source 1..80: mol_type = other DNA
gaaggtaactatgtaagtaaatataacatacagtataaattggttttcgattgtaactctctttttcttctctctaattt

SEQ ID NO: 123218 - DNA, 80 bp, synthetic construct; identical to SEQ ID NO: 39730
  misc_feature 1..80: note = Artificially Synthesized Probe
  source 1..80: mol_type = other DNA

SEQ ID NO: 123219 - DNA, 80 bp, synthetic construct
  misc_feature 1..80: note = Artificially Synthesized Probe
  source 1..80: mol_type = other DNA
agagatatacttagatcaaagatacaaatagggctgggcatggtgactcaaacctgtaatcccagcactttgggaggcca

SEQ ID NO: 123220 - DNA, 80 bp, synthetic construct
  misc_feature 1..80: note = Artificially Synthesized Probe
  source 1..80: mol_type = other DNA
ccaagatcacaccactgcacagcagcctgggcaacagtgagatcctgtctaaaaaaaaaaaaaaagatacgaatgactga

SEQ ID NO: 123221 - DNA, 80 bp, synthetic construct
  misc_feature 1..80: note = Artificially Synthesized Probe
  source 1..80: mol_type = other DNA
acattgtcactagagacaaaaaagaaaattacataatgataaaagggtcaatccctcaagaagacataacaattataaac

SEQ ID NO: 123222 - DNA, 80 bp, synthetic construct
  misc_feature 1..80: note = Artificially Synthesized Probe
  source 1..80: mol_type = other DNA
atgaacaacactataaaccaactgacctaacagacatatataaaataattcatccaacaacagcaaaatacctattcatc

SEQ ID NO: 123223 - DNA, 80 bp, synthetic construct; identical to SEQ ID NO: 39731
  misc_feature 1..80: note = Artificially Synthesized Probe
  source 1..80: mol_type = other DNA

SEQ ID NO: 123224 - DNA, 80 bp, synthetic construct
  misc_feature 1..80: note = Artificially Synthesized Probe
  source 1..80: mol_type = other DNA
ttggggacccaatttatattgaggccaagagggggctcctttggggatatacagcaggctgacatctaaaggatgagtag

SEQ ID NO: 123225 - DNA, 80 bp, synthetic construct
  misc_feature 1..80: note = Artificially Synthesized Probe
  source 1..80: mol_type = other DNA
aagcaagcagacagaagaaaataacaaagattagagtggaggtaaacaaaatgtagaatagaaaactgttagaggaaatc

SEQ ID NO: 123226 - DNA, 80 bp, synthetic construct
  misc_feature 1..80: note = Artificially Synthesized Probe
  source 1..80: mol_type = other DNA
tccatcaacattatggaaattaaatatagttataaggaaatgctgtgagcaattatatgcaaaaaattaaacaacctaca

SEQ ID NO: 123227 - DNA, 80 bp, synthetic construct
  misc_feature 1..80: note = Artificially Synthesized Probe
  source 1..80: mol_type = other DNA
catgagtttgagaccaccctgggcaacacggtgaaaccccatttctactaaaatacaaaaaattagctggttgtggtggc

SEQ ID NO: 123228 - DNA, 80 bp, synthetic construct; identical to SEQ ID NO: 39732
  misc_feature 1..80: note = Artificially Synthesized Probe
  source 1..80: mol_type = other DNA

SEQ ID NO: 123229 - DNA, 80 bp, synthetic construct
  misc_feature 1..80: note = Artificially Synthesized Probe
  source 1..80: mol_type = other DNA
cggtgaaaccccgtctctactaaaaatacaaaaaaaaaaaaaaattagccgggcgtggtggcgggcgcctgtagtcccag

SEQ ID NO: 123230 - DNA, 80 bp, synthetic construct
  misc_feature 1..80: note = Artificially Synthesized Probe
  source 1..80: mol_type = other DNA
aacgctacagtaatcaaaagaatatgatactgacagaaggataaacatgaaatccatgaaatagaatttgataagaagca

SEQ ID NO: 123231 - DNA, 80 bp, synthetic construct; identical to SEQ ID NO: 39733
  misc_feature 1..80: note = Artificially Synthesized Probe
  source 1..80: mol_type = other DNA

SEQ ID NO: 123232 - DNA, 80 bp, synthetic construct
  misc_feature 1..80: note = Artificially Synthesized Probe
  source 1..80: mol_type = other DNA
ttagtggagacggggtttcaccatgttggccaggctggtctgaaactcctgacctcaagtgatccgcctgcctcagcctc

SEQ ID NO: 123233 - DNA, 80 bp, synthetic construct
  misc_feature 1..80: note = Artificially Synthesized Probe
  source 1..80: mol_type = other DNA
tggttcaatatctccagtccaagggacccgcagagacggtgtccccgttccaaattcccaggaaagagaatataatttgc

SEQ ID NO: 123234 - DNA, 80 bp, synthetic construct
  misc_feature 1..80: note = Artificially Synthesized Probe
  source 1..80: mol_type = other DNA
tttgataagtaagaagcagatctgggggagtaacacaggcttcctgattctcatcatgaatcactttctacattacctgt

SEQ ID NO: 123235 - DNA, 80 bp, synthetic construct; identical to SEQ ID NO: 39734
  misc_feature 1..80: note = Artificially Synthesized Probe
  source 1..80: mol_type = other DNA

SEQ ID NO: 123236 - DNA, 80 bp, synthetic construct
  misc_feature 1..80: note = Artificially Synthesized Probe
  source 1..80: mol_type = other DNA
tgagcaggaaaatgatctgatctgactcatacttaaagatttctctggcttccgtgtgaggggcggattaaaaggaagca

SEQ ID NO: 123237 - DNA, 80 bp, synthetic construct
  misc_feature 1..80: note = Artificially Synthesized Probe
  source 1..80: mol_type = other DNA
tgaggaccctggtggaggacggtgtgggcagagcgtgggacatgtcaccttccccacctgctcagagttcaagggtcctg

SEQ ID NO: 123238 - DNA, 80 bp, synthetic construct
  misc_feature 1..80: note = Artificially Synthesized Probe
  source 1..80: mol_type = other DNA
tgctgctacgggcatttctgtatcagcttatgaacttaatgtaagtattttacctagggcatagatgacatcttacctct

SEQ ID NO: 123239 - DNA, 80 bp, synthetic construct
  misc_feature 1..80: note = Artificially Synthesized Probe
  source 1..80: mol_type = other DNA
aacgtggcgaaaccccgtctctactaaaaatacaaaaaattagccgagtgtaatggcgggcgccgtaatcccagctactc

SEQ ID NO: 123240 - DNA, 80 bp, synthetic construct
  misc_feature 1..80: note = Artificially Synthesized Probe
  source 1..80: mol_type = other DNA
cacacacacacacacacacaaacccaaaaaacacaaaaaaaaaacaatagtgggttgggcgcgatggctcaggcctgtaa

SEQ ID NO: 123241 - DNA, 80 bp, synthetic construct
  misc_feature 1..80: note = Artificially Synthesized Probe
  source 1..80: mol_type = other DNA
aggagaatcacttgaacctgggagacagaggctgcagtgaggtgagattgtaacactgcacttcagcctgggcgacagag

SEQ ID NO: 123242 - DNA, 80 bp, synthetic construct; identical to SEQ ID NO: 39735
  misc_feature 1..80: note = Artificially Synthesized Probe
  source 1..80: mol_type = other DNA

SEQ ID NO: 123243 - DNA, 80 bp, synthetic construct
  misc_feature 1..80: note = Artificially Synthesized Probe
  source 1..80: mol_type = other DNA
cacactgcctgggtttacattcttgctccaacacgtataaacttcagcagcaagttgctttttgtgtgaccttgggtggc

SEQ ID NO: 123244 - DNA, 80 bp, synthetic construct
  misc_feature 1..80: note = Artificially Synthesized Probe
  source 1..80: mol_type = other DNA
gaccacaggtgcacgccaccatgcctagctaattttcatatttttttgtagagacgggaatttcactatgttgctcaggt

SEQ ID NO: 123245 - DNA, 80 bp, synthetic construct; identical to SEQ ID NO: 39736
  misc_feature 1..80: note = Artificially Synthesized Probe
  source 1..80: mol_type = other DNA

SEQ ID NO: 123246 - DNA, 80 bp, synthetic construct
  misc_feature 1..80: note = Artificially Synthesized Probe
  source 1..80: mol_type = other DNA
cacaactggatgaagtgatgacatgatgtttaggagacacagaactaggaagcatcgcaaaggccttctttttccactct

SEQ ID NO: 123247 - DNA, 80 bp, synthetic construct
  misc_feature 1..80: note = Artificially Synthesized Probe
  source 1..80: mol_type = other DNA
gggggccaagtcctgactgtgttttcttgagcagggcttgttttctgtgctgatgttggcctggatcttcctacccatct

SEQ ID NO: 123248 - DNA, 80 bp, synthetic construct
  misc_feature 1..80: note = Artificially Synthesized Probe
  source 1..80: mol_type = other DNA
tggtggctcacacctgtaatcccagcactgtgcagggatcatttgagcccatggggttgaggctgcaggagctgtgtttg

SEQ ID NO: 123249 - DNA, 80 bp, synthetic construct
  misc_feature 1..80: note = Artificially Synthesized Probe
  source 1..80: mol_type = other DNA
gatgatccacaggtgagacaatgaggaacccagtccatagcacttcctgccagtacccaacatccaaggcacacagaagg

SEQ ID NO: 123250 - DNA, 80 bp, synthetic construct; identical to SEQ ID NO: 39737
  misc_feature 1..80: note = Artificially Synthesized Probe
  source 1..80: mol_type = other DNA

SEQ ID NO: 123251 - DNA, 80 bp, synthetic construct
  misc_feature 1..80: note = Artificially Synthesized Probe
  source 1..80: mol_type = other DNA
aaaaaataaaaataaaagtatatagcttatgcctgtaatcctagcactttgggaggccaaggcaggcaggtcacttgagc

SEQ ID NO: 123252 - DNA, 80 bp, synthetic construct
  misc_feature 1..80: note = Artificially Synthesized Probe
  source 1..80: mol_type = other DNA
caatatcacactacttaactcctgcctgggtgacagagtgggactccgtcagaaggaaaggaaaggaaagaaggaaagga

SEQ ID NO: 123253 - DNA, 80 bp, synthetic construct
  misc_feature 1..80: note = Artificially Synthesized Probe
  source 1..80: mol_type = other DNA
gaaggaaggaaggaaggaaataaatataatgtaccctgcaagcctttagaaaatcacaatgctggctgggcacagtggct

SEQ ID NO: 123254 - DNA, 80 bp, synthetic construct
  misc_feature 1..80: note = Artificially Synthesized Probe
  source 1..80: mol_type = other DNA
agaattagctgagactggtggtgtgcacctttagtcccagctagtcaggaggctgaggcaagaggatgggagactgagga

SEQ ID NO: 123255 - DNA, 80 bp, synthetic construct; identical to SEQ ID NO: 39738
  misc_feature 1..80: note = Artificially Synthesized Probe
  source 1..80: mol_type = other DNA

SEQ ID NO: 123256 - DNA, 80 bp, synthetic construct
  misc_feature 1..80: note = Artificially Synthesized Probe
  source 1..80: mol_type = other DNA
acaggtgcacaccaccacgcccgactactttttgtatttttagtagagatggggtttccccatgttggccaggctgttct

SEQ ID NO: 123257 - DNA, 80 bp, synthetic construct
  misc_feature 1..80: note = Artificially Synthesized Probe
  source 1..80: mol_type = other DNA
ttccaatatatttatccattctgttgtgcatgggcgtttaagttgctcccagtattggtctatgatagacagcactgctg

SEQ ID NO: 123258 - DNA, 80 bp, synthetic construct; identical to SEQ ID NO: 39739
  misc_feature 1..80: note = Artificially Synthesized Probe
  source 1..80: mol_type = other DNA

SEQ ID NO: 123259 - DNA, 80 bp, synthetic construct; identical to SEQ ID NO: 39711
  misc_feature 1..80: note = Artificially Synthesized Probe
  source 1..80: mol_type = other DNA

SEQ ID NO: 123260 - DNA, 80 bp, synthetic construct
  misc_feature 1..80: note = Artificially Synthesized Probe
  source 1..80: mol_type = other DNA
tccgtcccccaccacacacacactgccccagtagctgggactacagccaccatgcccagctaatttttgtatttttagta

SEQ ID NO: 123261 - DNA, 80 bp, synthetic construct
  misc_feature 1..80: note = Artificially Synthesized Probe
  source 1..80: mol_type = other DNA
actgtttttaattggcaactctttttatacattttccggccatttggatttcctctttgaggaagtaacttgtctaggac

SEQ ID NO: 123262 - DNA, 80 bp, synthetic construct
  misc_feature 1..80: note = Artificially Synthesized Probe
  source 1..80: mol_type = other DNA
atcgtgcatggcctcacaattaaatctattatccgcctagaatttgtttttgtctaccatatgtatgtcttttgaggcag

SEQ ID NO: 123263 - DNA, 80 bp, synthetic construct; identical to SEQ ID NO: 39740
  misc_feature 1..80: note = Artificially Synthesized Probe
  source 1..80: mol_type = other DNA

SEQ ID NO: 123264 - DNA, 80 bp, synthetic construct
  misc_feature 1..80: note = Artificially Synthesized Probe
  source 1..80: mol_type = other DNA
aatctcagctctggccctcaggtcaccacgatgccagaatacctacggaagcgcttcggtggcatcagaatccccatcat

SEQ ID NO: 123265 - DNA, 80 bp, synthetic construct
  misc_feature 1..80: note = Artificially Synthesized Probe
  source 1..80: mol_type = other DNA
tgcagggagattagaggaagatggcatggggggaggtaagcgtggacagagggaattgggagaaaatggttgggtgcagt

SEQ ID NO: 123266 - DNA, 80 bp, synthetic construct
  misc_feature 1..80: note = Artificially Synthesized Probe
  source 1..80: mol_type = other DNA
ttcgggaggctgaggcaggagaattgcttgagcccagaaggcgggggttgcagtgagccaagatcatgccactgtactgc

SEQ ID NO: 123267 - DNA, 80 bp, synthetic construct; identical to SEQ ID NO: 39741
  misc_feature 1..80: note = Artificially Synthesized Probe
  source 1..80: mol_type = other DNA

SEQ ID NO: 123268 - DNA, 80 bp, synthetic construct
  misc_feature 1..80: note = Artificially Synthesized Probe
  source 1..80: mol_type = other DNA
aaggggtgagggggagcagaaggggttccgttcaatccaaacaacaataagtgaatctacgccagctccagactgcagga

SEQ ID NO: 123269 - DNA, 80 bp, synthetic construct
  misc_feature 1..80: note = Artificially Synthesized Probe
  source 1..80: mol_type = other DNA
gaggcccaggtacacatgacttgttgagaaacagagggtatttcagagtctgtggaggtctgggagtacgaagtgagtat

SEQ ID NO: 123270 - DNA, 80 bp, synthetic construct
  misc_feature 1..80: note = Artificially Synthesized Probe
  source 1..80: mol_type = other DNA
ttgaggaggctgctgcatcagcccagggcccacagggctccagctgaagacccctgatctgggatgcagtggattaacaa

SEQ ID NO: 123271 - DNA, 80 bp, synthetic construct
  misc_feature 1..80: note = Artificially Synthesized Probe
  source 1..80: mol_type = other DNA
agaatggaattgggagtgaatagattctgggaggtgagaaagagatgctataaattcttcgatgagacatttacatacca

SEQ ID NO: 123272 - DNA, 80 bp, synthetic construct
  misc_feature 1..80: note = Artificially Synthesized Probe
  source 1..80: mol_type = other DNA
ctttcttcacaggtagacatgtatgcaggtgccatcttcatccagcagtctttgcacctggatctgtacctggccatagt

SEQ ID NO: 123273 - DNA, 80 bp, synthetic construct; identical to SEQ ID NO: 39742
  misc_feature 1..80: note = Artificially Synthesized Probe
  source 1..80: mol_type = other DNA

SEQ ID NO: 123274 - DNA, 80 bp, synthetic construct
  misc_feature 1..80: note = Artificially Synthesized Probe
  source 1..80: mol_type = other DNA
ctgtaatccctgcactttgggaggccaaggtgggtggatcacgaggtcaggagttcaagaccagcctgaccaacatggca

SEQ ID NO: 123275 - DNA, 80 bp, synthetic construct
  misc_feature 1..80: note = Artificially Synthesized Probe
  source 1..80: mol_type = other DNA
agagcgagacaccagctcacaactacaacaacaaaaaattagccgggcatgctggcagactcctgtaattccagctactc

SEQ ID NO: 123276 - DNA, 80 bp, synthetic construct
  misc_feature 1..80: note = Artificially Synthesized Probe
  source 1..80: mol_type = other DNA
agataaagcatttttaaaatgcaccacaatggcataatgttttttcccattcatgtatcccagaactgtttcttgagcac

SEQ ID NO: 123277 - DNA, 80 bp, synthetic construct; identical to SEQ ID NO: 39743
  misc_feature 1..80: note = Artificially Synthesized Probe
  source 1..80: mol_type = other DNA

SEQ ID NO: 123278 - DNA, 80 bp, synthetic construct
  misc_feature 1..80: note = Artificially Synthesized Probe
  source 1..80: mol_type = other DNA
gtgtatatggatatacatttcctactgtgtgccagacatcatgccagggagtgaggcacagatgtaagcaagacaaatat

SEQ ID NO: 123279 - DNA, 80 bp, synthetic construct
  misc_feature 1..80: note = Artificially Synthesized Probe
  source 1..80: mol_type = other DNA
aacatggcaaaacccggtctctactaaaaatacagaaaaattagctgggcatgatggcacatgcctgtaatcccagctac

SEQ ID NO: 123280 - DNA, 80 bp, synthetic construct
  misc_feature 1..80: note = Artificially Synthesized Probe
  source 1..80: mol_type = other DNA
ctataaggaaaaattaattggggtgaagagatggaggacaggttttttttggttttttgttttttttttacatagaatat

SEQ ID NO: 123281 - DNA, 80 bp, synthetic construct; identical to SEQ ID NO: 39744
  misc_feature 1..80: note = Artificially Synthesized Probe
  source 1..80: mol_type = other DNA

SEQ ID NO: 123282 - DNA, 80 bp, synthetic construct
  misc_feature 1..80: note = Artificially Synthesized Probe
  source 1..80: mol_type = other DNA
gaagcacgtgcttgggctggaaagcttggtctgtaactcgcacgtgtgaactttcagacatctattaagtaacaatgaga

SEQ ID NO: 123283 - DNA, 80 bp, synthetic construct
  misc_feature 1..80: note = Artificially Synthesized Probe
  source 1..80: mol_type = other DNA
ttctctactaaaaatacaaaaattagcagagtgtggtggcaggtgcctgtaatcccagctatgtggaaggctgaggcagg

SEQ ID NO: 123284 - DNA, 80 bp, synthetic construct
  misc_feature 1..80: note = Artificially Synthesized Probe
  source 1..80: mol_type = other DNA
gataagggcctccagctgcattcatgtgctgcaaaggttatgattttgtcctttttaatggctgtgtagtatttcgtggt

SEQ ID NO: 123285 - DNA, 80 bp, synthetic construct
  misc_feature 1..80: note = Artificially Synthesized Probe
  source 1..80: mol_type = other DNA
attgctggtcaaatgataattcaattctcagttctctctccacagtggctgaactaatttacactctgtattagtccatt

SEQ ID NO: 123286 - DNA, 80 bp, synthetic construct; identical to SEQ ID NO: 39745
  misc_feature 1..80: note = Artificially Synthesized Probe
  source 1..80: mol_type = other DNA

SEQ ID NO: 123287 - DNA, 80 bp, synthetic construct
  misc_feature 1..80: note = Artificially Synthesized Probe
  source 1..80: mol_type = other DNA
gtttctccatgttggtcaggctggtttcgaactcccatcctcaggtgatctgcccgcttcggcctcccaaagtgctggga

SEQ ID NO: 123288 - DNA, 80 bp, synthetic construct
  misc_feature 1..80: note = Artificially Synthesized Probe
  source 1..80: mol_type = other DNA
ggggattacaattcaacatgagatttgggtggggacacagagccaaaccatatcacactcccaccaacagtgcatcagca

SEQ ID NO: 123289 - DNA, 80 bp, synthetic construct
  misc_feature 1..80: note = Artificially Synthesized Probe
  source 1..80: mol_type = other DNA
ccagcctggccaatatagtgaaaccctgtctctactaaaaatacaaaaaaattagccaggcgtggtggcgggcacctgta

SEQ ID NO: 123290 - DNA, 80 bp, synthetic construct; identical to SEQ ID NO: 39746
  misc_feature 1..80: note = Artificially Synthesized Probe
  source 1..80: mol_type = other DNA

SEQ ID NO: 123291 - DNA, 80 bp, synthetic construct
  misc_feature 1..80: note = Artificially Synthesized Probe
  source 1..80: mol_type = other DNA
aaaacacaaaaattagccaggcgtggtgacacatgcctgtaatcccagctactcgggaggctgaggcgggagaatcgctt

SEQ ID NO: 123292 - DNA, 80 bp, synthetic construct
  misc_feature 1..80: note = Artificially Synthesized Probe
  source 1..80: mol_type = other DNA
ctgtgttggtcaggctggtcttgaactcctggcctcaagtgatccgcctgcatcagcctcccaaaatgctgggattacag

SEQ ID NO: 123293 - DNA, 80 bp, synthetic construct
  misc_feature 1..80: note = Artificially Synthesized Probe
  source 1..80: mol_type = other DNA
gagaacctgcttgagcaaatggttatgtaggctgtgccctattccactccagggggtgccattcacaccaaccagagtga

SEQ ID NO: 123294 - DNA, 80 bp, synthetic construct
  misc_feature 1..80: note = Artificially Synthesized Probe
  source 1..80: mol_type = other DNA
aaatctaacatatgcaaagtcccctgatacagaaagaccttggctgagttctcagaactagcagaagcaatgtgcctggg

SEQ ID NO: 123295 - DNA, 80 bp, synthetic construct; identical to SEQ ID NO: 39747
  misc_feature 1..80: note = Artificially Synthesized Probe
  source 1..80: mol_type = other DNA

SEQ ID NO: 123296 - DNA, 80 bp, synthetic construct
  misc_feature 1..80: note = Artificially Synthesized Probe
  source 1..80: mol_type = other DNA
ctggagagcacctcacccacgggcacagggtttttaaattgtacagtgactgtgccctctagtagacatgtttctattgg

SEQ ID NO: 123297 - DNA, 80 bp, synthetic construct
  misc_feature 1..80: note = Artificially Synthesized Probe
  source 1..80: mol_type = other DNA
cccaggctggcgtgcagtggcacgatcttggctcactgcaacctctgcctcctgggttcaagtgattctcctgtctcagc

SEQ ID NO: 123298 - DNA, 80 bp, synthetic construct
  misc_feature 1..80: note = Artificially Synthesized Probe
  source 1..80: mol_type = other DNA
atgagccatctttcccagcccatttcgaagatttttgcaggtggcaaacccaacaagaatcctctgaggcaccatcacga

SEQ ID NO: 123299 - DNA, 80 bp, synthetic construct; identical to SEQ ID NO: 39748
  misc_feature 1..80: note = Artificially Synthesized Probe
  source 1..80: mol_type = other DNA

SEQ ID NO: 123300 - DNA, 80 bp, synthetic construct
  misc_feature 1..80: note = Artificially Synthesized Probe
  source 1..80: mol_type = other DNA
cagagcttggggactgtggcctaagcaccacttcctatatcagttgaaaattgctgtgttaaaaaaccacccacaaattg

SEQ ID NO: 123301 - DNA, 80 bp, synthetic construct
  misc_feature 1..80: note = Artificially Synthesized Probe
  source 1..80: mol_type = other DNA
ggctgtcgactgggcttcccctccgtgggggccctcttccttcactaggttagacctggcttcttaaagcaaatggtctc

SEQ ID NO: 123302 - DNA, 80 bp, synthetic construct; identical to SEQ ID NO: 39712
  misc_feature 1..80: note = Artificially Synthesized Probe
  source 1..80: mol_type = other DNA

SEQ ID NO: 123303 - DNA, 80 bp, synthetic construct; identical to SEQ ID NO: 39749
  misc_feature 1..80: note = Artificially Synthesized Probe
  source 1..80: mol_type = other DNA

SEQ ID NO: 123304 - DNA, 80 bp, synthetic construct
  misc_feature 1..80: note = Artificially Synthesized Probe
  source 1..80: mol_type = other DNA
gctacagtaagtggggtccccgggtcactggggcggacaacagcacctctctccagcagggatatctgctctccacactg

SEQ ID NO: 123305 - DNA, 80 bp, synthetic construct
  misc_feature 1..80: note = Artificially Synthesized Probe
  source 1..80: mol_type = other DNA
tgtcagtcaggctggagtgcagtgctgtgatgattgctcactgcagccttgagcccctgggctcaagtgactctctcacc

SEQ ID NO: 123306 - DNA, 80 bp, synthetic construct
  misc_feature 1..80: note = Artificially Synthesized Probe
  source 1..80: mol_type = other DNA
ctccccaagctgccccacctggcactgtttttttttttttcaagtaaaaatctctttctatactaatatggaaaaataac

SEQ ID NO: 123307 - DNA, 80 bp, synthetic construct
  misc_feature 1..80: note = Artificially Synthesized Probe
  source 1..80: mol_type = other DNA
tcctcccgcctcagcctcccaagtagctgggcccacaggtgtgcaccaccatccctggctaatttttttcatttttttaa

SEQ ID NO: 123308 - DNA, 80 bp, synthetic construct; identical to SEQ ID NO: 39750
  misc_feature 1..80: note = Artificially Synthesized Probe
  source 1..80: mol_type = other DNA

SEQ ID NO: 123309 - DNA, 80 bp, synthetic construct
  misc_feature 1..80: note = Artificially Synthesized Probe
  source 1..80: mol_type = other DNA
taagcgggggacactactctccacaggtttctatcttttagaggtaagccactcattaagccttaaagactacaacaaag

SEQ ID NO: 123310 - DNA, 80 bp, synthetic construct
  misc_feature 1..80: note = Artificially Synthesized Probe
  source 1..80: mol_type = other DNA
tagtcccagctacctgacaggctgaggtgggaggatggcttgagcctggcaggttgagtctgcggtgagctgagattgtg

SEQ ID NO: 123311 - DNA, 80 bp, synthetic construct
  misc_feature 1..80: note = Artificially Synthesized Probe
  source 1..80: mol_type = other DNA
tatattttaggactcagaagaaaatatcaagagagtgccatgcttggaatcctgaactctatgaaacatgtatgaaagat

SEQ ID NO: 123312 - DNA, 80 bp, synthetic construct
  misc_feature 1..80: note = Artificially Synthesized Probe
  source 1..80: mol_type = other DNA
tccagatacctgaagccgtggctcttgctaacggactaggggtgatcctggcctctgcttcagcctcaaatcctgagatg

SEQ ID NO: 123313 - DNA, 80 bp, synthetic construct; identical to SEQ ID NO: 39751
  misc_feature 1..80: note = Artificially Synthesized Probe
  source 1..80: mol_type = other DNA

SEQ ID NO: 123314 - DNA, 80 bp, synthetic construct
  misc_feature 1..80: note = Artificially Synthesized Probe
  source 1..80: mol_type = other DNA
ctgggactacggacacacgccaccatgcccagctaatttttgtatttttagtagggacggggtttcaccatcttcaccag

SEQ ID NO: 123315 - DNA, 80 bp, synthetic construct
  misc_feature 1..80: note = Artificially Synthesized Probe
  source 1..80: mol_type = other DNA
cccggctgaaaacaaacaggagttctaataaaatgcagagaaaagggataaataataaaattataaaagaaaagatgaca

SEQ ID NO: 123316 - DNA, 80 bp, synthetic construct; identical to SEQ ID NO: 39752
  misc_feature 1..80: note = Artificially Synthesized Probe
  source 1..80: mol_type = other DNA

SEQ ID NO: 123317 - DNA, 80 bp, synthetic construct
  misc_feature 1..80: note = Artificially Synthesized Probe
  source 1..80: mol_type = other DNA
aagcaagaccccactctatgaaaaatggaaaattagctggatgtggtggtgcacacctgtggtctcaggtggggactgga

SEQ ID NO: 123318 - DNA, 80 bp, synthetic construct
  misc_feature 1..80: note = Artificially Synthesized Probe
  source 1..80: mol_type = other DNA
ctaaaaataataaacaaactggtctcattcccctccttcataacaataaaatgccaaaagacagtggagcaagggctaca

SEQ ID NO: 123319 - DNA, 80 bp, synthetic construct
  misc_feature 1..80: note = Artificially Synthesized Probe
  source 1..80: mol_type = other DNA
tgtgcctgtcttgaaggtacaagacagaaacaaaacaaaatcgagagttggtattatgactaaagagaaaatggtagtaa

SEQ ID NO: 123320 - DNA, 80 bp, synthetic construct
  misc_feature 1..80: note = Artificially Synthesized Probe
  source 1..80: mol_type = other DNA
catcaaataggaagaaaaacatcatgaagaagaaatactgaactccaagcagacactcatataaatctcaccctttatgt

SEQ ID NO: 123321 - DNA, 80 bp, synthetic construct; identical to SEQ ID NO: 39753
  misc_feature 1..80: note = Artificially Synthesized Probe
  source 1..80: mol_type = other DNA

SEQ ID NO: 123322 - DNA, 80 bp, synthetic construct
  misc_feature 1..80: note = Artificially Synthesized Probe
  source 1..80: mol_type = other DNA
taaggcaaaaagcgataaacgggggataagtaattttatattgaaaatagaaaattcataataaagagataatctttgct

SEQ ID NO: 123323 - DNA, 80 bp, synthetic construct
  misc_feature 1..80: note = Artificially Synthesized Probe
  source 1..80: mol_type = other DNA
ttctgcctcagcctcccaaatagccaggcccacagacacacagcaccatgcccagctaatttttaaaaatttgttgtaga

SEQ ID NO: 123324 - DNA, 80 bp, synthetic construct
  misc_feature 1..80: note = Artificially Synthesized Probe
  source 1..80: mol_type = other DNA
ttctacaaatgaataagcgttctcctatcatgaatgtatctttttccagcattcatggaatcacccgcaaaaattaatca

SEQ ID NO: 123325 - DNA, 80 bp, synthetic construct; identical to SEQ ID NO: 39754
  misc_feature 1..80: note = Artificially Synthesized Probe
  source 1..80: mol_type = other DNA

SEQ ID NO: 123326 - DNA, 80 bp, synthetic construct
  misc_feature 1..80: note = Artificially Synthesized Probe
  source 1..80: mol_type = other DNA
tttttttttttttttttgagatggactcttgctctgtcaccaagctagagtacagtggcacaatctcagctcactgcaac

SEQ ID NO: 123327 - DNA, 80 bp, synthetic construct
  misc_feature 1..80: note = Artificially Synthesized Probe
  source 1..80: mol_type = other DNA
tgcccactttggcctcccaaagtgctgggattacaggtgtgagccaccgtgcctgtcctttttttttttttttttttttt

SEQ ID NO: 123328 - DNA, 80 bp, synthetic construct
  misc_feature 1..80: note = Artificially Synthesized Probe
  source 1..80: mol_type = other DNA
tttctatttttagtagagacagggtttccccatgtgggccaggctggtcttgaattcctgacctaaggtgatgcacccgc

SEQ ID NO: 123329 - DNA, 80 bp, synthetic construct
  misc_feature 1..80: note = Artificially Synthesized Probe
  source 1..80: mol_type = other DNA
tatgcggtggctcatgcctgtaatcctagaactttgggaggctgaggcaggagaattgcttgagcctaggagttcgagac

SEQ ID NO: 123330 - DNA, 80 bp, synthetic construct; identical to SEQ ID NO: 39755
  misc_feature 1..80: note = Artificially Synthesized Probe
  source 1..80: mol_type = other DNA

SEQ ID NO: 123331 - DNA, 80 bp, synthetic construct
  misc_feature 1..80: note = Artificially Synthesized Probe
  source 1..80: mol_type = other DNA
tacaggcacccaccaccacgcctggctaatttttgtatttttagtagagacagggtttcaccatgtgggccaggttggtc

SEQ ID NO: 123332 - DNA, 80 bp, synthetic construct
  misc_feature 1..80: note = Artificially Synthesized Probe
  source 1..80: mol_type = other DNA
agccaggatctgtctttttggcctttttgtagagatctctctgtttctatgaaccccatggcatcaacgggtggaggagg

SEQ ID NO: 123333 - DNA, 80 bp, synthetic construct
  misc_feature 1..80: note = Artificially Synthesized Probe
  source 1..80: mol_type = other DNA
ttctttgcaatcctatgtatttttgcattatttagaagtattcttctgagaagcaattgtaggagcgaagggaagactgg

SEQ ID NO: 123334 - DNA, 80 bp, synthetic construct; identical to SEQ ID NO: 39756
  misc_feature 1..80: note = Artificially Synthesized Probe
  source 1..80: mol_type = other DNA

SEQ ID NO: 123335 - DNA, 80 bp, synthetic construct
  misc_feature 1..80: note = Artificially Synthesized Probe
  source 1..80: mol_type = other DNA
cccagctactcaggaggctgaagcaggagaatcgtttgaacctgggaggcggaggtggcagtgagccaagatcatgctac

SEQ ID NO: 123336 - DNA, 80 bp, synthetic construct
  misc_feature 1..80: note = Artificially Synthesized Probe
  source 1..80: mol_type = other DNA
acttggatagatacattcattactttgtgacggaggtttcatgggtgaatacttatgtcaaacaccaaattttacatttt

SEQ ID NO: 123337 - DNA, 80 bp, synthetic construct
  misc_feature 1..80: note = Artificially Synthesized Probe
  source 1..80: mol_type = other DNA
ggaggaggttaagaacccttaaggggattaacatttttggtggctctggtcctactagaatttcaccagtctccagccat

SEQ ID NO: 123338 - DNA, 80 bp, synthetic construct
  misc_feature 1..80: note = Artificially Synthesized Probe
  source 1..80: mol_type = other DNA
ggaagatgccttccatattttccgagatccgctgacatctgatctcccgtggccgggggtcctatttggaatgtccatcc

SEQ ID NO: 123339 - DNA, 80 bp, synthetic construct; identical to SEQ ID NO: 39757
  misc_feature 1..80: note = Artificially Synthesized Probe
  source 1..80: mol_type = other DNA

SEQ ID NO: 123340 - DNA, 80 bp, synthetic construct
  misc_feature 1..80: note = Artificially Synthesized Probe
  source 1..80: mol_type = other DNA
ctgggctcaagagatcctcccatgtcagcctcctgagtagctgggactacaggcacatgccaccatgcccagctatttat

SEQ ID NO: 123341 - DNA, 80 bp, synthetic construct
  misc_feature 1..80: note = Artificially Synthesized Probe
  source 1..80: mol_type = other DNA
gagaatatccagtaagcaaaggagatgataccttttaaatgggggtaaaactcctattggacatcatttgttcaacaaat

SEQ ID NO: 123342 - DNA, 80 bp, synthetic construct; identical to SEQ ID NO: 39758
  misc_feature 1..80: note = Artificially Synthesized Probe
  source 1..80: mol_type = other DNA

SEQ ID NO: 123343 - DNA, 80 bp, synthetic construct
  misc_feature 1..80: note = Artificially Synthesized Probe
  source 1..80: mol_type = other DNA
ctgaggtgggaggattgctggaacccaggaggtcaaagctgcagtgagttgagattgcaccactgcacttcagcctgggc

SEQ ID NO: 123344 - DNA, 80 bp, synthetic construct
  misc_feature 1..80: note = Artificially Synthesized Probe
  source 1..80: mol_type = other DNA
tcagcgccactgcagcccaggagtggtaggaaagggtgcgagtggcttccagcctgggtgatgagacccgtgccagtcct

SEQ ID NO: 123345 - DNA, 80 bp, synthetic construct
  misc_feature 1..80: note = Artificially Synthesized Probe
  source 1..80: mol_type = other DNA
ggaggaagagtttgcagcagaaggaacacccagagcgaggcagatacataactggtgtgaaaaaagaaaggaaaaaaatc

SEQ ID NO: 123346 - DNA, 80 bp, synthetic construct
  misc_feature 1..80: note = Artificially Synthesized Probe
  source 1..80: mol_type = other DNA
tgggaaggatgaatgagagccgatttactgcatgttatattttctcgggttttaaactgagtgaatatatcacgtgttca

SEQ ID NO: 123347 - DNA, 80 bp, synthetic construct; identical to SEQ ID NO: 39759
  misc_feature 1..80: note = Artificially Synthesized Probe
  source 1..80: mol_type = other DNA

SEQ ID NO: 123348 - DNA, 80 bp, synthetic construct
  misc_feature 1..80: note = Artificially Synthesized Probe
  source 1..80: mol_type = other DNA
tgggctttaaatttaacagacctggctgggtgcggtggctcatgcctgtaatcccaacactttgagaggtcaaggcgggt

SEQ ID NO: 123349 - DNA, 80 bp, synthetic construct
  misc_feature 1..80: note = Artificially Synthesized Probe
  source 1..80: mol_type = other DNA
tgaacccgggaggtggagtttgcagtgagccgagatcatgccattgcactccagcctgggcagcaaagtgagactccatc

SEQ ID NO: 123350 - DNA, 80 bp, synthetic construct
  misc_feature 1..80: note = Artificially Synthesized Probe
  source 1..80: mol_type = other DNA
aaaccagccagagacaatttcacctgcccaggtattcccccaagaccatcttcctccttcctttattgaaccaatgttta

SEQ ID NO: 123351 - DNA, 80 bp, synthetic construct
  misc_feature 1..80: note = Artificially Synthesized Probe
  source 1..80: mol_type = other DNA
tcagcctcctgagtagctgggactataggcgtgcaccactatgcccagctaatttttggtattttttgtagagatagggt

SEQ ID NO: 123352 - DNA, 80 bp, synthetic construct; identical to SEQ ID NO: 39760
  misc_feature 1..80: note = Artificially Synthesized Probe
  source 1..80: mol_type = other DNA

SEQ ID NO: 123353 - DNA, 80 bp, synthetic construct
  misc_feature 1..80: note = Artificially Synthesized Probe
  source 1..80: mol_type = other DNA
ctgcaaagagagaggatcccgggtatctccctccttacaaccaccgccacctcctagtgccttagaagccactgacagcc

SEQ ID NO: 123354 - DNA, 80 bp, synthetic construct
  misc_feature 1..80: note = Artificially Synthesized Probe
  source 1..80: mol_type = other DNA
atccaaactcacaaagagctggtggggggattcacacctaagtccgtctgcactttaaatcgctccattgactcattgca

SEQ ID NO: 123355 - DNA, 80 bp, synthetic construct
  misc_feature 1..80: note = Artificially Synthesized Probe
  source 1..80: mol_type = other DNA
aaggaagggaaaatttatacatgattaatgtggaaaaagcaaggaaagataaggtggctagatgacagatgccataacag

SEQ ID NO: 123356 - DNA, 80 bp, synthetic construct
  misc_feature 1..80: note = Artificially Synthesized Probe
  source 1..80: mol_type = other DNA
ctgaggcgggcggatcacgaggtcaggagatcaagaccatcctggctaacacagtgaaaccccgtctctactaaaaatac

SEQ ID NO: 123357 - DNA, 80 bp, synthetic construct; identical to SEQ ID NO: 39713
  misc_feature 1..80: note = Artificially Synthesized Probe
  source 1..80: mol_type = other DNA

SEQ ID NO: 123358 - DNA, 80 bp, synthetic construct; identical to SEQ ID NO: 39761
  misc_feature 1..80: note = Artificially Synthesized Probe
  source 1..80: mol_type = other DNA

SEQ ID NO: 123359 - DNA, 80 bp, synthetic construct
  misc_feature 1..80: note = Artificially Synthesized Probe
  source 1..80: mol_type = other DNA
gctctggagttcaaggctgcagtcagccatgattgcaccactgcactccaatctgggtgatagagtgagatcctgcctca

SEQ ID NO: 123360 - DNA, 80 bp, synthetic construct
  misc_feature 1..80: note = Artificially Synthesized Probe
  source 1..80: mol_type = other DNA
tgagaccagcctggccaacatggtgaaaccccatctctactaaaaatacaaaaattagccgggcatggtggcaggatcct

SEQ ID NO: 123361 - DNA, 80 bp, synthetic construct
  misc_feature 1..80: note = Artificially Synthesized Probe
  source 1..80: mol_type = other DNA
aggagaggagaggaaagaagaaaggagaggacaggagaggggaggggaagggagggaagggaaaaggaggggaggggagg

SEQ ID NO: 123362 - DNA, 80 bp, synthetic construct; identical to SEQ ID NO: 39762
  misc_feature 1..80: note = Artificially Synthesized Probe
  source 1..80: mol_type = other DNA

SEQ ID NO: 123363 - DNA, 80 bp, synthetic construct
  misc_feature 1..80: note = Artificially Synthesized Probe
  source 1..80: mol_type = other DNA
gaggactcatttagttgtttatgtggaaaaaattgtttaaggataaaaaggctcttttttttttttttctgggcgtggtg

SEQ ID NO: 123364 - DNA, 80 bp, synthetic construct
  misc_feature 1..80: note = Artificially Synthesized Probe
  source 1..80: mol_type = other DNA
aggctgaggcaggagaattgtttgaggccaggggttcaagaccagcctcctcaatatagcaatatagcaagaccccatct

SEQ ID NO: 123365 - DNA, 80 bp, synthetic construct; identical to SEQ ID NO: 39763
  misc_feature 1..80: note = Artificially Synthesized Probe
  source 1..80: mol_type = other DNA

SEQ ID NO: 123366 - DNA, 80 bp, synthetic construct
  misc_feature 1..80: note = Artificially Synthesized Probe
  source 1..80: mol_type = other DNA
gaagtggggaggtagtatttgaacccagactgcctgtctctgatactacatcatcacacattgcctttctctccatttcc

SEQ ID NO: 123367 - DNA, 80 bp, synthetic construct
  misc_feature 1..80: note = Artificially Synthesized Probe
  source 1..80: mol_type = other DNA
tttttgagacagagtctcactctatcgcccaggctgaagtgcagtggtgcgatcttggctcactgcaccctccacctccc

SEQ ID NO: 123368 - DNA, 80 bp, synthetic construct
  misc_feature 1..80: note = Artificially Synthesized Probe
  source 1..80: mol_type = other DNA
acgccctgctaatttttgtatttttagtggagacagggtttcatcacgttggccaggctggtctcgaactctggacctca

SEQ ID NO: 123369 - DNA, 80 bp, synthetic construct
  misc_feature 1..80: note = Artificially Synthesized Probe
  source 1..80: mol_type = other DNA
ggcctcccaaagtgctgggattacaagcgtgagccattgcacccagcctcctttgcctttttaaggaagaagttccatgg

SEQ ID NO: 123370 - DNA, 80 bp, synthetic construct; identical to SEQ ID NO: 39764
  misc_feature 1..80: note = Artificially Synthesized Probe
  source 1..80: mol_type = other DNA

SEQ ID NO: 123371 - DNA, 80 bp, synthetic construct
  misc_feature 1..80: note = Artificially Synthesized Probe
  source 1..80: mol_type = other DNA
aggcaaagaggagcaagtcacgtcttacatggatggcagcaggcaaagagagaatgagagccaagtgaaaggggtttccc

SEQ ID NO: 123372 - DNA, 80 bp, synthetic construct
  misc_feature 1..80: note = Artificially Synthesized Probe
  source 1..80: mol_type = other DNA
caaactatatcagcattcccagtttccaacccccttgatcttttccaggtgattgtccagcggactctggctgccaagaa

SEQ ID NO: 123373 - DNA, 80 bp, synthetic construct
  misc_feature 1..80: note = Artificially Synthesized Probe
  source 1..80: mol_type = other DNA
ttattctaaacatattattagaagcctcaagagaatgtgactacagtcctttctctctttttctaagacagagtctcatt

SEQ ID NO: 123374 - DNA, 80 bp, synthetic construct
  misc_feature 1..80: note = Artificially Synthesized Probe
  source 1..80: mol_type = other DNA
tgctatgttgctcaggctggtcttgaactcctggcctcaagctatcctcctgccttggcctctcaaagtgctgagattgc

SEQ ID NO: 123375 - DNA, 80 bp, synthetic construct; identical to SEQ ID NO: 39765
  misc_feature 1..80: note = Artificially Synthesized Probe
  source 1..80: mol_type = other DNA

SEQ ID NO: 123376 - DNA, 80 bp, synthetic construct
  misc_feature 1..80: note = Artificially Synthesized Probe
  source 1..80: mol_type = other DNA
agctcactgcagcctcagacttctgggctgaagggatcctttcgcctcagcctcccaagtagctgagactacaggcatgc

SEQ ID NO: 123377 - DNA, 80 bp, synthetic construct
  misc_feature 1..80: note = Artificially Synthesized Probe
  source 1..80: mol_type = other DNA
ctgtcaccaggctggaatgcagtggtgcaatcatagctcaatgcagtctcaaactcctgggcttgggcccagggcagtgg

SEQ ID NO: 123378 - DNA, 80 bp, synthetic construct
  misc_feature 1..80: note = Artificially Synthesized Probe
  source 1..80: mol_type = other DNA
ctttcctagtgatgagactgaggcatctctgtctaggcatctagtgactctatgctgtttctcaacattggttcaatggg

SEQ ID NO: 123379 - DNA, 80 bp, synthetic construct; identical to SEQ ID NO: 39766
  misc_feature 1..80: note = Artificially Synthesized Probe
  source 1..80: mol_type = other DNA

SEQ ID NO: 123380 - DNA, 80 bp, synthetic construct
  misc_feature 1..80: note = Artificially Synthesized Probe
  source 1..80: mol_type = other DNA
gctaatttttgtatttttagcagagatggggtttcaccatgttggccaggatggtctcgatctcttgaccttgtgatcct

SEQ ID NO: 123381 - DNA, 80 bp, synthetic construct
  misc_feature 1..80: note = Artificially Synthesized Probe
  source 1..80: mol_type = other DNA
caattctcccacctcagtctccttagtagctggactacgggtgcccaccaccatgcccagctgatttttataatttttgt

SEQ ID NO: 123382 - DNA, 80 bp, synthetic construct
  misc_feature 1..80: note = Artificially Synthesized Probe
  source 1..80: mol_type = other DNA
tagagcatttgctttagtttttttcttaatgtggtaagggaataggtttataccatggggataaatgataccgaggaggg

SEQ ID NO: 123383 - DNA, 80 bp, synthetic construct
  misc_feature 1..80: note = Artificially Synthesized Probe
  source 1..80: mol_type = other DNA
tcctacataatgttacacagaagctaagaaagggtaggatgaagtggtttgtagttggctcagaagcttagtcaaaataa

SEQ ID NO: 123384 - DNA, 80 bp, synthetic construct; identical to SEQ ID NO: 39767
  misc_feature 1..80: note = Artificially Synthesized Probe
  source 1..80: mol_type = other DNA

SEQ ID NO: 123385 - DNA, 80 bp, synthetic construct
  misc_feature 1..80: note = Artificially Synthesized Probe
  source 1..80: mol_type = other DNA
aacgataccagacccgctctctaccaaaaacaatttttaaaaattagccaggtgtggtggtgctcacctgtggttccagc

SEQ ID NO: 123386 - DNA, 80 bp, synthetic construct
  misc_feature 1..80: note = Artificially Synthesized Probe
  source 1..80: mol_type = other DNA
cattcattgtgcacttgctaagggtcagtccctatgaaaagagcttcagagtggagtgtggatatgaatatggattctga

SEQ ID NO: 123387 - DNA, 80 bp, synthetic construct; identical to SEQ ID NO: 39768
  misc_feature 1..80: note = Artificially Synthesized Probe
  source 1..80: mol_type = other DNA

SEQ ID NO: 123388 - DNA, 80 bp, synthetic construct
  misc_feature 1..80: note = Artificially Synthesized Probe
  source 1..80: mol_type = other DNA
gcagtttgagaccagcctgggcaacgtgatgaaacctcgtatctacaaaaaatacaaaaattagccaggcatggtggcat

SEQ ID NO: 123389 - DNA, 80 bp, synthetic construct
  misc_feature 1..80: note = Artificially Synthesized Probe
  source 1..80: mol_type = other DNA
atcccagctacctgggaggctgaggcaggcgaatcgcttgggggcaggagaatcgcttgaagccaggaggcagaggttgc

SEQ ID NO: 123390 - DNA, 80 bp, synthetic construct
  misc_feature 1..80: note = Artificially Synthesized Probe
  source 1..80: mol_type = other DNA
catgaattcaacaaatattttgagagccaattatcttccaagcgttattctagaacactctgggggcccataagtgaaca

SEQ ID NO: 123391 - DNA, 80 bp, synthetic construct
  misc_feature 1..80: note = Artificially Synthesized Probe
  source 1..80: mol_type = other DNA
accagcctgggcaacatggcaagatcccatctctggaaaaaaaaatacacacacacacacacacacacacacgcacacac

SEQ ID NO: 123392 - DNA, 80 bp, synthetic construct
  misc_feature 1..80: note = Artificially Synthesized Probe
  source 1..80: mol_type = other DNA
acataaataatttttgactgtgctaaatgccaggaggaggatgcacaaggagatatcaaaaagaatgtcagatcagagct

SEQ ID NO: 123393 - DNA, 80 bp, synthetic construct; identical to SEQ ID NO: 39769
  misc_feature 1..80: note = Artificially Synthesized Probe
  source 1..80: mol_type = other DNA

SEQ ID NO: 123394 - DNA, 80 bp, synthetic construct
  misc_feature 1..80: note = Artificially Synthesized Probe
  source 1..80: mol_type = other DNA
ggtgcgatctccactcactgcaacctctgcctcctgggttgaagcgattctcctgcctcagcctcctgggattacaggca

SEQ ID NO: 123395 - DNA, 80 bp, synthetic construct
  misc_feature 1..80: note = Artificially Synthesized Probe
  source 1..80: mol_type = other DNA
attattaaatgagacataacaccatgttccatgaacctaggactttgtaatgtagcagatgagtctcatactcatggaaa

SEQ ID NO: 123396 - DNA, 80 bp, synthetic construct; identical to SEQ ID NO: 39770
  misc_feature 1..80: note = Artificially Synthesized Probe
  source 1..80: mol_type = other DNA

SEQ ID NO: 123397 - DNA, 80 bp, synthetic construct
  misc_feature 1..80: note = Artificially Synthesized Probe
  source 1..80: mol_type = other DNA
caaatatttatcatttctttgtgttgggggcaatcaaaatccactctcgactatttgaaaatgtacaataaattgttgtg

SEQ ID NO: 123398 - DNA, 80 bp, synthetic construct
  misc_feature 1..80: note = Artificially Synthesized Probe
  source 1..80: mol_type = other DNA
tttcaagcttccacatatgagtgagagtatgcagtatttatctttctgtgcctggcttatttcacttaacataatattct

SEQ ID NO: 123399 - DNA, 80 bp, synthetic construct
  misc_feature 1..80: note = Artificially Synthesized Probe
  source 1..80: mol_type = other DNA
gagtgttgcaataaatggggtgcaggtatccatttgctatattgattccaattgctttggatatgtattaatccattttc

SEQ ID NO: 123400 - DNA, 80 bp, synthetic construct; identical to SEQ ID NO: 39714
  misc_feature 1..80: note = Artificially Synthesized Probe
  source 1..80: mol_type = other DNA

SEQ ID NO: 123401 - DNA, 80 bp, synthetic construct; identical to SEQ ID NO: 39771
  misc_feature 1..80: note = Artificially Synthesized Probe
  source 1..80: mol_type = other DNA

SEQ ID NO: 123402 - DNA, 80 bp, synthetic construct
  misc_feature 1..80: note = Artificially Synthesized Probe
  source 1..80: mol_type = other DNA
atcatatggtagttctattttcagttttttgaggaacctccatagttttccatactagctgtagtaatttacatctccac

SEQ ID NO: 123403 - DNA, 80 bp, synthetic construct
  misc_feature 1..80: note = Artificially Synthesized Probe
  source 1..80: mol_type = other DNA
tgtgccagccacctatttttttaacaagtccactagaaggttgagaaccccaggtctaaagggccagtttcagggccaag

SEQ ID NO: 123404 - DNA, 80 bp, synthetic construct
  misc_feature 1..80: note = Artificially Synthesized Probe
  source 1..80: mol_type = other DNA
tgcctaaaagtattttctgatcctgagttcttgtgagcctggaaaaaaaccctcttctgctaagtccatctgagaaatgg

SEQ ID NO: 123405 - DNA, 80 bp, synthetic construct
  misc_feature 1..80: note = Artificially Synthesized Probe
  source 1..80: mol_type = other DNA
aggttttaagctccacgtgcattaggtatttgtcctaatgctctccctccccttgccctccaccccccgacaggccccag

SEQ ID NO: 123406 - DNA, 80 bp, synthetic construct; identical to SEQ ID NO: 39772
  misc_feature 1..80: note = Artificially Synthesized Probe
  source 1..80: mol_type = other DNA

SEQ ID NO: 123407 - DNA, 80 bp, synthetic construct
  misc_feature 1..80: note = Artificially Synthesized Probe
  source 1..80: mol_type = other DNA
agctacaggctaggaggcttaggcaggagaatcgcttgaacctggaagaggaagttgcagtgagccgagattgtgccacg

SEQ ID NO: 123408 - DNA, 80 bp, synthetic construct
  misc_feature 1..80: note = Artificially Synthesized Probe
  source 1..80: mol_type = other DNA
gagccaagatggcaccactgaactccagcctgggcgacagagcaagaccccatctcaaaaacacgcgcgcgcgcgcacac

SEQ ID NO: 123409 - DNA, 80 bp, synthetic construct
  misc_feature 1..80: note = Artificially Synthesized Probe
  source 1..80: mol_type = other DNA
ggcctcagtttatctgtctttgaaatagggataataacagtatcttcccccatagagttgtgaaaattaaatgaggtgta

SEQ ID NO: 123410 - DNA, 80 bp, synthetic construct; identical to SEQ ID NO: 39773
  misc_feature 1..80: note = Artificially Synthesized Probe
  source 1..80: mol_type = other DNA

SEQ ID NO: 123411 - DNA, 80 bp, synthetic construct
  misc_feature 1..80: note = Artificially Synthesized Probe
  source 1..80: mol_type = other DNA
atttcctggagagtctgttgctcataattaaaatttgtaattagtcattgtcattttcattcagagcagggaacttccct

SEQ ID NO: 123412 - DNA, 80 bp, synthetic construct
  misc_feature 1..80: note = Artificially Synthesized Probe
  source 1..80: mol_type = other DNA
agctgagatcgtgccactgccctccagcctgggcgacagagcaagaggctccgtctcaaaaaaaaaaaaaaaaaagacat

SEQ ID NO: 123413 - DNA, 80 bp, synthetic construct
  misc_feature 1..80: note = Artificially Synthesized Probe
  source 1..80: mol_type = other DNA
agtctagactcttttttatttcattgagctataaacttccatatgataagcctgtgtccggccccatgttgcctgggcct

SEQ ID NO: 123414 - DNA, 80 bp, synthetic construct; identical to SEQ ID NO: 39774
  misc_feature 1..80: note = Artificially Synthesized Probe
  source 1..80: mol_type = other DNA

SEQ ID NO: 123415 - DNA, 80 bp, synthetic construct
  misc_feature 1..80: note = Artificially Synthesized Probe
  source 1..80: mol_type = other DNA
acctcccttccgcccccagggctccgtgggctgatgatggctgtgatggtggcggctctcatgtcctccctcacctccat

SEQ ID NO: 123416 - DNA, 80 bp, synthetic construct
  misc_feature 1..80: note = Artificially Synthesized Probe
  source 1..80: mol_type = other DNA
gttcagccagcaacctatccaggctgaagagcattaggactccatgtgcaagacattcattcattcaggagatgctgaac

SEQ ID NO: 123417 - DNA, 80 bp, synthetic construct
  misc_feature 1..80: note = Artificially Synthesized Probe
  source 1..80: mol_type = other DNA
tggatcacttgaggtcaggtgttcaagaccaggctggccaacatggtgaaacctcatctctactaaaaatacaaaaatta

SEQ ID NO: 123418 - DNA, 80 bp, synthetic construct
  misc_feature 1..80: note = Artificially Synthesized Probe
  source 1..80: mol_type = other DNA
gacagagtgagactctgtctcaaaaaaaaaaattaaaataataaaataaaataagctgggagtgttggcatgtgtctgta

SEQ ID NO: 123419 - DNA, 80 bp, synthetic construct; identical to SEQ ID NO: 39775
  misc_feature 1..80: note = Artificially Synthesized Probe
  source 1..80: mol_type = other DNA

SEQ ID NO: 123420 - DNA, 80 bp, synthetic construct
  misc_feature 1..80: note = Artificially Synthesized Probe
  source 1..80: mol_type = other DNA
gaaaaggtagctctggatggctcccactatgccagaaccaagtgctgccccttgaggactgggataggatgggaggggag

SEQ ID NO: 123421 - DNA, 80 bp, synthetic construct
  misc_feature 1..80: note = Artificially Synthesized Probe
  source 1..80: mol_type = other DNA
aggtgggtggatcacttgaggtcaggagtttgagaccagcctggccaacatggtgaaagcccatcattactcaaaataca

SEQ ID NO: 123422 - DNA, 80 bp, synthetic construct; identical to SEQ ID NO: 39776
  misc_feature 1..80: note = Artificially Synthesized Probe
  source 1..80: mol_type = other DNA

SEQ ID NO: 123423 - DNA, 80 bp, synthetic construct
  misc_feature 1..80: note = Artificially Synthesized Probe
  source 1..80: mol_type = other DNA
aattgtgctctgtttatttccctcctttttctttcattatgaaacgtttcagacacacagaagttataaagaatcacgca

SEQ ID NO: 123424 - DNA, 80 bp, synthetic construct
  misc_feature 1..80: note = Artificially Synthesized Probe
  source 1..80: mol_type = other DNA
ggcgtctctaagatgatcttgctctgattttgcagggtgccttctggggcctgatctcgggcctgctcctgggcttggtt

SEQ ID NO: 123425 - DNA, 80 bp, synthetic construct
  misc_feature 1..80: note = Artificially Synthesized Probe
  source 1..80: mol_type = other DNA
ccaaggagatggtacatttgggctgatggctagatccgttgagactttttgttggaagtgacagaaaactgactcaaact

SEQ ID NO: 123426 - DNA, 80 bp, synthetic construct
  misc_feature 1..80: note = Artificially Synthesized Probe
  source 1..80: mol_type = other DNA
tcttaggtcccatatggagcccagtatcttctagagatacatcctcttttactgtcattaagtaaacataaggctggggt

SEQ ID NO: 123427 - DNA, 80 bp, synthetic construct
  misc_feature 1..80: note = Artificially Synthesized Probe
  source 1..80: mol_type = other DNA
gttactagagaggctgaggtgggaggattgccagagcccaggagttttgatggtgcagtgagctatgaccatgccactgc

SEQ ID NO: 123428 - DNA, 80 bp, synthetic construct; identical to SEQ ID NO: 39777
  misc_feature 1..80: note = Artificially Synthesized Probe
  source 1..80: mol_type = other DNA

SEQ ID NO: 123429 - DNA, 80 bp, synthetic construct
  misc_feature 1..80: note = Artificially Synthesized Probe
  source 1..80: mol_type = other DNA
gccagagaaacggatgagctgaaatgaccagttctggggtcctgcaatactctagggtgagggttaagctctggggatta

SEQ ID NO: 123430 - DNA, 80 bp, synthetic construct
  misc_feature 1..80: note = Artificially Synthesized Probe
  source 1..80: mol_type = other DNA
caaaggctgagtgtggggttgggtggggagtgtgagaaaaggatggacaaccccggccccacctccaccacaaatctcat

SEQ ID NO: 123431 - DNA, 80 bp, synthetic construct; identical to SEQ ID NO: 39778
  misc_feature 1..80: note = Artificially Synthesized Probe
  source 1..80: mol_type = other DNA

SEQ ID NO: 123432 - DNA, 80 bp, synthetic construct
  misc_feature 1..80: note = Artificially Synthesized Probe
  source 1..80: mol_type = other DNA
agtttttagtaactttcaacaagcttcctacgggcactaacagcaaacaaacacttgttgagtgcctacggagacacggt

SEQ ID NO: 123433 - DNA, 80 bp, synthetic construct; identical to SEQ ID NO: 39715
  misc_feature 1..80: note = Artificially Synthesized Probe
  source 1..80: mol_type = other DNA

SEQ ID NO: 123434 - DNA, 80 bp, synthetic construct
  misc_feature 1..80: note = Artificially Synthesized Probe
  source 1..80: mol_type = other DNA
gcggcttgcagacatattttggcttagcccacctacagtttcaacaaaatgtgagttaacatttaaaaattgagagattt

SEQ ID NO: 123435 - DNA, 80 bp, synthetic construct
  misc_feature 1..80: note = Artificially Synthesized Probe
  source 1..80: mol_type = other DNA
atagtcccagctacttgggaggctgaggcaggagaatcgcttgaacctgggaggtggaggttgcagtgagccgagatcac

SEQ ID NO: 123436 - DNA, 80 bp, synthetic construct
  misc_feature 1..80: note = Artificially Synthesized Probe
  source 1..80: mol_type = other DNA
acagaccacctctacggtcttcctttgctgggttctttctaggtgacatgaccccaaagcagtccaaagtggtgaaggcc

SEQ ID NO: 123437 - DNA, 80 bp, synthetic construct; identical to SEQ ID NO: 39779
  misc_feature 1..80: note = Artificially Synthesized Probe
  source 1..80: mol_type = other DNA

SEQ ID NO: 123438 - DNA, 80 bp, synthetic construct
  misc_feature 1..80: note = Artificially Synthesized Probe
  source 1..80: mol_type = other DNA
cccccaaccaccccaaccagaccctcctgaggcagcctgggagccaaacatcaccatgcaagggacaaagggtgcccggg

SEQ ID NO: 123439 - DNA, 80 bp, synthetic construct
  misc_feature 1..80: note = Artificially Synthesized Probe
  source 1..80: mol_type = other DNA
tccccagggcctagcacagagcatggcacatagctgatgcctaataaatgtttgttctactgagtccccagggcctagca

SEQ ID NO: 123440 - DNA, 80 bp, synthetic construct
  misc_feature 1..80: note = Artificially Synthesized Probe
  source 1..80: mol_type = other DNA
tgtttgttgtacttagtccccagggtctagcacagagcatggcacacaactaatgcctaatgtttgttctactgagtccc

SEQ ID NO: 123441 - DNA, 80 bp, synthetic construct
  misc_feature 1..80: note = Artificially Synthesized Probe
  source 1..80: mol_type = other DNA
agaaagcttgtcatacaccaggacaatggagtgtgtttgtggggtgggcatggtggtatgaagccagcagccggcagcca

SEQ ID NO: 123442 - DNA, 80 bp, synthetic construct
  misc_feature 1..80: note = Artificially Synthesized Probe
  source 1..80: mol_type = other DNA
tgcctaataaatgtttatttcactgagtccccagggcctagtacagagcctggtacatagttgatgcctaataacatttg

SEQ ID NO: 123443 - DNA, 80 bp, synthetic construct; identical to SEQ ID NO: 39716
  misc_feature 1..80: note = Artificially Synthesized Probe
  source 1..80: mol_type = other DNA

SEQ ID NO: 123444 - DNA, 80 bp, synthetic construct
  misc_feature 1..80: note = Artificially Synthesized Probe
  source 1..80: mol_type = other DNA
tcacgtttgcctcaaagggctgtgctccatgcctggcactcaaatagaaatcgtgctcaccaagtgttagggccgattct

SEQ ID NO: 123445 - DNA, 80 bp, synthetic construct
  misc_feature 1..80: note = Artificially Synthesized Probe
  source 1..80: mol_type = other DNA
ggagactcaggaagggcttggaatcggtgccagtttcgccggctgtgggccccacggcgatgatgaataacttgtttatc

SEQ ID NO: 123446 - DNA, 80 bp, synthetic construct; identical to SEQ ID NO: 39717
  misc_feature 1..80: note = Artificially Synthesized Probe
  source 1..80: mol_type = other DNA

SEQ ID NO: 123447 - DNA, 80 bp, synthetic construct
  misc_feature 1..80: note = Artificially Synthesized Probe
  source 1..80: mol_type = other DNA
gtggcataatcacagctcactgcaacctccgcctcccgggttcaagcgatctttctgccttagcctccaaagtagctggg

SEQ ID NO: 123448 - DNA, 80 bp, synthetic construct
  misc_feature 1..80: note = Artificially Synthesized Probe
  source 1..80: mol_type = other DNA
ccagcctcctcccctgtaaagtctgatgagaacattacttacctaatggggcttcacccttgagacaacccacaagggtc

SEQ ID NO: 123449 - DNA, 80 bp, synthetic construct
  misc_feature 1..80: note = Artificially Synthesized Probe
  source 1..80: mol_type = other DNA
gaaagggagtctccacctctaggccttctctcactttcttgcacagagaaaggttaggttaggttagccttgtgtgtgtg

SEQ ID NO: 123450 - DNA, 80 bp, synthetic construct
  misc_feature 1..80: note = Artificially Synthesized Probe
  source 1..80: mol_type = other DNA
ggcctccaaattatttctctaatctactccctctgctatgatctgattgtgcatgtccctctgtccccagattcctacat

SEQ ID NO: 123451 - DNA, 80 bp, synthetic construct; identical to SEQ ID NO: 39718
  misc_feature 1..80: note = Artificially Synthesized Probe
  source 1..80: mol_type = other DNA

SEQ ID NO: 123452 - DNA, 80 bp, synthetic construct; identical to SEQ ID NO: 39709
  misc_feature 1..80: note = Artificially Synthesized Probe
  source 1..80: mol_type = other DNA

SEQ ID NO: 123453 - DNA, 80 bp, synthetic construct
  misc_feature 1..80: note = Artificially Synthesized Probe
  source 1..80: mol_type = other DNA
aaaaaagagaaaaagtgattgtgccactgcactccagtctggacaccaaagtgaaaccttgtctcaaaataaataaataa

SEQ ID NO: 123454 - DNA, 80 bp, synthetic construct
  misc_feature 1..80: note = Artificially Synthesized Probe
  source 1..80: mol_type = other DNA
ccaaacgtcggcagaggctggagacggctctctagtgctgggtgtggagtgaggcaccacccttgccctgaagcctgggg

SEQ ID NO: 123455 - DNA, 80 bp, synthetic construct
  misc_feature 1..80: note = Artificially Synthesized Probe
  source 1..80: mol_type = other DNA
cagtcgtgtacatgtgtgtcatcaggggcattgagactacagggaaggtgagagctggcagggcctgatcccctctcttg

SEQ ID NO: 123456 - DNA, 80 bp, synthetic construct; identical to SEQ ID NO: 39790
  misc_feature 1..80: note = Artificially Synthesized Probe
  source 1..80: mol_type = other DNA

SEQ ID NO: 123457 - DNA, 80 bp, synthetic construct
  misc_feature 1..80: note = Artificially Synthesized Probe
  source 1..80: mol_type = other DNA
ttgggtttagctctgtcctcagatgtgtttccatgtgccccatctgtttttttttattcttgtttctctctttctctagg

SEQ ID NO: 123458 - DNA, 80 bp, synthetic construct
  misc_feature 1..80: note = Artificially Synthesized Probe
  source 1..80: mol_type = other DNA
gcattttatcccatttcccttcccaggctttgcgctattgttgtcatacattttgcttataacatgttatataaacagca

SEQ ID NO: 123459 - DNA, 80 bp, synthetic construct; identical to SEQ ID NO: 39791
  misc_feature 1..80: note = Artificially Synthesized Probe
  source 1..80: mol_type = other DNA

SEQ ID NO: 123460 - DNA, 80 bp, synthetic construct
  misc_feature 1..80: note = Artificially Synthesized Probe
  source 1..80: mol_type = other DNA
gtgggggtcttcatgcttgagaggactggaattactgaattagacaaagcagccagccagaaattccaaataatcctatt

SEQ ID NO: 123461 - DNA, 80 bp, synthetic construct
  misc_feature 1..80: note = Artificially Synthesized Probe
  source 1..80: mol_type = other DNA
ataaaaaaaaaaaaaaattagccagccgtggtgttgggagcctgtaatcccaactacttgcgaggctgaggcagaagaat

SEQ ID NO: 123462 - DNA, 80 bp, synthetic construct
  misc_feature 1..80: note = Artificially Synthesized Probe
  source 1..80: mol_type = other DNA
cctgcttaagaaaagattctcaacaggcagaaaatgcaggaaatgcgcacaaatggaaaaaacaaaaagaaacacccgtc

SEQ ID NO: 123463 - DNA, 80 bp, synthetic construct
  misc_feature 1..80: note = Artificially Synthesized Probe
  source 1..80: mol_type = other DNA
agtgagagaggagtgtccatttatgctcttccatgtggatgtctagtgtgtagacccttgtctacagctgatgagaagtg

SEQ ID NO: 123464 - DNA, 80 bp, synthetic construct; identical to SEQ ID NO: 39792
  misc_feature 1..80: note = Artificially Synthesized Probe
  source 1..80: mol_type = other DNA

SEQ ID NO: 123465 - DNA, 80 bp, synthetic construct
  misc_feature 1..80: note = Artificially Synthesized Probe
  source 1..80: mol_type = other DNA
ccccaccatcccccaaggtgcacccccatccgtcctggtcaatcccataccagaggcagccactctgaccacaagggcgg

SEQ ID NO: 123466 - DNA, 80 bp, synthetic construct
  misc_feature 1..80: note = Artificially Synthesized Probe
  source 1..80: mol_type = other DNA
caacaaaaggactcatctacttgttcactcccaacgtaagtgggtcttggatcaaagttcagggcctccagcacacacat

SEQ ID NO: 123467 - DNA, 80 bp, synthetic construct
  misc_feature 1..80: note = Artificially Synthesized Probe
  source 1..80: mol_type = other DNA
agtgagcctggggcctcaggaaagaggtcaggtttggagtgggcctggaggactcaggaaagacatcaggtttggagtga

SEQ ID NO: 123468 - DNA, 80 bp, synthetic construct
  misc_feature 1..80: note = Artificially Synthesized Probe
  source 1..80: mol_type = other DNA
ctggaggactcaggaaagacatcaggtttggagtgagccaggggcctcaggaaagaggtcaggtttggagtgagcttggg

SEQ ID NO: 123469 - DNA, 80 bp, synthetic construct; identical to SEQ ID NO: 39793
  misc_feature 1..80: note = Artificially Synthesized Probe
  source 1..80: mol_type = other DNA

SEQ ID NO: 123470 - DNA, 80 bp, synthetic construct
  misc_feature 1..80: note = Artificially Synthesized Probe
  source 1..80: mol_type = other DNA
agtttccaggggctggtgtgggagtgggcacctgggtatgggcatgtctgcccggagtcctagcaaaagacagaggacac

SEQ ID NO: 123471 - DNA, 80 bp, synthetic construct
  misc_feature 1..80: note = Artificially Synthesized Probe
  source 1..80: mol_type = other DNA
acgttctcatgtgcgcctgacagccaccggctcattcggccacatcccggacaggggcctggcatttgccgtgtacagag

SEQ ID NO: 123472 - DNA, 80 bp, synthetic construct
  misc_feature 1..80: note = Artificially Synthesized Probe
  source 1..80: mol_type = other DNA
ccctcgctgcctgtgctgcggctcgatctgctaagagtcaccagagcatgcaaggttgtgggggcagcaggcttcacgca

SEQ ID NO: 123473 - DNA, 80 bp, synthetic construct; identical to SEQ ID NO: 39794
  misc_feature 1..80: note = Artificially Synthesized Probe
  source 1..80: mol_type = other DNA

SEQ ID NO: 123474 - DNA, 80 bp, synthetic construct
  misc_feature 1..80: note = Artificially Synthesized Probe
  source 1..80: mol_type = other DNA
gaacctgagataagaacctcacgccacagtctgggccctcacggcagctcccagcacgtccggagctggctgcaggaaga

SEQ ID NO: 123475 - DNA, 80 bp, synthetic construct
  misc_feature 1..80: note = Artificially Synthesized Probe
  source 1..80: mol_type = other DNA
tgatatcttaatatgcacagatccctacaaagtgcaattccacggatcataaagtgcatagcccagtgcactgtgatgaa

SEQ ID NO: 123476 - DNA, 80 bp, synthetic construct
  misc_feature 1..80: note = Artificially Synthesized Probe
  source 1..80: mol_type = other DNA
aatgtttgtgatcgacaccttacttccttgaactcacactggagctgcacttgtgtgcgtttctcctttggagatgattt

SEQ ID NO: 123477 - DNA, 80 bp, synthetic construct
  misc_feature 1..80: note = Artificially Synthesized Probe
  source 1..80: mol_type = other DNA
gccattctgagactccaggactggcagcagcagcccttgggtcagagaaggggcatcccaggcgggagagagggtcaagg

SEQ ID NO: 123478 - DNA, 80 bp, synthetic construct; identical to SEQ ID NO: 39795
  misc_feature 1..80: note = Artificially Synthesized Probe
  source 1..80: mol_type = other DNA

SEQ ID NO: 123479 - DNA, 80 bp, synthetic construct
  misc_feature 1..80: note = Artificially Synthesized Probe
  source 1..80: mol_type = other DNA
tggttggaaaagggtctttgcagatgtaattaagtaggatcggtctctctggagtagggtaggccctaaatccaataacc

SEQ ID NO: 123480 - DNA, 80 bp, synthetic construct
  misc_feature 1..80: note = Artificially Synthesized Probe
  source 1..80: mol_type = other DNA
ggcgcggcctggccacactgggatttcagatgtcacagtactccggaacgggagaggatgatttcccgtggttttgaggc

SEQ ID NO: 123481 - DNA, 80 bp, synthetic construct
  misc_feature 1..80: note = Artificially Synthesized Probe
  source 1..80: mol_type = other DNA
gggcagacagcacgtccctgcaacatggggtgactctgaccccaccagggtacatctggcagtatatggagacatttttg

SEQ ID NO: 123482 - DNA, 80 bp, synthetic construct; identical to SEQ ID NO: 39796
  misc_feature 1..80: note = Artificially Synthesized Probe
  source 1..80: mol_type = other DNA

SEQ ID NO: 123483 - DNA, 80 bp, synthetic construct
  misc_feature 1..80: note = Artificially Synthesized Probe
  source 1..80: mol_type = other DNA
gacgcgcccaacgccttgcccgccgacgccttgcccgccgacaccttgcccgccgaccccttgcccgccgacgccttgcc

SEQ ID NO: 123484 - DNA, 80 bp, synthetic construct
  misc_feature 1..80: note = Artificially Synthesized Probe
  source 1..80: mol_type = other DNA
tctgatttctgctcactctgaatgtcgcaagtaactgtaaaagtgcgcaaatattgacggggttacaagcacatctcaat

SEQ ID NO: 123485 - DNA, 80 bp, synthetic construct
  misc_feature 1..80: note = Artificially Synthesized Probe
  source 1..80: mol_type = other DNA
ttgctggtatccatgtgtcccgcccttggctgtctgtgcttgaaccttaagccctgaggacagaaggagcctttggcagt

SEQ ID NO: 123486 - DNA, 80 bp, synthetic construct; identical to SEQ ID NO: 39797
  misc_feature 1..80: note = Artificially Synthesized Probe
  source 1..80: mol_type = other DNA

SEQ ID NO: 123487 - DNA, 80 bp, synthetic construct
  misc_feature 1..80: note = Artificially Synthesized Probe
  source 1..80: mol_type = other DNA
gaggcgtccacacgatcccaacaggggcaggaggcgtccacacgatcccaacaggggcaggaggcgtccacacgatccca

SEQ ID NO: 123488 - DNA, 80 bp, synthetic construct
  misc_feature 1..80: note = Artificially Synthesized Probe
  source 1..80: mol_type = other DNA
catgagcccacagtcctctctgtccccgcagaaacatcctcagcctcatcaacgactttgacttcccagagcagagcatc

SEQ ID NO: 123489 - DNA, 80 bp, synthetic construct
  misc_feature 1..80: note = Artificially Synthesized Probe
  source 1..80: mol_type = other DNA
aggagcaccagggccgcactggctgtgtcccactgccaaaggctgcaaacaattcccacagacccagggccagggcctgt

SEQ ID NO: 123490 - DNA, 80 bp, synthetic construct
  misc_feature 1..80: note = Artificially Synthesized Probe
  source 1..80: mol_type = other DNA
ccccaggagagggggtggccagcatgagggtcacagtgccagggcatggctggggtcaagccacactcagggccagtgta

SEQ ID NO: 123491 - DNA, 80 bp, synthetic construct; identical to SEQ ID NO: 39798
  misc_feature 1..80: note = Artificially Synthesized Probe
  source 1..80: mol_type = other DNA

SEQ ID NO: 123492 - DNA, 80 bp, synthetic construct
  misc_feature 1..80: note = Artificially Synthesized Probe
  source 1..80: mol_type = other DNA
gaccgacctccacatgccgggggctcctgtgtgggccatgctcttcttcgggatgctgttcaccttggggctatcgacca

SEQ ID NO: 123493 - DNA, 80 bp, synthetic construct
  misc_feature 1..80: note = Artificially Synthesized Probe
  source 1..80: mol_type = other DNA
tgtccagacgcccctcctggatggagagcgcaaggggccaagcctgagttcagggaaaggctgagccaggctactccttg

SEQ ID NO: 123494 - DNA, 80 bp, synthetic construct; identical to SEQ ID NO: 39781
  misc_feature 1..80: note = Artificially Synthesized Probe
  source 1..80: mol_type = other DNA

SEQ ID NO: 123495 - DNA, 80 bp, synthetic construct
  misc_feature 1..80: note = Artificially Synthesized Probe
  source 1..80: mol_type = other DNA
gggatggagggtgggaagccgagagaagtctccagcccaggtgccctggccctccccgctgtccgagggcaggtctgcct

SEQ ID NO: 123496 - DNA, 80 bp, synthetic construct; identical to SEQ ID NO: 39799
  misc_feature 1..80: note = Artificially Synthesized Probe
  source 1..80: mol_type = other DNA

SEQ ID NO: 123497 - DNA, 80 bp, synthetic construct
  misc_feature 1..80: note = Artificially Synthesized Probe
  source 1..80: mol_type = other DNA
caggttggaccccagttagggtccgatcctcggcttggagtgggtggaccttccacagaccatgtgaagcctgagcccag

SEQ ID NO: 123498 - DNA, 80 bp, synthetic construct
  misc_feature 1..80: note = Artificially Synthesized Probe
  source 1..80: mol_type = other DNA
catcctcctgttctggaagccactgagatacaaggcctggaaccccaaatacgtaggtccttccggtgggaacctgggaa

SEQ ID NO: 123499 - DNA, 80 bp, synthetic construct
  misc_feature 1..80: note = Artificially Synthesized Probe
  source 1..80: mol_type = other DNA
ttgtgcagcgcccgagtgcccgctgggatcagaaatggcatgggggtgaccatgggcaagcgcctggtcagtggagtgag

SEQ ID NO: 123500 - DNA, 80 bp, synthetic construct; identical to SEQ ID NO: 39800
  misc_feature 1..80: note = Artificially Synthesized Probe
  source 1..80: mol_type = other DNA

SEQ ID NO: 123501 - DNA, 80 bp, synthetic construct
  misc_feature 1..80: note = Artificially Synthesized Probe
  source 1..80: mol_type = other DNA
tgtcttggaaagtccctccgtagcagaacaccaagggcaggtgaaggaggagtgaccatgtatttttgaagaatttccac

SEQ ID NO: 123502 - DNA, 80 bp, synthetic construct
  misc_feature 1..80: note = Artificially Synthesized Probe
  source 1..80: mol_type = other DNA
caggagaagctcagcccaggtccccaaactcctggcccggaggggcggtggtgagcggccacacggcctggccactgctc

SEQ ID NO: 123503 - DNA, 80 bp, synthetic construct; identical to SEQ ID NO: 39801
  misc_feature 1..80: note = Artificially Synthesized Probe
  source 1..80: mol_type = other DNA

SEQ ID NO: 123504 - DNA, 80 bp, synthetic construct
  misc_feature 1..80: note = Artificially Synthesized Probe
  source 1..80: mol_type = other DNA
cctgcatgggcgggtctgtgggggggcttggcctgatggtgggcggggccccgcccacagggccgaccccaatacaccag

SEQ ID NO: 123505 - DNA, 80 bp, synthetic construct
  misc_feature 1..80: note = Artificially Synthesized Probe
  source 1..80: mol_type = other DNA
attctcaccctgtgtgtgaacatgcccttcactttgtctcgctgtgaggatcactcattgatgattttgaaaacaagata

SEQ ID NO: 123506 - DNA, 80 bp, synthetic construct
  misc_feature 1..80: note = Artificially Synthesized Probe
  source 1..80: mol_type = other DNA
ctgtgccagacctatggaggaggtaagcacccacctgcgtcctggggcagacccctaagcaggggaggccgtctccaccc

SEQ ID NO: 123507 - DNA, 80 bp, synthetic construct
  misc_feature 1..80: note = Artificially Synthesized Probe
  source 1..80: mol_type = other DNA
ttgtaacagaatgtagcaaaacgttgcggtaaagatttacagtgattttctcacacctatgacatttcatggcagctgct

SEQ ID NO: 123508 - DNA, 80 bp, synthetic construct
  misc_feature 1..80: note = Artificially Synthesized Probe
  source 1..80: mol_type = other DNA
ggctggctgtgtccacacacgtgaggtcactcatcaagcgcgccccctccccgctacttcctgcctccggtgttcaaccg

SEQ ID NO: 123509 - DNA, 80 bp, synthetic construct; identical to SEQ ID NO: 39782
  misc_feature 1..80: note = Artificially Synthesized Probe
  source 1..80: mol_type = other DNA

SEQ ID NO: 123510 - DNA, 80 bp, synthetic construct
  misc_feature 1..80: note = Artificially Synthesized Probe
  source 1..80: mol_type = other DNA
catcatgaccctgggcgtgtctctggttgattctcagcaatccctggcttttgccgctgctctgagcagagcctgcttct

SEQ ID NO: 123511 - DNA, 80 bp, synthetic construct
  misc_feature 1..80: note = Artificially Synthesized Probe
  source 1..80: mol_type = other DNA
cgtcctccatgcttatgaacgactgctaaacttcacgtaattgttaaaactaggagctgcagcctgggcaacatggcaaa

SEQ ID NO: 123512 - DNA, 80 bp, synthetic construct
  misc_feature 1..80: note = Artificially Synthesized Probe
  source 1..80: mol_type = other DNA
agaaagatgctgtctcaaaacaaacacccaaaaaggagttgtgtagacattcttaccatgtggaatcaacgcttcttctt

SEQ ID NO: 123513 - DNA, 80 bp, synthetic construct; identical to SEQ ID NO: 39783
  misc_feature 1..80: note = Artificially Synthesized Probe
  source 1..80: mol_type = other DNA

SEQ ID NO: 123514 - DNA, 80 bp, synthetic construct
  misc_feature 1..80: note = Artificially Synthesized Probe
  source 1..80: mol_type = other DNA
caattcacagaaaaccctctcatctcctctcccctaaatacagcagattcagcttccccaaatcagtcacagagagctca

SEQ ID NO: 123515 - DNA, 80 bp, synthetic construct
  misc_feature 1..80: note = Artificially Synthesized Probe
  source 1..80: mol_type = other DNA
ctccctggacagtggatcccatatctggaacccggagcccctgcccaccgcgacgtggtgcccacgccacccacatctgt

SEQ ID NO: 123516 - DNA, 80 bp, synthetic construct
  misc_feature 1..80: note = Artificially Synthesized Probe
  source 1..80: mol_type = other DNA
gggggaagtgatgttttcacagtgcaggctgaacaggggaaaggtaagaggggctctcacggtacaggctggagatgggg

SEQ ID NO: 123517 - DNA, 80 bp, synthetic construct
  misc_feature 1..80: note = Artificially Synthesized Probe
  source 1..80: mol_type = other DNA
acagcacggaggatccagtcccctcggggtccactatggtcttccgggacctcagggcagcttcctgccaggcgtcaggt

SEQ ID NO: 123518 - DNA, 80 bp, synthetic construct
  misc_feature 1..80: note = Artificially Synthesized Probe
  source 1..80: mol_type = other DNA
gggaagaagagctctcaggtgcaggctggaggtgggggagggaaaaggggctctcacagcacaggctggaggggagcgaa

SEQ ID NO: 123519 - DNA, 80 bp, synthetic construct; identical to SEQ ID NO: 39784
  misc_feature 1..80: note = Artificially Synthesized Probe
  source 1..80: mol_type = other DNA

SEQ ID NO: 123520 - DNA, 80 bp, synthetic construct
  misc_feature 1..80: note = Artificially Synthesized Probe
  source 1..80: mol_type = other DNA
ttctgccgctgtgtaaatgacacggacaagagccgtccggcccccacatgctggccctggagtcctgtgcagaagccaac

SEQ ID NO: 123521 - DNA, 80 bp, synthetic construct
  misc_feature 1..80: note = Artificially Synthesized Probe
  source 1..80: mol_type = other DNA
tgatgggagatgccaggcgcggagacgcacggcggggaagagtgtgggcagccggcacccatgtaggtcagcgtcttagg

SEQ ID NO: 123522 - DNA, 80 bp, synthetic construct; identical to SEQ ID NO: 39785
  misc_feature 1..80: note = Artificially Synthesized Probe
  source 1..80: mol_type = other DNA

SEQ ID NO: 123523 - DNA, 80 bp, synthetic construct
  misc_feature 1..80: note = Artificially Synthesized Probe
  source 1..80: mol_type = other DNA
cctggcaccttgtctgccccttccactgcgggtgccccaggcagaaggcacggccattcatctctactgggtgcttccac

SEQ ID NO: 123524 - DNA, 80 bp, synthetic construct
  misc_feature 1..80: note = Artificially Synthesized Probe
  source 1..80: mol_type = other DNA
cagagccttggtctgagacaccactctcctgcgacatccccatgagcaaagatggttccagttcccaggagagaccgcca

SEQ ID NO: 123525 - DNA, 80 bp, synthetic construct
  misc_feature 1..80: note = Artificially Synthesized Probe
  source 1..80: mol_type = other DNA
ctccggtgactggggtgtttaaaaaacatgctcagtcagcactttatttctgcagactcatgaattttcagaaacatcac

SEQ ID NO: 123526 - DNA, 80 bp, synthetic construct; identical to SEQ ID NO: 39786
  misc_feature 1..80: note = Artificially Synthesized Probe
  source 1..80: mol_type = other DNA

SEQ ID NO: 123527 - DNA, 80 bp, synthetic construct
  misc_feature 1..80: note = Artificially Synthesized Probe
  source 1..80: mol_type = other DNA
cccttgaagaccacaggtggctccccctggcccacgccacagtcccccccagcccccgaccctgggcaggtgctgaccac

SEQ ID NO: 123528 - DNA, 80 bp, synthetic construct
  misc_feature 1..80: note = Artificially Synthesized Probe
  source 1..80: mol_type = other DNA
gtaggtaggccaccgtcctcgcttgccctgactgaggctgccagggacagggccctcctggatgagaggtggggcggggg

SEQ ID NO: 123529 - DNA, 80 bp, synthetic construct
  misc_feature 1..80: note = Artificially Synthesized Probe
  source 1..80: mol_type = other DNA
tttgcaggaatttgggggcccacccctcgcctccctggctttggttctctgggagagccctgtggggggtgccaggatgt

SEQ ID NO: 123530 - DNA, 80 bp, synthetic construct
  misc_feature 1..80: note = Artificially Synthesized Probe
  source 1..80: mol_type = other DNA
ccattcacatgtgaggtgtgagggaggcctggctttcagctgcgcccttcagcatgtgttattttatgttgttattttgt

SEQ ID NO: 123531 - DNA, 80 bp, synthetic construct
  misc_feature 1..80: note = Artificially Synthesized Probe
  source 1..80: mol_type = other DNA
tcctcaactccttccagcacccgctgccctggagctcctgcccaccggacctcaacagaacaggtgagctgggcgccgcc

SEQ ID NO: 123532 - DNA, 80 bp, synthetic construct; identical to SEQ ID NO: 39787
  misc_feature 1..80: note = Artificially Synthesized Probe
  source 1..80: mol_type = other DNA

SEQ ID NO: 123533 - DNA, 80 bp, synthetic construct
  misc_feature 1..80: note = Artificially Synthesized Probe
  source 1..80: mol_type = other DNA
tgaccaatatggtgaaaccccatctctactcaaaatacaaaaatcagccaggcatggtggcgggcatctgtaatcccagc

SEQ ID NO: 123534 - DNA, 80 bp, synthetic construct
  misc_feature 1..80: note = Artificially Synthesized Probe
  source 1..80: mol_type = other DNA
ggtccagacctcagccaggagctccatctggggagatcctcgagacatgaatgacagttatattttcttctttttttttt

SEQ ID NO: 123535 - DNA, 80 bp, synthetic construct
  misc_feature 1..80: note = Artificially Synthesized Probe
  source 1..80: mol_type = other DNA
ctaattttttttttgagacggagtcttgctctgtcgcccaggctggagtgcagtggtgctatcttggctcactgcaagct

SEQ ID NO: 123536 - DNA, 80 bp, synthetic construct
  misc_feature 1..80: note = Artificially Synthesized Probe
  source 1..80: mol_type = other DNA
cgtgatccgcctgcctcggcctcccaaagtgctgggattacaggcgtgagccaccgcgcccggccagcacccagctaatt

SEQ ID NO: 123537 - DNA, 80 bp, synthetic construct
  misc_feature 1..80: note = Artificially Synthesized Probe
  source 1..80: mol_type = other DNA
ttgcttaggaagcaactctgactttctttccttcctgccttttgctaaaactcacgctgggctggtgctggatgaggctg

SEQ ID NO: 123538 - DNA, 80 bp, synthetic construct
  misc_feature 1..80: note = Artificially Synthesized Probe
  source 1..80: mol_type = other DNA
ccagtacaggctatctgcagcccgagttcctgggtgatggtttgtgggtcccaaattccttctaccttgtccaagcgttt

SEQ ID NO: 123539 - DNA, 80 bp, synthetic construct
  misc_feature 1..80: note = Artificially Synthesized Probe
  source 1..80: mol_type = other DNA
cggaggggccagctctgcccatgcccttccctcagccaagcgtggggcaggcagtgcccactcagagctgggctgtgaca

SEQ ID NO: 123540 - DNA, 80 bp, synthetic construct; identical to SEQ ID NO: 39780
  misc_feature 1..80: note = Artificially Synthesized Probe
  source 1..80: mol_type = other DNA

SEQ ID NO: 123541 - DNA, 80 bp, synthetic construct; identical to SEQ ID NO: 39789
  misc_feature 1..80: note = Artificially Synthesized Probe
  source 1..80: mol_type = other DNA

SEQ ID NO: 123542 - DNA, 80 bp, synthetic construct
  misc_feature 1..80: note = Artificially Synthesized Probe
  source 1..80: mol_type = other DNA
gctcctgtgccatccttgggggtctgggatggtgggtggcaggaggaagtgaggggaccagctttacatggtgacagtga

SEQ ID NO: 123543 - DNA, 80 bp, synthetic construct
  misc_feature 1..80: note = Artificially Synthesized Probe
  source 1..80: mol_type = other DNA
caaaagggcagtgttgtgagcagcccagggaaattgagctcaagagccacatggtgagggtgcctacgccccacagccag

SEQ ID NO: 123544 - DNA, 80 bp, synthetic construct
  misc_feature 1..80: note = Artificially Synthesized Probe
  source 1..80: mol_type = other DNA
ccattgtggatgtcttttattgtgcttagggacccacacgatgctgaatagagattggtcaacagacacggacaacacct

SEQ ID NO: 123545 - DNA, 80 bp, synthetic construct
  misc_feature 1..80: note = Artificially Synthesized Probe
  source 1..80: mol_type = other DNA
atgcgtcctggggtagtacacgctcctgtgggggccctgcatgcgttctggggtagtacacgctcctgtgggggccctgc

SEQ ID NO: 123546 - DNA, 80 bp, synthetic construct
  misc_feature 1..80: note = Artificially Synthesized Probe
  source 1..80: mol_type = other DNA
gtggcctcacactcgggtgaaggcgccccgtccaaatacccacctctcgaaaggacccaggcaggctgcagaacttgtag

SEQ ID NO: 123547 - DNA, 80 bp, synthetic construct
  misc_feature 1..80: note = Artificially Synthesized Probe
  source 1..80: mol_type = other DNA
gctctcagccggcggtgccaggacaaagcagggagcgggcaggcacttcatggcagagcgtctctcagcccccacagctg

SEQ ID NO: 123548 - DNA, 80 bp, synthetic construct
  misc_feature 1..80: note = Artificially Synthesized Probe
  source 1..80: mol_type = other DNA
cctcccatcctgttctgtcccctcccctcccctcccatcctgttccatcccctctcctcccttcccctcccatcccatcc

SEQ ID NO: 123549 - DNA, 80 bp, synthetic construct
  misc_feature 1..80: note = Artificially Synthesized Probe
  source 1..80: mol_type = other DNA
atcacaacaaaaacaaaactgaccaccacccagtacactgaatctatgatcatccatggcctgaagacacaactgtgacc

SEQ ID NO: 123550 - DNA, 80 bp, synthetic construct
  misc_feature 1..80: note = Artificially Synthesized Probe
  source 1..80: mol_type = other DNA
tctcctgaggcagctcatgcatttgttcatccactccacaaacatgcaccaccatctaaaaagatcctccatgtgcctac

SEQ ID NO: 123551 - DNA, 80 bp, synthetic construct; identical to SEQ ID NO: 39813
  misc_feature 1..80: note = Artificially Synthesized Probe
  source 1..80: mol_type = other DNA

SEQ ID NO: 123552 - DNA, 80 bp, synthetic construct
  misc_feature 1..80: note = Artificially Synthesized Probe
  source 1..80: mol_type = other DNA
tttggagccggctagcggaggactgggatgggggctggggttgtgtctgtcacgtgaccagagccagggtgagcagcact

SEQ ID NO: 123553 - DNA, 80 bp, synthetic construct
  misc_feature 1..80: note = Artificially Synthesized Probe
  source 1..80: mol_type = other DNA
cctatctgacatggaggtattgctgtaatgtgctctctgttattgttcaacttcttgctagataccacctttcttagaaa

SEQ ID NO: 123554 - DNA, 80 bp, synthetic construct; identical to SEQ ID NO: 39814
  misc_feature 1..80: note = Artificially Synthesized Probe
  source 1..80: mol_type = other DNA

SEQ ID NO: 123555 - DNA, 80 bp, synthetic construct
  misc_feature 1..80: note = Artificially Synthesized Probe
  source 1..80: mol_type = other DNA
tgtgtttctgtatgaagttcgaagatttagtctaagatcagtagaacattttatctcctaagatcgaggtcagccctctg

SEQ ID NO: 123556 - DNA, 80 bp, synthetic construct
  misc_feature 1..80: note = Artificially Synthesized Probe
  source 1..80: mol_type = other DNA
attaaaagcccgccccatgaatccaggaaccttcaacgggagccttcacaagcgcagttaactggacttggaacacttac

SEQ ID NO: 123557 - DNA, 80 bp, synthetic construct
  misc_feature 1..80: note = Artificially Synthesized Probe
  source 1..80: mol_type = other DNA
cctgagctggtttcaaggagttttatttctctctgctgcaagaacataaacagaatttcctggtgagacataccaggacc

SEQ ID NO: 123558 - DNA, 80 bp, synthetic construct
  misc_feature 1..80: note = Artificially Synthesized Probe
  source 1..80: mol_type = other DNA
ccacctgctgtgtgcaggtgacgaggggtctccacgcacgcgggccctgctgactccgggaccagcccttggtccatgag

SEQ ID NO: 123559 - DNA, 80 bp, synthetic construct; identical to SEQ ID NO: 39815
  misc_feature 1..80: note = Artificially Synthesized Probe
  source 1..80: mol_type = other DNA

SEQ ID NO: 123560 - DNA, 80 bp, synthetic construct
  misc_feature 1..80: note = Artificially Synthesized Probe
  source 1..80: mol_type = other DNA
ccagcactcggcatcctttgtccccactgccccggaagctctaacttcgaccttgatcctcacaggcagaggtgagtgga

SEQ ID NO: 123561 - DNA, 80 bp, synthetic construct
  misc_feature 1..80: note = Artificially Synthesized Probe
  source 1..80: mol_type = other DNA
gagggtggaagccaccttaaggagactatagatgagttcagggatcagcctgtccttctgggccgagtcttgaggcccct

SEQ ID NO: 123562 - DNA, 80 bp, synthetic construct
  misc_feature 1..80: note = Artificially Synthesized Probe
  source 1..80: mol_type = other DNA
gggccgctgcccggtcatctgctggatgtcgtcgctgaactgcccaacacctgagggagaagaggtggcatcagtgtcca

SEQ ID NO: 123563 - DNA, 80 bp, synthetic construct
  misc_feature 1..80: note = Artificially Synthesized Probe
  source 1..80: mol_type = other DNA
ccacgtgcctgctccaccctggagatgcaccaggaagagccgtgccccggtgggtgctccccgcgccccggcaacagccc

SEQ ID NO: 123564 - DNA, 80 bp, synthetic construct; identical to SEQ ID NO: 39816
  misc_feature 1..80: note = Artificially Synthesized Probe
  source 1..80: mol_type = other DNA

SEQ ID NO: 123565 - DNA, 80 bp, synthetic construct
  misc_feature 1..80: note = Artificially Synthesized Probe
  source 1..80: mol_type = other DNA
cacatcagcattcccttttgttttaaggccgaatcatattccgtcatgagtataccgtcactgtgtcttcagaaaagcta

SEQ ID NO: 123566 - DNA, 80 bp, synthetic construct
  misc_feature 1..80: note = Artificially Synthesized Probe
  source 1..80: mol_type = other DNA
agtaccagcagtccactttagaaatgcatatttttctttcactggtattatctaacttcttctaggaactgaccctaaga

SEQ ID NO: 123567 - DNA, 80 bp, synthetic construct; identical to SEQ ID NO: 39803
  misc_feature 1..80: note = Artificially Synthesized Probe
  source 1..80: mol_type = other DNA

SEQ ID NO: 123568 - DNA, 80 bp, synthetic construct
  misc_feature 1..80: note = Artificially Synthesized Probe
  source 1..80: mol_type = other DNA
ccacacagaatcccctcttcacacccacccggcatccgagctctgaacatgagagatggacgtgggaggcagcggggatg

SEQ ID NO: 123569 - DNA, 80 bp, synthetic construct; identical to SEQ ID NO: 39817
  misc_feature 1..80: note = Artificially Synthesized Probe
  source 1..80: mol_type = other DNA

SEQ ID NO: 123570 - DNA, 80 bp, synthetic construct
  misc_feature 1..80: note = Artificially Synthesized Probe
  source 1..80: mol_type = other DNA
agacacccgtgaaagtacgaggttgatatttccgttttctgtagagcaacactgaaaacaatgttctcagaataggagct

SEQ ID NO: 123571 - DNA, 80 bp, synthetic construct
  misc_feature 1..80: note = Artificially Synthesized Probe
  source 1..80: mol_type = other DNA
catttttttttttcttttttgagacggagtctcactctgttgcccaggctggagtgcagtggtgcaatctcgggtgactg

SEQ ID NO: 123572 - DNA, 80 bp, synthetic construct
  misc_feature 1..80: note = Artificially Synthesized Probe
  source 1..80: mol_type = other DNA
ttaccatgttggccaggatggtcttgatctcttgatctcgtgatctgcccacctcggcctcccaaagtgctgggattaca

SEQ ID NO: 123573 - DNA, 80 bp, synthetic construct; identical to SEQ ID NO: 39818
  misc_feature 1..80: note = Artificially Synthesized Probe
  source 1..80: mol_type = other DNA

SEQ ID NO: 123574 - DNA, 80 bp, synthetic construct
  misc_feature 1..80: note = Artificially Synthesized Probe
  source 1..80: mol_type = other DNA
ctgattgtgttcccctgggtgggatgggctcaccggtgcctctagcgtggaggaggcagaagacgcccagccgctgtgaa

SEQ ID NO: 123575 - DNA, 80 bp, synthetic construct
  misc_feature 1..80: note = Artificially Synthesized Probe
  source 1..80: mol_type = other DNA
tcagaaggggagtggcacagccaccaaacaagagggtgccggcttggctgccttcccccggactcaccatagaaccaggc

SEQ ID NO: 123576 - DNA, 80 bp, synthetic construct; identical to SEQ ID NO: 39819
  misc_feature 1..80: note = Artificially Synthesized Probe
  source 1..80: mol_type = other DNA

SEQ ID NO: 123577 - DNA, 80 bp, synthetic construct
  misc_feature 1..80: note = Artificially Synthesized Probe
  source 1..80: mol_type = other DNA
acacagacagcatgaagttagacgtttttctgccctgcagggacaacaacggggtggacctcgctgcacagatctacgtc

SEQ ID NO: 123578 - DNA, 80 bp, synthetic construct
  misc_feature 1..80: note = Artificially Synthesized Probe
  source 1..80: mol_type = other DNA
ccacacccccagcgtcccccagtccccaaaccctagaaggaggcagcttcagcctggggtgcttctgggggagctgtcca

SEQ ID NO: 123579 - DNA, 80 bp, synthetic construct
  misc_feature 1..80: note = Artificially Synthesized Probe
  source 1..80: mol_type = other DNA
gagacatgaccaggagaaggcgaagccggcgatggtacgtacgttggtgacgcagaacagggacaggaggaaggtcgcca

SEQ ID NO: 123580 - DNA, 80 bp, synthetic construct
  misc_feature 1..80: note = Artificially Synthesized Probe
  source 1..80: mol_type = other DNA
cttgtcacccagtggacgcacacccggggatggacacggaacaggggccacatggccgtccagggtgcaggatgcctggt

SEQ ID NO: 123581 - DNA, 80 bp, synthetic construct; identical to SEQ ID NO: 39820
  misc_feature 1..80: note = Artificially Synthesized Probe
  source 1..80: mol_type = other DNA

SEQ ID NO: 123582 - DNA, 80 bp, synthetic construct
  misc_feature 1..80: note = Artificially Synthesized Probe
  source 1..80: mol_type = other DNA
ccaggagccgtggacgaggtggataggatatgagtggggggccgggtgcatgaccagcgtttataaggcaagggattctg

SEQ ID NO: 123583 - DNA, 80 bp, synthetic construct
  misc_feature 1..80: note = Artificially Synthesized Probe
  source 1..80: mol_type = other DNA
aacttctgttgccctcctcattcctcatggggtagctgaggcttccagggaaagccacgagatatgaaggacctgctgtg

SEQ ID NO: 123584 - DNA, 80 bp, synthetic construct
  misc_feature 1..80: note = Artificially Synthesized Probe
  source 1..80: mol_type = other DNA
tatgtgtgtgcatgcatgtgcatggtggtgtgaatgtgtgtgttcgtgtatgtgtgtatgtgtgtgcgtgtatgtgtgtg

SEQ ID NO: 123585 - DNA, 80 bp, synthetic construct
  misc_feature 1..80: note = Artificially Synthesized Probe
  source 1..80: mol_type = other DNA
ggacaggaggtctgggggccgtacgtgagcccagggatcttgcctagccctgggagggcagggccccctcgggtggaagg

SEQ ID NO: 123586 - DNA, 80 bp, synthetic construct; identical to SEQ ID NO: 39821
  misc_feature 1..80: note = Artificially Synthesized Probe
  source 1..80: mol_type = other DNA

SEQ ID NO: 123587 - DNA, 80 bp, synthetic construct
  misc_feature 1..80: note = Artificially Synthesized Probe
  source 1..80: mol_type = other DNA
aaattacctgggtccttttgggctatgggggtgcttggggaaggaaggggcagaaacaaggaggagcaggaggggcttcc

SEQ ID NO: 123588 - DNA, 80 bp, synthetic construct
  misc_feature 1..80: note = Artificially Synthesized Probe
  source 1..80: mol_type = other DNA
tgttcgtgtctctcccattgcaggatgacttcctggggtcttcgtctctgctccctctacaccttgagccagtggcggag

SEQ ID NO: 123589 - DNA, 80 bp, synthetic construct
  misc_feature 1..80: note = Artificially Synthesized Probe
  source 1..80: mol_type = other DNA
atgcaacatacacactcagacacacataccatgcaacatacacactcagacacacataccatgcaatatacacacacaga

SEQ ID NO: 123590 - DNA, 80 bp, synthetic construct; identical to SEQ ID NO: 39822
  misc_feature 1..80: note = Artificially Synthesized Probe
  source 1..80: mol_type = other DNA

SEQ ID NO: 123591 - DNA, 80 bp, synthetic construct
  misc_feature 1..80: note = Artificially Synthesized Probe
  source 1..80: mol_type = other DNA
tggggccctgagggctcagaggagcagcacatcctgatggatacaggggcccagatggtggcttcggagataagagacaa

SEQ ID NO: 123592 - DNA, 80 bp, synthetic construct
  misc_feature 1..80: note = Artificially Synthesized Probe
  source 1..80: mol_type = other DNA
gcaggcaggcgaccaaaagtcaacgcagtttggtctctgatgaccccaaagtaaaaaccagtcccataggcaattgacct

SEQ ID NO: 123593 - DNA, 80 bp, synthetic construct
  misc_feature 1..80: note = Artificially Synthesized Probe
  source 1..80: mol_type = other DNA
ggcctgcgcctggccttttaaataatcaaaggccagagccaggggccgttcctaaaggtctttcaggggcctcactatca

SEQ ID NO: 123594 - DNA, 80 bp, synthetic construct
  misc_feature 1..80: note = Artificially Synthesized Probe
  source 1..80: mol_type = other DNA
atgtaatgtcaacacccgtgccttcgtttctgtacctaagttaacatttcaccctattttcttgagaattaaggctgtaa

SEQ ID NO: 123595 - DNA, 80 bp, synthetic construct; identical to SEQ ID NO: 39823
  misc_feature 1..80: note = Artificially Synthesized Probe
  source 1..80: mol_type = other DNA

SEQ ID NO: 123596 - DNA, 80 bp, synthetic construct
  misc_feature 1..80: note = Artificially Synthesized Probe
  source 1..80: mol_type = other DNA
ttgtcgctccccgccttcactgagcctcaacacccaggcagagatcagtcagcaacaacacccacacgggacaggggctt

SEQ ID NO: 123597 - DNA, 80 bp, synthetic construct
  misc_feature 1..80: note = Artificially Synthesized Probe
  source 1..80: mol_type = other DNA
gccgggaggcaggcgggggctctgctggctgacagagaccgagaagccttgggactccctggagctctcggttggcccaa

SEQ ID NO: 123598 - DNA, 80 bp, synthetic construct
  misc_feature 1..80: note = Artificially Synthesized Probe
  source 1..80: mol_type = other DNA
ctcacctgtgcctgcccgagacctggacccctccccaccctctcggagacaactccaggcgtgcagggacactcagcgtc

SEQ ID NO: 123599 - DNA, 80 bp, synthetic construct
  misc_feature 1..80: note = Artificially Synthesized Probe
  source 1..80: mol_type = other DNA
acacccttgacaggtgccggggatccgatgcctcactcaaactcctacaaatcaatcattacttgattttttaaaaagcc

SEQ ID NO: 123600 - DNA, 80 bp, synthetic construct; identical to SEQ ID NO: 39824
  misc_feature 1..80: note = Artificially Synthesized Probe
  source 1..80: mol_type = other DNA

SEQ ID NO: 123601 - DNA, 80 bp, synthetic construct
  misc_feature 1..80: note = Artificially Synthesized Probe
  source 1..80: mol_type = other DNA
tggaggccccgagaggcacaaggcaggaaaggcactgggtgggggggcctggaggggcagggcggagaaggcactgggtg

SEQ ID NO: 123602 - DNA, 80 bp, synthetic construct
  misc_feature 1..80: note = Artificially Synthesized Probe
  source 1..80: mol_type = other DNA
tctccttcctctttcacaaggaaaaaggctttgctgagagctcggcgctggtgctacacggagcaggcccaggtgcagca

SEQ ID NO: 123603 - DNA, 80 bp, synthetic construct; identical to SEQ ID NO: 39825
  misc_feature 1..80: note = Artificially Synthesized Probe
  source 1..80: mol_type = other DNA

SEQ ID NO: 123604 - DNA, 80 bp, synthetic construct
  misc_feature 1..80: note = Artificially Synthesized Probe
  source 1..80: mol_type = other DNA
gtcttgctgtggacacctcacccagggcagatcttccagaagctctaggagcacacacctcccggggacctcgctaagat

SEQ ID NO: 123605 - DNA, 80 bp, synthetic construct
  misc_feature 1..80: note = Artificially Synthesized Probe
  source 1..80: mol_type = other DNA
gtcagggcaccagcgtcctcctcctgggttcctgtgtggcctgtcactggggtggaaggaccacacacttcatctgcaga

SEQ ID NO: 123606 - DNA, 80 bp, synthetic construct
  misc_feature 1..80: note = Artificially Synthesized Probe
  source 1..80: mol_type = other DNA
ctgtccttgtatttttaccgtgtttctagcctcatgatgtgaaagaaagtaagcacaagtccataaaggtcaaagcaagc

SEQ ID NO: 123607 - DNA, 80 bp, synthetic construct
  misc_feature 1..80: note = Artificially Synthesized Probe
  source 1..80: mol_type = other DNA
ttgtgaagctggaccctgagcgagggaggacagagaccccccggggctggtgtgagggaagagggtgtgtccttgtggag

SEQ ID NO: 123608 - DNA, 80 bp, synthetic construct; identical to SEQ ID NO: 39826
  misc_feature 1..80: note = Artificially Synthesized Probe
  source 1..80: mol_type = other DNA

SEQ ID NO: 123609 - DNA, 80 bp, synthetic construct
  misc_feature 1..80: note = Artificially Synthesized Probe
  source 1..80: mol_type = other DNA
cgcccagggagaagcacacctgggtggccgcgtcaatccaaacctgcagagccagagggcggtgagaggctgtcccagga

SEQ ID NO: 123610 - DNA, 80 bp, synthetic construct
  misc_feature 1..80: note = Artificially Synthesized Probe
  source 1..80: mol_type = other DNA
agcctgagaagcagggggctgtctgtgttcattgatctgggattccccatggagtatcaaggcagcgattccacagaacc

SEQ ID NO: 123611 - DNA, 80 bp, synthetic construct
  misc_feature 1..80: note = Artificially Synthesized Probe
  source 1..80: mol_type = other DNA
tccaccttcctgggggcctcagatgctccatctgagtgacacgctacctctgcagctccatcttgctctctgcgacccgc

SEQ ID NO: 123612 - DNA, 80 bp, synthetic construct
  misc_feature 1..80: note = Artificially Synthesized Probe
  source 1..80: mol_type = other DNA
cagcatgacctcagcgtcctaatagccctcagaacagcacggactcatccacacacggcatgaccgcagcgtcctaatag

SEQ ID NO: 123613 - DNA, 80 bp, synthetic construct
  misc_feature 1..80: note = Artificially Synthesized Probe
  source 1..80: mol_type = other DNA
tggggaagccgtcctctgtgtccctccccagaaggcaatggggaagccatcctctgtgctaactgcagctgcctggcagt

SEQ ID NO: 123614 - DNA, 80 bp, synthetic construct; identical to SEQ ID NO: 39827
  misc_feature 1..80: note = Artificially Synthesized Probe
  source 1..80: mol_type = other DNA

SEQ ID NO: 123615 - DNA, 80 bp, synthetic construct
  misc_feature 1..80: note = Artificially Synthesized Probe
  source 1..80: mol_type = other DNA
catgatggcagtgccctgaaaccctcagaacagcacagactcaaccacaggctacatgatggcggcttcctgataaccct

SEQ ID NO: 123616 - DNA, 80 bp, synthetic construct
  misc_feature 1..80: note = Artificially Synthesized Probe
  source 1..80: mol_type = other DNA
cctcagaaaggcatggacccatccacatgctacatgatgatggtgtcctgattggacgcacaccagcaatgcctgctttg

SEQ ID NO: 123617 - DNA, 80 bp, synthetic construct; identical to SEQ ID NO: 39828
  misc_feature 1..80: note = Artificially Synthesized Probe
  source 1..80: mol_type = other DNA

SEQ ID NO: 123618 - DNA, 80 bp, synthetic construct
  misc_feature 1..80: note = Artificially Synthesized Probe
  source 1..80: mol_type = other DNA
ctgctggggaggccaggtgggtctcagggcatcccaggtcccaggtcaagcttgcctgagcttgactgagcaagggaact

SEQ ID NO: 123619 - DNA, 80 bp, synthetic construct
  misc_feature 1..80: note = Artificially Synthesized Probe
  source 1..80: mol_type = other DNA
gccgagagtggctgggtgggcagtgggtggagaggctcataccctgatgtggctcccatgctggtcatcagccacctgcc

SEQ ID NO: 123620 - DNA, 80 bp, synthetic construct
  misc_feature 1..80: note = Artificially Synthesized Probe
  source 1..80: mol_type = other DNA
acctgcaattgtcctttccttccatttctttcctgatttctcttcactatacatcaatccatcatctattatctatcaat

SEQ ID NO: 123621 - DNA, 80 bp, synthetic construct; identical to SEQ ID NO: 39829
  misc_feature 1..80: note = Artificially Synthesized Probe
  source 1..80: mol_type = other DNA

SEQ ID NO: 123622 - DNA, 80 bp, synthetic construct
  misc_feature 1..80: note = Artificially Synthesized Probe
  source 1..80: mol_type = other DNA
catgctgtccagctacctacctatcattcatccatccacccaaacatccatcatccagcaatccacccatcatccatcca

SEQ ID NO: 123623 - DNA, 80 bp, synthetic construct; identical to SEQ ID NO: 39804
  misc_feature 1..80: note = Artificially Synthesized Probe
  source 1..80: mol_type = other DNA

SEQ ID NO: 123624 - DNA, 80 bp, synthetic construct
  misc_feature 1..80: note = Artificially Synthesized Probe
  source 1..80: mol_type = other DNA
gccatccatcatccagcaatccacccatcatccatccacccatccatcccatccatcatccatccattatccatctgtcc

SEQ ID NO: 123625 - DNA, 80 bp, synthetic construct
  misc_feature 1..80: note = Artificially Synthesized Probe
  source 1..80: mol_type = other DNA
cagccttccatccacccatcctatctatccattctatctacccacctatcatccatccatcctatccacctacttaccta

SEQ ID NO: 123626 - DNA, 80 bp, synthetic construct; identical to SEQ ID NO: 39830
  misc_feature 1..80: note = Artificially Synthesized Probe
  source 1..80: mol_type = other DNA

SEQ ID NO: 123627 - DNA, 80 bp, synthetic construct
  misc_feature 1..80: note = Artificially Synthesized Probe
  source 1..80: mol_type = other DNA
ccctggttgtcctcctctctcttccttggctcccgtgggccacacgcctgctgcacccatggctcctgtctccacagggc

SEQ ID NO: 123628 - DNA, 80 bp, synthetic construct
  misc_feature 1..80: note = Artificially Synthesized Probe
  source 1..80: mol_type = other DNA
ggcttcctgggaggcttgcagccatgcccgcccatcccttctccccttccttcccacttctgccttgggtttacacttgc

SEQ ID NO: 123629 - DNA, 80 bp, synthetic construct
  misc_feature 1..80: note = Artificially Synthesized Probe
  source 1..80: mol_type = other DNA
ctcccccacttagtccacctgatttccaacgatgccccaagggagctgccatttttgtcatgccagccttccgccaacag

SEQ ID NO: 123630 - DNA, 80 bp, synthetic construct; identical to SEQ ID NO: 39831
  misc_feature 1..80: note = Artificially Synthesized Probe
  source 1..80: mol_type = other DNA

SEQ ID NO: 123631 - DNA, 80 bp, synthetic construct
  misc_feature 1..80: note = Artificially Synthesized Probe
  source 1..80: mol_type = other DNA
ctgtactcacagacgcctcgcagagccggtagaagtcaacgctcaggtatgctctgatgccgtctatggctccagggagg

SEQ ID NO: 123632 - DNA, 80 bp, synthetic construct
  misc_feature 1..80: note = Artificially Synthesized Probe
  source 1..80: mol_type = other DNA
cctctgattgggaggcccaattcccaaacatttcctgggacgccagctcagcaaatgctccttggagtgagaaggtcaga

SEQ ID NO: 123633 - DNA, 80 bp, synthetic construct
  misc_feature 1..80: note = Artificially Synthesized Probe
  source 1..80: mol_type = other DNA
tctgatgcgtgggacgtgagtggattcacactggtgaacggcactgtggcacgatgaagggctgctctgggctgtgtccc

SEQ ID NO: 123634 - DNA, 80 bp, synthetic construct
  misc_feature 1..80: note = Artificially Synthesized Probe
  source 1..80: mol_type = other DNA
tggagttttgctctttttgcccaggctggagtgcagtggcatgatcttggctcactgcaacctccgcctcctgggttcaa

SEQ ID NO: 123635 - DNA, 80 bp, synthetic construct
  misc_feature 1..80: note = Artificially Synthesized Probe
  source 1..80: mol_type = other DNA
cggggctcagtgaaggaagctggggtcagggagcccggccaggacccacagccacgggtggcccagcggccagagcccta

SEQ ID NO: 123636 - DNA, 80 bp, synthetic construct; identical to SEQ ID NO: 39832
  misc_feature 1..80: note = Artificially Synthesized Probe
  source 1..80: mol_type = other DNA

SEQ ID NO: 123637 - DNA, 80 bp, synthetic construct
  misc_feature 1..80: note = Artificially Synthesized Probe
  source 1..80: mol_type = other DNA
acactcccaacctgattatggccatatgagtctcccaaactcaaccatggccatgtgtccaccccaacctggccatggcc

SEQ ID NO: 123638 - DNA, 80 bp, synthetic construct
  misc_feature 1..80: note = Artificially Synthesized Probe
  source 1..80: mol_type = other DNA
agcacgatgaccagcaccaggcaggctgtgagctgccaccgcggaggccccaggtcgtcgatgccatggctctggtggag

SEQ ID NO: 123639 - DNA, 80 bp, synthetic construct; identical to SEQ ID NO: 39833
  misc_feature 1..80: note = Artificially Synthesized Probe
  source 1..80: mol_type = other DNA

SEQ ID NO: 123640 - DNA, 80 bp, synthetic construct
  misc_feature 1..80: note = Artificially Synthesized Probe
  source 1..80: mol_type = other DNA
caccgctgcccacggtgctgcccacgctgctgggtacccaccgctgcccacagtgctgcccacgctgctgggtgcccacc

SEQ ID NO: 123641 - DNA, 80 bp, synthetic construct
  misc_feature 1..80: note = Artificially Synthesized Probe
  source 1..80: mol_type = other DNA
gctgcccatggtgctgggtacccaccgctgcccagtgctgcccatggtgctgggtgcccaccactgcccacagtgctgcc

SEQ ID NO: 123642 - DNA, 80 bp, synthetic construct
  misc_feature 1..80: note = Artificially Synthesized Probe
  source 1..80: mol_type = other DNA
tgcccaccgctgcccacagtgctgcccatggtgctgggtacccaccgctgcccacagtgctgcccacgctgctgggtgcc

SEQ ID NO: 123643 - DNA, 80 bp, synthetic construct
  misc_feature 1..80: note = Artificially Synthesized Probe
  source 1..80: mol_type = other DNA
cagtgctgcccacggtgctaggtgcccaccgctgcccacagtgctgcccacgctgctgggtacccactgctgcccagtgc

SEQ ID NO: 123644 - DNA, 80 bp, synthetic construct; identical to SEQ ID NO: 39834
  misc_feature 1..80: note = Artificially Synthesized Probe
  source 1..80: mol_type = other DNA

SEQ ID NO: 123645 - DNA, 80 bp, synthetic construct
  misc_feature 1..80: note = Artificially Synthesized Probe
  source 1..80: mol_type = other DNA
ctcagaaagggcagaacagagggtgagggatggagctgaccatcggctgtgctccttgccccaggcacaggtcctgggcc

SEQ ID NO: 123646 - DNA, 80 bp, synthetic construct
  misc_feature 1..80: note = Artificially Synthesized Probe
  source 1..80: mol_type = other DNA
gctcccagattcccacagattaagatcaagccataaatgtaaaataaagactagaaacagaagacagcagcccactctaa

SEQ ID NO: 123647 - DNA, 80 bp, synthetic construct
  misc_feature 1..80: note = Artificially Synthesized Probe
  source 1..80: mol_type = other DNA
agacagaagccgcgttatgaaaggagctcccactgcccaggtttgcttctgttgtgggtccactgaggtccccaggagat

SEQ ID NO: 123648 - DNA, 80 bp, synthetic construct
  misc_feature 1..80: note = Artificially Synthesized Probe
  source 1..80: mol_type = other DNA
tggacagtgcctccgtcctatcctggagggcgcccaggcagaggccccaggttggcacaggccccaggttggccgggtgg

SEQ ID NO: 123649 - DNA, 80 bp, synthetic construct; identical to SEQ ID NO: 39835
  misc_feature 1..80: note = Artificially Synthesized Probe
  source 1..80: mol_type = other DNA

SEQ ID NO: 123650 - DNA, 80 bp, synthetic construct
  misc_feature 1..80: note = Artificially Synthesized Probe
  source 1..80: mol_type = other DNA
gaccagacagcacaccctctccccttgcccaggtgcctggagaaaaggcaaactcagtcaatgcccatacatggcacagg

SEQ ID NO: 123651 - DNA, 80 bp, synthetic construct
  misc_feature 1..80: note = Artificially Synthesized Probe
  source 1..80: mol_type = other DNA
attagaaagtcactgtgctttgaggttatttgaaaacccacagacaatttagagaaccggacactcctgagtgctgtcaa

SEQ ID NO: 123652 - DNA, 80 bp, synthetic construct
  misc_feature 1..80: note = Artificially Synthesized Probe
  source 1..80: mol_type = other DNA
gcaggtgtttcataagccataatagttgggaggaccagaaaagtgttggcccaggatgttcaccaggcgtggaaaagaca

SEQ ID NO: 123653 - DNA, 80 bp, synthetic construct; identical to SEQ ID NO: 39836
  misc_feature 1..80: note = Artificially Synthesized Probe
  source 1..80: mol_type = other DNA

SEQ ID NO: 123654 - DNA, 80 bp, synthetic construct
  misc_feature 1..80: note = Artificially Synthesized Probe
  source 1..80: mol_type = other DNA
tacaaccagaggaaaatcagtgaacagctacttcacatgatatagaaaaattaacccaaaatggataaaagagccaaata

SEQ ID NO: 123655 - DNA, 80 bp, synthetic construct
  misc_feature 1..80: note = Artificially Synthesized Probe
  source 1..80: mol_type = other DNA
gaatttcacaagaaacagcagagcacacgcagcttccagagatgaagtagaaaagagaatggctgggctgcagaccaggg

SEQ ID NO: 123656 - DNA, 80 bp, synthetic construct
  misc_feature 1..80: note = Artificially Synthesized Probe
  source 1..80: mol_type = other DNA
ggaaaactacagaatgagagaaaatattcgcaaatcacctattaatctgaaaagagaataatatctaaaatatgtaaaga

SEQ ID NO: 123657 - DNA, 80 bp, synthetic construct; identical to SEQ ID NO: 39837
  misc_feature 1..80: note = Artificially Synthesized Probe
  source 1..80: mol_type = other DNA

SEQ ID NO: 123658 - DNA, 80 bp, synthetic construct
  misc_feature 1..80: note = Artificially Synthesized Probe
  source 1..80: mol_type = other DNA
tttacagtagccaaaatgtggaagcaacccaaatgtccatcaaaagataaatagatctggccaggtgtggtggcttacat

SEQ ID NO: 123659 - DNA, 80 bp, synthetic construct
  misc_feature 1..80: note = Artificially Synthesized Probe
  source 1..80: mol_type = other DNA
ctgaggcaggaggattgcttgagcccagaaggtcaagcctgcagtgagccgtgatcataccactgcacactccagcctgg

SEQ ID NO: 123660 - DNA, 80 bp, synthetic construct
  misc_feature 1..80: note = Artificially Synthesized Probe
  source 1..80: mol_type = other DNA
aaataaggcagtcacaaaaaaataagtgattctactcagaggagggacctagagtagacaaattcacagagacagaaagt

SEQ ID NO: 123661 - DNA, 80 bp, synthetic construct
  misc_feature 1..80: note = Artificially Synthesized Probe
  source 1..80: mol_type = other DNA
atggctaaggtggtaaaagcaatgctatgtatagcttaccacaatagccccccaagaaggcaaaatacttttgtgtaaag

SEQ ID NO: 123662 - DNA, 80 bp, synthetic construct; identical to SEQ ID NO: 39838
  misc_feature 1..80: note = Artificially Synthesized Probe
  source 1..80: mol_type = other DNA

SEQ ID NO: 123663 - DNA, 80 bp, synthetic construct
  misc_feature 1..80: note = Artificially Synthesized Probe
  source 1..80: mol_type = other DNA
aagtctactgttgtaggcccttctgctctgtgaaacggtatcatgtcacttgaaggtcagtgttgtaaaccctataaaat

SEQ ID NO: 123664 - DNA, 80 bp, synthetic construct
  misc_feature 1..80: note = Artificially Synthesized Probe
  source 1..80: mol_type = other DNA
gggggcaaaaaattagcacaatgaaagacttaaagccagccatgctgacaattattgaatggaaactctaattaaaaaac

SEQ ID NO: 123665 - DNA, 80 bp, synthetic construct; identical to SEQ ID NO: 39805
  misc_feature 1..80: note = Artificially Synthesized Probe
  source 1..80: mol_type = other DNA

SEQ ID NO: 123666 - DNA, 80 bp, synthetic construct
  misc_feature 1..80: note = Artificially Synthesized Probe
  source 1..80: mol_type = other DNA
cagacaaagtagacttcagaatgagaaatctaacccagaaggatagttcaaatggtaaagcggtcaattcaaagactaat

SEQ ID NO: 123667 - DNA, 80 bp, synthetic construct
  misc_feature 1..80: note = Artificially Synthesized Probe
  source 1..80: mol_type = other DNA
ggatgtagaaaacctgaaaaacacagtgacctaacataacctctctgacatttatgcaactttccaaccaaagacagcag

SEQ ID NO: 123668 - DNA, 80 bp, synthetic construct; identical to SEQ ID NO: 39839
  misc_feature 1..80: note = Artificially Synthesized Probe
  source 1..80: mol_type = other DNA

SEQ ID NO: 123669 - DNA, 80 bp, synthetic construct
  misc_feature 1..80: note = Artificially Synthesized Probe
  source 1..80: mol_type = other DNA
aatgccctgttagtcaaatagaaatcaaaagaaagattagggaatactttgaactgaatgaaatgaaaacacagcatatc

SEQ ID NO: 123670 - DNA, 80 bp, synthetic construct
  misc_feature 1..80: note = Artificially Synthesized Probe
  source 1..80: mol_type = other DNA
tgaaaacacagcatatcaaatgtgtgggatgcagccaatcaataatctccaggttcctacaaggaagggttccttttatt

SEQ ID NO: 123671 - DNA, 80 bp, synthetic construct
  misc_feature 1..80: note = Artificially Synthesized Probe
  source 1..80: mol_type = other DNA
gtaggagccagcactgcacacggcattcatggcacatggaggaagcaccattagtggggcagctcagcagtcttttctga

SEQ ID NO: 123672 - DNA, 80 bp, synthetic construct; identical to SEQ ID NO: 39840
  misc_feature 1..80: note = Artificially Synthesized Probe
  source 1..80: mol_type = other DNA

SEQ ID NO: 123673 - DNA, 80 bp, synthetic construct
  misc_feature 1..80: note = Artificially Synthesized Probe
  source 1..80: mol_type = other DNA
ctgctccccaagagtcactggggcctgtttcaggggaacctcagtcccactggtgggaaaatcaccttcagaaggtgtgg

SEQ ID NO: 123674 - DNA, 80 bp, synthetic construct
  misc_feature 1..80: note = Artificially Synthesized Probe
  source 1..80: mol_type = other DNA
tgtttccttccttccttccagactgagaacttccaaatagacttcgctagtctgatcgtttaaaataataacacgtgttc

SEQ ID NO: 123675 - DNA, 80 bp, synthetic construct
  misc_feature 1..80: note = Artificially Synthesized Probe
  source 1..80: mol_type = other DNA
aacagggcgttgggtaccgggaactctcaggctcttgccctggtggcacctctgcggccactgcccctggctctgtgtgc

SEQ ID NO: 123676 - DNA, 80 bp, synthetic construct; identical to SEQ ID NO: 39841
  misc_feature 1..80: note = Artificially Synthesized Probe
  source 1..80: mol_type = other DNA

SEQ ID NO: 123677 - DNA, 80 bp, synthetic construct
  misc_feature 1..80: note = Artificially Synthesized Probe
  source 1..80: mol_type = other DNA
cgagggaaacggaggtggctgcagtttgcaggccagagcgccagagaggaggtggccacacagagagaagacccgggaca

SEQ ID NO: 123678 - DNA, 80 bp, synthetic construct
  misc_feature 1..80: note = Artificially Synthesized Probe
  source 1..80: mol_type = other DNA
tcccatgagcgtcttcctggcgccccagcctggactctctctcctcctgctgggtacttggtgggccactctctcccatc

SEQ ID NO: 123679 - DNA, 80 bp, synthetic construct
  misc_feature 1..80: note = Artificially Synthesized Probe
  source 1..80: mol_type = other DNA
caaggccagtcccggcaatatgcttccatgcccgaggaggaattctagaaccaagcacttgggttctgaatatctgagtg

SEQ ID NO: 123680 - DNA, 80 bp, synthetic construct
  misc_feature 1..80: note = Artificially Synthesized Probe
  source 1..80: mol_type = other DNA
ttgcaggaaaagacctcagtgatgtctgttgatacggttttcagatatagaaagcatctctctgggaggctgtgcgcccc

SEQ ID NO: 123681 - DNA, 80 bp, synthetic construct; identical to SEQ ID NO: 39842
  misc_feature 1..80: note = Artificially Synthesized Probe
  source 1..80: mol_type = other DNA

SEQ ID NO: 123682 - DNA, 80 bp, synthetic construct
  misc_feature 1..80: note = Artificially Synthesized Probe
  source 1..80: mol_type = other DNA
acggcgacccggcacgaggccccaggcccggctggcgagggcaggaagatgtggatggcacccgccagatccagattccg

SEQ ID NO: 123683 - DNA, 80 bp, synthetic construct
  misc_feature 1..80: note = Artificially Synthesized Probe
  source 1..80: mol_type = other DNA
ggatggtgaggggcgggcctggcctgggtggacagtgagggacgggcctggatggggtggactgtgcgggttggggctgg

SEQ ID NO: 123684 - DNA, 80 bp, synthetic construct
  misc_feature 1..80: note = Artificially Synthesized Probe
  source 1..80: mol_type = other DNA
aggggcgggcctggccggggtggacggtgtggggtgggcctggccgaggtggacagtgagcgaggggcctggctggggtg

SEQ ID NO: 123685 - DNA, 80 bp, synthetic construct; identical to SEQ ID NO: 39843
  misc_feature 1..80: note = Artificially Synthesized Probe
  source 1..80: mol_type = other DNA

SEQ ID NO: 123686 - DNA, 80 bp, synthetic construct
  misc_feature 1..80: note = Artificially Synthesized Probe
  source 1..80: mol_type = other DNA
ggagcccagacatggggctgactcactccagaggcgccactgcagctcccagagactggagcttgcccaccttctgcaca

SEQ ID NO: 123687 - DNA, 80 bp, synthetic construct
  misc_feature 1..80: note = Artificially Synthesized Probe
  source 1..80: mol_type = other DNA
gagcactaaagggatggagtgcaggaacagattccccctccccgcaccctgggagtcagcaagggctggtgtccaaccaa

SEQ ID NO: 123688 - DNA, 80 bp, synthetic construct
  misc_feature 1..80: note = Artificially Synthesized Probe
  source 1..80: mol_type = other DNA
tcggggatctgcatggggtgtgcataaggtcttgcttcagtaggggttggttagggctacaccaaatgctgaagccaaat

SEQ ID NO: 123689 - DNA, 80 bp, synthetic construct
  misc_feature 1..80: note = Artificially Synthesized Probe
  source 1..80: mol_type = other DNA
gctgttccaggagttgttgcagtggatccaggggagctccgtggtgaaggaggagaagagatagtgcagcgcccaggcga

SEQ ID NO: 123690 - DNA, 80 bp, synthetic construct
  misc_feature 1..80: note = Artificially Synthesized Probe
  source 1..80: mol_type = other DNA
gagcccacaactcctggacagccctgatgccagacagcatcttcaaacatgcagggaaggcccgtgaaaggcctgagacc

SEQ ID NO: 123691 - DNA, 80 bp, synthetic construct; identical to SEQ ID NO: 39844
  misc_feature 1..80: note = Artificially Synthesized Probe
  source 1..80: mol_type = other DNA

SEQ ID NO: 123692 - DNA, 80 bp, synthetic construct
  misc_feature 1..80: note = Artificially Synthesized Probe
  source 1..80: mol_type = other DNA
aaaggtcgtctagggttacccaggaacacccagtgtctcccagagccatcaagactgccaatagtcactaagggacacct

SEQ ID NO: 123693 - DNA, 80 bp, synthetic construct
  misc_feature 1..80: note = Artificially Synthesized Probe
  source 1..80: mol_type = other DNA
ggccatccacagccatctccattcatccacaactatccacggtcagctatagccatcctcaaccattcatggccatccac

SEQ ID NO: 123694 - DNA, 80 bp, synthetic construct
  misc_feature 1..80: note = Artificially Synthesized Probe
  source 1..80: mol_type = other DNA
ccatccacagccatctacagacatccacaactatccatggtcatccatagccatccacaaccattcatggccacccacat

SEQ ID NO: 123695 - DNA, 80 bp, synthetic construct; identical to SEQ ID NO: 39845
  misc_feature 1..80: note = Artificially Synthesized Probe
  source 1..80: mol_type = other DNA

SEQ ID NO: 123696 - DNA, 80 bp, synthetic construct
  misc_feature 1..80: note = Artificially Synthesized Probe
  source 1..80: mol_type = other DNA
cccatgcatgaccatccagggtttcctagaatcacccagggccacgtaagaccaccagggtccacccagggcaggtaaga

SEQ ID NO: 123697 - DNA, 80 bp, synthetic construct
  misc_feature 1..80: note = Artificially Synthesized Probe
  source 1..80: mol_type = other DNA
tgtcctttccaggatcacagacctggaatttgggatccatcatttatggggtctcctggtaaactggaacagaactcagt

SEQ ID NO: 123698 - DNA, 80 bp, synthetic construct; identical to SEQ ID NO: 39806
  misc_feature 1..80: note = Artificially Synthesized Probe
  source 1..80: mol_type = other DNA

SEQ ID NO: 123699 - DNA, 80 bp, synthetic construct
  misc_feature 1..80: note = Artificially Synthesized Probe
  source 1..80: mol_type = other DNA
ttcttctcagtttactgacatgattagtttgggtacaactttgatttactttattaaaacccagtaggcaccatgccgtc

SEQ ID NO: 123700 - DNA, 80 bp, synthetic construct; identical to SEQ ID NO: 39846
  misc_feature 1..80: note = Artificially Synthesized Probe
  source 1..80: mol_type = other DNA

SEQ ID NO: 123701 - DNA, 80 bp, synthetic construct
  misc_feature 1..80: note = Artificially Synthesized Probe
  source 1..80: mol_type = other DNA
gtccatattaaataattctgtattgcagtctgtcacggattgcctttggaaggccttctcccacgtggatctggtccata

SEQ ID NO: 123702 - DNA, 80 bp, synthetic construct
  misc_feature 1..80: note = Artificially Synthesized Probe
  source 1..80: mol_type = other DNA
gacaatggatgcccaatttgaaaatttttcaaggttaaaactttctgtatcaagtccttagcttgaaaccctgggaagtc

SEQ ID NO: 123703 - DNA, 80 bp, synthetic construct; identical to SEQ ID NO: 39847
  misc_feature 1..80: note = Artificially Synthesized Probe
  source 1..80: mol_type = other DNA

SEQ ID NO: 123704 - DNA, 80 bp, synthetic construct
  misc_feature 1..80: note = Artificially Synthesized Probe
  source 1..80: mol_type = other DNA
ccagtcccctcctggatgcttccctgggcacctgggtgaggaaatggctcccttgaacggtggtggccagtcccctcctg

SEQ ID NO: 123705 - DNA, 80 bp, synthetic construct
  misc_feature 1..80: note = Artificially Synthesized Probe
  source 1..80: mol_type = other DNA
ggctcccttgaacggtggtggccagtcccctcctggatgcttccctgggcacctgggtgaggaaatggctcccttgaacg

SEQ ID NO: 123706 - DNA, 80 bp, synthetic construct
  misc_feature 1..80: note = Artificially Synthesized Probe
  source 1..80: mol_type = other DNA
acccactaccctgttggctacagaaccttctagtgatctctgctcatgacatcactgtgggctccagatgaagcttcacc

SEQ ID NO: 123707 - DNA, 80 bp, synthetic construct
  misc_feature 1..80: note = Artificially Synthesized Probe
  source 1..80: mol_type = other DNA
cctcctgtctgactcccaggaagctcggcgctaagtgtgaatttcaagcatagcttttaaggcccatttccttaaattta

SEQ ID NO: 123708 - DNA, 80 bp, synthetic construct; identical to SEQ ID NO: 39848
  misc_feature 1..80: note = Artificially Synthesized Probe
  source 1..80: mol_type = other DNA

SEQ ID NO: 123709 - DNA, 80 bp, synthetic construct
  misc_feature 1..80: note = Artificially Synthesized Probe
  source 1..80: mol_type = other DNA
ggctgcaaaattcacagaatgacaagatttgtgaatccacagatctggccacaaaacatatccagagaggaaaaataaaa

SEQ ID NO: 123710 - DNA, 80 bp, synthetic construct
  misc_feature 1..80: note = Artificially Synthesized Probe
  source 1..80: mol_type = other DNA
acggatcccgctggaggaagcctctggtggagcagcccctccatacctcacaggaggcatcaagcaggtctttggaagaa

SEQ ID NO: 123711 - DNA, 80 bp, synthetic construct
  misc_feature 1..80: note = Artificially Synthesized Probe
  source 1..80: mol_type = other DNA
cacgcacctgtagccccagctactcgggaggctggggcaggagaatcgcttgaacccgggacgcgcaggtgacagtgagc

SEQ ID NO: 123712 - DNA, 80 bp, synthetic construct
  misc_feature 1..80: note = Artificially Synthesized Probe
  source 1..80: mol_type = other DNA
gagacagagaggagaagagacagaacaggagagagacagagaggagaagagacagaacaggagagacacagagaggaaag

SEQ ID NO: 123713 - DNA, 80 bp, synthetic construct; identical to SEQ ID NO: 39849
  misc_feature 1..80: note = Artificially Synthesized Probe
  source 1..80: mol_type = other DNA

SEQ ID NO: 123714 - DNA, 80 bp, synthetic construct
  misc_feature 1..80: note = Artificially Synthesized Probe
  source 1..80: mol_type = other DNA
tgttgtgggcactttagctgatgtcttaatttaccacgtggcacttctattcaatgagacatgaaaacgtatgcattttt

SEQ ID NO: 123715 - DNA, 80 bp, synthetic construct
  misc_feature 1..80: note = Artificially Synthesized Probe
  source 1..80: mol_type = other DNA
cgttactgagattcaacaactcaaggtgtctcgtctctaaaaagaagtccagctttcttgcactgattcatctatccctt

SEQ ID NO: 123716 - DNA, 80 bp, synthetic construct
  misc_feature 1..80: note = Artificially Synthesized Probe
  source 1..80: mol_type = other DNA
ccacactttgcagccctcctctgggactagtcttcagaacgaagctggcggcatggaatgcgggattgtgggcacagggt

SEQ ID NO: 123717 - DNA, 80 bp, synthetic construct; identical to SEQ ID NO: 39850
  misc_feature 1..80: note = Artificially Synthesized Probe
  source 1..80: mol_type = other DNA

SEQ ID NO: 123718 - DNA, 80 bp, synthetic construct
  misc_feature 1..80: note = Artificially Synthesized Probe
  source 1..80: mol_type = other DNA
ccttgtaagacacttgtgacagactccagggtggctcttgaaaatccagcaaagcacagttggatgtcgctgcagcctgt

SEQ ID NO: 123719 - DNA, 80 bp, synthetic construct
  misc_feature 1..80: note = Artificially Synthesized Probe
  source 1..80: mol_type = other DNA
cctctctgaaacacgtccgtgccgctggccagggccaggcaggacacaggtaacgcgtgtgtcttgaactgttagcctgg

SEQ ID NO: 123720 - DNA, 80 bp, synthetic construct
  misc_feature 1..80: note = Artificially Synthesized Probe
  source 1..80: mol_type = other DNA
caaacaaacaaacaaacaaacaaaaaagaaacccaggtcccgacactccgcagtgaacccgagacaccgaaagcagaaga

SEQ ID NO: 123721 - DNA, 80 bp, synthetic construct; identical to SEQ ID NO: 39851
  misc_feature 1..80: note = Artificially Synthesized Probe
  source 1..80: mol_type = other DNA

SEQ ID NO: 123722 - DNA, 80 bp, synthetic construct
  misc_feature 1..80: note = Artificially Synthesized Probe
  source 1..80: mol_type = other DNA
tcacacctgtccagtctcagcatttccacggctgcgagactgacttctcctcctggagcctgacctcagcagctgtgaaa

SEQ ID NO: 123723 - DNA, 80 bp, synthetic construct
  misc_feature 1..80: note = Artificially Synthesized Probe
  source 1..80: mol_type = other DNA
tagtcattttcttaatgccaattttctgagtggtgcctctgagtaaatgcctgaatcctccctgaaccaccagcccctga

SEQ ID NO: 123724 - DNA, 80 bp, synthetic construct
  misc_feature 1..80: note = Artificially Synthesized Probe
  source 1..80: mol_type = other DNA
tgtgtgcccttcccagggtctcatgaagatggagtcagaaatgctgggagagggcttggtgctgggcaggccacctgcac

SEQ ID NO: 123725 - DNA, 80 bp, synthetic construct; identical to SEQ ID NO: 39852
  misc_feature 1..80: note = Artificially Synthesized Probe
  source 1..80: mol_type = other DNA

SEQ ID NO: 123726 - DNA, 80 bp, synthetic construct
  misc_feature 1..80: note = Artificially Synthesized Probe
  source 1..80: mol_type = other DNA
atcaaaagaaaatagatggatgaatgggtagatgacagacgggtgaatagatgattgacagataatagatagatagaatt

SEQ ID NO: 123727 - DNA, 80 bp, synthetic construct
  misc_feature 1..80: note = Artificially Synthesized Probe
  source 1..80: mol_type = other DNA
cggggaatttggttacagagatatgcatagaagcaagaagtataaagaggcacagggagaagacaatctctgagacaagg

SEQ ID NO: 123728 - DNA, 80 bp, synthetic construct
  misc_feature 1..80: note = Artificially Synthesized Probe
  source 1..80: mol_type = other DNA
tttcctgtcagtggcagagggcagtgtgccatggaaagcagcttttggccaacatccttcactcagtattgctaattatt

SEQ ID NO: 123729 - DNA, 80 bp, synthetic construct
  misc_feature 1..80: note = Artificially Synthesized Probe
  source 1..80: mol_type = other DNA
tacagatagatgatgatgatagatggatggattaggtagataggtagatagatgggtgaatgattgatataaagaccaat

SEQ ID NO: 123730 - DNA, 80 bp, synthetic construct; identical to SEQ ID NO: 39853
  misc_feature 1..80: note = Artificially Synthesized Probe
  source 1..80: mol_type = other DNA

SEQ ID NO: 123731 - DNA, 80 bp, synthetic construct
  misc_feature 1..80: note = Artificially Synthesized Probe
  source 1..80: mol_type = other DNA
ttccctgttgaactggccgagggccagctccatgtagaaaagtggcatcccagcaatgaccatgaagagcaggtagggga

SEQ ID NO: 123732 - DNA, 80 bp, synthetic construct
  misc_feature 1..80: note = Artificially Synthesized Probe
  source 1..80: mol_type = other DNA
gcagcataaagatgttcccacacaccaatagtgagggaggttagcaagagacctcctcaaaggaatgtctgaaggatgct

SEQ ID NO: 123733 - DNA, 80 bp, synthetic construct
  misc_feature 1..80: note = Artificially Synthesized Probe
  source 1..80: mol_type = other DNA
gatgagtcccgaagcccgccctccactgctgtcagtgcctgacacgtccctcctggatccccttgtcattgcgcacctcg

SEQ ID NO: 123734 - DNA, 80 bp, synthetic construct
  misc_feature 1..80: note = Artificially Synthesized Probe
  source 1..80: mol_type = other DNA
gaccccccaactctgcccctgagctgagtgggccctgccgtcctgtccccagcttctggggccctcagaggctgccccta

SEQ ID NO: 123735 - DNA, 80 bp, synthetic construct
  misc_feature 1..80: note = Artificially Synthesized Probe
  source 1..80: mol_type = other DNA
agtgagggagagctttgccactctctctcctggggaaggggagggggaggcatggggcccctcagctctgtctttgggca

SEQ ID NO: 123736 - DNA, 80 bp, synthetic construct; identical to SEQ ID NO: 39854
  misc_feature 1..80: note = Artificially Synthesized Probe
  source 1..80: mol_type = other DNA

SEQ ID NO: 123737 - DNA, 80 bp, synthetic construct
  misc_feature 1..80: note = Artificially Synthesized Probe
  source 1..80: mol_type = other DNA
aagcgaagatagcctctggaaacaggaggcagagccaagctgccccgtctgccgccccccaccccccagcttcttcgcgg

SEQ ID NO: 123738 - DNA, 80 bp, synthetic construct
  misc_feature 1..80: note = Artificially Synthesized Probe
  source 1..80: mol_type = other DNA
cgtgccttggccccggctgcccctacgacccccgcccggccagcatgctcagggaggctgagatgggacttaccgccacc

SEQ ID NO: 123739 - DNA, 80 bp, synthetic construct
  misc_feature 1..80: note = Artificially Synthesized Probe
  source 1..80: mol_type = other DNA
actccgttctgctccttgacaaggatgagctccacctccttcgggcccacggcattgggctccttagccggggccaccac

SEQ ID NO: 123740 - DNA, 80 bp, synthetic construct; identical to SEQ ID NO: 39855
  misc_feature 1..80: note = Artificially Synthesized Probe
  source 1..80: mol_type = other DNA

SEQ ID NO: 123741 - DNA, 80 bp, synthetic construct
  misc_feature 1..80: note = Artificially Synthesized Probe
  source 1..80: mol_type = other DNA
actaacaatgcatggatatcacttccaccttcccccacacttccagagagcaattttacaatcttctaagagcattcaat

SEQ ID NO: 123742 - DNA, 80 bp, synthetic construct
  misc_feature 1..80: note = Artificially Synthesized Probe
  source 1..80: mol_type = other DNA
gctgagactacaggtgtgcaccacagcaccggctaagttatttttgtgtgtgtttttttgttgttgttgttgtttttttg

SEQ ID NO: 123743 - DNA, 80 bp, synthetic construct; identical to SEQ ID NO: 39807
  misc_feature 1..80: note = Artificially Synthesized Probe
  source 1..80: mol_type = other DNA

SEQ ID NO: 123744 - DNA, 80 bp, synthetic construct; identical to SEQ ID NO: 39856
  misc_feature 1..80: note = Artificially Synthesized Probe
  source 1..80: mol_type = other DNA

SEQ ID NO: 123745 - DNA, 80 bp, synthetic construct
  misc_feature 1..80: note = Artificially Synthesized Probe
  source 1..80: mol_type = other DNA
ctacataaacccccctgcaacgctgagcaggagagcaggagcgtctacaccgccccagccagggcgacttctgtcatttg

SEQ ID NO: 123746 - DNA, 80 bp, synthetic construct
  misc_feature 1..80: note = Artificially Synthesized Probe
  source 1..80: mol_type = other DNA
gactgaagcaggtcgcaggtggaggctctaacaggcaactttccctgcatccaagtttgcacaaaacctcacccatgagc

SEQ ID NO: 123747 - DNA, 80 bp, synthetic construct
  misc_feature 1..80: note = Artificially Synthesized Probe
  source 1..80: mol_type = other DNA
cctggggccacctgaccccgctcctgaacgcggggcctcagaggcgagttttgggtctacacagcaaaatgtggcccgtt

SEQ ID NO: 123748 - DNA, 80 bp, synthetic construct; identical to SEQ ID NO: 39802
  misc_feature 1..80: note = Artificially Synthesized Probe
  source 1..80: mol_type = other DNA

SEQ ID NO: 123749 - DNA, 80 bp, synthetic construct; identical to SEQ ID NO: 39857
  misc_feature 1..80: note = Artificially Synthesized Probe
  source 1..80: mol_type = other DNA

SEQ ID NO: 123750 - DNA, 80 bp, synthetic construct
  misc_feature 1..80: note = Artificially Synthesized Probe
  source 1..80: mol_type = other DNA
caggggcagccctgcaccctcctcgcgcctcggacggcctcagggtcccatgtggcgctatcggggggcgctcggcaccc

SEQ ID NO: 123751 - DNA, 80 bp, synthetic construct
  misc_feature 1..80: note = Artificially Synthesized Probe
  source 1..80: mol_type = other DNA
cccgatgccgcgagcgacgctggcctcacctggccgcccgggcctgggctttgcacgcgagtcctggcgccgagagcgtt

SEQ ID NO: 123752 - DNA, 80 bp, synthetic construct
  misc_feature 1..80: note = Artificially Synthesized Probe
  source 1..80: mol_type = other DNA
gagaccagcctggccaacatggtcaaaccctgtctctactaaaaacacaaaaattatccaggtgtggtgctgggcacctg

SEQ ID NO: 123753 - DNA, 80 bp, synthetic construct
  misc_feature 1..80: note = Artificially Synthesized Probe
  source 1..80: mol_type = other DNA
agcaagtagagagaaataaacggaataataaaaatgagtgaaccaagaaaaatcaatctataaaaaggcaataaaggaga

SEQ ID NO: 123754 - DNA, 80 bp, synthetic construct
  misc_feature 1..80: note = Artificially Synthesized Probe
  source 1..80: mol_type = other DNA
tactgcaaagttgaaagttaacagattgcaaaagatatttcaggcaaactcaaaagacaccttggtgcaactatatttgt

SEQ ID NO: 123755 - DNA, 80 bp, synthetic construct; identical to SEQ ID NO: 39808
  misc_feature 1..80: note = Artificially Synthesized Probe
  source 1..80: mol_type = other DNA

SEQ ID NO: 123756 - DNA, 80 bp, synthetic construct
  misc_feature 1..80: note = Artificially Synthesized Probe
  source 1..80: mol_type = other DNA
ggtataaggccctaaagaagtctcaatacattttaaataataggtatcatatgtgtttgagaacaatgaaattaatttgg

SEQ ID NO: 123757 - DNA, 80 bp, synthetic construct
  misc_feature 1..80: note = Artificially Synthesized Probe
  source 1..80: mol_type = other DNA
cacatggagtattttgagggaaattcatagccttgagtgcttacattagaaaagaacgaaggatgcaaattaataaccta

SEQ ID NO: 123758 - DNA, 80 bp, synthetic construct
  misc_feature 1..80: note = Artificially Synthesized Probe
  source 1..80: mol_type = other DNA
gaagtcaaagttggatatttgagaagactagcaagatcctgtacaaagtgtaagacccccaggtataggactctcagagg

SEQ ID NO: 123759 - DNA, 80 bp, synthetic construct; identical to SEQ ID NO: 39809
  misc_feature 1..80: note = Artificially Synthesized Probe
  source 1..80: mol_type = other DNA

SEQ ID NO: 123760 - DNA, 80 bp, synthetic construct
  misc_feature 1..80: note = Artificially Synthesized Probe
  source 1..80: mol_type = other DNA
tttacgagaaccagccacagagaggtggccagagggaagaggcaggtccgaggtggggccgcggtgccctccacactatg

SEQ ID NO: 123761 - DNA, 80 bp, synthetic construct
  misc_feature 1..80: note = Artificially Synthesized Probe
  source 1..80: mol_type = other DNA
gatcttgggcacattccggggcctctctgggtctcagggaccctggtgtagagagagtgctgggctgcctcttagggttg

SEQ ID NO: 123762 - DNA, 80 bp, synthetic construct
  misc_feature 1..80: note = Artificially Synthesized Probe
  source 1..80: mol_type = other DNA
gtgtggtctgcaggctgcctgcatgggggccctgcatgcgtcctggggtagtacacgctcctgtgggggccctgcatgca

SEQ ID NO: 123763 - DNA, 80 bp, synthetic construct
  misc_feature 1..80: note = Artificially Synthesized Probe
  source 1..80: mol_type = other DNA
gcctctcccagcccctccagggctccctgtggcttcccatggccaggcccaggcctcccctcctggcactgtcccttgtg

SEQ ID NO: 123764 - DNA, 80 bp, synthetic construct
  misc_feature 1..80: note = Artificially Synthesized Probe
  source 1..80: mol_type = other DNA
catgtgccccccgtcccgggcacacgtctccactgtcacctgccaccactggctgcctgtcctcatagagcacatgctgg

SEQ ID NO: 123765 - DNA, 80 bp, synthetic construct; identical to SEQ ID NO: 39810
  misc_feature 1..80: note = Artificially Synthesized Probe
  source 1..80: mol_type = other DNA

SEQ ID NO: 123766 - DNA, 80 bp, synthetic construct
  misc_feature 1..80: note = Artificially Synthesized Probe
  source 1..80: mol_type = other DNA
cgaagccaacatcctgacggtccccttaaagtctagcgcagagcagaacatcagcatttgagcactcgcttgaaaataaa

SEQ ID NO: 123767 - DNA, 80 bp, synthetic construct
  misc_feature 1..80: note = Artificially Synthesized Probe
  source 1..80: mol_type = other DNA
gctgaacgtgccttccttccactgcccgctgcggcagctcctggggcctggacagcaccaagtcctcccagagcaggcag

SEQ ID NO: 123768 - DNA, 80 bp, synthetic construct; identical to SEQ ID NO: 39811
  misc_feature 1..80: note = Artificially Synthesized Probe
  source 1..80: mol_type = other DNA

SEQ ID NO: 123769 - DNA, 80 bp, synthetic construct
  misc_feature 1..80: note = Artificially Synthesized Probe
  source 1..80: mol_type = other DNA
gggccatggcagccccagagctcctcccactccacagaagcccccagccacacactgtgctttgcctgcactgggccttg

SEQ ID NO: 123770 - DNA, 80 bp, synthetic construct
  misc_feature 1..80: note = Artificially Synthesized Probe
  source 1..80: mol_type = other DNA
agaaaggctgggatttgaggaagcagcttccgggagttcccagtggtgggatctcaggtgagggcgaccctcttccaagg

SEQ ID NO: 123771 - DNA, 80 bp, synthetic construct
  misc_feature 1..80: note = Artificially Synthesized Probe
  source 1..80: mol_type = other DNA
gctccagctgcccctgttcagccaaagttgggctcggccctggggggacctagatcacccctgattctaccgccctcaga

SEQ ID NO: 123772 - DNA, 80 bp, synthetic construct; identical to SEQ ID NO: 39812
  misc_feature 1..80: note = Artificially Synthesized Probe
  source 1..80: mol_type = other DNA

SEQ ID NO: 123773 - DNA, 80 bp, synthetic construct
  misc_feature 1..80: note = Artificially Synthesized Probe
  source 1..80: mol_type = other DNA
tgagactgaacctttattttctgaaaaacaggtatttcatacaatctttgccatgttaatgcaaatatgcacaaagtagg

SEQ ID NO: 123774 - DNA, 80 bp, synthetic construct
  misc_feature 1..80: note = Artificially Synthesized Probe
  source 1..80: mol_type = other DNA
taataataaaataaatctaaaaattaagaaaataaggccgggcacggtggcttacgcctgtaatcccagcactttgggag

SEQ ID NO: 123775 - DNA, 80 bp, synthetic construct
  misc_feature 1..80: note = Artificially Synthesized Probe
  source 1..80: mol_type = other DNA
ccggaggtggaggttgcagtgagctgaggtcgcgccattgcactccagaccaggcaacagtgtgagactctgactcaaaa

SEQ ID NO: 123776 - DNA, 80 bp, synthetic construct
  misc_feature 1..80: note = Artificially Synthesized Probe
  source 1..80: mol_type = other DNA
gaagctattcctaccaaggtaggaactgccactcaagaccttcttggctctaaaatcccatgagactttttcagttcaca

SEQ ID NO: 123777 - DNA, 80 bp, synthetic construct
  misc_feature 1..80: note = Artificially Synthesized Probe
  source 1..80: mol_type = other DNA
tatagtggtgcaatactggctcactgcaacctccacctccaggttcaagtgattctcctgcctcagcctcccaagtagct

SEQ ID NO: 123778 - DNA, 80 bp, synthetic construct
  misc_feature 1..80: note = Artificially Synthesized Probe
  source 1..80: mol_type = other DNA
ctggccttagacaatcctcccaccttggccttcaagtagctgagattacaggtgtgagccatcgtgcctggcttacgagt

SEQ ID NO: 123779 - DNA, 80 bp, synthetic construct
  misc_feature 1..80: note = Artificially Synthesized Probe
  source 1..80: mol_type = other DNA
cccggccccttcctcacttctttaaccagcttagatttcattgtgtatcatttcaacaacactcttgcctatacccttaa

SEQ ID NO: 123780 - DNA, 80 bp, synthetic construct; identical to SEQ ID NO: 39963
  misc_feature 1..80: note = Artificially Synthesized Probe
  source 1..80: mol_type = other DNA

SEQ ID NO: 123781 - DNA, 80 bp, synthetic construct
  misc_feature 1..80: note = Artificially Synthesized Probe
  source 1..80: mol_type = other DNA
aaacctcatctctactaaaaatacaaaaattagctgggtgtggtggtgcgcacctgtaattccagctacacgggagactg

SEQ ID NO: 123782 - DNA, 80 bp, synthetic construct
  misc_feature 1..80: note = Artificially Synthesized Probe
  source 1..80: mol_type = other DNA
aggattccatctacttccaccttactgtaacttttcaaatactttcccactgaactaaatcccccccataaacatgcaac

SEQ ID NO: 123783 - DNA, 80 bp, synthetic construct; identical to SEQ ID NO: 39964
  misc_feature 1..80: note = Artificially Synthesized Probe
  source 1..80: mol_type = other DNA

SEQ ID NO: 123784 - DNA, 80 bp, synthetic construct
  misc_feature 1..80: note = Artificially Synthesized Probe
  source 1..80: mol_type = other DNA
tgtaatcccagcactttgggaggctgaggcggatggatcacttgaggtcaggagttcaagatccgcctggccaatatgac

SEQ ID NO: 123785 - DNA, 80 bp, synthetic construct
  misc_feature 1..80: note = Artificially Synthesized Probe
  source 1..80: mol_type = other DNA
agagaaactccatctcaaaaaaaaaaaaatcgtttatgccaactaattgtacacctaaatgcaccaagttcatgactttc

SEQ ID NO: 123786 - DNA, 80 bp, synthetic construct
  misc_feature 1..80: note = Artificially Synthesized Probe
  source 1..80: mol_type = other DNA
agtggctctctgcctttatttctaacccaagctagcttacaaccttaaaaagtgaccctgcttcgctgggcacagtggct

SEQ ID NO: 123787 - DNA, 80 bp, synthetic construct
  misc_feature 1..80: note = Artificially Synthesized Probe
  source 1..80: mol_type = other DNA
agggggctgaggcaggagaatcatttgaacccgggaggcagaggttgtagtgagccaagatcacgccactgcattcccac

SEQ ID NO: 123788 - DNA, 80 bp, synthetic construct; identical to SEQ ID NO: 39965
  misc_feature 1..80: note = Artificially Synthesized Probe
  source 1..80: mol_type = other DNA

SEQ ID NO: 123789 - DNA, 80 bp, synthetic construct; identical to SEQ ID NO: 39868
  misc_feature 1..80: note = Artificially Synthesized Probe
  source 1..80: mol_type = other DNA

SEQ ID NO: 123790 - DNA, 80 bp, synthetic construct
  misc_feature 1..80: note = Artificially Synthesized Probe
  source 1..80: mol_type = other DNA
aggcgtggtggtgcacatctgtaatcccagctactcgggaggctgaggcaggagaatcgcttacccagaggcggaggttg

SEQ ID NO: 123791 - DNA, 80 bp, synthetic construct
  misc_feature 1..80: note = Artificially Synthesized Probe
  source 1..80: mol_type = other DNA
agactccgtctcaaaaaaaaaaaaaaaaaaaaaaagttacacactgcagaaatctaaagaatctcaaaaatagacaggga

SEQ ID NO: 123792 - DNA, 80 bp, synthetic construct
  misc_feature 1..80: note = Artificially Synthesized Probe
  source 1..80: mol_type = other DNA
ccgtctctactagaactacaaaaaaattagccaggcgtggtggcaggcgcctgaagtcccagctactcgggaggctgagg

SEQ ID NO: 123793 - DNA, 80 bp, synthetic construct; identical to SEQ ID NO: 39966
  misc_feature 1..80: note = Artificially Synthesized Probe
  source 1..80: mol_type = other DNA

SEQ ID NO: 123794 - DNA, 80 bp, synthetic construct
  misc_feature 1..80: note = Artificially Synthesized Probe
  source 1..80: mol_type = other DNA
atacaaaattagccaggtgtggtggtgcatgcctgtaatcccagctactcgggaggctgaggcaggagaatcacttgaac

SEQ ID NO: 123795 - DNA, 80 bp, synthetic construct
  misc_feature 1..80: note = Artificially Synthesized Probe
  source 1..80: mol_type = other DNA
tcccagctactcaggaggctgaaacaggaggatcactcgagcccaggagtttgagaccagcctgggcaacacagtgagac

SEQ ID NO: 123796 - DNA, 80 bp, synthetic construct; identical to SEQ ID NO: 39967
  misc_feature 1..80: note = Artificially Synthesized Probe
  source 1..80: mol_type = other DNA

SEQ ID NO: 123797 - DNA, 80 bp, synthetic construct
  misc_feature 1..80: note = Artificially Synthesized Probe
  source 1..80: mol_type = other DNA
cctatctttttcttttgttacattttatactaaacacactttaatcagattgacataagtgatttaaaagaagtaacttt

SEQ ID NO: 123798 - DNA, 80 bp, synthetic construct
  misc_feature 1..80: note = Artificially Synthesized Probe
  source 1..80: mol_type = other DNA
tagcctcgacctcctgggctaaggcaatcctcccacctcagcctcccaagtaggtgggactagaaactcacgccaccatg

SEQ ID NO: 123799 - DNA, 80 bp, synthetic construct
  misc_feature 1..80: note = Artificially Synthesized Probe
  source 1..80: mol_type = other DNA
catgcccagctaatttttgtatttttagtagagacggagtttcaccaggttggtcaggctgctctcgaatttctgatctc

SEQ ID NO: 123800 - DNA, 80 bp, synthetic construct
  misc_feature 1..80: note = Artificially Synthesized Probe
  source 1..80: mol_type = other DNA
agaaggcattcttacctctgactttgtgttttcagttctttcaaggtgggagtgatttcctggagcatttcaacgtgttc

SEQ ID NO: 123801 - DNA, 80 bp, synthetic construct; identical to SEQ ID NO: 39968
  misc_feature 1..80: note = Artificially Synthesized Probe
  source 1..80: mol_type = other DNA

SEQ ID NO: 123802 - DNA, 80 bp, synthetic construct
  misc_feature 1..80: note = Artificially Synthesized Probe
  source 1..80: mol_type = other DNA
atacacactacaccagagggaaaaaagcaattcatcgttcaactggtgttcttataagaatcagttcttaaattccaact

SEQ ID NO: 123803 - DNA, 80 bp, synthetic construct
  misc_feature 1..80: note = Artificially Synthesized Probe
  source 1..80: mol_type = other DNA
gtgtgaatacaagatatggagaaaaaatgatgatgcagagctatgctgaaatttcttattgttcaacttgaaataggttt

SEQ ID NO: 123804 - DNA, 80 bp, synthetic construct
  misc_feature 1..80: note = Artificially Synthesized Probe
  source 1..80: mol_type = other DNA
tacaaaaaaaaaaattacctgggtgtggtggcacatgcctgtaatcctatctactcaggaggctgaggcaggataatcgc

SEQ ID NO: 123805 - DNA, 80 bp, synthetic construct
  misc_feature 1..80: note = Artificially Synthesized Probe
  source 1..80: mol_type = other DNA
attcactgaaacagttttaaaaataatttcctgaactttaaccctcccaacgtcttcaaaaggcaaaaattaccccctca

SEQ ID NO: 123806 - DNA, 80 bp, synthetic construct; identical to SEQ ID NO: 39969
  misc_feature 1..80: note = Artificially Synthesized Probe
  source 1..80: mol_type = other DNA

SEQ ID NO: 123807 - DNA, 80 bp, synthetic construct
  misc_feature 1..80: note = Artificially Synthesized Probe
  source 1..80: mol_type = other DNA
gagcaagatgccatctcaaaaaaaaaaaaaaaaaaccattcttaaaaataaagacacttagagaggaatctaaaacacac

SEQ ID NO: 123808 - DNA, 80 bp, synthetic construct
  misc_feature 1..80: note = Artificially Synthesized Probe
  source 1..80: mol_type = other DNA
gacagagataacaatagcaataataataatgtatttcaaacaattaagagtaaatttcaaatgcctcaccacaaaatata

SEQ ID NO: 123809 - DNA, 80 bp, synthetic construct
  misc_feature 1..80: note = Artificially Synthesized Probe
  source 1..80: mol_type = other DNA
accatctgccagagcagcttcttcatcctagaattgataaattaatgattaagaaaaatagttttagtatcagtaattac

SEQ ID NO: 123810 - DNA, 80 bp, synthetic construct
  misc_feature 1..80: note = Artificially Synthesized Probe
  source 1..80: mol_type = other DNA
agtaagattacaatgaaaatgtagagagcactaccatcatagtaactacacgataggccactttaaataaaaggtatctt

SEQ ID NO: 123811 - DNA, 80 bp, synthetic construct; identical to SEQ ID NO: 39970
  misc_feature 1..80: note = Artificially Synthesized Probe
  source 1..80: mol_type = other DNA

SEQ ID NO: 123812 - DNA, 80 bp, synthetic construct
  misc_feature 1..80: note = Artificially Synthesized Probe
  source 1..80: mol_type = other DNA
ttgggagaaaagaagaaccagctcctttgatttcagtactgccaaaacaagtaagcccccagagttaattacaaaaatgt

SEQ ID NO: 123813 - DNA, 80 bp, synthetic construct
  misc_feature 1..80: note = Artificially Synthesized Probe
  source 1..80: mol_type = other DNA
ttggtgatcatctctggatctttttactcatctaatgagaaaagggtctcattatacaaagaggatagtcaaaaagccta

SEQ ID NO: 123814 - DNA, 80 bp, synthetic construct
  misc_feature 1..80: note = Artificially Synthesized Probe
  source 1..80: mol_type = other DNA
atcatcaggaatataaaccagggacaccctcaagaggctgaagagcaagagtcatgcactgcttcagagaattaaatact

SEQ ID NO: 123815 - DNA, 80 bp, synthetic construct; identical to SEQ ID NO: 39971
  misc_feature 1..80: note = Artificially Synthesized Probe
  source 1..80: mol_type = other DNA

SEQ ID NO: 123816 - DNA, 80 bp, synthetic construct
  misc_feature 1..80: note = Artificially Synthesized Probe
  source 1..80: mol_type = other DNA
tactaaagttctctatgatgataaaaagggtaataaaaaaaaaatctagtgtctccccttaataaacaaagaatgagcat

SEQ ID NO: 123817 - DNA, 80 bp, synthetic construct
  misc_feature 1..80: note = Artificially Synthesized Probe
  source 1..80: mol_type = other DNA
agtgaaaccctgtctctactaaaaatacaaaaaattagccaggcgagtggcacatgtctgtaatcccagctactcaggag

SEQ ID NO: 123818 - DNA, 80 bp, synthetic construct
  misc_feature 1..80: note = Artificially Synthesized Probe
  source 1..80: mol_type = other DNA
tctataataggtttttaaataaccataaagtcctacacatattatatgaaaaccaacataataataacatgaatatgaat

SEQ ID NO: 123819 - DNA, 80 bp, synthetic construct
  misc_feature 1..80: note = Artificially Synthesized Probe
  source 1..80: mol_type = other DNA
ctaaggtcaggagttcaagaccagcctggccaagacggtgaaaccccatctctactaaaaactacaaaaattagccaggc

SEQ ID NO: 123820 - DNA, 80 bp, synthetic construct; identical to SEQ ID NO: 39972
  misc_feature 1..80: note = Artificially Synthesized Probe
  source 1..80: mol_type = other DNA

SEQ ID NO: 123821 - DNA, 80 bp, synthetic construct; identical to SEQ ID NO: 39869
  misc_feature 1..80: note = Artificially Synthesized Probe
  source 1..80: mol_type = other DNA

SEQ ID NO: 123822 - DNA, 80 bp, synthetic construct
  misc_feature 1..80: note = Artificially Synthesized Probe
  source 1..80: mol_type = other DNA
ttttttttttttttctgagacggagttttttttcctcttgttgcccaggctggagtgcaatggcatcatctccactcact

SEQ ID NO: 123823 - DNA, 80 bp, synthetic construct
  misc_feature 1..80: note = Artificially Synthesized Probe
  source 1..80: mol_type = other DNA
tatattttttagtcgagatggggtttcaccatgttggccaggatggtcttgatcccttgacctcatgatccgcccacctc

SEQ ID NO: 123824 - DNA, 80 bp, synthetic construct; identical to SEQ ID NO: 39973
  misc_feature 1..80: note = Artificially Synthesized Probe
  source 1..80: mol_type = other DNA

SEQ ID NO: 123825 - DNA, 80 bp, synthetic construct
  misc_feature 1..80: note = Artificially Synthesized Probe
  source 1..80: mol_type = other DNA
atggcacacataaaaattccagatagtggtaaggatatgaaaaaaacgtggcaggaatgggtgtcatagtgaaaaagtca

SEQ ID NO: 123826 - DNA, 80 bp, synthetic construct
  misc_feature 1..80: note = Artificially Synthesized Probe
  source 1..80: mol_type = other DNA
tcaagaccagcctggccaacatggtgaaaccccatctctactaaaagtacaaaaaccagccaggcgtggtggcaggcatc

SEQ ID NO: 123827 - DNA, 80 bp, synthetic construct
  misc_feature 1..80: note = Artificially Synthesized Probe
  source 1..80: mol_type = other DNA
aaaccaccaccacttatacatacataaattttatctcaaagaagcaccacaatagaattcaaaagagaattcaatctaaa

SEQ ID NO: 123828 - DNA, 80 bp, synthetic construct
  misc_feature 1..80: note = Artificially Synthesized Probe
  source 1..80: mol_type = other DNA
ctctaccaaaaatacaaaaaattagctgggcgaggtggcgggcgcctgtagtcccagctactcgggaggctgaggcagga

SEQ ID NO: 123829 - DNA, 80 bp, synthetic construct; identical to SEQ ID NO: 39974
  misc_feature 1..80: note = Artificially Synthesized Probe
  source 1..80: mol_type = other DNA

SEQ ID NO: 123830 - DNA, 80 bp, synthetic construct
  misc_feature 1..80: note = Artificially Synthesized Probe
  source 1..80: mol_type = other DNA
ccaaaataatgacaacatgaaaagataacaaacagctcctctgaatcatcaagggtggtccaatgaaaggagcctcaggg

SEQ ID NO: 123831 - DNA, 80 bp, synthetic construct
  misc_feature 1..80: note = Artificially Synthesized Probe
  source 1..80: mol_type = other DNA
tcacaataaaggaatctaattaagccttagcttctctgtgtatgaaattcaaactactactactggctttaaaaaatagt

SEQ ID NO: 123832 - DNA, 80 bp, synthetic construct
  misc_feature 1..80: note = Artificially Synthesized Probe
  source 1..80: mol_type = other DNA
ttgagcagataaaaagtatcactttagtaatcatcctcaatcaacaccagataacaaatgaggggcttttgcttatggaa

SEQ ID NO: 123833 - DNA, 80 bp, synthetic construct
  misc_feature 1..80: note = Artificially Synthesized Probe
  source 1..80: mol_type = other DNA
tcaccacaacctccatctcccaggttcaagtgattctcctgcctcagcctcccaagtagctgggattacaggcatatgcc

SEQ ID NO: 123834 - DNA, 80 bp, synthetic construct; identical to SEQ ID NO: 39975
  misc_feature 1..80: note = Artificially Synthesized Probe
  source 1..80: mol_type = other DNA

SEQ ID NO: 123835 - DNA, 80 bp, synthetic construct
  misc_feature 1..80: note = Artificially Synthesized Probe
  source 1..80: mol_type = other DNA
cctcctaggttccagcaattctcctgcctcagcctcccgagtagctgggaatacaggcatgcaccaccacactcgactaa

SEQ ID NO: 123836 - DNA, 80 bp, synthetic construct
  misc_feature 1..80: note = Artificially Synthesized Probe
  source 1..80: mol_type = other DNA
ttaatcttcctaaattgtgccactctcccgcagctaatatgattccctaaagtcactccaaatacacttgaactgggcca

SEQ ID NO: 123837 - DNA, 80 bp, synthetic construct
  misc_feature 1..80: note = Artificially Synthesized Probe
  source 1..80: mol_type = other DNA
aaaagattagccgggtgtggtggtgcgtgcctgtaatccctagagctacttgggaggctgaggaaggagaactgcttgaa

SEQ ID NO: 123838 - DNA, 80 bp, synthetic construct; identical to SEQ ID NO: 39976
  misc_feature 1..80: note = Artificially Synthesized Probe
  source 1..80: mol_type = other DNA

SEQ ID NO: 123839 - DNA, 80 bp, synthetic construct
  misc_feature 1..80: note = Artificially Synthesized Probe
  source 1..80: mol_type = other DNA
ctccaggtttttgtttttgtttttgagacagtctcactctgtcacccagactggagtgcaatggcatgatcttggctcac

SEQ ID NO: 123840 - DNA, 80 bp, synthetic construct
  misc_feature 1..80: note = Artificially Synthesized Probe
  source 1..80: mol_type = other DNA
ggcgggcagatcacctgaggtcaggagttcaagaccagcctggccaacctggcgaaaccctgtcaatcatgccactgcac

SEQ ID NO: 123841 - DNA, 80 bp, synthetic construct
  misc_feature 1..80: note = Artificially Synthesized Probe
  source 1..80: mol_type = other DNA
agggagagtaaatgtgtgttcatggtattagtcttaccttagccatagctttcaagagatgtttgacatctccaagctgt

SEQ ID NO: 123842 - DNA, 80 bp, synthetic construct
  misc_feature 1..80: note = Artificially Synthesized Probe
  source 1..80: mol_type = other DNA
gtcataaaaatcctggccgtggcccagtgcagtagcttatgcctgtaatcccagcactttgggaggccaagacaggcata

SEQ ID NO: 123843 - DNA, 80 bp, synthetic construct; identical to SEQ ID NO: 39977
  misc_feature 1..80: note = Artificially Synthesized Probe
  source 1..80: mol_type = other DNA

SEQ ID NO: 123844 - DNA, 80 bp, synthetic construct
  misc_feature 1..80: note = Artificially Synthesized Probe
  source 1..80: mol_type = other DNA
tcccagctactcaggaggatgaggcaggagaatggcgtgaacccgggaagcagagctggcagtgagccgagattgcgcca

SEQ ID NO: 123845 - DNA, 80 bp, synthetic construct
  misc_feature 1..80: note = Artificially Synthesized Probe
  source 1..80: mol_type = other DNA
tacctgttataaaaaacaaacaaaccttccattatactaatttgtaaaggaatcaaaacaaaaggggttgggggggtcca

SEQ ID NO: 123846 - DNA, 80 bp, synthetic construct
  misc_feature 1..80: note = Artificially Synthesized Probe
  source 1..80: mol_type = other DNA
ggaggctgaggcacgtgaatcacttaaacccaggaggtggaggttgtactgagccaagatcgtgccactgcactccagcc

SEQ ID NO: 123847 - DNA, 80 bp, synthetic construct; identical to SEQ ID NO: 39978
  misc_feature 1..80: note = Artificially Synthesized Probe
  source 1..80: mol_type = other DNA

SEQ ID NO: 123848 - DNA, 80 bp, synthetic construct
  misc_feature 1..80: note = Artificially Synthesized Probe
  source 1..80: mol_type = other DNA
atttcataatggagtaggagtttgacaccagcatgggcaacatggggaggccccatctctacaaaaaaataaaaataaaa

SEQ ID NO: 123849 - DNA, 80 bp, synthetic construct
  misc_feature 1..80: note = Artificially Synthesized Probe
  source 1..80: mol_type = other DNA
gtgacatgcacgtgtggtcccagctattgggagggtgaggtaggaggacttactgagcctgggaggtggaggctgcagtg

SEQ ID NO: 123850 - DNA, 80 bp, synthetic construct; identical to SEQ ID NO: 39979
  misc_feature 1..80: note = Artificially Synthesized Probe
  source 1..80: mol_type = other DNA

SEQ ID NO: 123851 - DNA, 80 bp, synthetic construct
  misc_feature 1..80: note = Artificially Synthesized Probe
  source 1..80: mol_type = other DNA
ttagcctgggactaatttattagtggtgtggtggtatgcacctgtggtcccagctactcaggaggctaaggcgggaggat

SEQ ID NO: 123852 - DNA, 80 bp, synthetic construct
  misc_feature 1..80: note = Artificially Synthesized Probe
  source 1..80: mol_type = other DNA
caataggatgttcaagaccagtgtcctaaatagaacaagcatttgtttgacttcgagtatcagctgaaataatgagttct

SEQ ID NO: 123853 - DNA, 80 bp, synthetic construct
  misc_feature 1..80: note = Artificially Synthesized Probe
  source 1..80: mol_type = other DNA
ttattatggctgttttactctcccctcaagtaaaatagccatacacaatttgctgaaattttccttagtgtactttgaaa

SEQ ID NO: 123854 - DNA, 80 bp, synthetic construct
  misc_feature 1..80: note = Artificially Synthesized Probe
  source 1..80: mol_type = other DNA
atgtatttccccgtattatgtacctatggacatcaaacttagtacagactgataaaaggctgaatagacaactctggttt

SEQ ID NO: 123855 - DNA, 80 bp, synthetic construct
  misc_feature 1..80: note = Artificially Synthesized Probe
  source 1..80: mol_type = other DNA
atacagtttcatccttttagaagtatagaaagatcctaagtttgggcacagtaagacactcaatatagatctactactaa

SEQ ID NO: 123856 - DNA, 80 bp, synthetic construct; identical to SEQ ID NO: 39980
  misc_feature 1..80: note = Artificially Synthesized Probe
  source 1..80: mol_type = other DNA

SEQ ID NO: 123857 - DNA, 80 bp, synthetic construct
  misc_feature 1..80: note = Artificially Synthesized Probe
  source 1..80: mol_type = other DNA
cagtggttcccaaaaccttctcaactttacgcttgaggaacccatagatttcaaataatacaactgacctaagaccactc

SEQ ID NO: 123858 - DNA, 80 bp, synthetic construct
  misc_feature 1..80: note = Artificially Synthesized Probe
  source 1..80: mol_type = other DNA
ccgctaatttatttatttatttatttattttagtagagacggggtttcaccatgtcagttggccaggctggtctcgaatt

SEQ ID NO: 123859 - DNA, 80 bp, synthetic construct
  misc_feature 1..80: note = Artificially Synthesized Probe
  source 1..80: mol_type = other DNA
gagttcaggggttcaagaccagcctgggcaacgtggtgaaaaccccatctctacaaaaaatacaaaaatgagccgggctg

SEQ ID NO: 123860 - DNA, 80 bp, synthetic construct; identical to SEQ ID NO: 39981
  misc_feature 1..80: note = Artificially Synthesized Probe
  source 1..80: mol_type = other DNA

SEQ ID NO: 123861 - DNA, 80 bp, synthetic construct
  misc_feature 1..80: note = Artificially Synthesized Probe
  source 1..80: mol_type = other DNA
actggcaaactaacactaaaagaaatcaacaagtgttgctttttcaaaagcctaaatcggctgagtgcggtgacttacac

SEQ ID NO: 123862 - DNA, 80 bp, synthetic construct
  misc_feature 1..80: note = Artificially Synthesized Probe
  source 1..80: mol_type = other DNA
tttttccttgtaaccgggaggcagaggctgcagtgagtcgagatgacaccactgcactccagcctgggagacagagcaag

SEQ ID NO: 123863 - DNA, 80 bp, synthetic construct
  misc_feature 1..80: note = Artificially Synthesized Probe
  source 1..80: mol_type = other DNA
ggctttaaatgcttaaagtttaagacctgagaaatacattcggaatcacaaagatgactggcaatccaggtccctaaatt

SEQ ID NO: 123864 - DNA, 80 bp, synthetic construct; identical to SEQ ID NO: 39982
  misc_feature 1..80: note = Artificially Synthesized Probe
  source 1..80: mol_type = other DNA

SEQ ID NO: 123865 - DNA, 80 bp, synthetic construct
  misc_feature 1..80: note = Artificially Synthesized Probe
  source 1..80: mol_type = other DNA
ccaacatcctaacaaactgttactccctataaccaaatgtatatcacagtatcgtctaccaaggcgttacatcctgaaac

SEQ ID NO: 123866 - DNA, 80 bp, synthetic construct
  misc_feature 1..80: note = Artificially Synthesized Probe
  source 1..80: mol_type = other DNA
atatttattaatagctcatgtacatattccataactacataagccatttggcttcatacctgtcagcaatgaagtcagct

SEQ ID NO: 123867 - DNA, 80 bp, synthetic construct
  misc_feature 1..80: note = Artificially Synthesized Probe
  source 1..80: mol_type = other DNA
ataatagaaaatccattgtcatttatttaccacctaatttgttagatgccagaaaatcaaatttcacacatttcaataaa

SEQ ID NO: 123868 - DNA, 80 bp, synthetic construct
  misc_feature 1..80: note = Artificially Synthesized Probe
  source 1..80: mol_type = other DNA
ttttttttacgactaaacatctcaattctagactcaggcactaattattaaagtcatctagttatatacaccaattctca

SEQ ID NO: 123869 - DNA, 80 bp, synthetic construct; identical to SEQ ID NO: 39983
  misc_feature 1..80: note = Artificially Synthesized Probe
  source 1..80: mol_type = other DNA

SEQ ID NO: 123870 - DNA, 80 bp, synthetic construct
  misc_feature 1..80: note = Artificially Synthesized Probe
  source 1..80: mol_type = other DNA
ttagaataaatcagtcctaaattaggcacagctgccctcccattgatcaaaaagacaggaaactacatttatttaaaaag

SEQ ID NO: 123871 - DNA, 80 bp, synthetic construct
  misc_feature 1..80: note = Artificially Synthesized Probe
  source 1..80: mol_type = other DNA
acttagggaaaacttccatcgcccaagaccagcgtgggtcgatcccatcaacagtcacacaatctcatctcatgctccac

SEQ ID NO: 123872 - DNA, 80 bp, synthetic construct; identical to SEQ ID NO: 39984
  misc_feature 1..80: note = Artificially Synthesized Probe
  source 1..80: mol_type = other DNA

SEQ ID NO: 123873 - DNA, 80 bp, synthetic construct; identical to SEQ ID NO: 39870
  misc_feature 1..80: note = Artificially Synthesized Probe
  source 1..80: mol_type = other DNA

SEQ ID NO: 123874 - DNA, 80 bp, synthetic construct
  misc_feature 1..80: note = Artificially Synthesized Probe
  source 1..80: mol_type = other DNA
aagccgcgcccggctccgaggggtggagggcctaggccgcgcctcccagccccgcggccctaggcctcggcccgcccgag

SEQ ID NO: 123875 - DNA, 80 bp, synthetic construct
  misc_feature 1..80: note = Artificially Synthesized Probe
  source 1..80: mol_type = other DNA
caagcgccgccgcccaaagaagcgcgagtcgccgcccgaaccggccgccgccgacaccccgctccggcccggggctgagg

SEQ ID NO: 123876 - DNA, 80 bp, synthetic construct
  misc_feature 1..80: note = Artificially Synthesized Probe
  source 1..80: mol_type = other DNA
cgtcttttccagggccgtgcgcggcccacgtcgccggggccccggaggacgaggacgacgaggagcaggcggtggcggca

SEQ ID NO: 123877 - DNA, 80 bp, synthetic construct
  misc_feature 1..80: note = Artificially Synthesized Probe
  source 1..80: mol_type = other DNA
ttaatcatcactgtccccccgcccccctaacaacctcttacatacagtatatgctcaacgaatgtaatcggaatgtatat

SEQ ID NO: 123878 - DNA, 80 bp, synthetic construct
  misc_feature 1..80: note = Artificially Synthesized Probe
  source 1..80: mol_type = other DNA
aacgaagctctaactcagacactgaactgttaaactgtgatgcaaacgaacacatctgctgacatcgcttgattagttca

SEQ ID NO: 123879 - DNA, 80 bp, synthetic construct
  misc_feature 1..80: note = Artificially Synthesized Probe
  source 1..80: mol_type = other DNA
gggaggaaggtgggaaagggaggtggcaattaataacatgaaaaaatactacttcctcattttgagaattcaggaccaga

SEQ ID NO: 123880 - DNA, 80 bp, synthetic construct
  misc_feature 1..80: note = Artificially Synthesized Probe
  source 1..80: mol_type = other DNA
cggcatttttaaaaaatggctctttccttaaatttcacacgtcagaacaaccacaattaaaaaaacaaaaaacaatgcag

SEQ ID NO: 123881 - DNA, 80 bp, synthetic construct; identical to SEQ ID NO: 39871
  misc_feature 1..80: note = Artificially Synthesized Probe
  source 1..80: mol_type = other DNA

SEQ ID NO: 123882 - DNA, 80 bp, synthetic construct
  misc_feature 1..80: note = Artificially Synthesized Probe
  source 1..80: mol_type = other DNA
ttaaactcctgggctcaagcaatcctaccgccttagtctcccaggtagctagtctcccagctgggaccagaggtgcgtgc

SEQ ID NO: 123883 - DNA, 80 bp, synthetic construct
  misc_feature 1..80: note = Artificially Synthesized Probe
  source 1..80: mol_type = other DNA
atacaaaaaacttagctgggcatggtggcgggtgcctgtaatcccagctacttgggaggctgaggcaggagaatcacttg

SEQ ID NO: 123884 - DNA, 80 bp, synthetic construct
  misc_feature 1..80: note = Artificially Synthesized Probe
  source 1..80: mol_type = other DNA
tcaagccatcctcccgcctcagacttctgagcagctagagctaaagggacataccaccatgcccagctatgatacattct

SEQ ID NO: 123885 - DNA, 80 bp, synthetic construct; identical to SEQ ID NO: 39872
  misc_feature 1..80: note = Artificially Synthesized Probe
  source 1..80: mol_type = other DNA

SEQ ID NO: 123886 - DNA, 80 bp, synthetic construct
  misc_feature 1..80: note = Artificially Synthesized Probe
  source 1..80: mol_type = other DNA
cagttgggactacaggtacccaccaccacacccagctaatttttttgtatttttagcagagacggggtttcaccatattg

SEQ ID NO: 123887 - DNA, 80 bp, synthetic construct
  misc_feature 1..80: note = Artificially Synthesized Probe
  source 1..80: mol_type = other DNA
aatctttggatcactttagttgtataaaagagacccagagaaccttaaacagatatgaatttaagacctctttatttttc

SEQ ID NO: 123888 - DNA, 80 bp, synthetic construct
  misc_feature 1..80: note = Artificially Synthesized Probe
  source 1..80: mol_type = other DNA
accccacatataacttccagctactcatctaatcctgtaaaagtgaatacaaagatggtgcatgtaagtcacaatacctg

SEQ ID NO: 123889 - DNA, 80 bp, synthetic construct; identical to SEQ ID NO: 39873
  misc_feature 1..80: note = Artificially Synthesized Probe
  source 1..80: mol_type = other DNA

SEQ ID NO: 123890 - DNA, 80 bp, synthetic construct
  misc_feature 1..80: note = Artificially Synthesized Probe
  source 1..80: mol_type = other DNA
gaacatttaaggccaaacatgtatggagagagaggcaagaactggctttcagtttattatcttaaaacgtacagaaggaa

SEQ ID NO: 123891 - DNA, 80 bp, synthetic construct
  misc_feature 1..80: note = Artificially Synthesized Probe
  source 1..80: mol_type = other DNA
aagcgattctcctgcctcagcctcccgagtagctgggactacaggcacctgccatcgtgcctggctaatttttgtagttt

SEQ ID NO: 123892 - DNA, 80 bp, synthetic construct; identical to SEQ ID NO: 39859
  misc_feature 1..80: note = Artificially Synthesized Probe
  source 1..80: mol_type = other DNA

SEQ ID NO: 123893 - DNA, 80 bp, synthetic construct
  misc_feature 1..80: note = Artificially Synthesized Probe
  source 1..80: mol_type = other DNA
ccatcctcccacctcagcttccaaagaagctgggacaagaggtgcgtgccaccatgcccaactaattttttgtattttct

SEQ ID NO: 123894 - DNA, 80 bp, synthetic construct; identical to SEQ ID NO: 39874
  misc_feature 1..80: note = Artificially Synthesized Probe
  source 1..80: mol_type = other DNA

SEQ ID NO: 123895 - DNA, 80 bp, synthetic construct
  misc_feature 1..80: note = Artificially Synthesized Probe
  source 1..80: mol_type = other DNA
cttttctctgaccaatacactgtagagaaagcttatttcaatcttcaaatgactgagctccaaaaaagcttcattaaaaa

SEQ ID NO: 123896 - DNA, 80 bp, synthetic construct
  misc_feature 1..80: note = Artificially Synthesized Probe
  source 1..80: mol_type = other DNA
gtagaaggattatgtacatagctttcaatatccagtcactataatagttcagaaaaatattctgctgccttaggcatcac

SEQ ID NO: 123897 - DNA, 80 bp, synthetic construct
  misc_feature 1..80: note = Artificially Synthesized Probe
  source 1..80: mol_type = other DNA
caaattcattaaaaacctgagatatttagtatgtttctttttttttttttttttttcttttttttttctttttttttttt

SEQ ID NO: 123898 - DNA, 80 bp, synthetic construct
  misc_feature 1..80: note = Artificially Synthesized Probe
  source 1..80: mol_type = other DNA
ccccagagtgtgatattccccttcctgtgtccatgtgatctcattgttcaattcccacctatgagtgagaatatgcggtg

SEQ ID NO: 123899 - DNA, 80 bp, synthetic construct
  misc_feature 1..80: note = Artificially Synthesized Probe
  source 1..80: mol_type = other DNA
ttgggttggttccaagtctttgctattgtgaatagtgccgcaataaacatacgtgtgcatgtgtctttatagcagcatga

SEQ ID NO: 123900 - DNA, 80 bp, synthetic construct
  misc_feature 1..80: note = Artificially Synthesized Probe
  source 1..80: mol_type = other DNA
ctccagcacctgttgtttcctgactttttaatgattgccattctaactggtgtgagatgatatctcatagtggttttgat

SEQ ID NO: 123901 - DNA, 80 bp, synthetic construct
  misc_feature 1..80: note = Artificially Synthesized Probe
  source 1..80: mol_type = other DNA
ctggatattagccctttgtcagatgagtaggttgcaaaaattttctcccatgttgtaggttgcctgttcactctgatggt

SEQ ID NO: 123902 - DNA, 80 bp, synthetic construct
  misc_feature 1..80: note = Artificially Synthesized Probe
  source 1..80: mol_type = other DNA
ttaggtctaacatttaagtctttaatccatcttgaattgatttttgtataaggtgtaaggaagggatccagtttcagctt

SEQ ID NO: 123903 - DNA, 80 bp, synthetic construct
  misc_feature 1..80: note = Artificially Synthesized Probe
  source 1..80: mol_type = other DNA
aagacagcaaaaaacttaagattgaacttcaatttccaagggtactttgaagaggttgtttgtaggttattctgtacccc

SEQ ID NO: 123904 - DNA, 80 bp, synthetic construct
  misc_feature 1..80: note = Artificially Synthesized Probe
  source 1..80: mol_type = other DNA
tggtaccagtaccatgctgttttggttactgtagccttgtagtatagtttgaagtcaggtagtgtgatgcctccagcttt

SEQ ID NO: 123905 - DNA, 80 bp, synthetic construct
  misc_feature 1..80: note = Artificially Synthesized Probe
  source 1..80: mol_type = other DNA
atattgattcttcctacccatgagcatggaatgttcttccatttgtttgtgtcctcttttatttccttgagcagtggttt

SEQ ID NO: 123906 - DNA, 80 bp, synthetic construct
  misc_feature 1..80: note = Artificially Synthesized Probe
  source 1..80: mol_type = other DNA
ttgtatcctgagactttgctgaagttgcttatcagcttaaggagattttgcgctgagatgatggggttttctagataaac

SEQ ID NO: 123907 - DNA, 80 bp, synthetic construct
  misc_feature 1..80: note = Artificially Synthesized Probe
  source 1..80: mol_type = other DNA
gggaatgcttccagtttttgcccattcagtatgatattggctgtgggtttgtcatagatagctcttattattttgaaata

SEQ ID NO: 123908 - DNA, 80 bp, synthetic construct
  misc_feature 1..80: note = Artificially Synthesized Probe
  source 1..80: mol_type = other DNA
ccttgcatcccagggatgaagcccacttgatcatggtggataagctttttgatgtgctgctggattcggtttgccagtat

SEQ ID NO: 123909 - DNA, 80 bp, synthetic construct
  misc_feature 1..80: note = Artificially Synthesized Probe
  source 1..80: mol_type = other DNA
aggaatggtaccagttcctccttgtacctctggtagaattcggctgtgaatccatctggtcctggactctttttggttgg

SEQ ID NO: 123910 - DNA, 80 bp, synthetic construct
  misc_feature 1..80: note = Artificially Synthesized Probe
  source 1..80: mol_type = other DNA
ctgatggtagtttgtatttctgtgggatcggtggtgatatcccctttatcattttttattgtgtctatttgattcttctc

SEQ ID NO: 123911 - DNA, 80 bp, synthetic construct
  misc_feature 1..80: note = Artificially Synthesized Probe
  source 1..80: mol_type = other DNA
gaatgtgtttgctcttgcttttctagttcttttaattgtgatgttagggtgtcaattttggatctttcctgctttctctt

SEQ ID NO: 123912 - DNA, 80 bp, synthetic construct
  misc_feature 1..80: note = Artificially Synthesized Probe
  source 1..80: mol_type = other DNA
agtttccatgtagttgagcggctttgagtgagattcttaatcctgagttctagtttgattgcactgtggtctgagagata

SEQ ID NO: 123913 - DNA, 80 bp, synthetic construct
  misc_feature 1..80: note = Artificially Synthesized Probe
  source 1..80: mol_type = other DNA
agagctgagttcaattcctgggtatccttgttgactttctgtctcgttgatctgtctaatgttgacagtggggtgttaaa

SEQ ID NO: 123914 - DNA, 80 bp, synthetic construct
  misc_feature 1..80: note = Artificially Synthesized Probe
  source 1..80: mol_type = other DNA
aactgctgaggtctcttacgaaagttcaaatggcaagtcaccttgtagaatgacttaacagaggaagccaaactatacag

SEQ ID NO: 123915 - DNA, 80 bp, synthetic construct
  misc_feature 1..80: note = Artificially Synthesized Probe
  source 1..80: mol_type = other DNA
agaaaagccactatttatacattgttactaagacaaggaagattcagttcaactcaacttgctcttagaataagggtaaa

SEQ ID NO: 123916 - DNA, 80 bp, synthetic construct; identical to SEQ ID NO: 39878
  misc_feature 1..80: note = Artificially Synthesized Probe
  source 1..80: mol_type = other DNA

SEQ ID NO: 123917 - DNA, 80 bp, synthetic construct
  misc_feature 1..80: note = Artificially Synthesized Probe
  source 1..80: mol_type = other DNA
gttaatattgttatgtgtgaatttgatcctgtcattatgatgttagctggtgattttgctcattagttgatgcagtttct

SEQ ID NO: 123918 - DNA, 80 bp, synthetic construct
  misc_feature 1..80: note = Artificially Synthesized Probe
  source 1..80: mol_type = other DNA
ccttcacttatgaagcttagtttggctggatatgaaattctgggttgaaaattcttttctttaagaatgttgaatattgg

SEQ ID NO: 123919 - DNA, 80 bp, synthetic construct
  misc_feature 1..80: note = Artificially Synthesized Probe
  source 1..80: mol_type = other DNA
gctcttctcgaggagtatctttgtggcgttctctgtatttcctgaatctgaacgttggcctgccttgctagattggggaa

SEQ ID NO: 123920 - DNA, 80 bp, synthetic construct
  misc_feature 1..80: note = Artificially Synthesized Probe
  source 1..80: mol_type = other DNA
ccttctcgcttcatttcattcatttcatcttccattgctgataccctttcttccagttgattgcatcggctcctgaggct

SEQ ID NO: 123921 - DNA, 80 bp, synthetic construct; identical to SEQ ID NO: 30696
  misc_feature 1..80: note = Artificially Synthesized Probe
  source 1..80: mol_type = other DNA

SEQ ID NO: 123922 - DNA, 80 bp, synthetic construct
  misc_feature 1..80: note = Artificially Synthesized Probe
  source 1..80: mol_type = other DNA
tttccttctaacagacaggaccctcagctgcaggtctgttggaataccctgccgtgtgaggtgtcagtgtgcccctgctg

SEQ ID NO: 123923 - DNA, 80 bp, synthetic construct
  misc_feature 1..80: note = Artificially Synthesized Probe
  source 1..80: mol_type = other DNA
tctttttgtttgtctgtgccctgcccccagaggtggagcctacagaggcaggcaggcctccttgagctgtggtgggctcc

SEQ ID NO: 123924 - DNA, 80 bp, synthetic construct
  misc_feature 1..80: note = Artificially Synthesized Probe
  source 1..80: mol_type = other DNA
gggatatagtctcgtggtgcgccgtttcttaagccggtctgaaaagcgtaatattcgggtgggagtgacccgattttcca

SEQ ID NO: 123925 - DNA, 80 bp, synthetic construct
  misc_feature 1..80: note = Artificially Synthesized Probe
  source 1..80: mol_type = other DNA
gggaggccaaggtgggcagatcacctgaggtcaggagtttgagaccagcctggccagcatggtgaaaccccgtctctata

SEQ ID NO: 123926 - DNA, 80 bp, synthetic construct
  misc_feature 1..80: note = Artificially Synthesized Probe
  source 1..80: mol_type = other DNA
aaagctgttttttgtttttgcttgagtaaggtgccaggtacctctgaagcctgaaaacacaggcaataaaattcacctat

SEQ ID NO: 123927 - DNA, 80 bp, synthetic construct
  misc_feature 1..80: note = Artificially Synthesized Probe
  source 1..80: mol_type = other DNA
ccaaaatatatatatataggtataaatatacctatatatatatatttttatatatatttggtataaatataccaaaatat

SEQ ID NO: 123928 - DNA, 80 bp, synthetic construct
  misc_feature 1..80: note = Artificially Synthesized Probe
  source 1..80: mol_type = other DNA
ttttatatatatttggtataaatatatctaaatatatattttatatatatatttggtataaatataccaaaatatatatt

SEQ ID NO: 123929 - DNA, 80 bp, synthetic construct
  misc_feature 1..80: note = Artificially Synthesized Probe
  source 1..80: mol_type = other DNA
atgctcttctggcttacaagccaaggacacacaaatagacacactgaacaacagagcactaacaatcatagtattggtta

SEQ ID NO: 123930 - DNA, 80 bp, synthetic construct
  misc_feature 1..80: note = Artificially Synthesized Probe
  source 1..80: mol_type = other DNA
accgtgggggaggtgtgactgacatggcttgtggtctattgataagtagatcttcatgttgccactgttgagagaaaaag

SEQ ID NO: 123931 - DNA, 80 bp, synthetic construct; identical to SEQ ID NO: 39880
  misc_feature 1..80: note = Artificially Synthesized Probe
  source 1..80: mol_type = other DNA

SEQ ID NO: 123932 - DNA, 80 bp, synthetic construct
  misc_feature 1..80: note = Artificially Synthesized Probe
  source 1..80: mol_type = other DNA
gtaattaaggccaaaactaggcttctaaaaaccatttccaaaataaagacagatttattcccaaagctgtttatcacatc

SEQ ID NO: 123933 - DNA, 80 bp, synthetic construct
  misc_feature 1..80: note = Artificially Synthesized Probe
  source 1..80: mol_type = other DNA
gctcgggagttcgagaccagcctgaccaacatggagaaaccccatctctactaaaaatacaaaattagccaggcgtggtg

SEQ ID NO: 123934 - DNA, 80 bp, synthetic construct
  misc_feature 1..80: note = Artificially Synthesized Probe
  source 1..80: mol_type = other DNA
acagatcatgcttatcatacagccttgatggaaagaaattctaaggacacaaaccataaaggataaatgatctcaactat

SEQ ID NO: 123935 - DNA, 80 bp, synthetic construct
  misc_feature 1..80: note = Artificially Synthesized Probe
  source 1..80: mol_type = other DNA
attataaacaaaaacacttacctgaaacatggcaatatgcagctgaacccgctgcaggcttgtcttacaagaagaaatac

SEQ ID NO: 123936 - DNA, 80 bp, synthetic construct; identical to SEQ ID NO: 39860
  misc_feature 1..80: note = Artificially Synthesized Probe
  source 1..80: mol_type = other DNA

SEQ ID NO: 123937 - DNA, 80 bp, synthetic construct; identical to SEQ ID NO: 39881
  misc_feature 1..80: note = Artificially Synthesized Probe
  source 1..80: mol_type = other DNA

SEQ ID NO: 123938 - DNA, 80 bp, synthetic construct
  misc_feature 1..80: note = Artificially Synthesized Probe
  source 1..80: mol_type = other DNA
tcactgaaacaagagtttctaaaaagggttttcacattgacaatctgtacaggcccattcacagtattctgatcttcaag

SEQ ID NO: 123939 - DNA, 80 bp, synthetic construct
  misc_feature 1..80: note = Artificially Synthesized Probe
  source 1..80: mol_type = other DNA
tgtttacaggtagaatattacctgacaatgttttagaaaaggtaccacagagcctgaagaactccttaatagtctgtagt

SEQ ID NO: 123940 - DNA, 80 bp, synthetic construct
  misc_feature 1..80: note = Artificially Synthesized Probe
  source 1..80: mol_type = other DNA
ttctccactcttgacacaactgaacaactactttatggcacttgcattatttttaaatccaagtccacatttaccttttc

SEQ ID NO: 123941 - DNA, 80 bp, synthetic construct; identical to SEQ ID NO: 39882
  misc_feature 1..80: note = Artificially Synthesized Probe
  source 1..80: mol_type = other DNA

SEQ ID NO: 123942 - DNA, 80 bp, synthetic construct
  misc_feature 1..80: note = Artificially Synthesized Probe
  source 1..80: mol_type = other DNA
taaaaatacaaaaaaatcagccgagtgtgatggtgggcacctgtagtcccagctactcaggaggctgaggctaggagaat

SEQ ID NO: 123943 - DNA, 80 bp, synthetic construct
  misc_feature 1..80: note = Artificially Synthesized Probe
  source 1..80: mol_type = other DNA
caattcgttattaatgactgttatgtgattaaattttatgcaaacttcagtgatcagtctcatttttacacacaaaatat

SEQ ID NO: 123944 - DNA, 80 bp, synthetic construct
  misc_feature 1..80: note = Artificially Synthesized Probe
  source 1..80: mol_type = other DNA
attttgaatgtaaggtcttcagaaattcacccctcacattaccattaagacttacatagtgcttatgtatccaggcacta

SEQ ID NO: 123945 - DNA, 80 bp, synthetic construct; identical to SEQ ID NO: 39883
  misc_feature 1..80: note = Artificially Synthesized Probe
  source 1..80: mol_type = other DNA

SEQ ID NO: 123946 - DNA, 80 bp, synthetic construct
  misc_feature 1..80: note = Artificially Synthesized Probe
  source 1..80: mol_type = other DNA
ttatatgataaagctgttctataaataatctaatatttatgctattaatgattatactttttctagccgggcatgggggc

SEQ ID NO: 123947 - DNA, 80 bp, synthetic construct
  misc_feature 1..80: note = Artificially Synthesized Probe
  source 1..80: mol_type = other DNA
gtaccaaaaaagcactgatactgaaacacattctttcatgggtacttaacgattacagattaacgtggcaatcagaatac

SEQ ID NO: 123948 - DNA, 80 bp, synthetic construct
  misc_feature 1..80: note = Artificially Synthesized Probe
  source 1..80: mol_type = other DNA
atatatacacacacacgtacatatttatgaatatatatgaatatatttattattttatgaatataaccactccaaagaaa

SEQ ID NO: 123949 - DNA, 80 bp, synthetic construct
  misc_feature 1..80: note = Artificially Synthesized Probe
  source 1..80: mol_type = other DNA
ctaaataactagggtagtaaatttaaaccagactagcccagtgcagataattaccaaaggtggtggcagggggttcatta

SEQ ID NO: 123950 - DNA, 80 bp, synthetic construct; identical to SEQ ID NO: 39884
  misc_feature 1..80: note = Artificially Synthesized Probe
  source 1..80: mol_type = other DNA

SEQ ID NO: 123951 - DNA, 80 bp, synthetic construct
  misc_feature 1..80: note = Artificially Synthesized Probe
  source 1..80: mol_type = other DNA
ctccaaggggttctacaagatggcttaaaaatatcatgttcgactgtgtgtatgtacatgtacataactacaagcactaa

SEQ ID NO: 123952 - DNA, 80 bp, synthetic construct
  misc_feature 1..80: note = Artificially Synthesized Probe
  source 1..80: mol_type = other DNA
gaaggaaggatgaagcatgcacaatacctgcctgcactttttttttaagcaacttctcgtgatgtataattatttcaaaa

SEQ ID NO: 123953 - DNA, 80 bp, synthetic construct; identical to SEQ ID NO: 39885
  misc_feature 1..80: note = Artificially Synthesized Probe
  source 1..80: mol_type = other DNA

SEQ ID NO: 123954 - DNA, 80 bp, synthetic construct
  misc_feature 1..80: note = Artificially Synthesized Probe
  source 1..80: mol_type = other DNA
aaaacttttaatgttttttgagtttagctaagttacacatttggagacttagagccatacattaagagcaaacttatgta

SEQ ID NO: 123955 - DNA, 80 bp, synthetic construct
  misc_feature 1..80: note = Artificially Synthesized Probe
  source 1..80: mol_type = other DNA
aatgactttaaaaagttgtcatataattaaacattcctaggatgatgtaccttaagaacaaaaagaactgccctaaagta

SEQ ID NO: 123956 - DNA, 80 bp, synthetic construct
  misc_feature 1..80: note = Artificially Synthesized Probe
  source 1..80: mol_type = other DNA
atataatttgttatactttggtacttgcatacactcatgaaactgtcaccacaatcaagaaaatcagcataccgactacc

SEQ ID NO: 123957 - DNA, 80 bp, synthetic construct
  misc_feature 1..80: note = Artificially Synthesized Probe
  source 1..80: mol_type = other DNA
gtagaaatgtctagctttctttactcagcataattattgtaagtcatacatgtggctgtatgttatcaaggtgtcgttca

SEQ ID NO: 123958 - DNA, 80 bp, synthetic construct; identical to SEQ ID NO: 39886
  misc_feature 1..80: note = Artificially Synthesized Probe
  source 1..80: mol_type = other DNA

SEQ ID NO: 123959 - DNA, 80 bp, synthetic construct
  misc_feature 1..80: note = Artificially Synthesized Probe
  source 1..80: mol_type = other DNA
agtctagctctgttgcccaggctggagtgcagtggcacaatctcggctcactgcaagctccgcctcctgggttcacgcca

SEQ ID NO: 123960 - DNA, 80 bp, synthetic construct
  misc_feature 1..80: note = Artificially Synthesized Probe
  source 1..80: mol_type = other DNA
ttaaaataaaagtgttcacctgaagtgaggtatacactccattggctaagtgaactgtctcagacgcttccatggggttc

SEQ ID NO: 123961 - DNA, 80 bp, synthetic construct
  misc_feature 1..80: note = Artificially Synthesized Probe
  source 1..80: mol_type = other DNA
tcatcaggttacgcctacaagagataaatatctgtacagtgaaacttaaatgtataaacaaaacaaggtaactggccggg

SEQ ID NO: 123962 - DNA, 80 bp, synthetic construct
  misc_feature 1..80: note = Artificially Synthesized Probe
  source 1..80: mol_type = other DNA
aaaattagccaggtgtggtggcacacacctgtagtcccagctattaaggaggctgaggttgctgtgagccgagatcgtgc

SEQ ID NO: 123963 - DNA, 80 bp, synthetic construct; identical to SEQ ID NO: 39887
  misc_feature 1..80: note = Artificially Synthesized Probe
  source 1..80: mol_type = other DNA

SEQ ID NO: 123964 - DNA, 80 bp, synthetic construct
  misc_feature 1..80: note = Artificially Synthesized Probe
  source 1..80: mol_type = other DNA
gtggcagtgatgaactgacacactgttgggggtggctggggagcatattgcatttcatatctataaaaataaggaagagg

SEQ ID NO: 123965 - DNA, 80 bp, synthetic construct
  misc_feature 1..80: note = Artificially Synthesized Probe
  source 1..80: mol_type = other DNA
tcattatttacattttacagataaaaatgtctcaagagcttaagcaatttcctaaaaggacttgttgatgactgtgacag

SEQ ID NO: 123966 - DNA, 80 bp, synthetic construct; identical to SEQ ID NO: 39888
  misc_feature 1..80: note = Artificially Synthesized Probe
  source 1..80: mol_type = other DNA

SEQ ID NO: 123967 - DNA, 80 bp, synthetic construct
  misc_feature 1..80: note = Artificially Synthesized Probe
  source 1..80: mol_type = other DNA
accagcctggccaatatagtgaaaccccgtctgtactaaaaagacaaaaattagccgggcttggtggtgttgtagtccca

SEQ ID NO: 123968 - DNA, 80 bp, synthetic construct
  misc_feature 1..80: note = Artificially Synthesized Probe
  source 1..80: mol_type = other DNA
tcttgacaacgctctactgtggtgttacagatgagctcttccatccaggtcttccactgttcaattcgatgtttctgaaa

SEQ ID NO: 123969 - DNA, 80 bp, synthetic construct
  misc_feature 1..80: note = Artificially Synthesized Probe
  source 1..80: mol_type = other DNA
gctgttgctggcacgtaacttggaggaccttttggtaaaagacattattaaacacagtaaaacagggtcaagtcagctgt

SEQ ID NO: 123970 - DNA, 80 bp, synthetic construct
  misc_feature 1..80: note = Artificially Synthesized Probe
  source 1..80: mol_type = other DNA
aatgcagcctgataatgtgttatccattgttcaaattcattcagcttcacctggattgcttcctgaacagctctttgctg

SEQ ID NO: 123971 - DNA, 80 bp, synthetic construct
  misc_feature 1..80: note = Artificially Synthesized Probe
  source 1..80: mol_type = other DNA
tgctgggattacaggcgtgagccactgtgcccagccaacaattaagattttaattgtgttctattttgtattgatacttg

SEQ ID NO: 123972 - DNA, 80 bp, synthetic construct; identical to SEQ ID NO: 39889
  misc_feature 1..80: note = Artificially Synthesized Probe
  source 1..80: mol_type = other DNA

SEQ ID NO: 123973 - DNA, 80 bp, synthetic construct
  misc_feature 1..80: note = Artificially Synthesized Probe
  source 1..80: mol_type = other DNA
agtgaggtagatgaagtagctgccattgtacaaatgagtaaggactcaagatacataatggtaatgagaaaaccaaaacc

SEQ ID NO: 123974 - DNA, 80 bp, synthetic construct
  misc_feature 1..80: note = Artificially Synthesized Probe
  source 1..80: mol_type = other DNA
tactaacactttgaagttgcagtcactgagacagcttttatcatttatgtgatttgttacaataattctaatccatattg

SEQ ID NO: 123975 - DNA, 80 bp, synthetic construct; identical to SEQ ID NO: 39890
  misc_feature 1..80: note = Artificially Synthesized Probe
  source 1..80: mol_type = other DNA

SEQ ID NO: 123976 - DNA, 80 bp, synthetic construct
  misc_feature 1..80: note = Artificially Synthesized Probe
  source 1..80: mol_type = other DNA
aacccgaaaggggtgatgcgttgcctccactgtacaaaaacaactaatgcgttcaagtttacacaggcataaactgacag

SEQ ID NO: 123977 - DNA, 80 bp, synthetic construct
  misc_feature 1..80: note = Artificially Synthesized Probe
  source 1..80: mol_type = other DNA
aaatcatgaacccacctcttaggagtgtggaatgtaactgtgcatgtttgtgtggaagaattacctaataaaaagttaac

SEQ ID NO: 123978 - DNA, 80 bp, synthetic construct
  misc_feature 1..80: note = Artificially Synthesized Probe
  source 1..80: mol_type = other DNA
cattttgatgagcatgtttactctattaataaaaagaagacaatgacttattccgtcactgggcttcaccttaatctcag

SEQ ID NO: 123979 - DNA, 80 bp, synthetic construct
  misc_feature 1..80: note = Artificially Synthesized Probe
  source 1..80: mol_type = other DNA
cagcagcgtcagcagggtctctctgccacgccgcataatgtgtaaaacctgttttcaggagagtttttaaaataaggtct

SEQ ID NO: 123980 - DNA, 80 bp, synthetic construct; identical to SEQ ID NO: 39891
  misc_feature 1..80: note = Artificially Synthesized Probe
  source 1..80: mol_type = other DNA

SEQ ID NO: 123981 - DNA, 80 bp, synthetic construct
  misc_feature 1..80: note = Artificially Synthesized Probe
  source 1..80: mol_type = other DNA
tgtctgtctccaaggccaattatgtatccaaccatagacatgactgcagtagatcttgcataagactaaaggaaaggaaa

SEQ ID NO: 123982 - DNA, 80 bp, synthetic construct
  misc_feature 1..80: note = Artificially Synthesized Probe
  source 1..80: mol_type = other DNA
cattcctcaaggttgctgcatgtggttatgcaggcatacaacactgtagacctgattggtcctagttaatcagctatcag

SEQ ID NO: 123983 - DNA, 80 bp, synthetic construct; identical to SEQ ID NO: 39861
  misc_feature 1..80: note = Artificially Synthesized Probe
  source 1..80: mol_type = other DNA

SEQ ID NO: 123984 - DNA, 80 bp, synthetic construct
  misc_feature 1..80: note = Artificially Synthesized Probe
  source 1..80: mol_type = other DNA
caaactcccgacctcagatgatccacccaccacagcttccaaaagtgctgggattacagatgtgagccactgtgcctgac

SEQ ID NO: 123985 - DNA, 80 bp, synthetic construct; identical to SEQ ID NO: 39892
  misc_feature 1..80: note = Artificially Synthesized Probe
  source 1..80: mol_type = other DNA

SEQ ID NO: 123986 - DNA, 80 bp, synthetic construct
  misc_feature 1..80: note = Artificially Synthesized Probe
  source 1..80: mol_type = other DNA
taatttgcttaggatctccttttcatttcctccataactctttccccatcctgccctcggacacagtcatgttcatgcct

SEQ ID NO: 123987 - DNA, 80 bp, synthetic construct
  misc_feature 1..80: note = Artificially Synthesized Probe
  source 1..80: mol_type = other DNA
actactgagtatagtctaaaacaaagcacatacctgcgtaactctccaccattcatcaggtgttgtgcaagatgaccaga

SEQ ID NO: 123988 - DNA, 80 bp, synthetic construct; identical to SEQ ID NO: 39893
  misc_feature 1..80: note = Artificially Synthesized Probe
  source 1..80: mol_type = other DNA

SEQ ID NO: 123989 - DNA, 80 bp, synthetic construct
  misc_feature 1..80: note = Artificially Synthesized Probe
  source 1..80: mol_type = other DNA
attctggactatggatctttcttatgatatataccttttaattaggcccattcactttattgaaaaattggtctactgtt

SEQ ID NO: 123990 - DNA, 80 bp, synthetic construct
  misc_feature 1..80: note = Artificially Synthesized Probe
  source 1..80: mol_type = other DNA
acacattacatgagaatttagatagcccttctctaattactatttgaaattacccttcaataacagttctgcagtctcct

SEQ ID NO: 123991 - DNA, 80 bp, synthetic construct
  misc_feature 1..80: note = Artificially Synthesized Probe
  source 1..80: mol_type = other DNA
ttaagcactcagatacatggctaaaatatattctaaattaaactcctagtctaaatcaaagcataaaattcatagataca

SEQ ID NO: 123992 - DNA, 80 bp, synthetic construct; identical to SEQ ID NO: 39894
  misc_feature 1..80: note = Artificially Synthesized Probe
  source 1..80: mol_type = other DNA

SEQ ID NO: 123993 - DNA, 80 bp, synthetic construct
  misc_feature 1..80: note = Artificially Synthesized Probe
  source 1..80: mol_type = other DNA
aaaacaaaaccaaaaaaaagcaaacaactttatttttataaaaggtacctcaaggccagatgcggtggctcatgcctgta

SEQ ID NO: 123994 - DNA, 80 bp, synthetic construct
  misc_feature 1..80: note = Artificially Synthesized Probe
  source 1..80: mol_type = other DNA
tggtttttaaaaaggtaaaagattacactggattagctactttctatgaaagaaactacagctatcacagaagagggaaa

SEQ ID NO: 123995 - DNA, 80 bp, synthetic construct
  misc_feature 1..80: note = Artificially Synthesized Probe
  source 1..80: mol_type = other DNA
gcagaattgcttgaacctgggaggcagaagttgcagtgacccaaaaccacaccactgcactccagcatgggcgacagagc

SEQ ID NO: 123996 - DNA, 80 bp, synthetic construct
  misc_feature 1..80: note = Artificially Synthesized Probe
  source 1..80: mol_type = other DNA
gtgtagatgatttaatcaaccttttgtgcttgtaaggcagcttcccgttgttgccatcgtttgtaaagaccaaataaggg

SEQ ID NO: 123997 - DNA, 80 bp, synthetic construct
  misc_feature 1..80: note = Artificially Synthesized Probe
  source 1..80: mol_type = other DNA
tcctccagtcctatgaaaacaaaattaaaatagctaggataggtgattaaacagggttgggagcataccactcctctttt

SEQ ID NO: 123998 - DNA, 80 bp, synthetic construct; identical to SEQ ID NO: 39895
  misc_feature 1..80: note = Artificially Synthesized Probe
  source 1..80: mol_type = other DNA

SEQ ID NO: 123999 - DNA, 80 bp, synthetic construct
  misc_feature 1..80: note = Artificially Synthesized Probe
  source 1..80: mol_type = other DNA
atggaggaagtcttaaatcctacctttgaaaagataaggatagctcttcccatctgatccaagaaagagaagtttctttg

SEQ ID NO: 124000 - DNA, 80 bp, synthetic construct
  misc_feature 1..80: note = Artificially Synthesized Probe
  source 1..80: mol_type = other DNA
gactgatttcttcaagacgcaagatgtaacttgcacgtttctgtgctctctgttgcaaacttagcattatctatattcat

SEQ ID NO: 124001 - DNA, 80 bp, synthetic construct
  misc_feature 1..80: note = Artificially Synthesized Probe
  source 1..80: mol_type = other DNA
gaccagcctgagcaacatggcaaaaccccatctctacaaagaatacaaaagttagtcaggcacagtggctcgtgcctgta

SEQ ID NO: 124002 - DNA, 80 bp, synthetic construct; identical to SEQ ID NO: 39896
  misc_feature 1..80: note = Artificially Synthesized Probe
  source 1..80: mol_type = other DNA

SEQ ID NO: 124003 - DNA, 80 bp, synthetic construct
  misc_feature 1..80: note = Artificially Synthesized Probe
  source 1..80: mol_type = other DNA
gcaaactattaataattccccaatgttgagctatgtatgcacaacaccaaaacaatccagtccttgcaataggtacagct

SEQ ID NO: 124004 - DNA, 80 bp, synthetic construct
  misc_feature 1..80: note = Artificially Synthesized Probe
  source 1..80: mol_type = other DNA
agacaagtaagaacatttttaacagagaagtaaccatttaggtctgaccacttgaggtttgcagaaaagccctataatac

SEQ ID NO: 124005 - DNA, 80 bp, synthetic construct; identical to SEQ ID NO: 39897
  misc_feature 1..80: note = Artificially Synthesized Probe
  source 1..80: mol_type = other DNA

SEQ ID NO: 124006 - DNA, 80 bp, synthetic construct
  misc_feature 1..80: note = Artificially Synthesized Probe
  source 1..80: mol_type = other DNA
tgtgtgtgatcatcagacctttaaacaatccttgaattttccatgttatcagaagttgttaacagcatcgagacggaagt

SEQ ID NO: 124007 - DNA, 80 bp, synthetic construct
  misc_feature 1..80: note = Artificially Synthesized Probe
  source 1..80: mol_type = other DNA
aactattttttaaagtagatagtgattaattaaaactcagaaaactggttgtgggtggggagataaaattagggagagaa

SEQ ID NO: 124008 - DNA, 80 bp, synthetic construct
  misc_feature 1..80: note = Artificially Synthesized Probe
  source 1..80: mol_type = other DNA
acgtgcgcacacaaacagggtttacagggtttcctcctatatcctcttctgattttctaatttgatttactgaaagggaa

SEQ ID NO: 124009 - DNA, 80 bp, synthetic construct
  misc_feature 1..80: note = Artificially Synthesized Probe
  source 1..80: mol_type = other DNA
ctaaaagtacaaaaattagccaagcatggtggtgtgtgcctgtaatcccagctacacgggaggctgaggcaggagaatca

SEQ ID NO: 124010 - DNA, 80 bp, synthetic construct
  misc_feature 1..80: note = Artificially Synthesized Probe
  source 1..80: mol_type = other DNA
acacacacacacacacacggaaactcgagttttggcaagaacacataataaacttcatccttctctcacacacacacacg

SEQ ID NO: 124011 - DNA, 80 bp, synthetic construct; identical to SEQ ID NO: 39898
  misc_feature 1..80: note = Artificially Synthesized Probe
  source 1..80: mol_type = other DNA

SEQ ID NO: 124012 - DNA, 80 bp, synthetic construct
  misc_feature 1..80: note = Artificially Synthesized Probe
  source 1..80: mol_type = other DNA
tacactaatcatcccacgcagcatatgtggaattgattccagaactacttgtaaaactttatgttgttataagcgactat

SEQ ID NO: 124013 - DNA, 80 bp, synthetic construct
  misc_feature 1..80: note = Artificially Synthesized Probe
  source 1..80: mol_type = other DNA
taaataaagcaggcaaccaatatttagctcagggtcacagccccttccttggctaatttcttcatctgttgttcactggt

SEQ ID NO: 124014 - DNA, 80 bp, synthetic construct
  misc_feature 1..80: note = Artificially Synthesized Probe
  source 1..80: mol_type = other DNA
gtaagaagtccacttattgaaatttcgtatctcatgggaactgtgatgtgccatttcagtagcatgcttgggattattct

SEQ ID NO: 124015 - DNA, 80 bp, synthetic construct; identical to SEQ ID NO: 39899
  misc_feature 1..80: note = Artificially Synthesized Probe
  source 1..80: mol_type = other DNA

SEQ ID NO: 124016 - DNA, 80 bp, synthetic construct
  misc_feature 1..80: note = Artificially Synthesized Probe
  source 1..80: mol_type = other DNA
tttttttttggagacagagttttgctctgtcaccagactggagtggagtggtacaatcttggctcactgcaacctccacc

SEQ ID NO: 124017 - DNA, 80 bp, synthetic construct
  misc_feature 1..80: note = Artificially Synthesized Probe
  source 1..80: mol_type = other DNA
cagcctcccaaagtgccagaattacaggtatgagtcaccgtgtccagccaagaattttttgttttttaaaaaaatgcagc

SEQ ID NO: 124018 - DNA, 80 bp, synthetic construct
  misc_feature 1..80: note = Artificially Synthesized Probe
  source 1..80: mol_type = other DNA
gttacatagctctccattttcagtccatttctgaaattcatatcgcatagcctttagcctttttctacttactggtcaac

SEQ ID NO: 124019 - DNA, 80 bp, synthetic construct; identical to SEQ ID NO: 39900
  misc_feature 1..80: note = Artificially Synthesized Probe
  source 1..80: mol_type = other DNA

SEQ ID NO: 124020 - DNA, 80 bp, synthetic construct
  misc_feature 1..80: note = Artificially Synthesized Probe
  source 1..80: mol_type = other DNA
aattaaaaaatgggcaaaggacttgtaatgacatttctccaaagataggcaaatggccaataaacacatgaaaggaagct

SEQ ID NO: 124021 - DNA, 80 bp, synthetic construct
  misc_feature 1..80: note = Artificially Synthesized Probe
  source 1..80: mol_type = other DNA
ggtgcagccactgtggaaaagtttgttggctcctcagtaagtcagacgtagaattgccatattgccatacgattcagcaa

SEQ ID NO: 124022 - DNA, 80 bp, synthetic construct
  misc_feature 1..80: note = Artificially Synthesized Probe
  source 1..80: mol_type = other DNA
gaagcaacccagctgtccataaacggatggacaaaacggtataatcatacagtattattcagcgataaaaaaatgaaatt

SEQ ID NO: 124023 - DNA, 80 bp, synthetic construct; identical to SEQ ID NO: 39901
  misc_feature 1..80: note = Artificially Synthesized Probe
  source 1..80: mol_type = other DNA

SEQ ID NO: 124024 - DNA, 80 bp, synthetic construct
  misc_feature 1..80: note = Artificially Synthesized Probe
  source 1..80: mol_type = other DNA
ttatgttatttatactttgaaacaaagtggcagcttcactgtctcaggacaagtgtatggaaacatacttgcgtaaggtg

SEQ ID NO: 124025 - DNA, 80 bp, synthetic construct
  misc_feature 1..80: note = Artificially Synthesized Probe
  source 1..80: mol_type = other DNA
ccaaatagctcatctacaagcctatgcacagcacagctcttcaaacactggactttgtaagttaagtgtgtgcaattggt

SEQ ID NO: 124026 - DNA, 80 bp, synthetic construct
  misc_feature 1..80: note = Artificially Synthesized Probe
  source 1..80: mol_type = other DNA
ctgtaacaatcctgcatcatggcttggtcttcatttaatccacttttaggttcatccttattgctatcctgagatgcagg

SEQ ID NO: 124027 - DNA, 80 bp, synthetic construct; identical to SEQ ID NO: 39902
  misc_feature 1..80: note = Artificially Synthesized Probe
  source 1..80: mol_type = other DNA

SEQ ID NO: 124028 - DNA, 80 bp, synthetic construct
  misc_feature 1..80: note = Artificially Synthesized Probe
  source 1..80: mol_type = other DNA
tctagctctgttgcccaggttggagtacagtggcacaatctcggctcactgcaacctgtctcctgggttcaagtgattct

SEQ ID NO: 124029 - DNA, 80 bp, synthetic construct
  misc_feature 1..80: note = Artificially Synthesized Probe
  source 1..80: mol_type = other DNA
caaatcactctgtgctccgcggcatcccgatttctttccgcagctaacctcccgacacgtctgctgctgttctgtggcag

SEQ ID NO: 124030 - DNA, 80 bp, synthetic construct
  misc_feature 1..80: note = Artificially Synthesized Probe
  source 1..80: mol_type = other DNA
tgcgagtcactgctcctggccaaaaattggtataattcttatccatcagtaacagctcagtgagcctggcagaggtactc

SEQ ID NO: 124031 - DNA, 80 bp, synthetic construct
  misc_feature 1..80: note = Artificially Synthesized Probe
  source 1..80: mol_type = other DNA
cactttgggaggccgaggcaagtggatcacgaggtcaggagttcaagaccagcctggccaagatggtgaaaccccgactc

SEQ ID NO: 124032 - DNA, 80 bp, synthetic construct
  misc_feature 1..80: note = Artificially Synthesized Probe
  source 1..80: mol_type = other DNA
acattctaaaagtgtgcatttcagaacatagaattcttctaagtttaccatcttcaaaaatcttctaaattgtatgacac

SEQ ID NO: 124033 - DNA, 80 bp, synthetic construct
  misc_feature 1..80: note = Artificially Synthesized Probe
  source 1..80: mol_type = other DNA
atctcaaaaaaaaaaaaaaaaaaaaaaaaaaaaaaaaaaaaaccctacaaactctaacaactctggaacataaagcttaa

SEQ ID NO: 124034 - DNA, 80 bp, synthetic construct; identical to SEQ ID NO: 39903
  misc_feature 1..80: note = Artificially Synthesized Probe
  source 1..80: mol_type = other DNA

SEQ ID NO: 124035 - DNA, 80 bp, synthetic construct
  misc_feature 1..80: note = Artificially Synthesized Probe
  source 1..80: mol_type = other DNA
ttgattcgcaagtctggttaaggttggtttagatacagagctgtaatcaaagtccagggcagctcaaaaatgttacggag

SEQ ID NO: 124036 - DNA, 80 bp, synthetic construct
  misc_feature 1..80: note = Artificially Synthesized Probe
  source 1..80: mol_type = other DNA
ggaaaagtcctagtgatgtaacaagcagtgcagggtgtcctaggaagttaatctggctattctttttacacattcaaata

SEQ ID NO: 124037 - DNA, 80 bp, synthetic construct
  misc_feature 1..80: note = Artificially Synthesized Probe
  source 1..80: mol_type = other DNA
caaccgcagcaggcgcaatgtggccatcacaatcatgtcatcagtgctctgttccactctgtgacttaaatgcagcctag

SEQ ID NO: 124038 - DNA, 80 bp, synthetic construct; identical to SEQ ID NO: 39904
  misc_feature 1..80: note = Artificially Synthesized Probe
  source 1..80: mol_type = other DNA

SEQ ID NO: 124039 - DNA, 80 bp, synthetic construct
  misc_feature 1..80: note = Artificially Synthesized Probe
  source 1..80: mol_type = other DNA
atcaactgacgccagataacatcaaccatgtcatcttcttcgttgtcttcactctcagttatctgaagtgttatatcttc

SEQ ID NO: 124040 - DNA, 80 bp, synthetic construct
  misc_feature 1..80: note = Artificially Synthesized Probe
  source 1..80: mol_type = other DNA
tctttatgatatatttactaatatgaagccagtgaagaagaatataagcatttagcaaagactagacttttctggggttt

SEQ ID NO: 124041 - DNA, 80 bp, synthetic construct
  misc_feature 1..80: note = Artificially Synthesized Probe
  source 1..80: mol_type = other DNA
tgcctcagcctcctaagtagctgagattacaggtgcccactaccacgccctgctgtttttttgtgtttttagtagagaca

SEQ ID NO: 124042 - DNA, 80 bp, synthetic construct; identical to SEQ ID NO: 39862
  misc_feature 1..80: note = Artificially Synthesized Probe
  source 1..80: mol_type = other DNA

SEQ ID NO: 124043 - DNA, 80 bp, synthetic construct
  misc_feature 1..80: note = Artificially Synthesized Probe
  source 1..80: mol_type = other DNA
tgtacacagaatacatatactaaacctcattctcttcacagtactgtgcatgtatcagacaccagcttagggagagactt

SEQ ID NO: 124044 - DNA, 80 bp, synthetic construct; identical to SEQ ID NO: 39905
  misc_feature 1..80: note = Artificially Synthesized Probe
  source 1..80: mol_type = other DNA

SEQ ID NO: 124045 - DNA, 80 bp, synthetic construct
  misc_feature 1..80: note = Artificially Synthesized Probe
  source 1..80: mol_type = other DNA
gtctcattcagagtatctgggagtaagtttcgtgcactggcatattttaaaagctcacaaccaaggattaagaacttaca

SEQ ID NO: 124046 - DNA, 80 bp, synthetic construct
  misc_feature 1..80: note = Artificially Synthesized Probe
  source 1..80: mol_type = other DNA
atctcactgcaacattcaagtggttcacctgcctcagcctcccgagtagctggcattacaggcatgcaccaccacaccct

SEQ ID NO: 124047 - DNA, 80 bp, synthetic construct
  misc_feature 1..80: note = Artificially Synthesized Probe
  source 1..80: mol_type = other DNA
gagccaccgtgccaggccaactcacctatttttaacaggactctaaggaaatgccttattttctcaaaagtatattcttc

SEQ ID NO: 124048 - DNA, 80 bp, synthetic construct
  misc_feature 1..80: note = Artificially Synthesized Probe
  source 1..80: mol_type = other DNA
tttatcaaatatatatgatcaattttctcaaaatcaatgatttggagtagcaatcttgccccaagcaccatgttttcctt

SEQ ID NO: 124049 - DNA, 80 bp, synthetic construct; identical to SEQ ID NO: 39906
  misc_feature 1..80: note = Artificially Synthesized Probe
  source 1..80: mol_type = other DNA

SEQ ID NO: 124050 - DNA, 80 bp, synthetic construct
  misc_feature 1..80: note = Artificially Synthesized Probe
  source 1..80: mol_type = other DNA
tcccaaaatgaagtcaggttctccaactccaatatgcactgccaaaatggacaaaaaaataattataataaaagaactca

SEQ ID NO: 124051 - DNA, 80 bp, synthetic construct
  misc_feature 1..80: note = Artificially Synthesized Probe
  source 1..80: mol_type = other DNA
agcttcccaagtaagattatattatctcctgtggaagacatcaatatctttcatgacactgaacattgtaaacagtcagg

SEQ ID NO: 124052 - DNA, 80 bp, synthetic construct
  misc_feature 1..80: note = Artificially Synthesized Probe
  source 1..80: mol_type = other DNA
aaggtgaagacactgcctgctatagtgcatctgacaagatgaagatttataatgaccacaagacatatcctttatgaata

SEQ ID NO: 124053 - DNA, 80 bp, synthetic construct; identical to SEQ ID NO: 39907
  misc_feature 1..80: note = Artificially Synthesized Probe
  source 1..80: mol_type = other DNA

SEQ ID NO: 124054 - DNA, 80 bp, synthetic construct
  misc_feature 1..80: note = Artificially Synthesized Probe
  source 1..80: mol_type = other DNA
aattacaatcagcagacaaattatgccaaaagttaagtgcaaaggactctatacttaccctgctcctgtaagccccttaa

SEQ ID NO: 124055 - DNA, 80 bp, synthetic construct
  misc_feature 1..80: note = Artificially Synthesized Probe
  source 1..80: mol_type = other DNA
gggggcagagttcagtgactcccaaaatggcattcgatcctaaatatgttttagttatttcccaacaataaaataaactc

SEQ ID NO: 124056 - DNA, 80 bp, synthetic construct
  misc_feature 1..80: note = Artificially Synthesized Probe
  source 1..80: mol_type = other DNA
tattaacagatggcagttctattagagtgagtatgtttttagacaaagtagaaagacctgtgaagttctgttggtgctga

SEQ ID NO: 124057 - DNA, 80 bp, synthetic construct; identical to SEQ ID NO: 39908
  misc_feature 1..80: note = Artificially Synthesized Probe
  source 1..80: mol_type = other DNA

SEQ ID NO: 124058 - DNA, 80 bp, synthetic construct
  misc_feature 1..80: note = Artificially Synthesized Probe
  source 1..80: mol_type = other DNA
gaggcagggtttcactctgtcacctaggctggagtgcagtagcacaatcagggctcactgtagcctcaacttcccaggct

SEQ ID NO: 124059 - DNA, 80 bp, synthetic construct
  misc_feature 1..80: note = Artificially Synthesized Probe
  source 1..80: mol_type = other DNA
cccaaagtgctcagattgtaagcataagcacctggcccaaaataataaagttaaaaaaacatgtaaattcagtgaccaat

SEQ ID NO: 124060 - DNA, 80 bp, synthetic construct
  misc_feature 1..80: note = Artificially Synthesized Probe
  source 1..80: mol_type = other DNA
acatacacagtaacattcatatacatgatttttattatactcatgtattaaccataattaattttactaacctgctgtat

SEQ ID NO: 124061 - DNA, 80 bp, synthetic construct; identical to SEQ ID NO: 39909
  misc_feature 1..80: note = Artificially Synthesized Probe
  source 1..80: mol_type = other DNA

SEQ ID NO: 124062 - DNA, 80 bp, synthetic construct
  misc_feature 1..80: note = Artificially Synthesized Probe
  source 1..80: mol_type = other DNA
actcatcctcaaatccctagcagctagcacagtgcttgagatacaatgaacaggttttgctaaattaaatgtatacaatg

SEQ ID NO: 124063 - DNA, 80 bp, synthetic construct
  misc_feature 1..80: note = Artificially Synthesized Probe
  source 1..80: mol_type = other DNA
tggttttcttcctatcttgctgaagaatcctcagtctctttctcttccatcactcatccattaaacaccagtgctccttg

SEQ ID NO: 124064 - DNA, 80 bp, synthetic construct
  misc_feature 1..80: note = Artificially Synthesized Probe
  source 1..80: mol_type = other DNA
tttatttcaagagtgcttcctctaatgtcagtcatgccaaatggagctcattttccaccaccctccaaatcttttactcc

SEQ ID NO: 124065 - DNA, 80 bp, synthetic construct
  misc_feature 1..80: note = Artificially Synthesized Probe
  source 1..80: mol_type = other DNA
catggtttttgacaaacttgacaaaacggtttcttaaaaaaaaaaaaattcttgcccaagaagagttcaagtctaggtcc

SEQ ID NO: 124066 - DNA, 80 bp, synthetic construct
  misc_feature 1..80: note = Artificially Synthesized Probe
  source 1..80: mol_type = other DNA
gcataacttaggtccctttgaccccattcttatactcttctaatccattttccaacttgcaattgaagtgacattacaca

SEQ ID NO: 124067 - DNA, 80 bp, synthetic construct; identical to SEQ ID NO: 39910
  misc_feature 1..80: note = Artificially Synthesized Probe
  source 1..80: mol_type = other DNA

SEQ ID NO: 124068 - DNA, 80 bp, synthetic construct
  misc_feature 1..80: note = Artificially Synthesized Probe
  source 1..80: mol_type = other DNA
tgatcatagctcgctgcagccttcatttcccaggctcatgctatccgcccacctcagcctcctaagcagctgggactata

SEQ ID NO: 124069 - DNA, 80 bp, synthetic construct
  misc_feature 1..80: note = Artificially Synthesized Probe
  source 1..80: mol_type = other DNA
tagctgggactacaggcacccgcccccacgcccagctaatttttttgtatttttagtagagatggggtttcaccgtgtta

SEQ ID NO: 124070 - DNA, 80 bp, synthetic construct
  misc_feature 1..80: note = Artificially Synthesized Probe
  source 1..80: mol_type = other DNA
ctagcagagacagggtcttgctatgttgggtcaccgtgtttgatgtcagttttccctgccagaatctacaatctccttga

SEQ ID NO: 124071 - DNA, 80 bp, synthetic construct; identical to SEQ ID NO: 39911
  misc_feature 1..80: note = Artificially Synthesized Probe
  source 1..80: mol_type = other DNA

SEQ ID NO: 124072 - DNA, 80 bp, synthetic construct
  misc_feature 1..80: note = Artificially Synthesized Probe
  source 1..80: mol_type = other DNA
cccaggtatatttggcagtgaaggaccagttgagtcacagcttcaagtaaccactctgcagtggtccctatcttggctgt

SEQ ID NO: 124073 - DNA, 80 bp, synthetic construct
  misc_feature 1..80: note = Artificially Synthesized Probe
  source 1..80: mol_type = other DNA
ctctagccattcatttggagtatttaaaactcaatattcatagcgcattttacgtgacaaagaacttaggttcagaacac

SEQ ID NO: 124074 - DNA, 80 bp, synthetic construct; identical to SEQ ID NO: 39912
  misc_feature 1..80: note = Artificially Synthesized Probe
  source 1..80: mol_type = other DNA

SEQ ID NO: 124075 - DNA, 80 bp, synthetic construct
  misc_feature 1..80: note = Artificially Synthesized Probe
  source 1..80: mol_type = other DNA
tgggtgaaccttaaaaatatcatgttgagcaagagaagccaaacacaagagaacatgttgttatgatttcacgtacatga

SEQ ID NO: 124076 - DNA, 80 bp, synthetic construct
  misc_feature 1..80: note = Artificially Synthesized Probe
  source 1..80: mol_type = other DNA
cgatcgtattggtggtcacacaagtgaagacatgttagaactcatcaaaccatacacttagaatgtgtaatataaacctc

SEQ ID NO: 124077 - DNA, 80 bp, synthetic construct; identical to SEQ ID NO: 39863
  misc_feature 1..80: note = Artificially Synthesized Probe
  source 1..80: mol_type = other DNA

SEQ ID NO: 124078 - DNA, 80 bp, synthetic construct
  misc_feature 1..80: note = Artificially Synthesized Probe
  source 1..80: mol_type = other DNA
tcactgaagagtggaataagacagtcctgccagagaaaaaccaaaattactcaacataaaacaggctgttgatatgtttg

SEQ ID NO: 124079 - DNA, 80 bp, synthetic construct
  misc_feature 1..80: note = Artificially Synthesized Probe
  source 1..80: mol_type = other DNA
atcttcttcagaatattaagtctaatttatcagtatacttaataaagcacattacaaaaaaaaaagtcacagcacattta

SEQ ID NO: 124080 - DNA, 80 bp, synthetic construct; identical to SEQ ID NO: 39913
  misc_feature 1..80: note = Artificially Synthesized Probe
  source 1..80: mol_type = other DNA

SEQ ID NO: 124081 - DNA, 80 bp, synthetic construct
  misc_feature 1..80: note = Artificially Synthesized Probe
  source 1..80: mol_type = other DNA
aatagtcataagagtgtgcttgtaaaaatatacagacctctgttgaaagtctgttagaaactgtgttctccaaagcagat

SEQ ID NO: 124082 - DNA, 80 bp, synthetic construct
  misc_feature 1..80: note = Artificially Synthesized Probe
  source 1..80: mol_type = other DNA
ataaccactcaaagaataaagcaattgataagatgctatcaaactgacatccaaagttagggggcagtaagaggagcagc

SEQ ID NO: 124083 - DNA, 80 bp, synthetic construct
  misc_feature 1..80: note = Artificially Synthesized Probe
  source 1..80: mol_type = other DNA
ctagtaactctccttccagccctcttcaccccatgtatgtttatcacatgatatacacaatgtacatttacctccgtaag

SEQ ID NO: 124084 - DNA, 80 bp, synthetic construct; identical to SEQ ID NO: 39914
  misc_feature 1..80: note = Artificially Synthesized Probe
  source 1..80: mol_type = other DNA

SEQ ID NO: 124085 - DNA, 80 bp, synthetic construct
  misc_feature 1..80: note = Artificially Synthesized Probe
  source 1..80: mol_type = other DNA
ttgccttcaaaggccaaaaatcagtaagtcgaggccaggcgtggtggctcacgcctgtaatcccagcactttgggaggcc

SEQ ID NO: 124086 - DNA, 80 bp, synthetic construct
  misc_feature 1..80: note = Artificially Synthesized Probe
  source 1..80: mol_type = other DNA
aaaccaaaaatatcaacggaagagaagagggaaaggctcaggaactgttctagatattaaagcagatcaagaagtaggac

SEQ ID NO: 124087 - DNA, 80 bp, synthetic construct
  misc_feature 1..80: note = Artificially Synthesized Probe
  source 1..80: mol_type = other DNA
agggcagaggctgcagtgagccgagattgcgccactgcactccagcctgggcaacagagtgaaactctgtctcaacaaaa

SEQ ID NO: 124088 - DNA, 80 bp, synthetic construct
  misc_feature 1..80: note = Artificially Synthesized Probe
  source 1..80: mol_type = other DNA
aaaatatttagctgaaacactactttgtcctttatcaaacaaaatggctagataaatctcaaagtattaaggtggtcatt

SEQ ID NO: 124089 - DNA, 80 bp, synthetic construct
  misc_feature 1..80: note = Artificially Synthesized Probe
  source 1..80: mol_type = other DNA
acttgtccactaaaataactttaaaactattttctcaaatacctattttttcttttgatcctccagcaagtagattgata

SEQ ID NO: 124090 - DNA, 80 bp, synthetic construct; identical to SEQ ID NO: 39915
  misc_feature 1..80: note = Artificially Synthesized Probe
  source 1..80: mol_type = other DNA

SEQ ID NO: 124091 - DNA, 80 bp, synthetic construct
  misc_feature 1..80: note = Artificially Synthesized Probe
  source 1..80: mol_type = other DNA
ggacaactttgacacccagttctctccaagctgccagtgagctccctgtgcagcctcactcctcacctacagcatgagcc

SEQ ID NO: 124092 - DNA, 80 bp, synthetic construct
  misc_feature 1..80: note = Artificially Synthesized Probe
  source 1..80: mol_type = other DNA
ttcctgtagtcctgcagcatcaatgccaggaagacaggcctcatcctcccagcttctatgctgctcctttcagatccctt

SEQ ID NO: 124093 - DNA, 80 bp, synthetic construct
  misc_feature 1..80: note = Artificially Synthesized Probe
  source 1..80: mol_type = other DNA
tgtgcctgattctacctagatccgtgcaaccactggcttctcagggggacccttgagtactgggcactgatgaactgctg

SEQ ID NO: 124094 - DNA, 80 bp, synthetic construct; identical to SEQ ID NO: 39916
  misc_feature 1..80: note = Artificially Synthesized Probe
  source 1..80: mol_type = other DNA

SEQ ID NO: 124095 - DNA, 80 bp, synthetic construct
  misc_feature 1..80: note = Artificially Synthesized Probe
  source 1..80: mol_type = other DNA
caagaaaaactcactgaccaaataacttacctcaagcttttcattttcaaatgtctctaccactcaatagtattcaatct

SEQ ID NO: 124096 - DNA, 80 bp, synthetic construct
  misc_feature 1..80: note = Artificially Synthesized Probe
  source 1..80: mol_type = other DNA
tgctaaactaggattctgacccaggcctgcctttctcttcactcactattcttcagaggcttctctctggtttggttgct

SEQ ID NO: 124097 - DNA, 80 bp, synthetic construct
  misc_feature 1..80: note = Artificially Synthesized Probe
  source 1..80: mol_type = other DNA
cttgactagatcttgaaggtcggaggaacagggggttcagagaggaggaataagcaataaaggatattttgagataattg

SEQ ID NO: 124098 - DNA, 80 bp, synthetic construct
  misc_feature 1..80: note = Artificially Synthesized Probe
  source 1..80: mol_type = other DNA
aaacatggcttgttctctgtgtgctcctactccagttaatagcattgtttctcttccctctaccattgcccccataaatt

SEQ ID NO: 124099 - DNA, 80 bp, synthetic construct; identical to SEQ ID NO: 39917
  misc_feature 1..80: note = Artificially Synthesized Probe
  source 1..80: mol_type = other DNA

SEQ ID NO: 124100 - DNA, 80 bp, synthetic construct
  misc_feature 1..80: note = Artificially Synthesized Probe
  source 1..80: mol_type = other DNA
tctaatctttgctttaaaaggttggaatttgtgtctgttttatgtgctgcctgggtcatagtacatgctcagtgaagcaa

SEQ ID NO: 124101 - DNA, 80 bp, synthetic construct
  misc_feature 1..80: note = Artificially Synthesized Probe
  source 1..80: mol_type = other DNA
agcacagaggaatgaaaagaaagtttaatttacagatgttcacaaactgtcctcattagaataaatgtttttgatatatt

SEQ ID NO: 124102 - DNA, 80 bp, synthetic construct
  misc_feature 1..80: note = Artificially Synthesized Probe
  source 1..80: mol_type = other DNA
cattacacaaataccttccctcacctctgacgtcagtttcctgttgtcattttcataatggcagtaagttagatatataa

SEQ ID NO: 124103 - DNA, 80 bp, synthetic construct; identical to SEQ ID NO: 39918
  misc_feature 1..80: note = Artificially Synthesized Probe
  source 1..80: mol_type = other DNA

SEQ ID NO: 124104 - DNA, 80 bp, synthetic construct
  misc_feature 1..80: note = Artificially Synthesized Probe
  source 1..80: mol_type = other DNA
tcagtacgaaatatattactataacttttgctttatttaaaaatactgaacgctcaccattcagagaatgtttcgggctg

SEQ ID NO: 124105 - DNA, 80 bp, synthetic construct
  misc_feature 1..80: note = Artificially Synthesized Probe
  source 1..80: mol_type = other DNA
tactttttttttttttttttttttttttgtgatgaagttttgctcttcttgcccaggctggagtgcaatggcactgtctc

SEQ ID NO: 124106 - DNA, 80 bp, synthetic construct
  misc_feature 1..80: note = Artificially Synthesized Probe
  source 1..80: mol_type = other DNA
tgacctcaggtgatccacctgcctcggcctcccaaaatgctgggattatgggcatgagccaccgcgcctggcctttactt

SEQ ID NO: 124107 - DNA, 80 bp, synthetic construct
  misc_feature 1..80: note = Artificially Synthesized Probe
  source 1..80: mol_type = other DNA
aagtttaggcatgaagtgctaagatgtctgcaaagaaccctcaaattgttcagaaaaactgtgtgtgcatacacacacag

SEQ ID NO: 124108 - DNA, 80 bp, synthetic construct; identical to SEQ ID NO: 39919
  misc_feature 1..80: note = Artificially Synthesized Probe
  source 1..80: mol_type = other DNA

SEQ ID NO: 124109 - DNA, 80 bp, synthetic construct
  misc_feature 1..80: note = Artificially Synthesized Probe
  source 1..80: mol_type = other DNA
tcgactatggtggggggaggtttgatgtcttcctcacaactatgaaactaaatttaaaagtggttaaatgtttttaaaaa

SEQ ID NO: 124110 - DNA, 80 bp, synthetic construct
  misc_feature 1..80: note = Artificially Synthesized Probe
  source 1..80: mol_type = other DNA
tataaatcaagaaattggatagcatcaacaatcttagtatttcataaaatttcacagattaacacaggaaaaattgagag

SEQ ID NO: 124111 - DNA, 80 bp, synthetic construct
  misc_feature 1..80: note = Artificially Synthesized Probe
  source 1..80: mol_type = other DNA
acaaagatgaagggaagggggtactctattattaagggtataaactgcagccaccttttctgtagagtagcttagcaata

SEQ ID NO: 124112 - DNA, 80 bp, synthetic construct
  misc_feature 1..80: note = Artificially Synthesized Probe
  source 1..80: mol_type = other DNA
aagaaatattaaattatggtacactcataaatacaaatctttattaaaaataacactgtagaatatttaacatggcaatt

SEQ ID NO: 124113 - DNA, 80 bp, synthetic construct; identical to SEQ ID NO: 39920
  misc_feature 1..80: note = Artificially Synthesized Probe
  source 1..80: mol_type = other DNA

SEQ ID NO: 124114 - DNA, 80 bp, synthetic construct
  misc_feature 1..80: note = Artificially Synthesized Probe
  source 1..80: mol_type = other DNA
gaaagaaaaaagaattacaaagcatatggatatggaaatacagaactacaaaaggacacacaacagaagttactacaaag

SEQ ID NO: 124115 - DNA, 80 bp, synthetic construct
  misc_feature 1..80: note = Artificially Synthesized Probe
  source 1..80: mol_type = other DNA
ataaagggtaatttgtatcagactctgagggggaaggagctcaactagggatcaagttcaaaagcatttataaaataact

SEQ ID NO: 124116 - DNA, 80 bp, synthetic construct
  misc_feature 1..80: note = Artificially Synthesized Probe
  source 1..80: mol_type = other DNA
aaaaaatttcagaataatgacttcagacaaatgtcccgatacccaaagatgctttacaaacataggttgagtatccctta

SEQ ID NO: 124117 - DNA, 80 bp, synthetic construct
  misc_feature 1..80: note = Artificially Synthesized Probe
  source 1..80: mol_type = other DNA
ctacaatgtcagtgagtaatacacagaacttaaacataaagtaattctatcacccatttccttccctccaacctacctcc

SEQ ID NO: 124118 - DNA, 80 bp, synthetic construct; identical to SEQ ID NO: 39921
  misc_feature 1..80: note = Artificially Synthesized Probe
  source 1..80: mol_type = other DNA

SEQ ID NO: 124119 - DNA, 80 bp, synthetic construct
  misc_feature 1..80: note = Artificially Synthesized Probe
  source 1..80: mol_type = other DNA
cctgtgacctctgtaggaacaacacatggagtaaaaagaaagcaaaaattaaatataaataaacaggaattaaggaatga

SEQ ID NO: 124120 - DNA, 80 bp, synthetic construct
  misc_feature 1..80: note = Artificially Synthesized Probe
  source 1..80: mol_type = other DNA
agctcatgcctgtaatcccagcactttggaaggccgaggtgggcagatcacttgtggtcaggagttcgagaccagcctgg

SEQ ID NO: 124121 - DNA, 80 bp, synthetic construct
  misc_feature 1..80: note = Artificially Synthesized Probe
  source 1..80: mol_type = other DNA
caaagtgaaactgtgtctcaaaaaataaataaataaataaataaataaataaataaataaataatttatcccataaacaa

SEQ ID NO: 124122 - DNA, 80 bp, synthetic construct
  misc_feature 1..80: note = Artificially Synthesized Probe
  source 1..80: mol_type = other DNA
gtcgcccaggctggagtgcagtggtgcgatctcggttcactgcaagctccgcctcccgggttcacgccattctcctgcct

SEQ ID NO: 124123 - DNA, 80 bp, synthetic construct; identical to SEQ ID NO: 39922
  misc_feature 1..80: note = Artificially Synthesized Probe
  source 1..80: mol_type = other DNA

SEQ ID NO: 124124 - DNA, 80 bp, synthetic construct
  misc_feature 1..80: note = Artificially Synthesized Probe
  source 1..80: mol_type = other DNA
agtcaaagccatgtctcactgtcactgcaggctggcctgccaacaatcctaccctcatgatggagagtcgaatccgcgtt

SEQ ID NO: 124125 - DNA, 80 bp, synthetic construct
  misc_feature 1..80: note = Artificially Synthesized Probe
  source 1..80: mol_type = other DNA
tactgccagctgtgaccattaaactgctataaaacaacactatctcatggaaaccaaccttgggaggtgaagttaatgca

SEQ ID NO: 124126 - DNA, 80 bp, synthetic construct; identical to SEQ ID NO: 39923
  misc_feature 1..80: note = Artificially Synthesized Probe
  source 1..80: mol_type = other DNA

SEQ ID NO: 124127 - DNA, 80 bp, synthetic construct; identical to SEQ ID NO: 39864
  misc_feature 1..80: note = Artificially Synthesized Probe
  source 1..80: mol_type = other DNA

SEQ ID NO: 124128 - DNA, 80 bp, synthetic construct; identical to SEQ ID NO: 39858
  misc_feature 1..80: note = Artificially Synthesized Probe
  source 1..80: mol_type = other DNA

SEQ ID NO: 124129 - DNA, 80 bp, synthetic construct
  misc_feature 1..80: note = Artificially Synthesized Probe
  source 1..80: mol_type = other DNA
aattattcaatgaaagcttattctaacaaacatacctgaaaattattgacttttttcaaaaaaatcatatactctcaaat

SEQ ID NO: 124130 - DNA, 80 bp, synthetic construct
  misc_feature 1..80: note = Artificially Synthesized Probe
  source 1..80: mol_type = other DNA
atatggcccactgccaaaggacagcatctgtcttcaggagattgcgtggaattgttgactggtcacgcttatccagtctc

SEQ ID NO: 124131 - DNA, 80 bp, synthetic construct
  misc_feature 1..80: note = Artificially Synthesized Probe
  source 1..80: mol_type = other DNA
ctatgaaattgagaagcattgtgtcccccctctcattttgaggtcttttatagttaacaggttgaggtacagtgtggaag

SEQ ID NO: 124132 - DNA, 80 bp, synthetic construct
  misc_feature 1..80: note = Artificially Synthesized Probe
  source 1..80: mol_type = other DNA
tttttgtttctacagatgctatcttcaaagcaattttcctattgatgaaaactaaaataacccatatgagaagaatgtta

SEQ ID NO: 124133 - DNA, 80 bp, synthetic construct; identical to SEQ ID NO: 39924
  misc_feature 1..80: note = Artificially Synthesized Probe
  source 1..80: mol_type = other DNA

SEQ ID NO: 124134 - DNA, 80 bp, synthetic construct
  misc_feature 1..80: note = Artificially Synthesized Probe
  source 1..80: mol_type = other DNA
tttagatcctttttttattcacctcagatgggtaatgtgctgacatcataagaggatttgagggaggcatatcaaacatg

SEQ ID NO: 124135 - DNA, 80 bp, synthetic construct
  misc_feature 1..80: note = Artificially Synthesized Probe
  source 1..80: mol_type = other DNA
tctgagctactaagaaacatattttggcactacatgagttattctatactaattattgtgagcctataaagctcattaaa

SEQ ID NO: 124136 - DNA, 80 bp, synthetic construct; identical to SEQ ID NO: 39925
  misc_feature 1..80: note = Artificially Synthesized Probe
  source 1..80: mol_type = other DNA

SEQ ID NO: 124137 - DNA, 80 bp, synthetic construct
  misc_feature 1..80: note = Artificially Synthesized Probe
  source 1..80: mol_type = other DNA
gatcttaatttcatacctctgtaaaagatcatctggcaaggaagaggacagagcatgtagactgctgcatgcctgcagac

SEQ ID NO: 124138 - DNA, 80 bp, synthetic construct
  misc_feature 1..80: note = Artificially Synthesized Probe
  source 1..80: mol_type = other DNA
aaaccttcaacagtcttctttaaatggaaactaactgtagtctggtggaggaggatcggacttatatttgggttaaaaca

SEQ ID NO: 124139 - DNA, 80 bp, synthetic construct
  misc_feature 1..80: note = Artificially Synthesized Probe
  source 1..80: mol_type = other DNA
gagtgagtgcctactatagactaggcactactcttgtccagaattctcactgactgtcacatttgttaaaatgatacatt

SEQ ID NO: 124140 - DNA, 80 bp, synthetic construct
  misc_feature 1..80: note = Artificially Synthesized Probe
  source 1..80: mol_type = other DNA
aaaacatttttctaatactaagaatgaaaaaaaatcaagactgtgtatctgtcattaaaatgaggattacacatcttcag

SEQ ID NO: 124141 - DNA, 80 bp, synthetic construct; identical to SEQ ID NO: 39926
  misc_feature 1..80: note = Artificially Synthesized Probe
  source 1..80: mol_type = other DNA

SEQ ID NO: 124142 - DNA, 80 bp, synthetic construct
  misc_feature 1..80: note = Artificially Synthesized Probe
  source 1..80: mol_type = other DNA
tatagaaattactgtcaaaattgttgtgtgccttttaagaaaacctcccaacgcagcatgataatagcaaagaggccggg

SEQ ID NO: 124143 - DNA, 80 bp, synthetic construct
  misc_feature 1..80: note = Artificially Synthesized Probe
  source 1..80: mol_type = other DNA
gctacttgggaggctgaggcaggagaattgcttgaacctaggaggcagaggttgcagtgagcaaaactccgtctcaaaaa

SEQ ID NO: 124144 - DNA, 80 bp, synthetic construct
  misc_feature 1..80: note = Artificially Synthesized Probe
  source 1..80: mol_type = other DNA
aaaccaaattataaggtgtttgacaataaagaagctgctctacctcacctctataatccacatttttaaaaattttttgt

SEQ ID NO: 124145 - DNA, 80 bp, synthetic construct
  misc_feature 1..80: note = Artificially Synthesized Probe
  source 1..80: mol_type = other DNA
gtagttacagtgctaatcacagctccatcaaacaaagaaggagaggaagaactgaggctactagagataaagtgatcatg

SEQ ID NO: 124146 - DNA, 80 bp, synthetic construct; identical to SEQ ID NO: 39927
  misc_feature 1..80: note = Artificially Synthesized Probe
  source 1..80: mol_type = other DNA

SEQ ID NO: 124147 - DNA, 80 bp, synthetic construct
  misc_feature 1..80: note = Artificially Synthesized Probe
  source 1..80: mol_type = other DNA
ggatctagtacactaaacctgggacaaacacttttttatgaagtcagtaaagcctttgcgtgcaatataccatctctatg

SEQ ID NO: 124148 - DNA, 80 bp, synthetic construct
  misc_feature 1..80: note = Artificially Synthesized Probe
  source 1..80: mol_type = other DNA
ctctactaaaattacaaaaattagctgggcatggtggcatacacttgtaatcccagctactcgggaggctgaggcaggag

SEQ ID NO: 124149 - DNA, 80 bp, synthetic construct; identical to SEQ ID NO: 39928
  misc_feature 1..80: note = Artificially Synthesized Probe
  source 1..80: mol_type = other DNA

SEQ ID NO: 124150 - DNA, 80 bp, synthetic construct
  misc_feature 1..80: note = Artificially Synthesized Probe
  source 1..80: mol_type = other DNA
acctctacttttccagcagcattaaaatgtgtagcccaagtttaaaacacggtcacctgttcagcaactgacatcctcct

SEQ ID NO: 124151 - DNA, 80 bp, synthetic construct
  misc_feature 1..80: note = Artificially Synthesized Probe
  source 1..80: mol_type = other DNA
ttggccaggctggtcttgaactcctgagctcaggtgatctgcccccctcggtctcccgagggattacaggcgtgaaccac

SEQ ID NO: 124152 - DNA, 80 bp, synthetic construct
  misc_feature 1..80: note = Artificially Synthesized Probe
  source 1..80: mol_type = other DNA
cgatctctggtctaaacaaagccctctgtatgtgccttttgcggaagtagactgtatttcctcaattttccatatactgc

SEQ ID NO: 124153 - DNA, 80 bp, synthetic construct
  misc_feature 1..80: note = Artificially Synthesized Probe
  source 1..80: mol_type = other DNA
acatctctgaatctgtaaataatgtgaattcctcaaaaatcaagctttcgtgttcgaagaagaatttattgtgacttcaa

SEQ ID NO: 124154 - DNA, 80 bp, synthetic construct; identical to SEQ ID NO: 39929
  misc_feature 1..80: note = Artificially Synthesized Probe
  source 1..80: mol_type = other DNA

SEQ ID NO: 124155 - DNA, 80 bp, synthetic construct
  misc_feature 1..80: note = Artificially Synthesized Probe
  source 1..80: mol_type = other DNA
atttttctatttttagtagaggcgaggtttcaccatgttggccaggctggtctcaaactcctgaccacaagtgatcagcc

SEQ ID NO: 124156 - DNA, 80 bp, synthetic construct
  misc_feature 1..80: note = Artificially Synthesized Probe
  source 1..80: mol_type = other DNA
ccatgtcgaattacttaaaaaaaaaaaaaaaaaaaagcaggctgggcgcggtggctcacgcctgtaattccagcactttg

SEQ ID NO: 124157 - DNA, 80 bp, synthetic construct
  misc_feature 1..80: note = Artificially Synthesized Probe
  source 1..80: mol_type = other DNA
gaacccgggaggcagaggtggcagtgagccgagattgcaccactgcactccagcccaggcgacaacagcatgactctgtc

SEQ ID NO: 124158 - DNA, 80 bp, synthetic construct; identical to SEQ ID NO: 39930
  misc_feature 1..80: note = Artificially Synthesized Probe
  source 1..80: mol_type = other DNA

SEQ ID NO: 124159 - DNA, 80 bp, synthetic construct
  misc_feature 1..80: note = Artificially Synthesized Probe
  source 1..80: mol_type = other DNA
tagggatgctcaccagtaagtgttatgaaaatactccaaaatccggctgggcatggtggtgcccacctgtaatcccagca

SEQ ID NO: 124160 - DNA, 80 bp, synthetic construct
  misc_feature 1..80: note = Artificially Synthesized Probe
  source 1..80: mol_type = other DNA
cgcttgtacccgggaggcggaggttgcagcgagccaagatcgcgccatggcactccagcctgggcaacaagagtaaaacc

SEQ ID NO: 124161 - DNA, 80 bp, synthetic construct
  misc_feature 1..80: note = Artificially Synthesized Probe
  source 1..80: mol_type = other DNA
tacctttcccagttttagggtctctgactgcctttttaggactacaagcaacactcttgccagttcctggaacggtgctt

SEQ ID NO: 124162 - DNA, 80 bp, synthetic construct
  misc_feature 1..80: note = Artificially Synthesized Probe
  source 1..80: mol_type = other DNA
agaaagaaaaaagtaccaggggaagaagaaagagaccgcattttaaaacaactacacaaatttgagctgtaagaaacact

SEQ ID NO: 124163 - DNA, 80 bp, synthetic construct; identical to SEQ ID NO: 39931
  misc_feature 1..80: note = Artificially Synthesized Probe
  source 1..80: mol_type = other DNA

SEQ ID NO: 124164 - DNA, 80 bp, synthetic construct
  misc_feature 1..80: note = Artificially Synthesized Probe
  source 1..80: mol_type = other DNA
aagcctcatgttttatttcagaacaggcctcaggaagttgtagactgtgtaggaggttgtttagggcacaagtcatttct

SEQ ID NO: 124165 - DNA, 80 bp, synthetic construct
  misc_feature 1..80: note = Artificially Synthesized Probe
  source 1..80: mol_type = other DNA
actatctgtattagtgctgacgatacaaataaatttaagatcgatcaattcactgtccgtagcacttaatattttaactt

SEQ ID NO: 124166 - DNA, 80 bp, synthetic construct
  misc_feature 1..80: note = Artificially Synthesized Probe
  source 1..80: mol_type = other DNA
tttttttttttttttaaataatcaacatcagaagacatatgcaaacagcagtttaagactgggtttcttaaatctaccag

SEQ ID NO: 124167 - DNA, 80 bp, synthetic construct
  misc_feature 1..80: note = Artificially Synthesized Probe
  source 1..80: mol_type = other DNA
cagcaaaagatgcatagtctgaaaagagtatctggcacatcattcatgaaagtattcagtatgattctcaagaaatacaa

SEQ ID NO: 124168 - DNA, 80 bp, synthetic construct; identical to SEQ ID NO: 39932
  misc_feature 1..80: note = Artificially Synthesized Probe
  source 1..80: mol_type = other DNA

SEQ ID NO: 124169 - DNA, 80 bp, synthetic construct
  misc_feature 1..80: note = Artificially Synthesized Probe
  source 1..80: mol_type = other DNA
acggagacagtaaaaagatcagggattgccatgggcttaagatggagggagggaggagtggggagagggaacgaggaagg

SEQ ID NO: 124170 - DNA, 80 bp, synthetic construct
  misc_feature 1..80: note = Artificially Synthesized Probe
  source 1..80: mol_type = other DNA
gtaataaatgtaccacactaacacaatatgttaatgagggggaaactgttgggatgaagaaggtatatgggaactcattg

SEQ ID NO: 124171 - DNA, 80 bp, synthetic construct
  misc_feature 1..80: note = Artificially Synthesized Probe
  source 1..80: mol_type = other DNA
acacgtattttacagttatcatgggcattttttcacattagtaaaaagaggtgtaattctggcagaaatgctcagcagaa

SEQ ID NO: 124172 - DNA, 80 bp, synthetic construct; identical to SEQ ID NO: 39933
  misc_feature 1..80: note = Artificially Synthesized Probe
  source 1..80: mol_type = other DNA

SEQ ID NO: 124173 - DNA, 80 bp, synthetic construct; identical to SEQ ID NO: 39865
  misc_feature 1..80: note = Artificially Synthesized Probe
  source 1..80: mol_type = other DNA

SEQ ID NO: 124174 - DNA, 80 bp, synthetic construct
  misc_feature 1..80: note = Artificially Synthesized Probe
  source 1..80: mol_type = other DNA
aaaaaaaaagaaattaaaggaggccaggcatgattgctcacacctgtaatcccagcactttgggagggcaaggcaggagg

SEQ ID NO: 124175 - DNA, 80 bp, synthetic construct
  misc_feature 1..80: note = Artificially Synthesized Probe
  source 1..80: mol_type = other DNA
tgcagtgagctctgattgtaccgctgcactccaaccaggggaatacagcaagatcctgtgacaaaaaaaaaaaaaagaaa

SEQ ID NO: 124176 - DNA, 80 bp, synthetic construct; identical to SEQ ID NO: 39934
  misc_feature 1..80: note = Artificially Synthesized Probe
  source 1..80: mol_type = other DNA

SEQ ID NO: 124177 - DNA, 80 bp, synthetic construct
  misc_feature 1..80: note = Artificially Synthesized Probe
  source 1..80: mol_type = other DNA
taaaaataaaagtaaatagacactaaaatgaaagcacagattataactgatgaatgtactctaagaaaataatataataa

SEQ ID NO: 124178 - DNA, 80 bp, synthetic construct
  misc_feature 1..80: note = Artificially Synthesized Probe
  source 1..80: mol_type = other DNA
gccactacaccaagctaatttttgactttttgtacagatggggtctcactacattgcccaagctgtgccagaattcctgg

SEQ ID NO: 124179 - DNA, 80 bp, synthetic construct
  misc_feature 1..80: note = Artificially Synthesized Probe
  source 1..80: mol_type = other DNA
cattcaggtatgaatttgtacaattatgtttactaggcttgtggcatcaaaaaccataaataacagccaggcatgatggc

SEQ ID NO: 124180 - DNA, 80 bp, synthetic construct
  misc_feature 1..80: note = Artificially Synthesized Probe
  source 1..80: mol_type = other DNA
aaattcaagactgagatgatataatcggtaccacaagtctggcaattctccagttggtctaatccatatgtaatgaccat

SEQ ID NO: 124181 - DNA, 80 bp, synthetic construct
  misc_feature 1..80: note = Artificially Synthesized Probe
  source 1..80: mol_type = other DNA
tactctgtacagaacctgtaaatggggaaaacaagcagctttttaaaaaaattcacgtgcttccacaaagcaagaaaata

SEQ ID NO: 124182 - DNA, 80 bp, synthetic construct; identical to SEQ ID NO: 39935
  misc_feature 1..80: note = Artificially Synthesized Probe
  source 1..80: mol_type = other DNA

SEQ ID NO: 124183 - DNA, 80 bp, synthetic construct
  misc_feature 1..80: note = Artificially Synthesized Probe
  source 1..80: mol_type = other DNA
ctcttttgaaagataagcactctcatgcttaccacaaaataccttcaaaaatcatattatttccaatacacacacaaaca

SEQ ID NO: 124184 - DNA, 80 bp, synthetic construct
  misc_feature 1..80: note = Artificially Synthesized Probe
  source 1..80: mol_type = other DNA
gattttatttagtctacccatagttttcattaaaagtatccttggaggttaggcacagtgactcatatctatcatcctag

SEQ ID NO: 124185 - DNA, 80 bp, synthetic construct
  misc_feature 1..80: note = Artificially Synthesized Probe
  source 1..80: mol_type = other DNA
ggatcacttaagcctgggaggtcaaggctgcagtgagccaagatcgtgccactgcactccagcgtgggcaacagagacca

SEQ ID NO: 124186 - DNA, 80 bp, synthetic construct; identical to SEQ ID NO: 39936
  misc_feature 1..80: note = Artificially Synthesized Probe
  source 1..80: mol_type = other DNA

SEQ ID NO: 124187 - DNA, 80 bp, synthetic construct
  misc_feature 1..80: note = Artificially Synthesized Probe
  source 1..80: mol_type = other DNA
gaggctctagctccaaaaaaaaattaaattaaattaaatttaaaaaaaaaaaaccaccattctaccattctcaaaggcct

SEQ ID NO: 124188 - DNA, 80 bp, synthetic construct
  misc_feature 1..80: note = Artificially Synthesized Probe
  source 1..80: mol_type = other DNA
tattggtttaaaataccaatatgctggtttcatttaagttctgacatttctgctcaagtacgcaacttactaaaaatttt

SEQ ID NO: 124189 - DNA, 80 bp, synthetic construct; identical to SEQ ID NO: 39937
  misc_feature 1..80: note = Artificially Synthesized Probe
  source 1..80: mol_type = other DNA

SEQ ID NO: 124190 - DNA, 80 bp, synthetic construct
  misc_feature 1..80: note = Artificially Synthesized Probe
  source 1..80: mol_type = other DNA
ctattttatatatatatacatatatatacacacacatatatatacatatatatacacatatatatacatacacacatata

SEQ ID NO: 124191 - DNA, 80 bp, synthetic construct
  misc_feature 1..80: note = Artificially Synthesized Probe
  source 1..80: mol_type = other DNA
tcagagaagattactttctgaggcttttcctatagtgtgctattcgtagtatgctgaaaaactaaaaggaaacccaataa

SEQ ID NO: 124192 - DNA, 80 bp, synthetic construct
  misc_feature 1..80: note = Artificially Synthesized Probe
  source 1..80: mol_type = other DNA
acaatatatacatatatacatacatacatacatgctaaacaaatgaaggattaataacagttcaccaggtaaagagaagc

SEQ ID NO: 124193 - DNA, 80 bp, synthetic construct
  misc_feature 1..80: note = Artificially Synthesized Probe
  source 1..80: mol_type = other DNA
agctttggtaatgacactgatggaggagggacatcttcatccactgattccccagaggccacatggctgaggtcctagat

SEQ ID NO: 124194 - DNA, 80 bp, synthetic construct
  misc_feature 1..80: note = Artificially Synthesized Probe
  source 1..80: mol_type = other DNA
ttttacctaattatttcaaaaagccaacattaaacccaacagacaacaaattaaagaaataatctcttaaatcaactcag

SEQ ID NO: 124195 - DNA, 80 bp, synthetic construct; identical to SEQ ID NO: 39938
  misc_feature 1..80: note = Artificially Synthesized Probe
  source 1..80: mol_type = other DNA

SEQ ID NO: 124196 - DNA, 80 bp, synthetic construct
  misc_feature 1..80: note = Artificially Synthesized Probe
  source 1..80: mol_type = other DNA
acgtgggctgtgaaaaaaagacgttctaggtgtgggggcaaagaaaaaacaacacagaagcgaaacacttccttgctttt

SEQ ID NO: 124197 - DNA, 80 bp, synthetic construct
  misc_feature 1..80: note = Artificially Synthesized Probe
  source 1..80: mol_type = other DNA
ggcacagagttaagccacgacagtggggccagaaaagccaagtgccagtaacagaggcttcagcagcgctcttaaagctc

SEQ ID NO: 124198 - DNA, 80 bp, synthetic construct; identical to SEQ ID NO: 39939
  misc_feature 1..80: note = Artificially Synthesized Probe
  source 1..80: mol_type = other DNA

SEQ ID NO: 124199 - DNA, 80 bp, synthetic construct
  misc_feature 1..80: note = Artificially Synthesized Probe
  source 1..80: mol_type = other DNA
ggtcaggagtttgagaccagcctggccaacatggtgaaaccctgtctctactaaaaatacaaaaattagctgggcatggt

SEQ ID NO: 124200 - DNA, 80 bp, synthetic construct
  misc_feature 1..80: note = Artificially Synthesized Probe
  source 1..80: mol_type = other DNA
tattgcaatgggcatgtaatttctgcttaaatgtcaggaggtctgagccattttaaaataaatctagcacaatttaagat

SEQ ID NO: 124201 - DNA, 80 bp, synthetic construct; identical to SEQ ID NO: 39866
  misc_feature 1..80: note = Artificially Synthesized Probe
  source 1..80: mol_type = other DNA

SEQ ID NO: 124202 - DNA, 80 bp, synthetic construct
  misc_feature 1..80: note = Artificially Synthesized Probe
  source 1..80: mol_type = other DNA
aattgtgaaagggtaggggggaaaaaaacaccaaaaaatccaaattaaaaaaaaataagaggcttgttttaagaggtatc

SEQ ID NO: 124203 - DNA, 80 bp, synthetic construct
  misc_feature 1..80: note = Artificially Synthesized Probe
  source 1..80: mol_type = other DNA
catatctatattgtcactacacatgacttaagactaaactgccacaatctaccattggcccagctaatcccagggccaca

SEQ ID NO: 124204 - DNA, 80 bp, synthetic construct; identical to SEQ ID NO: 39940
  misc_feature 1..80: note = Artificially Synthesized Probe
  source 1..80: mol_type = other DNA

SEQ ID NO: 124205 - DNA, 80 bp, synthetic construct
  misc_feature 1..80: note = Artificially Synthesized Probe
  source 1..80: mol_type = other DNA
acaaataacttgggtaagtcctgtctgtacttactgtacccacctactagtaatttcctctgaaaatacatatttagcta

SEQ ID NO: 124206 - DNA, 80 bp, synthetic construct
  misc_feature 1..80: note = Artificially Synthesized Probe
  source 1..80: mol_type = other DNA
tgagcgaaggtttctgagtatgatctatatgccatccaactaatatatcaactgtatccttgatggaaacaaagagagag

SEQ ID NO: 124207 - DNA, 80 bp, synthetic construct
  misc_feature 1..80: note = Artificially Synthesized Probe
  source 1..80: mol_type = other DNA
aaatagtttattttcttcaaatattttaaggtatgaatgtcagaaagaaaaatgcggtatttaaccctggaacctcaaat

SEQ ID NO: 124208 - DNA, 80 bp, synthetic construct; identical to SEQ ID NO: 39941
  misc_feature 1..80: note = Artificially Synthesized Probe
  source 1..80: mol_type = other DNA

SEQ ID NO: 124209 - DNA, 80 bp, synthetic construct
  misc_feature 1..80: note = Artificially Synthesized Probe
  source 1..80: mol_type = other DNA
aatcccaactacctgggaggctgagacacaagaatcgcttgaacccaggaggcagaggttgcagtgagctgagattgcac

SEQ ID NO: 124210 - DNA, 80 bp, synthetic construct
  misc_feature 1..80: note = Artificially Synthesized Probe
  source 1..80: mol_type = other DNA
tgacatcagttaacattagtccttaataacatctgtttacaatatccctaaatgctctctttaagattctacctgtgatt

SEQ ID NO: 124211 - DNA, 80 bp, synthetic construct
  misc_feature 1..80: note = Artificially Synthesized Probe
  source 1..80: mol_type = other DNA
cttgcttcatattaaaattaaagaagatcagtatgggaccacacataaataacatgcaggctcaggttaccattatacat

SEQ ID NO: 124212 - DNA, 80 bp, synthetic construct
  misc_feature 1..80: note = Artificially Synthesized Probe
  source 1..80: mol_type = other DNA
ttccatggtgtatatgtgccacattttcttaatccagtctatcattgttggacatttgggttggttccaagtctttgcta

SEQ ID NO: 124213 - DNA, 80 bp, synthetic construct; identical to SEQ ID NO: 39942
  misc_feature 1..80: note = Artificially Synthesized Probe
  source 1..80: mol_type = other DNA

SEQ ID NO: 124214 - DNA, 80 bp, synthetic construct
  misc_feature 1..80: note = Artificially Synthesized Probe
  source 1..80: mol_type = other DNA
tgagccgagatcgtgccactgccctccagcttggacaacagagcaagattatgtctcaaaaaaaaagagaaaaagaaaac

SEQ ID NO: 124215 - DNA, 80 bp, synthetic construct
  misc_feature 1..80: note = Artificially Synthesized Probe
  source 1..80: mol_type = other DNA
tacagaagaaaaaccttattcttgggagatgcatactaaaacattatggggtgaactgtcatcatgtgtatggttttcag

SEQ ID NO: 124216 - DNA, 80 bp, synthetic construct
  misc_feature 1..80: note = Artificially Synthesized Probe
  source 1..80: mol_type = other DNA
tgggaaaatgttcataattgtgcatgcagaataagcccgagctggtggcattctgtttagttacaggtaattttctgaat

SEQ ID NO: 124217 - DNA, 80 bp, synthetic construct; identical to SEQ ID NO: 39943
  misc_feature 1..80: note = Artificially Synthesized Probe
  source 1..80: mol_type = other DNA

SEQ ID NO: 124218 - DNA, 80 bp, synthetic construct
  misc_feature 1..80: note = Artificially Synthesized Probe
  source 1..80: mol_type = other DNA
tatatttcctttatattttttaaactacatacccaaaataaagcatatcaaaaacagtaaaaaaaaaaaaaaaaaaaaaa

SEQ ID NO: 124219 - DNA, 80 bp, synthetic construct
  misc_feature 1..80: note = Artificially Synthesized Probe
  source 1..80: mol_type = other DNA
cacttgaggtcaggagttcaagaccagcatggccagcacaacgaaaccccatctctatcaaaaatacaaaacttagccag

SEQ ID NO: 124220 - DNA, 80 bp, synthetic construct; identical to SEQ ID NO: 39944
  misc_feature 1..80: note = Artificially Synthesized Probe
  source 1..80: mol_type = other DNA

SEQ ID NO: 124221 - DNA, 80 bp, synthetic construct
  misc_feature 1..80: note = Artificially Synthesized Probe
  source 1..80: mol_type = other DNA
tcctagtggagttcctattttcaaatttgcaaatcattctggtcctaagcaatctcaaaaaaacatttctaaaaaccaaa

SEQ ID NO: 124222 - DNA, 80 bp, synthetic construct
  misc_feature 1..80: note = Artificially Synthesized Probe
  source 1..80: mol_type = other DNA
gcctggctaatttttgtattgttagtagagacggggtttcaccatgttggcctggatggtttcgatctcttgacctcatg

SEQ ID NO: 124223 - DNA, 80 bp, synthetic construct
  misc_feature 1..80: note = Artificially Synthesized Probe
  source 1..80: mol_type = other DNA
caggctggagtgcagtggcgtgatctcgactcactgcaagctccgcctcgcaggttcacggcattctcctgcctcagtct

SEQ ID NO: 124224 - DNA, 80 bp, synthetic construct
  misc_feature 1..80: note = Artificially Synthesized Probe
  source 1..80: mol_type = other DNA
aactagtttacagtcccaccaacagtgtaaaagtgttcctatttctccacatcctctccagcacctgttgtttcctgact

SEQ ID NO: 124225 - DNA, 80 bp, synthetic construct
  misc_feature 1..80: note = Artificially Synthesized Probe
  source 1..80: mol_type = other DNA
ccttctttaacccttgtattagtaattctacctccttggcttatggggggaaaagtcctagttttaaattgctggcattt

SEQ ID NO: 124226 - DNA, 80 bp, synthetic construct; identical to SEQ ID NO: 39945
  misc_feature 1..80: note = Artificially Synthesized Probe
  source 1..80: mol_type = other DNA

SEQ ID NO: 124227 - DNA, 80 bp, synthetic construct
  misc_feature 1..80: note = Artificially Synthesized Probe
  source 1..80: mol_type = other DNA
aaggacatgtgttaagggacaattttcttcccaagtacatcatgcatttttcccccttcattcttacctgcattacagat

SEQ ID NO: 124228 - DNA, 80 bp, synthetic construct
  misc_feature 1..80: note = Artificially Synthesized Probe
  source 1..80: mol_type = other DNA
agcaagctccctcctgtctcaactcctgaagcaatttgctactgtgtttattttaatgcaaacaaaaaacacacacaaaa

SEQ ID NO: 124229 - DNA, 80 bp, synthetic construct
  misc_feature 1..80: note = Artificially Synthesized Probe
  source 1..80: mol_type = other DNA
agtctgtctagcctgcattgccctcaagtatctgtctgatattactttctttttacaaaatcaattatttacaaacagtg

SEQ ID NO: 124230 - DNA, 80 bp, synthetic construct; identical to SEQ ID NO: 39946
  misc_feature 1..80: note = Artificially Synthesized Probe
  source 1..80: mol_type = other DNA

SEQ ID NO: 124231 - DNA, 80 bp, synthetic construct
  misc_feature 1..80: note = Artificially Synthesized Probe
  source 1..80: mol_type = other DNA
cagtttcaaattctctagtttacaaaaactaattttattcattcatgcctgcatcaagagtttatgccattccataagtc

SEQ ID NO: 124232 - DNA, 80 bp, synthetic construct
  misc_feature 1..80: note = Artificially Synthesized Probe
  source 1..80: mol_type = other DNA
gtcaggagtttgagaccagcctggccaacatggtgaaactgcaagctccgccttgtctctactaaaaatacaaaaattag

SEQ ID NO: 124233 - DNA, 80 bp, synthetic construct
  misc_feature 1..80: note = Artificially Synthesized Probe
  source 1..80: mol_type = other DNA
tattcttttcaagtggattccatttgtattcaaccgtaattaacacataattaatgcagataaaaatgacaagacccact

SEQ ID NO: 124234 - DNA, 80 bp, synthetic construct
  misc_feature 1..80: note = Artificially Synthesized Probe
  source 1..80: mol_type = other DNA
ttcattaagcacgtcatgtacagcagccaagatattatccaattgtttaactagtacctttaaaagaaaacacatttata

SEQ ID NO: 124235 - DNA, 80 bp, synthetic construct; identical to SEQ ID NO: 39947
  misc_feature 1..80: note = Artificially Synthesized Probe
  source 1..80: mol_type = other DNA

SEQ ID NO: 124236 - DNA, 80 bp, synthetic construct
  misc_feature 1..80: note = Artificially Synthesized Probe
  source 1..80: mol_type = other DNA
tttgatggggttgtttttttcttgtaaatttgagttctttgtagattctggatattagacttttgtcagatgagtagatt

SEQ ID NO: 124237 - DNA, 80 bp, synthetic construct
  misc_feature 1..80: note = Artificially Synthesized Probe
  source 1..80: mol_type = other DNA
aaatttggaaggaggagaaacttgctttgatccaagtgtcatctgcctcactagaccattttcattaattttctcctgct

SEQ ID NO: 124238 - DNA, 80 bp, synthetic construct
  misc_feature 1..80: note = Artificially Synthesized Probe
  source 1..80: mol_type = other DNA
ccaccacgcccagctaactttgtctttttagtagagatggggcttcactatgttgggcaggctggtatcgaactcctgaa

SEQ ID NO: 124239 - DNA, 80 bp, synthetic construct; identical to SEQ ID NO: 39948
  misc_feature 1..80: note = Artificially Synthesized Probe
  source 1..80: mol_type = other DNA

SEQ ID NO: 124240 - DNA, 80 bp, synthetic construct
  misc_feature 1..80: note = Artificially Synthesized Probe
  source 1..80: mol_type = other DNA
tttaagaagaaaaagaaattacatattagagagcattaagttctcgatcatcataatacagactttccccattcttaaac

SEQ ID NO: 124241 - DNA, 80 bp, synthetic construct
  misc_feature 1..80: note = Artificially Synthesized Probe
  source 1..80: mol_type = other DNA
ccgaagaagattcgacagtcgagactcatcagaataagacatcgatctctctgtgaatatataaacattttgttgtccat

SEQ ID NO: 124242 - DNA, 80 bp, synthetic construct
  misc_feature 1..80: note = Artificially Synthesized Probe
  source 1..80: mol_type = other DNA
gaaaccctgtctccacagacatacaaaaaattacataaactagccagccaaggtggtgtgcacctgtagtcccagctact

SEQ ID NO: 124243 - DNA, 80 bp, synthetic construct; identical to SEQ ID NO: 39949
  misc_feature 1..80: note = Artificially Synthesized Probe
  source 1..80: mol_type = other DNA

SEQ ID NO: 124244 - DNA, 80 bp, synthetic construct
  misc_feature 1..80: note = Artificially Synthesized Probe
  source 1..80: mol_type = other DNA
taggtaaattaaacaacttccaaggggtacggataaagtctcaatcaagtaaaaacaggatataggcttctacttatcat

SEQ ID NO: 124245 - DNA, 80 bp, synthetic construct
  misc_feature 1..80: note = Artificially Synthesized Probe
  source 1..80: mol_type = other DNA
tccactagaaaggtagcaaaccacaacttttctccccttattttttaatcacaagaacaagcaaacaatagtgaatacta

SEQ ID NO: 124246 - DNA, 80 bp, synthetic construct
  misc_feature 1..80: note = Artificially Synthesized Probe
  source 1..80: mol_type = other DNA
aaatacaaaaattagctgggcatagtggcacatgcctgtaatcccagctactcaggaggctgaggtgggaggatcgcttt

SEQ ID NO: 124247 - DNA, 80 bp, synthetic construct
  misc_feature 1..80: note = Artificially Synthesized Probe
  source 1..80: mol_type = other DNA
tgtcctgaatggtattgcctaggttttcttctagggtttttatggttttaggtctaacatttaagtctttaatccatctt

SEQ ID NO: 124248 - DNA, 80 bp, synthetic construct; identical to SEQ ID NO: 39950
  misc_feature 1..80: note = Artificially Synthesized Probe
  source 1..80: mol_type = other DNA

SEQ ID NO: 124249 - DNA, 80 bp, synthetic construct
  misc_feature 1..80: note = Artificially Synthesized Probe
  source 1..80: mol_type = other DNA
tactcgggaggctgaggcaggagaatcattttaatctgggaggtggaggctgcagtgagctgagattgcgccactgcact

SEQ ID NO: 124250 - DNA, 80 bp, synthetic construct
  misc_feature 1..80: note = Artificially Synthesized Probe
  source 1..80: mol_type = other DNA
ttaatacctgggtgataaaataatctatactacaaaccctcatgacacaagtttaccaatgtaacaaatctgcactggta

SEQ ID NO: 124251 - DNA, 80 bp, synthetic construct
  misc_feature 1..80: note = Artificially Synthesized Probe
  source 1..80: mol_type = other DNA
tagcaaactacatgaccctgagcctttgaagaagaggaattgtttactgaactactttagagtcgctgtttagcttctat

SEQ ID NO: 124252 - DNA, 80 bp, synthetic construct; identical to SEQ ID NO: 39951
  misc_feature 1..80: note = Artificially Synthesized Probe
  source 1..80: mol_type = other DNA

SEQ ID NO: 124253 - DNA, 80 bp, synthetic construct
  misc_feature 1..80: note = Artificially Synthesized Probe
  source 1..80: mol_type = other DNA
cctcccgggttcacgccagtctcctgcctcagcctcccgtgtagctggggctacaggcgcccaccaccgcacccggctaa

SEQ ID NO: 124254 - DNA, 80 bp, synthetic construct
  misc_feature 1..80: note = Artificially Synthesized Probe
  source 1..80: mol_type = other DNA
tatacagtgaggctacatcataaggcagaaatgctatcagtgtatttaactttagaaaagtgcccactctaggcagggcc

SEQ ID NO: 124255 - DNA, 80 bp, synthetic construct
  misc_feature 1..80: note = Artificially Synthesized Probe
  source 1..80: mol_type = other DNA
acgagaatcacttgaacctgggaggcggaggttgcagtgagcagagattgcagcactgtgctccagcctgggtgacagag

SEQ ID NO: 124256 - DNA, 80 bp, synthetic construct
  misc_feature 1..80: note = Artificially Synthesized Probe
  source 1..80: mol_type = other DNA
catggcacacgtttacctacataacaaacctgtacatcctgcacacgtaccctgaacttaaaagagaaaaaaaaaaaaga

SEQ ID NO: 124257 - DNA, 80 bp, synthetic construct; identical to SEQ ID NO: 39952
  misc_feature 1..80: note = Artificially Synthesized Probe
  source 1..80: mol_type = other DNA

SEQ ID NO: 124258 - DNA, 80 bp, synthetic construct
  misc_feature 1..80: note = Artificially Synthesized Probe
  source 1..80: mol_type = other DNA
catgtctttggtggctaaagcacgactgccatgctgaacactggtgaactcagggctggtcacattgttaaccctcagct

SEQ ID NO: 124259 - DNA, 80 bp, synthetic construct; identical to SEQ ID NO: 39867
  misc_feature 1..80: note = Artificially Synthesized Probe
  source 1..80: mol_type = other DNA

SEQ ID NO: 124260 - DNA, 80 bp, synthetic construct
  misc_feature 1..80: note = Artificially Synthesized Probe
  source 1..80: mol_type = other DNA
ttcctgatagctcaggatcttattactcaatctgcagctcaaccagcctttgcttctcctacctttttcctgtactgtct

SEQ ID NO: 124261 - DNA, 80 bp, synthetic construct
  misc_feature 1..80: note = Artificially Synthesized Probe
  source 1..80: mol_type = other DNA
ttgttttaaaactttcttgaagtttagagatagtagccaagaggaacttcaaccttagctaaatatttttgaaaataaaa

SEQ ID NO: 124262 - DNA, 80 bp, synthetic construct; identical to SEQ ID NO: 39953
  misc_feature 1..80: note = Artificially Synthesized Probe
  source 1..80: mol_type = other DNA

SEQ ID NO: 124263 - DNA, 80 bp, synthetic construct
  misc_feature 1..80: note = Artificially Synthesized Probe
  source 1..80: mol_type = other DNA
gcactatcagttctataaaaagagaaaagtttaagattagaactttaaataacataaataaatatttctttatacaagcc

SEQ ID NO: 124264 - DNA, 80 bp, synthetic construct
  misc_feature 1..80: note = Artificially Synthesized Probe
  source 1..80: mol_type = other DNA
cccattcagaaatatgaacaactactgggattagggtgactttgctggttttaccattgaaagtctcctgtcccaggcaa

SEQ ID NO: 124265 - DNA, 80 bp, synthetic construct; identical to SEQ ID NO: 39954
  misc_feature 1..80: note = Artificially Synthesized Probe
  source 1..80: mol_type = other DNA

SEQ ID NO: 124266 - DNA, 80 bp, synthetic construct
  misc_feature 1..80: note = Artificially Synthesized Probe
  source 1..80: mol_type = other DNA
aagtagggtacagccaagggtaaaagtgtgtcctcatctaagtatctgctctacgcttcaactacctcataagtaaaaca

SEQ ID NO: 124267 - DNA, 80 bp, synthetic construct
  misc_feature 1..80: note = Artificially Synthesized Probe
  source 1..80: mol_type = other DNA
aaaaaaaaagaaaatcacttctatgatatttactaaaaatgctttctcaaccttttagaacctgaatcttttagaaaagt

SEQ ID NO: 124268 - DNA, 80 bp, synthetic construct
  misc_feature 1..80: note = Artificially Synthesized Probe
  source 1..80: mol_type = other DNA
tttccttgcttccaaaaatactaaacataaaacttagcatgagctcaatcagttggacaccttgatctgcacttactgca

SEQ ID NO: 124269 - DNA, 80 bp, synthetic construct
  misc_feature 1..80: note = Artificially Synthesized Probe
  source 1..80: mol_type = other DNA
ctaaaatgactaaggctccataaggagtatcttctaatattcagagttcatttattcataaagctaagtacttagaacat

SEQ ID NO: 124270 - DNA, 80 bp, synthetic construct
  misc_feature 1..80: note = Artificially Synthesized Probe
  source 1..80: mol_type = other DNA
catatgcacagcaagtaaatcaacaaatgcagagtggtttctgcctctatttggaatggaactacaaattcttcatttgt

SEQ ID NO: 124271 - DNA, 80 bp, synthetic construct; identical to SEQ ID NO: 39955
  misc_feature 1..80: note = Artificially Synthesized Probe
  source 1..80: mol_type = other DNA

SEQ ID NO: 124272 - DNA, 80 bp, synthetic construct
  misc_feature 1..80: note = Artificially Synthesized Probe
  source 1..80: mol_type = other DNA
ctttactattaagagttaaatatttgtatcactttctggtgacacagtagtaccataaggcagcagagaatacaagttaa

SEQ ID NO: 124273 - DNA, 80 bp, synthetic construct
  misc_feature 1..80: note = Artificially Synthesized Probe
  source 1..80: mol_type = other DNA
ataaagaaacgcttagtttgcagggtatgttaaaagttattatgaccataatacaaaataaactcagtttccagtctaaa

SEQ ID NO: 124274 - DNA, 80 bp, synthetic construct; identical to SEQ ID NO: 39956
  misc_feature 1..80: note = Artificially Synthesized Probe
  source 1..80: mol_type = other DNA

SEQ ID NO: 124275 - DNA, 80 bp, synthetic construct
  misc_feature 1..80: note = Artificially Synthesized Probe
  source 1..80: mol_type = other DNA
aaaagcacaaaatgctttagcatttatatgaaatttctatttttatacaatcttgactacttaggtttcaaaaaatgtca

SEQ ID NO: 124276 - DNA, 80 bp, synthetic construct
  misc_feature 1..80: note = Artificially Synthesized Probe
  source 1..80: mol_type = other DNA
gaagagctgaaagggatatcatctgccagaattagtgtctcaatttagtgaaaaaagaaaatctatctgttaagtctaag

SEQ ID NO: 124277 - DNA, 80 bp, synthetic construct
  misc_feature 1..80: note = Artificially Synthesized Probe
  source 1..80: mol_type = other DNA
acctcaaaaatcgcatactgtataatatggagcctttgtgatgttttgcatcaagtcaatctgtaagacagtagttacaa

SEQ ID NO: 124278 - DNA, 80 bp, synthetic construct
  misc_feature 1..80: note = Artificially Synthesized Probe
  source 1..80: mol_type = other DNA
gcttaatgtggcaaccaaaaaaattttagtacataagagaatttaaatgttaactgtaacatacaaatcacatgcaaata

SEQ ID NO: 124279 - DNA, 80 bp, synthetic construct; identical to SEQ ID NO: 39957
  misc_feature 1..80: note = Artificially Synthesized Probe
  source 1..80: mol_type = other DNA

SEQ ID NO: 124280 - DNA, 80 bp, synthetic construct
  misc_feature 1..80: note = Artificially Synthesized Probe
  source 1..80: mol_type = other DNA
atgagatttgcactaaagccaatgaagtaggaatgtacttattctctaaagtagcaaagatagtctcactgtcacagagc

SEQ ID NO: 124281 - DNA, 80 bp, synthetic construct
  misc_feature 1..80: note = Artificially Synthesized Probe
  source 1..80: mol_type = other DNA
ctccagcctgggcgacaagagacagttttgagactccgcctcaaacaaaaataaaaacaatttttttaaagaaaactatt

SEQ ID NO: 124282 - DNA, 80 bp, synthetic construct
  misc_feature 1..80: note = Artificially Synthesized Probe
  source 1..80: mol_type = other DNA
tgggccttgtatcattacattaaaaacactgctctaaatatgagtctatggctaaaatattaatttgagaggctcaggga

SEQ ID NO: 124283 - DNA, 80 bp, synthetic construct
  misc_feature 1..80: note = Artificially Synthesized Probe
  source 1..80: mol_type = other DNA
taatttatcggtaaaactagtttaactacctcagtattaagtgtctataataaccaaatcttaattatccatttatgggt

SEQ ID NO: 124284 - DNA, 80 bp, synthetic construct; identical to SEQ ID NO: 39958
  misc_feature 1..80: note = Artificially Synthesized Probe
  source 1..80: mol_type = other DNA

SEQ ID NO: 124285 - DNA, 80 bp, synthetic construct
  misc_feature 1..80: note = Artificially Synthesized Probe
  source 1..80: mol_type = other DNA
cttttacctgtgaattctggaaggtaatctctaaactcttgaaatgtcatacctaataagagggtcctggccagaagcag

SEQ ID NO: 124286 - DNA, 80 bp, synthetic construct
  misc_feature 1..80: note = Artificially Synthesized Probe
  source 1..80: mol_type = other DNA
tactcaggaggctgaggtttcagtgagctgagatcatgccactgcactccagcctgggcaacagagcaagactatctcca

SEQ ID NO: 124287 - DNA, 80 bp, synthetic construct; identical to SEQ ID NO: 39959
  misc_feature 1..80: note = Artificially Synthesized Probe
  source 1..80: mol_type = other DNA

SEQ ID NO: 124288 - DNA, 80 bp, synthetic construct
  misc_feature 1..80: note = Artificially Synthesized Probe
  source 1..80: mol_type = other DNA
ttggctcattctaatctgaatccctaaactgcaataaactctaaccatgggtatgagagctttcaatgagttctagtgag

SEQ ID NO: 124289 - DNA, 80 bp, synthetic construct
  misc_feature 1..80: note = Artificially Synthesized Probe
  source 1..80: mol_type = other DNA
ccagcctggcaatatggtgaaactgtctctaaaaaatatagaaaaactagccaggcgaggtggtatgcgcccatagatcc

SEQ ID NO: 124290 - DNA, 80 bp, synthetic construct
  misc_feature 1..80: note = Artificially Synthesized Probe
  source 1..80: mol_type = other DNA
caaaaaaaaaaaaaagagtggtcttgggaacccccaaacttgcaactagtattagatgcaagggtcatcttatggactgg

SEQ ID NO: 124291 - DNA, 80 bp, synthetic construct
  misc_feature 1..80: note = Artificially Synthesized Probe
  source 1..80: mol_type = other DNA
tagctgagaccacaggcttactccaccacgcccagcaacttttgtattttttttgtcccattccctacaacattcccaaa

SEQ ID NO: 124292 - DNA, 80 bp, synthetic construct
  misc_feature 1..80: note = Artificially Synthesized Probe
  source 1..80: mol_type = other DNA
gcttattttccttccaaggaacctctaatattctctattttcagacctccaatcaaattagccagaaggagcaaacgaag

SEQ ID NO: 124293 - DNA, 80 bp, synthetic construct; identical to SEQ ID NO: 39960
  misc_feature 1..80: note = Artificially Synthesized Probe
  source 1..80: mol_type = other DNA

SEQ ID NO: 124294 - DNA, 80 bp, synthetic construct
  misc_feature 1..80: note = Artificially Synthesized Probe
  source 1..80: mol_type = other DNA
gctgggactacaagcatctggcaccacacccagctaattttttttgtatttttagtagagacaaggtttcaccatgttgg

SEQ ID NO: 124295 - DNA, 80 bp, synthetic construct
  misc_feature 1..80: note = Artificially Synthesized Probe
  source 1..80: mol_type = other DNA
ttatagatttctgcttcatgagaagtagaagccatttgacaacaccctcagcaagagctaacattttagctcctaacaag

SEQ ID NO: 124296 - DNA, 80 bp, synthetic construct
  misc_feature 1..80: note = Artificially Synthesized Probe
  source 1..80: mol_type = other DNA
ctaatgtttgagctcttcaacactccatcactgcctgtcatcttccttctaatatatccacaaattcacctgcatctgca

SEQ ID NO: 124297 - DNA, 80 bp, synthetic construct; identical to SEQ ID NO: 39961
  misc_feature 1..80: note = Artificially Synthesized Probe
  source 1..80: mol_type = other DNA

SEQ ID NO: 124298 - DNA, 80 bp, synthetic construct
  misc_feature 1..80: note = Artificially Synthesized Probe
  source 1..80: mol_type = other DNA
ccgtgcccggcctgtttcttttgtacgttgcaaaatctcccattttactactgcttatcacatcatcaacatatgagcac

SEQ ID NO: 124299 - DNA, 80 bp, synthetic construct
  misc_feature 1..80: note = Artificially Synthesized Probe
  source 1..80: mol_type = other DNA
tctactaaaatagaaaaaataaaattacctgcgtgtggtggcacgcacctgtagtcccagctacctgggaggctgaggca

SEQ ID NO: 124300 - DNA, 80 bp, synthetic construct; identical to SEQ ID NO: 39962
  misc_feature 1..80: note = Artificially Synthesized Probe
  source 1..80: mol_type = other DNA

SEQ ID NO: 124301 - DNA, 80 bp, synthetic construct
  misc_feature 1..80: note = Artificially Synthesized Probe
  source 1..80: mol_type = other DNA
ccccgggcggcggaagtcgtcactcttaagaagggacggggccccacgctgcgcacccgcgggtttgctatggcgatgag

SEQ ID NO: 124302 - DNA, 80 bp, synthetic construct
  misc_feature 1..80: note = Artificially Synthesized Probe
  source 1..80: mol_type = other DNA
ccttccaagtgcgaatgtaaccttaagtcagttaacctctttgtgattacttttcttatctgcaaagtgacttaatgatc

SEQ ID NO: 124303 - DNA, 80 bp, synthetic construct
  misc_feature 1..80: note = Artificially Synthesized Probe
  source 1..80: mol_type = other DNA
cacgcccagctaatttttgtactttttgtagagatggggttttgccatgttgcccaggctgggattattaagtacttttt

SEQ ID NO: 124304 - DNA, 80 bp, synthetic construct
  misc_feature 1..80: note = Artificially Synthesized Probe
  source 1..80: mol_type = other DNA
ccagttttgccaagatgatgaaagcccatgtctactaaaaatacaaaaattagcccagcttgatggtgggcgcctataat

SEQ ID NO: 124305 - DNA, 80 bp, synthetic construct
  misc_feature 1..80: note = Artificially Synthesized Probe
  source 1..80: mol_type = other DNA
caaaaagtaatattacaactcagtgaattttataacaaacttttttggaattcattgactaatactataccaaatccaaa

SEQ ID NO: 124306 - DNA, 80 bp, synthetic construct; identical to SEQ ID NO: 39996
  misc_feature 1..80: note = Artificially Synthesized Probe
  source 1..80: mol_type = other DNA

SEQ ID NO: 124307 - DNA, 80 bp, synthetic construct
  misc_feature 1..80: note = Artificially Synthesized Probe
  source 1..80: mol_type = other DNA
gtagctgggattacagtcatgcaccaccacgcccggctaattttgtatttttagtagagaaggggtttctccatgttgag

SEQ ID NO: 124308 - DNA, 80 bp, synthetic construct
  misc_feature 1..80: note = Artificially Synthesized Probe
  source 1..80: mol_type = other DNA
ttttgcttccatgccttttttgttgttgttcatgctcttacttggaatgcgttctattttgtctacctatgcacatcctg

SEQ ID NO: 124309 - DNA, 80 bp, synthetic construct
  misc_feature 1..80: note = Artificially Synthesized Probe
  source 1..80: mol_type = other DNA
gcaggtagctgggactataggcatgtgccaccatgcccagctaaatttggtttttttgtttgtttgtttttgagacagag

SEQ ID NO: 124310 - DNA, 80 bp, synthetic construct
  misc_feature 1..80: note = Artificially Synthesized Probe
  source 1..80: mol_type = other DNA
tggggtttcaccttgttggccatgctggtctcgaactcctgacctcgtgatctgcctgcttctgcctcccaaagtgctgg

SEQ ID NO: 124311 - DNA, 80 bp, synthetic construct
  misc_feature 1..80: note = Artificially Synthesized Probe
  source 1..80: mol_type = other DNA
actgcactccagcctgggcgatagagcaagactccgtctcaaataaataaataaataaataaataaataataaaaacatc

SEQ ID NO: 124312 - DNA, 80 bp, synthetic construct
  misc_feature 1..80: note = Artificially Synthesized Probe
  source 1..80: mol_type = other DNA
cctaaatcctgttgttttgttttgttttattttgttttgttttgttttgtttgttttttgagacagagtctcgctatgtc

SEQ ID NO: 124313 - DNA, 80 bp, synthetic construct
  misc_feature 1..80: note = Artificially Synthesized Probe
  source 1..80: mol_type = other DNA
catgttggccaggctggtctcgaactcctgacctcgtgatccacccacctcggccacccaaagtgctgggattacaggcg

SEQ ID NO: 124314 - DNA, 80 bp, synthetic construct
  misc_feature 1..80: note = Artificially Synthesized Probe
  source 1..80: mol_type = other DNA
aatccctagttagataataactggagagtaccatgtttctatatatctctcagtgacttgcacagtgctagcagatagtg

SEQ ID NO: 124315 - DNA, 80 bp, synthetic construct
  misc_feature 1..80: note = Artificially Synthesized Probe
  source 1..80: mol_type = other DNA
gtagctgggattacaggcatgagccaccatgtctggacaaaaatatttccaggtgcagtggctcatgcctgtaattccca

SEQ ID NO: 124316 - DNA, 80 bp, synthetic construct
  misc_feature 1..80: note = Artificially Synthesized Probe
  source 1..80: mol_type = other DNA
gagggtcatttgaacacaggaatttgaggggagaaaaaaagaagagagaaagagaagtgaaggaaggaagaaaggaagga

SEQ ID NO: 124317 - DNA, 80 bp, synthetic construct
  misc_feature 1..80: note = Artificially Synthesized Probe
  source 1..80: mol_type = other DNA
gaaacattataatttcaaaagaaaaaatattctttggatcataggttctgaggtcagaacagcattcccgtagtctagat

SEQ ID NO: 124318 - DNA, 80 bp, synthetic construct
  misc_feature 1..80: note = Artificially Synthesized Probe
  source 1..80: mol_type = other DNA
gaacatttacctatgtctagcttttggagtaaagtcacataacctctaaccaggtaagtttcctgtggctttatttagga

SEQ ID NO: 124319 - DNA, 80 bp, synthetic construct
  misc_feature 1..80: note = Artificially Synthesized Probe
  source 1..80: mol_type = other DNA
ccagagcgatgattctgacatttgggatgatacagcactgataaaagcatatgataaagctgtggcttcatttaaggtat

SEQ ID NO: 124320 - DNA, 80 bp, synthetic construct
  misc_feature 1..80: note = Artificially Synthesized Probe
  source 1..80: mol_type = other DNA
tgatagcctatatatgtcatcctttgtggaggcaatttaaataaaatttaaaacatttattcctggctgggtatggtggc

SEQ ID NO: 124321 - DNA, 80 bp, synthetic construct
  misc_feature 1..80: note = Artificially Synthesized Probe
  source 1..80: mol_type = other DNA
ggacactgaggcaggagaattgcttgaacctggggggcagaggttgcaatgattgcaccactgcactccagcctgggcga

SEQ ID NO: 124322 - DNA, 80 bp, synthetic construct; identical to SEQ ID NO: 39986
  misc_feature 1..80: note = Artificially Synthesized Probe
  source 1..80: mol_type = other DNA

SEQ ID NO: 124323 - DNA, 80 bp, synthetic construct
  misc_feature 1..80: note = Artificially Synthesized Probe
  source 1..80: mol_type = other DNA
gaagataaatagcattagtacagcaattaatatttgtagcatgctgacagtgctctgtgtgcgtttcatatattaaatta

SEQ ID NO: 124324 - DNA, 80 bp, synthetic construct
  misc_feature 1..80: note = Artificially Synthesized Probe
  source 1..80: mol_type = other DNA
gttggccaacatcatcaccttctccattctctgagatgtttagtcttactgagcactaaatatgggtcatcaatagtcca

SEQ ID NO: 124325 - DNA, 80 bp, synthetic construct
  misc_feature 1..80: note = Artificially Synthesized Probe
  source 1..80: mol_type = other DNA
catacagatttcatgtctttctcatagttactcttgtaacatgagctaaagatcagacctctatgtcacctttgtaactg

SEQ ID NO: 124326 - DNA, 80 bp, synthetic construct
  misc_feature 1..80: note = Artificially Synthesized Probe
  source 1..80: mol_type = other DNA
ctcagcttcctgagtagttgggaccacaggtgtgtgccaccacacccagctcatttttgtattctttgtagagatgcagt

SEQ ID NO: 124327 - DNA, 80 bp, synthetic construct
  misc_feature 1..80: note = Artificially Synthesized Probe
  source 1..80: mol_type = other DNA
attaccaagagaattctataaaatagagattgaaatggggctcgatgtgggatgggttggtgatattgcagggagaagta

SEQ ID NO: 124328 - DNA, 80 bp, synthetic construct
  misc_feature 1..80: note = Artificially Synthesized Probe
  source 1..80: mol_type = other DNA
attggaaatgttagattgagaaaagtcacagctggattaatagcttcagaagtgtgtttgcagacagttgcaactaaagt

SEQ ID NO: 124329 - DNA, 80 bp, synthetic construct
  misc_feature 1..80: note = Artificially Synthesized Probe
  source 1..80: mol_type = other DNA
gaaaccccgtctttattaaaaatacaaaaattagctgtgcacagtggtgcacgcctgtaatcccagctactcgggaggct

SEQ ID NO: 124330 - DNA, 80 bp, synthetic construct
  misc_feature 1..80: note = Artificially Synthesized Probe
  source 1..80: mol_type = other DNA
aatggccgtaagcaagtaaagaaggatggccagctcttattgggaatgcctaaatctaaggcttgatcagaagtaatgaa

SEQ ID NO: 124331 - DNA, 80 bp, synthetic construct
  misc_feature 1..80: note = Artificially Synthesized Probe
  source 1..80: mol_type = other DNA
tttagagctgatgtcaggtgtatgatgcctttaagagcagtttttatagtgcagggggtggtcaaaagagaaaataggtg

SEQ ID NO: 124332 - DNA, 80 bp, synthetic construct
  misc_feature 1..80: note = Artificially Synthesized Probe
  source 1..80: mol_type = other DNA
aaaccacacctaaaagaaaacctgctaagaagaataaaagccaaaagaagaatactgcagcttccttacaacaggttatt

SEQ ID NO: 124333 - DNA, 80 bp, synthetic construct
  misc_feature 1..80: note = Artificially Synthesized Probe
  source 1..80: mol_type = other DNA
attagtcatgaaagtataaagaattagatgggaatgataaatgctaaaatcaggacatgtgttccatttgtgaatggaag

SEQ ID NO: 124334 - DNA, 80 bp, synthetic construct
  misc_feature 1..80: note = Artificially Synthesized Probe
  source 1..80: mol_type = other DNA
gtgagccactgcactaagataggagcaacatgtttcagcatgtttgtgggttgataggaaagatgagaatgggaaagttg

SEQ ID NO: 124335 - DNA, 80 bp, synthetic construct
  misc_feature 1..80: note = Artificially Synthesized Probe
  source 1..80: mol_type = other DNA
tctgctagttaaaagcagtagtcctgaaagctgaatattttggtgtcttttgagccaactttagtttcatcattaccaag

SEQ ID NO: 124336 - DNA, 80 bp, synthetic construct
  misc_feature 1..80: note = Artificially Synthesized Probe
  source 1..80: mol_type = other DNA
agccatctaataagatggggaaactaagactcaaagagattcagaaacttgtccatgattataaatgtaagagagttgga

SEQ ID NO: 124337 - DNA, 80 bp, synthetic construct
  misc_feature 1..80: note = Artificially Synthesized Probe
  source 1..80: mol_type = other DNA
tagtggaaagttggggacaaatgttctgccatttggtcagaagacggttgcatttacccagctaccattgcttcaattga

SEQ ID NO: 124338 - DNA, 80 bp, synthetic construct
  misc_feature 1..80: note = Artificially Synthesized Probe
  source 1..80: mol_type = other DNA
agcagagactagatgagaaactgttaaacagtatacacagttgtcagtttgatccaccgaggcattaattttttcttaat

SEQ ID NO: 124339 - DNA, 80 bp, synthetic construct
  misc_feature 1..80: note = Artificially Synthesized Probe
  source 1..80: mol_type = other DNA
ccccccatgccagggccaagactgggaccaggaaaggtaaaccttctatgaaagttttccagaaaatagttaatgtcggg

SEQ ID NO: 124340 - DNA, 80 bp, synthetic construct
  misc_feature 1..80: note = Artificially Synthesized Probe
  source 1..80: mol_type = other DNA
aaatgttagacactgcagtggatgcaacaaaatactttatatgaaagatttatccagttaacttttgtggagtattaggt

SEQ ID NO: 124341 - DNA, 80 bp, synthetic construct
  misc_feature 1..80: note = Artificially Synthesized Probe
  source 1..80: mol_type = other DNA
ctctactgaaaatacaaaaaaatttgccgggcgtgatggcgggcacctgtagtcccagctactcgggaggctgaggcagg

SEQ ID NO: 124342 - DNA, 80 bp, synthetic construct
  misc_feature 1..80: note = Artificially Synthesized Probe
  source 1..80: mol_type = other DNA
tgtttcccatgtcacctgtataagatatgtaaaataagaacacattatttacatctaatatagataaaatcctgaggcgc

SEQ ID NO: 124343 - DNA, 80 bp, synthetic construct
  misc_feature 1..80: note = Artificially Synthesized Probe
  source 1..80: mol_type = other DNA
accttaaggcttgtccctttctagttcttttgtgtaaagcggtgatttcttccatggagggaatggtatttaggcaattt

SEQ ID NO: 124344 - DNA, 80 bp, synthetic construct
  misc_feature 1..80: note = Artificially Synthesized Probe
  source 1..80: mol_type = other DNA
attttgtatttttagtagagatggggtttcaccatgttggccaggctggtcttgaactcctgacctcaagtgatctcccc

SEQ ID NO: 124345 - DNA, 80 bp, synthetic construct
  misc_feature 1..80: note = Artificially Synthesized Probe
  source 1..80: mol_type = other DNA
tcttaggatatatacatcatgcttcattggtctcagggggctgatttttataaggagagatttgctagttttcacaatat

SEQ ID NO: 124346 - DNA, 80 bp, synthetic construct
  misc_feature 1..80: note = Artificially Synthesized Probe
  source 1..80: mol_type = other DNA
aagttctcttgattcttactgttctcttagtgaaagaagcaaggttatcagctagaagctgggatgggagaggaaagaga

SEQ ID NO: 124347 - DNA, 80 bp, synthetic construct
  misc_feature 1..80: note = Artificially Synthesized Probe
  source 1..80: mol_type = other DNA
taatgtctacatagaaaggaaatgagaaaaatccagaggttgtcatttgacttatgagtctgtttgacttcaggatttgg

SEQ ID NO: 124348 - DNA, 80 bp, synthetic construct
  misc_feature 1..80: note = Artificially Synthesized Probe
  source 1..80: mol_type = other DNA
ctatcatgctggctgcctccatttccttctggaccaccagtaagtaaaaaagagtataggttagattttgctttcacata

SEQ ID NO: 124349 - DNA, 80 bp, synthetic construct; identical to SEQ ID NO: 40005
  misc_feature 1..80: note = Artificially Synthesized Probe
  source 1..80: mol_type = other DNA

SEQ ID NO: 124350 - DNA, 80 bp, synthetic construct
  misc_feature 1..80: note = Artificially Synthesized Probe
  source 1..80: mol_type = other DNA
ctcagctcacagcaacctccgcctcctgggttcaagcaattctgcctcggcctcccaagtagctgggattacaggcgact

SEQ ID NO: 124351 - DNA, 80 bp, synthetic construct
  misc_feature 1..80: note = Artificially Synthesized Probe
  source 1..80: mol_type = other DNA
atttctaatggtagatttttaggtattaacaatagataaaaagatactttttggcatactgtgtattgggatggggttag

SEQ ID NO: 124352 - DNA, 80 bp, synthetic construct
  misc_feature 1..80: note = Artificially Synthesized Probe
  source 1..80: mol_type = other DNA
tagtctaaatcaaaatgtttaaactttttatgtcacttgctgtcttttcgtcctcgttaaatttaattttgttggtcttt

SEQ ID NO: 124353 - DNA, 80 bp, synthetic construct
  misc_feature 1..80: note = Artificially Synthesized Probe
  source 1..80: mol_type = other DNA
tcgtctttgtttaggggaaaaaaaagaaatttaagtaggagattatataagcaaaaatacaattaatttccagcattcac

SEQ ID NO: 124354 - DNA, 80 bp, synthetic construct; identical to SEQ ID NO: 40006
  misc_feature 1..80: note = Artificially Synthesized Probe
  source 1..80: mol_type = other DNA

SEQ ID NO: 124355 - DNA, 80 bp, synthetic construct
  misc_feature 1..80: note = Artificially Synthesized Probe
  source 1..80: mol_type = other DNA
aattttaaaaagctttcatgctattgttagattattttgattatacacttttgaattgaaattatactttttctaaataa

SEQ ID NO: 124356 - DNA, 80 bp, synthetic construct
  misc_feature 1..80: note = Artificially Synthesized Probe
  source 1..80: mol_type = other DNA
gcaagctctgccttctggattcacgccattctcctgcctcagcctcagaggtagctgggactacaggtgcctgccaccac

SEQ ID NO: 124357 - DNA, 80 bp, synthetic construct
  misc_feature 1..80: note = Artificially Synthesized Probe
  source 1..80: mol_type = other DNA
aaatggagagttgaaattaatgcagttgtgattttaccacgtggatatgaagaagtgagggggagaagtacaaaggagtt

SEQ ID NO: 124358 - DNA, 80 bp, synthetic construct
  misc_feature 1..80: note = Artificially Synthesized Probe
  source 1..80: mol_type = other DNA
accttggggagtatggcttcaaacttgtcactttatacgttagtctcctacggacatgttctattgtattttagtcagaa

SEQ ID NO: 124359 - DNA, 80 bp, synthetic construct
  misc_feature 1..80: note = Artificially Synthesized Probe
  source 1..80: mol_type = other DNA
ggactacaggcgcccgccaccacgcccggctaatttttttttatttttagtagagacggggtttcaccgtggtctcaatc

SEQ ID NO: 124360 - DNA, 80 bp, synthetic construct
  misc_feature 1..80: note = Artificially Synthesized Probe
  source 1..80: mol_type = other DNA
tagaagaaacaactgacttaaaggtgtatgtttttaaatgtatcatctgtgtgtgcccccattaatattcttatttaaaa

SEQ ID NO: 124361 - DNA, 80 bp, synthetic construct
  misc_feature 1..80: note = Artificially Synthesized Probe
  source 1..80: mol_type = other DNA
ctactaaaaataccaaaaaaaatttagccaggcatggtggcacatgcctgtaatccgagctacttgggaggctgtggcag

SEQ ID NO: 124362 - DNA, 80 bp, synthetic construct
  misc_feature 1..80: note = Artificially Synthesized Probe
  source 1..80: mol_type = other DNA
gtggatcacttgaggttaggagttcaggaccagcctggccaacatggtgactactccatttctactaaatacacaaaact

SEQ ID NO: 124363 - DNA, 80 bp, synthetic construct
  misc_feature 1..80: note = Artificially Synthesized Probe
  source 1..80: mol_type = other DNA
ccaacagagtgagaatttgcggagggaaaaaaaagtcacgcttcagttgttgtagtataaccttggtatattgtatgtat

SEQ ID NO: 124364 - DNA, 80 bp, synthetic construct; identical to SEQ ID NO: 40008
  misc_feature 1..80: note = Artificially Synthesized Probe
  source 1..80: mol_type = other DNA

SEQ ID NO: 124365 - DNA, 80 bp, synthetic construct
  misc_feature 1..80: note = Artificially Synthesized Probe
  source 1..80: mol_type = other DNA
aacaaattagccgggcatgttggcgggcaccttttgtcccagctgctcgggaggctgaggcaggagagtggcgtgaaccc

SEQ ID NO: 124366 - DNA, 80 bp, synthetic construct
  misc_feature 1..80: note = Artificially Synthesized Probe
  source 1..80: mol_type = other DNA
catcaccccaaaaagaaaccctgttaccttcattttccccagccctaggcagtcagtacactttctgtctctatgaattt

SEQ ID NO: 124367 - DNA, 80 bp, synthetic construct
  misc_feature 1..80: note = Artificially Synthesized Probe
  source 1..80: mol_type = other DNA
tcacattttatccattcatcagttcatggacatttaggttgtttttatttttgggctataatgaataatgttgctatgaa

SEQ ID NO: 124368 - DNA, 80 bp, synthetic construct; identical to SEQ ID NO: 39987
  misc_feature 1..80: note = Artificially Synthesized Probe
  source 1..80: mol_type = other DNA

SEQ ID NO: 124369 - DNA, 80 bp, synthetic construct
  misc_feature 1..80: note = Artificially Synthesized Probe
  source 1..80: mol_type = other DNA
aagtcgatccgctcactggagttgtggtccgcgtttttctacgtcttttcccactccgttccctgcgaaccacatccgca

SEQ ID NO: 124370 - DNA, 80 bp, synthetic construct
  misc_feature 1..80: note = Artificially Synthesized Probe
  source 1..80: mol_type = other DNA
cagcccgacaagtagctgggactacaggcgtgtgccaccatgcacggctaattttttgtatttttagtagagatggggtt

SEQ ID NO: 124371 - DNA, 80 bp, synthetic construct; identical to SEQ ID NO: 40009
  misc_feature 1..80: note = Artificially Synthesized Probe
  source 1..80: mol_type = other DNA

SEQ ID NO: 124372 - DNA, 80 bp, synthetic construct
  misc_feature 1..80: note = Artificially Synthesized Probe
  source 1..80: mol_type = other DNA
aagccactgcaagctagtatacatgtagggaaagatagaaagcattgaagccagaagagagacagaggacatttgggcta

SEQ ID NO: 124373 - DNA, 80 bp, synthetic construct
  misc_feature 1..80: note = Artificially Synthesized Probe
  source 1..80: mol_type = other DNA
acggtggctcacacctgtaatcccagcactttgggaggccgaggcaggcggatcacctgaggtcgggagttagagactag

SEQ ID NO: 124374 - DNA, 80 bp, synthetic construct
  misc_feature 1..80: note = Artificially Synthesized Probe
  source 1..80: mol_type = other DNA
tccagcctgggcaataagagcaaaactccatctcaaaaaaaaaaaaataaggtataagcgggctcaggaacatcattgga

SEQ ID NO: 124375 - DNA, 80 bp, synthetic construct
  misc_feature 1..80: note = Artificially Synthesized Probe
  source 1..80: mol_type = other DNA
ggcatggtggcgcatgcctgtaatcccagctacttgggaggctgaggcaggagagttgcttgaactgagaaggcggaggt

SEQ ID NO: 124376 - DNA, 80 bp, synthetic construct
  misc_feature 1..80: note = Artificially Synthesized Probe
  source 1..80: mol_type = other DNA
gcaatctcggctcactgcaacctccgcctcctgggttcaagtgattctcctgcctcagcttcccgagtagctgtgattac

SEQ ID NO: 124377 - DNA, 80 bp, synthetic construct
  misc_feature 1..80: note = Artificially Synthesized Probe
  source 1..80: mol_type = other DNA
cagcctcccgagtagctgggactacaggtgcccgccaccacacccggctaatttttttgtgtttttagtagagatggggt

SEQ ID NO: 124378 - DNA, 80 bp, synthetic construct
  misc_feature 1..80: note = Artificially Synthesized Probe
  source 1..80: mol_type = other DNA
aaatccgacctcaggtgatccgcccgccttggcctccaaaagtgcaaggcattacaggcatgagccactgtgaccggcaa

SEQ ID NO: 124379 - DNA, 80 bp, synthetic construct; identical to SEQ ID NO: 40011
  misc_feature 1..80: note = Artificially Synthesized Probe
  source 1..80: mol_type = other DNA

SEQ ID NO: 124380 - DNA, 80 bp, synthetic construct
  misc_feature 1..80: note = Artificially Synthesized Probe
  source 1..80: mol_type = other DNA
ggatcggccgggcgctgtggctgacacctgtaatcccagcactttgggaggccgagttgggcagatcacaaggtcaggag

SEQ ID NO: 124381 - DNA, 80 bp, synthetic construct
  misc_feature 1..80: note = Artificially Synthesized Probe
  source 1..80: mol_type = other DNA
atgttggccaggctgttctcgaactcctgagctcaggtgatccaactgtctcggcctcccaaagtgctgggattacaggc

SEQ ID NO: 124382 - DNA, 80 bp, synthetic construct
  misc_feature 1..80: note = Artificially Synthesized Probe
  source 1..80: mol_type = other DNA
cactgcaagaaaaccttaactgcagcctaataattgttttctttgggataacttttaaagtacattaaaagactatcaac

SEQ ID NO: 124383 - DNA, 80 bp, synthetic construct
  misc_feature 1..80: note = Artificially Synthesized Probe
  source 1..80: mol_type = other DNA
tcaaaaagaaggaaggtgctcacattccttaaattaaggagtaagtctgccagcattatgaaagtgaatcttacttttgt

SEQ ID NO: 124384 - DNA, 80 bp, synthetic construct
  misc_feature 1..80: note = Artificially Synthesized Probe
  source 1..80: mol_type = other DNA
ttaactggttggttatgtggaagaaacatactttcacaataaagagctttaggatatgatgccattttatatcactagta

SEQ ID NO: 124385 - DNA, 80 bp, synthetic construct; identical to SEQ ID NO: 40012
  misc_feature 1..80: note = Artificially Synthesized Probe
  source 1..80: mol_type = other DNA

SEQ ID NO: 124386 - DNA, 80 bp, synthetic construct
  misc_feature 1..80: note = Artificially Synthesized Probe
  source 1..80: mol_type = other DNA
ggtgggggtgggaggccagcacggtggtgaggcagttgagaaaatttgaatgtggattagattttgaatgatattggata

SEQ ID NO: 124387 - DNA, 80 bp, synthetic construct
  misc_feature 1..80: note = Artificially Synthesized Probe
  source 1..80: mol_type = other DNA
ttaacaaaatgtatgtgaggcgtatgtggcaaaatgttacagaatctaactggtggacatggctgttcattgtactgttt

SEQ ID NO: 124388 - DNA, 80 bp, synthetic construct
  misc_feature 1..80: note = Artificially Synthesized Probe
  source 1..80: mol_type = other DNA
tattcccacttaatgtcacatttttcatgtctttacatattcttatttttgtttgtttttgagacagagtctcgctctgc

SEQ ID NO: 124389 - DNA, 80 bp, synthetic construct
  misc_feature 1..80: note = Artificially Synthesized Probe
  source 1..80: mol_type = other DNA
ccatgttggccaggctggtctcaaactcctgccctcaagtgattcgaccaccctggcctcccaaagtgctgggattacag

SEQ ID NO: 124390 - DNA, 80 bp, synthetic construct
  misc_feature 1..80: note = Artificially Synthesized Probe
  source 1..80: mol_type = other DNA
agtcaagcgtgagcttagagcatagactggtgggattgtcaaagaagagggcaactggaagagaactgtcagttattttt

SEQ ID NO: 124391 - DNA, 80 bp, synthetic construct
  misc_feature 1..80: note = Artificially Synthesized Probe
  source 1..80: mol_type = other DNA
cttaatatcgaataatgaagcagcttcccccttagatatagacagaaaacatcaaagccaccacactacctggctggatt

SEQ ID NO: 124392 - DNA, 80 bp, synthetic construct
  misc_feature 1..80: note = Artificially Synthesized Probe
  source 1..80: mol_type = other DNA
actccattgcactccagcctgggcaacaagagcaaaactttgtctttaaaaaaaaaaaaaaaaaaagaatacaaaaatta

SEQ ID NO: 124393 - DNA, 80 bp, synthetic construct
  misc_feature 1..80: note = Artificially Synthesized Probe
  source 1..80: mol_type = other DNA
gctgggcatggtggcaggtgcctgtagtctcagctactagggaggctgaggcaggaaaatcacttgaacccgggatgtgg

SEQ ID NO: 124394 - DNA, 80 bp, synthetic construct; identical to SEQ ID NO: 39988
  misc_feature 1..80: note = Artificially Synthesized Probe
  source 1..80: mol_type = other DNA

SEQ ID NO: 124395 - DNA, 80 bp, synthetic construct
  misc_feature 1..80: note = Artificially Synthesized Probe
  source 1..80: mol_type = other DNA
gtggaggcctaaggaaacttacagtcatggtggaaggtgaaggggaaacaagcacagtcttcacatggccagcaggagag

SEQ ID NO: 124396 - DNA, 80 bp, synthetic construct
  misc_feature 1..80: note = Artificially Synthesized Probe
  source 1..80: mol_type = other DNA
agcatgagatttgggtaggaacacagagctgcaccacatcagaggatgtacaagattgtggtggagaggagtttagagac

SEQ ID NO: 124397 - DNA, 80 bp, synthetic construct
  misc_feature 1..80: note = Artificially Synthesized Probe
  source 1..80: mol_type = other DNA
actcggtaggctgtaggtgactgcaataggaaacgataatagactgtgagtctggtgacaagattttccttctttctttt

SEQ ID NO: 124398 - DNA, 80 bp, synthetic construct
  misc_feature 1..80: note = Artificially Synthesized Probe
  source 1..80: mol_type = other DNA
ttttgtcaggattttcaaggctgggaattttgagaggggaatggaggagaataatctgaaagtgcaagtaaggagcaggg

SEQ ID NO: 124399 - DNA, 80 bp, synthetic construct
  misc_feature 1..80: note = Artificially Synthesized Probe
  source 1..80: mol_type = other DNA
gcccgccaccacgcccagctaattgtttttttgtatttttagtagagacggggtttcaccgtgttagccaggatggtctc

SEQ ID NO: 124400 - DNA, 80 bp, synthetic construct
  misc_feature 1..80: note = Artificially Synthesized Probe
  source 1..80: mol_type = other DNA
tgatatgaagtgtgtggaggagaaaagaggaaacatctatcatttgagatggctgcgaaaggaaaaggcatcctcaggga

SEQ ID NO: 124401 - DNA, 80 bp, synthetic construct
  misc_feature 1..80: note = Artificially Synthesized Probe
  source 1..80: mol_type = other DNA
gatgatctgaacttcagaacaagatgttattaacagagtgaaagtatttggattctgggtatattttgaaatcggaggca

SEQ ID NO: 124402 - DNA, 80 bp, synthetic construct
  misc_feature 1..80: note = Artificially Synthesized Probe
  source 1..80: mol_type = other DNA
tggcagggtgttgggaataatttgagaaatctgagctactggaaatgactgagaatcagatataaaggcagtcctggtgg

SEQ ID NO: 124403 - DNA, 80 bp, synthetic construct; identical to SEQ ID NO: 39990
  misc_feature 1..80: note = Artificially Synthesized Probe
  source 1..80: mol_type = other DNA

SEQ ID NO: 124404 - DNA, 80 bp, synthetic construct
  misc_feature 1..80: note = Artificially Synthesized Probe
  source 1..80: mol_type = other DNA
actgatctactttctgtcaccatagattagcctgcatttttaagaatttttataaacgtggaatgatagagtaccttttt

SEQ ID NO: 124405 - DNA, 80 bp, synthetic construct
  misc_feature 1..80: note = Artificially Synthesized Probe
  source 1..80: mol_type = other DNA
tttttccagtttgggactgttaacaagtagagccactatgaatattagtgtataagacttcatatagccaaggctggcag

SEQ ID NO: 124406 - DNA, 80 bp, synthetic construct
  misc_feature 1..80: note = Artificially Synthesized Probe
  source 1..80: mol_type = other DNA
ggtagatgtattttaagtctttaaggagctgtcaaactcttcctcaaagtggtggttgtaccatgttactttttaatata

SEQ ID NO: 124407 - DNA, 80 bp, synthetic construct
  misc_feature 1..80: note = Artificially Synthesized Probe
  source 1..80: mol_type = other DNA
tttaggcattataatagatatagtggcttcttgtgattttaattagcatttcctaatgaccagtgctgctgttgatcatt

SEQ ID NO: 124408 - DNA, 80 bp, synthetic construct; identical to SEQ ID NO: 39991
  misc_feature 1..80: note = Artificially Synthesized Probe
  source 1..80: mol_type = other DNA

SEQ ID NO: 124409 - DNA, 80 bp, synthetic construct
  misc_feature 1..80: note = Artificially Synthesized Probe
  source 1..80: mol_type = other DNA
cacccggccaacttacccatcttttaattgaatttttttgttgttgaggtttgagagttcttcatgtttgctgggtacaa

SEQ ID NO: 124410 - DNA, 80 bp, synthetic construct
  misc_feature 1..80: note = Artificially Synthesized Probe
  source 1..80: mol_type = other DNA
cagttttttctttgatggttttgagagaggaggtaaaaaaagactaggtaagccgatagttagacagagtcctcggtaga

SEQ ID NO: 124411 - DNA, 80 bp, synthetic construct; identical to SEQ ID NO: 39992
  misc_feature 1..80: note = Artificially Synthesized Probe
  source 1..80: mol_type = other DNA

SEQ ID NO: 124412 - DNA, 80 bp, synthetic construct
  misc_feature 1..80: note = Artificially Synthesized Probe
  source 1..80: mol_type = other DNA
cccttatttagcacatgcacaataggaaagagataagcaatgtggagtagctcaggccaaggacctgcctgcataataaa

SEQ ID NO: 124413 - DNA, 80 bp, synthetic construct; identical to SEQ ID NO: 39985
  misc_feature 1..80: note = Artificially Synthesized Probe
  source 1..80: mol_type = other DNA

SEQ ID NO: 124414 - DNA, 80 bp, synthetic construct
  misc_feature 1..80: note = Artificially Synthesized Probe
  source 1..80: mol_type = other DNA
gtgtagataagctacccccttcccattagctcatttataaaaatgcttgcatttcactgtggaatgggaactcttttcag

SEQ ID NO: 124415 - DNA, 80 bp, synthetic construct
  misc_feature 1..80: note = Artificially Synthesized Probe
  source 1..80: mol_type = other DNA
gtgccaccccaggcaacaaggccatttcagtttgttcttttgttataggcaatccatgatcacagatttttctctctttt

SEQ ID NO: 124416 - DNA, 80 bp, synthetic construct; identical to SEQ ID NO: 40022
  misc_feature 1..80: note = Artificially Synthesized Probe
  source 1..80: mol_type = other DNA

SEQ ID NO: 124417 - DNA, 80 bp, synthetic construct
  misc_feature 1..80: note = Artificially Synthesized Probe
  source 1..80: mol_type = other DNA
gaaaaactagttcaagccatgatgggaagggggagttggacatgtctcatcacaccctactaccttttggaattactgat

SEQ ID NO: 124418 - DNA, 80 bp, synthetic construct; identical to SEQ ID NO: 39993
  misc_feature 1..80: note = Artificially Synthesized Probe
  source 1..80: mol_type = other DNA

SEQ ID NO: 124419 - DNA, 80 bp, synthetic construct
  misc_feature 1..80: note = Artificially Synthesized Probe
  source 1..80: mol_type = other DNA
gattgaaacctgtcttagctacttctggtttacagtcttaaagttagataatgtaaattgtccagctttggtttattttt

SEQ ID NO: 124420 - DNA, 80 bp, synthetic construct
  misc_feature 1..80: note = Artificially Synthesized Probe
  source 1..80: mol_type = other DNA
ggagtgcagtggcgcgatcttggctcaccacaacctccacctcccaggttcaagcaattcttctgcctcagcctcccgag

SEQ ID NO: 124421 - DNA, 80 bp, synthetic construct
  misc_feature 1..80: note = Artificially Synthesized Probe
  source 1..80: mol_type = other DNA
catgcctggccagttctgttatttttaaaacccaagtttccctggtcatatcttggttggatgaagcgtattttcaatag

SEQ ID NO: 124422 - DNA, 80 bp, synthetic construct
  misc_feature 1..80: note = Artificially Synthesized Probe
  source 1..80: mol_type = other DNA
ttttgtaacttagtctttttgcttagaggctctctgaggatgggagggggttcttcctcccatccctaggaatttttctt

SEQ ID NO: 124423 - DNA, 80 bp, synthetic construct
  misc_feature 1..80: note = Artificially Synthesized Probe
  source 1..80: mol_type = other DNA
atggctttgctttggtgctccttagattttcagtcagatgtatttgtccttgggtaccttgtaatcagtattaccttttc

SEQ ID NO: 124424 - DNA, 80 bp, synthetic construct
  misc_feature 1..80: note = Artificially Synthesized Probe
  source 1..80: mol_type = other DNA
cttctattgatatcactggccttgattttgtgatttctttatttcttcaggaccacccttcattttctactgtttgcttc

SEQ ID NO: 124425 - DNA, 80 bp, synthetic construct
  misc_feature 1..80: note = Artificially Synthesized Probe
  source 1..80: mol_type = other DNA
gccgggcgcggtggctcaagcctgtaatcccagcactttgggaggccgaggcggccggatcacaaggtcaggagatcgag

SEQ ID NO: 124426 - DNA, 80 bp, synthetic construct
  misc_feature 1..80: note = Artificially Synthesized Probe
  source 1..80: mol_type = other DNA
tatttttaatagagacggggttttgccacattggcaggctggtctcaaactcctgatgtcaagtgatccacccaccccac

SEQ ID NO: 124427 - DNA, 80 bp, synthetic construct
  misc_feature 1..80: note = Artificially Synthesized Probe
  source 1..80: mol_type = other DNA
taagaagggacggggccccacgctgcgcacccgcgggtttgctatggcgatgagcagcggcggcagtggtggcggcgtcc

SEQ ID NO: 124428 - DNA, 80 bp, synthetic construct; identical to SEQ ID NO: 39995
  misc_feature 1..80: note = Artificially Synthesized Probe
  source 1..80: mol_type = other DNA

SEQ ID NO: 124429 - DNA, 80 bp, synthetic construct
  misc_feature 1..80: note = Artificially Synthesized Probe
  source 1..80: mol_type = other DNA
tgaaccaccacgcccagctaatttttgtactttttgtagagatggggttttgccatgttgcccaggctgggattattaag

SEQ ID NO: 124430 - DNA, 80 bp, synthetic construct
  misc_feature 1..80: note = Artificially Synthesized Probe
  source 1..80: mol_type = other DNA
gttcgagaccagttttgccaagatgatgaaagcccatgtctactaaaaatacaaaaattagcccagcttgatggtgggcg

SEQ ID NO: 124431 - DNA, 80 bp, synthetic construct
  misc_feature 1..80: note = Artificially Synthesized Probe
  source 1..80: mol_type = other DNA
gaaaatgacaaaaagtaatattacaactcagtgaattttataacaaacttttttggaattcattgactaatactatacca

SEQ ID NO: 124432 - DNA, 80 bp, synthetic construct
  misc_feature 1..80: note = Artificially Synthesized Probe
  source 1..80: mol_type = other DNA
aatattaagtatgttcatgttgttgcgcaatagatcttcggaagtttttcgtcttgcaacctgaaactctacccattagc

SEQ ID NO: 124433 - DNA, 80 bp, synthetic construct
  misc_feature 1..80: note = Artificially Synthesized Probe
  source 1..80: mol_type = other DNA
cctcccgagtagctgggattacagtcatgcaccaccacgcccggctaattttgtatttttagtagagaaggggtttctcc

SEQ ID NO: 124434 - DNA, 80 bp, synthetic construct
  misc_feature 1..80: note = Artificially Synthesized Probe
  source 1..80: mol_type = other DNA
agtgttatttttgcttccatgccttttttgttgttgttcatgctcttacttggaatgcgttctattttgtctacctatgc

SEQ ID NO: 124435 - DNA, 80 bp, synthetic construct
  misc_feature 1..80: note = Artificially Synthesized Probe
  source 1..80: mol_type = other DNA
cagcccctgcaggtagctgggactataggcatgtgccaccatgcccagctaaatttggtttttttgtttgtttgtttttg

SEQ ID NO: 124436 - DNA, 80 bp, synthetic construct; identical to SEQ ID NO: 39997
  misc_feature 1..80: note = Artificially Synthesized Probe
  source 1..80: mol_type = other DNA

SEQ ID NO: 124437 - DNA, 80 bp, synthetic construct
  misc_feature 1..80: note = Artificially Synthesized Probe
  source 1..80: mol_type = other DNA
caagactccgtctcaaataaataaataaataaataaataaataataaaaacatcggtaggcatatttcaaggaattctat

SEQ ID NO: 124438 - DNA, 80 bp, synthetic construct
  misc_feature 1..80: note = Artificially Synthesized Probe
  source 1..80: mol_type = other DNA
atgcccggcctaaatcctgttgttttgttttgttttattttgttttgttttgttttgtttgttttttgagacagagtctc

SEQ ID NO: 124439 - DNA, 80 bp, synthetic construct
  misc_feature 1..80: note = Artificially Synthesized Probe
  source 1..80: mol_type = other DNA
ggtttcaccatgttggccaggctggtctcgaactcctgacctcgtgatccacccacctcggccacccaaagtgctgggat

SEQ ID NO: 124440 - DNA, 80 bp, synthetic construct
  misc_feature 1..80: note = Artificially Synthesized Probe
  source 1..80: mol_type = other DNA
tagtcttaaatccctagttagataataactggagagtaccatgtttctatatatctctcagtgacttgcacagtgctagc

SEQ ID NO: 124441 - DNA, 80 bp, synthetic construct
  misc_feature 1..80: note = Artificially Synthesized Probe
  source 1..80: mol_type = other DNA
cttcccaagtagctgggattacaggcatgagccaccatgtctggacaaaaatatttccaggtgcagtggctcatgcctgt

SEQ ID NO: 124442 - DNA, 80 bp, synthetic construct; identical to SEQ ID NO: 39998
  misc_feature 1..80: note = Artificially Synthesized Probe
  source 1..80: mol_type = other DNA

SEQ ID NO: 124443 - DNA, 80 bp, synthetic construct
  misc_feature 1..80: note = Artificially Synthesized Probe
  source 1..80: mol_type = other DNA
ataatctggaaacattataatttcaaaagaaaaaatattctttggatcataggttctgaggtcagaacagcattcccgta

SEQ ID NO: 124444 - DNA, 80 bp, synthetic construct
  misc_feature 1..80: note = Artificially Synthesized Probe
  source 1..80: mol_type = other DNA
cattcttagaacatttacctatgtctagcttttggagtaaagtcacataacctctaaccaggtaagtttcctgtggcttt

SEQ ID NO: 124445 - DNA, 80 bp, synthetic construct
  misc_feature 1..80: note = Artificially Synthesized Probe
  source 1..80: mol_type = other DNA
taccctttccagagcgatgattctgacatttgggatgatacagcactgataaaagcatatgataaagctgtggcttcatt

SEQ ID NO: 124446 - DNA, 80 bp, synthetic construct; identical to SEQ ID NO: 39999
  misc_feature 1..80: note = Artificially Synthesized Probe
  source 1..80: mol_type = other DNA

SEQ ID NO: 124447 - DNA, 80 bp, synthetic construct
  misc_feature 1..80: note = Artificially Synthesized Probe
  source 1..80: mol_type = other DNA
cctggccaacatggtgaaaccccgtctttactaaaaatacaaaaattagccaagcatggtggcacgtgcctgtaatccca

SEQ ID NO: 124448 - DNA, 80 bp, synthetic construct
  misc_feature 1..80: note = Artificially Synthesized Probe
  source 1..80: mol_type = other DNA
atggaagtcctctaattgagattaataagaaaaagacaatctgaattataattttaaacatttaacaagcatgtagtaaa

SEQ ID NO: 124449 - DNA, 80 bp, synthetic construct
  misc_feature 1..80: note = Artificially Synthesized Probe
  source 1..80: mol_type = other DNA
aaatggagggtagagaaattgggcaataaatggagggggaagtgagttaagaggaattttaattatgtgtgtgtggtttt

SEQ ID NO: 124450 - DNA, 80 bp, synthetic construct
  misc_feature 1..80: note = Artificially Synthesized Probe
  source 1..80: mol_type = other DNA
tttaggaaatgtagtatggttctgtgtctcaaacaggacacttacacagttggccaacatcatcaccttctccattctct

SEQ ID NO: 124451 - DNA, 80 bp, synthetic construct; identical to SEQ ID NO: 40000
  misc_feature 1..80: note = Artificially Synthesized Probe
  source 1..80: mol_type = other DNA

SEQ ID NO: 124452 - DNA, 80 bp, synthetic construct
  misc_feature 1..80: note = Artificially Synthesized Probe
  source 1..80: mol_type = other DNA
cctcctacctcagcttcctgagtagttgggaccacaggtgtgtgccaccacacccagctcatttttgtattctttgtaga

SEQ ID NO: 124453 - DNA, 80 bp, synthetic construct
  misc_feature 1..80: note = Artificially Synthesized Probe
  source 1..80: mol_type = other DNA
actaaagaattaccaagagaattctataaaatagagattgaaatggggctcgatgtgggatgggttggtgatattgcagg

SEQ ID NO: 124454 - DNA, 80 bp, synthetic construct
  misc_feature 1..80: note = Artificially Synthesized Probe
  source 1..80: mol_type = other DNA
aattgatcattggaaatgttagattgagaaaagtcacagctggattaatagcttcagaagtgtgtttgcagacagttgca

SEQ ID NO: 124455 - DNA, 80 bp, synthetic construct
  misc_feature 1..80: note = Artificially Synthesized Probe
  source 1..80: mol_type = other DNA
agctgtgcacagtggtgcacgcctgtaatcccagctactcgggaggctgagacaggagaatcgcttgaacctgggaggtg

SEQ ID NO: 124456 - DNA, 80 bp, synthetic construct; identical to SEQ ID NO: 40001
  misc_feature 1..80: note = Artificially Synthesized Probe
  source 1..80: mol_type = other DNA

SEQ ID NO: 124457 - DNA, 80 bp, synthetic construct
  misc_feature 1..80: note = Artificially Synthesized Probe
  source 1..80: mol_type = other DNA
aataggtgctttctgaggtgacggagccttgagactagcttatagtagtaactgggttatgtcgtgacttttattctgtg

SEQ ID NO: 124458 - DNA, 80 bp, synthetic construct
  misc_feature 1..80: note = Artificially Synthesized Probe
  source 1..80: mol_type = other DNA
aataaaagccaaaagaagaatactgcagcttccttacaacaggttattttaaaatgttgagatttaacttcaaaggatgt

SEQ ID NO: 124459 - DNA, 80 bp, synthetic construct
  misc_feature 1..80: note = Artificially Synthesized Probe
  source 1..80: mol_type = other DNA
aatgataaatgctaaaatcaggacatgtgttccatttgtgaatggaaggcagggagaaggtgccgtttggaaggagtacc

SEQ ID NO: 124460 - DNA, 80 bp, synthetic construct
  misc_feature 1..80: note = Artificially Synthesized Probe
  source 1..80: mol_type = other DNA
aacatgtttcagcatgtttgtgggttgataggaaagatgagaatgggaaagttgatgtcggaaagaagacaatggctaga

SEQ ID NO: 124461 - DNA, 80 bp, synthetic construct; identical to SEQ ID NO: 40002
  misc_feature 1..80: note = Artificially Synthesized Probe
  source 1..80: mol_type = other DNA

SEQ ID NO: 124462 - DNA, 80 bp, synthetic construct
  misc_feature 1..80: note = Artificially Synthesized Probe
  source 1..80: mol_type = other DNA
gagttggaattcagatttatgtatttagaccccaagcctttctcattacatcattttgccttccaaatctctaccctcta

SEQ ID NO: 124463 - DNA, 80 bp, synthetic construct
  misc_feature 1..80: note = Artificially Synthesized Probe
  source 1..80: mol_type = other DNA
ttggtcagaagacggttgcatttacccagctaccattgcttcaattgattttaagagagaaacctgtgttgtggtttaca

SEQ ID NO: 124464 - DNA, 80 bp, synthetic construct
  misc_feature 1..80: note = Artificially Synthesized Probe
  source 1..80: mol_type = other DNA
atacacagttgtcagtttgatccaccgaggcattaattttttcttaatcacacccttataacaaaaacctgcatattttt

SEQ ID NO: 124465 - DNA, 80 bp, synthetic construct
  misc_feature 1..80: note = Artificially Synthesized Probe
  source 1..80: mol_type = other DNA
aaaggtaaaccttctatgaaagttttccagaaaatagttaatgtcgggacatttaacctctctgttaactaatttgtagc

SEQ ID NO: 124466 - DNA, 80 bp, synthetic construct; identical to SEQ ID NO: 40003
  misc_feature 1..80: note = Artificially Synthesized Probe
  source 1..80: mol_type = other DNA

SEQ ID NO: 124467 - DNA, 80 bp, synthetic construct
  misc_feature 1..80: note = Artificially Synthesized Probe
  source 1..80: mol_type = other DNA
gaggcaggaggatggtgtgaaccccggaggcagagcttgcagtgagtcaagatcgtgccactgcactccaacctgggcga

SEQ ID NO: 124468 - DNA, 80 bp, synthetic construct
  misc_feature 1..80: note = Artificially Synthesized Probe
  source 1..80: mol_type = other DNA
tgaggcgctctcagattgttttgtagagttcaaatgtaaatattgttttcatttatggtccttttggttataagtaacag

SEQ ID NO: 124469 - DNA, 80 bp, synthetic construct
  misc_feature 1..80: note = Artificially Synthesized Probe
  source 1..80: mol_type = other DNA
tcgctcaggctggagtgcagtggcaccatttcagctcactgcaacttccacctcctgggttcaagtgattctcctgcttc

SEQ ID NO: 124470 - DNA, 80 bp, synthetic construct
  misc_feature 1..80: note = Artificially Synthesized Probe
  source 1..80: mol_type = other DNA
gcgcctagcctaggcagtcattttcaaaaaacaagcatgactcaccaaaagttttaagattttctgtgataatgttctta

SEQ ID NO: 124471 - DNA, 80 bp, synthetic construct; identical to SEQ ID NO: 40004
  misc_feature 1..80: note = Artificially Synthesized Probe
  source 1..80: mol_type = other DNA

SEQ ID NO: 124472 - DNA, 80 bp, synthetic construct
  misc_feature 1..80: note = Artificially Synthesized Probe
  source 1..80: mol_type = other DNA
ttagtgaaagaagcaaggttatcagctagaagctgggatgggagaggaaagagaagatgggaagtagatagttctttaga

SEQ ID NO: 124473 - DNA, 80 bp, synthetic construct
  misc_feature 1..80: note = Artificially Synthesized Probe
  source 1..80: mol_type = other DNA
tccagaggttgtcatttgacttatgagtctgtttgacttcaggatttggtacatgaaatttcacttaatctttttgatat

SEQ ID NO: 124474 - DNA, 80 bp, synthetic construct
  misc_feature 1..80: note = Artificially Synthesized Probe
  source 1..80: mol_type = other DNA
ccccacttactatcatgctggctgcctccatttccttctggaccaccagtaagtaaaaaagagtataggttagattttgc

SEQ ID NO: 124475 - DNA, 80 bp, synthetic construct
  misc_feature 1..80: note = Artificially Synthesized Probe
  source 1..80: mol_type = other DNA
gttggtgtctatgccataaggaggtagttcctgttagaagggatttaattataccttatataaggaattagtgtttgccc

SEQ ID NO: 124476 - DNA, 80 bp, synthetic construct
  misc_feature 1..80: note = Artificially Synthesized Probe
  source 1..80: mol_type = other DNA
tcaagcaattctgcctcggcctcccaagtagctgggattacaggcgactgccaccacacccggctaatttttgttttatt

SEQ ID NO: 124477 - DNA, 80 bp, synthetic construct
  misc_feature 1..80: note = Artificially Synthesized Probe
  source 1..80: mol_type = other DNA
atagataaaaagatactttttggcatactgtgtattgggatggggttagaacaggtgttctacccaagacatttacttaa

SEQ ID NO: 124478 - DNA, 80 bp, synthetic construct
  misc_feature 1..80: note = Artificially Synthesized Probe
  source 1..80: mol_type = other DNA
cacttgctgtcttttcgtcctcgttaaatttaattttgttggtcttttgttgttattggttggttttctccaaatgctag

SEQ ID NO: 124479 - DNA, 80 bp, synthetic construct
  misc_feature 1..80: note = Artificially Synthesized Probe
  source 1..80: mol_type = other DNA
caagacctcgtctttgtttaggggaaaaaaaagaaatttaagtaggagattatataagcaaaaatacaattaatttccag

SEQ ID NO: 124480 - DNA, 80 bp, synthetic construct
  misc_feature 1..80: note = Artificially Synthesized Probe
  source 1..80: mol_type = other DNA
gatgctgatgctttgggaagtatgttaatttcatggtacatgagtggctatcatactggctattatatggtaagtaatca

SEQ ID NO: 124481 - DNA, 80 bp, synthetic construct
  misc_feature 1..80: note = Artificially Synthesized Probe
  source 1..80: mol_type = other DNA
ctgaggcttaaattactcttgcattgtccctaagtataattttagttaattttaaaaagctttcatgctattgttagatt

SEQ ID NO: 124482 - DNA, 80 bp, synthetic construct
  misc_feature 1..80: note = Artificially Synthesized Probe
  source 1..80: mol_type = other DNA
tgctctgttgcccaggctggagtgcaatggcgtgatcttggctcacagcaagctctgcctcctggattcacgccattctc

SEQ ID NO: 124483 - DNA, 80 bp, synthetic construct
  misc_feature 1..80: note = Artificially Synthesized Probe
  source 1..80: mol_type = other DNA
tgtgattttaccacgtggatatgaagaagtgagggggagaagtacaaaggagttctcttaatgattgaccatggaattta

SEQ ID NO: 124484 - DNA, 80 bp, synthetic construct
  misc_feature 1..80: note = Artificially Synthesized Probe
  source 1..80: mol_type = other DNA
aaatttttttaatgcacaaagatctggggtaatgtgtaccacattgaaccttggggagtatggcttcaaacttgtcactt

SEQ ID NO: 124485 - DNA, 80 bp, synthetic construct
  misc_feature 1..80: note = Artificially Synthesized Probe
  source 1..80: mol_type = other DNA
ggagtacagtggcgcagtctcggctcactgcaagctccgcctcccgggttcacgccattctcctgcctcagcctctccga

SEQ ID NO: 124486 - DNA, 80 bp, synthetic construct; identical to SEQ ID NO: 40007
  misc_feature 1..80: note = Artificially Synthesized Probe
  source 1..80: mol_type = other DNA

SEQ ID NO: 124487 - DNA, 80 bp, synthetic construct
  misc_feature 1..80: note = Artificially Synthesized Probe
  source 1..80: mol_type = other DNA
ggtcaggagtttgagaccagcctggccaacatgatgaaaccttgtctctactaaaaataccaaaaaaaatttagccaggc

SEQ ID NO: 124488 - DNA, 80 bp, synthetic construct
  misc_feature 1..80: note = Artificially Synthesized Probe
  source 1..80: mol_type = other DNA
acggtggctcacacctataatcccagtactttgggaggtagaggcaggtggatcacttgaggttaggagttcaggaccag

SEQ ID NO: 124489 - DNA, 80 bp, synthetic construct
  misc_feature 1..80: note = Artificially Synthesized Probe
  source 1..80: mol_type = other DNA
agcctggccaacagagtgagaatttgcggagggaaaaaaaagtcacgcttcagttgttgtagtataaccttggtatattg

SEQ ID NO: 124490 - DNA, 80 bp, synthetic construct
  misc_feature 1..80: note = Artificially Synthesized Probe
  source 1..80: mol_type = other DNA
gtataatttatgttctaaataactttcttgagaaataattcacatggtgtgcagtttacctttgaaagtatacaagttgg

SEQ ID NO: 124491 - DNA, 80 bp, synthetic construct
  misc_feature 1..80: note = Artificially Synthesized Probe
  source 1..80: mol_type = other DNA
gtacaaaaacaaattagccgggcatgttggcgggcaccttttgtcccagctgctcgggaggctgaggcaggagagtggcg

SEQ ID NO: 124492 - DNA, 80 bp, synthetic construct
  misc_feature 1..80: note = Artificially Synthesized Probe
  source 1..80: mol_type = other DNA
acattttcatcaccccaaaaagaaaccctgttaccttcattttccccagccctaggcagtcagtacactttctgtctcta

SEQ ID NO: 124493 - DNA, 80 bp, synthetic construct
  misc_feature 1..80: note = Artificially Synthesized Probe
  source 1..80: mol_type = other DNA
ggttatatcacattttatccattcatcagttcatggacatttaggttgtttttatttttgggctataatgaataatgttg

SEQ ID NO: 124494 - DNA, 80 bp, synthetic construct
  misc_feature 1..80: note = Artificially Synthesized Probe
  source 1..80: mol_type = other DNA
tagccgggaatggtggcaggtgcctgtaatcccagctactcaagaggctgtggcaggagtatcccttggacccaggaggt

SEQ ID NO: 124495 - DNA, 80 bp, synthetic construct
  misc_feature 1..80: note = Artificially Synthesized Probe
  source 1..80: mol_type = other DNA
gtccgcgtttttctacgtcttttcccactccgttccctgcgaaccacatccgcaagctccttcctcgagcagtttgggct

SEQ ID NO: 124496 - DNA, 80 bp, synthetic construct
  misc_feature 1..80: note = Artificially Synthesized Probe
  source 1..80: mol_type = other DNA
cctgcctcagcccgacaagtagctgggactacaggcgtgtgccaccatgcacggctaattttttgtatttttagtagaga

SEQ ID NO: 124497 - DNA, 80 bp, synthetic construct
  misc_feature 1..80: note = Artificially Synthesized Probe
  source 1..80: mol_type = other DNA
gttctactgaagccacgtggttgagataggctctgagtctagcttttaacctctatctttttgtcttagaaatctaagca

SEQ ID NO: 124498 - DNA, 80 bp, synthetic construct
  misc_feature 1..80: note = Artificially Synthesized Probe
  source 1..80: mol_type = other DNA
gatagaaagcattgaagccagaagagagacagaggacatttgggctagatctgacaagaaaaacaaatgttttagtatta

SEQ ID NO: 124499 - DNA, 80 bp, synthetic construct
  misc_feature 1..80: note = Artificially Synthesized Probe
  source 1..80: mol_type = other DNA
ggaggccgaggcaggcggatcacctgaggtcgggagttagagactagcctcaacatggagaaaccccgtctctactaaaa

SEQ ID NO: 124500 - DNA, 80 bp, synthetic construct
  misc_feature 1..80: note = Artificially Synthesized Probe
  source 1..80: mol_type = other DNA
caaaaaaaaaaaaataaggtataagcgggctcaggaacatcattggacatactgaaagaagaaaaatcagctgggcgcag

SEQ ID NO: 124501 - DNA, 80 bp, synthetic construct
  misc_feature 1..80: note = Artificially Synthesized Probe
  source 1..80: mol_type = other DNA
ttgggaggctgaggcaggagaattgcttgaaccgagaaggcggaggttgcggtgagccaagattgcaccattgcactcca

SEQ ID NO: 124502 - DNA, 80 bp, synthetic construct; identical to SEQ ID NO: 40010
  misc_feature 1..80: note = Artificially Synthesized Probe
  source 1..80: mol_type = other DNA

SEQ ID NO: 124503 - DNA, 80 bp, synthetic construct
  misc_feature 1..80: note = Artificially Synthesized Probe
  source 1..80: mol_type = other DNA
gccaccacacccggctaatttttttgtgtttttagtagagatggggtttcactgtgttagccaggatggtctcgatctcc

SEQ ID NO: 124504 - DNA, 80 bp, synthetic construct
  misc_feature 1..80: note = Artificially Synthesized Probe
  source 1..80: mol_type = other DNA
ctccaaaagtgcaaggcaaggcattacaggcatgagccactgtgaccggcaatgtttttaaattttttacatttaaattt

SEQ ID NO: 124505 - DNA, 80 bp, synthetic construct
  misc_feature 1..80: note = Artificially Synthesized Probe
  source 1..80: mol_type = other DNA
ttttatttttatttatttatttttttttgagacagagtcttgctctgtcacccaggctggagtgcagtggtgtaaatctc

SEQ ID NO: 124506 - DNA, 80 bp, synthetic construct
  misc_feature 1..80: note = Artificially Synthesized Probe
  source 1..80: mol_type = other DNA
cggggttttgccatgttggccaggctgttctcgaactcctgagctcaggtgatccaactgtctcggcctcccaaagtgct

SEQ ID NO: 124507 - DNA, 80 bp, synthetic construct
  misc_feature 1..80: note = Artificially Synthesized Probe
  source 1..80: mol_type = other DNA
ctgtaatcccagcactttgggaggccgagttgggcagatcacaaggtcaggagttcgagaccagcctggccaatatggtg

SEQ ID NO: 124508 - DNA, 80 bp, synthetic construct
  misc_feature 1..80: note = Artificially Synthesized Probe
  source 1..80: mol_type = other DNA
gtaggcatgagccactgcaagaaaaccttaactgcagcctaataattgttttctttgggataacttttaaagtacattaa

SEQ ID NO: 124509 - DNA, 80 bp, synthetic construct
  misc_feature 1..80: note = Artificially Synthesized Probe
  source 1..80: mol_type = other DNA
ttttagacaaaatcaaaaagaaggaaggtgctcacattccttaaattaaggagtaagtctgccagcattatgaaagtgaa

SEQ ID NO: 124510 - DNA, 80 bp, synthetic construct
  misc_feature 1..80: note = Artificially Synthesized Probe
  source 1..80: mol_type = other DNA
gaattctcatacttaactggttggttgtgtggaagaaacatactttcacaataaagagctttaggatatgatgccatttt

SEQ ID NO: 124511 - DNA, 80 bp, synthetic construct
  misc_feature 1..80: note = Artificially Synthesized Probe
  source 1..80: mol_type = other DNA
aatttctcatttgcaggaaatgctggcatagagcagcactaaatgacaccactaaagaaacgatcagacagatctggaat

SEQ ID NO: 124512 - DNA, 80 bp, synthetic construct
  misc_feature 1..80: note = Artificially Synthesized Probe
  source 1..80: mol_type = other DNA
tgtgaaatattttactggactctattttgaaaaaccatctgtaaaagactgaggtgggggtgggaggccagcacggtggt

SEQ ID NO: 124513 - DNA, 80 bp, synthetic construct
  misc_feature 1..80: note = Artificially Synthesized Probe
  source 1..80: mol_type = other DNA
gtttcaaatggtttaacaaaatgtatgtgaggcgtatgtggcaaaatgttacagaatctaactggtggacatggctgttc

SEQ ID NO: 124514 - DNA, 80 bp, synthetic construct
  misc_feature 1..80: note = Artificially Synthesized Probe
  source 1..80: mol_type = other DNA
ggcccatattttgatatggatgccaccatagcattttgtgtatgtgcatgtgtattcccacttaatgtcacatttttcat

SEQ ID NO: 124515 - DNA, 80 bp, synthetic construct
  misc_feature 1..80: note = Artificially Synthesized Probe
  source 1..80: mol_type = other DNA
tgtggcaccatgccccactaagttttgtatttttagtagagatggagtttcaccatgttggccaggctggtctcaaactc

SEQ ID NO: 124516 - DNA, 80 bp, synthetic construct
  misc_feature 1..80: note = Artificially Synthesized Probe
  source 1..80: mol_type = other DNA
aggtagtacatcttattcttcatggtgtctacaatatctggcagtttttggaagtcaagcgtgagcttagagcatagact

SEQ ID NO: 124517 - DNA, 80 bp, synthetic construct; identical to SEQ ID NO: 40013
  misc_feature 1..80: note = Artificially Synthesized Probe
  source 1..80: mol_type = other DNA

SEQ ID NO: 124518 - DNA, 80 bp, synthetic construct
  misc_feature 1..80: note = Artificially Synthesized Probe
  source 1..80: mol_type = other DNA
ggccctatttatcttaatatcgaataatgaagcagcttcccccttagatatagacagaaaacatcaaagccaccacacta

SEQ ID NO: 124519 - DNA, 80 bp, synthetic construct
  misc_feature 1..80: note = Artificially Synthesized Probe
  source 1..80: mol_type = other DNA
aagagcaaaactttgtctttaaaaaaaaaaaaaaaaaaagaatacaaaaattagccgggcgtggtggcgcgtgcctataa

SEQ ID NO: 124520 - DNA, 80 bp, synthetic construct
  misc_feature 1..80: note = Artificially Synthesized Probe
  source 1..80: mol_type = other DNA
tctcagctactagggaggctgaggcaggaaaatcacttgaacccgggatgtggagtttgcagtgacccgagatcgtgcca

SEQ ID NO: 124521 - DNA, 80 bp, synthetic construct
  misc_feature 1..80: note = Artificially Synthesized Probe
  source 1..80: mol_type = other DNA
gagagtgggattcttgaaactgcatttatggagaggttgtggttattggttataataaataaatacagttgaagtgagtg

SEQ ID NO: 124522 - DNA, 80 bp, synthetic construct
  misc_feature 1..80: note = Artificially Synthesized Probe
  source 1..80: mol_type = other DNA
gaaggtgaaggggaaacaagcacagtcttcacatggccagcaggagagagagagaagggggaagtgctacatactttaaa

SEQ ID NO: 124523 - DNA, 80 bp, synthetic construct
  misc_feature 1..80: note = Artificially Synthesized Probe
  source 1..80: mol_type = other DNA
accacatcagaggatgtacaagattgtggtggagaggagtttagagacctgcaaatatagggtaattgaagggatcatct

SEQ ID NO: 124524 - DNA, 80 bp, synthetic construct
  misc_feature 1..80: note = Artificially Synthesized Probe
  source 1..80: mol_type = other DNA
acgataatagactgtgagtctggtgacaagattttccttctttctttttttccccccccccgagacagggcctctttttg

SEQ ID NO: 124525 - DNA, 80 bp, synthetic construct; identical to SEQ ID NO: 39989
  misc_feature 1..80: note = Artificially Synthesized Probe
  source 1..80: mol_type = other DNA

SEQ ID NO: 124526 - DNA, 80 bp, synthetic construct
  misc_feature 1..80: note = Artificially Synthesized Probe
  source 1..80: mol_type = other DNA
ctacaggcgcccgccaccacgcccagctaattgtttttttgtatttttagtagagacggggtttcaccgtgttagccagg

SEQ ID NO: 124527 - DNA, 80 bp, synthetic construct; identical to SEQ ID NO: 40019
  misc_feature 1..80: note = Artificially Synthesized Probe
  source 1..80: mol_type = other DNA

SEQ ID NO: 124528 - DNA, 80 bp, synthetic construct
  misc_feature 1..80: note = Artificially Synthesized Probe
  source 1..80: mol_type = other DNA
ttattaacagagtgaaagtatttggattctgggtatattttgaaatcggaggcaacaggtttttcagatagattcgataa

SEQ ID NO: 124529 - DNA, 80 bp, synthetic construct
  misc_feature 1..80: note = Artificially Synthesized Probe
  source 1..80: mol_type = other DNA
gtagaagatggcagggtgttgggaataatttgagaaatctgagctactggaaatgactgagaatcagatataaaggcagt

SEQ ID NO: 124530 - DNA, 80 bp, synthetic construct
  misc_feature 1..80: note = Artificially Synthesized Probe
  source 1..80: mol_type = other DNA
acctacatagttgctagagctacagtagctggggactgagcagctagggattggcaggctatctctttttttcatgtagt

SEQ ID NO: 124531 - DNA, 80 bp, synthetic construct
  misc_feature 1..80: note = Artificially Synthesized Probe
  source 1..80: mol_type = other DNA
agacaaccactgatctactttctgtcaccatagattagcctgcatttttaagaatttttataaacgtggaatgatagagt

SEQ ID NO: 124532 - DNA, 80 bp, synthetic construct
  misc_feature 1..80: note = Artificially Synthesized Probe
  source 1..80: mol_type = other DNA
atttgggctttttccagtttgggactgttaacaagtagagccactatgaatattagtgtataagacttcatatagccaag

SEQ ID NO: 124533 - DNA, 80 bp, synthetic construct; identical to SEQ ID NO: 40020
  misc_feature 1..80: note = Artificially Synthesized Probe
  source 1..80: mol_type = other DNA

SEQ ID NO: 124534 - DNA, 80 bp, synthetic construct
  misc_feature 1..80: note = Artificially Synthesized Probe
  source 1..80: mol_type = other DNA
tttttaattttaggcattataatagatatagtggcttcttgtgattttaattagcatttcctaatgaccagtgctgctgt

SEQ ID NO: 124535 - DNA, 80 bp, synthetic construct
  misc_feature 1..80: note = Artificially Synthesized Probe
  source 1..80: mol_type = other DNA
cagcctccacctcctgcgctcagtcttcttgtctcagccttctgagtagctgaaattacgagcacacgccacaatgcctg

SEQ ID NO: 124536 - DNA, 80 bp, synthetic construct
  misc_feature 1..80: note = Artificially Synthesized Probe
  source 1..80: mol_type = other DNA
tttttttgttgttgaggtttgagagttcttcatgtttgctgggtacaatatctttatcagataggtaacttgcatgtatt

SEQ ID NO: 124537 - DNA, 80 bp, synthetic construct
  misc_feature 1..80: note = Artificially Synthesized Probe
  source 1..80: mol_type = other DNA
tcggtagaacttcccttctaacaaaaagcagcccaagaaatcacttctcttctaacaaggagcagcctggaagatcgggc

SEQ ID NO: 124538 - DNA, 80 bp, synthetic construct
  misc_feature 1..80: note = Artificially Synthesized Probe
  source 1..80: mol_type = other DNA
atgttgtgagttgttggggttgcctgcagctgcacggagagaaaggggtacctggggccaggcatgtccaccatggtggc

SEQ ID NO: 124539 - DNA, 80 bp, synthetic construct
  misc_feature 1..80: note = Artificially Synthesized Probe
  source 1..80: mol_type = other DNA
ctccctatgtgtagataagctacccccttcccattagctcatttataaaaatgcttgcatttcactgtggaatgggaact

SEQ ID NO: 124540 - DNA, 80 bp, synthetic construct
  misc_feature 1..80: note = Artificially Synthesized Probe
  source 1..80: mol_type = other DNA
ccaaggcaacatttgaccagcctgggcaacatagtgtgactccgagtctgcaaaaattagacgggtgttgtggtgcgcgt

SEQ ID NO: 124541 - DNA, 80 bp, synthetic construct
  misc_feature 1..80: note = Artificially Synthesized Probe
  source 1..80: mol_type = other DNA
aacctcgggtgccaccccaggcaacaaggccatttcagtttgttcttttgttataggcaatccatgatcacagatttttc

SEQ ID NO: 124542 - DNA, 80 bp, synthetic construct
  misc_feature 1..80: note = Artificially Synthesized Probe
  source 1..80: mol_type = other DNA
tgctttctctattaaaccacatttgtaactttagttaaaatcagtcacatatatcacagggctatttctgactctcaatt

SEQ ID NO: 124543 - DNA, 80 bp, synthetic construct
  misc_feature 1..80: note = Artificially Synthesized Probe
  source 1..80: mol_type = other DNA
attaacctgaaaaactagttcaagccatgatgggaagggggagttggacatgtctcatcacaccctactaccttttggaa

SEQ ID NO: 124544 - DNA, 80 bp, synthetic construct
  misc_feature 1..80: note = Artificially Synthesized Probe
  source 1..80: mol_type = other DNA
actagttgccaattagaaaatctttaaatcttcctatgacctagaaacctccctacccccactttgagttgtcctgcctt

SEQ ID NO: 124545 - DNA, 80 bp, synthetic construct
  misc_feature 1..80: note = Artificially Synthesized Probe
  source 1..80: mol_type = other DNA
tctaaattgattgaaacctgtcttagctacttctggtttacagtcttaaagttagataatgtaaattgtccagctttggt

SEQ ID NO: 124546 - DNA, 80 bp, synthetic construct
  misc_feature 1..80: note = Artificially Synthesized Probe
  source 1..80: mol_type = other DNA
cccaggctggagtgcagtggcgcgatcttggctcaccacaacctccacctcccaggttcaagcaattcttctgcctcagc

SEQ ID NO: 124547 - DNA, 80 bp, synthetic construct; identical to SEQ ID NO: 40023
  misc_feature 1..80: note = Artificially Synthesized Probe
  source 1..80: mol_type = other DNA

SEQ ID NO: 124548 - DNA, 80 bp, synthetic construct; identical to SEQ ID NO: 39994
  misc_feature 1..80: note = Artificially Synthesized Probe
  source 1..80: mol_type = other DNA

SEQ ID NO: 124549 - DNA, 80 bp, synthetic construct
  misc_feature 1..80: note = Artificially Synthesized Probe
  source 1..80: mol_type = other DNA
tctttttcatggctttgctttggtgctccttagattttcagtcagatgtatttgtccttgggtaccttgtaatcagtatt

SEQ ID NO: 124550 - DNA, 80 bp, synthetic construct
  misc_feature 1..80: note = Artificially Synthesized Probe
  source 1..80: mol_type = other DNA
actgcactcttctattgatatcactggccttgattttgtgatttctttatttcttcaggaccacccttcattttctactg

SEQ ID NO: 124551 - DNA, 80 bp, synthetic construct
  misc_feature 1..80: note = Artificially Synthesized Probe
  source 1..80: mol_type = other DNA
atcccagcactttgggaggccgaggcggccggatcacaaggtcaggagatcgagaccatcctggctaacacggtgaaacc

SEQ ID NO: 124552 - DNA, 80 bp, synthetic construct; identical to SEQ ID NO: 40024
  misc_feature 1..80: note = Artificially Synthesized Probe
  source 1..80: mol_type = other DNA

SEQ ID NO: 124553 - DNA, 80 bp, synthetic construct
  misc_feature 1..80: note = Artificially Synthesized Probe
  source 1..80: mol_type = other DNA
tttgacaggagcgagggcggacgcaaagaacgcggaggacctctgggtgcctgcaggggagctgctccagccgggccgcc

SEQ ID NO: 124554 - DNA, 80 bp, synthetic construct; identical to SEQ ID NO: 40153
  misc_feature 1..80: note = Artificially Synthesized Probe
  source 1..80: mol_type = other DNA

SEQ ID NO: 124555 - DNA, 80 bp, synthetic construct
  misc_feature 1..80: note = Artificially Synthesized Probe
  source 1..80: mol_type = other DNA
tttctgcaagtacagccggcaatcttgcttgttataaacacttggaagttcagcaaatccttatctccagaaaaatgcaa

SEQ ID NO: 124556 - DNA, 80 bp, synthetic construct
  misc_feature 1..80: note = Artificially Synthesized Probe
  source 1..80: mol_type = other DNA
cggggtcttggaaatcatcagtaaaatgctaaattgaactcccgagtacatgtaactggaaatgttactctaaaagctta

SEQ ID NO: 124557 - DNA, 80 bp, synthetic construct
  misc_feature 1..80: note = Artificially Synthesized Probe
  source 1..80: mol_type = other DNA
ttaaaaggtgaagtcaatgcactatcaggatctcctccaatttctgtcttgtaaaatatttgagtcatgaatcacggagc

SEQ ID NO: 124558 - DNA, 80 bp, synthetic construct
  misc_feature 1..80: note = Artificially Synthesized Probe
  source 1..80: mol_type = other DNA
ctgagtgtagagaatgtttaaatgttggattctgacctcaggcgaaattttgaatttgcagtctgtactgttctgtctgt

SEQ ID NO: 124559 - DNA, 80 bp, synthetic construct
  misc_feature 1..80: note = Artificially Synthesized Probe
  source 1..80: mol_type = other DNA
tttttgcctctttcgggaacacatgataaaaataaactgatgactgagaagcttaagctctttaagaaatgtggatttgt

SEQ ID NO: 124560 - DNA, 80 bp, synthetic construct; identical to SEQ ID NO: 40154
  misc_feature 1..80: note = Artificially Synthesized Probe
  source 1..80: mol_type = other DNA

SEQ ID NO: 124561 - DNA, 80 bp, synthetic construct
  misc_feature 1..80: note = Artificially Synthesized Probe
  source 1..80: mol_type = other DNA
cactaaattcccaaacgcatattatttagttatttttagatatgcagcctgcagggaaaccgctgagaacattcccgtgt

SEQ ID NO: 124562 - DNA, 80 bp, synthetic construct
  misc_feature 1..80: note = Artificially Synthesized Probe
  source 1..80: mol_type = other DNA
agaggatggatggcgccttgaagttactccgttttctctgccatccaatgaattgcttgtaaatttcctgccacattact

SEQ ID NO: 124563 - DNA, 80 bp, synthetic construct; identical to SEQ ID NO: 40155
  misc_feature 1..80: note = Artificially Synthesized Probe
  source 1..80: mol_type = other DNA

SEQ ID NO: 124564 - DNA, 80 bp, synthetic construct
  misc_feature 1..80: note = Artificially Synthesized Probe
  source 1..80: mol_type = other DNA
tttcaatactctaccaaaaggtagttcctcgccattctcctctataaatcagaatcaagctgaaatcagggtttttagtt

SEQ ID NO: 124565 - DNA, 80 bp, synthetic construct
  misc_feature 1..80: note = Artificially Synthesized Probe
  source 1..80: mol_type = other DNA
ctaatatattgggttttaaggtcttatatacatgtgcaaccccttagcgccagaagcagaaactaatcttttgtttctga

SEQ ID NO: 124566 - DNA, 80 bp, synthetic construct
  misc_feature 1..80: note = Artificially Synthesized Probe
  source 1..80: mol_type = other DNA
tcatttcactccttattttcctcttttaggttccgtaaatgaaaagttaccccaacgcgaaggcacaggaaaaacaggta

SEQ ID NO: 124567 - DNA, 80 bp, synthetic construct
  misc_feature 1..80: note = Artificially Synthesized Probe
  source 1..80: mol_type = other DNA
catccactagtgatgatgatgagagccgaaccagtttgttacttctgcattcattcagcaatgccattcactcacgatca

SEQ ID NO: 124568 - DNA, 80 bp, synthetic construct; identical to SEQ ID NO: 40055
  misc_feature 1..80: note = Artificially Synthesized Probe
  source 1..80: mol_type = other DNA

SEQ ID NO: 124569 - DNA, 80 bp, synthetic construct; identical to SEQ ID NO: 40156
  misc_feature 1..80: note = Artificially Synthesized Probe
  source 1..80: mol_type = other DNA

SEQ ID NO: 124570 - DNA, 80 bp, synthetic construct
  misc_feature 1..80: note = Artificially Synthesized Probe
  source 1..80: mol_type = other DNA
ctctgcccttgcctcggccaacacccttcagtaccaggacacatttctgcttttctcttacatcagcctttaaagtcaga

SEQ ID NO: 124571 - DNA, 80 bp, synthetic construct
  misc_feature 1..80: note = Artificially Synthesized Probe
  source 1..80: mol_type = other DNA
cagcctggccaaaatggtgaaacgccatctctactaaaaagacaaaaattaaccaggcatggtggtgcatgcctgtaatc

SEQ ID NO: 124572 - DNA, 80 bp, synthetic construct
  misc_feature 1..80: note = Artificially Synthesized Probe
  source 1..80: mol_type = other DNA
tcaaccaatcccttctgcatgtgtggaaactgtggtggggcccatccctgccctggaagatcctttgcaaaaagagttct

SEQ ID NO: 124573 - DNA, 80 bp, synthetic construct; identical to SEQ ID NO: 40157
  misc_feature 1..80: note = Artificially Synthesized Probe
  source 1..80: mol_type = other DNA

SEQ ID NO: 124574 - DNA, 80 bp, synthetic construct
  misc_feature 1..80: note = Artificially Synthesized Probe
  source 1..80: mol_type = other DNA
aaaattaatcaaatgtggaaagggaggaggagatggaaggatcatcgtctttcagagggcatttcttaatcctgtttatt

SEQ ID NO: 124575 - DNA, 80 bp, synthetic construct
  misc_feature 1..80: note = Artificially Synthesized Probe
  source 1..80: mol_type = other DNA
gacacttcacacactctgatagagggaaagtaaaaaatgcacagctcttcgagatttttgttttatttccttaaggctga

SEQ ID NO: 124576 - DNA, 80 bp, synthetic construct
  misc_feature 1..80: note = Artificially Synthesized Probe
  source 1..80: mol_type = other DNA
aggaacggccagtgggcccattactcaccctgtcctcaggccacacctgccctccctgcctgccattcaggctgagcttt

SEQ ID NO: 124577 - DNA, 80 bp, synthetic construct; identical to SEQ ID NO: 40158
  misc_feature 1..80: note = Artificially Synthesized Probe
  source 1..80: mol_type = other DNA

SEQ ID NO: 124578 - DNA, 80 bp, synthetic construct
  misc_feature 1..80: note = Artificially Synthesized Probe
  source 1..80: mol_type = other DNA
tttattctttagaccactgggaagttcatgacttagttatctacgtaagccttgtatctggccctcatctttgccacttt

SEQ ID NO: 124579 - DNA, 80 bp, synthetic construct
  misc_feature 1..80: note = Artificially Synthesized Probe
  source 1..80: mol_type = other DNA
ctcacaggctccaccatcctgccaggtctctgagccatttaaaacctctttctttaccagggggcccaatgtgtgtgtgt

SEQ ID NO: 124580 - DNA, 80 bp, synthetic construct
  misc_feature 1..80: note = Artificially Synthesized Probe
  source 1..80: mol_type = other DNA
ggctaaggaaactgagcaatctctctgacctgaacatacacgtccgttaagttctttctttttaggatacgcagatctgt

SEQ ID NO: 124581 - DNA, 80 bp, synthetic construct
  misc_feature 1..80: note = Artificially Synthesized Probe
  source 1..80: mol_type = other DNA
ggcagcagtggagagagggagggccagaggtgtagaaaggggtccaggattctccaacccttgcctttctcttggggaaa

SEQ ID NO: 124582 - DNA, 80 bp, synthetic construct; identical to SEQ ID NO: 40159
  misc_feature 1..80: note = Artificially Synthesized Probe
  source 1..80: mol_type = other DNA

SEQ ID NO: 124583 - DNA, 80 bp, synthetic construct
  misc_feature 1..80: note = Artificially Synthesized Probe
  source 1..80: mol_type = other DNA
ataattgtagtctccttgcaaatcttttccgttctgaattcagatgatgccgcagctccagcgttggagactcagcctca

SEQ ID NO: 124584 - DNA, 80 bp, synthetic construct
  misc_feature 1..80: note = Artificially Synthesized Probe
  source 1..80: mol_type = other DNA
tcttacttatatgtggaatctctttaaaaaaaacaaacaaacaaaactccaatagtgaggagaggaaaacagcaagccga

SEQ ID NO: 124585 - DNA, 80 bp, synthetic construct
  misc_feature 1..80: note = Artificially Synthesized Probe
  source 1..80: mol_type = other DNA
cagcacatagcatgaggaatatacttaatgatgaaacggcaacggatggcatagtaaacatttcctagccacacgcccct

SEQ ID NO: 124586 - DNA, 80 bp, synthetic construct; identical to SEQ ID NO: 40160
  misc_feature 1..80: note = Artificially Synthesized Probe
  source 1..80: mol_type = other DNA

SEQ ID NO: 124587 - DNA, 80 bp, synthetic construct
  misc_feature 1..80: note = Artificially Synthesized Probe
  source 1..80: mol_type = other DNA
tcaggtcaaagggaaccggggtttaagggcaaagtgtaaggagtacacagtataaattaacaaaaccttaaaatgtagaa

SEQ ID NO: 124588 - DNA, 80 bp, synthetic construct
  misc_feature 1..80: note = Artificially Synthesized Probe
  source 1..80: mol_type = other DNA
caactggcattcaaacccagatgtcttcttcagggtctgtgctctcaagcactaacggtgacctgcactacattcctttt

SEQ ID NO: 124589 - DNA, 80 bp, synthetic construct
  misc_feature 1..80: note = Artificially Synthesized Probe
  source 1..80: mol_type = other DNA
cctggctattttttttttttttgtattattagtagagacagggtttcaccatgttggccaggctggtcttgaacacccga

SEQ ID NO: 124590 - DNA, 80 bp, synthetic construct; identical to SEQ ID NO: 40161
  misc_feature 1..80: note = Artificially Synthesized Probe
  source 1..80: mol_type = other DNA

SEQ ID NO: 124591 - DNA, 80 bp, synthetic construct
  misc_feature 1..80: note = Artificially Synthesized Probe
  source 1..80: mol_type = other DNA
catccaggtgcaatcacccagctggtgtgaggggaagcccctgtccttttttggaagaggtggaagaggttgtctcccag

SEQ ID NO: 124592 - DNA, 80 bp, synthetic construct
  misc_feature 1..80: note = Artificially Synthesized Probe
  source 1..80: mol_type = other DNA
ttctttacaaatgtacaatgtgtgttatgttgatttattttggctgttggactacttgctgcactgcgtaactaaggaac

SEQ ID NO: 124593 - DNA, 80 bp, synthetic construct
  misc_feature 1..80: note = Artificially Synthesized Probe
  source 1..80: mol_type = other DNA
gaattcaggtaagatgctgcctgatgtcactttgtaaggagtgatttaatagatctagaaaatgatggggtttttttttg

SEQ ID NO: 124594 - DNA, 80 bp, synthetic construct
  misc_feature 1..80: note = Artificially Synthesized Probe
  source 1..80: mol_type = other DNA
atgttatatgtattatatactgtattcttacaaaaatagagaaaagaaaatttattaaaaatcataaggaatagaaaata

SEQ ID NO: 124595 - DNA, 80 bp, synthetic construct; identical to SEQ ID NO: 40162
  misc_feature 1..80: note = Artificially Synthesized Probe
  source 1..80: mol_type = other DNA

SEQ ID NO: 124596 - DNA, 80 bp, synthetic construct
  misc_feature 1..80: note = Artificially Synthesized Probe
  source 1..80: mol_type = other DNA
agtttaaaatcctccaaattgtgtgcattttgtttgctataaagcagtgtttgagagaactttcaccttttaaagctgac

SEQ ID NO: 124597 - DNA, 80 bp, synthetic construct
  misc_feature 1..80: note = Artificially Synthesized Probe
  source 1..80: mol_type = other DNA
cttactgaagggaagtagctctgtaggtttaaagtagttcagctgctgaggaaatacggagttagtaacagcttgaattt

SEQ ID NO: 124598 - DNA, 80 bp, synthetic construct
  misc_feature 1..80: note = Artificially Synthesized Probe
  source 1..80: mol_type = other DNA
tattaaagttcaggagactaagagtggttcgattcccccttcacccagctcttacacacccaacctgaaaaggacccttg

SEQ ID NO: 124599 - DNA, 80 bp, synthetic construct; identical to SEQ ID NO: 40163
  misc_feature 1..80: note = Artificially Synthesized Probe
  source 1..80: mol_type = other DNA

SEQ ID NO: 124600 - DNA, 80 bp, synthetic construct
  misc_feature 1..80: note = Artificially Synthesized Probe
  source 1..80: mol_type = other DNA
ggttttgttcaattttgtcaccccatttaaaaaagttattttgatttatttctgtttcatacaaatttgtatatgagaga

SEQ ID NO: 124601 - DNA, 80 bp, synthetic construct
  misc_feature 1..80: note = Artificially Synthesized Probe
  source 1..80: mol_type = other DNA
gttctcatgatactgagtgagttctcacgagatctggtggttttatactgggctctaaccccttcgctgggcacttctcc

SEQ ID NO: 124602 - DNA, 80 bp, synthetic construct
  misc_feature 1..80: note = Artificially Synthesized Probe
  source 1..80: mol_type = other DNA
agttcaactttccagctttaaagaattggctcatgatgcagaatgctaaattagggaattaaaaagcagggacattttag

SEQ ID NO: 124603 - DNA, 80 bp, synthetic construct
  misc_feature 1..80: note = Artificially Synthesized Probe
  source 1..80: mol_type = other DNA
atggactaatacattggtagatcttgaaaaccattgaagaataaatatgttagcacctaaacttaatttgacattcttgt

SEQ ID NO: 124604 - DNA, 80 bp, synthetic construct
  misc_feature 1..80: note = Artificially Synthesized Probe
  source 1..80: mol_type = other DNA
cgattctcctgcctcagcctcctgagtagctgggactacaggcacccaccaccacacccagctaatttttgtatttctag

SEQ ID NO: 124605 - DNA, 80 bp, synthetic construct; identical to SEQ ID NO: 40164
  misc_feature 1..80: note = Artificially Synthesized Probe
  source 1..80: mol_type = other DNA

SEQ ID NO: 124606 - DNA, 80 bp, synthetic construct
  misc_feature 1..80: note = Artificially Synthesized Probe
  source 1..80: mol_type = other DNA
gcacgaaaagatggcattgagttgatttacagacacggggcatgaagctactggactatgtttgtgtttaataccagttt

SEQ ID NO: 124607 - DNA, 80 bp, synthetic construct
  misc_feature 1..80: note = Artificially Synthesized Probe
  source 1..80: mol_type = other DNA
catttatacttaattttaatttttaaaatatacttttacttgtaatcatcttcggtagacatagacacatttatttgaga

SEQ ID NO: 124608 - DNA, 80 bp, synthetic construct; identical to SEQ ID NO: 40165
  misc_feature 1..80: note = Artificially Synthesized Probe
  source 1..80: mol_type = other DNA

SEQ ID NO: 124609 - DNA, 80 bp, synthetic construct
  misc_feature 1..80: note = Artificially Synthesized Probe
  source 1..80: mol_type = other DNA
cacaataaaatcatgcctcctgtggggtttgaaccaaattgggatctgtaagtcaggcagaattccttcatacccaggcc

SEQ ID NO: 124610 - DNA, 80 bp, synthetic construct
  misc_feature 1..80: note = Artificially Synthesized Probe
  source 1..80: mol_type = other DNA
cacaataaatatgcattaaatgaataaagatttgtaccagcatatgttccacgggccctactgtagcatcattactcttt

SEQ ID NO: 124611 - DNA, 80 bp, synthetic construct
  misc_feature 1..80: note = Artificially Synthesized Probe
  source 1..80: mol_type = other DNA
catcactttcatcatgtgaatcatatacattaaataaacgagtaaaatctgaagttgcctgttacttaaaagtgcattac

SEQ ID NO: 124612 - DNA, 80 bp, synthetic construct
  misc_feature 1..80: note = Artificially Synthesized Probe
  source 1..80: mol_type = other DNA
caaatgtaaatcgaattagtactcttccctactggcatattaagtactttctagatttctgcctgatttcctttaaaacc

SEQ ID NO: 124613 - DNA, 80 bp, synthetic construct; identical to SEQ ID NO: 40056
  misc_feature 1..80: note = Artificially Synthesized Probe
  source 1..80: mol_type = other DNA

SEQ ID NO: 124614 - DNA, 80 bp, synthetic construct; identical to SEQ ID NO: 40166
  misc_feature 1..80: note = Artificially Synthesized Probe
  source 1..80: mol_type = other DNA

SEQ ID NO: 124615 - DNA, 80 bp, synthetic construct
  misc_feature 1..80: note = Artificially Synthesized Probe
  source 1..80: mol_type = other DNA
gagaacatgtggaaggccagctgtctcacattttggtaggaggattattccatgggacgagtcgattaaaacttgctttt

SEQ ID NO: 124616 - DNA, 80 bp, synthetic construct
  misc_feature 1..80: note = Artificially Synthesized Probe
  source 1..80: mol_type = other DNA
acggtgccccttccccaccaggtatcagcttttttcacattttggtaggaggattattccatgggacgagtcggttaaaa

SEQ ID NO: 124617 - DNA, 80 bp, synthetic construct; identical to SEQ ID NO: 40167
  misc_feature 1..80: note = Artificially Synthesized Probe
  source 1..80: mol_type = other DNA

SEQ ID NO: 124618 - DNA, 80 bp, synthetic construct
  misc_feature 1..80: note = Artificially Synthesized Probe
  source 1..80: mol_type = other DNA
gctcctgggctcctgggctcctgggcagcctgcccctggaaggggtgggggtggagaggaggggcacggaggccccccgt

SEQ ID NO: 124619 - DNA, 80 bp, synthetic construct
  misc_feature 1..80: note = Artificially Synthesized Probe
  source 1..80: mol_type = other DNA
caaggtgaatttggttgctttccttaacaccgtgtgcccaattcctgatggagccatgctgccacagggctttgccacgt

SEQ ID NO: 124620 - DNA, 80 bp, synthetic construct
  misc_feature 1..80: note = Artificially Synthesized Probe
  source 1..80: mol_type = other DNA
catttttgaaaggccttttactgtgatatcagtgaaaatgaaagctgaagcagttcctgataaagggggaaagtggattt

SEQ ID NO: 124621 - DNA, 80 bp, synthetic construct; identical to SEQ ID NO: 40168
  misc_feature 1..80: note = Artificially Synthesized Probe
  source 1..80: mol_type = other DNA

SEQ ID NO: 124622 - DNA, 80 bp, synthetic construct
  misc_feature 1..80: note = Artificially Synthesized Probe
  source 1..80: mol_type = other DNA
gctctgttagcacgcagctcccaccatcaagcttcccaccaggggccaagcagggaagcccttaccttcccgtcgcctac

SEQ ID NO: 124623 - DNA, 80 bp, synthetic construct
  misc_feature 1..80: note = Artificially Synthesized Probe
  source 1..80: mol_type = other DNA
ccactcatagcatgcactgtggaacctaaatcatgcctcttgcgggatttgaaccaaattgggatctgtagctcaggcca

SEQ ID NO: 124624 - DNA, 80 bp, synthetic construct
  misc_feature 1..80: note = Artificially Synthesized Probe
  source 1..80: mol_type = other DNA
ctctcggccctgagcccttgtctcctgcgcggtcctcctaaggccgaggcagcaccgggcagtcccttaccagcagggtg

SEQ ID NO: 124625 - DNA, 80 bp, synthetic construct
  misc_feature 1..80: note = Artificially Synthesized Probe
  source 1..80: mol_type = other DNA
cttgcatttttttgtaccccaaaatctgaaggaaattttgaaaaatcattagcagctgtcatttagatttgtacaccatt

SEQ ID NO: 124626 - DNA, 80 bp, synthetic construct
  misc_feature 1..80: note = Artificially Synthesized Probe
  source 1..80: mol_type = other DNA
ttcactgttgaggggaccccctccacgtccaggccttcccctccccgcacggggaagctgaagtgttcccgggggtccgc

SEQ ID NO: 124627 - DNA, 80 bp, synthetic construct; identical to SEQ ID NO: 40169
  misc_feature 1..80: note = Artificially Synthesized Probe
  source 1..80: mol_type = other DNA

SEQ ID NO: 124628 - DNA, 80 bp, synthetic construct
  misc_feature 1..80: note = Artificially Synthesized Probe
  source 1..80: mol_type = other DNA
cccagggctgtttgaggcccccaaaatgcgccttgggatcttttttttttaaattatactttaagttttagggtacatgt

SEQ ID NO: 124629 - DNA, 80 bp, synthetic construct
  misc_feature 1..80: note = Artificially Synthesized Probe
  source 1..80: mol_type = other DNA
tgtgttctcattgttctgttaggttttttttttgtgagctggagagaacgtagaggcctccagttttgtcatctgtgaaa

SEQ ID NO: 124630 - DNA, 80 bp, synthetic construct; identical to SEQ ID NO: 40170
  misc_feature 1..80: note = Artificially Synthesized Probe
  source 1..80: mol_type = other DNA

SEQ ID NO: 124631 - DNA, 80 bp, synthetic construct
  misc_feature 1..80: note = Artificially Synthesized Probe
  source 1..80: mol_type = other DNA
cacaaacatcaagacaccaattagatttgtaagttattaatttttggtcatttgaagagattaatgctaaattaaagcaa

SEQ ID NO: 124632 - DNA, 80 bp, synthetic construct
  misc_feature 1..80: note = Artificially Synthesized Probe
  source 1..80: mol_type = other DNA
ggttaagtaatcagaatgaagcttttcaacctaagtacagaaaatagtaatacaagcaaaccctatctgagtggtttgga

SEQ ID NO: 124633 - DNA, 80 bp, synthetic construct
  misc_feature 1..80: note = Artificially Synthesized Probe
  source 1..80: mol_type = other DNA
atataaatgacatcaactcctccttgaactaatgaggtctgatgttgacatcactagttgctcatgggtctgctgttggc

SEQ ID NO: 124634 - DNA, 80 bp, synthetic construct; identical to SEQ ID NO: 40171
  misc_feature 1..80: note = Artificially Synthesized Probe
  source 1..80: mol_type = other DNA

SEQ ID NO: 124635 - DNA, 80 bp, synthetic construct
  misc_feature 1..80: note = Artificially Synthesized Probe
  source 1..80: mol_type = other DNA
ctccaccaggcaagggactggcttcagaagcgatctcatggtaaacagcaccagcagaagctctctcaggctcacagatg

SEQ ID NO: 124636 - DNA, 80 bp, synthetic construct
  misc_feature 1..80: note = Artificially Synthesized Probe
  source 1..80: mol_type = other DNA
cactacctgccctaggaaccatcttttctgcacaagggaacacagtggctggagagatattaggtgtgctcactcctcct

SEQ ID NO: 124637 - DNA, 80 bp, synthetic construct
  misc_feature 1..80: note = Artificially Synthesized Probe
  source 1..80: mol_type = other DNA
tgacacgaggctgactcccaggccacactctgtcaatttctggggcttcctctgggctccacgcaggacccccttctccc

SEQ ID NO: 124638 - DNA, 80 bp, synthetic construct
  misc_feature 1..80: note = Artificially Synthesized Probe
  source 1..80: mol_type = other DNA
ttcagcatctcatctttaaaatggtaatggtaagacccacctcccggaaaagccccagagctcagtctggttggatgcac

SEQ ID NO: 124639 - DNA, 80 bp, synthetic construct
  misc_feature 1..80: note = Artificially Synthesized Probe
  source 1..80: mol_type = other DNA
cgtgtgcgcatgtgtgtgtgtgcgtatgtgcatgtgtgtgcacgtgtgtatgtgcgcgtgtgcgcatgtgtgtgcatgtg

SEQ ID NO: 124640 - DNA, 80 bp, synthetic construct; identical to SEQ ID NO: 40172
  misc_feature 1..80: note = Artificially Synthesized Probe
  source 1..80: mol_type = other DNA

SEQ ID NO: 124641 - DNA, 80 bp, synthetic construct
  misc_feature 1..80: note = Artificially Synthesized Probe
  source 1..80: mol_type = other DNA
tgaaacccggtctctactaaaaatacaaaattagctgggcatggtggcgggtgcctataatcccagatactcaggaggct

SEQ ID NO: 124642 - DNA, 80 bp, synthetic construct
  misc_feature 1..80: note = Artificially Synthesized Probe
  source 1..80: mol_type = other DNA
gagatttcactgtgattctgtttccatggtcttcccatcagttagcttaaagacccacagataattaatatggcccatga

SEQ ID NO: 124643 - DNA, 80 bp, synthetic construct; identical to SEQ ID NO: 40173
  misc_feature 1..80: note = Artificially Synthesized Probe
  source 1..80: mol_type = other DNA

SEQ ID NO: 124644 - DNA, 80 bp, synthetic construct
  misc_feature 1..80: note = Artificially Synthesized Probe
  source 1..80: mol_type = other DNA
actgagagtttaaaaaatgttcatgcatttgctgaggaattttattcattccccaggaatggtgtggtgcatgaatgtgc

SEQ ID NO: 124645 - DNA, 80 bp, synthetic construct
  misc_feature 1..80: note = Artificially Synthesized Probe
  source 1..80: mol_type = other DNA
ttccccttttatgtacctgcagcctacatttgtgtctcagataaaatctagtatagacatggatctctctgcttttgcct

SEQ ID NO: 124646 - DNA, 80 bp, synthetic construct
  misc_feature 1..80: note = Artificially Synthesized Probe
  source 1..80: mol_type = other DNA
tgcgtctgcatcaaaacacagaacatttaagtgatggaagagtcatggttactgacaaacagtcttcaaggtcatattta

SEQ ID NO: 124647 - DNA, 80 bp, synthetic construct
  misc_feature 1..80: note = Artificially Synthesized Probe
  source 1..80: mol_type = other DNA
ctgccctgagacacgaggctctcactgcattcttggaggaggtgtcattttcataccctgagacacgaggctctcactgc

SEQ ID NO: 124648 - DNA, 80 bp, synthetic construct
  misc_feature 1..80: note = Artificially Synthesized Probe
  source 1..80: mol_type = other DNA
aggaattcagggcagtgtggcttgaatctgctgtccgacgcaggcaggtgcaggctgttctagagtgtgctcagggtggc

SEQ ID NO: 124649 - DNA, 80 bp, synthetic construct
  misc_feature 1..80: note = Artificially Synthesized Probe
  source 1..80: mol_type = other DNA
ttggaggaggtgtcattttcctgccctgagacacgaggctctcactgcattcttggaggaggtgtcattttcataccctg

SEQ ID NO: 124650 - DNA, 80 bp, synthetic construct
  misc_feature 1..80: note = Artificially Synthesized Probe
  source 1..80: mol_type = other DNA
acgaggctctcactgcattcttggaggaggtgtcattttcataccctgagacacgaggctctcactgcgttcttggagga

SEQ ID NO: 124651 - DNA, 80 bp, synthetic construct
  misc_feature 1..80: note = Artificially Synthesized Probe
  source 1..80: mol_type = other DNA
tagagggggctgagccaagcccccgccggccaagccaacccgcggcggccgctgggccaaggccgggtgtctgcagcccc

SEQ ID NO: 124652 - DNA, 80 bp, synthetic construct
  misc_feature 1..80: note = Artificially Synthesized Probe
  source 1..80: mol_type = other DNA
tcattttcctgccctgagacacgaggctctcactgtgttctcggaggaggtgtcattttcctgccctgagacacgaggct

SEQ ID NO: 124653 - DNA, 80 bp, synthetic construct
  misc_feature 1..80: note = Artificially Synthesized Probe
  source 1..80: mol_type = other DNA
ctgcattcttggaggaggtgtcattttcataccctgagacacgaggctctcactgcgttcttggaggaggtgtcattttc

SEQ ID NO: 124654 - DNA, 80 bp, synthetic construct
  misc_feature 1..80: note = Artificially Synthesized Probe
  source 1..80: mol_type = other DNA
cctgagacacgaggctctcactgcgttcttggaggaggtgtcattttcctgccctgagacacgaggctctcactgtgttc

SEQ ID NO: 124655 - DNA, 80 bp, synthetic construct
  misc_feature 1..80: note = Artificially Synthesized Probe
  source 1..80: mol_type = other DNA
aggaggtgtcattttcctgccctgagacacaaggctctcactgcattcttggaggaggtgtcattttcataccctgagac

SEQ ID NO: 124656 - DNA, 80 bp, synthetic construct; identical to SEQ ID NO: 40174
  misc_feature 1..80: note = Artificially Synthesized Probe
  source 1..80: mol_type = other DNA

SEQ ID NO: 124657 - DNA, 80 bp, synthetic construct
  misc_feature 1..80: note = Artificially Synthesized Probe
  source 1..80: mol_type = other DNA
tttcatgccgtcctcactttgggggtgaggaggtactgttttcctctttacatatgaaaaaatgcaaacgttcacccaaa

SEQ ID NO: 124658 - DNA, 80 bp, synthetic construct; identical to SEQ ID NO: 40176
  misc_feature 1..80: note = Artificially Synthesized Probe
  source 1..80: mol_type = other DNA

SEQ ID NO: 124659 - DNA, 80 bp, synthetic construct
  misc_feature 1..80: note = Artificially Synthesized Probe
  source 1..80: mol_type = other DNA
gaacgggggctgggagtggagactcgctgtgtgcctgccataattccgtctgcgtcgaggaagggggcggcttgggaagc

SEQ ID NO: 124660 - DNA, 80 bp, synthetic construct; identical to SEQ ID NO: 40057
  misc_feature 1..80: note = Artificially Synthesized Probe
  source 1..80: mol_type = other DNA

SEQ ID NO: 124661 - DNA, 80 bp, synthetic construct
  misc_feature 1..80: note = Artificially Synthesized Probe
  source 1..80: mol_type = other DNA
cacacacgtgcattcatacacaatatcgatgtatgtatgtatgtaagttttatgtgtgtgtgtgtatatatatgtgtgta

SEQ ID NO: 124662 - DNA, 80 bp, synthetic construct
  misc_feature 1..80: note = Artificially Synthesized Probe
  source 1..80: mol_type = other DNA
ttgctaaaatattgtgtgtctgtttcttgtctccctgctatggtctaaatgtatgtgtgtccccaaattcctgtgttgaa

SEQ ID NO: 124663 - DNA, 80 bp, synthetic construct; identical to SEQ ID NO: 40177
  misc_feature 1..80: note = Artificially Synthesized Probe
  source 1..80: mol_type = other DNA

SEQ ID NO: 124664 - DNA, 80 bp, synthetic construct
  misc_feature 1..80: note = Artificially Synthesized Probe
  source 1..80: mol_type = other DNA
gtcctggttaaagcacaccctggagtagaacctctggggtgggtggggccttggagacgcaatttaagcagcttctcagg

SEQ ID NO: 124665 - DNA, 80 bp, synthetic construct
  misc_feature 1..80: note = Artificially Synthesized Probe
  source 1..80: mol_type = other DNA
ctagatacaagtccttaccagatttatgattcacacgtattttcttccactctgagccgtcctttcactctcttggtggg

SEQ ID NO: 124666 - DNA, 80 bp, synthetic construct
  misc_feature 1..80: note = Artificially Synthesized Probe
  source 1..80: mol_type = other DNA
tgcatatgaaatataacacttcagactttatgacaaatccttgcagtaggttgtttgtctttaacttgtatgtatgtgga

SEQ ID NO: 124667 - DNA, 80 bp, synthetic construct
  misc_feature 1..80: note = Artificially Synthesized Probe
  source 1..80: mol_type = other DNA
taattttggtaaagtccagtttacctatcttttcttttgtggctatgcttttggtgccatgtctaaggaactagtgcctc

SEQ ID NO: 124668 - DNA, 80 bp, synthetic construct; identical to SEQ ID NO: 40178
  misc_feature 1..80: note = Artificially Synthesized Probe
  source 1..80: mol_type = other DNA

SEQ ID NO: 124669 - DNA, 80 bp, synthetic construct
  misc_feature 1..80: note = Artificially Synthesized Probe
  source 1..80: mol_type = other DNA
ttatctgacaactctgcctgtaaataaatgcagttcccttagtgaatcttcagttaaggaaatttccttgggctttcttt

SEQ ID NO: 124670 - DNA, 80 bp, synthetic construct
  misc_feature 1..80: note = Artificially Synthesized Probe
  source 1..80: mol_type = other DNA
ctctgattctctcagtctctgccatttgctctctctctttctgtctgtctctgtttcttcctgtctctgtctctttgtct

SEQ ID NO: 124671 - DNA, 80 bp, synthetic construct
  misc_feature 1..80: note = Artificially Synthesized Probe
  source 1..80: mol_type = other DNA
tctgactggcctccatgtggtcttctctccgtggtcttccctctgtggtgttccctctgtgttcttccctccgtggtctt

SEQ ID NO: 124672 - DNA, 80 bp, synthetic construct
  misc_feature 1..80: note = Artificially Synthesized Probe
  source 1..80: mol_type = other DNA
ccaaatacagtcacattcagagttaagccttcatccatgaattttgaatccataacaagcaggatagaattatttctgtc

SEQ ID NO: 124673 - DNA, 80 bp, synthetic construct; identical to SEQ ID NO: 40179
  misc_feature 1..80: note = Artificially Synthesized Probe
  source 1..80: mol_type = other DNA

SEQ ID NO: 124674 - DNA, 80 bp, synthetic construct
  misc_feature 1..80: note = Artificially Synthesized Probe
  source 1..80: mol_type = other DNA
ggtgattctttttttactatttttatggggaccatccaagcatagttgaagtgaactaagaaaaaatccacgtcttttac

SEQ ID NO: 124675 - DNA, 80 bp, synthetic construct
  misc_feature 1..80: note = Artificially Synthesized Probe
  source 1..80: mol_type = other DNA
atgcctgtgtgtgtttatacaccactgcacaagtcctcatacagtacatgattctaggacactgtctaatcatgtatact

SEQ ID NO: 124676 - DNA, 80 bp, synthetic construct
  misc_feature 1..80: note = Artificially Synthesized Probe
  source 1..80: mol_type = other DNA
cttctttttttttttttttttttttgaaacagagtcttgctctgttgcccaggctggagtgcaatggtgtgatctcggct

SEQ ID NO: 124677 - DNA, 80 bp, synthetic construct; identical to SEQ ID NO: 40180
  misc_feature 1..80: note = Artificially Synthesized Probe
  source 1..80: mol_type = other DNA

SEQ ID NO: 124678 - DNA, 80 bp, synthetic construct
  misc_feature 1..80: note = Artificially Synthesized Probe
  source 1..80: mol_type = other DNA
aaaaaagacagaatgatacacggaaaataggagacaggcccgctatccttatttatgattaaatcctgaccacaaagcat

SEQ ID NO: 124679 - DNA, 80 bp, synthetic construct
  misc_feature 1..80: note = Artificially Synthesized Probe
  source 1..80: mol_type = other DNA
aaaggatactttaattgtataagtcaatatttaaaacaaaaaatgagaaaattttcttaaaaatacttctttgggaagag

SEQ ID NO: 124680 - DNA, 80 bp, synthetic construct
  misc_feature 1..80: note = Artificially Synthesized Probe
  source 1..80: mol_type = other DNA
acaaaattttaggttgaagcagatgtttgttgataaattacttaagatatttctctttgtttaatgctttacctttgtgt

SEQ ID NO: 124681 - DNA, 80 bp, synthetic construct
  misc_feature 1..80: note = Artificially Synthesized Probe
  source 1..80: mol_type = other DNA
tcattctccatctctgtcctctatctctctccgtctctctgtttgtctctcattctttctctggatctctgccattctcc

SEQ ID NO: 124682 - DNA, 80 bp, synthetic construct; identical to SEQ ID NO: 40181
  misc_feature 1..80: note = Artificially Synthesized Probe
  source 1..80: mol_type = other DNA

SEQ ID NO: 124683 - DNA, 80 bp, synthetic construct
  misc_feature 1..80: note = Artificially Synthesized Probe
  source 1..80: mol_type = other DNA
ggatggtgtgagtcggtgtctcatattagaatttagtgcgtcttcgcttcagatgagcaactacaggcaaagaccggatg

SEQ ID NO: 124684 - DNA, 80 bp, synthetic construct
  misc_feature 1..80: note = Artificially Synthesized Probe
  source 1..80: mol_type = other DNA
gtgtctcatattagaatttagtgcatcttctcttcagatgagcagctacaggcgaagaccggatggtgtgagtcggtgtc

SEQ ID NO: 124685 - DNA, 80 bp, synthetic construct; identical to SEQ ID NO: 40182
  misc_feature 1..80: note = Artificially Synthesized Probe
  source 1..80: mol_type = other DNA

SEQ ID NO: 124686 - DNA, 80 bp, synthetic construct
  misc_feature 1..80: note = Artificially Synthesized Probe
  source 1..80: mol_type = other DNA
cccccatcatagtgtcatacagagttgattgactgccctgaaaacctagagtgacgtgtacccaccatcatggtatcata

SEQ ID NO: 124687 - DNA, 80 bp, synthetic construct
  misc_feature 1..80: note = Artificially Synthesized Probe
  source 1..80: mol_type = other DNA
tggcttcctttgcttactagtattcgtttaaggttcctctgttactaatattcgtttaaggttcccccgtgtcttttcgt

SEQ ID NO: 124688 - DNA, 80 bp, synthetic construct
  misc_feature 1..80: note = Artificially Synthesized Probe
  source 1..80: mol_type = other DNA
atcagggttcagcacatttggctaaataactaagaacacgattggtggatggtacagtaaaactctgtgtgtcttcataa

SEQ ID NO: 124689 - DNA, 80 bp, synthetic construct; identical to SEQ ID NO: 40183
  misc_feature 1..80: note = Artificially Synthesized Probe
  source 1..80: mol_type = other DNA

SEQ ID NO: 124690 - DNA, 80 bp, synthetic construct
  misc_feature 1..80: note = Artificially Synthesized Probe
  source 1..80: mol_type = other DNA
tcagcctcctgagtagctaggaccacaggcgcacaccaccacgcctggttagtttttatttttatttttgtagagacagg

SEQ ID NO: 124691 - DNA, 80 bp, synthetic construct
  misc_feature 1..80: note = Artificially Synthesized Probe
  source 1..80: mol_type = other DNA
tgcagcttgtcttctcattctcctaatggtgtatttgcagagcggaagttttccactttgaggaagtcccgtttatcaat

SEQ ID NO: 124692 - DNA, 80 bp, synthetic construct
  misc_feature 1..80: note = Artificially Synthesized Probe
  source 1..80: mol_type = other DNA
tttctgtccatctctgtactatctctgtgtctctcttactctattcatctatttccctatctttattcatctctctgtct

SEQ ID NO: 124693 - DNA, 80 bp, synthetic construct
  misc_feature 1..80: note = Artificially Synthesized Probe
  source 1..80: mol_type = other DNA
tagctctgtggtatattggagttaatttattaaaggcgtaaggtccgtgtctagacggcattctctttgtgtgcggatgt

SEQ ID NO: 124694 - DNA, 80 bp, synthetic construct; identical to SEQ ID NO: 40184
  misc_feature 1..80: note = Artificially Synthesized Probe
  source 1..80: mol_type = other DNA

SEQ ID NO: 124695 - DNA, 80 bp, synthetic construct
  misc_feature 1..80: note = Artificially Synthesized Probe
  source 1..80: mol_type = other DNA
taattctccgtgctcagctaggagggagccaggttttcacagggccctgtgttgtgtgtgggatatatttcacctctttt

SEQ ID NO: 124696 - DNA, 80 bp, synthetic construct
  misc_feature 1..80: note = Artificially Synthesized Probe
  source 1..80: mol_type = other DNA
ggagagggacgctaaatacttttgcaaagaatttaaagagaaaacttgaggaaagggaagaattgaagataacgtaactt

SEQ ID NO: 124697 - DNA, 80 bp, synthetic construct
  misc_feature 1..80: note = Artificially Synthesized Probe
  source 1..80: mol_type = other DNA
tcctcatcccttcatcttttccaagagcacataactcatagtgaagtttttaacaaccaatggagcgtagctgtctgagc

SEQ ID NO: 124698 - DNA, 80 bp, synthetic construct
  misc_feature 1..80: note = Artificially Synthesized Probe
  source 1..80: mol_type = other DNA
aagattgactatgttcagaatggcagttgaatacatctttttgtttagtaaaaaaggtttattgtaggagatattaacaa

SEQ ID NO: 124699 - DNA, 80 bp, synthetic construct; identical to SEQ ID NO: 40185
  misc_feature 1..80: note = Artificially Synthesized Probe
  source 1..80: mol_type = other DNA

SEQ ID NO: 124700 - DNA, 80 bp, synthetic construct
  misc_feature 1..80: note = Artificially Synthesized Probe
  source 1..80: mol_type = other DNA
ggacacttccatgaggaatacttctctatggatacaattttctgtgcttctgtgattgtgtccaggatggatttcctggg

SEQ ID NO: 124701 - DNA, 80 bp, synthetic construct
  misc_feature 1..80: note = Artificially Synthesized Probe
  source 1..80: mol_type = other DNA
cccgggtgcggggaccagggctgcgtgctccctgaacgcgatgttcacttcctccccgcatccccgggtgccgggaccag

SEQ ID NO: 124702 - DNA, 80 bp, synthetic construct
  misc_feature 1..80: note = Artificially Synthesized Probe
  source 1..80: mol_type = other DNA
cccgcatccccgggtgccgggaccagggctgcgtgctccctgaacgcgatgttcatttcctccccgcatctccgggtgcc

SEQ ID NO: 124703 - DNA, 80 bp, synthetic construct
  misc_feature 1..80: note = Artificially Synthesized Probe
  source 1..80: mol_type = other DNA
atttcctccccgcatccccgggtgccgggaccagggctgcgtgctccctgaacgcgatgttcatttcctccccgcatccc

SEQ ID NO: 124704 - DNA, 80 bp, synthetic construct; identical to SEQ ID NO: 40058
  misc_feature 1..80: note = Artificially Synthesized Probe
  source 1..80: mol_type = other DNA

SEQ ID NO: 124705 - DNA, 80 bp, synthetic construct; identical to SEQ ID NO: 40186
  misc_feature 1..80: note = Artificially Synthesized Probe
  source 1..80: mol_type = other DNA

SEQ ID NO: 124706 - DNA, 80 bp, synthetic construct
  misc_feature 1..80: note = Artificially Synthesized Probe
  source 1..80: mol_type = other DNA
cctgaacgcgatgttcatttcctgcccgcatctccgggtgctgggaccagggctgcgtggtccctgaacgcgatgttcac

SEQ ID NO: 124707 - DNA, 80 bp, synthetic construct; identical to SEQ ID NO: 40187
  misc_feature 1..80: note = Artificially Synthesized Probe
  source 1..80: mol_type = other DNA

SEQ ID NO: 124708 - DNA, 80 bp, synthetic construct
  misc_feature 1..80: note = Artificially Synthesized Probe
  source 1..80: mol_type = other DNA
ccagggctgcgtgctccttggacgcgatgctcatttccttcccacatccccgggtgctgggaccagggctgcgtggtccc

SEQ ID NO: 124709 - DNA, 80 bp, synthetic construct
  misc_feature 1..80: note = Artificially Synthesized Probe
  source 1..80: mol_type = other DNA
ggcgcagaggctggagtagcctctgcccacacacgtgcaggcagcgagcgcctgcgacagggcagagagcagcatgcatg

SEQ ID NO: 124710 - DNA, 80 bp, synthetic construct
  misc_feature 1..80: note = Artificially Synthesized Probe
  source 1..80: mol_type = other DNA
gcccacaggtttcattgtccatcccactaacgatccagtggaggctttttgtttttgttttaaaatagaagtcccagatc

SEQ ID NO: 124711 - DNA, 80 bp, synthetic construct; identical to SEQ ID NO: 40188
  misc_feature 1..80: note = Artificially Synthesized Probe
  source 1..80: mol_type = other DNA

SEQ ID NO: 124712 - DNA, 80 bp, synthetic construct
  misc_feature 1..80: note = Artificially Synthesized Probe
  source 1..80: mol_type = other DNA
aggccctgagcatgctcatgggcagggcgggtaggtcgaaggctgctccaggaccctgcaggccgggcctccatagggca

SEQ ID NO: 124713 - DNA, 80 bp, synthetic construct
  misc_feature 1..80: note = Artificially Synthesized Probe
  source 1..80: mol_type = other DNA
ggccttggggagttggagaatattctgaaacaagtcacatcacagaggtaaagggtgcaagagcagctctggagaaaggt

SEQ ID NO: 124714 - DNA, 80 bp, synthetic construct
  misc_feature 1..80: note = Artificially Synthesized Probe
  source 1..80: mol_type = other DNA
actgccggactcggcgctctgtccttcccgacctccctgaagaccggcacattccatgctggtctcacttcagacagcca

SEQ ID NO: 124715 - DNA, 80 bp, synthetic construct
  misc_feature 1..80: note = Artificially Synthesized Probe
  source 1..80: mol_type = other DNA
ggtagggccagactgcggctctgacaggttctgcagatgggaggcacctgggcagtgagaccaggtgtttgcaggtagac

SEQ ID NO: 124716 - DNA, 80 bp, synthetic construct; identical to SEQ ID NO: 40189
  misc_feature 1..80: note = Artificially Synthesized Probe
  source 1..80: mol_type = other DNA

SEQ ID NO: 124717 - DNA, 80 bp, synthetic construct
  misc_feature 1..80: note = Artificially Synthesized Probe
  source 1..80: mol_type = other DNA
ccgagtggctcgcttttgctgctgaacatttcaggctgttcttctgtggcttaaaatgacagtaggttataaagtgagca

SEQ ID NO: 124718 - DNA, 80 bp, synthetic construct
  misc_feature 1..80: note = Artificially Synthesized Probe
  source 1..80: mol_type = other DNA
aggataaatctcttactctcctagcatatctagtaaaatattgttgggaagataaatgcatagatagcgctttactgtag

SEQ ID NO: 124719 - DNA, 80 bp, synthetic construct
  misc_feature 1..80: note = Artificially Synthesized Probe
  source 1..80: mol_type = other DNA
gaagggtctgtctttactgtgggatgcagaacacaggcagagccatttgaaccagccaaaaacatccaaaaaataaatca

SEQ ID NO: 124720 - DNA, 80 bp, synthetic construct; identical to SEQ ID NO: 40190
  misc_feature 1..80: note = Artificially Synthesized Probe
  source 1..80: mol_type = other DNA

SEQ ID NO: 124721 - DNA, 80 bp, synthetic construct
  misc_feature 1..80: note = Artificially Synthesized Probe
  source 1..80: mol_type = other DNA
gtcaggttgtggttgctcagatttagttgtgccaagcggtgaagactgggtgaggccatgctgggcaggtgcaccagtca

SEQ ID NO: 124722 - DNA, 80 bp, synthetic construct
  misc_feature 1..80: note = Artificially Synthesized Probe
  source 1..80: mol_type = other DNA
aaaaagctcttgtaatcatgggctgtatctactgacatcagtgaacatgtttgcactaagcacgttgtgatctgaggcac

SEQ ID NO: 124723 - DNA, 80 bp, synthetic construct
  misc_feature 1..80: note = Artificially Synthesized Probe
  source 1..80: mol_type = other DNA
gctctgagaatggctggtctaacagcagggacaccaaatggacgcatcacaggcaaaccggcgggcctcgctccatggaa

SEQ ID NO: 124724 - DNA, 80 bp, synthetic construct; identical to SEQ ID NO: 40191
  misc_feature 1..80: note = Artificially Synthesized Probe
  source 1..80: mol_type = other DNA

SEQ ID NO: 124725 - DNA, 80 bp, synthetic construct
  misc_feature 1..80: note = Artificially Synthesized Probe
  source 1..80: mol_type = other DNA
ttccagccactgagtcttgggtgacacttgctgttttgaaatggccccttgcctgttgaaaactatgcacgtttcaaaaa

SEQ ID NO: 124726 - DNA, 80 bp, synthetic construct
  misc_feature 1..80: note = Artificially Synthesized Probe
  source 1..80: mol_type = other DNA
aggtgagcttacaacttctccatgggacgcatcctgaagctacacctgtactggccatgtgctgaagacgctgctgggga

SEQ ID NO: 124727 - DNA, 80 bp, synthetic construct
  misc_feature 1..80: note = Artificially Synthesized Probe
  source 1..80: mol_type = other DNA
aagactctgctggaccaggatgccttattccatctaaacacgcactctcttcttatctctgtaagactttgctggaccag

SEQ ID NO: 124728 - DNA, 80 bp, synthetic construct
  misc_feature 1..80: note = Artificially Synthesized Probe
  source 1..80: mol_type = other DNA
ctggcacctaaactctgagatgtttggttctttttccttgacccagtttcagatgagggttctggtttccattgtgatgg

SEQ ID NO: 124729 - DNA, 80 bp, synthetic construct
  misc_feature 1..80: note = Artificially Synthesized Probe
  source 1..80: mol_type = other DNA
ctatctggtcccgcagcatctcccagcagtgattcattcactcctgtttcatctgcatgagggtcacgcactttcgaatc

SEQ ID NO: 124730 - DNA, 80 bp, synthetic construct; identical to SEQ ID NO: 40192
  misc_feature 1..80: note = Artificially Synthesized Probe
  source 1..80: mol_type = other DNA

SEQ ID NO: 124731 - DNA, 80 bp, synthetic construct
  misc_feature 1..80: note = Artificially Synthesized Probe
  source 1..80: mol_type = other DNA
aatcaccgtgcatttgcacgtagctgcccagctgctgtgtgtagcagctccaggtggcaggaagcttggccgtgccctgc

SEQ ID NO: 124732 - DNA, 80 bp, synthetic construct
  misc_feature 1..80: note = Artificially Synthesized Probe
  source 1..80: mol_type = other DNA
aatgggaagtgtttggagctggaaagtgctgtcaaaatgttattgtttccttcaaattccattgaggtaggagacggggg

SEQ ID NO: 124733 - DNA, 80 bp, synthetic construct; identical to SEQ ID NO: 40193
  misc_feature 1..80: note = Artificially Synthesized Probe
  source 1..80: mol_type = other DNA

SEQ ID NO: 124734 - DNA, 80 bp, synthetic construct
  misc_feature 1..80: note = Artificially Synthesized Probe
  source 1..80: mol_type = other DNA
ttttcttccttgtgttaaaggttaaggattttcaagtagggatcgctgcgtggtaaaatgaaatgcagcattcctgcctc

SEQ ID NO: 124735 - DNA, 80 bp, synthetic construct
  misc_feature 1..80: note = Artificially Synthesized Probe
  source 1..80: mol_type = other DNA
gcagcacatagaagctgttattgtcatcctgcagatggggaaacaggctttaaaaggtcaacctgagaacacatggctag

SEQ ID NO: 124736 - DNA, 80 bp, synthetic construct
  misc_feature 1..80: note = Artificially Synthesized Probe
  source 1..80: mol_type = other DNA
ttcttttatccacatgaaaagtgaagtgttaaaaagtggccccctctggctattggcttatgccgcctgtcacagtctat

SEQ ID NO: 124737 - DNA, 80 bp, synthetic construct; identical to SEQ ID NO: 40194
  misc_feature 1..80: note = Artificially Synthesized Probe
  source 1..80: mol_type = other DNA

SEQ ID NO: 124738 - DNA, 80 bp, synthetic construct
  misc_feature 1..80: note = Artificially Synthesized Probe
  source 1..80: mol_type = other DNA
gtggccggggtctcagatgggagctgtgtgtattgggttcagggagcccaggacaggaggggagggcttgttaggggccc

SEQ ID NO: 124739 - DNA, 80 bp, synthetic construct
  misc_feature 1..80: note = Artificially Synthesized Probe
  source 1..80: mol_type = other DNA
cctgtgagtcagggctggggacccagggatgaggggagggagggaattaaggaaataccatagaaacttaggctaaatga

SEQ ID NO: 124740 - DNA, 80 bp, synthetic construct
  misc_feature 1..80: note = Artificially Synthesized Probe
  source 1..80: mol_type = other DNA
acaaatgctgaggacaccggggaggatacagagagaggtaggaggttagtgtgggaggcaaatgggacttgggaggcatt

SEQ ID NO: 124741 - DNA, 80 bp, synthetic construct
  misc_feature 1..80: note = Artificially Synthesized Probe
  source 1..80: mol_type = other DNA
atacatgtgaaaagaaataaatcagaacagacacctgtggtcattactttctctccaaaggaactggatccacgcatttt

SEQ ID NO: 124742 - DNA, 80 bp, synthetic construct; identical to SEQ ID NO: 40195
  misc_feature 1..80: note = Artificially Synthesized Probe
  source 1..80: mol_type = other DNA

SEQ ID NO: 124743 - DNA, 80 bp, synthetic construct
  misc_feature 1..80: note = Artificially Synthesized Probe
  source 1..80: mol_type = other DNA
ggctcaagtgatcctcccacctcagcctcctgagtagctgggactgcagacacagatcaccacatctggctgattttttt

SEQ ID NO: 124744 - DNA, 80 bp, synthetic construct
  misc_feature 1..80: note = Artificially Synthesized Probe
  source 1..80: mol_type = other DNA
acaccatttgaatgcataattttaaaacacagttttaatgctgtgttgttatgaggattaaaggacagcatgcagagcac

SEQ ID NO: 124745 - DNA, 80 bp, synthetic construct
  misc_feature 1..80: note = Artificially Synthesized Probe
  source 1..80: mol_type = other DNA
agccttcgcctctgattcccccctggtttttataccaaaagtaaacatatgaagaattttattccaacagaagtataagt

SEQ ID NO: 124746 - DNA, 80 bp, synthetic construct
  misc_feature 1..80: note = Artificially Synthesized Probe
  source 1..80: mol_type = other DNA
agacaacatgcgtaaaaattaagtaaaatcaattctaaaaaaaaaatgaaaacccctacggggacatctgtgacaggtgg

SEQ ID NO: 124747 - DNA, 80 bp, synthetic construct; identical to SEQ ID NO: 40196
  misc_feature 1..80: note = Artificially Synthesized Probe
  source 1..80: mol_type = other DNA

SEQ ID NO: 124748 - DNA, 80 bp, synthetic construct
  misc_feature 1..80: note = Artificially Synthesized Probe
  source 1..80: mol_type = other DNA
gcagacctgcctgggaccccgctgcctccctgcagcccccctcccctcccttcctcattgaccggggctgggtgcaggtg

SEQ ID NO: 124749 - DNA, 80 bp, synthetic construct; identical to SEQ ID NO: 40059
  misc_feature 1..80: note = Artificially Synthesized Probe
  source 1..80: mol_type = other DNA

SEQ ID NO: 124750 - DNA, 80 bp, synthetic construct
  misc_feature 1..80: note = Artificially Synthesized Probe
  source 1..80: mol_type = other DNA
tctgcttgcttcatggagttcttccgagattatctgggtcatttgcccgtttcctgatttcttcattacatctcaagctc

SEQ ID NO: 124751 - DNA, 80 bp, synthetic construct; identical to SEQ ID NO: 40197
  misc_feature 1..80: note = Artificially Synthesized Probe
  source 1..80: mol_type = other DNA

SEQ ID NO: 124752 - DNA, 80 bp, synthetic construct
  misc_feature 1..80: note = Artificially Synthesized Probe
  source 1..80: mol_type = other DNA
gattaaaggtagcaaaggaggccgagggagtggcagtgcccgaaatgcaggctggggtggggcagagccggagagagtaa

SEQ ID NO: 124753 - DNA, 80 bp, synthetic construct
  misc_feature 1..80: note = Artificially Synthesized Probe
  source 1..80: mol_type = other DNA
gaggagtgcgtcacgcggtgtttccacctgtttggagcatgtccgacctgccgggaactcagagcttagtaacattcaga

SEQ ID NO: 124754 - DNA, 80 bp, synthetic construct
  misc_feature 1..80: note = Artificially Synthesized Probe
  source 1..80: mol_type = other DNA
actgtggcgccctctcacccccgcctccctcaatctccccctccttcaagactcacgccagactcgtccaggctccggcc

SEQ ID NO: 124755 - DNA, 80 bp, synthetic construct; identical to SEQ ID NO: 40198
  misc_feature 1..80: note = Artificially Synthesized Probe
  source 1..80: mol_type = other DNA

SEQ ID NO: 124756 - DNA, 80 bp, synthetic construct
  misc_feature 1..80: note = Artificially Synthesized Probe
  source 1..80: mol_type = other DNA
tcccagctccactgggctcagccctgccctgcctcacccctcctggtctgaagcttaggaaggaatggctgtcatatcgg

SEQ ID NO: 124757 - DNA, 80 bp, synthetic construct
  misc_feature 1..80: note = Artificially Synthesized Probe
  source 1..80: mol_type = other DNA
cccctgtctctcatcttccttgcactaatcagcaaactggggatgttcttctcatagcagcagcagaggcacacgaaagc

SEQ ID NO: 124758 - DNA, 80 bp, synthetic construct
  misc_feature 1..80: note = Artificially Synthesized Probe
  source 1..80: mol_type = other DNA
gtggccagtactgcagtctgttcttcctggaataagggtgtcattgtcctgagtgggacaaactgaagaagggaggaggg

SEQ ID NO: 124759 - DNA, 80 bp, synthetic construct
  misc_feature 1..80: note = Artificially Synthesized Probe
  source 1..80: mol_type = other DNA
tacacgtcagagcagcacagcagcaggccagcaaaaactggggagccaggccggccaatagtaacaagacttggggtggg

SEQ ID NO: 124760 - DNA, 80 bp, synthetic construct; identical to SEQ ID NO: 40199
  misc_feature 1..80: note = Artificially Synthesized Probe
  source 1..80: mol_type = other DNA

SEQ ID NO: 124761 - DNA, 80 bp, synthetic construct
  misc_feature 1..80: note = Artificially Synthesized Probe
  source 1..80: mol_type = other DNA
gctttgagaggctgggcccttttctttcctcattctctcctacttaaaaatgttcatgtttatacttgtttattgttccc

SEQ ID NO: 124762 - DNA, 80 bp, synthetic construct
  misc_feature 1..80: note = Artificially Synthesized Probe
  source 1..80: mol_type = other DNA
tcacattagtggtaagaggtctctgtttaatcgagtgtacactaatggaacaccaggtcctcttaaaaaaaaaaagcatt

SEQ ID NO: 124763 - DNA, 80 bp, synthetic construct
  misc_feature 1..80: note = Artificially Synthesized Probe
  source 1..80: mol_type = other DNA
actaggagcactttttcaggcttatgtagacatagatgttgtttatggagagcatcgatgtagagtgagatgcacagacg

SEQ ID NO: 124764 - DNA, 80 bp, synthetic construct; identical to SEQ ID NO: 40200
  misc_feature 1..80: note = Artificially Synthesized Probe
  source 1..80: mol_type = other DNA

SEQ ID NO: 124765 - DNA, 80 bp, synthetic construct
  misc_feature 1..80: note = Artificially Synthesized Probe
  source 1..80: mol_type = other DNA
cacagtgaatttttgtgtttttttgcagtcacggggttttgctatgttgcccaggctgacatcaaacccctgggcttatg

SEQ ID NO: 124766 - DNA, 80 bp, synthetic construct
  misc_feature 1..80: note = Artificially Synthesized Probe
  source 1..80: mol_type = other DNA
ggccggggacttgtcctaaaggtgtttattgtattgaaaataaagatggttgaaataagctgtggtcggttctgcctttc

SEQ ID NO: 124767 - DNA, 80 bp, synthetic construct
  misc_feature 1..80: note = Artificially Synthesized Probe
  source 1..80: mol_type = other DNA
ctttgttcctgtctttttttcgatccagtaatggttttgagcttcatcctcactgcgtgcattacccattcattctctgc

SEQ ID NO: 124768 - DNA, 80 bp, synthetic construct
  misc_feature 1..80: note = Artificially Synthesized Probe
  source 1..80: mol_type = other DNA
actagtcattgtactagtcattcgtgagtgcatgttttcatgatgctggggataaatacctgagagtaggtttccagagt

SEQ ID NO: 124769 - DNA, 80 bp, synthetic construct
  misc_feature 1..80: note = Artificially Synthesized Probe
  source 1..80: mol_type = other DNA
atgttggacagtttctttcaaatacttatttttcagtcacacatctttcattttgtcatgtctgttttcacctttgttaa

SEQ ID NO: 124770 - DNA, 80 bp, synthetic construct; identical to SEQ ID NO: 40201
  misc_feature 1..80: note = Artificially Synthesized Probe
  source 1..80: mol_type = other DNA

SEQ ID NO: 124771 - DNA, 80 bp, synthetic construct
  misc_feature 1..80: note = Artificially Synthesized Probe
  source 1..80: mol_type = other DNA
gaaggcttccctttcttattgaattgttttggtgcctcatcaaatatcaattgaacatatacatatatttttaaatttac

SEQ ID NO: 124772 - DNA, 80 bp, synthetic construct
  misc_feature 1..80: note = Artificially Synthesized Probe
  source 1..80: mol_type = other DNA
aaaattactgatgttgaatatcacagaaaggacatagaatgagccattatctcctggaggtccgaaaccttgaacttaga

SEQ ID NO: 124773 - DNA, 80 bp, synthetic construct
  misc_feature 1..80: note = Artificially Synthesized Probe
  source 1..80: mol_type = other DNA
acattttcctatttgttttagaaccataatgtcagtttctactatagagcttcctaggatttcggtaggaattatatggg

SEQ ID NO: 124774 - DNA, 80 bp, synthetic construct
  misc_feature 1..80: note = Artificially Synthesized Probe
  source 1..80: mol_type = other DNA
atgtttttgatattatagcaaatgacatttaatttttttaatattccaattattcattagtaatatataaaaatagaagt

SEQ ID NO: 124775 - DNA, 80 bp, synthetic construct; identical to SEQ ID NO: 40202
  misc_feature 1..80: note = Artificially Synthesized Probe
  source 1..80: mol_type = other DNA

SEQ ID NO: 124776 - DNA, 80 bp, synthetic construct
  misc_feature 1..80: note = Artificially Synthesized Probe
  source 1..80: mol_type = other DNA
ttgcaaaatgctttatctttctttctaaatacactcatatattcttccactaactcctcccgcccaccttgtgagacaat

SEQ ID NO: 124777 - DNA, 80 bp, synthetic construct
  misc_feature 1..80: note = Artificially Synthesized Probe
  source 1..80: mol_type = other DNA
tgtgagacatcaatcagtatgtgtaagaagtacattggttcagtccagaaaggcgggacaacttcttaagcagatatgag

SEQ ID NO: 124778 - DNA, 80 bp, synthetic construct
  misc_feature 1..80: note = Artificially Synthesized Probe
  source 1..80: mol_type = other DNA
tgctgagggatgactgagttctgtctgtccttggtccatgggaatttcctgcaggcaaacagcgagggaggtctgtagct

SEQ ID NO: 124779 - DNA, 80 bp, synthetic construct; identical to SEQ ID NO: 40203
  misc_feature 1..80: note = Artificially Synthesized Probe
  source 1..80: mol_type = other DNA

SEQ ID NO: 124780 - DNA, 80 bp, synthetic construct
  misc_feature 1..80: note = Artificially Synthesized Probe
  source 1..80: mol_type = other DNA
ctctgtcacccaggctggagtacagtggcatgatctcggctcactgtaacctctgcctcacgggttcaagcaattctcct

SEQ ID NO: 124781 - DNA, 80 bp, synthetic construct
  misc_feature 1..80: note = Artificially Synthesized Probe
  source 1..80: mol_type = other DNA
ctacaggcgtgagccactgcacccagctggagccccttttctaaaggctcatctcattcccagccggagcctcttttcta

SEQ ID NO: 124782 - DNA, 80 bp, synthetic construct
  misc_feature 1..80: note = Artificially Synthesized Probe
  source 1..80: mol_type = other DNA
gcggagtggccaggttggggctgaactgagacttaaccgtatttattctcttcttgttttattttctccattttgcactg

SEQ ID NO: 124783 - DNA, 80 bp, synthetic construct
  misc_feature 1..80: note = Artificially Synthesized Probe
  source 1..80: mol_type = other DNA
tgcaaacgtctgggcggagtcttcacctcacttcccgatttcccggtctgttcctgtgaaagggcgcggcactcaggcag

SEQ ID NO: 124784 - DNA, 80 bp, synthetic construct
  misc_feature 1..80: note = Artificially Synthesized Probe
  source 1..80: mol_type = other DNA
ggccaggagttcgagaccagcctggccaacatctctactaaaaaaatacaaaaaattaattgggcgtggtggtgtgtccc

SEQ ID NO: 124785 - DNA, 80 bp, synthetic construct; identical to SEQ ID NO: 40204
  misc_feature 1..80: note = Artificially Synthesized Probe
  source 1..80: mol_type = other DNA

SEQ ID NO: 124786 - DNA, 80 bp, synthetic construct
  misc_feature 1..80: note = Artificially Synthesized Probe
  source 1..80: mol_type = other DNA
gaaaagggattcagagttccttgacaacaacagcaatgacatccattcaaccacgcagctgccagcaatgggctcaacag

SEQ ID NO: 124787 - DNA, 80 bp, synthetic construct
  misc_feature 1..80: note = Artificially Synthesized Probe
  source 1..80: mol_type = other DNA
aagccagcctggtggtggtcaggtgtggcattagtttagggggcagccggtctggtggtggtcaggtgtggcattagttt

SEQ ID NO: 124788 - DNA, 80 bp, synthetic construct
  misc_feature 1..80: note = Artificially Synthesized Probe
  source 1..80: mol_type = other DNA
tggcattagtttagggggcagccggtctggtggtggtcaggtgtggcattagtttagggggcagccggcctggtgttggt

SEQ ID NO: 124789 - DNA, 80 bp, synthetic construct
  misc_feature 1..80: note = Artificially Synthesized Probe
  source 1..80: mol_type = other DNA
tctggtggtggtcaggtgtggcattagtttagggggcagccggcctggtgttggtcaggtgtggcatgagtttagggggc

SEQ ID NO: 124790 - DNA, 80 bp, synthetic construct; identical to SEQ ID NO: 40205
  misc_feature 1..80: note = Artificially Synthesized Probe
  source 1..80: mol_type = other DNA

SEQ ID NO: 124791 - DNA, 80 bp, synthetic construct
  misc_feature 1..80: note = Artificially Synthesized Probe
  source 1..80: mol_type = other DNA
ccaaatgttgatgcaaagcccctaagcgtgtgagcttgccaaaaaacttaaaacctgcagcgtgcgatgtcttgaaatat

SEQ ID NO: 124792 - DNA, 80 bp, synthetic construct; identical to SEQ ID NO: 40206
  misc_feature 1..80: note = Artificially Synthesized Probe
  source 1..80: mol_type = other DNA

SEQ ID NO: 124793 - DNA, 80 bp, synthetic construct
  misc_feature 1..80: note = Artificially Synthesized Probe
  source 1..80: mol_type = other DNA
atagaagtgaaattgaaatcatatttctataaaagttagaatttatagaagtaaattggaattgaaatcatgtttctata

SEQ ID NO: 124794 - DNA, 80 bp, synthetic construct; identical to SEQ ID NO: 40060
  misc_feature 1..80: note = Artificially Synthesized Probe
  source 1..80: mol_type = other DNA

SEQ ID NO: 124795 - DNA, 80 bp, synthetic construct
  misc_feature 1..80: note = Artificially Synthesized Probe
  source 1..80: mol_type = other DNA
cagcagaaagctgtcagagaagggagcacacaggcaatgctcgtggaactagaaaagcacaaaccaccaaatagaactac

SEQ ID NO: 124796 - DNA, 80 bp, synthetic construct
  misc_feature 1..80: note = Artificially Synthesized Probe
  source 1..80: mol_type = other DNA
caagagcagaaaccttcagattgaggcaaagccaaaggtttgagtgagaatgaacttaatacactaaatggaaggctatt

SEQ ID NO: 124797 - DNA, 80 bp, synthetic construct
  misc_feature 1..80: note = Artificially Synthesized Probe
  source 1..80: mol_type = other DNA
tgtgtgtattaaaagtcagcctcttgaatgccttcatatcggaattgcttctatttgcgtctttttcagattattttttc

SEQ ID NO: 124798 - DNA, 80 bp, synthetic construct; identical to SEQ ID NO: 40207
  misc_feature 1..80: note = Artificially Synthesized Probe
  source 1..80: mol_type = other DNA

SEQ ID NO: 124799 - DNA, 80 bp, synthetic construct
  misc_feature 1..80: note = Artificially Synthesized Probe
  source 1..80: mol_type = other DNA
ctctccttccctatttccctagttctctacccttgccatcctgcttctctcaatcttcagtttcactcagttctcttttt

SEQ ID NO: 124800 - DNA, 80 bp, synthetic construct
  misc_feature 1..80: note = Artificially Synthesized Probe
  source 1..80: mol_type = other DNA
tcctcctccttcctgaggcctcacgagcatctttctagaggatcgccgagctcctcctccttcctgaggcctcacgaggg

SEQ ID NO: 124801 - DNA, 80 bp, synthetic construct
  misc_feature 1..80: note = Artificially Synthesized Probe
  source 1..80: mol_type = other DNA
ctttctagaggatcgctgagctcctcctccttcctgaggcctcacgggcatctttctagaggatggccgagctcctcctc

SEQ ID NO: 124802 - DNA, 80 bp, synthetic construct
  misc_feature 1..80: note = Artificially Synthesized Probe
  source 1..80: mol_type = other DNA
aggcctcacgggcatctttctagaggatggccgagctcctcctccttcctgaggcctcacgggcatctttctagaggatg

SEQ ID NO: 124803 - DNA, 80 bp, synthetic construct
  misc_feature 1..80: note = Artificially Synthesized Probe
  source 1..80: mol_type = other DNA
tcctcctccttcctgaggcctcacgggcatctttctagaggatggccgagctcctcctccttcctgaggcctcacgggca

SEQ ID NO: 124804 - DNA, 80 bp, synthetic construct
  misc_feature 1..80: note = Artificially Synthesized Probe
  source 1..80: mol_type = other DNA
agaggatctccgagctcctcctccttcctgaggcctcacgggcatctttctagaggatctccgagctcctcctccttcct

SEQ ID NO: 124805 - DNA, 80 bp, synthetic construct
  misc_feature 1..80: note = Artificially Synthesized Probe
  source 1..80: mol_type = other DNA
taacctcaaccaggtcaggctgcattgaagcaggccacaaagagaaacctcgcagtgggttccgttcacaccaggtacct

SEQ ID NO: 124806 - DNA, 80 bp, synthetic construct
  misc_feature 1..80: note = Artificially Synthesized Probe
  source 1..80: mol_type = other DNA
cacgggcatctttctagaggatggccgagctcctcctccttcctgaggcctcacgggcatctttctagaggatctccgag

SEQ ID NO: 124807 - DNA, 80 bp, synthetic construct; identical to SEQ ID NO: 40209
  misc_feature 1..80: note = Artificially Synthesized Probe
  source 1..80: mol_type = other DNA

SEQ ID NO: 124808 - DNA, 80 bp, synthetic construct
  misc_feature 1..80: note = Artificially Synthesized Probe
  source 1..80: mol_type = other DNA
tcgccgagctcctcctccttcctgaggcctcacgaggggcatctttctagaggatcgcggagctcctcctccttcctgag

SEQ ID NO: 124809 - DNA, 80 bp, synthetic construct
  misc_feature 1..80: note = Artificially Synthesized Probe
  source 1..80: mol_type = other DNA
gaggggcatctttctagaggatcgccgagctcctcctccttcctgaggcctcacgaggggcatctttctagaggatcgcg

SEQ ID NO: 124810 - DNA, 80 bp, synthetic construct; identical to SEQ ID NO: 40208
  misc_feature 1..80: note = Artificially Synthesized Probe
  source 1..80: mol_type = other DNA

SEQ ID NO: 124811 - DNA, 80 bp, synthetic construct
  misc_feature 1..80: note = Artificially Synthesized Probe
  source 1..80: mol_type = other DNA
ggatcgccgagctcctcctccttcctgaggcctcacgaggggcatctttctagaggatctccgagctcctcctccttcct

SEQ ID NO: 124812 - DNA, 80 bp, synthetic construct
  misc_feature 1..80: note = Artificially Synthesized Probe
  source 1..80: mol_type = other DNA
cctcacgagcatctttctagaggatggccgagctcctcctccttcctgaggcctcacgggcatctttctagaggatggcc

SEQ ID NO: 124813 - DNA, 80 bp, synthetic construct
  misc_feature 1..80: note = Artificially Synthesized Probe
  source 1..80: mol_type = other DNA
tcctcctccttgggttccttcctggagtcacggccccatgcgcctccccaagacggaaatctcccgtgctgtggtgacac

SEQ ID NO: 124814 - DNA, 80 bp, synthetic construct
  misc_feature 1..80: note = Artificially Synthesized Probe
  source 1..80: mol_type = other DNA
acaggtggaaattgtgttctgtggccttctcttcccaggggccgtcatcagtttgtttaaagatcttctgcctccactgt

SEQ ID NO: 124815 - DNA, 80 bp, synthetic construct; identical to SEQ ID NO: 40211
  misc_feature 1..80: note = Artificially Synthesized Probe
  source 1..80: mol_type = other DNA

SEQ ID NO: 124816 - DNA, 80 bp, synthetic construct
  misc_feature 1..80: note = Artificially Synthesized Probe
  source 1..80: mol_type = other DNA
agcacagaaagtatgtcgtgtctggatcatcaaaccataaattctgtgcactaataaaatttctgaagaagcgctgcggc

SEQ ID NO: 124817 - DNA, 80 bp, synthetic construct
  misc_feature 1..80: note = Artificially Synthesized Probe
  source 1..80: mol_type = other DNA
ctggctagtactggatttcaaaacgcgccccaggtcaggctgatctcagagaagcctccttacatttttaggagggtgct

SEQ ID NO: 124818 - DNA, 80 bp, synthetic construct
  misc_feature 1..80: note = Artificially Synthesized Probe
  source 1..80: mol_type = other DNA
gtgccatgtgaacacggcagtgatgagtttcctgggtgctgctggagaggcatgaacaagcgccacgtgaacacggcagt

SEQ ID NO: 124819 - DNA, 80 bp, synthetic construct
  misc_feature 1..80: note = Artificially Synthesized Probe
  source 1..80: mol_type = other DNA
catgtgaacacggcagtgatgagtttccagggtgctgctggaggggcatgagcaagcgccacgtgaacacggcagtgcta

SEQ ID NO: 124820 - DNA, 80 bp, synthetic construct; identical to SEQ ID NO: 40212
  misc_feature 1..80: note = Artificially Synthesized Probe
  source 1..80: mol_type = other DNA

SEQ ID NO: 124821 - DNA, 80 bp, synthetic construct
  misc_feature 1..80: note = Artificially Synthesized Probe
  source 1..80: mol_type = other DNA
tgtgcatttgctgagcaaaacctggagcccacacagaacttataagacacaatcatatgaaatttcagtcattgacaaat

SEQ ID NO: 124822 - DNA, 80 bp, synthetic construct
  misc_feature 1..80: note = Artificially Synthesized Probe
  source 1..80: mol_type = other DNA
gacacgatgacttcactttaatgtttatcatccactctttcaagtggctgagtacagcgtatgaggttgccaggggagaa

SEQ ID NO: 124823 - DNA, 80 bp, synthetic construct
  misc_feature 1..80: note = Artificially Synthesized Probe
  source 1..80: mol_type = other DNA
ggtaatatagtcagtaatggactaatcataaaattacgaatctgattatcctcagatgttaaacagagttgctagatatg

SEQ ID NO: 124824 - DNA, 80 bp, synthetic construct; identical to SEQ ID NO: 40213
  misc_feature 1..80: note = Artificially Synthesized Probe
  source 1..80: mol_type = other DNA

SEQ ID NO: 124825 - DNA, 80 bp, synthetic construct
  misc_feature 1..80: note = Artificially Synthesized Probe
  source 1..80: mol_type = other DNA
gtagttaatcagcttcaaagcaggcttaaagcaccatttgtggaaaatcacttccaactggagagattcgtgacgtccca

SEQ ID NO: 124826 - DNA, 80 bp, synthetic construct
  misc_feature 1..80: note = Artificially Synthesized Probe
  source 1..80: mol_type = other DNA
attctcaggtattcctggcttaactatttggggcagaagatggatgtcagacatacatgtctaaacaaaggagaaactga

SEQ ID NO: 124827 - DNA, 80 bp, synthetic construct; identical to SEQ ID NO: 40214
  misc_feature 1..80: note = Artificially Synthesized Probe
  source 1..80: mol_type = other DNA

SEQ ID NO: 124828 - DNA, 80 bp, synthetic construct
  misc_feature 1..80: note = Artificially Synthesized Probe
  source 1..80: mol_type = other DNA
atgttgagaatgaggagagaggggtcacacagggagcctcggagtctaaacacgaccttgccctggggcccgctctgagg

SEQ ID NO: 124829 - DNA, 80 bp, synthetic construct; identical to SEQ ID NO: 40061
  misc_feature 1..80: note = Artificially Synthesized Probe
  source 1..80: mol_type = other DNA

SEQ ID NO: 124830 - DNA, 80 bp, synthetic construct
  misc_feature 1..80: note = Artificially Synthesized Probe
  source 1..80: mol_type = other DNA
gctgcgtgttgagcaggaatgtccatcactgtgggtatgctgttgagagatccgtgatcacagcagcatgcgaggctgcg

SEQ ID NO: 124831 - DNA, 80 bp, synthetic construct
  misc_feature 1..80: note = Artificially Synthesized Probe
  source 1..80: mol_type = other DNA
tttgccttcttcttccccgcagtgtcatcctgtgaccaagagcaccagtctgccctggaggaagccaagcagcccaagaa

SEQ ID NO: 124832 - DNA, 80 bp, synthetic construct
  misc_feature 1..80: note = Artificially Synthesized Probe
  source 1..80: mol_type = other DNA
catgggaggctttggggtgtggaagccaggaaagcagaacccccacttcccccaacacacaccgacacacagtcacacac

SEQ ID NO: 124833 - DNA, 80 bp, synthetic construct; identical to SEQ ID NO: 40215
  misc_feature 1..80: note = Artificially Synthesized Probe
  source 1..80: mol_type = other DNA

SEQ ID NO: 124834 - DNA, 80 bp, synthetic construct
  misc_feature 1..80: note = Artificially Synthesized Probe
  source 1..80: mol_type = other DNA
cacacaatcataccccacacacccactgacactcacacacacactcatacccccacacacccactcacacacactcatac

SEQ ID NO: 124835 - DNA, 80 bp, synthetic construct
  misc_feature 1..80: note = Artificially Synthesized Probe
  source 1..80: mol_type = other DNA
acaaccactaatactctcacacactcatacccacactcatacaatcccccaaacacccccccacacacaaacatacccac

SEQ ID NO: 124836 - DNA, 80 bp, synthetic construct; identical to SEQ ID NO: 40216
  misc_feature 1..80: note = Artificially Synthesized Probe
  source 1..80: mol_type = other DNA

SEQ ID NO: 124837 - DNA, 80 bp, synthetic construct
  misc_feature 1..80: note = Artificially Synthesized Probe
  source 1..80: mol_type = other DNA
aagagtttgagaccagcctggacaatatagtgaaaccctgtcactagtaaaaatacaaaaaattagctgggcgtggtggt

SEQ ID NO: 124838 - DNA, 80 bp, synthetic construct
  misc_feature 1..80: note = Artificially Synthesized Probe
  source 1..80: mol_type = other DNA
aaaaaaaaaacagtagtttcaactgttggaaactggaggaaaccatttctttgatggcctccaaaagcacccgagtggca

SEQ ID NO: 124839 - DNA, 80 bp, synthetic construct
  misc_feature 1..80: note = Artificially Synthesized Probe
  source 1..80: mol_type = other DNA
ggaaagggagctcagcatttcataaagtgaaagaaccgattgtccaagatggctttttatggtattcacatatgtgtgcc

SEQ ID NO: 124840 - DNA, 80 bp, synthetic construct
  misc_feature 1..80: note = Artificially Synthesized Probe
  source 1..80: mol_type = other DNA
gcgcggccgccacgcccctctccagctctcccttccacggtcacctggagatggcagctcctctggaccgtccacgaggg

SEQ ID NO: 124841 - DNA, 80 bp, synthetic construct; identical to SEQ ID NO: 40217
  misc_feature 1..80: note = Artificially Synthesized Probe
  source 1..80: mol_type = other DNA

SEQ ID NO: 124842 - DNA, 80 bp, synthetic construct
  misc_feature 1..80: note = Artificially Synthesized Probe
  source 1..80: mol_type = other DNA
tttaatgcttaggcatgagcatttggacgcttcctaaactgttttccaaatttgtcaccaagtgtcaccagtagacattt

SEQ ID NO: 124843 - DNA, 80 bp, synthetic construct
  misc_feature 1..80: note = Artificially Synthesized Probe
  source 1..80: mol_type = other DNA
tggagcgtgagtgctgccccttcctggccagcgctccaccgtccggccgccctggctgaccgcctgctctcgacacccca

SEQ ID NO: 124844 - DNA, 80 bp, synthetic construct
  misc_feature 1..80: note = Artificially Synthesized Probe
  source 1..80: mol_type = other DNA
ctgtgcctaggtatagagggagtactgttttctaagaaaccgttcttggaagcaatgtttctgcgtatcttagagctctg

SEQ ID NO: 124845 - DNA, 80 bp, synthetic construct; identical to SEQ ID NO: 40218
  misc_feature 1..80: note = Artificially Synthesized Probe
  source 1..80: mol_type = other DNA

SEQ ID NO: 124846 - DNA, 80 bp, synthetic construct
  misc_feature 1..80: note = Artificially Synthesized Probe
  source 1..80: mol_type = other DNA
cagctcctttgattctgcatgtaattttacctttattattattcattcattcagcacaaatactgattatcaacaacatt

SEQ ID NO: 124847 - DNA, 80 bp, synthetic construct
  misc_feature 1..80: note = Artificially Synthesized Probe
  source 1..80: mol_type = other DNA
tctcactcgactctctggagacagggaagttctggatgatttcagcggttcaaagacataattgttataagtcgttggtg

SEQ ID NO: 124848 - DNA, 80 bp, synthetic construct
  misc_feature 1..80: note = Artificially Synthesized Probe
  source 1..80: mol_type = other DNA
gcggtggtttcccctcacactaattggccggaatatcactgaacgcccagacccagacctgccttggactggggagaaaa

SEQ ID NO: 124849 - DNA, 80 bp, synthetic construct; identical to SEQ ID NO: 40219
  misc_feature 1..80: note = Artificially Synthesized Probe
  source 1..80: mol_type = other DNA

SEQ ID NO: 124850 - DNA, 80 bp, synthetic construct
  misc_feature 1..80: note = Artificially Synthesized Probe
  source 1..80: mol_type = other DNA
aatctcatcttgaatggtaatttccataatccccacatgtcgtgggagggacctaccctgtgggaagtgattggatcatg

SEQ ID NO: 124851 - DNA, 80 bp, synthetic construct
  misc_feature 1..80: note = Artificially Synthesized Probe
  source 1..80: mol_type = other DNA
cccaccttcaacacaagcagtgcccgaggggctggctgactgcgatggactcagcgacaaacggcacccaccgaccctgc

SEQ ID NO: 124852 - DNA, 80 bp, synthetic construct
  misc_feature 1..80: note = Artificially Synthesized Probe
  source 1..80: mol_type = other DNA
tttcctgaggcctccccaaccatgccaaactgtgagtcaattaaaccttttttttttttttttttttttttagaaattac

SEQ ID NO: 124853 - DNA, 80 bp, synthetic construct
  misc_feature 1..80: note = Artificially Synthesized Probe
  source 1..80: mol_type = other DNA
gctgctgggacagtttagcagaggagtgatacaatctctcaacaatcctgaaaaacactcacatttattcatttaccttt

SEQ ID NO: 124854 - DNA, 80 bp, synthetic construct; identical to SEQ ID NO: 40220
  misc_feature 1..80: note = Artificially Synthesized Probe
  source 1..80: mol_type = other DNA

SEQ ID NO: 124855 - DNA, 80 bp, synthetic construct
  misc_feature 1..80: note = Artificially Synthesized Probe
  source 1..80: mol_type = other DNA
tggggtgtatcagttaggaagcttttggtttcatgtagtgagatgagaaactgatgaatgaatataaatgaccagagatg

SEQ ID NO: 124856 - DNA, 80 bp, synthetic construct
  misc_feature 1..80: note = Artificially Synthesized Probe
  source 1..80: mol_type = other DNA
ggctgcaacagatccggacatctcatccagatgccacagtgctcagaggacacaggagcccatctctttgtttctttgga

SEQ ID NO: 124857 - DNA, 80 bp, synthetic construct
  misc_feature 1..80: note = Artificially Synthesized Probe
  source 1..80: mol_type = other DNA
caccaggcaaaataatcaatattaggcagtatctgataagccacagccagcttcaccattcctcatctcccagtgattct

SEQ ID NO: 124858 - DNA, 80 bp, synthetic construct
  misc_feature 1..80: note = Artificially Synthesized Probe
  source 1..80: mol_type = other DNA
tcctctaaatttcctgatggggaagaaacatttaataatccagtaacagtaagaagctataaacataaattgcatcgtct

SEQ ID NO: 124859 - DNA, 80 bp, synthetic construct; identical to SEQ ID NO: 40221
  misc_feature 1..80: note = Artificially Synthesized Probe
  source 1..80: mol_type = other DNA

SEQ ID NO: 124860 - DNA, 80 bp, synthetic construct
  misc_feature 1..80: note = Artificially Synthesized Probe
  source 1..80: mol_type = other DNA
aggctgatggccagattctgcattcatgcccagaacagagaggctgatgaagcctttgtctgtctgccatccaactgctg

SEQ ID NO: 124861 - DNA, 80 bp, synthetic construct
  misc_feature 1..80: note = Artificially Synthesized Probe
  source 1..80: mol_type = other DNA
agagtaatcctcccagaacatgagccccgcgtcacgtccttccagccgtgcttgtgatcactgccggggtgggagcctgg

SEQ ID NO: 124862 - DNA, 80 bp, synthetic construct
  misc_feature 1..80: note = Artificially Synthesized Probe
  source 1..80: mol_type = other DNA
acctggtatctgatgggcaatgagagaagagacgtttgtgtttttccttatacaaataagttaaaataaacctattgaaa

SEQ ID NO: 124863 - DNA, 80 bp, synthetic construct; identical to SEQ ID NO: 40222
  misc_feature 1..80: note = Artificially Synthesized Probe
  source 1..80: mol_type = other DNA

SEQ ID NO: 124864 - DNA, 80 bp, synthetic construct
  misc_feature 1..80: note = Artificially Synthesized Probe
  source 1..80: mol_type = other DNA
tcctttttctaacactacagagcagtccagggctctaaggaggtgtgccctctgatactcggagaagcaagatggcccct

SEQ ID NO: 124865 - DNA, 80 bp, synthetic construct
  misc_feature 1..80: note = Artificially Synthesized Probe
  source 1..80: mol_type = other DNA
tgaagatcgttcagccctcagagtgccctagttctacaaatttaacacgcataagtaaaaataagagcttcctaatccct

SEQ ID NO: 124866 - DNA, 80 bp, synthetic construct
  misc_feature 1..80: note = Artificially Synthesized Probe
  source 1..80: mol_type = other DNA
attttcaaagaatatgagttaatggctttcagttagaatgtgatagcttaactgtttgccagagtgtgtcagagacttta

SEQ ID NO: 124867 - DNA, 80 bp, synthetic construct
  misc_feature 1..80: note = Artificially Synthesized Probe
  source 1..80: mol_type = other DNA
ctctctggggcctctgttagaacactttaaatatgtccctttagagagaaatttcattttattttctatggctgaaaagc

SEQ ID NO: 124868 - DNA, 80 bp, synthetic construct; identical to SEQ ID NO: 40223
  misc_feature 1..80: note = Artificially Synthesized Probe
  source 1..80: mol_type = other DNA

SEQ ID NO: 124869 - DNA, 80 bp, synthetic construct
  misc_feature 1..80: note = Artificially Synthesized Probe
  source 1..80: mol_type = other DNA
ttgccagggcctgaggaggccgccacgaaggattccacgtgcctgacactcatggatgggaggggcagggggctggggag

SEQ ID NO: 124870 - DNA, 80 bp, synthetic construct
  misc_feature 1..80: note = Artificially Synthesized Probe
  source 1..80: mol_type = other DNA
gtgagaagccccacttcttggtgaaagccacagtgaaggatttctgtgtgcggaagattgtcctccttgggggtgggggc

SEQ ID NO: 124871 - DNA, 80 bp, synthetic construct
  misc_feature 1..80: note = Artificially Synthesized Probe
  source 1..80: mol_type = other DNA
taaaacccaggcaaagcaggccttggtcaagggctgctgaatggcatgcatatggcagtgtttatgagctgtttaccgga

SEQ ID NO: 124872 - DNA, 80 bp, synthetic construct; identical to SEQ ID NO: 40224
  misc_feature 1..80: note = Artificially Synthesized Probe
  source 1..80: mol_type = other DNA

SEQ ID NO: 124873 - DNA, 80 bp, synthetic construct
  misc_feature 1..80: note = Artificially Synthesized Probe
  source 1..80: mol_type = other DNA
cctgttttgttctctcttccctcctctttctaatgagtctaatagaaacattccagttgtttcttttttcatggtggtat

SEQ ID NO: 124874 - DNA, 80 bp, synthetic construct
  misc_feature 1..80: note = Artificially Synthesized Probe
  source 1..80: mol_type = other DNA
aacgggaggagggggaggtgtgggcgctgctccatccaaccctgcaacgggaggagggggaggtgtgggtgcttggcagc

SEQ ID NO: 124875 - DNA, 80 bp, synthetic construct
  misc_feature 1..80: note = Artificially Synthesized Probe
  source 1..80: mol_type = other DNA
atcagagccacaggtcacggtgtatgctagggtaggacactccagaaatggaagacaaaccacagctggtctcaagcccg

SEQ ID NO: 124876 - DNA, 80 bp, synthetic construct
  misc_feature 1..80: note = Artificially Synthesized Probe
  source 1..80: mol_type = other DNA
gccccaccatgcagtttcttgcaaatttggaatgaaaaagactttatctgactctgtttcccagggggcctgtctgactc

SEQ ID NO: 124877 - DNA, 80 bp, synthetic construct; identical to SEQ ID NO: 40225
  misc_feature 1..80: note = Artificially Synthesized Probe
  source 1..80: mol_type = other DNA

SEQ ID NO: 124878 - DNA, 80 bp, synthetic construct
  misc_feature 1..80: note = Artificially Synthesized Probe
  source 1..80: mol_type = other DNA
gtcacaaaaagacgtcatggggtgaatttgatatatcattaagaagcttcaaagctacttgccatttgtttcattttgat

SEQ ID NO: 124879 - DNA, 80 bp, synthetic construct
  misc_feature 1..80: note = Artificially Synthesized Probe
  source 1..80: mol_type = other DNA
tgtttagagtacgtgcttgatcttgtctcatacagaaactggatgaattccggatgagtaaacttttgtgcttcctgtac

SEQ ID NO: 124880 - DNA, 80 bp, synthetic construct
  misc_feature 1..80: note = Artificially Synthesized Probe
  source 1..80: mol_type = other DNA
tcatagcgattccacaacatgagtaacgagaatggttgacacagggaagcagagggcggaatgtggttccggggacacac

SEQ ID NO: 124881 - DNA, 80 bp, synthetic construct
  misc_feature 1..80: note = Artificially Synthesized Probe
  source 1..80: mol_type = other DNA
caaatgacttgtagattagaaactgctaactggggctccaaggaggttttcacacactcaggctttccctgaagatcctt

SEQ ID NO: 124882 - DNA, 80 bp, synthetic construct; identical to SEQ ID NO: 40226
  misc_feature 1..80: note = Artificially Synthesized Probe
  source 1..80: mol_type = other DNA

SEQ ID NO: 124883 - DNA, 80 bp, synthetic construct
  misc_feature 1..80: note = Artificially Synthesized Probe
  source 1..80: mol_type = other DNA
tcctccattatctggtgtcatctcttgtctctgaagtccgattttaatattggtgggcaagatgtttccttaaaagacat

SEQ ID NO: 124884 - DNA, 80 bp, synthetic construct
  misc_feature 1..80: note = Artificially Synthesized Probe
  source 1..80: mol_type = other DNA
caaagttgcatcacttctaagccaagctgcactgtggtcttcacacaggtgatacgagtgcaatttatggaagtcagttt

SEQ ID NO: 124885 - DNA, 80 bp, synthetic construct; identical to SEQ ID NO: 40062
  misc_feature 1..80: note = Artificially Synthesized Probe
  source 1..80: mol_type = other DNA

SEQ ID NO: 124886 - DNA, 80 bp, synthetic construct; identical to SEQ ID NO: 40227
  misc_feature 1..80: note = Artificially Synthesized Probe
  source 1..80: mol_type = other DNA

SEQ ID NO: 124887 - DNA, 80 bp, synthetic construct
  misc_feature 1..80: note = Artificially Synthesized Probe
  source 1..80: mol_type = other DNA
aaggtcagcttgtgctgttgccatagatgtttgggagtgcactgttcatgaccacttaattattttgattatttggagat

SEQ ID NO: 124888 - DNA, 80 bp, synthetic construct
  misc_feature 1..80: note = Artificially Synthesized Probe
  source 1..80: mol_type = other DNA
cttcaggtcccatgcaggctgatgtattttattcttaaaaggtaccgtttccttttgaagttgcttttctaaggttttgc

SEQ ID NO: 124889 - DNA, 80 bp, synthetic construct
  misc_feature 1..80: note = Artificially Synthesized Probe
  source 1..80: mol_type = other DNA
gcaggtgtttggcagcaaacgatcattgagtctttggaggccatcattttattatatggcacaagagatctaggtctggc

SEQ ID NO: 124890 - DNA, 80 bp, synthetic construct; identical to SEQ ID NO: 40228
  misc_feature 1..80: note = Artificially Synthesized Probe
  source 1..80: mol_type = other DNA

SEQ ID NO: 124891 - DNA, 80 bp, synthetic construct
  misc_feature 1..80: note = Artificially Synthesized Probe
  source 1..80: mol_type = other DNA
tcctcatgtgaggctggagaaccaggcacttgcattgagctgtggctcctgtgtcggggccgtggtgtgtctgttgggcc

SEQ ID NO: 124892 - DNA, 80 bp, synthetic construct
  misc_feature 1..80: note = Artificially Synthesized Probe
  source 1..80: mol_type = other DNA
tgtcgggcctggccgtggctcccatgtctggccctgctctggttctcatgtccgggacccaccgtggctcccgtgtcggg

SEQ ID NO: 124893 - DNA, 80 bp, synthetic construct
  misc_feature 1..80: note = Artificially Synthesized Probe
  source 1..80: mol_type = other DNA
ccatgtctggccctgctctggttcccatgtccgggacccaccgtggctcccgtgtcgggcctggctgtggctcccatgtc

SEQ ID NO: 124894 - DNA, 80 bp, synthetic construct
  misc_feature 1..80: note = Artificially Synthesized Probe
  source 1..80: mol_type = other DNA
tctgcttgagctgcatctctcttagctcctgtgcctcccacacatccttcaggacggcttcctcaggatgcccaggcggc

SEQ ID NO: 124895 - DNA, 80 bp, synthetic construct
  misc_feature 1..80: note = Artificially Synthesized Probe
  source 1..80: mol_type = other DNA
tctcaccctgcccctccgggggcatcgtgctgcctgccctgggggtcctgggagggagacggtctcaccctgcccctctg

SEQ ID NO: 124896 - DNA, 80 bp, synthetic construct; identical to SEQ ID NO: 40229
  misc_feature 1..80: note = Artificially Synthesized Probe
  source 1..80: mol_type = other DNA

SEQ ID NO: 124897 - DNA, 80 bp, synthetic construct
  misc_feature 1..80: note = Artificially Synthesized Probe
  source 1..80: mol_type = other DNA
aggggagagggtgaccccagcctttactcaaacagcagcgctgggttcgtgatctccatcaggggagagggtgaccccaa

SEQ ID NO: 124898 - DNA, 80 bp, synthetic construct
  misc_feature 1..80: note = Artificially Synthesized Probe
  source 1..80: mol_type = other DNA
gggagagggtgaccccagcctttactcaaacagcagcgctgggttcgtgatctccatcaggggagagggtgaccccagcc

SEQ ID NO: 124899 - DNA, 80 bp, synthetic construct
  misc_feature 1..80: note = Artificially Synthesized Probe
  source 1..80: mol_type = other DNA
aagaggccatcggcacaaccttgtcagagaggagatgcaggcgaaagacagaggtgcagggagatgcacctgtccagagc

SEQ ID NO: 124900 - DNA, 80 bp, synthetic construct; identical to SEQ ID NO: 40230
  misc_feature 1..80: note = Artificially Synthesized Probe
  source 1..80: mol_type = other DNA

SEQ ID NO: 124901 - DNA, 80 bp, synthetic construct
  misc_feature 1..80: note = Artificially Synthesized Probe
  source 1..80: mol_type = other DNA
aggtgcaggggaagtctgacgtatcctgtgagccattccttcctccaccagctcaggtgaaaacagcactgtctttctgt

SEQ ID NO: 124902 - DNA, 80 bp, synthetic construct
  misc_feature 1..80: note = Artificially Synthesized Probe
  source 1..80: mol_type = other DNA
acagtctaagaaatggtctttattttggtcaaacagcctctcacccaagtgtttctggaagctctatggacccagcagac

SEQ ID NO: 124903 - DNA, 80 bp, synthetic construct
  misc_feature 1..80: note = Artificially Synthesized Probe
  source 1..80: mol_type = other DNA
cctcttcacacctacagccagcacagggggcctcttcacacctacagccagcacagggcctcttcacacctacagccagc

SEQ ID NO: 124904 - DNA, 80 bp, synthetic construct
  misc_feature 1..80: note = Artificially Synthesized Probe
  source 1..80: mol_type = other DNA
tacagccagcacagggggcctcttcacacctacagccagcacagggcctcttcacacctacagccagcacagggggcctc

SEQ ID NO: 124905 - DNA, 80 bp, synthetic construct
  misc_feature 1..80: note = Artificially Synthesized Probe
  source 1..80: mol_type = other DNA
cagcacagagcctcttcacacctacagccagcacatggagcctcttcacacctacagccagcacagggcctctttatacc

SEQ ID NO: 124906 - DNA, 80 bp, synthetic construct
  misc_feature 1..80: note = Artificially Synthesized Probe
  source 1..80: mol_type = other DNA
ctgagtctcagtctttcatgctgtaaaatgggaagtgcagcctctttggagtgcagtattttgagttgtgtgtgatgttg

SEQ ID NO: 124907 - DNA, 80 bp, synthetic construct
  misc_feature 1..80: note = Artificially Synthesized Probe
  source 1..80: mol_type = other DNA
ttcacacctacagccagcacatggagcctcttcacacctacagccagcacagggcctcttcacacctacagccagcacag

SEQ ID NO: 124908 - DNA, 80 bp, synthetic construct; identical to SEQ ID NO: 40231
  misc_feature 1..80: note = Artificially Synthesized Probe
  source 1..80: mol_type = other DNA

SEQ ID NO: 124909 - DNA, 80 bp, synthetic construct
  misc_feature 1..80: note = Artificially Synthesized Probe
  source 1..80: mol_type = other DNA
ggggcctcttcacacctacagccagcacagtacctcttcacacctacagccagcacagggcctcttcacacctacagcca

SEQ ID NO: 124910 - DNA, 80 bp, synthetic construct
  misc_feature 1..80: note = Artificially Synthesized Probe
  source 1..80: mol_type = other DNA
cacctacagccagcacagggcctcttcacacctacagccagcacagggcctctttatacctacagccagcacggggcctc

SEQ ID NO: 124911 - DNA, 80 bp, synthetic construct
  misc_feature 1..80: note = Artificially Synthesized Probe
  source 1..80: mol_type = other DNA
acagggcctcttcacacctacagccagcacagggggcctcttcacacctacagccagcacagggcctcttcacacctaca

SEQ ID NO: 124912 - DNA, 80 bp, synthetic construct
  misc_feature 1..80: note = Artificially Synthesized Probe
  source 1..80: mol_type = other DNA
cctcttcatacctacagccagcacagggggcctcttcacacctacagccagcacagggcctcttcacacctacagccagc

SEQ ID NO: 124913 - DNA, 80 bp, synthetic construct; identical to SEQ ID NO: 40233
  misc_feature 1..80: note = Artificially Synthesized Probe
  source 1..80: mol_type = other DNA

SEQ ID NO: 124914 - DNA, 80 bp, synthetic construct
  misc_feature 1..80: note = Artificially Synthesized Probe
  source 1..80: mol_type = other DNA
acgaggtgtcaatattctgcccactaaaaatgtctacttctgtgatccctgctgtcatatcaaagactgaatttacagac

SEQ ID NO: 124915 - DNA, 80 bp, synthetic construct
  misc_feature 1..80: note = Artificially Synthesized Probe
  source 1..80: mol_type = other DNA
tccatgacccatgaggctgggacaaggactgggtgttgaggaggctgggatgcgaggctgtctgtgagagaggattttta

SEQ ID NO: 124916 - DNA, 80 bp, synthetic construct; identical to SEQ ID NO: 40234
  misc_feature 1..80: note = Artificially Synthesized Probe
  source 1..80: mol_type = other DNA

SEQ ID NO: 124917 - DNA, 80 bp, synthetic construct
  misc_feature 1..80: note = Artificially Synthesized Probe
  source 1..80: mol_type = other DNA
gccctccagttgtgtttgtgccatgttgctgtgtgcctcacacccccagctctccttctaggaacactttctgcaccctg

SEQ ID NO: 124918 - DNA, 80 bp, synthetic construct
  misc_feature 1..80: note = Artificially Synthesized Probe
  source 1..80: mol_type = other DNA
agcagggacaaggggtgccgaggagtcaagcggttgggaaaaggtggttttcaagaaccggtgtctgtggagcatcccga

SEQ ID NO: 124919 - DNA, 80 bp, synthetic construct
  misc_feature 1..80: note = Artificially Synthesized Probe
  source 1..80: mol_type = other DNA
agatgagaactaagaaggagcgatatggctactcttgcagcaaggccagcagaattctcagtgggattttattacaatat

SEQ ID NO: 124920 - DNA, 80 bp, synthetic construct
  misc_feature 1..80: note = Artificially Synthesized Probe
  source 1..80: mol_type = other DNA
aaaggcgttttattttcctcaacatgtagaggaaagactaacaaatgtctaattatgtacaggagggtgctgggcgcttt

SEQ ID NO: 124921 - DNA, 80 bp, synthetic construct; identical to SEQ ID NO: 40235
  misc_feature 1..80: note = Artificially Synthesized Probe
  source 1..80: mol_type = other DNA

SEQ ID NO: 124922 - DNA, 80 bp, synthetic construct
  misc_feature 1..80: note = Artificially Synthesized Probe
  source 1..80: mol_type = other DNA
ctggcctgtattgcttcccatcatcagggtctcctggctccagattaaatgtgaactgcttgttgtgaccgatggggccc

SEQ ID NO: 124923 - DNA, 80 bp, synthetic construct
  misc_feature 1..80: note = Artificially Synthesized Probe
  source 1..80: mol_type = other DNA
gagaggcatgctgacatggattgccaggtttatggggtctgccagggataaaataatctgagatttttaacccacccatt

SEQ ID NO: 124924 - DNA, 80 bp, synthetic construct
  misc_feature 1..80: note = Artificially Synthesized Probe
  source 1..80: mol_type = other DNA
attgctgtgctatcaccacgatgaaataattaatttttaaacgcgaggcctccgtgctccattttgcactgagccctaca

SEQ ID NO: 124925 - DNA, 80 bp, synthetic construct
  misc_feature 1..80: note = Artificially Synthesized Probe
  source 1..80: mol_type = other DNA
agtggaggaaaggcgggtagtggcattaggagagtggaggagaggcgggtagtggcattaggagagtggaggagaggcgg

SEQ ID NO: 124926 - DNA, 80 bp, synthetic construct; identical to SEQ ID NO: 40236
  misc_feature 1..80: note = Artificially Synthesized Probe
  source 1..80: mol_type = other DNA

SEQ ID NO: 124927 - DNA, 80 bp, synthetic construct
  misc_feature 1..80: note = Artificially Synthesized Probe
  source 1..80: mol_type = other DNA
tcagtcactactccacagactccactaaactgggaaccaatttctgaaattatgggctgcattttatttgtttattcaat

SEQ ID NO: 124928 - DNA, 80 bp, synthetic construct
  misc_feature 1..80: note = Artificially Synthesized Probe
  source 1..80: mol_type = other DNA
gttgagttattttagaagcaatgtggcttgtttttgtttatggtttcctttagagccagatttttaaagataaagtgcca

SEQ ID NO: 124929 - DNA, 80 bp, synthetic construct; identical to SEQ ID NO: 40063
  misc_feature 1..80: note = Artificially Synthesized Probe
  source 1..80: mol_type = other DNA

SEQ ID NO: 124930 - DNA, 80 bp, synthetic construct
  misc_feature 1..80: note = Artificially Synthesized Probe
  source 1..80: mol_type = other DNA
caaattaatagtgtaagcaatatttcagagacaatttaaataacttgagaacaaactggtctccaacactatcaaatata

SEQ ID NO: 124931 - DNA, 80 bp, synthetic construct; identical to SEQ ID NO: 40237
  misc_feature 1..80: note = Artificially Synthesized Probe
  source 1..80: mol_type = other DNA

SEQ ID NO: 124932 - DNA, 80 bp, synthetic construct
  misc_feature 1..80: note = Artificially Synthesized Probe
  source 1..80: mol_type = other DNA
cttgtgtagccagtgcctgccatggttagaaagcccacagcttcagtttacacgctctgtgtcttgtggcccttttactc

SEQ ID NO: 124933 - DNA, 80 bp, synthetic construct
  misc_feature 1..80: note = Artificially Synthesized Probe
  source 1..80: mol_type = other DNA
acctgcgtgtaatatttgcctgtggtctctcccctccaccaaaccaagcaattcagatgccttgagcgttctttagctat

SEQ ID NO: 124934 - DNA, 80 bp, synthetic construct; identical to SEQ ID NO: 40238
  misc_feature 1..80: note = Artificially Synthesized Probe
  source 1..80: mol_type = other DNA

SEQ ID NO: 124935 - DNA, 80 bp, synthetic construct
  misc_feature 1..80: note = Artificially Synthesized Probe
  source 1..80: mol_type = other DNA
aaaaatattatggtagaattcttgtaaactcttttccagacttgtaccaatgtcaagaacatttcaccctcaccctagat

SEQ ID NO: 124936 - DNA, 80 bp, synthetic construct
  misc_feature 1..80: note = Artificially Synthesized Probe
  source 1..80: mol_type = other DNA
gggaaaatccaattatccaggttggatattggccagagcactgcggttattacttctagaataaaggcaagactaataga

SEQ ID NO: 124937 - DNA, 80 bp, synthetic construct
  misc_feature 1..80: note = Artificially Synthesized Probe
  source 1..80: mol_type = other DNA
ctggcttgtgatgaataaccacaggctatggaaacccctaggatgttttctcagacagcatgatttactttttttcttag

SEQ ID NO: 124938 - DNA, 80 bp, synthetic construct; identical to SEQ ID NO: 40239
  misc_feature 1..80: note = Artificially Synthesized Probe
  source 1..80: mol_type = other DNA

SEQ ID NO: 124939 - DNA, 80 bp, synthetic construct
  misc_feature 1..80: note = Artificially Synthesized Probe
  source 1..80: mol_type = other DNA
gctctttaaaaatgtatttgaagtccatgttttatttacaattttgctctgttaagtagtaacccgcttgtactagtttg

SEQ ID NO: 124940 - DNA, 80 bp, synthetic construct
  misc_feature 1..80: note = Artificially Synthesized Probe
  source 1..80: mol_type = other DNA
tgacaggagcgatgtcatcagtgcaagttctgtcaacccgaggctcaaagccggggcgtgggcctcgtgctgtgcaagcg

SEQ ID NO: 124941 - DNA, 80 bp, synthetic construct
  misc_feature 1..80: note = Artificially Synthesized Probe
  source 1..80: mol_type = other DNA
agaaggggaagtgccagatgtttataaaaccatcagatctcacgatctcacgcggactcactcgctatctggagaacagc

SEQ ID NO: 124942 - DNA, 80 bp, synthetic construct
  misc_feature 1..80: note = Artificially Synthesized Probe
  source 1..80: mol_type = other DNA
aaggcagcagaatagcattgttgtctttggaatttctctaatggattaatcttctttttttttttcttgagatggagtct

SEQ ID NO: 124943 - DNA, 80 bp, synthetic construct
  misc_feature 1..80: note = Artificially Synthesized Probe
  source 1..80: mol_type = other DNA
cggggtttcaccgtgttagccaggatggtctcgatctcctgacctcctgatccacccgcctcggcctcccaaagtgctgg

SEQ ID NO: 124944 - DNA, 80 bp, synthetic construct; identical to SEQ ID NO: 40240
  misc_feature 1..80: note = Artificially Synthesized Probe
  source 1..80: mol_type = other DNA

SEQ ID NO: 124945 - DNA, 80 bp, synthetic construct
  misc_feature 1..80: note = Artificially Synthesized Probe
  source 1..80: mol_type = other DNA
gtcaagaaagtgacaagagcagggctgcctgtcttgtcttcccactgctatttccaagccctttccaccctgagatgcca

SEQ ID NO: 124946 - DNA, 80 bp, synthetic construct
  misc_feature 1..80: note = Artificially Synthesized Probe
  source 1..80: mol_type = other DNA
catgcccacatttctccaaggagaggacaatctgtagaaagccggatgtactcgggctgagtgtgggattgaacttccga

SEQ ID NO: 124947 - DNA, 80 bp, synthetic construct; identical to SEQ ID NO: 40241
  misc_feature 1..80: note = Artificially Synthesized Probe
  source 1..80: mol_type = other DNA

SEQ ID NO: 124948 - DNA, 80 bp, synthetic construct
  misc_feature 1..80: note = Artificially Synthesized Probe
  source 1..80: mol_type = other DNA
agtcttgctctgtgacccaggctggagttcagtgacatgatctttgctcactgcaaccttcccgggttcaagcaattctc

SEQ ID NO: 124949 - DNA, 80 bp, synthetic construct
  misc_feature 1..80: note = Artificially Synthesized Probe
  source 1..80: mol_type = other DNA
aaagtgctgggattacaggcgtgagccaccacacctggccaataattattttttttatttttaatgaatctgggtgcagt

SEQ ID NO: 124950 - DNA, 80 bp, synthetic construct
  misc_feature 1..80: note = Artificially Synthesized Probe
  source 1..80: mol_type = other DNA
aagactggggcagccagagtggctgatgcgtgctgaggcctgggctgtcggtgcagtggctgtggggatggcagaggaag

SEQ ID NO: 124951 - DNA, 80 bp, synthetic construct
  misc_feature 1..80: note = Artificially Synthesized Probe
  source 1..80: mol_type = other DNA
ttccttcggtcatgcctgggttgatcccagtgagttgatgaaacaggatcctggcaccctcacatgtgaaaatgaagcag

SEQ ID NO: 124952 - DNA, 80 bp, synthetic construct
  misc_feature 1..80: note = Artificially Synthesized Probe
  source 1..80: mol_type = other DNA
ccaaatggagacagtaacagggtcaacaaccaccaccacaacattcaaaatggcaaatatttactgagaacttagacggt

SEQ ID NO: 124953 - DNA, 80 bp, synthetic construct; identical to SEQ ID NO: 40242
  misc_feature 1..80: note = Artificially Synthesized Probe
  source 1..80: mol_type = other DNA

SEQ ID NO: 124954 - DNA, 80 bp, synthetic construct
  misc_feature 1..80: note = Artificially Synthesized Probe
  source 1..80: mol_type = other DNA
acactgacatacagaaacacacacacagatacacagacacagatgtgcacagacacacagagacacagacacagacaaca

SEQ ID NO: 124955 - DNA, 80 bp, synthetic construct
  misc_feature 1..80: note = Artificially Synthesized Probe
  source 1..80: mol_type = other DNA
gacacatgcacacagacacacattgacatacagaaacacacagacacaggcacacagacacacacacattcacagaaaca

SEQ ID NO: 124956 - DNA, 80 bp, synthetic construct
  misc_feature 1..80: note = Artificially Synthesized Probe
  source 1..80: mol_type = other DNA
gaacagagtgatgtggaccccgaccctgccccctggacactgtgaagcgccgcccccgcccttcctcccaggggctcctg

SEQ ID NO: 124957 - DNA, 80 bp, synthetic construct; identical to SEQ ID NO: 40243
  misc_feature 1..80: note = Artificially Synthesized Probe
  source 1..80: mol_type = other DNA

SEQ ID NO: 124958 - DNA, 80 bp, synthetic construct
  misc_feature 1..80: note = Artificially Synthesized Probe
  source 1..80: mol_type = other DNA
gcttttggtggttttctttctcacttgttctttctttattaaaactaaatagcataggctcaaatccagggagcaaacac

SEQ ID NO: 124959 - DNA, 80 bp, synthetic construct
  misc_feature 1..80: note = Artificially Synthesized Probe
  source 1..80: mol_type = other DNA
ccctgggccccaggagcaaatgaaagcaaatgcgcctgtccacacccagacctgcttcttccctttgcaagggcagggca

SEQ ID NO: 124960 - DNA, 80 bp, synthetic construct
  misc_feature 1..80: note = Artificially Synthesized Probe
  source 1..80: mol_type = other DNA
aggagtgaaggtcttgacctggctcccctattctgcagtgagcaaggcaatggttaagacgagagctgcctttctaagaa

SEQ ID NO: 124961 - DNA, 80 bp, synthetic construct; identical to SEQ ID NO: 40244
  misc_feature 1..80: note = Artificially Synthesized Probe
  source 1..80: mol_type = other DNA

SEQ ID NO: 124962 - DNA, 80 bp, synthetic construct
  misc_feature 1..80: note = Artificially Synthesized Probe
  source 1..80: mol_type = other DNA
gagccctggggtgggtgagccctggggtgggtgagccagggtgggtgagcactggagtgggtgggccttgtggtgggtga

SEQ ID NO: 124963 - DNA, 80 bp, synthetic construct
  misc_feature 1..80: note = Artificially Synthesized Probe
  source 1..80: mol_type = other DNA
agctcggattacttgaggtcgtccagagaaggggagacagctgcatttttctctatgttttatgaagaaatcagaatcca

SEQ ID NO: 124964 - DNA, 80 bp, synthetic construct
  misc_feature 1..80: note = Artificially Synthesized Probe
  source 1..80: mol_type = other DNA
caaaaggcaatgggctctactctctgattatcacccaaaggaagggctataggtcactctaaagccaaacatcatttagc

SEQ ID NO: 124965 - DNA, 80 bp, synthetic construct
  misc_feature 1..80: note = Artificially Synthesized Probe
  source 1..80: mol_type = other DNA
taggtaacggctgaaggagatgttgggctacacctgcttgaattgtttgtaggctgaaaatgtggtgatagagacccggg

SEQ ID NO: 124966 - DNA, 80 bp, synthetic construct; identical to SEQ ID NO: 40245
  misc_feature 1..80: note = Artificially Synthesized Probe
  source 1..80: mol_type = other DNA

SEQ ID NO: 124967 - DNA, 80 bp, synthetic construct
  misc_feature 1..80: note = Artificially Synthesized Probe
  source 1..80: mol_type = other DNA
cctttggaaagtgtgatattgtttgttgagatttaggtgagtgcactgttagctgttatgttagaggcacagggaagatt

SEQ ID NO: 124968 - DNA, 80 bp, synthetic construct
  misc_feature 1..80: note = Artificially Synthesized Probe
  source 1..80: mol_type = other DNA
caactgagaactacaaaatccagtgactctggtagttgctcaatgtgatccaattcaaacaagaaatcaattataaactt

SEQ ID NO: 124969 - DNA, 80 bp, synthetic construct; identical to SEQ ID NO: 40246
  misc_feature 1..80: note = Artificially Synthesized Probe
  source 1..80: mol_type = other DNA

SEQ ID NO: 124970 - DNA, 80 bp, synthetic construct
  misc_feature 1..80: note = Artificially Synthesized Probe
  source 1..80: mol_type = other DNA
ccgttgaaccctggactaacgccactcttgccatccatccttgtcaaggaggcatgtttcacaaccaccttcctcacccc

SEQ ID NO: 124971 - DNA, 80 bp, synthetic construct
  misc_feature 1..80: note = Artificially Synthesized Probe
  source 1..80: mol_type = other DNA
gcctcgtcgagacatacactttcttgaaaacaaaacagtaacatcccgttgtcctctgtgtggctacctcccaaataaaa

SEQ ID NO: 124972 - DNA, 80 bp, synthetic construct
  misc_feature 1..80: note = Artificially Synthesized Probe
  source 1..80: mol_type = other DNA
gccaggtctccggacactctgtagtagatactaaacacagcttccacattaggaaacaggagtatgtaatttggagaaat

SEQ ID NO: 124973 - DNA, 80 bp, synthetic construct; identical to SEQ ID NO: 40247
  misc_feature 1..80: note = Artificially Synthesized Probe
  source 1..80: mol_type = other DNA

SEQ ID NO: 124974 - DNA, 80 bp, synthetic construct; identical to SEQ ID NO: 40064
  misc_feature 1..80: note = Artificially Synthesized Probe
  source 1..80: mol_type = other DNA

SEQ ID NO: 124975 - DNA, 80 bp, synthetic construct
  misc_feature 1..80: note = Artificially Synthesized Probe
  source 1..80: mol_type = other DNA
gggtggagggcagtccggtccctgagagggaagggcagggggcccgggacatgggctgcgcaggggttccaccctccgcg

SEQ ID NO: 124976 - DNA, 80 bp, synthetic construct
  misc_feature 1..80: note = Artificially Synthesized Probe
  source 1..80: mol_type = other DNA
tttgtgcacacaatgtgtgacaccactggttctccagaaggagccaccacactgttgttccctcactcaagctgcaaggt

SEQ ID NO: 124977 - DNA, 80 bp, synthetic construct; identical to SEQ ID NO: 40046
  misc_feature 1..80: note = Artificially Synthesized Probe
  source 1..80: mol_type = other DNA

SEQ ID NO: 124978 - DNA, 80 bp, synthetic construct
  misc_feature 1..80: note = Artificially Synthesized Probe
  source 1..80: mol_type = other DNA
ctgctggctgtcaaaggctccaggtcccaggcagggcacctgtcgccacaggacaggctgattgggtgccgggctgcctg

SEQ ID NO: 124979 - DNA, 80 bp, synthetic construct
  misc_feature 1..80: note = Artificially Synthesized Probe
  source 1..80: mol_type = other DNA
gtacagcctggggaagctgagagtcatcaaggaatgaaatggactgttcaggcctttaattaagcagatgtggactgagt

SEQ ID NO: 124980 - DNA, 80 bp, synthetic construct; identical to SEQ ID NO: 40248
  misc_feature 1..80: note = Artificially Synthesized Probe
  source 1..80: mol_type = other DNA

SEQ ID NO: 124981 - DNA, 80 bp, synthetic construct
  misc_feature 1..80: note = Artificially Synthesized Probe
  source 1..80: mol_type = other DNA
ccacaccaatgctctccctccgtggccacttcttgttaaagatgtgtgaggtagaaagaagacaggccctcttagcttga

SEQ ID NO: 124982 - DNA, 80 bp, synthetic construct
  misc_feature 1..80: note = Artificially Synthesized Probe
  source 1..80: mol_type = other DNA
cctgtctttcctgcaatctctaaacataagttgtgaagatttcatggacacttttcacttccccaagcaatactcttgtg

SEQ ID NO: 124983 - DNA, 80 bp, synthetic construct
  misc_feature 1..80: note = Artificially Synthesized Probe
  source 1..80: mol_type = other DNA
acagcaatgttcagggaacaagagagatcaccttaaattctgactgccggtgagccgggtggaacagagccatatttctc

SEQ ID NO: 124984 - DNA, 80 bp, synthetic construct; identical to SEQ ID NO: 40249
  misc_feature 1..80: note = Artificially Synthesized Probe
  source 1..80: mol_type = other DNA

SEQ ID NO: 124985 - DNA, 80 bp, synthetic construct
  misc_feature 1..80: note = Artificially Synthesized Probe
  source 1..80: mol_type = other DNA
acctattcgcacactccctccccttttgaaaatccctaataaaaacttgctggtttttgtggcttgtggggcatcacgga

SEQ ID NO: 124986 - DNA, 80 bp, synthetic construct
  misc_feature 1..80: note = Artificially Synthesized Probe
  source 1..80: mol_type = other DNA
actcacatcacaattagcacacttaagacctatgtatttaaatgacctcaaaactcctcaaatgaaatcccctagacccc

SEQ ID NO: 124987 - DNA, 80 bp, synthetic construct
  misc_feature 1..80: note = Artificially Synthesized Probe
  source 1..80: mol_type = other DNA
aggccttggagcatcagagatgacccctcaaagcatttggcagtgtgctgggtttgaagtaggtacacactgggtgcaag

SEQ ID NO: 124988 - DNA, 80 bp, synthetic construct
  misc_feature 1..80: note = Artificially Synthesized Probe
  source 1..80: mol_type = other DNA
aaaacttaaggattggcaactaataaaactaacagtacgtgcttgggaaaagcttttcttgaaggaatgcagacattggt

SEQ ID NO: 124989 - DNA, 80 bp, synthetic construct; identical to SEQ ID NO: 40250
  misc_feature 1..80: note = Artificially Synthesized Probe
  source 1..80: mol_type = other DNA

SEQ ID NO: 124990 - DNA, 80 bp, synthetic construct
  misc_feature 1..80: note = Artificially Synthesized Probe
  source 1..80: mol_type = other DNA
ctccgttcccctcactcagcatttccagacctgatgctttgtgaatataaaattgcataataattcccaaatcttacaaa

SEQ ID NO: 124991 - DNA, 80 bp, synthetic construct
  misc_feature 1..80: note = Artificially Synthesized Probe
  source 1..80: mol_type = other DNA
tcactttggccatacgcaattatagaacaagtcatcagaacatagtcgtgccaagaatcaacaactttgctatctttgac

SEQ ID NO: 124992 - DNA, 80 bp, synthetic construct; identical to SEQ ID NO: 40251
  misc_feature 1..80: note = Artificially Synthesized Probe
  source 1..80: mol_type = other DNA

SEQ ID NO: 124993 - DNA, 80 bp, synthetic construct
  misc_feature 1..80: note = Artificially Synthesized Probe
  source 1..80: mol_type = other DNA
aaaggagcaggctaaggacagaattctgtggctcgtcctcagaagctcccagagactgtcatcagcccatccttttgatg

SEQ ID NO: 124994 - DNA, 80 bp, synthetic construct
  misc_feature 1..80: note = Artificially Synthesized Probe
  source 1..80: mol_type = other DNA
aagccccagctgtctctccagcttcaagccacaggagttcactctctgtcaagtgttgatgagaaaccaggtaaacccaa

SEQ ID NO: 124995 - DNA, 80 bp, synthetic construct
  misc_feature 1..80: note = Artificially Synthesized Probe
  source 1..80: mol_type = other DNA
aaaatgttttgctatttgaaagcttcagaaactgtatcagacatgccccacctcccagaggtcctgatctgcatttcccc

SEQ ID NO: 124996 - DNA, 80 bp, synthetic construct
  misc_feature 1..80: note = Artificially Synthesized Probe
  source 1..80: mol_type = other DNA
cggctttgccacatggactccagagctgcaaggaaataggcccttggctctcatgcacaaagatttgaactattgtaaag

SEQ ID NO: 124997 - DNA, 80 bp, synthetic construct
  misc_feature 1..80: note = Artificially Synthesized Probe
  source 1..80: mol_type = other DNA
tcctcacatgactttcttagaacattgctataatgaggacataaaacattttacgtctgtcttacttaataatatttagg

SEQ ID NO: 124998 - DNA, 80 bp, synthetic construct; identical to SEQ ID NO: 40252
  misc_feature 1..80: note = Artificially Synthesized Probe
  source 1..80: mol_type = other DNA

SEQ ID NO: 124999 - DNA, 80 bp, synthetic construct
  misc_feature 1..80: note = Artificially Synthesized Probe
  source 1..80: mol_type = other DNA
gctcttctcatgatagtgagtgagttctcaagagatctggtggttttataaggggatattcccccttcactttgaacttc

SEQ ID NO: 125000 - DNA, 80 bp, synthetic construct
  misc_feature 1..80: note = Artificially Synthesized Probe
  source 1..80: mol_type = other DNA
gaacggactaatacacacaggctttgcagtctggctaggggatttctagagcctgtagtctatcattgaactggctactt

SEQ ID NO: 125001 - DNA, 80 bp, synthetic construct
  misc_feature 1..80: note = Artificially Synthesized Probe
  source 1..80: mol_type = other DNA
tgcatgcgataattgtgcatcaagggttggctgtaattaaaatgagcatatttataaccttcttatggggatattctccc

SEQ ID NO: 125002 - DNA, 80 bp, synthetic construct; identical to SEQ ID NO: 40253
  misc_feature 1..80: note = Artificially Synthesized Probe
  source 1..80: mol_type = other DNA

SEQ ID NO: 125003 - DNA, 80 bp, synthetic construct
  misc_feature 1..80: note = Artificially Synthesized Probe
  source 1..80: mol_type = other DNA
acatttgggagctctcagcctgatttctgatttcctttgactttaaaaaatgtgtgtggcttttagttactttctaagca

SEQ ID NO: 125004 - DNA, 80 bp, synthetic construct
  misc_feature 1..80: note = Artificially Synthesized Probe
  source 1..80: mol_type = other DNA
aggatgtagaacacagccttgctgaaagggtcaataaacagatccccaggaagagccttctcacgcctcgtgagcacttc

SEQ ID NO: 125005 - DNA, 80 bp, synthetic construct; identical to SEQ ID NO: 40254
  misc_feature 1..80: note = Artificially Synthesized Probe
  source 1..80: mol_type = other DNA

SEQ ID NO: 125006 - DNA, 80 bp, synthetic construct
  misc_feature 1..80: note = Artificially Synthesized Probe
  source 1..80: mol_type = other DNA
aagtattttttaggttcatctgtctaaaggtcgctttgaaagcataaatcttgctgagtcaaaagtttactggggctggg

SEQ ID NO: 125007 - DNA, 80 bp, synthetic construct
  misc_feature 1..80: note = Artificially Synthesized Probe
  source 1..80: mol_type = other DNA
agctacttgggaggctgaggcatgagaactgcttgaacccgggaggcagagcttgcagtgagctgagatcgcaccactgc

SEQ ID NO: 125008 - DNA, 80 bp, synthetic construct
  misc_feature 1..80: note = Artificially Synthesized Probe
  source 1..80: mol_type = other DNA
tctcagcttcaccaacttccttccacactcctttgctggcttgacatttaaaggtgaattaatgccacattttaacattg

SEQ ID NO: 125009 - DNA, 80 bp, synthetic construct
  misc_feature 1..80: note = Artificially Synthesized Probe
  source 1..80: mol_type = other DNA
atcctcctaatttgaaagcaattttacataaaattgaaatctggcaatgaaggaggaatagcatgtctgttgtgtgactg

SEQ ID NO: 125010 - DNA, 80 bp, synthetic construct
  misc_feature 1..80: note = Artificially Synthesized Probe
  source 1..80: mol_type = other DNA
ctcattcctgggagtcatttatcagctgcattcggttaaggatgagtggcatggtgctcggcacaggtggtcacaccagc

SEQ ID NO: 125011 - DNA, 80 bp, synthetic construct; identical to SEQ ID NO: 40255
  misc_feature 1..80: note = Artificially Synthesized Probe
  source 1..80: mol_type = other DNA

SEQ ID NO: 125012 - DNA, 80 bp, synthetic construct
  misc_feature 1..80: note = Artificially Synthesized Probe
  source 1..80: mol_type = other DNA
tatctctctgtcactgtgatcctgagatcaggaattggctcaccttgctgtgactgctgcgtgagaactgcttgctgctc

SEQ ID NO: 125013 - DNA, 80 bp, synthetic construct
  misc_feature 1..80: note = Artificially Synthesized Probe
  source 1..80: mol_type = other DNA
ctccctcctcccccctccccacctccctcttccctcctctttcctccctcctccctcctgctttcctccctcctcccgcc

SEQ ID NO: 125014 - DNA, 80 bp, synthetic construct
  misc_feature 1..80: note = Artificially Synthesized Probe
  source 1..80: mol_type = other DNA
gaaagccagcatgttgggaataaaaacaatagcatattaaccatgtctgaaaaagaaagtgtgaatgaaaaccatgcagt

SEQ ID NO: 125015 - DNA, 80 bp, synthetic construct; identical to SEQ ID NO: 40256
  misc_feature 1..80: note = Artificially Synthesized Probe
  source 1..80: mol_type = other DNA

SEQ ID NO: 125016 - DNA, 80 bp, synthetic construct
  misc_feature 1..80: note = Artificially Synthesized Probe
  source 1..80: mol_type = other DNA
cgtcttcttacccaattctatcacaatacttttaagaaacaaatgctgcccagttttgtgggtgtcgacttgctagagga

SEQ ID NO: 125017 - DNA, 80 bp, synthetic construct
  misc_feature 1..80: note = Artificially Synthesized Probe
  source 1..80: mol_type = other DNA
ctccatttaaaaactgcttcttccaaacaaaactgcaaaaccagtgcctgagaccttgagaggagagaaggattcctgtc

SEQ ID NO: 125018 - DNA, 80 bp, synthetic construct
  misc_feature 1..80: note = Artificially Synthesized Probe
  source 1..80: mol_type = other DNA
gagccaggcgtgcccctgccccgcccctgccccaccctgcagcgcccagggaaggattccctctccctgcacatctgcgc

SEQ ID NO: 125019 - DNA, 80 bp, synthetic construct; identical to SEQ ID NO: 40257
  misc_feature 1..80: note = Artificially Synthesized Probe
  source 1..80: mol_type = other DNA

SEQ ID NO: 125020 - DNA, 80 bp, synthetic construct
  misc_feature 1..80: note = Artificially Synthesized Probe
  source 1..80: mol_type = other DNA
gggaacataactttaagagcaagtgtcattaagttagacactaagcaaacatgtcttccttcatgtttctcgtgacgggg

SEQ ID NO: 125021 - DNA, 80 bp, synthetic construct; identical to SEQ ID NO: 40065
  misc_feature 1..80: note = Artificially Synthesized Probe
  source 1..80: mol_type = other DNA

SEQ ID NO: 125022 - DNA, 80 bp, synthetic construct
  misc_feature 1..80: note = Artificially Synthesized Probe
  source 1..80: mol_type = other DNA
ggaggaggaggctgggaaggcccatcaggagggacagccggaattcccgcggagtggagtcttgctcccagcccttccta

SEQ ID NO: 125023 - DNA, 80 bp, synthetic construct
  misc_feature 1..80: note = Artificially Synthesized Probe
  source 1..80: mol_type = other DNA
aagaattcatagttagacagagggctgagctgacgtaaggaagaaacaaatgcacttttaaaaggagaaaatctccagtg

SEQ ID NO: 125024 - DNA, 80 bp, synthetic construct; identical to SEQ ID NO: 40258
  misc_feature 1..80: note = Artificially Synthesized Probe
  source 1..80: mol_type = other DNA

SEQ ID NO: 125025 - DNA, 80 bp, synthetic construct
  misc_feature 1..80: note = Artificially Synthesized Probe
  source 1..80: mol_type = other DNA
taggacccgaccttctgttgctcagattctgccaagactactactgcaaacttgttttcattccatagtttacgaaaaag

SEQ ID NO: 125026 - DNA, 80 bp, synthetic construct
  misc_feature 1..80: note = Artificially Synthesized Probe
  source 1..80: mol_type = other DNA
agatcttttgtagctgttttgaaatatacagtaaattatttttaactataatttttctattgtacttttgaatattagaa

SEQ ID NO: 125027 - DNA, 80 bp, synthetic construct
  misc_feature 1..80: note = Artificially Synthesized Probe
  source 1..80: mol_type = other DNA
aaagcgtttctcagactcgctgctacttgcatccctcatttcagaacaaactcaatcataagattacagagacggcagaa

SEQ ID NO: 125028 - DNA, 80 bp, synthetic construct; identical to SEQ ID NO: 40259
  misc_feature 1..80: note = Artificially Synthesized Probe
  source 1..80: mol_type = other DNA

SEQ ID NO: 125029 - DNA, 80 bp, synthetic construct
  misc_feature 1..80: note = Artificially Synthesized Probe
  source 1..80: mol_type = other DNA
agtcgctgtgtggttgccaactcagaaggattggccgctctatttccatggtagggttcattggtggtgactgtcagcct

SEQ ID NO: 125030 - DNA, 80 bp, synthetic construct
  misc_feature 1..80: note = Artificially Synthesized Probe
  source 1..80: mol_type = other DNA
gtagcgttgctgattggcccttgaggagacaatgcaacatcacagtgtgctcagaaaacacttgctctaaatattttgag

SEQ ID NO: 125031 - DNA, 80 bp, synthetic construct
  misc_feature 1..80: note = Artificially Synthesized Probe
  source 1..80: mol_type = other DNA
catagagagtctatcttgttgttaagactgactccttaagtttttcataaaagatacaaaagagggaatgttgtagaaaa

SEQ ID NO: 125032 - DNA, 80 bp, synthetic construct
  misc_feature 1..80: note = Artificially Synthesized Probe
  source 1..80: mol_type = other DNA
ggggaagcctcaggaggagcaagtcccatcttacatggatggcaggaggcaaagagagcttgtgcaggggtactcccgtt

SEQ ID NO: 125033 - DNA, 80 bp, synthetic construct
  misc_feature 1..80: note = Artificially Synthesized Probe
  source 1..80: mol_type = other DNA
ttgcatatttggtgtcctcatgaggctagagcaacctgccagggccagttgtttggacagtaaacagttaaaagtcattc

SEQ ID NO: 125034 - DNA, 80 bp, synthetic construct; identical to SEQ ID NO: 40260
  misc_feature 1..80: note = Artificially Synthesized Probe
  source 1..80: mol_type = other DNA

SEQ ID NO: 125035 - DNA, 80 bp, synthetic construct
  misc_feature 1..80: note = Artificially Synthesized Probe
  source 1..80: mol_type = other DNA
tatcaccataaaccctccgtgtctcttcaccaataccttcattcaaaagctccttgagggcaaaattggtgctttttacc

SEQ ID NO: 125036 - DNA, 80 bp, synthetic construct
  misc_feature 1..80: note = Artificially Synthesized Probe
  source 1..80: mol_type = other DNA
cttattagctgtgataaattccaagtgcacaccctggccttggatgacctgacccaaaagagagttaaagtcaaaggcaa

SEQ ID NO: 125037 - DNA, 80 bp, synthetic construct; identical to SEQ ID NO: 40261
  misc_feature 1..80: note = Artificially Synthesized Probe
  source 1..80: mol_type = other DNA

SEQ ID NO: 125038 - DNA, 80 bp, synthetic construct
  misc_feature 1..80: note = Artificially Synthesized Probe
  source 1..80: mol_type = other DNA
ttttctttagtgtcttttttaaagtatgaattgtcatgagcaaatttcattggataaaagaaaaacttcagctgaattaa

SEQ ID NO: 125039 - DNA, 80 bp, synthetic construct
  misc_feature 1..80: note = Artificially Synthesized Probe
  source 1..80: mol_type = other DNA
agccggattggctacagctcggcgtcagcctcatttgaacatggtttgaacagttggctacgttggattggccaaaactc

SEQ ID NO: 125040 - DNA, 80 bp, synthetic construct
  misc_feature 1..80: note = Artificially Synthesized Probe
  source 1..80: mol_type = other DNA
aggacttctttctctactgcgtggtggttaaagcgcgtacctgtcgtgaggaaactgcatctgtcttgaatcgtccaaaa

SEQ ID NO: 125041 - DNA, 80 bp, synthetic construct
  misc_feature 1..80: note = Artificially Synthesized Probe
  source 1..80: mol_type = other DNA
aaatcaaagtgcctgaagaaactttcctaacacgatacttttttttcttatgtttaaactgcatggaaagttaaaagttg

SEQ ID NO: 125042 - DNA, 80 bp, synthetic construct; identical to SEQ ID NO: 40262
  misc_feature 1..80: note = Artificially Synthesized Probe
  source 1..80: mol_type = other DNA

SEQ ID NO: 125043 - DNA, 80 bp, synthetic construct
  misc_feature 1..80: note = Artificially Synthesized Probe
  source 1..80: mol_type = other DNA
catattaaaagtgtaagaaaaatttacttcatttttcaatggtgttgggtacactctgaattgcaagtgaatcacttgca

SEQ ID NO: 125044 - DNA, 80 bp, synthetic construct
  misc_feature 1..80: note = Artificially Synthesized Probe
  source 1..80: mol_type = other DNA
ctgtcacactttaaaacagaaacaagattgtgtcacttctcagattctcccaacagcttccagtttcctttcagataagg

SEQ ID NO: 125045 - DNA, 80 bp, synthetic construct
  misc_feature 1..80: note = Artificially Synthesized Probe
  source 1..80: mol_type = other DNA
ggccttccctgtgcccccagcactctcctccctgttccaaatggctcactccacaccactgcacctctgcctggcaagca

SEQ ID NO: 125046 - DNA, 80 bp, synthetic construct
  misc_feature 1..80: note = Artificially Synthesized Probe
  source 1..80: mol_type = other DNA
ctaccccccagcaaggtcagagttctcagcaccatccaagccttcagtctcccactgagtgtgacttgggcctcagtttc

SEQ ID NO: 125047 - DNA, 80 bp, synthetic construct; identical to SEQ ID NO: 40263
  misc_feature 1..80: note = Artificially Synthesized Probe
  source 1..80: mol_type = other DNA

SEQ ID NO: 125048 - DNA, 80 bp, synthetic construct
  misc_feature 1..80: note = Artificially Synthesized Probe
  source 1..80: mol_type = other DNA
tgctttttaactctggcaatgtcaggatttaaagcggagttttcaaattcagcaaatgttggtaatccaaagctgccaag

SEQ ID NO: 125049 - DNA, 80 bp, synthetic construct
  misc_feature 1..80: note = Artificially Synthesized Probe
  source 1..80: mol_type = other DNA
aatgagtagccatgacattttatttctagctgtttgtgaaaagacccagccaaatgcaggtgctgttattggcaccctct

SEQ ID NO: 125050 - DNA, 80 bp, synthetic construct; identical to SEQ ID NO: 40264
  misc_feature 1..80: note = Artificially Synthesized Probe
  source 1..80: mol_type = other DNA

SEQ ID NO: 125051 - DNA, 80 bp, synthetic construct
  misc_feature 1..80: note = Artificially Synthesized Probe
  source 1..80: mol_type = other DNA
tatggggtttcactctgttggccagactggtctcaaactcctgacctcaagtgatccacccacctcagcctcccaaagtg

SEQ ID NO: 125052 - DNA, 80 bp, synthetic construct
  misc_feature 1..80: note = Artificially Synthesized Probe
  source 1..80: mol_type = other DNA
gagttagtaaatgtaaaattttgttagtgtcaagacaaaactggatttaatcgcaaaggagaaattctcagcgcctttct

SEQ ID NO: 125053 - DNA, 80 bp, synthetic construct
  misc_feature 1..80: note = Artificially Synthesized Probe
  source 1..80: mol_type = other DNA
aactagagcacactcaaacttttctatgatacattcttaaaatggggaggaagtgagcctaaaacccacggggaagggcc

SEQ ID NO: 125054 - DNA, 80 bp, synthetic construct; identical to SEQ ID NO: 40265
  misc_feature 1..80: note = Artificially Synthesized Probe
  source 1..80: mol_type = other DNA

SEQ ID NO: 125055 - DNA, 80 bp, synthetic construct
  misc_feature 1..80: note = Artificially Synthesized Probe
  source 1..80: mol_type = other DNA
aagagtctgatattgagttttactgcactttaaagcatttcggatgttaattaaaatcttgactctagtagcacattcag

SEQ ID NO: 125056 - DNA, 80 bp, synthetic construct
  misc_feature 1..80: note = Artificially Synthesized Probe
  source 1..80: mol_type = other DNA
ggcccccaatgggagacgaggacagtcttttctcaggtggctgacctgtccccctcacatcaggccagcaaaggcattcc

SEQ ID NO: 125057 - DNA, 80 bp, synthetic construct
  misc_feature 1..80: note = Artificially Synthesized Probe
  source 1..80: mol_type = other DNA
ttagagaagaaagctcctttgtcatccattcttttctcctcatttctcatctataccagtttcctaaacattggaactaa

SEQ ID NO: 125058 - DNA, 80 bp, synthetic construct
  misc_feature 1..80: note = Artificially Synthesized Probe
  source 1..80: mol_type = other DNA
ccgatccagaccctgcaggcctcactggcacaatccagacccacgattgtgccagtgtgtggctgctgttatccagtggt

SEQ ID NO: 125059 - DNA, 80 bp, synthetic construct; identical to SEQ ID NO: 40266
  misc_feature 1..80: note = Artificially Synthesized Probe
  source 1..80: mol_type = other DNA

SEQ ID NO: 125060 - DNA, 80 bp, synthetic construct
  misc_feature 1..80: note = Artificially Synthesized Probe
  source 1..80: mol_type = other DNA
ttaaagcatcagaatattaacccagtttctgaaaagtccctggtccataggctggggtctcagggacccgccagttcagc

SEQ ID NO: 125061 - DNA, 80 bp, synthetic construct
  misc_feature 1..80: note = Artificially Synthesized Probe
  source 1..80: mol_type = other DNA
aggatacttgggctaagctactcccttcattgttttgccacagattggatataaattggtgaacttattctgtttctagc

SEQ ID NO: 125062 - DNA, 80 bp, synthetic construct
  misc_feature 1..80: note = Artificially Synthesized Probe
  source 1..80: mol_type = other DNA
gttgacctgagacttctgaactcagttcaatgggtggttggagaacttactgtgagtggaactgtcccaaaataaagggt

SEQ ID NO: 125063 - DNA, 80 bp, synthetic construct
  misc_feature 1..80: note = Artificially Synthesized Probe
  source 1..80: mol_type = other DNA
ctcatacaggttctcagcgggcagcttccccagcctgaatcacacaccacaaaatgccagagcaaagggtggctttgcta

SEQ ID NO: 125064 - DNA, 80 bp, synthetic construct; identical to SEQ ID NO: 40267
  misc_feature 1..80: note = Artificially Synthesized Probe
  source 1..80: mol_type = other DNA

SEQ ID NO: 125065 - DNA, 80 bp, synthetic construct
  misc_feature 1..80: note = Artificially Synthesized Probe
  source 1..80: mol_type = other DNA
gcattattccaggtcctggggtgactgtgacatgggactgagcaggattgatttgctgcttcttgttttagaagtacata

SEQ ID NO: 125066 - DNA, 80 bp, synthetic construct; identical to SEQ ID NO: 40066
  misc_feature 1..80: note = Artificially Synthesized Probe
  source 1..80: mol_type = other DNA

SEQ ID NO: 125067 - DNA, 80 bp, synthetic construct
  misc_feature 1..80: note = Artificially Synthesized Probe
  source 1..80: mol_type = other DNA
aatccccctgggtgtgtccctattaccacaccaaatatccacataattctttcttaaagctgttcagtactgaggattat

SEQ ID NO: 125068 - DNA, 80 bp, synthetic construct
  misc_feature 1..80: note = Artificially Synthesized Probe
  source 1..80: mol_type = other DNA
cctgtctcgtcgccctggacaagttctcctggacggctggcctggcagggcttctgcccacgtgttcccgagcctgtgcc

SEQ ID NO: 125069 - DNA, 80 bp, synthetic construct; identical to SEQ ID NO: 40268
  misc_feature 1..80: note = Artificially Synthesized Probe
  source 1..80: mol_type = other DNA

SEQ ID NO: 125070 - DNA, 80 bp, synthetic construct
  misc_feature 1..80: note = Artificially Synthesized Probe
  source 1..80: mol_type = other DNA
gagtcttgctatcggcagctcacgtgtgcttcaagagcaatcacacaaaactccagtgtcaaaaagaaacctaggaaaac

SEQ ID NO: 125071 - DNA, 80 bp, synthetic construct
  misc_feature 1..80: note = Artificially Synthesized Probe
  source 1..80: mol_type = other DNA
ttccccacggcaccctcagcctgtcctgttgcctgaggagtccagagagagccctcctcatctcagacaatccttcctct

SEQ ID NO: 125072 - DNA, 80 bp, synthetic construct; identical to SEQ ID NO: 40269
  misc_feature 1..80: note = Artificially Synthesized Probe
  source 1..80: mol_type = other DNA

SEQ ID NO: 125073 - DNA, 80 bp, synthetic construct
  misc_feature 1..80: note = Artificially Synthesized Probe
  source 1..80: mol_type = other DNA
agggctggtgcctggcttctgtcttctattttcccctcggtatctttctctttctactgaactctggaagggctttcttt

SEQ ID NO: 125074 - DNA, 80 bp, synthetic construct
  misc_feature 1..80: note = Artificially Synthesized Probe
  source 1..80: mol_type = other DNA
ctacctcttgcatttgcttattgatccagcaagcatgtattgggcagctgagctgcttctctatgccaaaagggcatcca

SEQ ID NO: 125075 - DNA, 80 bp, synthetic construct
  misc_feature 1..80: note = Artificially Synthesized Probe
  source 1..80: mol_type = other DNA
agagaaagtggatggcttctttcaaatgttatcttgaatttggggtgggacgagtgtctcaggcatggtgtcagggaatt

SEQ ID NO: 125076 - DNA, 80 bp, synthetic construct
  misc_feature 1..80: note = Artificially Synthesized Probe
  source 1..80: mol_type = other DNA
gtgccaatgccgtggtgtggacaagtccccaggagacgggcgttggggagctcctgctgtttgccctactgcctcctttt

SEQ ID NO: 125077 - DNA, 80 bp, synthetic construct
  misc_feature 1..80: note = Artificially Synthesized Probe
  source 1..80: mol_type = other DNA
cttgtccagatcaactgagagtaatgagctgtgctctttccccatcctgcccatcctctgatttcttcccttaactttga

SEQ ID NO: 125078 - DNA, 80 bp, synthetic construct; identical to SEQ ID NO: 40270
  misc_feature 1..80: note = Artificially Synthesized Probe
  source 1..80: mol_type = other DNA

SEQ ID NO: 125079 - DNA, 80 bp, synthetic construct
  misc_feature 1..80: note = Artificially Synthesized Probe
  source 1..80: mol_type = other DNA
ttaggctttatgagttaattatgaaaacatacacgtgtttttcaggttgtccgggtgccaaaaagcatgagtttctgacc

SEQ ID NO: 125080 - DNA, 80 bp, synthetic construct
  misc_feature 1..80: note = Artificially Synthesized Probe
  source 1..80: mol_type = other DNA
ggaatctggaaagtctgaacattacatattggcaaccttctcagcttatttggacacagtagggccttaaaaaggagcct

SEQ ID NO: 125081 - DNA, 80 bp, synthetic construct; identical to SEQ ID NO: 40271
  misc_feature 1..80: note = Artificially Synthesized Probe
  source 1..80: mol_type = other DNA

SEQ ID NO: 125082 - DNA, 80 bp, synthetic construct
  misc_feature 1..80: note = Artificially Synthesized Probe
  source 1..80: mol_type = other DNA
tttcaggcatgtgattcagttacatcaaagacattcacactgttcaaaataggatttttggaaccctggagatgttcctt

SEQ ID NO: 125083 - DNA, 80 bp, synthetic construct
  misc_feature 1..80: note = Artificially Synthesized Probe
  source 1..80: mol_type = other DNA
agaagaaccccagggttttactgcgatggcatctcaagcatcagatattccccctgatctagccatagtttatctgtttc

SEQ ID NO: 125084 - DNA, 80 bp, synthetic construct
  misc_feature 1..80: note = Artificially Synthesized Probe
  source 1..80: mol_type = other DNA
tggtctcctgaactaaaagcctctcctctcactgtctgtctgctaaagaagacttaaggaaataaaaaggcaatactaac

SEQ ID NO: 125085 - DNA, 80 bp, synthetic construct
  misc_feature 1..80: note = Artificially Synthesized Probe
  source 1..80: mol_type = other DNA
actaaaaatacaaaacttaatccagcatggtggcaggcacctgtaatcccagctactcgggaggctaaggcaggagaatc

SEQ ID NO: 125086 - DNA, 80 bp, synthetic construct; identical to SEQ ID NO: 40272
  misc_feature 1..80: note = Artificially Synthesized Probe
  source 1..80: mol_type = other DNA

SEQ ID NO: 125087 - DNA, 80 bp, synthetic construct
  misc_feature 1..80: note = Artificially Synthesized Probe
  source 1..80: mol_type = other DNA
tccaggagggccatcccatgcgcacacacacaccctccatctcacggagaaggtgcgtgtctgccatttggtgcactttt

SEQ ID NO: 125088 - DNA, 80 bp, synthetic construct
  misc_feature 1..80: note = Artificially Synthesized Probe
  source 1..80: mol_type = other DNA
ttcctatgacatgaaggatgtgtaaaagaatcacatttacagggctagaaaagctcagggttctggtgtgtcgggcgggt

SEQ ID NO: 125089 - DNA, 80 bp, synthetic construct
  misc_feature 1..80: note = Artificially Synthesized Probe
  source 1..80: mol_type = other DNA
acttttgcaatgaagctgcaatgaggttgtaaacatgtccttgttggaactgcctgagtctgtatgttgaattatcgttt

SEQ ID NO: 125090 - DNA, 80 bp, synthetic construct; identical to SEQ ID NO: 40273
  misc_feature 1..80: note = Artificially Synthesized Probe
  source 1..80: mol_type = other DNA

SEQ ID NO: 125091 - DNA, 80 bp, synthetic construct
  misc_feature 1..80: note = Artificially Synthesized Probe
  source 1..80: mol_type = other DNA
ggagacatcggcaaaaaggaaatcaaacccttcaagaggttccttcgcaaaaaatcaaagcccaaaaaatgtgtgaagaa

SEQ ID NO: 125092 - DNA, 80 bp, synthetic construct
  misc_feature 1..80: note = Artificially Synthesized Probe
  source 1..80: mol_type = other DNA
agtttaagactcggcaggttttcttgtcttctctcccctgtctcatctaactatttacttgaaccctctcaccttttgcc

SEQ ID NO: 125093 - DNA, 80 bp, synthetic construct
  misc_feature 1..80: note = Artificially Synthesized Probe
  source 1..80: mol_type = other DNA
gcctgggaggtctgcttctcacaaacacaattacagattgtgtttatggcctgggagtgcaaaaaatcaaatatgctgtt

SEQ ID NO: 125094 - DNA, 80 bp, synthetic construct
  misc_feature 1..80: note = Artificially Synthesized Probe
  source 1..80: mol_type = other DNA
ttgtcttctggtatttgaggtgcaaacctgggaaccactggaataaccaaccctgcacctgagctccaaccaaatgttag

SEQ ID NO: 125095 - DNA, 80 bp, synthetic construct; identical to SEQ ID NO: 40274
  misc_feature 1..80: note = Artificially Synthesized Probe
  source 1..80: mol_type = other DNA

SEQ ID NO: 125096 - DNA, 80 bp, synthetic construct
  misc_feature 1..80: note = Artificially Synthesized Probe
  source 1..80: mol_type = other DNA
cagatgttaggaactcaccaaccctgcacctgagctccaaccagatgttaggaactcaccaaccctgctcctgagctcca

SEQ ID NO: 125097 - DNA, 80 bp, synthetic construct
  misc_feature 1..80: note = Artificially Synthesized Probe
  source 1..80: mol_type = other DNA
tccaaccagatgttaggaactcaccaaccctgctcctgagctccaaccaaatgttaggaactcaccaaccctctacctga

SEQ ID NO: 125098 - DNA, 80 bp, synthetic construct
  misc_feature 1..80: note = Artificially Synthesized Probe
  source 1..80: mol_type = other DNA
tgagctccaaccaaatgttaggaactcaccacccctgtacctgagctccaaccaaatgttaggaactcaccacccctgta

SEQ ID NO: 125099 - DNA, 80 bp, synthetic construct; identical to SEQ ID NO: 40275
  misc_feature 1..80: note = Artificially Synthesized Probe
  source 1..80: mol_type = other DNA

SEQ ID NO: 125100 - DNA, 80 bp, synthetic construct
  misc_feature 1..80: note = Artificially Synthesized Probe
  source 1..80: mol_type = other DNA
caaccctgcacctgagctccaaccagatgttaggaactcaccaaccctgcacctgagctccaaccagatgttaggaactc

SEQ ID NO: 125101 - DNA, 80 bp, synthetic construct
  misc_feature 1..80: note = Artificially Synthesized Probe
  source 1..80: mol_type = other DNA
actcaccaaccctgcacctgagctccaaccagatgttaggaactcaccaaccctgcacctgagctccaaccagatgttag

SEQ ID NO: 125102 - DNA, 80 bp, synthetic construct
  misc_feature 1..80: note = Artificially Synthesized Probe
  source 1..80: mol_type = other DNA
tggtgctggaattcccagatgtctcatgggctccatttggtgctctccagtggtggcttatgatgaatgacacgaagtca

SEQ ID NO: 125103 - DNA, 80 bp, synthetic construct
  misc_feature 1..80: note = Artificially Synthesized Probe
  source 1..80: mol_type = other DNA
gaagtaagagaaacctgtgatggccagagcccagatgttcttaggaggcaagccaggagaagccgggtctgacttttcag

SEQ ID NO: 125104 - DNA, 80 bp, synthetic construct; identical to SEQ ID NO: 40276
  misc_feature 1..80: note = Artificially Synthesized Probe
  source 1..80: mol_type = other DNA

SEQ ID NO: 125105 - DNA, 80 bp, synthetic construct
  misc_feature 1..80: note = Artificially Synthesized Probe
  source 1..80: mol_type = other DNA
tcactgcacgtatgtgctcgatcccttgcatgtgtgagctagatcccccatatgtgtgtgctagatcccactgtacacat

SEQ ID NO: 125106 - DNA, 80 bp, synthetic construct
  misc_feature 1..80: note = Artificially Synthesized Probe
  source 1..80: mol_type = other DNA
atacttgctgggtagggctagtagacaccgctcaaatctctgtcgtttatgactcttttatttgttgtcaactcgataac

SEQ ID NO: 125107 - DNA, 80 bp, synthetic construct
  misc_feature 1..80: note = Artificially Synthesized Probe
  source 1..80: mol_type = other DNA
gcctggccagcatagtgaaacctcatctctactaaaaatataaaaattagctaggcatgatggctcatgcctgtagtccc

SEQ ID NO: 125108 - DNA, 80 bp, synthetic construct
  misc_feature 1..80: note = Artificially Synthesized Probe
  source 1..80: mol_type = other DNA
aaaaaaaaaaaaccctcccatgtttgaagctcagctgtgagacaggggccctttgatctgacctggactgagggctcctg

SEQ ID NO: 125109 - DNA, 80 bp, synthetic construct; identical to SEQ ID NO: 40277
  misc_feature 1..80: note = Artificially Synthesized Probe
  source 1..80: mol_type = other DNA

SEQ ID NO: 125110 - DNA, 80 bp, synthetic construct
  misc_feature 1..80: note = Artificially Synthesized Probe
  source 1..80: mol_type = other DNA
tctaataagacaaaaaagaaaagaaatcactctgggctgatcaactgcaatgcatgaaggcagcaaatgcccactcacca

SEQ ID NO: 125111 - DNA, 80 bp, synthetic construct; identical to SEQ ID NO: 40067
  misc_feature 1..80: note = Artificially Synthesized Probe
  source 1..80: mol_type = other DNA

SEQ ID NO: 125112 - DNA, 80 bp, synthetic construct
  misc_feature 1..80: note = Artificially Synthesized Probe
  source 1..80: mol_type = other DNA
aggtcacagacagatgctgccatccctgacacttgcagacaaggacacacaggcactgcagtcatcagcactttgatctg

SEQ ID NO: 125113 - DNA, 80 bp, synthetic construct; identical to SEQ ID NO: 40278
  misc_feature 1..80: note = Artificially Synthesized Probe
  source 1..80: mol_type = other DNA

SEQ ID NO: 125114 - DNA, 80 bp, synthetic construct
  misc_feature 1..80: note = Artificially Synthesized Probe
  source 1..80: mol_type = other DNA
agcatctggtgagggcctttgtgctgtgtcatccccaaatagaagggcgaagagagggtgagaaagagagagagagcaag

SEQ ID NO: 125115 - DNA, 80 bp, synthetic construct
  misc_feature 1..80: note = Artificially Synthesized Probe
  source 1..80: mol_type = other DNA
ccataacaggctgctttcttcacttcctgtgctttttctcttattttggtccctgctcaggatcccagaagacaaatggt

SEQ ID NO: 125116 - DNA, 80 bp, synthetic construct
  misc_feature 1..80: note = Artificially Synthesized Probe
  source 1..80: mol_type = other DNA
gtccctcacccctgatggttccacagagagggaagatgaacacccacccagtgattcatgaagggagctgctcacattct

SEQ ID NO: 125117 - DNA, 80 bp, synthetic construct
  misc_feature 1..80: note = Artificially Synthesized Probe
  source 1..80: mol_type = other DNA
tcataatgagaaaattaaggatgggtagagccaagtgtagatctgtttctaacttttaatcttcttccattcctgggtgg

SEQ ID NO: 125118 - DNA, 80 bp, synthetic construct; identical to SEQ ID NO: 40279
  misc_feature 1..80: note = Artificially Synthesized Probe
  source 1..80: mol_type = other DNA

SEQ ID NO: 125119 - DNA, 80 bp, synthetic construct
  misc_feature 1..80: note = Artificially Synthesized Probe
  source 1..80: mol_type = other DNA
cctcatcctgcatcacctgcaggacacagctcagactgtgtgtgtgtgtggagtatgtgtatgtgtggtgtgtgtggtgt

SEQ ID NO: 125120 - DNA, 80 bp, synthetic construct
  misc_feature 1..80: note = Artificially Synthesized Probe
  source 1..80: mol_type = other DNA
tgtatgtatgtgtatagcatgtggtgtgtaaacactaatactggcgctctgggctggatcaagctctgttagggcaaatg

SEQ ID NO: 125121 - DNA, 80 bp, synthetic construct
  misc_feature 1..80: note = Artificially Synthesized Probe
  source 1..80: mol_type = other DNA
taaatgttggtaattaataataacacactaaaactctcccaataggaaggctcccacatttgtttgaggacaatctttga

SEQ ID NO: 125122 - DNA, 80 bp, synthetic construct
  misc_feature 1..80: note = Artificially Synthesized Probe
  source 1..80: mol_type = other DNA
gtgaagcaccagggtcagccaagagacagagggagcaagggactggccctgagccctcatcatgatttcccaggcaggct

SEQ ID NO: 125123 - DNA, 80 bp, synthetic construct; identical to SEQ ID NO: 40280
  misc_feature 1..80: note = Artificially Synthesized Probe
  source 1..80: mol_type = other DNA

SEQ ID NO: 125124 - DNA, 80 bp, synthetic construct
  misc_feature 1..80: note = Artificially Synthesized Probe
  source 1..80: mol_type = other DNA
tgtaggttgggtgaggttgtagattataggctgagtgagggtggaggttgtagattgggtgagggtgaaggttgttgact

SEQ ID NO: 125125 - DNA, 80 bp, synthetic construct
  misc_feature 1..80: note = Artificially Synthesized Probe
  source 1..80: mol_type = other DNA
tgttgtctgggtgagggtggaggttgtaggctgggtgagggtggaggttgtaggttggcctgaataggaaaggctgctcc

SEQ ID NO: 125126 - DNA, 80 bp, synthetic construct
  misc_feature 1..80: note = Artificially Synthesized Probe
  source 1..80: mol_type = other DNA
atgggcaagctaaatcccctagacaatctctttggaaggtggcagcaccatacagacaactgttgtgagccgcatatcct

SEQ ID NO: 125127 - DNA, 80 bp, synthetic construct; identical to SEQ ID NO: 40281
  misc_feature 1..80: note = Artificially Synthesized Probe
  source 1..80: mol_type = other DNA

SEQ ID NO: 125128 - DNA, 80 bp, synthetic construct
  misc_feature 1..80: note = Artificially Synthesized Probe
  source 1..80: mol_type = other DNA
ggatgctcagagatggagcctctcagcctcccaccttccaaaggcccgagccgcagtgtggggcagggaaggggcatgga

SEQ ID NO: 125129 - DNA, 80 bp, synthetic construct
  misc_feature 1..80: note = Artificially Synthesized Probe
  source 1..80: mol_type = other DNA
ttactgtcttcttagtaatcaagaagaaagaatatgatcgctcctagcaaaataaactgcagtttggcaaaagaggcaat

SEQ ID NO: 125130 - DNA, 80 bp, synthetic construct; identical to SEQ ID NO: 40282
  misc_feature 1..80: note = Artificially Synthesized Probe
  source 1..80: mol_type = other DNA

SEQ ID NO: 125131 - DNA, 80 bp, synthetic construct
  misc_feature 1..80: note = Artificially Synthesized Probe
  source 1..80: mol_type = other DNA
tactgaaaatacaataattagctgggtgtggtggtgtgagcctgtaatcccagctactcgggaggctgaggcaggaaaat

SEQ ID NO: 125132 - DNA, 80 bp, synthetic construct
  misc_feature 1..80: note = Artificially Synthesized Probe
  source 1..80: mol_type = other DNA
gtgcagaattgtcttcctaatattaagtaatagacccccttttcccgtacttaccccaaggagaatctcattctcataaa

SEQ ID NO: 125133 - DNA, 80 bp, synthetic construct
  misc_feature 1..80: note = Artificially Synthesized Probe
  source 1..80: mol_type = other DNA
atctacagctacttctaactcccagggagaattctattaatcagcaagcaatacaaaaaaaactggcaattgttgaatag

SEQ ID NO: 125134 - DNA, 80 bp, synthetic construct
  misc_feature 1..80: note = Artificially Synthesized Probe
  source 1..80: mol_type = other DNA
acagcagcactcattttggcacttagaccattgaaaccaactatttaaaaaaatcatagatttagccactgctcgatgtt

SEQ ID NO: 125135 - DNA, 80 bp, synthetic construct; identical to SEQ ID NO: 40283
  misc_feature 1..80: note = Artificially Synthesized Probe
  source 1..80: mol_type = other DNA

SEQ ID NO: 125136 - DNA, 80 bp, synthetic construct
  misc_feature 1..80: note = Artificially Synthesized Probe
  source 1..80: mol_type = other DNA
ggaggccctgcaaggtgcgagtgagtggagactggaggagcagaggagaaccaagggccgtcgggtggagagcagcctgc

SEQ ID NO: 125137 - DNA, 80 bp, synthetic construct
  misc_feature 1..80: note = Artificially Synthesized Probe
  source 1..80: mol_type = other DNA
gagtgaggccattggaaggcttgggtggaatgttttagaggactgctggtttccatgtttgtgtagacaacagatgggaa

SEQ ID NO: 125138 - DNA, 80 bp, synthetic construct
  misc_feature 1..80: note = Artificially Synthesized Probe
  source 1..80: mol_type = other DNA
agaagagaggcgtgatcatgactcccaaagtttgccctgagcagctcaagaatggggttactgtgtcctgaggatggaat

SEQ ID NO: 125139 - DNA, 80 bp, synthetic construct
  misc_feature 1..80: note = Artificially Synthesized Probe
  source 1..80: mol_type = other DNA
tgtatccttgggagctgtcaggaaatagagagtatttaaaatcctgaggccaacctgagcccaccagtgagtgggtgaag

SEQ ID NO: 125140 - DNA, 80 bp, synthetic construct; identical to SEQ ID NO: 40284
  misc_feature 1..80: note = Artificially Synthesized Probe
  source 1..80: mol_type = other DNA

SEQ ID NO: 125141 - DNA, 80 bp, synthetic construct
  misc_feature 1..80: note = Artificially Synthesized Probe
  source 1..80: mol_type = other DNA
aaacattcttctaaggctggactagagaatctgtatgttagaaagtacttacatagttactttcatgatccagtactcat

SEQ ID NO: 125142 - DNA, 80 bp, synthetic construct; identical to SEQ ID NO: 40068
  misc_feature 1..80: note = Artificially Synthesized Probe
  source 1..80: mol_type = other DNA

SEQ ID NO: 125143 - DNA, 80 bp, synthetic construct
  misc_feature 1..80: note = Artificially Synthesized Probe
  source 1..80: mol_type = other DNA
gatttaaagtatataggaggtgttcagattatattaaaatattacacgataatatataagaagcttgagaattggaggat

SEQ ID NO: 125144 - DNA, 80 bp, synthetic construct; identical to SEQ ID NO: 40285
  misc_feature 1..80: note = Artificially Synthesized Probe
  source 1..80: mol_type = other DNA

SEQ ID NO: 125145 - DNA, 80 bp, synthetic construct
  misc_feature 1..80: note = Artificially Synthesized Probe
  source 1..80: mol_type = other DNA
agcagccttgccgaattctatccgaaatcaccaacttgtttgaaaaaagtttattatttgaactttcatttattaagaaa

SEQ ID NO: 125146 - DNA, 80 bp, synthetic construct
  misc_feature 1..80: note = Artificially Synthesized Probe
  source 1..80: mol_type = other DNA
attttttcaagcaattgtctgagtgtttgtaatttggttcctccattttgtcagggaggttgcaggaacaggaggcatcc

SEQ ID NO: 125147 - DNA, 80 bp, synthetic construct
  misc_feature 1..80: note = Artificially Synthesized Probe
  source 1..80: mol_type = other DNA
cagacccaaagccacaacccatcgcaagtcaagaacactttccagaagataaacatgagtgggttcatgtctctctcctt

SEQ ID NO: 125148 - DNA, 80 bp, synthetic construct; identical to SEQ ID NO: 40286
  misc_feature 1..80: note = Artificially Synthesized Probe
  source 1..80: mol_type = other DNA

SEQ ID NO: 125149 - DNA, 80 bp, synthetic construct
  misc_feature 1..80: note = Artificially Synthesized Probe
  source 1..80: mol_type = other DNA
cgcatcttaaataaactcagttcaaagcacatgcctcctgcttcagctcttttttccaaaaagagaaacagaagcaggtt

SEQ ID NO: 125150 - DNA, 80 bp, synthetic construct
  misc_feature 1..80: note = Artificially Synthesized Probe
  source 1..80: mol_type = other DNA
tctcaaagaataacatagtgccagccagcaagggtttcaccatatgcatgacccagacaggaactatcaaaagaagggat

SEQ ID NO: 125151 - DNA, 80 bp, synthetic construct
  misc_feature 1..80: note = Artificially Synthesized Probe
  source 1..80: mol_type = other DNA
ccgtctcctcctgcaatcctaaccatcttttgagactgttagaatactttgacgggttgtctttctgtgcaactaattta

SEQ ID NO: 125152 - DNA, 80 bp, synthetic construct; identical to SEQ ID NO: 40287
  misc_feature 1..80: note = Artificially Synthesized Probe
  source 1..80: mol_type = other DNA

SEQ ID NO: 125153 - DNA, 80 bp, synthetic construct
  misc_feature 1..80: note = Artificially Synthesized Probe
  source 1..80: mol_type = other DNA
ggtaacatcctgtgcttacagagaacattgtcctgagagaaaccctgtgcttacagagagcatcatcctgagagaagact

SEQ ID NO: 125154 - DNA, 80 bp, synthetic construct
  misc_feature 1..80: note = Artificially Synthesized Probe
  source 1..80: mol_type = other DNA
gataaaaaggaaaattaagaatcaactatgcctttatcaaatttgaagcataagttatattattaaaattatttttgtat

SEQ ID NO: 125155 - DNA, 80 bp, synthetic construct
  misc_feature 1..80: note = Artificially Synthesized Probe
  source 1..80: mol_type = other DNA
ggaaactgttaagaagttaccagtgtccaaaatgtcttcattgtttcttactcatacttacacctcacatgacctgccca

SEQ ID NO: 125156 - DNA, 80 bp, synthetic construct
  misc_feature 1..80: note = Artificially Synthesized Probe
  source 1..80: mol_type = other DNA
taaatggctcataccccgaaggcagttcctagacacatgggaaatttccctcaccaaagagcaattaagaaaacaaaaac

SEQ ID NO: 125157 - DNA, 80 bp, synthetic construct
  misc_feature 1..80: note = Artificially Synthesized Probe
  source 1..80: mol_type = other DNA
tgtggtggagaagtatttgaatgcatttaggcttaatttcttcgccttccacatgttaacagtagagctctatgcactcc

SEQ ID NO: 125158 - DNA, 80 bp, synthetic construct; identical to SEQ ID NO: 40288
  misc_feature 1..80: note = Artificially Synthesized Probe
  source 1..80: mol_type = other DNA

SEQ ID NO: 125159 - DNA, 80 bp, synthetic construct
  misc_feature 1..80: note = Artificially Synthesized Probe
  source 1..80: mol_type = other DNA
tcaaactgtcgttggtgtgatactttggctcaaaggatctttgcttttccattttaagcttctgttttgagttttgccct

SEQ ID NO: 125160 - DNA, 80 bp, synthetic construct
  misc_feature 1..80: note = Artificially Synthesized Probe
  source 1..80: mol_type = other DNA
cctacacgtggacattattctcctgatcctcctacctggtccaccccagggctaccggaaggtaaaatcttcacctgaac

SEQ ID NO: 125161 - DNA, 80 bp, synthetic construct
  misc_feature 1..80: note = Artificially Synthesized Probe
  source 1..80: mol_type = other DNA
gagtggcactggcagagaaggataggagtggaatgcccacacagtgaccaacagaactggtctgcgtgcataaccagctg

SEQ ID NO: 125162 - DNA, 80 bp, synthetic construct; identical to SEQ ID NO: 40289
  misc_feature 1..80: note = Artificially Synthesized Probe
  source 1..80: mol_type = other DNA

SEQ ID NO: 125163 - DNA, 80 bp, synthetic construct
  misc_feature 1..80: note = Artificially Synthesized Probe
  source 1..80: mol_type = other DNA
gctgagatgatgtctggagaacttggatggacttctcccttatatcacattttatcaccaggatttgaaatctggccagg

SEQ ID NO: 125164 - DNA, 80 bp, synthetic construct
  misc_feature 1..80: note = Artificially Synthesized Probe
  source 1..80: mol_type = other DNA
tagtcttttttttttccagctaattgcagactttgatcattgcttaattgtacaagtgtccactgtaagggagggaaagg

SEQ ID NO: 125165 - DNA, 80 bp, synthetic construct
  misc_feature 1..80: note = Artificially Synthesized Probe
  source 1..80: mol_type = other DNA
aatgtatgtaaagtgcttggaacctgcaccccaggtgtgccacgtacatgtgtttgccctgaccatgtggaaggtcatct

SEQ ID NO: 125166 - DNA, 80 bp, synthetic construct
  misc_feature 1..80: note = Artificially Synthesized Probe
  source 1..80: mol_type = other DNA
ggtggatcatttgaggtcaggagtttgagaccagcctggccaatctggtgaaaccccatctctactgaaaatacaaaaat

SEQ ID NO: 125167 - DNA, 80 bp, synthetic construct; identical to SEQ ID NO: 40290
  misc_feature 1..80: note = Artificially Synthesized Probe
  source 1..80: mol_type = other DNA

SEQ ID NO: 125168 - DNA, 80 bp, synthetic construct
  misc_feature 1..80: note = Artificially Synthesized Probe
  source 1..80: mol_type = other DNA
tcccccacaccccgcgtccccctcccccacacctgctgtcaccctcccccacaccgtcatccccctccccgacaccccac

SEQ ID NO: 125169 - DNA, 80 bp, synthetic construct
  misc_feature 1..80: note = Artificially Synthesized Probe
  source 1..80: mol_type = other DNA
catccccgtcccccacaccccgcgtccccctcccccacaccccacgccccccacaacatcctgcgtccccctcccccgca

SEQ ID NO: 125170 - DNA, 80 bp, synthetic construct; identical to SEQ ID NO: 40291
  misc_feature 1..80: note = Artificially Synthesized Probe
  source 1..80: mol_type = other DNA

SEQ ID NO: 125171 - DNA, 80 bp, synthetic construct
  misc_feature 1..80: note = Artificially Synthesized Probe
  source 1..80: mol_type = other DNA
tgcaaaatattaagattgcaaatccaaaccagaaatctttctcttacctaggccatgtggctgcttctagtgaaagatgc

SEQ ID NO: 125172 - DNA, 80 bp, synthetic construct
  misc_feature 1..80: note = Artificially Synthesized Probe
  source 1..80: mol_type = other DNA
aggtgaatgttttcagcttttttttttttggaatcaatgtacagaaataactgacatgatcataagctgccaattggaca

SEQ ID NO: 125173 - DNA, 80 bp, synthetic construct
  misc_feature 1..80: note = Artificially Synthesized Probe
  source 1..80: mol_type = other DNA
tactaaaaatacaaaaaaattagccaggcatggtgacaggtgcctgtaatcccagctacttgggaggctaaggcatgaga

SEQ ID NO: 125174 - DNA, 80 bp, synthetic construct; identical to SEQ ID NO: 40292
  misc_feature 1..80: note = Artificially Synthesized Probe
  source 1..80: mol_type = other DNA

SEQ ID NO: 125175 - DNA, 80 bp, synthetic construct
  misc_feature 1..80: note = Artificially Synthesized Probe
  source 1..80: mol_type = other DNA
agctacttgggaggctgaggcacaagaatcactcgaacctgggaggtggaggctgcagtgtgctgagatcatgccactgc

SEQ ID NO: 125176 - DNA, 80 bp, synthetic construct
  misc_feature 1..80: note = Artificially Synthesized Probe
  source 1..80: mol_type = other DNA
aagcctcagctgtggcctgtctgctaatatctgctgggggaagtctgtcatgtgggtcagagcaagtcacagggctatgg

SEQ ID NO: 125177 - DNA, 80 bp, synthetic construct
  misc_feature 1..80: note = Artificially Synthesized Probe
  source 1..80: mol_type = other DNA
gggggttaaactaaaatggaacaggggcctcccagcttaccagcagcatgacctgcaggccgcaggatcccagcctcctc

SEQ ID NO: 125178 - DNA, 80 bp, synthetic construct
  misc_feature 1..80: note = Artificially Synthesized Probe
  source 1..80: mol_type = other DNA
aatgattctgaattttcctcttgaaagagaataaaggatggggaaaattgaatccacaaacctgagcaatacacatcagg

SEQ ID NO: 125179 - DNA, 80 bp, synthetic construct; identical to SEQ ID NO: 40293
  misc_feature 1..80: note = Artificially Synthesized Probe
  source 1..80: mol_type = other DNA

SEQ ID NO: 125180 - DNA, 80 bp, synthetic construct
  misc_feature 1..80: note = Artificially Synthesized Probe
  source 1..80: mol_type = other DNA
tctccgtcatgcatccctggggggaggcttcacccctgcatcctggtgcctattctccttcccatccgcgggggaggttt

SEQ ID NO: 125181 - DNA, 80 bp, synthetic construct
  misc_feature 1..80: note = Artificially Synthesized Probe
  source 1..80: mol_type = other DNA
agacaggacccagggtggagagcaagggcaggaagcagaatatggcacatttcatgattttagttttcccctgtcccgtc

SEQ ID NO: 125182 - DNA, 80 bp, synthetic construct
  misc_feature 1..80: note = Artificially Synthesized Probe
  source 1..80: mol_type = other DNA
ccacaggtgccagtggtttaggcttaatggtacatttgacacctaatgatttttattccagcttttatacaaagtaaatg

SEQ ID NO: 125183 - DNA, 80 bp, synthetic construct; identical to SEQ ID NO: 40294
  misc_feature 1..80: note = Artificially Synthesized Probe
  source 1..80: mol_type = other DNA

SEQ ID NO: 125184 - DNA, 80 bp, synthetic construct
  misc_feature 1..80: note = Artificially Synthesized Probe
  source 1..80: mol_type = other DNA
gttttattatttaaaatatatcaactcacttgctttttcatctaagaaaatggtctttttcatttggtaagtaattttat

SEQ ID NO: 125185 - DNA, 80 bp, synthetic construct
  misc_feature 1..80: note = Artificially Synthesized Probe
  source 1..80: mol_type = other DNA
tgcctcagcctcttaaatgtgttttcagatggagtgaggaggttgacttggtagttagattgttttttaatgtgagaagg

SEQ ID NO: 125186 - DNA, 80 bp, synthetic construct; identical to SEQ ID NO: 40069
  misc_feature 1..80: note = Artificially Synthesized Probe
  source 1..80: mol_type = other DNA

SEQ ID NO: 125187 - DNA, 80 bp, synthetic construct
  misc_feature 1..80: note = Artificially Synthesized Probe
  source 1..80: mol_type = other DNA
cgaccctgggctacacactgagcccttcattaaatgccttctccagtttgggaaagaggaaaaatgtaaaagcagaacgt

SEQ ID NO: 125188 - DNA, 80 bp, synthetic construct; identical to SEQ ID NO: 40295
  misc_feature 1..80: note = Artificially Synthesized Probe
  source 1..80: mol_type = other DNA

SEQ ID NO: 125189 - DNA, 80 bp, synthetic construct
  misc_feature 1..80: note = Artificially Synthesized Probe
  source 1..80: mol_type = other DNA
acccccgagacttagtgacagttatttttgacttttccaactatactatttgcctagaaaatgtgtctattaaatagcgt

SEQ ID NO: 125190 - DNA, 80 bp, synthetic construct
  misc_feature 1..80: note = Artificially Synthesized Probe
  source 1..80: mol_type = other DNA
aggattttcattttttttttttaacatactttctgcatctaaggctcagaaaccaaaatgccagaatcaactatggtagt

SEQ ID NO: 125191 - DNA, 80 bp, synthetic construct
  misc_feature 1..80: note = Artificially Synthesized Probe
  source 1..80: mol_type = other DNA
ttgtgctagttaacttcattctgccgtcatagaacaattaaacagaagcatttgggagaggaataaaaaaagtgccaggg

SEQ ID NO: 125192 - DNA, 80 bp, synthetic construct
  misc_feature 1..80: note = Artificially Synthesized Probe
  source 1..80: mol_type = other DNA
cgaagaaaagattaaagccataacacattttggcacacttcttctcaccccacccccagtctagaaaatcaagaagtagt

SEQ ID NO: 125193 - DNA, 80 bp, synthetic construct
  misc_feature 1..80: note = Artificially Synthesized Probe
  source 1..80: mol_type = other DNA
tgtctgagaagctccggaggctccacagactgcagggcagccctgccccagagagtgagtgacttacgtccaggagcggc

SEQ ID NO: 125194 - DNA, 80 bp, synthetic construct
  misc_feature 1..80: note = Artificially Synthesized Probe
  source 1..80: mol_type = other DNA
tgccgctgctcgctgggctgctcccgccggtgcccgctcagaagttctcggcgctcacggtaagcccgggcccgcgggac

SEQ ID NO: 125195 - DNA, 80 bp, synthetic construct; identical to SEQ ID NO: 40070
  misc_feature 1..80: note = Artificially Synthesized Probe
  source 1..80: mol_type = other DNA

SEQ ID NO: 125196 - DNA, 80 bp, synthetic construct
  misc_feature 1..80: note = Artificially Synthesized Probe
  source 1..80: mol_type = other DNA
tctcgaatggtcaagatttagatgaaacttaggaacacacagttctctgctaagaagccatcagatcagccggaaaaaaa

SEQ ID NO: 125197 - DNA, 80 bp, synthetic construct
  misc_feature 1..80: note = Artificially Synthesized Probe
  source 1..80: mol_type = other DNA
atagggaatcagatgaaactggggagctctggatgaagcgaggtgctgctctgagagctggaactgggggctctggatga

SEQ ID NO: 125198 - DNA, 80 bp, synthetic construct
  misc_feature 1..80: note = Artificially Synthesized Probe
  source 1..80: mol_type = other DNA
actggggggctctggatgaagcggcatgctgctctgagagctggaactggggggctctggatgaagcgaggtgctgctct

SEQ ID NO: 125199 - DNA, 80 bp, synthetic construct; identical to SEQ ID NO: 40071
  misc_feature 1..80: note = Artificially Synthesized Probe
  source 1..80: mol_type = other DNA

SEQ ID NO: 125200 - DNA, 80 bp, synthetic construct
  misc_feature 1..80: note = Artificially Synthesized Probe
  source 1..80: mol_type = other DNA
agagctggaactggggtgctctggatgccgctcccacagctggagtcctgctctcgtgccctgctccaggggctcctcta

SEQ ID NO: 125201 - DNA, 80 bp, synthetic construct
  misc_feature 1..80: note = Artificially Synthesized Probe
  source 1..80: mol_type = other DNA
gtttccaaaaatctcaagaaaaacagcatatttgtcatagtatttgtgcatgcgctttgtctgggctttctgcatctgtc

SEQ ID NO: 125202 - DNA, 80 bp, synthetic construct
  misc_feature 1..80: note = Artificially Synthesized Probe
  source 1..80: mol_type = other DNA
cagggccaaggaatggtgaatagcccggtggggcggtaaatcccaagccgcttctccaacattccttttggaaaagggag

SEQ ID NO: 125203 - DNA, 80 bp, synthetic construct; identical to SEQ ID NO: 40072
  misc_feature 1..80: note = Artificially Synthesized Probe
  source 1..80: mol_type = other DNA

SEQ ID NO: 125204 - DNA, 80 bp, synthetic construct
  misc_feature 1..80: note = Artificially Synthesized Probe
  source 1..80: mol_type = other DNA
ctccctacgatttgcatcctacctactttaataaatcaagaggcagtatcagtccatgcagtgggtgggacccacagctt

SEQ ID NO: 125205 - DNA, 80 bp, synthetic construct
  misc_feature 1..80: note = Artificially Synthesized Probe
  source 1..80: mol_type = other DNA
tttttttcagagatggagtctcgccctgtcgcccaggctggagtgcagtggagcaatctcatctcactgcaacctccacc

SEQ ID NO: 125206 - DNA, 80 bp, synthetic construct
  misc_feature 1..80: note = Artificially Synthesized Probe
  source 1..80: mol_type = other DNA
cctcggcctcccaaagtgctgggattacaggcatgagccaccgcttctggcccaacctgctaatttttaaaaatgttttt

SEQ ID NO: 125207 - DNA, 80 bp, synthetic construct
  misc_feature 1..80: note = Artificially Synthesized Probe
  source 1..80: mol_type = other DNA
ctattgagtttattcggttacttttcctgttgatcaatgattattttccttttgatactcctagtatgctatccttatat

SEQ ID NO: 125208 - DNA, 80 bp, synthetic construct; identical to SEQ ID NO: 40073
  misc_feature 1..80: note = Artificially Synthesized Probe
  source 1..80: mol_type = other DNA

SEQ ID NO: 125209 - DNA, 80 bp, synthetic construct
  misc_feature 1..80: note = Artificially Synthesized Probe
  source 1..80: mol_type = other DNA
gtgtatggtcagggctctgccagccttgctggaattccggaagcacatgttctaaagtgttggcaggactttcaggtcag

SEQ ID NO: 125210 - DNA, 80 bp, synthetic construct
  misc_feature 1..80: note = Artificially Synthesized Probe
  source 1..80: mol_type = other DNA
tccctgccatgggcagtgggcaccatttagaaattcttttgaatgctggtcttgacaatgaaggttttttgttttttgag

SEQ ID NO: 125211 - DNA, 80 bp, synthetic construct
  misc_feature 1..80: note = Artificially Synthesized Probe
  source 1..80: mol_type = other DNA
aggtgtttgccaccacacctggccaatttttgtatttttgtagagacggggtttcaccatgttggccaggctggtctcaa

SEQ ID NO: 125212 - DNA, 80 bp, synthetic construct; identical to SEQ ID NO: 40074
  misc_feature 1..80: note = Artificially Synthesized Probe
  source 1..80: mol_type = other DNA

SEQ ID NO: 125213 - DNA, 80 bp, synthetic construct
  misc_feature 1..80: note = Artificially Synthesized Probe
  source 1..80: mol_type = other DNA
tccttgccctgatgaaaggggctggttctcatcaggctcctcactggtaaaaagagataagagccagtccttccagggcc

SEQ ID NO: 125214 - DNA, 80 bp, synthetic construct
  misc_feature 1..80: note = Artificially Synthesized Probe
  source 1..80: mol_type = other DNA
aggaaagtttggcaaaactgaaaggagggacaggctttgctaggggtaatttagtgtgttttgtaaacggataggggttc

SEQ ID NO: 125215 - DNA, 80 bp, synthetic construct
  misc_feature 1..80: note = Artificially Synthesized Probe
  source 1..80: mol_type = other DNA
tgaaatcaataaactttagcaattcaaatcatcgtgcaaacccaggcttgtacggaaagccaaatcacaagcctctgctt

SEQ ID NO: 125216 - DNA, 80 bp, synthetic construct; identical to SEQ ID NO: 40047
  misc_feature 1..80: note = Artificially Synthesized Probe
  source 1..80: mol_type = other DNA

SEQ ID NO: 125217 - DNA, 80 bp, synthetic construct
  misc_feature 1..80: note = Artificially Synthesized Probe
  source 1..80: mol_type = other DNA
tgcagcctcgttaggagtgctccctcactgcttcaagatgtccagtggaaatttccactccattcggtgatattgtgcat

SEQ ID NO: 125218 - DNA, 80 bp, synthetic construct; identical to SEQ ID NO: 40075
  misc_feature 1..80: note = Artificially Synthesized Probe
  source 1..80: mol_type = other DNA

SEQ ID NO: 125219 - DNA, 80 bp, synthetic construct
  misc_feature 1..80: note = Artificially Synthesized Probe
  source 1..80: mol_type = other DNA
tgctgtgagtccttttggacatagtttcctactctttccgttataaagcgtcttcacattttaatgaaaaaatacctgtt

SEQ ID NO: 125220 - DNA, 80 bp, synthetic construct
  misc_feature 1..80: note = Artificially Synthesized Probe
  source 1..80: mol_type = other DNA
accagcctgggcaacatgatgaaaccctgtctctaccaaaaatacaaaaaattaaccaggtgttagtggctcatgtctgt

SEQ ID NO: 125221 - DNA, 80 bp, synthetic construct
  misc_feature 1..80: note = Artificially Synthesized Probe
  source 1..80: mol_type = other DNA
aaataaactgggtatcctgtgacattactttgttctatgtttaaacaaggataattatgtttttaaaaaaggatttctat

SEQ ID NO: 125222 - DNA, 80 bp, synthetic construct; identical to SEQ ID NO: 40076
  misc_feature 1..80: note = Artificially Synthesized Probe
  source 1..80: mol_type = other DNA

SEQ ID NO: 125223 - DNA, 80 bp, synthetic construct
  misc_feature 1..80: note = Artificially Synthesized Probe
  source 1..80: mol_type = other DNA
tttaagtgtgtggctgagttctgttttaaggagatataactgtcgcacaaccgatatccagaactttttcaactggcaaa

SEQ ID NO: 125224 - DNA, 80 bp, synthetic construct
  misc_feature 1..80: note = Artificially Synthesized Probe
  source 1..80: mol_type = other DNA
aggcttacttcacctggcataatggcctcaaggttcattcatgcggtaacatagttcagcatttccttcttttccaaggc

SEQ ID NO: 125225 - DNA, 80 bp, synthetic construct
  misc_feature 1..80: note = Artificially Synthesized Probe
  source 1..80: mol_type = other DNA
actctatagaccaaggaggaaagcttgcctctctgcctccttctactccattcatttcttctcatctagaagcagggaaa

SEQ ID NO: 125226 - DNA, 80 bp, synthetic construct
  misc_feature 1..80: note = Artificially Synthesized Probe
  source 1..80: mol_type = other DNA
gttacttttactttttcaagaaaccaccgtattattttccatagtgcctatatcattttatattcccaccagaatataca

SEQ ID NO: 125227 - DNA, 80 bp, synthetic construct; identical to SEQ ID NO: 40077
  misc_feature 1..80: note = Artificially Synthesized Probe
  source 1..80: mol_type = other DNA

SEQ ID NO: 125228 - DNA, 80 bp, synthetic construct
  misc_feature 1..80: note = Artificially Synthesized Probe
  source 1..80: mol_type = other DNA
ctgctatggcttgtgcttttggggtcatagccaggaaatcattgccaaagccaatgtcaagatattttcctccatgtttt

SEQ ID NO: 125229 - DNA, 80 bp, synthetic construct
  misc_feature 1..80: note = Artificially Synthesized Probe
  source 1..80: mol_type = other DNA
agtgaatggtcttgccatcattactgaaaatcatttgcctgtatatgtaagagcttatttctggcacttctactctattc

SEQ ID NO: 125230 - DNA, 80 bp, synthetic construct; identical to SEQ ID NO: 40078
  misc_feature 1..80: note = Artificially Synthesized Probe
  source 1..80: mol_type = other DNA

SEQ ID NO: 125231 - DNA, 80 bp, synthetic construct
  misc_feature 1..80: note = Artificially Synthesized Probe
  source 1..80: mol_type = other DNA
tattttactaatactataggggaaatggggaaatgctatttctcattcaaaagcactgcactggagcatcgtgatgtttt

SEQ ID NO: 125232 - DNA, 80 bp, synthetic construct
  misc_feature 1..80: note = Artificially Synthesized Probe
  source 1..80: mol_type = other DNA
aatcctttgtcctttggctgagcagccctttggtgtgttaagatgaagagtacgattgtaaattcaacctccacccctga

SEQ ID NO: 125233 - DNA, 80 bp, synthetic construct
  misc_feature 1..80: note = Artificially Synthesized Probe
  source 1..80: mol_type = other DNA
ccagaaagtggatctccctacatgtttataagattctggcattactgaagggtattgaatggctcgaaagttcaagccct

SEQ ID NO: 125234 - DNA, 80 bp, synthetic construct
  misc_feature 1..80: note = Artificially Synthesized Probe
  source 1..80: mol_type = other DNA
acctgtgtgccctgcggtgagcctgtgaaacgatactgttaccttctctcacttccttgatgcctgttgcttattctctt

SEQ ID NO: 125235 - DNA, 80 bp, synthetic construct
  misc_feature 1..80: note = Artificially Synthesized Probe
  source 1..80: mol_type = other DNA
cctctgctactttatgtttaagattcagagaatccactttgtctggtaatgatctctcttctttccaccaaagtcattct

SEQ ID NO: 125236 - DNA, 80 bp, synthetic construct; identical to SEQ ID NO: 40079
  misc_feature 1..80: note = Artificially Synthesized Probe
  source 1..80: mol_type = other DNA

SEQ ID NO: 125237 - DNA, 80 bp, synthetic construct
  misc_feature 1..80: note = Artificially Synthesized Probe
  source 1..80: mol_type = other DNA
gggacagcacggcatgtgtgctgcaaattaatgggatctggagcctggagacagagtcttgtcccttcccagctatatga

SEQ ID NO: 125238 - DNA, 80 bp, synthetic construct
  misc_feature 1..80: note = Artificially Synthesized Probe
  source 1..80: mol_type = other DNA
gggattttgttctttcctctgttcatccgtgcattgatggattgcttcattcaatagtgagcatttagcacaggtgggga

SEQ ID NO: 125239 - DNA, 80 bp, synthetic construct
  misc_feature 1..80: note = Artificially Synthesized Probe
  source 1..80: mol_type = other DNA
ctgggctggggcttcctggggcacctttcacagtgccccgctcctccttccagcatttcctgctgccctttgctgattcc

SEQ ID NO: 125240 - DNA, 80 bp, synthetic construct; identical to SEQ ID NO: 40080
  misc_feature 1..80: note = Artificially Synthesized Probe
  source 1..80: mol_type = other DNA

SEQ ID NO: 125241 - DNA, 80 bp, synthetic construct
  misc_feature 1..80: note = Artificially Synthesized Probe
  source 1..80: mol_type = other DNA
taggacacgacagttattgctgctgatgttctgtgtagaaaacgtgtaacaaatgacacgtccttaaccttttgaggcat

SEQ ID NO: 125242 - DNA, 80 bp, synthetic construct
  misc_feature 1..80: note = Artificially Synthesized Probe
  source 1..80: mol_type = other DNA
ccgatacatttttgaggagaaagaagaaaaaagaatgtaaggtcgttgtggctgtagcttcagaatagatccctttatgg

SEQ ID NO: 125243 - DNA, 80 bp, synthetic construct; identical to SEQ ID NO: 40081
  misc_feature 1..80: note = Artificially Synthesized Probe
  source 1..80: mol_type = other DNA

SEQ ID NO: 125244 - DNA, 80 bp, synthetic construct
  misc_feature 1..80: note = Artificially Synthesized Probe
  source 1..80: mol_type = other DNA
catgcgggctctgagcaagacgggtgagatgttctgtaaacctgtggcaggctggggagaggaggccatggccagcgttg

SEQ ID NO: 125245 - DNA, 80 bp, synthetic construct
  misc_feature 1..80: note = Artificially Synthesized Probe
  source 1..80: mol_type = other DNA
ggacactgctcggcgttagaagaagaagtagtgaagggcagtattggtggaataggcaggagagggagacaacgtctccg

SEQ ID NO: 125246 - DNA, 80 bp, synthetic construct
  misc_feature 1..80: note = Artificially Synthesized Probe
  source 1..80: mol_type = other DNA
taaccgtagtccacttgggaccttcccacacgtggtctcccagaaccattccggtctcacaggtacagagatgaggttgg

SEQ ID NO: 125247 - DNA, 80 bp, synthetic construct
  misc_feature 1..80: note = Artificially Synthesized Probe
  source 1..80: mol_type = other DNA
ccttgaagaaggaggtacattgaatgccacaccgtgcccattttcctttttatttctgtgaatgactgagatgagggaat

SEQ ID NO: 125248 - DNA, 80 bp, synthetic construct; identical to SEQ ID NO: 40082
  misc_feature 1..80: note = Artificially Synthesized Probe
  source 1..80: mol_type = other DNA

SEQ ID NO: 125249 - DNA, 80 bp, synthetic construct
  misc_feature 1..80: note = Artificially Synthesized Probe
  source 1..80: mol_type = other DNA
ctgtaatatcactactaagagattaaacatttagagttttgcagtactgagcagttggcaatcttttatcctgtgtgtgt

SEQ ID NO: 125250 - DNA, 80 bp, synthetic construct
  misc_feature 1..80: note = Artificially Synthesized Probe
  source 1..80: mol_type = other DNA
gtgtgtgtgtacatacatacatatatatttataataatttagccaaactcttactgtcgacatttaattttaaaatttac

SEQ ID NO: 125251 - DNA, 80 bp, synthetic construct
  misc_feature 1..80: note = Artificially Synthesized Probe
  source 1..80: mol_type = other DNA
gcatgtatgaaacatttggaactgcttggagcacgtcactccttcaagttgagcatcagcaactttatttcccttggttc

SEQ ID NO: 125252 - DNA, 80 bp, synthetic construct; identical to SEQ ID NO: 40083
  misc_feature 1..80: note = Artificially Synthesized Probe
  source 1..80: mol_type = other DNA

SEQ ID NO: 125253 - DNA, 80 bp, synthetic construct
  misc_feature 1..80: note = Artificially Synthesized Probe
  source 1..80: mol_type = other DNA
tgatgcatgtctctgagatcccaaatcttactctttaccttttcagttttcagagcatgaaaaggtatatttgggcttgt

SEQ ID NO: 125254 - DNA, 80 bp, synthetic construct
  misc_feature 1..80: note = Artificially Synthesized Probe
  source 1..80: mol_type = other DNA
aagtacagaggaaagttctggacatataacagagccctttctctttctttcgtggacagctcaagtcctaaacggaaaat

SEQ ID NO: 125255 - DNA, 80 bp, synthetic construct
  misc_feature 1..80: note = Artificially Synthesized Probe
  source 1..80: mol_type = other DNA
tgctctaaagaaccatcccctaatgtgcttgacttttagggatctactggggatgaaagccaaaaatacacaacaaaagt

SEQ ID NO: 125256 - DNA, 80 bp, synthetic construct; identical to SEQ ID NO: 40084
  misc_feature 1..80: note = Artificially Synthesized Probe
  source 1..80: mol_type = other DNA

SEQ ID NO: 125257 - DNA, 80 bp, synthetic construct
  misc_feature 1..80: note = Artificially Synthesized Probe
  source 1..80: mol_type = other DNA
gacttgggaccacaagaggacagtccaaaatgaatagtccaaaatgtctcctggtgtagccaagaaaatgatggtggtag

SEQ ID NO: 125258 - DNA, 80 bp, synthetic construct
  misc_feature 1..80: note = Artificially Synthesized Probe
  source 1..80: mol_type = other DNA
agaacaatattgcctgggacccctttcccagaagtttttggttagagccaaagtattcattcccatgttgactaaatcat

SEQ ID NO: 125259 - DNA, 80 bp, synthetic construct
  misc_feature 1..80: note = Artificially Synthesized Probe
  source 1..80: mol_type = other DNA
agtaaagtaagtattcattaaaaaaacaaaataagatgaactgcctgaaacaaagatctccttatgcccagacttgcagc

SEQ ID NO: 125260 - DNA, 80 bp, synthetic construct
  misc_feature 1..80: note = Artificially Synthesized Probe
  source 1..80: mol_type = other DNA
ggaaaggagtcaggaacattgaatgatatattgtatctggtctagaacagccctggttgtcagacactgtcctggggaaa

SEQ ID NO: 125261 - DNA, 80 bp, synthetic construct
  misc_feature 1..80: note = Artificially Synthesized Probe
  source 1..80: mol_type = other DNA
acgttgaatgatttatggtatctggtctagaacagccctggtttacagaccctgtctcgggaaaaggagtcaggaacgtt

SEQ ID NO: 125262 - DNA, 80 bp, synthetic construct; identical to SEQ ID NO: 40085
  misc_feature 1..80: note = Artificially Synthesized Probe
  source 1..80: mol_type = other DNA

SEQ ID NO: 125263 - DNA, 80 bp, synthetic construct
  misc_feature 1..80: note = Artificially Synthesized Probe
  source 1..80: mol_type = other DNA
taaaagtgttagtagtttggaggaaatagtggagaaggaaacatcagaaatctgtattcccacctagataacagttgcac

SEQ ID NO: 125264 - DNA, 80 bp, synthetic construct
  misc_feature 1..80: note = Artificially Synthesized Probe
  source 1..80: mol_type = other DNA
aagctgtgcacatgttcctggaacaggctgcatgcagtttgtgagaatcagagtgcggagaaagaccctgtccttcaaat

SEQ ID NO: 125265 - DNA, 80 bp, synthetic construct; identical to SEQ ID NO: 40086
  misc_feature 1..80: note = Artificially Synthesized Probe
  source 1..80: mol_type = other DNA

SEQ ID NO: 125266 - DNA, 80 bp, synthetic construct
  misc_feature 1..80: note = Artificially Synthesized Probe
  source 1..80: mol_type = other DNA
aacaaaccccaagcaaaccctgggaaaaatgaagaatctgacttcaagagttatcacagtattaaattcaaatgtccagt

SEQ ID NO: 125267 - DNA, 80 bp, synthetic construct
  misc_feature 1..80: note = Artificially Synthesized Probe
  source 1..80: mol_type = other DNA
tgtggcatatttaaaggaagaaaatgaatcaacagaaaactgtccttgaaaaagacctgatagcagatctacttgacaaa

SEQ ID NO: 125268 - DNA, 80 bp, synthetic construct
  misc_feature 1..80: note = Artificially Synthesized Probe
  source 1..80: mol_type = other DNA
taaaaaaattactagagggattcagaggcacatttgagcagatggaagaaaggatcagcaaacttaaagacaggaaaatg

SEQ ID NO: 125269 - DNA, 80 bp, synthetic construct
  misc_feature 1..80: note = Artificially Synthesized Probe
  source 1..80: mol_type = other DNA
aagtggaccaacatacatgttatgggagtcccagaagtagaagtgaaagagtaagaggcagagagaatacttgaagaaac

SEQ ID NO: 125270 - DNA, 80 bp, synthetic construct; identical to SEQ ID NO: 40048
  misc_feature 1..80: note = Artificially Synthesized Probe
  source 1..80: mol_type = other DNA

SEQ ID NO: 125271 - DNA, 80 bp, synthetic construct; identical to SEQ ID NO: 40087
  misc_feature 1..80: note = Artificially Synthesized Probe
  source 1..80: mol_type = other DNA

SEQ ID NO: 125272 - DNA, 80 bp, synthetic construct
  misc_feature 1..80: note = Artificially Synthesized Probe
  source 1..80: mol_type = other DNA
aaatgctaaagggagtcctgtgagatgaaataaaagacactaaatagtaactcaaagctgaataaagaaataaagatctc

SEQ ID NO: 125273 - DNA, 80 bp, synthetic construct
  misc_feature 1..80: note = Artificially Synthesized Probe
  source 1..80: mol_type = other DNA
gcagaatgaacagggtaaaaaacatgatctcaaatagaaataaaacaacaatcgaaaggtaggaacagagctgctaaaag

SEQ ID NO: 125274 - DNA, 80 bp, synthetic construct
  misc_feature 1..80: note = Artificially Synthesized Probe
  source 1..80: mol_type = other DNA
tacaaatagttaactaatcacaaaataagacaggacatgcaggaaatgagggacaaagtccttataagatatgtaagaaa

SEQ ID NO: 125275 - DNA, 80 bp, synthetic construct; identical to SEQ ID NO: 40088
  misc_feature 1..80: note = Artificially Synthesized Probe
  source 1..80: mol_type = other DNA

SEQ ID NO: 125276 - DNA, 80 bp, synthetic construct
  misc_feature 1..80: note = Artificially Synthesized Probe
  source 1..80: mol_type = other DNA
aaacctaactttacaacttgaggaactgaaaaataagaacaagctaaacctaaagctagcagaaggaactacataataaa

SEQ ID NO: 125277 - DNA, 80 bp, synthetic construct
  misc_feature 1..80: note = Artificially Synthesized Probe
  source 1..80: mol_type = other DNA
aaagtgggttttcctaagaaaaagaaagaaataaaagtgggaacagtactaccaactctacagaaataaaaatggattaa

SEQ ID NO: 125278 - DNA, 80 bp, synthetic construct
  misc_feature 1..80: note = Artificially Synthesized Probe
  source 1..80: mol_type = other DNA
acttttataacatgattgagccagtgaccaaaaatctctggacagagaaaacctgtggacctcacggcttcactggtgaa

SEQ ID NO: 125279 - DNA, 80 bp, synthetic construct
  misc_feature 1..80: note = Artificially Synthesized Probe
  source 1..80: mol_type = other DNA
atcgatgccaaaatcttcaacaaaatgtagcaaactgaattcagcagcatattaaaaggaatatacaccatgatcatgtg

SEQ ID NO: 125280 - DNA, 80 bp, synthetic construct
  misc_feature 1..80: note = Artificially Synthesized Probe
  source 1..80: mol_type = other DNA
tggtaaatgcctcttattggtcttgtggaatgcatgaccacagacctgaaacagttatttcccactcctatttgtgttta

SEQ ID NO: 125281 - DNA, 80 bp, synthetic construct; identical to SEQ ID NO: 40089
  misc_feature 1..80: note = Artificially Synthesized Probe
  source 1..80: mol_type = other DNA

SEQ ID NO: 125282 - DNA, 80 bp, synthetic construct
  misc_feature 1..80: note = Artificially Synthesized Probe
  source 1..80: mol_type = other DNA
aagtaaaattatctctgtttacagatgatatgattttatgtgttaaaaaaccctaacaatgctgtacacacacatacaca

SEQ ID NO: 125283 - DNA, 80 bp, synthetic construct
  misc_feature 1..80: note = Artificially Synthesized Probe
  source 1..80: mol_type = other DNA
taaaatgctttggaataatcaaataatgtgacagatttgtacaataaaaattataaaacattgccaaaagaagttaaaaa

SEQ ID NO: 125284 - DNA, 80 bp, synthetic construct
  misc_feature 1..80: note = Artificially Synthesized Probe
  source 1..80: mol_type = other DNA
aattcatcctaaaattcatgtggaatgtcaagggacactgactagacaaaataatttttaaaaagaacaaaactgagtac

SEQ ID NO: 125285 - DNA, 80 bp, synthetic construct; identical to SEQ ID NO: 40090
  misc_feature 1..80: note = Artificially Synthesized Probe
  source 1..80: mol_type = other DNA

SEQ ID NO: 125286 - DNA, 80 bp, synthetic construct
  misc_feature 1..80: note = Artificially Synthesized Probe
  source 1..80: mol_type = other DNA
aaaaattgtacaaattggactttaagaaaaattcaaaaattggtgtatcaaaagacactatcaacacagtacaaaggcat

SEQ ID NO: 125287 - DNA, 80 bp, synthetic construct
  misc_feature 1..80: note = Artificially Synthesized Probe
  source 1..80: mol_type = other DNA
agccactaaggacatgaaaacatgctcagaacacatgcttagcatcatggaaatgcacagaaaaactacaatgaggtgcc

SEQ ID NO: 125288 - DNA, 80 bp, synthetic construct
  misc_feature 1..80: note = Artificially Synthesized Probe
  source 1..80: mol_type = other DNA
tgtggaaaacagtatggttgcctctcaaagaattagaaataggattactgtatgatccagcaattccacttctgattatg

SEQ ID NO: 125289 - DNA, 80 bp, synthetic construct; identical to SEQ ID NO: 40091
  misc_feature 1..80: note = Artificially Synthesized Probe
  source 1..80: mol_type = other DNA

SEQ ID NO: 125290 - DNA, 80 bp, synthetic construct
  misc_feature 1..80: note = Artificially Synthesized Probe
  source 1..80: mol_type = other DNA
ataaaaatgctattccatttctgagcagttgtggtttggaatgcgtacctcatcctgttttgatatagttctcactcagc

SEQ ID NO: 125291 - DNA, 80 bp, synthetic construct
  misc_feature 1..80: note = Artificially Synthesized Probe
  source 1..80: mol_type = other DNA
ttggaagtggttctggagacagatggtggtgatagttatacaacatgatgaatgtatttaatatcacttaactatgcgct

SEQ ID NO: 125292 - DNA, 80 bp, synthetic construct
  misc_feature 1..80: note = Artificially Synthesized Probe
  source 1..80: mol_type = other DNA
ttgacaaggatatggaaaaaccctcatatagtttggagagaaatgtaaaattgttcaagtgctttggaaaacagttttcc

SEQ ID NO: 125293 - DNA, 80 bp, synthetic construct
  misc_feature 1..80: note = Artificially Synthesized Probe
  source 1..80: mol_type = other DNA
taacagccaaaaggtgaaatcaacctgaatattcatcagccagtgaatgaataagtaaaatgcagcctagtcacacaaca

SEQ ID NO: 125294 - DNA, 80 bp, synthetic construct; identical to SEQ ID NO: 40092
  misc_feature 1..80: note = Artificially Synthesized Probe
  source 1..80: mol_type = other DNA

SEQ ID NO: 125295 - DNA, 80 bp, synthetic construct
  misc_feature 1..80: note = Artificially Synthesized Probe
  source 1..80: mol_type = other DNA
cccttataggttcctatgacttcatcaaattcaaaagtattctgtctaatagatttattttgtaatgttacgagcaactg

SEQ ID NO: 125296 - DNA, 80 bp, synthetic construct
  misc_feature 1..80: note = Artificially Synthesized Probe
  source 1..80: mol_type = other DNA
atcataataatttatcttctctacttcttactgtggggactgtttgtcttagtgtccctggttcagcatggtttctggct

SEQ ID NO: 125297 - DNA, 80 bp, synthetic construct
  misc_feature 1..80: note = Artificially Synthesized Probe
  source 1..80: mol_type = other DNA
ctaaattctcaaggcagcactttatccatccaacagccttgtagattgaatactcacatcatttccttctctacacactc

SEQ ID NO: 125298 - DNA, 80 bp, synthetic construct; identical to SEQ ID NO: 40093
  misc_feature 1..80: note = Artificially Synthesized Probe
  source 1..80: mol_type = other DNA

SEQ ID NO: 125299 - DNA, 80 bp, synthetic construct
  misc_feature 1..80: note = Artificially Synthesized Probe
  source 1..80: mol_type = other DNA
tgttttggaggctgatgatatgaaaacctatctggcttgttctgtttgttcacattctattgtggttcaacggcatttta

SEQ ID NO: 125300 - DNA, 80 bp, synthetic construct
  misc_feature 1..80: note = Artificially Synthesized Probe
  source 1..80: mol_type = other DNA
cgaaggtggttaaggaggagagaactaaacataatcaaaattttccaacttagaagcccatttacatggcgtctaaaaac

SEQ ID NO: 125301 - DNA, 80 bp, synthetic construct
  misc_feature 1..80: note = Artificially Synthesized Probe
  source 1..80: mol_type = other DNA
tcacttcttggaagaaaatcataaaccaacgcattagttatcttatgccaagggctgggcagcatgcagagagacatact

SEQ ID NO: 125302 - DNA, 80 bp, synthetic construct
  misc_feature 1..80: note = Artificially Synthesized Probe
  source 1..80: mol_type = other DNA
acgtccccctgcttcttgttgctggttgctcggaaaccttgggttccagacaaatctttttccccggcaaagctgcacct

SEQ ID NO: 125303 - DNA, 80 bp, synthetic construct; identical to SEQ ID NO: 40094
  misc_feature 1..80: note = Artificially Synthesized Probe
  source 1..80: mol_type = other DNA

SEQ ID NO: 125304 - DNA, 80 bp, synthetic construct
  misc_feature 1..80: note = Artificially Synthesized Probe
  source 1..80: mol_type = other DNA
ctggattgaagcgattctactgcctcagcctcccaagtagctaggattacaggtaccccaccatgcctggctaatttttg

SEQ ID NO: 125305 - DNA, 80 bp, synthetic construct
  misc_feature 1..80: note = Artificially Synthesized Probe
  source 1..80: mol_type = other DNA
cacacaatctatacgttgatgtagttcccttttaagtattttttttggcaatttacatgtatattctatatgtaaagcag

SEQ ID NO: 125306 - DNA, 80 bp, synthetic construct
  misc_feature 1..80: note = Artificially Synthesized Probe
  source 1..80: mol_type = other DNA
atcacagcaccacaaatgggtagcttgaaacagcagaaacttatgctttcccagttcaggaggccagcagtccaaaatct

SEQ ID NO: 125307 - DNA, 80 bp, synthetic construct; identical to SEQ ID NO: 40095
  misc_feature 1..80: note = Artificially Synthesized Probe
  source 1..80: mol_type = other DNA

SEQ ID NO: 125308 - DNA, 80 bp, synthetic construct
  misc_feature 1..80: note = Artificially Synthesized Probe
  source 1..80: mol_type = other DNA
gcactgtgggtgggaggcagagaaaactaacattttcgcaggaggcagagatcaggacccaggttctcaatcgaatcgtc

SEQ ID NO: 125309 - DNA, 80 bp, synthetic construct
  misc_feature 1..80: note = Artificially Synthesized Probe
  source 1..80: mol_type = other DNA
atcacactgttttagagggaaatatatcgaatcatctgggtccccttgcatcacactgttttagaatgaaatatatcaaa

SEQ ID NO: 125310 - DNA, 80 bp, synthetic construct
  misc_feature 1..80: note = Artificially Synthesized Probe
  source 1..80: mol_type = other DNA
ggatcacactgttttagagggaaatatatcgaatcatctgggtccccttggatcacactgttttagagtgaaatatatca

SEQ ID NO: 125311 - DNA, 80 bp, synthetic construct; identical to SEQ ID NO: 40049
  misc_feature 1..80: note = Artificially Synthesized Probe
  source 1..80: mol_type = other DNA

SEQ ID NO: 125312 - DNA, 80 bp, synthetic construct
  misc_feature 1..80: note = Artificially Synthesized Probe
  source 1..80: mol_type = other DNA
ctgggacccggctgggatgggcttctggggaccctgcccgccggggtcctgctgcggctgcgacgggctcctcgggttcc

SEQ ID NO: 125313 - DNA, 80 bp, synthetic construct
  misc_feature 1..80: note = Artificially Synthesized Probe
  source 1..80: mol_type = other DNA
cttggatcacactgttttagagggaaatatatcgaatcatctgggtccccttggatcacactgttttagagtgaaatata

SEQ ID NO: 125314 - DNA, 80 bp, synthetic construct
  misc_feature 1..80: note = Artificially Synthesized Probe
  source 1..80: mol_type = other DNA
ccccttggatcacactgttttagaatgaaatatatcaaatcgtctgggtccccttggatcacactgttttagaatgaaat

SEQ ID NO: 125315 - DNA, 80 bp, synthetic construct
  misc_feature 1..80: note = Artificially Synthesized Probe
  source 1..80: mol_type = other DNA
tgggtcctcttggatcacactgttttagagtgaaatatatggaatcatctgggtccccttgcatcacactgttttagagt

SEQ ID NO: 125316 - DNA, 80 bp, synthetic construct; identical to SEQ ID NO: 40096
  misc_feature 1..80: note = Artificially Synthesized Probe
  source 1..80: mol_type = other DNA

SEQ ID NO: 125317 - DNA, 80 bp, synthetic construct
  misc_feature 1..80: note = Artificially Synthesized Probe
  source 1..80: mol_type = other DNA
tctgggtccccttggatcacactgttttagaatgaaatatatcaaatcgtctgggtccccttggatcacactgttttaga

SEQ ID NO: 125318 - DNA, 80 bp, synthetic construct
  misc_feature 1..80: note = Artificially Synthesized Probe
  source 1..80: mol_type = other DNA
accccttgatggcctgcacgcccacccatcttcaagttcacagtggcaactcggaagcaaagtggtgtgccaagtgagat

SEQ ID NO: 125319 - DNA, 80 bp, synthetic construct; identical to SEQ ID NO: 40098
  misc_feature 1..80: note = Artificially Synthesized Probe
  source 1..80: mol_type = other DNA

SEQ ID NO: 125320 - DNA, 80 bp, synthetic construct
  misc_feature 1..80: note = Artificially Synthesized Probe
  source 1..80: mol_type = other DNA
ctcattaaaaggtgaccccgtaggactctggagaggtcattcctgatggcaggaaatatttctgcatcatcttgtgcaag

SEQ ID NO: 125321 - DNA, 80 bp, synthetic construct
  misc_feature 1..80: note = Artificially Synthesized Probe
  source 1..80: mol_type = other DNA
gtttttgatcttggtcttgtggaagctggagaatttgaactatgaggatgcaagagacagatgatgctgaacggacatta

SEQ ID NO: 125322 - DNA, 80 bp, synthetic construct
  misc_feature 1..80: note = Artificially Synthesized Probe
  source 1..80: mol_type = other DNA
gtttctggcggctggaaggtgaagactgcttggtctcatgatgatgtcacccatggagcatcttttaaaataagtatttg

SEQ ID NO: 125323 - DNA, 80 bp, synthetic construct
  misc_feature 1..80: note = Artificially Synthesized Probe
  source 1..80: mol_type = other DNA
ttactaaaaatacaaaaattctctgggtgtggtgacacgcacctgtagtcccagctacttgggaggctgagacaggggaa

SEQ ID NO: 125324 - DNA, 80 bp, synthetic construct
  misc_feature 1..80: note = Artificially Synthesized Probe
  source 1..80: mol_type = other DNA
catgagctgtgggaatgtgtctactcttgtcagacacagatacagaagagccattgagttgacttaattgtgattttatt

SEQ ID NO: 125325 - DNA, 80 bp, synthetic construct; identical to SEQ ID NO: 40099
  misc_feature 1..80: note = Artificially Synthesized Probe
  source 1..80: mol_type = other DNA

SEQ ID NO: 125326 - DNA, 80 bp, synthetic construct
  misc_feature 1..80: note = Artificially Synthesized Probe
  source 1..80: mol_type = other DNA
gagaaattacaggttgtatctgaagggaatatttctcttgaaaggaaaaatataggacttacctatctaaatgagaaaag

SEQ ID NO: 125327 - DNA, 80 bp, synthetic construct
  misc_feature 1..80: note = Artificially Synthesized Probe
  source 1..80: mol_type = other DNA
caagacacccacctacctttccatagttttcagttcaccttctattttcaaagcaagaactatgcaaacataaaggaagc

SEQ ID NO: 125328 - DNA, 80 bp, synthetic construct
  misc_feature 1..80: note = Artificially Synthesized Probe
  source 1..80: mol_type = other DNA
acaactcagtccagtgataagggtgaaaaagtgtggcagaaaatatacacacaagcatctgttacgaatttcatagttat

SEQ ID NO: 125329 - DNA, 80 bp, synthetic construct; identical to SEQ ID NO: 40100
  misc_feature 1..80: note = Artificially Synthesized Probe
  source 1..80: mol_type = other DNA

SEQ ID NO: 125330 - DNA, 80 bp, synthetic construct
  misc_feature 1..80: note = Artificially Synthesized Probe
  source 1..80: mol_type = other DNA
tacattgtgaaggtagcttcaaaggaagagttcacaaatttgaatgaagactaaattgttggaatgtttagatatgctca

SEQ ID NO: 125331 - DNA, 80 bp, synthetic construct
  misc_feature 1..80: note = Artificially Synthesized Probe
  source 1..80: mol_type = other DNA
ctgcctaatttttgtacttttagtagagacgaggttccaccatattggtcaggctggtctcgaactcctgatctcaggag

SEQ ID NO: 125332 - DNA, 80 bp, synthetic construct; identical to SEQ ID NO: 40101
  misc_feature 1..80: note = Artificially Synthesized Probe
  source 1..80: mol_type = other DNA

SEQ ID NO: 125333 - DNA, 80 bp, synthetic construct
  misc_feature 1..80: note = Artificially Synthesized Probe
  source 1..80: mol_type = other DNA
agggatattaaatcctaggtagttaaaattagcttttgacaaacaagttgacattgcggacatgattttatttttcaaaa

SEQ ID NO: 125334 - DNA, 80 bp, synthetic construct
  misc_feature 1..80: note = Artificially Synthesized Probe
  source 1..80: mol_type = other DNA
aattggttcttgctattcagtgtctgccaagaataacttccagaggagttgttcttcaaaaaacaaaattagattctatg

SEQ ID NO: 125335 - DNA, 80 bp, synthetic construct
  misc_feature 1..80: note = Artificially Synthesized Probe
  source 1..80: mol_type = other DNA
aggattttgaagttagaggagaaaattaaagaaatagtctttagaactgccagcccttatgtttctccaattgatggcat

SEQ ID NO: 125336 - DNA, 80 bp, synthetic construct
  misc_feature 1..80: note = Artificially Synthesized Probe
  source 1..80: mol_type = other DNA
cttggcaagtgtattagatggttattccagatgttactaagagcagttttccttctacacgctctgagtgcaagcattct

SEQ ID NO: 125337 - DNA, 80 bp, synthetic construct; identical to SEQ ID NO: 40102
  misc_feature 1..80: note = Artificially Synthesized Probe
  source 1..80: mol_type = other DNA

SEQ ID NO: 125338 - DNA, 80 bp, synthetic construct
  misc_feature 1..80: note = Artificially Synthesized Probe
  source 1..80: mol_type = other DNA
gaacacacacagcaaacattttcttctatgcattttcacagccaacaagataggggatcacttcctaagcacgttgaaaa

SEQ ID NO: 125339 - DNA, 80 bp, synthetic construct
  misc_feature 1..80: note = Artificially Synthesized Probe
  source 1..80: mol_type = other DNA
tggagcagccccatcccagcagctgaagggcaagggaggtggctgggaagggcgggcaccacttcgctcccagctgctgg

SEQ ID NO: 125340 - DNA, 80 bp, synthetic construct
  misc_feature 1..80: note = Artificially Synthesized Probe
  source 1..80: mol_type = other DNA
gcatcctccaggccccgcctctggcaccttcctgaaacccgcagggaacctgctcacaccatgacccttctcagagggtc

SEQ ID NO: 125341 - DNA, 80 bp, synthetic construct
  misc_feature 1..80: note = Artificially Synthesized Probe
  source 1..80: mol_type = other DNA
ggctccttgtggcccaggtgtaggtccctctgcgggtccacccccctctaactgaggccctgtggaaagcccaccgtggc

SEQ ID NO: 125342 - DNA, 80 bp, synthetic construct; identical to SEQ ID NO: 40103
  misc_feature 1..80: note = Artificially Synthesized Probe
  source 1..80: mol_type = other DNA

SEQ ID NO: 125343 - DNA, 80 bp, synthetic construct
  misc_feature 1..80: note = Artificially Synthesized Probe
  source 1..80: mol_type = other DNA
gggtcacagggctctgctagctcatggcttcactcacctgcgcggttccctggcagcctcacccacctgcagggttcacc

SEQ ID NO: 125344 - DNA, 80 bp, synthetic construct
  misc_feature 1..80: note = Artificially Synthesized Probe
  source 1..80: mol_type = other DNA
tgcatgcatttcctctcgcctcctcgctcttttcttttaatgtctaaaatacctttgaagtccctcaaaatcctctgtac

SEQ ID NO: 125345 - DNA, 80 bp, synthetic construct
  misc_feature 1..80: note = Artificially Synthesized Probe
  source 1..80: mol_type = other DNA
actcatcttgttgcaactgtttgtttcttgggcattttgtggaaaacactggggtttgggaaggcagggtggggagtgct

SEQ ID NO: 125346 - DNA, 80 bp, synthetic construct; identical to SEQ ID NO: 40050
  misc_feature 1..80: note = Artificially Synthesized Probe
  source 1..80: mol_type = other DNA

SEQ ID NO: 125347 - DNA, 80 bp, synthetic construct; identical to SEQ ID NO: 40104
  misc_feature 1..80: note = Artificially Synthesized Probe
  source 1..80: mol_type = other DNA

SEQ ID NO: 125348 - DNA, 80 bp, synthetic construct
  misc_feature 1..80: note = Artificially Synthesized Probe
  source 1..80: mol_type = other DNA
aggaggcagcggtgagggcccccaccctggggcctcccgagcccttccctgcccatctccaagattgcactgtgcacctc

SEQ ID NO: 125349 - DNA, 80 bp, synthetic construct
  misc_feature 1..80: note = Artificially Synthesized Probe
  source 1..80: mol_type = other DNA
aaggtgagaggggaacaggagcctgaccggagcccccaccgcctctcctccaggcgaggggaagatgcggcccccggcaa

SEQ ID NO: 125350 - DNA, 80 bp, synthetic construct
  misc_feature 1..80: note = Artificially Synthesized Probe
  source 1..80: mol_type = other DNA
aacggagggcagggcccgggccccaagcccatgactgggttctccttccctcgcagaggagcccggtggtcactgggagc

SEQ ID NO: 125351 - DNA, 80 bp, synthetic construct; identical to SEQ ID NO: 40105
  misc_feature 1..80: note = Artificially Synthesized Probe
  source 1..80: mol_type = other DNA

SEQ ID NO: 125352 - DNA, 80 bp, synthetic construct
  misc_feature 1..80: note = Artificially Synthesized Probe
  source 1..80: mol_type = other DNA
attcatgggaccaatccccgttaggagcccgtggtcttgtcaggaaaacctggctcagatgaagtgagagacaaactcgg

SEQ ID NO: 125353 - DNA, 80 bp, synthetic construct
  misc_feature 1..80: note = Artificially Synthesized Probe
  source 1..80: mol_type = other DNA
atgatggggggtgctgaagggctataggtgacatttagaataaaatgaagtctcactgcctttagatggagacacagggc

SEQ ID NO: 125354 - DNA, 80 bp, synthetic construct; identical to SEQ ID NO: 40106
  misc_feature 1..80: note = Artificially Synthesized Probe
  source 1..80: mol_type = other DNA

SEQ ID NO: 125355 - DNA, 80 bp, synthetic construct
  misc_feature 1..80: note = Artificially Synthesized Probe
  source 1..80: mol_type = other DNA
gcaagagcctcagaaaagaaactctggctgaatgcctttgaaaatgtcacttcatcagcaaacgcattcgctattccagg

SEQ ID NO: 125356 - DNA, 80 bp, synthetic construct
  misc_feature 1..80: note = Artificially Synthesized Probe
  source 1..80: mol_type = other DNA
cctggaatggtaggggagccgctcttttctgatcgcccttcctgctgcaggctgagtggtgagagagccgcaacatgtga

SEQ ID NO: 125357 - DNA, 80 bp, synthetic construct
  misc_feature 1..80: note = Artificially Synthesized Probe
  source 1..80: mol_type = other DNA
ttttgatttttattatgtatgacataatgtggcatatccaccaattaaactgtcacttaagagaaggcaaatgtcaatat

SEQ ID NO: 125358 - DNA, 80 bp, synthetic construct
  misc_feature 1..80: note = Artificially Synthesized Probe
  source 1..80: mol_type = other DNA
agagtctctggggggatggccagggcccatagcctgtctactacacatggaaaccctgggtcctcccagccctacgagcc

SEQ ID NO: 125359 - DNA, 80 bp, synthetic construct
  misc_feature 1..80: note = Artificially Synthesized Probe
  source 1..80: mol_type = other DNA
acagtctctggggggacagccagggcccatagcctgtctactacacatggaaaccctgggtcctcccagccctacgagcc

SEQ ID NO: 125360 - DNA, 80 bp, synthetic construct; identical to SEQ ID NO: 40107
  misc_feature 1..80: note = Artificially Synthesized Probe
  source 1..80: mol_type = other DNA

SEQ ID NO: 125361 - DNA, 80 bp, synthetic construct
  misc_feature 1..80: note = Artificially Synthesized Probe
  source 1..80: mol_type = other DNA
atggggcagtgatgagagtcaaaccttcaggttagaagtcagatcagtttttccctatatgcctacagcagagaattcca

SEQ ID NO: 125362 - DNA, 80 bp, synthetic construct
  misc_feature 1..80: note = Artificially Synthesized Probe
  source 1..80: mol_type = other DNA
tgtaattttccactgggagcccgtgaggagctacacatttcatttttttaaccagaaccaataggggactgtggagcaga

SEQ ID NO: 125363 - DNA, 80 bp, synthetic construct; identical to SEQ ID NO: 40108
  misc_feature 1..80: note = Artificially Synthesized Probe
  source 1..80: mol_type = other DNA

SEQ ID NO: 125364 - DNA, 80 bp, synthetic construct
  misc_feature 1..80: note = Artificially Synthesized Probe
  source 1..80: mol_type = other DNA
gcccctgtggtcccacagcaactcgggaggctgagacaggagaatcacttgaacccaggaggcagaggttgcagcgagcc

SEQ ID NO: 125365 - DNA, 80 bp, synthetic construct
  misc_feature 1..80: note = Artificially Synthesized Probe
  source 1..80: mol_type = other DNA
ctggaggtgttttgtacttggtgttggcgggtctcctgttgactcgggtggaaggacagcattcacgcgtggaacctgac

SEQ ID NO: 125366 - DNA, 80 bp, synthetic construct
  misc_feature 1..80: note = Artificially Synthesized Probe
  source 1..80: mol_type = other DNA
cactgagctgcagctctggccagacactgctggactccaaggccatgtgggtgcacaagcttctctaccccccgaggagg

SEQ ID NO: 125367 - DNA, 80 bp, synthetic construct
  misc_feature 1..80: note = Artificially Synthesized Probe
  source 1..80: mol_type = other DNA
ttttgtagctaaagcaataaggatggtgcctgaggctgcatgaacccccggaacacttttaagtgaccaaaagcatgaca

SEQ ID NO: 125368 - DNA, 80 bp, synthetic construct; identical to SEQ ID NO: 40109
  misc_feature 1..80: note = Artificially Synthesized Probe
  source 1..80: mol_type = other DNA

SEQ ID NO: 125369 - DNA, 80 bp, synthetic construct
  misc_feature 1..80: note = Artificially Synthesized Probe
  source 1..80: mol_type = other DNA
tcctgggctcaagcgattcccctgcctcagcctcctgaggagctgggactataggcacacgctacaacgcctggctaatt

SEQ ID NO: 125370 - DNA, 80 bp, synthetic construct
  misc_feature 1..80: note = Artificially Synthesized Probe
  source 1..80: mol_type = other DNA
ggagacagggaaggaaaataaacacaaaataaatgttttggaaaaggagaagagagttgcagagcaaaaagtacaataaa

SEQ ID NO: 125371 - DNA, 80 bp, synthetic construct
  misc_feature 1..80: note = Artificially Synthesized Probe
  source 1..80: mol_type = other DNA
tgaggtggggggaagatggaaccaagagctctaggaaatcctggctcaggggaccaaaagccagtaaagcattggtaaat

SEQ ID NO: 125372 - DNA, 80 bp, synthetic construct
  misc_feature 1..80: note = Artificially Synthesized Probe
  source 1..80: mol_type = other DNA
ccaggggtggctggggttcagccttgcttggttgtgtgtgcatcctgagaggtccgtcttgattccccacagaaggtggg

SEQ ID NO: 125373 - DNA, 80 bp, synthetic construct; identical to SEQ ID NO: 40110
  misc_feature 1..80: note = Artificially Synthesized Probe
  source 1..80: mol_type = other DNA

SEQ ID NO: 125374 - DNA, 80 bp, synthetic construct
  misc_feature 1..80: note = Artificially Synthesized Probe
  source 1..80: mol_type = other DNA
tgcactatcacattttgttttcacgatcatctttatgaaacaggaatccttgttatcacctccattggacaagtgaagaa

SEQ ID NO: 125375 - DNA, 80 bp, synthetic construct
  misc_feature 1..80: note = Artificially Synthesized Probe
  source 1..80: mol_type = other DNA
atctgcccacagccaccttctgcgtatttattgggtttgtggctgtaatctagtcatgcagattaaaacaaattcatctc

SEQ ID NO: 125376 - DNA, 80 bp, synthetic construct; identical to SEQ ID NO: 40111
  misc_feature 1..80: note = Artificially Synthesized Probe
  source 1..80: mol_type = other DNA

SEQ ID NO: 125377 - DNA, 80 bp, synthetic construct
  misc_feature 1..80: note = Artificially Synthesized Probe
  source 1..80: mol_type = other DNA
cctgcctcagcctcctgagtagctgggattataggtgtgtgtcaccacgcctggctaattttttgtatttttagtagagg

SEQ ID NO: 125378 - DNA, 80 bp, synthetic construct
  misc_feature 1..80: note = Artificially Synthesized Probe
  source 1..80: mol_type = other DNA
ttttttttttttttttttttgagacaaaatttcactcttgttgccaaggctggagtgcagtggcgcaatctctgctcact

SEQ ID NO: 125379 - DNA, 80 bp, synthetic construct
  misc_feature 1..80: note = Artificially Synthesized Probe
  source 1..80: mol_type = other DNA
gatttgcctgcctcggcctcccaaagtgctgggattacaggtgtgagccaccatgcctggccaccttgcttgttttctaa

SEQ ID NO: 125380 - DNA, 80 bp, synthetic construct; identical to SEQ ID NO: 40112
  misc_feature 1..80: note = Artificially Synthesized Probe
  source 1..80: mol_type = other DNA

SEQ ID NO: 125381 - DNA, 80 bp, synthetic construct
  misc_feature 1..80: note = Artificially Synthesized Probe
  source 1..80: mol_type = other DNA
accaagatactgaccgtggatgctgctatttctattttagcaccagctgagactccctgaagggttttctagtttctgtt

SEQ ID NO: 125382 - DNA, 80 bp, synthetic construct
  misc_feature 1..80: note = Artificially Synthesized Probe
  source 1..80: mol_type = other DNA
gaggctgtggtggccagagcccaatgttaatgcccccaaactgagcatctgtgactcagtctagtgcatcagggaggatc

SEQ ID NO: 125383 - DNA, 80 bp, synthetic construct
  misc_feature 1..80: note = Artificially Synthesized Probe
  source 1..80: mol_type = other DNA
caagtgatgccagcacattgatttgagaggcactggccaccacgatgacacacgaggcctgctttcagtggcatcctttc

SEQ ID NO: 125384 - DNA, 80 bp, synthetic construct
  misc_feature 1..80: note = Artificially Synthesized Probe
  source 1..80: mol_type = other DNA
tgggtgggggatggtttccagatgattcaagcatgttacatttattgcgcactttatttctatcattacattgtaatata

SEQ ID NO: 125385 - DNA, 80 bp, synthetic construct
  misc_feature 1..80: note = Artificially Synthesized Probe
  source 1..80: mol_type = other DNA
cgcagttcacaatagggttcacactgctgtgagaatctaatggtgctgctgatctgacaggaggtggagctcagggtaat

SEQ ID NO: 125386 - DNA, 80 bp, synthetic construct; identical to SEQ ID NO: 40113
  misc_feature 1..80: note = Artificially Synthesized Probe
  source 1..80: mol_type = other DNA

SEQ ID NO: 125387 - DNA, 80 bp, synthetic construct
  misc_feature 1..80: note = Artificially Synthesized Probe
  source 1..80: mol_type = other DNA
gtttctaaaatacatataaagtggtgcagctaacttccatcagatgcgagatgaatgagtgaatgaaatgtccgtctctc

SEQ ID NO: 125388 - DNA, 80 bp, synthetic construct
  misc_feature 1..80: note = Artificially Synthesized Probe
  source 1..80: mol_type = other DNA
gctggatgaatgactgaatgaaatgtccatctctcagatgccagatgaatgagtgaatgaaatgtccgtctctcagatgc

SEQ ID NO: 125389 - DNA, 80 bp, synthetic construct
  misc_feature 1..80: note = Artificially Synthesized Probe
  source 1..80: mol_type = other DNA
tgaatgactgaatgaaatgtccatctctcagatgccggatgaatgagtgaatggaatgtccgtctctcagatgccggatg

SEQ ID NO: 125390 - DNA, 80 bp, synthetic construct; identical to SEQ ID NO: 40114
  misc_feature 1..80: note = Artificially Synthesized Probe
  source 1..80: mol_type = other DNA

SEQ ID NO: 125391 - DNA, 80 bp, synthetic construct
  misc_feature 1..80: note = Artificially Synthesized Probe
  source 1..80: mol_type = other DNA
catttcttcctgtgtgcacctcccactaagaaagcaaacacgtggatgccatctattttctcttggcctattatttggaa

SEQ ID NO: 125392 - DNA, 80 bp, synthetic construct
  misc_feature 1..80: note = Artificially Synthesized Probe
  source 1..80: mol_type = other DNA
tagaaaagagtcttccaataataacaaagtttctgaaggtggaagagttgtaggtaaacacgatggcctgtggtgtgttt

SEQ ID NO: 125393 - DNA, 80 bp, synthetic construct
  misc_feature 1..80: note = Artificially Synthesized Probe
  source 1..80: mol_type = other DNA
catttattgtgcactttattttgttacacccccatacctggctaatttcctcccacccctgatagagacagagtctcact

SEQ ID NO: 125394 - DNA, 80 bp, synthetic construct
  misc_feature 1..80: note = Artificially Synthesized Probe
  source 1..80: mol_type = other DNA
agaattatgtatttcagaggcaacatttccttaatgtcttcttatgtcacgttatctcatatagtcagagacgtatttaa

SEQ ID NO: 125395 - DNA, 80 bp, synthetic construct; identical to SEQ ID NO: 40115
  misc_feature 1..80: note = Artificially Synthesized Probe
  source 1..80: mol_type = other DNA

SEQ ID NO: 125396 - DNA, 80 bp, synthetic construct
  misc_feature 1..80: note = Artificially Synthesized Probe
  source 1..80: mol_type = other DNA
tcaaaagaaatgagaaccccctgcaattgtggggttttttaataaagtcactcgatgtccagttcattgcattctacatt

SEQ ID NO: 125397 - DNA, 80 bp, synthetic construct
  misc_feature 1..80: note = Artificially Synthesized Probe
  source 1..80: mol_type = other DNA
ttcctgtgaaatttaattgctattaaacaggaggaaggggagaaacatgtccataacctgtatgttctcttatccctgag

SEQ ID NO: 125398 - DNA, 80 bp, synthetic construct; identical to SEQ ID NO: 40116
  misc_feature 1..80: note = Artificially Synthesized Probe
  source 1..80: mol_type = other DNA

SEQ ID NO: 125399 - DNA, 80 bp, synthetic construct
  misc_feature 1..80: note = Artificially Synthesized Probe
  source 1..80: mol_type = other DNA
gtgctgcgagaacgaggctgctgagatcctcaagtacctgtgaggcgcctgtgactcggaagcattttataagatccaag

SEQ ID NO: 125400 - DNA, 80 bp, synthetic construct
  misc_feature 1..80: note = Artificially Synthesized Probe
  source 1..80: mol_type = other DNA
tcaacagaatgtatttatgtgccatctctgccctctttaagtgaaagcatacatatttgcaaaaccctgaaaggcaatga

SEQ ID NO: 125401 - DNA, 80 bp, synthetic construct
  misc_feature 1..80: note = Artificially Synthesized Probe
  source 1..80: mol_type = other DNA
tgtctcttggctccagccttcatccccacatctgggcaaggccactgccaagtagctttgtgagctccaaaacacacagg

SEQ ID NO: 125402 - DNA, 80 bp, synthetic construct; identical to SEQ ID NO: 40117
  misc_feature 1..80: note = Artificially Synthesized Probe
  source 1..80: mol_type = other DNA

SEQ ID NO: 125403 - DNA, 80 bp, synthetic construct
  misc_feature 1..80: note = Artificially Synthesized Probe
  source 1..80: mol_type = other DNA
tttttaaaagaactgagacttaacccacagtggtgctgacagccctatgtgacaataatataaaagtgagtgcaatttcc

SEQ ID NO: 125404 - DNA, 80 bp, synthetic construct; identical to SEQ ID NO: 40051
  misc_feature 1..80: note = Artificially Synthesized Probe
  source 1..80: mol_type = other DNA

SEQ ID NO: 125405 - DNA, 80 bp, synthetic construct
  misc_feature 1..80: note = Artificially Synthesized Probe
  source 1..80: mol_type = other DNA
tgcagcatcctgagttggtgaatttctttttcctctcttactggtaaaggagcatgttgatgagggccccccagcttctg

SEQ ID NO: 125406 - DNA, 80 bp, synthetic construct
  misc_feature 1..80: note = Artificially Synthesized Probe
  source 1..80: mol_type = other DNA
ccagccacagctctgcgcgtttctttctttctttttgttaatgcattgtctatgctctgaatcaaggagaataccccttg

SEQ ID NO: 125407 - DNA, 80 bp, synthetic construct
  misc_feature 1..80: note = Artificially Synthesized Probe
  source 1..80: mol_type = other DNA
ggaggcctggacgggactagttggccggtcaggaagtggcaggacactggtgacttgtccaaggaaaacacacggggcca

SEQ ID NO: 125408 - DNA, 80 bp, synthetic construct; identical to SEQ ID NO: 40118
  misc_feature 1..80: note = Artificially Synthesized Probe
  source 1..80: mol_type = other DNA

SEQ ID NO: 125409 - DNA, 80 bp, synthetic construct
  misc_feature 1..80: note = Artificially Synthesized Probe
  source 1..80: mol_type = other DNA
tccagatagtggacattcctgatactcgtcacttccaaaagaatggtacaatgtgatgaatgtggaggcaaattagtcga

SEQ ID NO: 125410 - DNA, 80 bp, synthetic construct
  misc_feature 1..80: note = Artificially Synthesized Probe
  source 1..80: mol_type = other DNA
tgtgtcagacggccgatattgatgtagagaacttccaaattatctaggcttttgaaacagatgatggctaaaatgttcag

SEQ ID NO: 125411 - DNA, 80 bp, synthetic construct; identical to SEQ ID NO: 40119
  misc_feature 1..80: note = Artificially Synthesized Probe
  source 1..80: mol_type = other DNA

SEQ ID NO: 125412 - DNA, 80 bp, synthetic construct
  misc_feature 1..80: note = Artificially Synthesized Probe
  source 1..80: mol_type = other DNA
tcatacttgataactttttacatttacaaactcgggtttatgttggctctttttttacagcatgtaaggaagaagagtaa

SEQ ID NO: 125413 - DNA, 80 bp, synthetic construct
  misc_feature 1..80: note = Artificially Synthesized Probe
  source 1..80: mol_type = other DNA
tttctttttagcaagtgggatgtgtacaatagcacgtgtgcagttttcagtgattttttggtgttgattttatactctca

SEQ ID NO: 125414 - DNA, 80 bp, synthetic construct
  misc_feature 1..80: note = Artificially Synthesized Probe
  source 1..80: mol_type = other DNA
aggaaaaaagaccacaaagactaaagatgcctttgagatgaagttctgcatcatctggcagttagcttcagcaatcctct

SEQ ID NO: 125415 - DNA, 80 bp, synthetic construct
  misc_feature 1..80: note = Artificially Synthesized Probe
  source 1..80: mol_type = other DNA
gatttgtgactaggattagtggtgagttgatgatattgagggctgagttgtgaaggagcaaaatcctcccacagaagaga

SEQ ID NO: 125416 - DNA, 80 bp, synthetic construct; identical to SEQ ID NO: 40120
  misc_feature 1..80: note = Artificially Synthesized Probe
  source 1..80: mol_type = other DNA

SEQ ID NO: 125417 - DNA, 80 bp, synthetic construct
  misc_feature 1..80: note = Artificially Synthesized Probe
  source 1..80: mol_type = other DNA
ttgatattggcattgcgatcaagtaggggaaatgactgatgttcagtaatgatgctgggacattctgttttccatatgaa

SEQ ID NO: 125418 - DNA, 80 bp, synthetic construct
  misc_feature 1..80: note = Artificially Synthesized Probe
  source 1..80: mol_type = other DNA
gtttaattgactcatagttctgcacagctggggaggcctcaggaagcttacaatcatggcagaaggggaagcaaacgcat

SEQ ID NO: 125419 - DNA, 80 bp, synthetic construct
  misc_feature 1..80: note = Artificially Synthesized Probe
  source 1..80: mol_type = other DNA
ggggaactacaattcaaggtgagatttgggtggggacacagccaaaccatatcagggtgatttctcagagtgcatccctg

SEQ ID NO: 125420 - DNA, 80 bp, synthetic construct
  misc_feature 1..80: note = Artificially Synthesized Probe
  source 1..80: mol_type = other DNA
ctgtccacatgcacctgtggctttgcccatgacaaatggctattcattatcaagggttgtttttttttttttttctgaaa

SEQ ID NO: 125421 - DNA, 80 bp, synthetic construct; identical to SEQ ID NO: 40121
  misc_feature 1..80: note = Artificially Synthesized Probe
  source 1..80: mol_type = other DNA

SEQ ID NO: 125422 - DNA, 80 bp, synthetic construct
  misc_feature 1..80: note = Artificially Synthesized Probe
  source 1..80: mol_type = other DNA
gatcccggaatttgcactctcctgtgggaaatggaaagacacaggaagtcgtgggcagaacagggatggatgcaaattgc

SEQ ID NO: 125423 - DNA, 80 bp, synthetic construct
  misc_feature 1..80: note = Artificially Synthesized Probe
  source 1..80: mol_type = other DNA
tggaggggtgagctactttcaaagggaaaatggaactttaattcactgattaacctcaatatgctactgagattgcaagg

SEQ ID NO: 125424 - DNA, 80 bp, synthetic construct
  misc_feature 1..80: note = Artificially Synthesized Probe
  source 1..80: mol_type = other DNA
agcttgtggaacccaccccagacctcaggatccatttcagagagctgggctctggacactcatctgtttgaaacagctct

SEQ ID NO: 125425 - DNA, 80 bp, synthetic construct; identical to SEQ ID NO: 40122
  misc_feature 1..80: note = Artificially Synthesized Probe
  source 1..80: mol_type = other DNA

SEQ ID NO: 125426 - DNA, 80 bp, synthetic construct
  misc_feature 1..80: note = Artificially Synthesized Probe
  source 1..80: mol_type = other DNA
aacacacattgaaactttgactatagtagcagcaatagctgctccagctttctttgtggtggtagggaaaatagaatata

SEQ ID NO: 125427 - DNA, 80 bp, synthetic construct
  misc_feature 1..80: note = Artificially Synthesized Probe
  source 1..80: mol_type = other DNA
ggatggagatggggaggaggatggcaatggggagaatggagatggggaggaggatggcaatggggaggacgatgatgggg

SEQ ID NO: 125428 - DNA, 80 bp, synthetic construct
  misc_feature 1..80: note = Artificially Synthesized Probe
  source 1..80: mol_type = other DNA
cgccgccccgcggactgtcccaaggccaagacagacccgccgggactgggcgcccacctcgcccacggggacccggcctg

SEQ ID NO: 125429 - DNA, 80 bp, synthetic construct
  misc_feature 1..80: note = Artificially Synthesized Probe
  source 1..80: mol_type = other DNA
gtagacatttaggtttcagtaaactgtacgttattttagttttaattcccgtggtgaaaacttggatgaaatatcttaga

SEQ ID NO: 125430 - DNA, 80 bp, synthetic construct; identical to SEQ ID NO: 40123
  misc_feature 1..80: note = Artificially Synthesized Probe
  source 1..80: mol_type = other DNA

SEQ ID NO: 125431 - DNA, 80 bp, synthetic construct
  misc_feature 1..80: note = Artificially Synthesized Probe
  source 1..80: mol_type = other DNA
cccagaactcagggactgtgtaagaatctttgtccctggcagcatcctccaggtgggaagtgactggcctgcttctagca

SEQ ID NO: 125432 - DNA, 80 bp, synthetic construct
  misc_feature 1..80: note = Artificially Synthesized Probe
  source 1..80: mol_type = other DNA
acagggggccctcatgggacttctccagagcccagtggtgcctactttgtggggtcataagcacaggaccccaaagtgcc

SEQ ID NO: 125433 - DNA, 80 bp, synthetic construct
  misc_feature 1..80: note = Artificially Synthesized Probe
  source 1..80: mol_type = other DNA
cgttccacacactgaatgagtgtctccttccactgccgatactctactgctagaagtcttgcttcattggctaggaagga

SEQ ID NO: 125434 - DNA, 80 bp, synthetic construct; identical to SEQ ID NO: 40124
  misc_feature 1..80: note = Artificially Synthesized Probe
  source 1..80: mol_type = other DNA

SEQ ID NO: 125435 - DNA, 80 bp, synthetic construct
  misc_feature 1..80: note = Artificially Synthesized Probe
  source 1..80: mol_type = other DNA
acagcacctcattaaacttggaatttcatcttcccttttcttgccgtgttcccttagataactccagtcggatgtgccat

SEQ ID NO: 125436 - DNA, 80 bp, synthetic construct
  misc_feature 1..80: note = Artificially Synthesized Probe
  source 1..80: mol_type = other DNA
tagcatgtgacttcggatctttgccgtacccagctgcagggtcacagtgacattctctttggacagggagaacaaatgtc

SEQ ID NO: 125437 - DNA, 80 bp, synthetic construct
  misc_feature 1..80: note = Artificially Synthesized Probe
  source 1..80: mol_type = other DNA
gggaggaggacagaactggggaggaggatggtgatggggaggacgatgatggggaggaggatggtgatggggaggatggt

SEQ ID NO: 125438 - DNA, 80 bp, synthetic construct
  misc_feature 1..80: note = Artificially Synthesized Probe
  source 1..80: mol_type = other DNA
aagtaggcaaaaataaaatggacctaaccaaagtaggtctcacttaaatctaaaggattctgttggaaagaacgcacaga

SEQ ID NO: 125439 - DNA, 80 bp, synthetic construct; identical to SEQ ID NO: 40125
  misc_feature 1..80: note = Artificially Synthesized Probe
  source 1..80: mol_type = other DNA

SEQ ID NO: 125440 - DNA, 80 bp, synthetic construct
  misc_feature 1..80: note = Artificially Synthesized Probe
  source 1..80: mol_type = other DNA
agtcacttacacactcatcccagcatccagcctgtcccactgctgcaaacgcagcataggggctcctggggagcaggagc

SEQ ID NO: 125441 - DNA, 80 bp, synthetic construct
  misc_feature 1..80: note = Artificially Synthesized Probe
  source 1..80: mol_type = other DNA
gattgtccctttagatcattcgtgtaacacaaataaacctccaggttttctctacgtgattcctggagtgggcgctggct

SEQ ID NO: 125442 - DNA, 80 bp, synthetic construct
  misc_feature 1..80: note = Artificially Synthesized Probe
  source 1..80: mol_type = other DNA
ttcgatttaaatgttttgcacacttcacacagtgatctagccattgaccttgaatagaactgcggtagtttacactgatg

SEQ ID NO: 125443 - DNA, 80 bp, synthetic construct; identical to SEQ ID NO: 40126
  misc_feature 1..80: note = Artificially Synthesized Probe
  source 1..80: mol_type = other DNA

SEQ ID NO: 125444 - DNA, 80 bp, synthetic construct
  misc_feature 1..80: note = Artificially Synthesized Probe
  source 1..80: mol_type = other DNA
cccacggtgcaggaagtccacaggtatcacaatcagattcgaatctccacaagatgaacgcacatgctgttattattaag

SEQ ID NO: 125445 - DNA, 80 bp, synthetic construct
  misc_feature 1..80: note = Artificially Synthesized Probe
  source 1..80: mol_type = other DNA
cccgggaggtggaggttgcagtgagcccagatcgtgccattgcattccagcctggcgacaacactgaaactccgtctgaa

SEQ ID NO: 125446 - DNA, 80 bp, synthetic construct
  misc_feature 1..80: note = Artificially Synthesized Probe
  source 1..80: mol_type = other DNA
gacaaggcgtttcgtgtcagcgcttccctggaaaagctcctttcttcaaggttgccccagacagtcagctgtgaggcctc

SEQ ID NO: 125447 - DNA, 80 bp, synthetic construct
  misc_feature 1..80: note = Artificially Synthesized Probe
  source 1..80: mol_type = other DNA
ccgcctcacgcctgctcctgatgcttccagagaggaacagcgggcagcagtgtctccgggaggaaagccaggcggcttca

SEQ ID NO: 125448 - DNA, 80 bp, synthetic construct; identical to SEQ ID NO: 40052
  misc_feature 1..80: note = Artificially Synthesized Probe
  source 1..80: mol_type = other DNA

SEQ ID NO: 125449 - DNA, 80 bp, synthetic construct; identical to SEQ ID NO: 40127
  misc_feature 1..80: note = Artificially Synthesized Probe
  source 1..80: mol_type = other DNA

SEQ ID NO: 125450 - DNA, 80 bp, synthetic construct
  misc_feature 1..80: note = Artificially Synthesized Probe
  source 1..80: mol_type = other DNA
ggcctgggcggtggagggcgggctctgcaggtgtcccgatgcccagcccagctccagactctcagggctacaagctgagg

SEQ ID NO: 125451 - DNA, 80 bp, synthetic construct
  misc_feature 1..80: note = Artificially Synthesized Probe
  source 1..80: mol_type = other DNA
ccagagagctccacacctgcccgttcctcggaattccacagcctcgccttggaggaagcgggagtcgcgacgtccccatg

SEQ ID NO: 125452 - DNA, 80 bp, synthetic construct
  misc_feature 1..80: note = Artificially Synthesized Probe
  source 1..80: mol_type = other DNA
ctgttgcatgtgtgtatgcctgaggtgtgtgtgcgtgagtgcgaatgtgtgttcatgtgcattgtgtgcatgtgtgattg

SEQ ID NO: 125453 - DNA, 80 bp, synthetic construct; identical to SEQ ID NO: 40128
  misc_feature 1..80: note = Artificially Synthesized Probe
  source 1..80: mol_type = other DNA

SEQ ID NO: 125454 - DNA, 80 bp, synthetic construct
  misc_feature 1..80: note = Artificially Synthesized Probe
  source 1..80: mol_type = other DNA
tgtgttcatgtgcgtgtgtgcatgtgtgaaagcatgtatgtgcttgtgtgtgaatgcatgtttatgtgagtgcatgagtg

SEQ ID NO: 125455 - DNA, 80 bp, synthetic construct
  misc_feature 1..80: note = Artificially Synthesized Probe
  source 1..80: mol_type = other DNA
tgcatgtgtgagtatgcgtgcatgcgaacatgtgtgtgtatgtgtgcatgtgtgagcatgcatatgtgtgtgagtgtatg

SEQ ID NO: 125456 - DNA, 80 bp, synthetic construct; identical to SEQ ID NO: 40129
  misc_feature 1..80: note = Artificially Synthesized Probe
  source 1..80: mol_type = other DNA

SEQ ID NO: 125457 - DNA, 80 bp, synthetic construct
  misc_feature 1..80: note = Artificially Synthesized Probe
  source 1..80: mol_type = other DNA
gtctgatgtttgggagcgcccttcctcacaggctggggtagacataacaggagattcagggccttcggtctcgtgtgcag

SEQ ID NO: 125458 - DNA, 80 bp, synthetic construct
  misc_feature 1..80: note = Artificially Synthesized Probe
  source 1..80: mol_type = other DNA
aatctaacccccatgttcagtttttttacacctaattacctggttttttctttcttcgctcacatggaaccacatttgtg

SEQ ID NO: 125459 - DNA, 80 bp, synthetic construct
  misc_feature 1..80: note = Artificially Synthesized Probe
  source 1..80: mol_type = other DNA
tagtcagccttcctgcaaaggatttagtgaccatttacacaatcatccatttcgatctgttgcaaatcactgatattttc

SEQ ID NO: 125460 - DNA, 80 bp, synthetic construct
  misc_feature 1..80: note = Artificially Synthesized Probe
  source 1..80: mol_type = other DNA
tctgcctttatgcatttaaaaagagaatacttacgtaaaacgaaaatgtcgttcctgtctcccttagctctgaaatggtg

SEQ ID NO: 125461 - DNA, 80 bp, synthetic construct; identical to SEQ ID NO: 40130
  misc_feature 1..80: note = Artificially Synthesized Probe
  source 1..80: mol_type = other DNA

SEQ ID NO: 125462 - DNA, 80 bp, synthetic construct
  misc_feature 1..80: note = Artificially Synthesized Probe
  source 1..80: mol_type = other DNA
aaaatactacaacttttaaaacacagtgtctgccttcatttgatgccaaaatcaataaaagccatgccactctgagggct

SEQ ID NO: 125463 - DNA, 80 bp, synthetic construct
  misc_feature 1..80: note = Artificially Synthesized Probe
  source 1..80: mol_type = other DNA
tacatggccgtggccataatcatagccattcagtgacctcgcgagatccagagtcagagcatctgttgaccagaaacata

SEQ ID NO: 125464 - DNA, 80 bp, synthetic construct
  misc_feature 1..80: note = Artificially Synthesized Probe
  source 1..80: mol_type = other DNA
ctggtgtaaaccaaagcatcttggaagaccaacaggaagagttactttgattcacttttgcctagcttagtgtgtttatg

SEQ ID NO: 125465 - DNA, 80 bp, synthetic construct; identical to SEQ ID NO: 40131
  misc_feature 1..80: note = Artificially Synthesized Probe
  source 1..80: mol_type = other DNA

SEQ ID NO: 125466 - DNA, 80 bp, synthetic construct
  misc_feature 1..80: note = Artificially Synthesized Probe
  source 1..80: mol_type = other DNA
tggagtatggtggcacgatctcggctcactgcaacctccacctcccaggttcatgtgattctcctgcctcagcctcctga

SEQ ID NO: 125467 - DNA, 80 bp, synthetic construct
  misc_feature 1..80: note = Artificially Synthesized Probe
  source 1..80: mol_type = other DNA
actgtgccaggtctccatgacatatcttgatatgtaaacaagcttgtaatctgattggagcctattttgttttgtaactg

SEQ ID NO: 125468 - DNA, 80 bp, synthetic construct
  misc_feature 1..80: note = Artificially Synthesized Probe
  source 1..80: mol_type = other DNA
agttcaaaacaagcctgggcaacaaatcaataccccatctctacgaaaattaaaaaatttgccagtcgtggtgcctgtct

SEQ ID NO: 125469 - DNA, 80 bp, synthetic construct; identical to SEQ ID NO: 40132
  misc_feature 1..80: note = Artificially Synthesized Probe
  source 1..80: mol_type = other DNA

SEQ ID NO: 125470 - DNA, 80 bp, synthetic construct
  misc_feature 1..80: note = Artificially Synthesized Probe
  source 1..80: mol_type = other DNA
cgttgagaaaaaaatgtaaatctgaagtcgtatctcagaaccatgtgtacaaactttcctcacatttatagcggtcactg

SEQ ID NO: 125471 - DNA, 80 bp, synthetic construct
  misc_feature 1..80: note = Artificially Synthesized Probe
  source 1..80: mol_type = other DNA
acattgattatagtaatataatactatgagccaaagtactatgaaaccatttcatcccagtcagatggttacaacagtgt

SEQ ID NO: 125472 - DNA, 80 bp, synthetic construct
  misc_feature 1..80: note = Artificially Synthesized Probe
  source 1..80: mol_type = other DNA
ccaaaagacttgaaaacaggcgttcaaacaaaaatttacatctgcatgtctataacagcattatttacaatagccaaaag

SEQ ID NO: 125473 - DNA, 80 bp, synthetic construct
  misc_feature 1..80: note = Artificially Synthesized Probe
  source 1..80: mol_type = other DNA
ggatacctcgtgtatgattacattgatggtgtagacatgcatgaacacacgtacatgaaccttgaaatcatcatgccaag

SEQ ID NO: 125474 - DNA, 80 bp, synthetic construct; identical to SEQ ID NO: 40133
  misc_feature 1..80: note = Artificially Synthesized Probe
  source 1..80: mol_type = other DNA

SEQ ID NO: 125475 - DNA, 80 bp, synthetic construct
  misc_feature 1..80: note = Artificially Synthesized Probe
  source 1..80: mol_type = other DNA
aatgttctggaactaggctgaggtggcagttgcccaacactatgaatgtgctacatgccactgaatcgttcactttaaaa

SEQ ID NO: 125476 - DNA, 80 bp, synthetic construct
  misc_feature 1..80: note = Artificially Synthesized Probe
  source 1..80: mol_type = other DNA
ctcctgcctcagcctcccgagtagctgggactacaggcgcccgccaccgcgcccggctaattttttgtatttttagtaga

SEQ ID NO: 125477 - DNA, 80 bp, synthetic construct
  misc_feature 1..80: note = Artificially Synthesized Probe
  source 1..80: mol_type = other DNA
ggagtgcagtggtgcgatctcagctcactgcaatctctgcctcccaggttcaagtgattctccttcctcagcctccagag

SEQ ID NO: 125478 - DNA, 80 bp, synthetic construct; identical to SEQ ID NO: 40134
  misc_feature 1..80: note = Artificially Synthesized Probe
  source 1..80: mol_type = other DNA

SEQ ID NO: 125479 - DNA, 80 bp, synthetic construct
  misc_feature 1..80: note = Artificially Synthesized Probe
  source 1..80: mol_type = other DNA
tttatcatcatctgtaaataaggtttccaggggacagtgttgaagcatcctattccattctttcaaagcgattaaaaagt

SEQ ID NO: 125480 - DNA, 80 bp, synthetic construct
  misc_feature 1..80: note = Artificially Synthesized Probe
  source 1..80: mol_type = other DNA
ttctctggcaattttgtgcctctcggtagaatggaccttgtcggatgctggtcaggcacttctctgtagtaaagatcttg

SEQ ID NO: 125481 - DNA, 80 bp, synthetic construct
  misc_feature 1..80: note = Artificially Synthesized Probe
  source 1..80: mol_type = other DNA
caggccttgtaatttcatgctaagtcttaattgtttcctatgactaaatagtttgccataggctagacgtaaacttggaa

SEQ ID NO: 125482 - DNA, 80 bp, synthetic construct
  misc_feature 1..80: note = Artificially Synthesized Probe
  source 1..80: mol_type = other DNA
tctggatgaaaaagaatcaggccaactttagggtatatttttggttttggttgtatattaattcatgccacatgggatgt

SEQ ID NO: 125483 - DNA, 80 bp, synthetic construct; identical to SEQ ID NO: 40135
  misc_feature 1..80: note = Artificially Synthesized Probe
  source 1..80: mol_type = other DNA

SEQ ID NO: 125484 - DNA, 80 bp, synthetic construct
  misc_feature 1..80: note = Artificially Synthesized Probe
  source 1..80: mol_type = other DNA
agcgtttgctcagatgtgtaggcccgtaatgctctatgcagcatgtggccggtggttctgcaaaagccagagaggagtcg

SEQ ID NO: 125485 - DNA, 80 bp, synthetic construct
  misc_feature 1..80: note = Artificially Synthesized Probe
  source 1..80: mol_type = other DNA
gaagaagagtccttggagtcgagacggcctttgtgctctctcaagatgcaggcacttgtgattgaaatctggaaatacgt

SEQ ID NO: 125486 - DNA, 80 bp, synthetic construct
  misc_feature 1..80: note = Artificially Synthesized Probe
  source 1..80: mol_type = other DNA
ggacaagccttttccccctgggggcactgaaagatgggcctggttgatgctgggctcacagctttcactccctgggctgg

SEQ ID NO: 125487 - DNA, 80 bp, synthetic construct; identical to SEQ ID NO: 40136
  misc_feature 1..80: note = Artificially Synthesized Probe
  source 1..80: mol_type = other DNA

SEQ ID NO: 125488 - DNA, 80 bp, synthetic construct
  misc_feature 1..80: note = Artificially Synthesized Probe
  source 1..80: mol_type = other DNA
gaaaagggacgagccacgctctcctctcaggctggtctcagtgggacggtgccctgggctgcagctgtggttggaagtcc

SEQ ID NO: 125489 - DNA, 80 bp, synthetic construct
  misc_feature 1..80: note = Artificially Synthesized Probe
  source 1..80: mol_type = other DNA
gcagctggcgtttccccattttcaggaagcaggggccacctgtttccccagggataagctaggaggccttcctgggcctc

SEQ ID NO: 125490 - DNA, 80 bp, synthetic construct
  misc_feature 1..80: note = Artificially Synthesized Probe
  source 1..80: mol_type = other DNA
gtcctcagcactcctgcctaactcatgccttcacatctttcaatgttcctatatctgttctatcttcttcccattgcata

SEQ ID NO: 125491 - DNA, 80 bp, synthetic construct
  misc_feature 1..80: note = Artificially Synthesized Probe
  source 1..80: mol_type = other DNA
tctgcacctgtgcgattagggagggagatgtggagcgggtgtggggagaaggcaggtggggggagccgaacagaagaagc

SEQ ID NO: 125492 - DNA, 80 bp, synthetic construct; identical to SEQ ID NO: 40137
  misc_feature 1..80: note = Artificially Synthesized Probe
  source 1..80: mol_type = other DNA

SEQ ID NO: 125493 - DNA, 80 bp, synthetic construct; identical to SEQ ID NO: 40053
  misc_feature 1..80: note = Artificially Synthesized Probe
  source 1..80: mol_type = other DNA

SEQ ID NO: 125494 - DNA, 80 bp, synthetic construct
  misc_feature 1..80: note = Artificially Synthesized Probe
  source 1..80: mol_type = other DNA
tctccgttttgagtgtgtcaatgctgttaactccttattaaggaaaaacaaagtactaacatacaatgctaactggcaca

SEQ ID NO: 125495 - DNA, 80 bp, synthetic construct
  misc_feature 1..80: note = Artificially Synthesized Probe
  source 1..80: mol_type = other DNA
ggagagaatgagagagagaggagctggagctgaaggacaggctgttctggccctggttgcagggggagcgggcggtgcag

SEQ ID NO: 125496 - DNA, 80 bp, synthetic construct; identical to SEQ ID NO: 40138
  misc_feature 1..80: note = Artificially Synthesized Probe
  source 1..80: mol_type = other DNA

SEQ ID NO: 125497 - DNA, 80 bp, synthetic construct
  misc_feature 1..80: note = Artificially Synthesized Probe
  source 1..80: mol_type = other DNA
tcacagctacacgggatactgctggtgcgtcacgcccaacgggaggcccatcagcggcactgccgtggcccacaagacgc

SEQ ID NO: 125498 - DNA, 80 bp, synthetic construct
  misc_feature 1..80: note = Artificially Synthesized Probe
  source 1..80: mol_type = other DNA
tgacaaagcctacattttagggagcccttgtttttaagaggggaagggtgaagctgtgtgaatgtatgcatatggctgga

SEQ ID NO: 125499 - DNA, 80 bp, synthetic construct
  misc_feature 1..80: note = Artificially Synthesized Probe
  source 1..80: mol_type = other DNA
gttttctttggccaaaaaagtgaaaattgctggttttgtatgcatatgttttcaaagaaaaatgggtctttcttcataag

SEQ ID NO: 125500 - DNA, 80 bp, synthetic construct
  misc_feature 1..80: note = Artificially Synthesized Probe
  source 1..80: mol_type = other DNA
atttgaaaataatctgcagcccaagtttgattaatttgtgggggagacttatcagaccatctatgaagaaatgctatgat

SEQ ID NO: 125501 - DNA, 80 bp, synthetic construct; identical to SEQ ID NO: 40139
  misc_feature 1..80: note = Artificially Synthesized Probe
  source 1..80: mol_type = other DNA

SEQ ID NO: 125502 - DNA, 80 bp, synthetic construct
  misc_feature 1..80: note = Artificially Synthesized Probe
  source 1..80: mol_type = other DNA
atctttagttaagctaacatgtatacctaatagttctgttgcaaactcatggaggaaatgaaacagaaaaacatcaccaa

SEQ ID NO: 125503 - DNA, 80 bp, synthetic construct
  misc_feature 1..80: note = Artificially Synthesized Probe
  source 1..80: mol_type = other DNA
gataggggcatctatttccgttgctttagtgatatcatctgataattaaggagtgtcccaaagaactttcttagaaaaca

SEQ ID NO: 125504 - DNA, 80 bp, synthetic construct
  misc_feature 1..80: note = Artificially Synthesized Probe
  source 1..80: mol_type = other DNA
gtgccctgtggtcctacattcccaaggacagtgagtttcaatcaggatcctgtcattgctgcttccttgagatgtgctta

SEQ ID NO: 125505 - DNA, 80 bp, synthetic construct
  misc_feature 1..80: note = Artificially Synthesized Probe
  source 1..80: mol_type = other DNA
ttggtccaaggaatggactggggaagagagtagatggccctttgcatatagaagtctggtgtttattgggcagcccatgc

SEQ ID NO: 125506 - DNA, 80 bp, synthetic construct; identical to SEQ ID NO: 40140
  misc_feature 1..80: note = Artificially Synthesized Probe
  source 1..80: mol_type = other DNA

SEQ ID NO: 125507 - DNA, 80 bp, synthetic construct
  misc_feature 1..80: note = Artificially Synthesized Probe
  source 1..80: mol_type = other DNA
caaacacagagaatttatcataaattcatactggaatttaacttcttcctgaaagttatataatgcagagaagcagggaa

SEQ ID NO: 125508 - DNA, 80 bp, synthetic construct
  misc_feature 1..80: note = Artificially Synthesized Probe
  source 1..80: mol_type = other DNA
tggctaatctgcagtatgcactgtctgtacatggcaggagtacttttcatcaagtttactaaaattgggcaaatttcagt

SEQ ID NO: 125509 - DNA, 80 bp, synthetic construct
  misc_feature 1..80: note = Artificially Synthesized Probe
  source 1..80: mol_type = other DNA
agaaagtgcatgtgtgtgtgtttatgaataatacatgcaaacgtaacttgaggccagccacagcggagggaaacggggct

SEQ ID NO: 125510 - DNA, 80 bp, synthetic construct; identical to SEQ ID NO: 40141
  misc_feature 1..80: note = Artificially Synthesized Probe
  source 1..80: mol_type = other DNA

SEQ ID NO: 125511 - DNA, 80 bp, synthetic construct
  misc_feature 1..80: note = Artificially Synthesized Probe
  source 1..80: mol_type = other DNA
aacccccccccccccgcccccacacccactgctctggcagaaatgaaaaaccgtgattctatgacttgctggtgaggaca

SEQ ID NO: 125512 - DNA, 80 bp, synthetic construct
  misc_feature 1..80: note = Artificially Synthesized Probe
  source 1..80: mol_type = other DNA
gttcacatgagaaccaaagcctggaaacagatctgtgtccattggcgtctgcctgggtgagcactgcggttcgctcggtt

SEQ ID NO: 125513 - DNA, 80 bp, synthetic construct
  misc_feature 1..80: note = Artificially Synthesized Probe
  source 1..80: mol_type = other DNA
ccacagctgagagtcagaaaactcagctccagctctgagggatgcatccagaggtggcaaaccatgaagaccagcaggga

SEQ ID NO: 125514 - DNA, 80 bp, synthetic construct; identical to SEQ ID NO: 40142
  misc_feature 1..80: note = Artificially Synthesized Probe
  source 1..80: mol_type = other DNA

SEQ ID NO: 125515 - DNA, 80 bp, synthetic construct
  misc_feature 1..80: note = Artificially Synthesized Probe
  source 1..80: mol_type = other DNA
caggggggatttggggaacaggaaaattaaggtttgcctttggggatgctctggagagctggagagagcgggctgggcat

SEQ ID NO: 125516 - DNA, 80 bp, synthetic construct
  misc_feature 1..80: note = Artificially Synthesized Probe
  source 1..80: mol_type = other DNA
tgtacataaagttttgaacactgagcaagaaagataatgtgagcattctggtggcctgctgtcatgccagtcaccataga

SEQ ID NO: 125517 - DNA, 80 bp, synthetic construct
  misc_feature 1..80: note = Artificially Synthesized Probe
  source 1..80: mol_type = other DNA
tgggatgtaaacctacatctttgtctccataacccatgtttctcccccaaataccaaagtatcaaaattcttggggcctt

SEQ ID NO: 125518 - DNA, 80 bp, synthetic construct; identical to SEQ ID NO: 40143
  misc_feature 1..80: note = Artificially Synthesized Probe
  source 1..80: mol_type = other DNA

SEQ ID NO: 125519 - DNA, 80 bp, synthetic construct
  misc_feature 1..80: note = Artificially Synthesized Probe
  source 1..80: mol_type = other DNA
agtaaagggcagggttcacactacataacaagcccttcatgtccttcgtcctgggattgggggccagctccacgtgtctc

SEQ ID NO: 125520 - DNA, 80 bp, synthetic construct
  misc_feature 1..80: note = Artificially Synthesized Probe
  source 1..80: mol_type = other DNA
agggtgtttgcaacccattctccagtatttggatatagcttcaggtttttaatctcatctctcctctgtaactgtgcacc

SEQ ID NO: 125521 - DNA, 80 bp, synthetic construct
  misc_feature 1..80: note = Artificially Synthesized Probe
  source 1..80: mol_type = other DNA
gaagagggatagacacagcccatgtgtagtagctggtgcccatcttgagacccccagcctatccctgccttctaaagtag

SEQ ID NO: 125522 - DNA, 80 bp, synthetic construct
  misc_feature 1..80: note = Artificially Synthesized Probe
  source 1..80: mol_type = other DNA
aacatgcaaatttataatttggttttaattactaaagtctgtgtgatacctgtgacaggcagcagtaggtcagtggcctt

SEQ ID NO: 125523 - DNA, 80 bp, synthetic construct; identical to SEQ ID NO: 40144
  misc_feature 1..80: note = Artificially Synthesized Probe
  source 1..80: mol_type = other DNA

SEQ ID NO: 125524 - DNA, 80 bp, synthetic construct
  misc_feature 1..80: note = Artificially Synthesized Probe
  source 1..80: mol_type = other DNA
ccaaagctaactgaatttttaatttttcacatgaatttccctggcactaagttaaggaccctacatagctgagggacttg

SEQ ID NO: 125525 - DNA, 80 bp, synthetic construct
  misc_feature 1..80: note = Artificially Synthesized Probe
  source 1..80: mol_type = other DNA
ctcttaatgaatcaacaggaacggacatcatctattttccagggccccttatttaagtatttaaacaagatgcttaggtt

SEQ ID NO: 125526 - DNA, 80 bp, synthetic construct
  misc_feature 1..80: note = Artificially Synthesized Probe
  source 1..80: mol_type = other DNA
agcttgctgtttgtctccacctcaaaacggctttttctttagccttcgtaggtcttttcttgaaaagtgaaagttattaa

SEQ ID NO: 125527 - DNA, 80 bp, synthetic construct; identical to SEQ ID NO: 40145
  misc_feature 1..80: note = Artificially Synthesized Probe
  source 1..80: mol_type = other DNA

SEQ ID NO: 125528 - DNA, 80 bp, synthetic construct
  misc_feature 1..80: note = Artificially Synthesized Probe
  source 1..80: mol_type = other DNA
ccaccatctctacaaaaaataaaaatttaaaaatttaaaacaattaaaaacttgtgaatttttttcagagaaaaatgtta

SEQ ID NO: 125529 - DNA, 80 bp, synthetic construct
  misc_feature 1..80: note = Artificially Synthesized Probe
  source 1..80: mol_type = other DNA
atactaaatttaaaaacataataataaataaaatgttaaagaaaaagaccacagggtgtaggtttagtctgacaagccgc

SEQ ID NO: 125530 - DNA, 80 bp, synthetic construct
  misc_feature 1..80: note = Artificially Synthesized Probe
  source 1..80: mol_type = other DNA
gctgaagctcccatctgggcccagcctttcctctgcttcacttttctttttaaagttggactttatgttgagttattcac

SEQ ID NO: 125531 - DNA, 80 bp, synthetic construct; identical to SEQ ID NO: 40146
  misc_feature 1..80: note = Artificially Synthesized Probe
  source 1..80: mol_type = other DNA

SEQ ID NO: 125532 - DNA, 80 bp, synthetic construct
  misc_feature 1..80: note = Artificially Synthesized Probe
  source 1..80: mol_type = other DNA
attttatttttatttatttatttatttatttttgagatggagtctggctctgtcgcccaggctggagtgcagtggcacaa

SEQ ID NO: 125533 - DNA, 80 bp, synthetic construct; identical to SEQ ID NO: 40054
  misc_feature 1..80: note = Artificially Synthesized Probe
  source 1..80: mol_type = other DNA

SEQ ID NO: 125534 - DNA, 80 bp, synthetic construct
  misc_feature 1..80: note = Artificially Synthesized Probe
  source 1..80: mol_type = other DNA
tcctgaccttgtgatccgctcaccttggcctcccaaagtgctgggattacaggcaggagccaccgtgcccagcctccaga

SEQ ID NO: 125535 - DNA, 80 bp, synthetic construct
  misc_feature 1..80: note = Artificially Synthesized Probe
  source 1..80: mol_type = other DNA
gcaagagtgatacagctgtactcagacatttttctcctgccattgaatcagggtctcaaatcagaaatcagtaaattcag

SEQ ID NO: 125536 - DNA, 80 bp, synthetic construct; identical to SEQ ID NO: 40147
  misc_feature 1..80: note = Artificially Synthesized Probe
  source 1..80: mol_type = other DNA

SEQ ID NO: 125537 - DNA, 80 bp, synthetic construct
  misc_feature 1..80: note = Artificially Synthesized Probe
  source 1..80: mol_type = other DNA
cagggatcctggggacacgtgaggaataacgcagcagccatgcagcttcacggcacaggggcccggccgttctctctgga

SEQ ID NO: 125538 - DNA, 80 bp, synthetic construct
  misc_feature 1..80: note = Artificially Synthesized Probe
  source 1..80: mol_type = other DNA
cactccaagccctgggttgaggtgaggggcctcactccagaggaacacaggcccacagggcagccatccatgaccatctc

SEQ ID NO: 125539 - DNA, 80 bp, synthetic construct
  misc_feature 1..80: note = Artificially Synthesized Probe
  source 1..80: mol_type = other DNA
aaggctgagacaaagaaggaatacttgggagcagtgccttcagaggctgacaggagctggcggataaggaggtggttggg

SEQ ID NO: 125540 - DNA, 80 bp, synthetic construct; identical to SEQ ID NO: 40148
  misc_feature 1..80: note = Artificially Synthesized Probe
  source 1..80: mol_type = other DNA

SEQ ID NO: 125541 - DNA, 80 bp, synthetic construct
  misc_feature 1..80: note = Artificially Synthesized Probe
  source 1..80: mol_type = other DNA
agtcctgcttggccccaacctgtggccacggtgaggctcagggatgggacccggtgaagtcggatagagcagaggcattc

SEQ ID NO: 125542 - DNA, 80 bp, synthetic construct
  misc_feature 1..80: note = Artificially Synthesized Probe
  source 1..80: mol_type = other DNA
agcccgtggtcacctccctcggccggccagtgccgggattctggctcatgccaaggagaccctgactggtccaaaggcct

SEQ ID NO: 125543 - DNA, 80 bp, synthetic construct
  misc_feature 1..80: note = Artificially Synthesized Probe
  source 1..80: mol_type = other DNA
tatggtcttgcacaagcatttggtcacttaaacccgaacgtgaccttgtgaggtggcactagttggtgatcagataataa

SEQ ID NO: 125544 - DNA, 80 bp, synthetic construct; identical to SEQ ID NO: 40044
  misc_feature 1..80: note = Artificially Synthesized Probe
  source 1..80: mol_type = other DNA

SEQ ID NO: 125545 - DNA, 80 bp, synthetic construct
  misc_feature 1..80: note = Artificially Synthesized Probe
  source 1..80: mol_type = other DNA
acttgcttagctgaaagccggtcctatttagagagagcagcgtctgtcctaatacagcactctgcaggctgtgagaagac

SEQ ID NO: 125546 - DNA, 80 bp, synthetic construct
  misc_feature 1..80: note = Artificially Synthesized Probe
  source 1..80: mol_type = other DNA
ttagctgaaagctggtcctatttagggagagcagcgtctatcctaatacagtgctctgcaggatgtaagaagcacgttct

SEQ ID NO: 125547 - DNA, 80 bp, synthetic construct; identical to SEQ ID NO: 40149
  misc_feature 1..80: note = Artificially Synthesized Probe
  source 1..80: mol_type = other DNA

SEQ ID NO: 125548 - DNA, 80 bp, synthetic construct
  misc_feature 1..80: note = Artificially Synthesized Probe
  source 1..80: mol_type = other DNA
atctggggagtggggtgagctctgctggaatctggcagagtggggtgagctctgctggaatctgggggaatggggtgacc

SEQ ID NO: 125549 - DNA, 80 bp, synthetic construct
  misc_feature 1..80: note = Artificially Synthesized Probe
  source 1..80: mol_type = other DNA
cccctgctggaatctgggggagtggggtgacccctgctggaatctggggagtggggtgaccgctgctggaatctggggga

SEQ ID NO: 125550 - DNA, 80 bp, synthetic construct; identical to SEQ ID NO: 40150
  misc_feature 1..80: note = Artificially Synthesized Probe
  source 1..80: mol_type = other DNA

SEQ ID NO: 125551 - DNA, 80 bp, synthetic construct
  misc_feature 1..80: note = Artificially Synthesized Probe
  source 1..80: mol_type = other DNA
ctgctggaatgtgggggagtggggtgaccgctgctggaatatggtggagtggggtgaccgctgctggaatgtgaggggga

SEQ ID NO: 125552 - DNA, 80 bp, synthetic construct
  misc_feature 1..80: note = Artificially Synthesized Probe
  source 1..80: mol_type = other DNA
aaaaggccctttagaggagagggctgctgaccacatccccggagtcctcagcagcagagatgagccccagggtcaggttt

SEQ ID NO: 125553 - DNA, 80 bp, synthetic construct
  misc_feature 1..80: note = Artificially Synthesized Probe
  source 1..80: mol_type = other DNA
gcatgtcccctctcagtcttcatgctgactgaagcatgagattgcaaaaaatgtagatggcttctctatttcctcccctg

SEQ ID NO: 125554 - DNA, 80 bp, synthetic construct
  misc_feature 1..80: note = Artificially Synthesized Probe
  source 1..80: mol_type = other DNA
atcttgattccattatcctaggttggaaatacagccaccagttgatgcaaatgtgttacaggatcctgtttcttcccgtg

SEQ ID NO: 125555 - DNA, 80 bp, synthetic construct; identical to SEQ ID NO: 40151
  misc_feature 1..80: note = Artificially Synthesized Probe
  source 1..80: mol_type = other DNA

SEQ ID NO: 125556 - DNA, 80 bp, synthetic construct
  misc_feature 1..80: note = Artificially Synthesized Probe
  source 1..80: mol_type = other DNA
gctgcctgagagagtcctgccagatgggcaagcccagtggggacagaacgctcctaacaggtggggcttgcaggggggca

SEQ ID NO: 125557 - DNA, 80 bp, synthetic construct
  misc_feature 1..80: note = Artificially Synthesized Probe
  source 1..80: mol_type = other DNA
atgcctactcacccctttactcttcctcagagaggcctttctgctcaaagtcagctctcctgaggactaaaaaagcaggc

SEQ ID NO: 125558 - DNA, 80 bp, synthetic construct
  misc_feature 1..80: note = Artificially Synthesized Probe
  source 1..80: mol_type = other DNA
tacattaaatgacttcaagtctgtgaaggacatagcagggattggcacacagtaagagctatatagacatcagctgtgta

SEQ ID NO: 125559 - DNA, 80 bp, synthetic construct
  misc_feature 1..80: note = Artificially Synthesized Probe
  source 1..80: mol_type = other DNA
tgatggcggcgagggcctgagggctgcaggccatttggtgccctcctagaggctgctctgttttggatggcttggtctga

SEQ ID NO: 125560 - DNA, 80 bp, synthetic construct; identical to SEQ ID NO: 40152
  misc_feature 1..80: note = Artificially Synthesized Probe
  source 1..80: mol_type = other DNA

SEQ ID NO: 125561 - DNA, 80 bp, synthetic construct
  misc_feature 1..80: note = Artificially Synthesized Probe
  source 1..80: mol_type = other DNA
gagacgccgtctagaccagagaacgcagcccttgctgttcccttttctttttctctcgcctccctcatctgatgctgtaa

SEQ ID NO: 125562 - DNA, 80 bp, synthetic construct
  misc_feature 1..80: note = Artificially Synthesized Probe
  source 1..80: mol_type = other DNA
cttatgcaaaccactgcctccatcagcataacaccgttccctccactgggctgttctggtaacacgttgttaaggctgag

SEQ ID NO: 125563 - DNA, 80 bp, synthetic construct; identical to SEQ ID NO: 40296
  misc_feature 1..80: note = Artificially Synthesized Probe
  source 1..80: mol_type = other DNA

SEQ ID NO: 125564 - DNA, 80 bp, synthetic construct
  misc_feature 1..80: note = Artificially Synthesized Probe
  source 1..80: mol_type = other DNA
tgcgccccggtggagcccgagccggagccggcagaggggcgcgggcgcggacgcggcgcctggcggggccctgggaggct

SEQ ID NO: 125565 - DNA, 80 bp, synthetic construct; identical to SEQ ID NO: 40404
  misc_feature 1..80: note = Artificially Synthesized Probe
  source 1..80: mol_type = other DNA

SEQ ID NO: 125566 - DNA, 80 bp, synthetic construct
  misc_feature 1..80: note = Artificially Synthesized Probe
  source 1..80: mol_type = other DNA
gctcattccttttctcaggaattttcaagctttacgctgagtatgacatgtgctgtaagtcttttgtagacgtctctaac

SEQ ID NO: 125567 - DNA, 80 bp, synthetic construct
  misc_feature 1..80: note = Artificially Synthesized Probe
  source 1..80: mol_type = other DNA
acatttgtcaacacttttttgagattaatcaatgatcatataagttctttgctcatatggtatggttgccagcctggagg

SEQ ID NO: 125568 - DNA, 80 bp, synthetic construct
  misc_feature 1..80: note = Artificially Synthesized Probe
  source 1..80: mol_type = other DNA
tgcagtttctgtgctgggggcaagcatttttcctcctggatcattctttccagtatatgccatgttgtgaactatcattg

SEQ ID NO: 125569 - DNA, 80 bp, synthetic construct; identical to SEQ ID NO: 40405
  misc_feature 1..80: note = Artificially Synthesized Probe
  source 1..80: mol_type = other DNA

SEQ ID NO: 125570 - DNA, 80 bp, synthetic construct; identical to SEQ ID NO: 40307
  misc_feature 1..80: note = Artificially Synthesized Probe
  source 1..80: mol_type = other DNA

SEQ ID NO: 125571 - DNA, 80 bp, synthetic construct
  misc_feature 1..80: note = Artificially Synthesized Probe
  source 1..80: mol_type = other DNA
ctttattataaccttcttgttaggttctggtctgcagcttaggttggttgtataaatgagtttactggtagtcattgttt

SEQ ID NO: 125572 - DNA, 80 bp, synthetic construct
  misc_feature 1..80: note = Artificially Synthesized Probe
  source 1..80: mol_type = other DNA
gttttagcaaattgcatgttttaaagagttcatcctttgtacacaaatcacaaactgtaaggtaaaacattcttgctatt

SEQ ID NO: 125573 - DNA, 80 bp, synthetic construct
  misc_feature 1..80: note = Artificially Synthesized Probe
  source 1..80: mol_type = other DNA
cttatttcctttattctctttcctttttcttgctttgcttttggaaactgaaatcagaggtctctaaagtgttttgaaag

SEQ ID NO: 125574 - DNA, 80 bp, synthetic construct
  misc_feature 1..80: note = Artificially Synthesized Probe
  source 1..80: mol_type = other DNA
gtcgctgattttcacctttagtttctgcatgcattccagctgtaagttattcagttgcagctgcacttcacaggttttga

SEQ ID NO: 125575 - DNA, 80 bp, synthetic construct; identical to SEQ ID NO: 40406
  misc_feature 1..80: note = Artificially Synthesized Probe
  source 1..80: mol_type = other DNA

SEQ ID NO: 125576 - DNA, 80 bp, synthetic construct
  misc_feature 1..80: note = Artificially Synthesized Probe
  source 1..80: mol_type = other DNA
ctagaaatgcattaaaagttttttttattgaagatgaaagttattttggcaaaaatatcaattttacattactgaaaact

SEQ ID NO: 125577 - DNA, 80 bp, synthetic construct
  misc_feature 1..80: note = Artificially Synthesized Probe
  source 1..80: mol_type = other DNA
acggagacgtaattgtttccaggagtattatttctatgcctttttattgttttccactttggaaacatgagttacatgct

SEQ ID NO: 125578 - DNA, 80 bp, synthetic construct; identical to SEQ ID NO: 40407
  misc_feature 1..80: note = Artificially Synthesized Probe
  source 1..80: mol_type = other DNA

SEQ ID NO: 125579 - DNA, 80 bp, synthetic construct
  misc_feature 1..80: note = Artificially Synthesized Probe
  source 1..80: mol_type = other DNA
gatttaacctgcatgtcttggccttgttgtttgtgcagccctctaagtgctgcaccagcatgacaggcaccacgcctgcc

SEQ ID NO: 125580 - DNA, 80 bp, synthetic construct
  misc_feature 1..80: note = Artificially Synthesized Probe
  source 1..80: mol_type = other DNA
caggtggtggaaattggccctttctcctgcatccctaagcgtcagacctcagccgttcccacccaagagaggcggcccac

SEQ ID NO: 125581 - DNA, 80 bp, synthetic construct
  misc_feature 1..80: note = Artificially Synthesized Probe
  source 1..80: mol_type = other DNA
tgactgagtttgaaggattcctgaaaggaaatcccaagctcctactgtggttttgtcactcttcctagcaggtttaggat

SEQ ID NO: 125582 - DNA, 80 bp, synthetic construct
  misc_feature 1..80: note = Artificially Synthesized Probe
  source 1..80: mol_type = other DNA
tttttatttttgagacggtgtcttgctctgttacccaggctggagtgcagtggcacgatcttggctcactgcaacctctg

SEQ ID NO: 125583 - DNA, 80 bp, synthetic construct; identical to SEQ ID NO: 40408
  misc_feature 1..80: note = Artificially Synthesized Probe
  source 1..80: mol_type = other DNA

SEQ ID NO: 125584 - DNA, 80 bp, synthetic construct
  misc_feature 1..80: note = Artificially Synthesized Probe
  source 1..80: mol_type = other DNA
tactattaagcatttgaaatacatgagatgaaaattagccattttagaagttaaaaatattgccagggtgatggcttttt

SEQ ID NO: 125585 - DNA, 80 bp, synthetic construct
  misc_feature 1..80: note = Artificially Synthesized Probe
  source 1..80: mol_type = other DNA
ctataaatgctgttacctcctctgtgcagcccacgtcaggtactgctgtgtgttgctataaatgctgttaactctgcatt

SEQ ID NO: 125586 - DNA, 80 bp, synthetic construct
  misc_feature 1..80: note = Artificially Synthesized Probe
  source 1..80: mol_type = other DNA
tcggggcttctttctgtaagtttttcattttgtgtaggtgactttttccagtgctgttgcctagagtgggtaccgttttc

SEQ ID NO: 125587 - DNA, 80 bp, synthetic construct; identical to SEQ ID NO: 40409
  misc_feature 1..80: note = Artificially Synthesized Probe
  source 1..80: mol_type = other DNA

SEQ ID NO: 125588 - DNA, 80 bp, synthetic construct
  misc_feature 1..80: note = Artificially Synthesized Probe
  source 1..80: mol_type = other DNA
aaacccggaacagtaattgatcttatccattctcctagggttatcatgaaggatttaacagtgtgaacatttccattttc

SEQ ID NO: 125589 - DNA, 80 bp, synthetic construct
  misc_feature 1..80: note = Artificially Synthesized Probe
  source 1..80: mol_type = other DNA
catctcaccagcggtatttcctggagggtctgatctgtcctggacatgcggtgggtcgcggggactgcagcttcatctct

SEQ ID NO: 125590 - DNA, 80 bp, synthetic construct
  misc_feature 1..80: note = Artificially Synthesized Probe
  source 1..80: mol_type = other DNA
ctgaaggaaggagttgaataagttaaggaaagtggatgagagggagagtgcatgggggagggagggagaggccgcactgt

SEQ ID NO: 125591 - DNA, 80 bp, synthetic construct; identical to SEQ ID NO: 40410
  misc_feature 1..80: note = Artificially Synthesized Probe
  source 1..80: mol_type = other DNA

SEQ ID NO: 125592 - DNA, 80 bp, synthetic construct
  misc_feature 1..80: note = Artificially Synthesized Probe
  source 1..80: mol_type = other DNA
agggagagcgtcgcgctgtgctgtggggcgggagggagagggcggcgccacgctgtggggagggagggagggagagcacg

SEQ ID NO: 125593 - DNA, 80 bp, synthetic construct
  misc_feature 1..80: note = Artificially Synthesized Probe
  source 1..80: mol_type = other DNA
gcattagtacagctgctgggagttaacacaccacggtgtgcccaggaaatgttacattttaattttcttactcagaatgg

SEQ ID NO: 125594 - DNA, 80 bp, synthetic construct
  misc_feature 1..80: note = Artificially Synthesized Probe
  source 1..80: mol_type = other DNA
gagggagagcgtcgcgctgtgctgtggggagggagggagggagagcgcggcgccccgctgtggggagggagggagggaga

SEQ ID NO: 125595 - DNA, 80 bp, synthetic construct
  misc_feature 1..80: note = Artificially Synthesized Probe
  source 1..80: mol_type = other DNA
tttctgctagaagctgtgaattacaactgtaatgtatttattctaaggactaacatggcactattcataaaagactgtgt

SEQ ID NO: 125596 - DNA, 80 bp, synthetic construct; identical to SEQ ID NO: 40411
  misc_feature 1..80: note = Artificially Synthesized Probe
  source 1..80: mol_type = other DNA

SEQ ID NO: 125597 - DNA, 80 bp, synthetic construct
  misc_feature 1..80: note = Artificially Synthesized Probe
  source 1..80: mol_type = other DNA
aaattaagggtgggtctgtttttcccagtccactgactcaaatgttagtctcctttggcaacaccctcacagacacaccc

SEQ ID NO: 125598 - DNA, 80 bp, synthetic construct
  misc_feature 1..80: note = Artificially Synthesized Probe
  source 1..80: mol_type = other DNA
atggtgagaccccatctctacaaaagatttaaaaaaaattaggtggcatggtggcgcacacctgtagtcccagctactca

SEQ ID NO: 125599 - DNA, 80 bp, synthetic construct
  misc_feature 1..80: note = Artificially Synthesized Probe
  source 1..80: mol_type = other DNA
tctgcattcttttctgctcttatcttccttgttcatcagttgttgctgactaagagatatgattgtgtgtcaaaaattag

SEQ ID NO: 125600 - DNA, 80 bp, synthetic construct
  misc_feature 1..80: note = Artificially Synthesized Probe
  source 1..80: mol_type = other DNA
acagcatgtggtaaaagtacaggcagagtaggcattggatttttttttaaaaaagcaaacaacacaccagtagtgttaaa

SEQ ID NO: 125601 - DNA, 80 bp, synthetic construct; identical to SEQ ID NO: 40412
  misc_feature 1..80: note = Artificially Synthesized Probe
  source 1..80: mol_type = other DNA

SEQ ID NO: 125602 - DNA, 80 bp, synthetic construct
  misc_feature 1..80: note = Artificially Synthesized Probe
  source 1..80: mol_type = other DNA
ggttgtacctaactaatggcacctgtttgtgccacacaagcctgtggcccctaatgaaagtcagatgaactgagcttccc

SEQ ID NO: 125603 - DNA, 80 bp, synthetic construct
  misc_feature 1..80: note = Artificially Synthesized Probe
  source 1..80: mol_type = other DNA
ctcttatgtcattttgagttcagtttttccgctattctgaaatgtgggtacattcccagtgaatgggtctaagatagtga

SEQ ID NO: 125604 - DNA, 80 bp, synthetic construct
  misc_feature 1..80: note = Artificially Synthesized Probe
  source 1..80: mol_type = other DNA
ggacagtggagagacggttcagaaggccacgggttgagggctgctacaaattcctatcgtcataataatgattctaaact

SEQ ID NO: 125605 - DNA, 80 bp, synthetic construct
  misc_feature 1..80: note = Artificially Synthesized Probe
  source 1..80: mol_type = other DNA
ctgggctcacttttgggcagcatttccttccttgtcccagttgctgcttcagtagaaaaacaggaaagcaaatacatctt

SEQ ID NO: 125606 - DNA, 80 bp, synthetic construct; identical to SEQ ID NO: 40413
  misc_feature 1..80: note = Artificially Synthesized Probe
  source 1..80: mol_type = other DNA

SEQ ID NO: 125607 - DNA, 80 bp, synthetic construct
  misc_feature 1..80: note = Artificially Synthesized Probe
  source 1..80: mol_type = other DNA
agatgatgaagcttctacaatgtgaagtttactagaaggattccacaggttttataaatacaagtgtgttctgagattct

SEQ ID NO: 125608 - DNA, 80 bp, synthetic construct
  misc_feature 1..80: note = Artificially Synthesized Probe
  source 1..80: mol_type = other DNA
gaaatataaaactccctcaaccctcataactcagagggcataacatgaataatcttagacaaaagttcttaaaatttaat

SEQ ID NO: 125609 - DNA, 80 bp, synthetic construct
  misc_feature 1..80: note = Artificially Synthesized Probe
  source 1..80: mol_type = other DNA
tggatcaggggtacaaaagttcagtagaatcaaatatagagctcagaaataggagatatataagaaaagtggcatggcag

SEQ ID NO: 125610 - DNA, 80 bp, synthetic construct
  misc_feature 1..80: note = Artificially Synthesized Probe
  source 1..80: mol_type = other DNA
caccaagactaaaagactttagggataaatgaaaggtttgataaatgtaattacactaaaataaaacatttaaattaaag

SEQ ID NO: 125611 - DNA, 80 bp, synthetic construct; identical to SEQ ID NO: 40414
  misc_feature 1..80: note = Artificially Synthesized Probe
  source 1..80: mol_type = other DNA

SEQ ID NO: 125612 - DNA, 80 bp, synthetic construct
  misc_feature 1..80: note = Artificially Synthesized Probe
  source 1..80: mol_type = other DNA
agcctgaaagtgtcccatgggccaagcctcgaataattcaaatatgaacctaagaatgatactaaattataactatttga

SEQ ID NO: 125613 - DNA, 80 bp, synthetic construct
  misc_feature 1..80: note = Artificially Synthesized Probe
  source 1..80: mol_type = other DNA
gagcaggatatgttcacagtcccaatgggtcctcccctgaattatgtataaattacaaaggaaaaaatggtaacattagg

SEQ ID NO: 125614 - DNA, 80 bp, synthetic construct
  misc_feature 1..80: note = Artificially Synthesized Probe
  source 1..80: mol_type = other DNA
aaaaaagagtcaagatcaagaaaggtaaacaaagggtgaaaaggtaagagacatgacagcatagagccgcgtgatcctgg

SEQ ID NO: 125615 - DNA, 80 bp, synthetic construct; identical to SEQ ID NO: 40308
  misc_feature 1..80: note = Artificially Synthesized Probe
  source 1..80: mol_type = other DNA

SEQ ID NO: 125616 - DNA, 80 bp, synthetic construct; identical to SEQ ID NO: 40415
  misc_feature 1..80: note = Artificially Synthesized Probe
  source 1..80: mol_type = other DNA

SEQ ID NO: 125617 - DNA, 80 bp, synthetic construct
  misc_feature 1..80: note = Artificially Synthesized Probe
  source 1..80: mol_type = other DNA
cagctgtcaatcatctggccctcttggtgcttcatgggatagcaggctcaagaaatcataaaggaaattgtgggtgctct

SEQ ID NO: 125618 - DNA, 80 bp, synthetic construct
  misc_feature 1..80: note = Artificially Synthesized Probe
  source 1..80: mol_type = other DNA
taaaatcttaaaaccctcacagttcttgtcaggtgtcaatgatcaggtttctgaacttcgtctttggaatggagcaatat

SEQ ID NO: 125619 - DNA, 80 bp, synthetic construct
  misc_feature 1..80: note = Artificially Synthesized Probe
  source 1..80: mol_type = other DNA
acataagaggcctttcacagaagtaatatgttaataacaaacatgagtgtaatagaggagagaaacacaaatgctacaat

SEQ ID NO: 125620 - DNA, 80 bp, synthetic construct; identical to SEQ ID NO: 40416
  misc_feature 1..80: note = Artificially Synthesized Probe
  source 1..80: mol_type = other DNA

SEQ ID NO: 125621 - DNA, 80 bp, synthetic construct
  misc_feature 1..80: note = Artificially Synthesized Probe
  source 1..80: mol_type = other DNA
catcaaataactgactaaataaaaacaagctatgcatggatcaatgatcagaaagtgggaaaaatgaagtggggttaatc

SEQ ID NO: 125622 - DNA, 80 bp, synthetic construct
  misc_feature 1..80: note = Artificially Synthesized Probe
  source 1..80: mol_type = other DNA
ttttgcatgtacaaattttcccttgatttttgtgagttatagagtacttccccttaaaaggaaatgtgaccacattaagc

SEQ ID NO: 125623 - DNA, 80 bp, synthetic construct
  misc_feature 1..80: note = Artificially Synthesized Probe
  source 1..80: mol_type = other DNA
caatgcatatttttgtttctttgcttagtaaaagatctaccacattgtacataacaaatagacatttctactgttcgttg

SEQ ID NO: 125624 - DNA, 80 bp, synthetic construct; identical to SEQ ID NO: 40417
  misc_feature 1..80: note = Artificially Synthesized Probe
  source 1..80: mol_type = other DNA

SEQ ID NO: 125625 - DNA, 80 bp, synthetic construct
  misc_feature 1..80: note = Artificially Synthesized Probe
  source 1..80: mol_type = other DNA
ggggcagcagggccgagagaagagttccctctcaggcacagctggctctctccaaaagcaccaggaaggaaagctttcag

SEQ ID NO: 125626 - DNA, 80 bp, synthetic construct
  misc_feature 1..80: note = Artificially Synthesized Probe
  source 1..80: mol_type = other DNA
cagaaataaataattatgtcattgggcttaactgaagagtggacacaacaaaatactgaaattgaagatagatcaatcac

SEQ ID NO: 125627 - DNA, 80 bp, synthetic construct
  misc_feature 1..80: note = Artificially Synthesized Probe
  source 1..80: mol_type = other DNA
agcttactgcagccttgaactccccaaacacctcagctcaagcaatgcccctgccccagcctcccgagtagctggaacca

SEQ ID NO: 125628 - DNA, 80 bp, synthetic construct
  misc_feature 1..80: note = Artificially Synthesized Probe
  source 1..80: mol_type = other DNA
ggaacagaagggatatttgaacatacaatggccacgaatttatgaaatcagtgagagttatcagtacatgtcctgaaaag

SEQ ID NO: 125629 - DNA, 80 bp, synthetic construct
  misc_feature 1..80: note = Artificially Synthesized Probe
  source 1..80: mol_type = other DNA
cttagaaacaacaggggcgagaagaaaatagaaccatatcttcacagtgctaaaagaaaaaaataatgaacctagaattc

SEQ ID NO: 125630 - DNA, 80 bp, synthetic construct; identical to SEQ ID NO: 40418
  misc_feature 1..80: note = Artificially Synthesized Probe
  source 1..80: mol_type = other DNA

SEQ ID NO: 125631 - DNA, 80 bp, synthetic construct
  misc_feature 1..80: note = Artificially Synthesized Probe
  source 1..80: mol_type = other DNA
agaggatgggaggagttactaaaattaaattatttgaagattcttacatcgttcatgaagtgatactatatttgatggta

SEQ ID NO: 125632 - DNA, 80 bp, synthetic construct
  misc_feature 1..80: note = Artificially Synthesized Probe
  source 1..80: mol_type = other DNA
tccaaacagaacacacacggcaaacatggtgaaatcaaatgaaaccagatcaaaacttacctcacaggttaaaggaacaa

SEQ ID NO: 125633 - DNA, 80 bp, synthetic construct; identical to SEQ ID NO: 40419
  misc_feature 1..80: note = Artificially Synthesized Probe
  source 1..80: mol_type = other DNA

SEQ ID NO: 125634 - DNA, 80 bp, synthetic construct
  misc_feature 1..80: note = Artificially Synthesized Probe
  source 1..80: mol_type = other DNA
ttcagacccttcaccacaaggcatctgacatagtgactgccctctgttctaggtgggtgaccatatagttaattgtctaa

SEQ ID NO: 125635 - DNA, 80 bp, synthetic construct
  misc_feature 1..80: note = Artificially Synthesized Probe
  source 1..80: mol_type = other DNA
tatcaactggatgtttgcttactgcttattttatgaagcacgcattgtattatgagatgatgtttgttatatatgtttac

SEQ ID NO: 125636 - DNA, 80 bp, synthetic construct
  misc_feature 1..80: note = Artificially Synthesized Probe
  source 1..80: mol_type = other DNA
atgtcgtttagctaaatggccatattaaatagatattctggaaagagtcttgtgttgtaggattggtggctttgaattcc

SEQ ID NO: 125637 - DNA, 80 bp, synthetic construct
  misc_feature 1..80: note = Artificially Synthesized Probe
  source 1..80: mol_type = other DNA
ataatcacacaagattatctaaaatgctttatatagcagtcacttaggaaactgtagcaataatgatttcattattagtt

SEQ ID NO: 125638 - DNA, 80 bp, synthetic construct
  misc_feature 1..80: note = Artificially Synthesized Probe
  source 1..80: mol_type = other DNA
aagataagtttcgtaccatacaagaaagcatgagttttgtggtgacggttctggatctggatctgccttgcaccttttct

SEQ ID NO: 125639 - DNA, 80 bp, synthetic construct; identical to SEQ ID NO: 40420
  misc_feature 1..80: note = Artificially Synthesized Probe
  source 1..80: mol_type = other DNA

SEQ ID NO: 125640 - DNA, 80 bp, synthetic construct
  misc_feature 1..80: note = Artificially Synthesized Probe
  source 1..80: mol_type = other DNA
ctgcaggcgttgagttctcggtgcgtctcatcgacttgctgggcacacttctcagatgtgatgattttgccgggattcag

SEQ ID NO: 125641 - DNA, 80 bp, synthetic construct
  misc_feature 1..80: note = Artificially Synthesized Probe
  source 1..80: mol_type = other DNA
aatctgattgagaaatggttcattgttgcatagaataagagaagacgatgcttcaaaacgacgatttttttttatttttg

SEQ ID NO: 125642 - DNA, 80 bp, synthetic construct
  misc_feature 1..80: note = Artificially Synthesized Probe
  source 1..80: mol_type = other DNA
ccaatggcgtcgctacgctcctcatcttcaaagctctcatctcctctgcaaaacttcgtgacccagcactgcactgtacg

SEQ ID NO: 125643 - DNA, 80 bp, synthetic construct; identical to SEQ ID NO: 40421
  misc_feature 1..80: note = Artificially Synthesized Probe
  source 1..80: mol_type = other DNA

SEQ ID NO: 125644 - DNA, 80 bp, synthetic construct
  misc_feature 1..80: note = Artificially Synthesized Probe
  source 1..80: mol_type = other DNA
ctgtatccagttgctggagtagctgcatttgaaaccatatgagcctctgcaatgcagaaaaataattagatgaagtaagg

SEQ ID NO: 125645 - DNA, 80 bp, synthetic construct
  misc_feature 1..80: note = Artificially Synthesized Probe
  source 1..80: mol_type = other DNA
atatttacactttttatttgggagagctgattttcatggatcacttatgcttctgtggaactaagcattcacaatcttcc

SEQ ID NO: 125646 - DNA, 80 bp, synthetic construct
  misc_feature 1..80: note = Artificially Synthesized Probe
  source 1..80: mol_type = other DNA
gtgagtcagagaatgagtttatgaagtttgggctcaaagagagcaaggggacccatgacatagtctgtcagcattctctt

SEQ ID NO: 125647 - DNA, 80 bp, synthetic construct; identical to SEQ ID NO: 40422
  misc_feature 1..80: note = Artificially Synthesized Probe
  source 1..80: mol_type = other DNA

SEQ ID NO: 125648 - DNA, 80 bp, synthetic construct
  misc_feature 1..80: note = Artificially Synthesized Probe
  source 1..80: mol_type = other DNA
ccttcaggaatcaacaggcattccccgggttcagtctgctgtgtcaacctgagcttatcctcatttctgctaagagatcc

SEQ ID NO: 125649 - DNA, 80 bp, synthetic construct
  misc_feature 1..80: note = Artificially Synthesized Probe
  source 1..80: mol_type = other DNA
acagatcctcacatagcagggcgcccgtaactgtgtcagcaggccttgtttttaaaaattttcttgaaagtcgaggttca

SEQ ID NO: 125650 - DNA, 80 bp, synthetic construct
  misc_feature 1..80: note = Artificially Synthesized Probe
  source 1..80: mol_type = other DNA
tgttattgcagctgctggccctgcatccttcatggcatgatatttccctacaggcatattcttaaaaatatgagtgataa

SEQ ID NO: 125651 - DNA, 80 bp, synthetic construct
  misc_feature 1..80: note = Artificially Synthesized Probe
  source 1..80: mol_type = other DNA
atcttaaatttgtatgctgaaagcactgaagaaacacatagcacagaagtttcatgattttattttatatattcagaatg

SEQ ID NO: 125652 - DNA, 80 bp, synthetic construct; identical to SEQ ID NO: 40423
  misc_feature 1..80: note = Artificially Synthesized Probe
  source 1..80: mol_type = other DNA

SEQ ID NO: 125653 - DNA, 80 bp, synthetic construct
  misc_feature 1..80: note = Artificially Synthesized Probe
  source 1..80: mol_type = other DNA
agatgctaagcaccttaacacgaaaatcgtgtctgaaagattcatcctgcaagactgtgctgctttgttctgagctgaac

SEQ ID NO: 125654 - DNA, 80 bp, synthetic construct
  misc_feature 1..80: note = Artificially Synthesized Probe
  source 1..80: mol_type = other DNA
ttctgaaagtagtccaacctgtgcgtgaaactgaactatattctcattaaaattctggtctaaagcaatgcacgtggatt

SEQ ID NO: 125655 - DNA, 80 bp, synthetic construct
  misc_feature 1..80: note = Artificially Synthesized Probe
  source 1..80: mol_type = other DNA
cgaggtcaagagatcgagatcatcctggccaacatggtgaaaccctgtctgtactaaaaatacaaaaatttgctgggcag

SEQ ID NO: 125656 - DNA, 80 bp, synthetic construct
  misc_feature 1..80: note = Artificially Synthesized Probe
  source 1..80: mol_type = other DNA
ataaaaccaagaaaattacagatacctgtgtaaaggagatatggtgagccctgtcctggcttctaatttgattgaggaga

SEQ ID NO: 125657 - DNA, 80 bp, synthetic construct; identical to SEQ ID NO: 40424
  misc_feature 1..80: note = Artificially Synthesized Probe
  source 1..80: mol_type = other DNA

SEQ ID NO: 125658 - DNA, 80 bp, synthetic construct
  misc_feature 1..80: note = Artificially Synthesized Probe
  source 1..80: mol_type = other DNA
caaagccagtcaccaccttggagctttttgcgaaaccatcggtgccagtgaagtgatgtcggcaatttctgccagtcagt

SEQ ID NO: 125659 - DNA, 80 bp, synthetic construct
  misc_feature 1..80: note = Artificially Synthesized Probe
  source 1..80: mol_type = other DNA
agttttgacaggtagatgtgggacattgcaattgatgacattgcagctcttcagcaaatggatgtgggctcccgttcaga

SEQ ID NO: 125660 - DNA, 80 bp, synthetic construct
  misc_feature 1..80: note = Artificially Synthesized Probe
  source 1..80: mol_type = other DNA
actcatattatttttaatgttaatatcgtttcaatgtttgcctcattttccacaagagggaagtccggctcacaaaagct

SEQ ID NO: 125661 - DNA, 80 bp, synthetic construct; identical to SEQ ID NO: 40425
  misc_feature 1..80: note = Artificially Synthesized Probe
  source 1..80: mol_type = other DNA

SEQ ID NO: 125662 - DNA, 80 bp, synthetic construct
  misc_feature 1..80: note = Artificially Synthesized Probe
  source 1..80: mol_type = other DNA
ttgcgtcctgcctctatgtgcatttaacaaatgacattttgtgtcactggggggtggccacattcaatgcgttggcaata

SEQ ID NO: 125663 - DNA, 80 bp, synthetic construct
  misc_feature 1..80: note = Artificially Synthesized Probe
  source 1..80: mol_type = other DNA
tcatgctgctataaagacacatgcacacgtatgtttattgcggcattactcacaatagcaaagacttggaaccaacccaa

SEQ ID NO: 125664 - DNA, 80 bp, synthetic construct
  misc_feature 1..80: note = Artificially Synthesized Probe
  source 1..80: mol_type = other DNA
caccgcatattctcgctcataggtgggaattgaacaatgagatcacatggacacaggaaggggaatatcacactctgggg

SEQ ID NO: 125665 - DNA, 80 bp, synthetic construct; identical to SEQ ID NO: 40426
  misc_feature 1..80: note = Artificially Synthesized Probe
  source 1..80: mol_type = other DNA

SEQ ID NO: 125666 - DNA, 80 bp, synthetic construct
  misc_feature 1..80: note = Artificially Synthesized Probe
  source 1..80: mol_type = other DNA
aacaaacaagtagtcaggtggtaaaacaaaggacaattcttgacagaaattaagaagcgctgctccagtgaacacacaaa

SEQ ID NO: 125667 - DNA, 80 bp, synthetic construct
  misc_feature 1..80: note = Artificially Synthesized Probe
  source 1..80: mol_type = other DNA
gaaggaaagttggaagctagcggaggtgggtttatgaggttcaaggaaagaagccatcttgacaacataaaagtgcaagg

SEQ ID NO: 125668 - DNA, 80 bp, synthetic construct; identical to SEQ ID NO: 40309
  misc_feature 1..80: note = Artificially Synthesized Probe
  source 1..80: mol_type = other DNA

SEQ ID NO: 125669 - DNA, 80 bp, synthetic construct; identical to SEQ ID NO: 40427
  misc_feature 1..80: note = Artificially Synthesized Probe
  source 1..80: mol_type = other DNA

SEQ ID NO: 125670 - DNA, 80 bp, synthetic construct
  misc_feature 1..80: note = Artificially Synthesized Probe
  source 1..80: mol_type = other DNA
agcacatctgttgacagtgtggttgactgaatatttttagcacactgttgtgatccactgagacaaaaagaaaaaaaaga

SEQ ID NO: 125671 - DNA, 80 bp, synthetic construct
  misc_feature 1..80: note = Artificially Synthesized Probe
  source 1..80: mol_type = other DNA
gctgatttcatgcctgttaatataacatccactctgcaagtcaggaatcaaggtgtagtgttgacttcaagttttattat

SEQ ID NO: 125672 - DNA, 80 bp, synthetic construct
  misc_feature 1..80: note = Artificially Synthesized Probe
  source 1..80: mol_type = other DNA
ttcggaagatggtgattccagccctcatgggtgactatgagggatttaagacttcagtggagcaggtacctgcagatgtg

SEQ ID NO: 125673 - DNA, 80 bp, synthetic construct; identical to SEQ ID NO: 40428
  misc_feature 1..80: note = Artificially Synthesized Probe
  source 1..80: mol_type = other DNA

SEQ ID NO: 125674 - DNA, 80 bp, synthetic construct
  misc_feature 1..80: note = Artificially Synthesized Probe
  source 1..80: mol_type = other DNA
cagccaccatcttgatccgtcagcctacaacaacgaggcaaggttctccaccagcaaaatgattacaacccagccaaggc

SEQ ID NO: 125675 - DNA, 80 bp, synthetic construct
  misc_feature 1..80: note = Artificially Synthesized Probe
  source 1..80: mol_type = other DNA
tcgcaatatccacttgattagggtggtctagaaccaaacctgtgatatctttgaggttgcttgttcttctttcacacaca

SEQ ID NO: 125676 - DNA, 80 bp, synthetic construct
  misc_feature 1..80: note = Artificially Synthesized Probe
  source 1..80: mol_type = other DNA
gtaattgcttttgtggttagggtgaagttgcatgatgaaaactttgcattcttttcattaacaaatagttaaatggttat

SEQ ID NO: 125677 - DNA, 80 bp, synthetic construct; identical to SEQ ID NO: 40429
  misc_feature 1..80: note = Artificially Synthesized Probe
  source 1..80: mol_type = other DNA

SEQ ID NO: 125678 - DNA, 80 bp, synthetic construct
  misc_feature 1..80: note = Artificially Synthesized Probe
  source 1..80: mol_type = other DNA
agctgcagtgtagcccctctgtgcatgtgtgaccctcgtctgcccgggggaatgctcagacatgccctgctcaggggtag

SEQ ID NO: 125679 - DNA, 80 bp, synthetic construct
  misc_feature 1..80: note = Artificially Synthesized Probe
  source 1..80: mol_type = other DNA
gagcacactcctgggaaactggaaggaaggaagtgatgtggttcagtgtgcagttttcaggaatatttataaaatcttaa

SEQ ID NO: 125680 - DNA, 80 bp, synthetic construct
  misc_feature 1..80: note = Artificially Synthesized Probe
  source 1..80: mol_type = other DNA
agcatcacaaaataggtacttttgaaaatgaaaatatgctacgtaaaaattgaaatggaatgacccaaaaaattcaaaat

SEQ ID NO: 125681 - DNA, 80 bp, synthetic construct
  misc_feature 1..80: note = Artificially Synthesized Probe
  source 1..80: mol_type = other DNA
taattcattcacccctaagattcaaagcttactctgtatctgacattaaacacacctcctacaatttatacaccttataa

SEQ ID NO: 125682 - DNA, 80 bp, synthetic construct; identical to SEQ ID NO: 40430
  misc_feature 1..80: note = Artificially Synthesized Probe
  source 1..80: mol_type = other DNA

SEQ ID NO: 125683 - DNA, 80 bp, synthetic construct
  misc_feature 1..80: note = Artificially Synthesized Probe
  source 1..80: mol_type = other DNA
tgcacataaaagagtaataacttagccaaagtcacataactaagaaaaatggatcagatgagggttggagtataattaaa

SEQ ID NO: 125684 - DNA, 80 bp, synthetic construct
  misc_feature 1..80: note = Artificially Synthesized Probe
  source 1..80: mol_type = other DNA
gccaccagcaagtctcagccaaagaccctgcttttatggggacttcattttatgtctctaaacttcaaactcttaacttt

SEQ ID NO: 125685 - DNA, 80 bp, synthetic construct
  misc_feature 1..80: note = Artificially Synthesized Probe
  source 1..80: mol_type = other DNA
agatcttagtgggacactaactgagtggcgttcgtttttcttcttatccgaattgttttggtttatatctaaaactagga

SEQ ID NO: 125686 - DNA, 80 bp, synthetic construct
  misc_feature 1..80: note = Artificially Synthesized Probe
  source 1..80: mol_type = other DNA
gataacctgccagaaaaatgactgaattgtattggaccactgctgttctgtgacaggttctctgttaggaactttcacaa

SEQ ID NO: 125687 - DNA, 80 bp, synthetic construct; identical to SEQ ID NO: 40431
  misc_feature 1..80: note = Artificially Synthesized Probe
  source 1..80: mol_type = other DNA

SEQ ID NO: 125688 - DNA, 80 bp, synthetic construct
  misc_feature 1..80: note = Artificially Synthesized Probe
  source 1..80: mol_type = other DNA
attcttgataaccaagcacttcttacagctcccttagctgttaacttctagaaactgggctaaattggaagtctgttcct

SEQ ID NO: 125689 - DNA, 80 bp, synthetic construct
  misc_feature 1..80: note = Artificially Synthesized Probe
  source 1..80: mol_type = other DNA
gattcagggaaggaaatatactgacttctggataaacaaggggcaatgctttataacaacttgcatacatttttgtcaca

SEQ ID NO: 125690 - DNA, 80 bp, synthetic construct
  misc_feature 1..80: note = Artificially Synthesized Probe
  source 1..80: mol_type = other DNA
gttcttctgggaaaagtattaggaaggcgagcaagtcagtttccacgctttacacacttatatgtaaatgaggtgaccag

SEQ ID NO: 125691 - DNA, 80 bp, synthetic construct; identical to SEQ ID NO: 40432
  misc_feature 1..80: note = Artificially Synthesized Probe
  source 1..80: mol_type = other DNA

SEQ ID NO: 125692 - DNA, 80 bp, synthetic construct
  misc_feature 1..80: note = Artificially Synthesized Probe
  source 1..80: mol_type = other DNA
attttaaaattataaacatttgcataaattattaatgttttgaaaccctattctgagtcttctccatgctatgtttacat

SEQ ID NO: 125693 - DNA, 80 bp, synthetic construct
  misc_feature 1..80: note = Artificially Synthesized Probe
  source 1..80: mol_type = other DNA
ataaatcataatgcactttaaaatgaaaggtgtgaaatgaacaccttgcccgccactctcagtgccaagtctgattgtat

SEQ ID NO: 125694 - DNA, 80 bp, synthetic construct
  misc_feature 1..80: note = Artificially Synthesized Probe
  source 1..80: mol_type = other DNA
ggtgttgctattccttttaaacatttacctgcctggtagtttaaaattcttaatgttgtagtgactgtggttttttcatg

SEQ ID NO: 125695 - DNA, 80 bp, synthetic construct
  misc_feature 1..80: note = Artificially Synthesized Probe
  source 1..80: mol_type = other DNA
gctccatgaaccccgggtctgcggcacgcatttagtttcgaatatggtatttttgttacagaaaggttttttatttctat

SEQ ID NO: 125696 - DNA, 80 bp, synthetic construct; identical to SEQ ID NO: 40433
  misc_feature 1..80: note = Artificially Synthesized Probe
  source 1..80: mol_type = other DNA

SEQ ID NO: 125697 - DNA, 80 bp, synthetic construct
  misc_feature 1..80: note = Artificially Synthesized Probe
  source 1..80: mol_type = other DNA
tcgtggtggattttatgttttcatgtctctctgtagcaggtccttttctctgcagctgtcttatttcattaaacacattg

SEQ ID NO: 125698 - DNA, 80 bp, synthetic construct
  misc_feature 1..80: note = Artificially Synthesized Probe
  source 1..80: mol_type = other DNA
ccctgaagtggagaaggtagagaggacccttccatcatggaactcatgctctgttgtcaagcggcacatgggttctgaga

SEQ ID NO: 125699 - DNA, 80 bp, synthetic construct
  misc_feature 1..80: note = Artificially Synthesized Probe
  source 1..80: mol_type = other DNA
aggacatgaggatgccaggagaggagtgggtggggcaggtggacagaccccaggcaggtatggcaggattgcaggacagc

SEQ ID NO: 125700 - DNA, 80 bp, synthetic construct; identical to SEQ ID NO: 40434
  misc_feature 1..80: note = Artificially Synthesized Probe
  source 1..80: mol_type = other DNA

SEQ ID NO: 125701 - DNA, 80 bp, synthetic construct
  misc_feature 1..80: note = Artificially Synthesized Probe
  source 1..80: mol_type = other DNA
tttcaggggatttgctggtgagttggacactgagggtcaggagggaggaaggtcacaggaactgaggagtttcaaccaag

SEQ ID NO: 125702 - DNA, 80 bp, synthetic construct; identical to SEQ ID NO: 40310
  misc_feature 1..80: note = Artificially Synthesized Probe
  source 1..80: mol_type = other DNA

SEQ ID NO: 125703 - DNA, 80 bp, synthetic construct
  misc_feature 1..80: note = Artificially Synthesized Probe
  source 1..80: mol_type = other DNA
aaaatgtgggtgttcgtttcttgaagtactttgtaatatgaatagctatcccactgttgcccatggtaatcaaacccgag

SEQ ID NO: 125704 - DNA, 80 bp, synthetic construct
  misc_feature 1..80: note = Artificially Synthesized Probe
  source 1..80: mol_type = other DNA
aaatgtgtcaaggaaatgtattcaattagctcattaaatacccagaatcacttaagcagtgggaaatgtgggccttggag

SEQ ID NO: 125705 - DNA, 80 bp, synthetic construct; identical to SEQ ID NO: 40435
  misc_feature 1..80: note = Artificially Synthesized Probe
  source 1..80: mol_type = other DNA

SEQ ID NO: 125706 - DNA, 80 bp, synthetic construct
  misc_feature 1..80: note = Artificially Synthesized Probe
  source 1..80: mol_type = other DNA
tatttcagatggcatcatctggttcgcacggtgtaataaaacaacagatgatctattagaggtctttgttgaatcttatt

SEQ ID NO: 125707 - DNA, 80 bp, synthetic construct
  misc_feature 1..80: note = Artificially Synthesized Probe
  source 1..80: mol_type = other DNA
tgtcctcaccaggacaattaaccggtagcaatggtgagtggtcagcgtgatgaattagttggaagttaatatcctatgtg

SEQ ID NO: 125708 - DNA, 80 bp, synthetic construct
  misc_feature 1..80: note = Artificially Synthesized Probe
  source 1..80: mol_type = other DNA
tggacgctgctcaccacgcatctgccacttggggtctctgcaccctgttccgggtcctgctccttattagtgccgcccct

SEQ ID NO: 125709 - DNA, 80 bp, synthetic construct
  misc_feature 1..80: note = Artificially Synthesized Probe
  source 1..80: mol_type = other DNA
tagccagagctcctattgctagggagattcctaggtcatcatggagaaagcctgtttagcaggatgatatggcctctgta

SEQ ID NO: 125710 - DNA, 80 bp, synthetic construct; identical to SEQ ID NO: 40436
  misc_feature 1..80: note = Artificially Synthesized Probe
  source 1..80: mol_type = other DNA

SEQ ID NO: 125711 - DNA, 80 bp, synthetic construct
  misc_feature 1..80: note = Artificially Synthesized Probe
  source 1..80: mol_type = other DNA
gtgtgtgtgcatgcatccctgtatgtgtgtgcatgagtgtttgggcatgtgtggaggtatgcatgtgggccatgtgtgtt

SEQ ID NO: 125712 - DNA, 80 bp, synthetic construct
  misc_feature 1..80: note = Artificially Synthesized Probe
  source 1..80: mol_type = other DNA
acatacttctgagctccattctgcaggaatcattaccgagaacgctggtggcccttccttttctcagagcctgagagctg

SEQ ID NO: 125713 - DNA, 80 bp, synthetic construct
  misc_feature 1..80: note = Artificially Synthesized Probe
  source 1..80: mol_type = other DNA
ctcagcccctcccattgtcaagcccacacgcctgggctaggggctcagtgcttgcagccctgtggcggagctggccttgc

SEQ ID NO: 125714 - DNA, 80 bp, synthetic construct
  misc_feature 1..80: note = Artificially Synthesized Probe
  source 1..80: mol_type = other DNA
tgtcttcattttcttctttttgtttcttctttttgtttcttcactttgttccaaagtgaccgtgtctctcatttttaaca

SEQ ID NO: 125715 - DNA, 80 bp, synthetic construct; identical to SEQ ID NO: 40437
  misc_feature 1..80: note = Artificially Synthesized Probe
  source 1..80: mol_type = other DNA

SEQ ID NO: 125716 - DNA, 80 bp, synthetic construct
  misc_feature 1..80: note = Artificially Synthesized Probe
  source 1..80: mol_type = other DNA
tccttcccggctgcccttggtgcctccacaggcactgccccttccagagagctggtggatccacagacgtcccgtgagct

SEQ ID NO: 125717 - DNA, 80 bp, synthetic construct
  misc_feature 1..80: note = Artificially Synthesized Probe
  source 1..80: mol_type = other DNA
ctgggtgaggtgtggattgcagtggccggtccctgggctgccagccagatagtcacgtgtgacagtgtgtgtgagcacag

SEQ ID NO: 125718 - DNA, 80 bp, synthetic construct; identical to SEQ ID NO: 40438
  misc_feature 1..80: note = Artificially Synthesized Probe
  source 1..80: mol_type = other DNA

SEQ ID NO: 125719 - DNA, 80 bp, synthetic construct
  misc_feature 1..80: note = Artificially Synthesized Probe
  source 1..80: mol_type = other DNA
atgaactccggatctctggggcagacgcaggcgctggggctccttgaaccccctgtttggttctcacagcagctgagttg

SEQ ID NO: 125720 - DNA, 80 bp, synthetic construct
  misc_feature 1..80: note = Artificially Synthesized Probe
  source 1..80: mol_type = other DNA
ctgggccactggcctccagctgtgcccatccctctcccccgccacgtggcatgaggaccaagtgccctggctgccacccc

SEQ ID NO: 125721 - DNA, 80 bp, synthetic construct
  misc_feature 1..80: note = Artificially Synthesized Probe
  source 1..80: mol_type = other DNA
ttctaatgatccaaaggtgtctttctgaactgtctttccttcatctgctgacaaagctgatagatttatcttctttgact

SEQ ID NO: 125722 - DNA, 80 bp, synthetic construct; identical to SEQ ID NO: 40439
  misc_feature 1..80: note = Artificially Synthesized Probe
  source 1..80: mol_type = other DNA

SEQ ID NO: 125723 - DNA, 80 bp, synthetic construct
  misc_feature 1..80: note = Artificially Synthesized Probe
  source 1..80: mol_type = other DNA
aaaaaaacaaacgcctggctaattttcttttaaaaacatgccttatataaatcctacaaaaacggctcaggaacaattat

SEQ ID NO: 125724 - DNA, 80 bp, synthetic construct
  misc_feature 1..80: note = Artificially Synthesized Probe
  source 1..80: mol_type = other DNA
tgtgtttccactttgtccctacagacgaaaaccactattgctctgttgtatgatgaagagtccgaaaatgcctatgacat

SEQ ID NO: 125725 - DNA, 80 bp, synthetic construct
  misc_feature 1..80: note = Artificially Synthesized Probe
  source 1..80: mol_type = other DNA
acctctggatcttgtaatgaagctccaaggtagccaaagaactcacacatgcctaactttttagaaagagagcaattttc

SEQ ID NO: 125726 - DNA, 80 bp, synthetic construct
  misc_feature 1..80: note = Artificially Synthesized Probe
  source 1..80: mol_type = other DNA
gaatgattgctgagcaaaagctgctactcgttatttaaatatccccaactactggctttcactgtgtcacaaaatacagt

SEQ ID NO: 125727 - DNA, 80 bp, synthetic construct
  misc_feature 1..80: note = Artificially Synthesized Probe
  source 1..80: mol_type = other DNA
gaggtttcagtgagccaagatcgcaccactgcactccagcctgggcaatagagcgaggctccatctcaaaaaaaaaagga

SEQ ID NO: 125728 - DNA, 80 bp, synthetic construct; identical to SEQ ID NO: 40440
  misc_feature 1..80: note = Artificially Synthesized Probe
  source 1..80: mol_type = other DNA

SEQ ID NO: 125729 - DNA, 80 bp, synthetic construct
  misc_feature 1..80: note = Artificially Synthesized Probe
  source 1..80: mol_type = other DNA
ggcacccggtccgccctcctgctccccaacatgtcccctgtggctcaaggaggcgaaggctctgggatgggggcagggtc

SEQ ID NO: 125730 - DNA, 80 bp, synthetic construct
  misc_feature 1..80: note = Artificially Synthesized Probe
  source 1..80: mol_type = other DNA
tcacagttctggaggctcagagcacaggatcaaggtgcccgcaggctgggtggtctggtgagggtctgctctctttccag

SEQ ID NO: 125731 - DNA, 80 bp, synthetic construct
  misc_feature 1..80: note = Artificially Synthesized Probe
  source 1..80: mol_type = other DNA
cacaccccggcaccactgccctgggtagtaagtttccacgtgagctttgggggagacacagacatcccaaccacggcctc

SEQ ID NO: 125732 - DNA, 80 bp, synthetic construct; identical to SEQ ID NO: 40441
  misc_feature 1..80: note = Artificially Synthesized Probe
  source 1..80: mol_type = other DNA

SEQ ID NO: 125733 - DNA, 80 bp, synthetic construct
  misc_feature 1..80: note = Artificially Synthesized Probe
  source 1..80: mol_type = other DNA
cataggtatagacttatgcgtacagttttaggtgaattattgactccaaacctctagttatatttgtattcccacctgca

SEQ ID NO: 125734 - DNA, 80 bp, synthetic construct
  misc_feature 1..80: note = Artificially Synthesized Probe
  source 1..80: mol_type = other DNA
gtgtatccagcagtgcagaatctgaattgatgtattattttacttcctattcctttatagtgacatgaagtgtcgatgtt

SEQ ID NO: 125735 - DNA, 80 bp, synthetic construct
  misc_feature 1..80: note = Artificially Synthesized Probe
  source 1..80: mol_type = other DNA
actttgaattaatggggtgggatgctgtatattacacttgttatgttaggtcacggtagatttgcagttggaaagtattt

SEQ ID NO: 125736 - DNA, 80 bp, synthetic construct
  misc_feature 1..80: note = Artificially Synthesized Probe
  source 1..80: mol_type = other DNA
ctgatttgcttcaggtgcctttaggatttttgcaggaaaagagtcaatatttaacattttacttccaggagagcagtccc

SEQ ID NO: 125737 - DNA, 80 bp, synthetic construct; identical to SEQ ID NO: 40442
  misc_feature 1..80: note = Artificially Synthesized Probe
  source 1..80: mol_type = other DNA

SEQ ID NO: 125738 - DNA, 80 bp, synthetic construct
  misc_feature 1..80: note = Artificially Synthesized Probe
  source 1..80: mol_type = other DNA
tgagtgaacttgaaaaacaatctgtcccttagaaagggacagtcagaacattcacctggaagagagacaaagacacaaat

SEQ ID NO: 125739 - DNA, 80 bp, synthetic construct
  misc_feature 1..80: note = Artificially Synthesized Probe
  source 1..80: mol_type = other DNA
tctaatgaaggcctcaggccactgccaagtgtaaggtcacaggaccctgtggagatcctaaaattatttgttaatgcaga

SEQ ID NO: 125740 - DNA, 80 bp, synthetic construct
  misc_feature 1..80: note = Artificially Synthesized Probe
  source 1..80: mol_type = other DNA
tatctagaaattaaaatagaaacaatacctgaaatgaacctccatgaacaatttaaataacgtgttaggtaccaatgaga

SEQ ID NO: 125741 - DNA, 80 bp, synthetic construct; identical to SEQ ID NO: 40443
  misc_feature 1..80: note = Artificially Synthesized Probe
  source 1..80: mol_type = other DNA

SEQ ID NO: 125742 - DNA, 80 bp, synthetic construct
  misc_feature 1..80: note = Artificially Synthesized Probe
  source 1..80: mol_type = other DNA
ctgtcctataggaaggctttgtcagggtaatgtaagtctgtagacttaactatcagaattcaaagtacatcgtgctctag

SEQ ID NO: 125743 - DNA, 80 bp, synthetic construct
  misc_feature 1..80: note = Artificially Synthesized Probe
  source 1..80: mol_type = other DNA
atcaaagaccatggtgttttcttctgtttcctatatgtatctttacaactgtgcaaatgagactaaagccatttttgaat

SEQ ID NO: 125744 - DNA, 80 bp, synthetic construct; identical to SEQ ID NO: 40444
  misc_feature 1..80: note = Artificially Synthesized Probe
  source 1..80: mol_type = other DNA

SEQ ID NO: 125745 - DNA, 80 bp, synthetic construct
  misc_feature 1..80: note = Artificially Synthesized Probe
  source 1..80: mol_type = other DNA
ttgcttcttattctttgggtccaaaatcaggagtagacatcgcttctgctttacttttttaaattctaaccttaatcttt

SEQ ID NO: 125746 - DNA, 80 bp, synthetic construct
  misc_feature 1..80: note = Artificially Synthesized Probe
  source 1..80: mol_type = other DNA
ggggccctgagggatgaggccttggttgatcctacaaggagttctgaagacaggacaagcctttgaaagcctcccctgtg

SEQ ID NO: 125747 - DNA, 80 bp, synthetic construct
  misc_feature 1..80: note = Artificially Synthesized Probe
  source 1..80: mol_type = other DNA
attagtttgttaactcttccatttttctcagatcccaacacagaatctgtttctttccagtttctgaaaaccagtttctg

SEQ ID NO: 125748 - DNA, 80 bp, synthetic construct
  misc_feature 1..80: note = Artificially Synthesized Probe
  source 1..80: mol_type = other DNA
tgctccacagagctcatcagtgtagagcaaacatgcatgtttacaaatggaatactgcataagaagaattggctactgtt

SEQ ID NO: 125749 - DNA, 80 bp, synthetic construct; identical to SEQ ID NO: 40445
  misc_feature 1..80: note = Artificially Synthesized Probe
  source 1..80: mol_type = other DNA

SEQ ID NO: 125750 - DNA, 80 bp, synthetic construct
  misc_feature 1..80: note = Artificially Synthesized Probe
  source 1..80: mol_type = other DNA
ctgggaaaagtgcagataaatttggaagcaagtgatttgtgaaatttcacaggtacggggctgaaggctgcaaggatgaa

SEQ ID NO: 125751 - DNA, 80 bp, synthetic construct
  misc_feature 1..80: note = Artificially Synthesized Probe
  source 1..80: mol_type = other DNA
ggatagtggccgactcttacaaaatttaccttcaccttaattttcaacactattgagttagctcattaaaatgttattta

SEQ ID NO: 125752 - DNA, 80 bp, synthetic construct
  misc_feature 1..80: note = Artificially Synthesized Probe
  source 1..80: mol_type = other DNA
atcacaaggttaggagtttgagaccagcctgaccaacatggtgaaaccccgtttctactaaaaatacaaaaattagtcgg

SEQ ID NO: 125753 - DNA, 80 bp, synthetic construct; identical to SEQ ID NO: 40446
  misc_feature 1..80: note = Artificially Synthesized Probe
  source 1..80: mol_type = other DNA

SEQ ID NO: 125754 - DNA, 80 bp, synthetic construct
  misc_feature 1..80: note = Artificially Synthesized Probe
  source 1..80: mol_type = other DNA
ctagattgctttggctctgtctacgttattaaagagtgaagtgtgcctccacatctggagcctgactgcttcctcactgg

SEQ ID NO: 125755 - DNA, 80 bp, synthetic construct; identical to SEQ ID NO: 40311
  misc_feature 1..80: note = Artificially Synthesized Probe
  source 1..80: mol_type = other DNA

SEQ ID NO: 125756 - DNA, 80 bp, synthetic construct
  misc_feature 1..80: note = Artificially Synthesized Probe
  source 1..80: mol_type = other DNA
gccattaggtgctcattttgcaaacgttatgctttttaaatggatctacaatgcatgaagataaaacctgctccatgtag

SEQ ID NO: 125757 - DNA, 80 bp, synthetic construct
  misc_feature 1..80: note = Artificially Synthesized Probe
  source 1..80: mol_type = other DNA
tgatgtgtacattcgctagaagttaatctggggctcatatgtggtgagttcttgttaccagctgtgaatccacaaccgtc

SEQ ID NO: 125758 - DNA, 80 bp, synthetic construct
  misc_feature 1..80: note = Artificially Synthesized Probe
  source 1..80: mol_type = other DNA
aagggccggtgggtgacttgagagatcaagagccccatccagcccttgacttggggttttctccattgacatggttccaa

SEQ ID NO: 125759 - DNA, 80 bp, synthetic construct; identical to SEQ ID NO: 40447
  misc_feature 1..80: note = Artificially Synthesized Probe
  source 1..80: mol_type = other DNA

SEQ ID NO: 125760 - DNA, 80 bp, synthetic construct
  misc_feature 1..80: note = Artificially Synthesized Probe
  source 1..80: mol_type = other DNA
ccaccacctgatggtcgcctgacgttctggggctggggcccatctcctgccctgttcatgtctgctctgtgatatggttg

SEQ ID NO: 125761 - DNA, 80 bp, synthetic construct
  misc_feature 1..80: note = Artificially Synthesized Probe
  source 1..80: mol_type = other DNA
ctgacatggacagacacccctgctcctcatcacctgccctgatagtgcaggccaggctgaccaggaaagctgccagcccc

SEQ ID NO: 125762 - DNA, 80 bp, synthetic construct
  misc_feature 1..80: note = Artificially Synthesized Probe
  source 1..80: mol_type = other DNA
tcaggttcctcctgtaccccatcagggatcgaggcaggggctccagatggaccagagactctgatgccaggacgcaaaca

SEQ ID NO: 125763 - DNA, 80 bp, synthetic construct; identical to SEQ ID NO: 40448
  misc_feature 1..80: note = Artificially Synthesized Probe
  source 1..80: mol_type = other DNA

SEQ ID NO: 125764 - DNA, 80 bp, synthetic construct
  misc_feature 1..80: note = Artificially Synthesized Probe
  source 1..80: mol_type = other DNA
ttagtttgaaatcattgcatccagacactgagaaatagtttacttacttcagatggcaaatccaggctccctcagcctat

SEQ ID NO: 125765 - DNA, 80 bp, synthetic construct
  misc_feature 1..80: note = Artificially Synthesized Probe
  source 1..80: mol_type = other DNA
aaacaatgcctcctgactcaacagccccctcacatagccccagggcgaagtctgttagcacattgttttctgaaataaaa

SEQ ID NO: 125766 - DNA, 80 bp, synthetic construct
  misc_feature 1..80: note = Artificially Synthesized Probe
  source 1..80: mol_type = other DNA
tcagtccacctccttggccacctttgcttttcctccttggtcccctgtccttttcctgcacccccaatcttcatccttgg

SEQ ID NO: 125767 - DNA, 80 bp, synthetic construct; identical to SEQ ID NO: 40449
  misc_feature 1..80: note = Artificially Synthesized Probe
  source 1..80: mol_type = other DNA

SEQ ID NO: 125768 - DNA, 80 bp, synthetic construct
  misc_feature 1..80: note = Artificially Synthesized Probe
  source 1..80: mol_type = other DNA
cgcagtgttttacctgtagaactgattgaaatctttctggaaactgcagtattaaaatctgaacatgagtttgcagccat

SEQ ID NO: 125769 - DNA, 80 bp, synthetic construct
  misc_feature 1..80: note = Artificially Synthesized Probe
  source 1..80: mol_type = other DNA
atgagaaatgtataattgataagttatctatgtcatagaaaatagctcgttcttaaaatatgtggtcagaagataatgtg

SEQ ID NO: 125770 - DNA, 80 bp, synthetic construct
  misc_feature 1..80: note = Artificially Synthesized Probe
  source 1..80: mol_type = other DNA
tttgaaaataatttattgaacaattaccttagattgcaacctccattctgtagaagttttatgatacattcgattgtatt

SEQ ID NO: 125771 - DNA, 80 bp, synthetic construct; identical to SEQ ID NO: 40450
  misc_feature 1..80: note = Artificially Synthesized Probe
  source 1..80: mol_type = other DNA

SEQ ID NO: 125772 - DNA, 80 bp, synthetic construct
  misc_feature 1..80: note = Artificially Synthesized Probe
  source 1..80: mol_type = other DNA
aacttcagccaggctgctgtgtgaaaagttccagttagaagctgcagaagttttcctgtttactttttatcatccagtaa

SEQ ID NO: 125773 - DNA, 80 bp, synthetic construct
  misc_feature 1..80: note = Artificially Synthesized Probe
  source 1..80: mol_type = other DNA
atgaggtggttttaaaataacgatttttcatggataaaactaaccaccttggtatttttgttaaacctgatggtctgtaa

SEQ ID NO: 125774 - DNA, 80 bp, synthetic construct
  misc_feature 1..80: note = Artificially Synthesized Probe
  source 1..80: mol_type = other DNA
caagggctgccttcctggcttgcaggcgaaggccttataggtgtgtcctcatatggtagagttactggcaagggctggct

SEQ ID NO: 125775 - DNA, 80 bp, synthetic construct
  misc_feature 1..80: note = Artificially Synthesized Probe
  source 1..80: mol_type = other DNA
tataggtgtgtcctcatatggtagagttactggcaagggccagcttcctggcctgcaggcaaaggccttataggtgtgtc

SEQ ID NO: 125776 - DNA, 80 bp, synthetic construct
  misc_feature 1..80: note = Artificially Synthesized Probe
  source 1..80: mol_type = other DNA
gggctggcttcctggactgcaggcgaaggccttgtaggtgtgtcctcatatggtagagttactggcaagggccagcttcc

SEQ ID NO: 125777 - DNA, 80 bp, synthetic construct
  misc_feature 1..80: note = Artificially Synthesized Probe
  source 1..80: mol_type = other DNA
tcctcctcctggtccccagtcctcctccttggaccccaatcctcctcctggtccccagtcctcctccttggaccccaatc

SEQ ID NO: 125778 - DNA, 80 bp, synthetic construct
  misc_feature 1..80: note = Artificially Synthesized Probe
  source 1..80: mol_type = other DNA
ggtgtgtcctcatatggtagagttactggcaagggctggcttcctggactgcaggcgaaggccttataggtgtgtcctca

SEQ ID NO: 125779 - DNA, 80 bp, synthetic construct; identical to SEQ ID NO: 40451
  misc_feature 1..80: note = Artificially Synthesized Probe
  source 1..80: mol_type = other DNA

SEQ ID NO: 125780 - DNA, 80 bp, synthetic construct
  misc_feature 1..80: note = Artificially Synthesized Probe
  source 1..80: mol_type = other DNA
aaaaaagagagagagagagcgctgtatctgctgtcttttcctgttccaaccctatcagatagggcccacctgaatgacct

SEQ ID NO: 125781 - DNA, 80 bp, synthetic construct; identical to SEQ ID NO: 40452
  misc_feature 1..80: note = Artificially Synthesized Probe
  source 1..80: mol_type = other DNA

SEQ ID NO: 125782 - DNA, 80 bp, synthetic construct
  misc_feature 1..80: note = Artificially Synthesized Probe
  source 1..80: mol_type = other DNA
tgttaagaatattagtccagattttaccacaggtgatcagtttcttgatattttctttgaaatatcaaggatattttagg

SEQ ID NO: 125783 - DNA, 80 bp, synthetic construct
  misc_feature 1..80: note = Artificially Synthesized Probe
  source 1..80: mol_type = other DNA
aacagctacaattttaaaatgttattgagcattttcagaaattccatacagagaggcctccagttactatgacgtagata

SEQ ID NO: 125784 - DNA, 80 bp, synthetic construct
  misc_feature 1..80: note = Artificially Synthesized Probe
  source 1..80: mol_type = other DNA
atgaacactacagaatttagcgtctgctgagggagggaatgaacccccccttggttctgcagtccacattcattgtgaga

SEQ ID NO: 125785 - DNA, 80 bp, synthetic construct; identical to SEQ ID NO: 40453
  misc_feature 1..80: note = Artificially Synthesized Probe
  source 1..80: mol_type = other DNA

SEQ ID NO: 125786 - DNA, 80 bp, synthetic construct
  misc_feature 1..80: note = Artificially Synthesized Probe
  source 1..80: mol_type = other DNA
ttccattagagccacagaacttgtttaccttacagctgaaatgttgcaccctttggcctgcacctccgccccccaaccct

SEQ ID NO: 125787 - DNA, 80 bp, synthetic construct
  misc_feature 1..80: note = Artificially Synthesized Probe
  source 1..80: mol_type = other DNA
ttccttctttatggctgaaggatgttccattcggtgtatctactgcatcttctttattctcgcatctactggtggacact

SEQ ID NO: 125788 - DNA, 80 bp, synthetic construct
  misc_feature 1..80: note = Artificially Synthesized Probe
  source 1..80: mol_type = other DNA
tggttgcctcctcctccttgacttggtcctcctccttgatcctctggtcttcttcagggtcccctcctcctggcctctcg

SEQ ID NO: 125789 - DNA, 80 bp, synthetic construct
  misc_feature 1..80: note = Artificially Synthesized Probe
  source 1..80: mol_type = other DNA
cccaggagtggctctgactttgctgttcacagtatctggaatacagtctaacaccaagaaaaagccaaaacgatcactct

SEQ ID NO: 125790 - DNA, 80 bp, synthetic construct; identical to SEQ ID NO: 40454
  misc_feature 1..80: note = Artificially Synthesized Probe
  source 1..80: mol_type = other DNA

SEQ ID NO: 125791 - DNA, 80 bp, synthetic construct
  misc_feature 1..80: note = Artificially Synthesized Probe
  source 1..80: mol_type = other DNA
tgtttcctcttagaactcaaagaatgtctgtcacttctgtttttcctgtagtgtatttttgaggtaaaagcaccctttgg

SEQ ID NO: 125792 - DNA, 80 bp, synthetic construct
  misc_feature 1..80: note = Artificially Synthesized Probe
  source 1..80: mol_type = other DNA
atttcactagccagttaaaggcctattgtgcttttagctttttatcacaacctacccttaaatatcccagacatctgtgg

SEQ ID NO: 125793 - DNA, 80 bp, synthetic construct
  misc_feature 1..80: note = Artificially Synthesized Probe
  source 1..80: mol_type = other DNA
agagagcggttctaaaacaggactgagtgctccgccccacttccctttcaccacctgggagaaggtggacccctcgtttc

SEQ ID NO: 125794 - DNA, 80 bp, synthetic construct; identical to SEQ ID NO: 40455
  misc_feature 1..80: note = Artificially Synthesized Probe
  source 1..80: mol_type = other DNA

SEQ ID NO: 125795 - DNA, 80 bp, synthetic construct
  misc_feature 1..80: note = Artificially Synthesized Probe
  source 1..80: mol_type = other DNA
tatggaaatggttttctctattcctgctttttatttttgaagaactttccagtgtgaatcatgataaccacgtttctttc

SEQ ID NO: 125796 - DNA, 80 bp, synthetic construct
  misc_feature 1..80: note = Artificially Synthesized Probe
  source 1..80: mol_type = other DNA
tatgtgttttgctcgattacctaaacttccgttttatttttgtagctgtgtcttgtttcaaaggatgcttcttatgccct

SEQ ID NO: 125797 - DNA, 80 bp, synthetic construct
  misc_feature 1..80: note = Artificially Synthesized Probe
  source 1..80: mol_type = other DNA
catatagatggagaagtccatggtgttcgttgaagtatctgatacacaagtctctgagcctaagaacgtaatgagcctgt

SEQ ID NO: 125798 - DNA, 80 bp, synthetic construct
  misc_feature 1..80: note = Artificially Synthesized Probe
  source 1..80: mol_type = other DNA
attgtgcatttttctccagacattcgagcaaagcaattcttgcttttaatcattgtaattatagcggaagcgttgaagtg

SEQ ID NO: 125799 - DNA, 80 bp, synthetic construct; identical to SEQ ID NO: 40456
  misc_feature 1..80: note = Artificially Synthesized Probe
  source 1..80: mol_type = other DNA

SEQ ID NO: 125800 - DNA, 80 bp, synthetic construct
  misc_feature 1..80: note = Artificially Synthesized Probe
  source 1..80: mol_type = other DNA
tcaggccactcctcccctgctctccagagcaaggggcacctggacatgcggtccgtgtcggggggtggggcggttagctt

SEQ ID NO: 125801 - DNA, 80 bp, synthetic construct; identical to SEQ ID NO: 40312
  misc_feature 1..80: note = Artificially Synthesized Probe
  source 1..80: mol_type = other DNA

SEQ ID NO: 125802 - DNA, 80 bp, synthetic construct
  misc_feature 1..80: note = Artificially Synthesized Probe
  source 1..80: mol_type = other DNA
gtggaggttctgggtgaaaagcacagaataagctcatactttttctctaaacattcttactcatttcacccaattttacc

SEQ ID NO: 125803 - DNA, 80 bp, synthetic construct
  misc_feature 1..80: note = Artificially Synthesized Probe
  source 1..80: mol_type = other DNA
atctgaaggtgggtgtggtgagggcagttgtggtgagggcagtcatggtcaggtcagccatgtgtggtgcaggagaccat

SEQ ID NO: 125804 - DNA, 80 bp, synthetic construct
  misc_feature 1..80: note = Artificially Synthesized Probe
  source 1..80: mol_type = other DNA
ttctttttcggcagaaggacatttaagagtcaggtcagcaacacatttttctcctttttgagcaagcttacaaacctgcc

SEQ ID NO: 125805 - DNA, 80 bp, synthetic construct; identical to SEQ ID NO: 40457
  misc_feature 1..80: note = Artificially Synthesized Probe
  source 1..80: mol_type = other DNA

SEQ ID NO: 125806 - DNA, 80 bp, synthetic construct
  misc_feature 1..80: note = Artificially Synthesized Probe
  source 1..80: mol_type = other DNA
tttttgtatttttagtagaggcgggggtctcgaactcctgacctcaggtgatctgcctgcctccgcctcccaaagtgctg

SEQ ID NO: 125807 - DNA, 80 bp, synthetic construct
  misc_feature 1..80: note = Artificially Synthesized Probe
  source 1..80: mol_type = other DNA
ggctcatataaagtgggattccacacgggcgccgtgggtccaccgttgctgtgtcgggcgtggttggttcttgttgcacc

SEQ ID NO: 125808 - DNA, 80 bp, synthetic construct; identical to SEQ ID NO: 40458
  misc_feature 1..80: note = Artificially Synthesized Probe
  source 1..80: mol_type = other DNA

SEQ ID NO: 125809 - DNA, 80 bp, synthetic construct
  misc_feature 1..80: note = Artificially Synthesized Probe
  source 1..80: mol_type = other DNA
gagaaactgggacccaggagattccaaacttagcagtcttcagaccatgctgatgccattctcttctgacattggaagct

SEQ ID NO: 125810 - DNA, 80 bp, synthetic construct
  misc_feature 1..80: note = Artificially Synthesized Probe
  source 1..80: mol_type = other DNA
ctcaccacccctccaggcccaggcccaggcccacgacctcagcaggcacttggagatgaacttacatggttcctccctgc

SEQ ID NO: 125811 - DNA, 80 bp, synthetic construct
  misc_feature 1..80: note = Artificially Synthesized Probe
  source 1..80: mol_type = other DNA
tcttccattccatgtaaaacacagaatgcatgttttgcaggaagcagagcccctgggttgtcctgaatgtcttgtgttaa

SEQ ID NO: 125812 - DNA, 80 bp, synthetic construct
  misc_feature 1..80: note = Artificially Synthesized Probe
  source 1..80: mol_type = other DNA
ggctgggcccagctcctcccggctgctcccggctcctcccagctgctcccactcagtccctgcttcttcggtcctgtgtg

SEQ ID NO: 125813 - DNA, 80 bp, synthetic construct; identical to SEQ ID NO: 40459
  misc_feature 1..80: note = Artificially Synthesized Probe
  source 1..80: mol_type = other DNA

SEQ ID NO: 125814 - DNA, 80 bp, synthetic construct
  misc_feature 1..80: note = Artificially Synthesized Probe
  source 1..80: mol_type = other DNA
agtgtgcttatttatccatgagtttatccaatcatatttaataaacaacttctacagataagacgcttctcgggccatcc

SEQ ID NO: 125815 - DNA, 80 bp, synthetic construct
  misc_feature 1..80: note = Artificially Synthesized Probe
  source 1..80: mol_type = other DNA
atgtggttaatgcttttatcctgtgagtaagagagtcagctgaagttggtttaaaattagtgtgattagggtagcttctc

SEQ ID NO: 125816 - DNA, 80 bp, synthetic construct
  misc_feature 1..80: note = Artificially Synthesized Probe
  source 1..80: mol_type = other DNA
ggctccacgtcacatgctgctgaagggtgggctgcgtgtctgagaggaaggaggactcaggccaggttgaggtttccttt

SEQ ID NO: 125817 - DNA, 80 bp, synthetic construct; identical to SEQ ID NO: 40460
  misc_feature 1..80: note = Artificially Synthesized Probe
  source 1..80: mol_type = other DNA

SEQ ID NO: 125818 - DNA, 80 bp, synthetic construct
  misc_feature 1..80: note = Artificially Synthesized Probe
  source 1..80: mol_type = other DNA
caccttgaattcttcgcgaagtggctcgtgagcctctgaattgcctgagcagctttgcagagcatgacagagccaagact

SEQ ID NO: 125819 - DNA, 80 bp, synthetic construct
  misc_feature 1..80: note = Artificially Synthesized Probe
  source 1..80: mol_type = other DNA
agataggtctgagactctcctcagtgcagatatagggttgagcacatatgtctagacattgtttaatacctagtgagatt

SEQ ID NO: 125820 - DNA, 80 bp, synthetic construct
  misc_feature 1..80: note = Artificially Synthesized Probe
  source 1..80: mol_type = other DNA
aatttctttttttttttatttttttttttagatggagtcttgctctgtcgcccaggctggagtgcagtggtgagttcttg

SEQ ID NO: 125821 - DNA, 80 bp, synthetic construct
  misc_feature 1..80: note = Artificially Synthesized Probe
  source 1..80: mol_type = other DNA
ccttgacctcatgatcctccccctttggcctcccaaagtactgggattacgggcgtgagccaccgcgcctggccatgatt

SEQ ID NO: 125822 - DNA, 80 bp, synthetic construct; identical to SEQ ID NO: 40461
  misc_feature 1..80: note = Artificially Synthesized Probe
  source 1..80: mol_type = other DNA

SEQ ID NO: 125823 - DNA, 80 bp, synthetic construct
  misc_feature 1..80: note = Artificially Synthesized Probe
  source 1..80: mol_type = other DNA
tctgtgtggggtcttcagttacttctgggtcatcaaaactggttagttttgatatttttaaaatgtttgttgttgcactt

SEQ ID NO: 125824 - DNA, 80 bp, synthetic construct
  misc_feature 1..80: note = Artificially Synthesized Probe
  source 1..80: mol_type = other DNA
tatgttaaagagtttgcacagggacagacatgcaaatggcagagccggggagtgacccccaagacccttctctgggtcat

SEQ ID NO: 125825 - DNA, 80 bp, synthetic construct
  misc_feature 1..80: note = Artificially Synthesized Probe
  source 1..80: mol_type = other DNA
attaaacctgaaaaggaaaaagcagtgtcttttcagacgagctgagtgacagggtctgttctttgatgcatgggttattg

SEQ ID NO: 125826 - DNA, 80 bp, synthetic construct
  misc_feature 1..80: note = Artificially Synthesized Probe
  source 1..80: mol_type = other DNA
gggaaaacacaaatggagaaaggaaaaactcacttgtcagcgtggcccaagccctgccgtgggtccttttgtcagcgtgt

SEQ ID NO: 125827 - DNA, 80 bp, synthetic construct; identical to SEQ ID NO: 40462
  misc_feature 1..80: note = Artificially Synthesized Probe
  source 1..80: mol_type = other DNA

SEQ ID NO: 125828 - DNA, 80 bp, synthetic construct
  misc_feature 1..80: note = Artificially Synthesized Probe
  source 1..80: mol_type = other DNA
agaaaggctgagggagcaagttcttcatgagttgttggacagccttttgccactcccttaggggaatgcaggggttccat

SEQ ID NO: 125829 - DNA, 80 bp, synthetic construct
  misc_feature 1..80: note = Artificially Synthesized Probe
  source 1..80: mol_type = other DNA
ttgtttctgtccatggtttcaggcatctgctgcagggcttacaacttagataagggtggttgccatatgatgttctgcat

SEQ ID NO: 125830 - DNA, 80 bp, synthetic construct; identical to SEQ ID NO: 40463
  misc_feature 1..80: note = Artificially Synthesized Probe
  source 1..80: mol_type = other DNA

SEQ ID NO: 125831 - DNA, 80 bp, synthetic construct
  misc_feature 1..80: note = Artificially Synthesized Probe
  source 1..80: mol_type = other DNA
ccagctcacctcacatcctgggtcccacagccacatttgtctcctccctgctccgatgcatggcacaggatggcacccca

SEQ ID NO: 125832 - DNA, 80 bp, synthetic construct
  misc_feature 1..80: note = Artificially Synthesized Probe
  source 1..80: mol_type = other DNA
ataatggacacgtgctgtcactcgggtgcagggtatggagagctccttggtaatagtggacacctgctgtcactcgggtg

SEQ ID NO: 125833 - DNA, 80 bp, synthetic construct
  misc_feature 1..80: note = Artificially Synthesized Probe
  source 1..80: mol_type = other DNA
gtatggagagctccttggtaatagtggatgtgtgctgtcactcgggtgcagggtatggagagctccttgataataatgga

SEQ ID NO: 125834 - DNA, 80 bp, synthetic construct; identical to SEQ ID NO: 40313
  misc_feature 1..80: note = Artificially Synthesized Probe
  source 1..80: mol_type = other DNA

SEQ ID NO: 125835 - DNA, 80 bp, synthetic construct
  misc_feature 1..80: note = Artificially Synthesized Probe
  source 1..80: mol_type = other DNA
gctgtcactcgggtgcagggtatggagagctccttggtaagagtggacacgtgctgtcactcgggtgcagggtgtggaga

SEQ ID NO: 125836 - DNA, 80 bp, synthetic construct
  misc_feature 1..80: note = Artificially Synthesized Probe
  source 1..80: mol_type = other DNA
cttgataataatggacacgtgctgtcactcgggtgcagggtatggagagctccttggtaagagtggacacgtgctgtcac

SEQ ID NO: 125837 - DNA, 80 bp, synthetic construct
  misc_feature 1..80: note = Artificially Synthesized Probe
  source 1..80: mol_type = other DNA
gtgcagggtatggagagctccttggtaagagtggacacgtgctgtcactcgggtgcagggtatggagagctgcttggtaa

SEQ ID NO: 125838 - DNA, 80 bp, synthetic construct
  misc_feature 1..80: note = Artificially Synthesized Probe
  source 1..80: mol_type = other DNA
ggacacgtgctgtcactcgggtgcagggtatggagagctccttggtaatagtggacacgtgctgtcactcgggtgcaggg

SEQ ID NO: 125839 - DNA, 80 bp, synthetic construct
  misc_feature 1..80: note = Artificially Synthesized Probe
  source 1..80: mol_type = other DNA
gagagctccttggtaagagtggtcacgtgctgtcactcgggtgcagggtatggagagctgcttggtaatagtggacacgt

SEQ ID NO: 125840 - DNA, 80 bp, synthetic construct
  misc_feature 1..80: note = Artificially Synthesized Probe
  source 1..80: mol_type = other DNA
tcactcgggtgcagggtatggagagctccttggtaagagtggacacgtgctgtcactcgggtgcagggtatggagagctc

SEQ ID NO: 125841 - DNA, 80 bp, synthetic construct
  misc_feature 1..80: note = Artificially Synthesized Probe
  source 1..80: mol_type = other DNA
gtaagagtggacacgtgctgtcactcgggtgcagggtatggagagctccttggtaatagtggacacgtgctgtcactcgg

SEQ ID NO: 125842 - DNA, 80 bp, synthetic construct
  misc_feature 1..80: note = Artificially Synthesized Probe
  source 1..80: mol_type = other DNA
agggtatggagagctgcttggtaatagtggacacgtgctgtcactcgggtgcagggtatggagagctccttggtaagagt

SEQ ID NO: 125843 - DNA, 80 bp, synthetic construct
  misc_feature 1..80: note = Artificially Synthesized Probe
  source 1..80: mol_type = other DNA
acgtgctgtcactcgggtgcagggtatggagagctccttggtaagagtggacacgtgctgtcactcgggtgcagggtatg

SEQ ID NO: 125844 - DNA, 80 bp, synthetic construct; identical to SEQ ID NO: 40465
  misc_feature 1..80: note = Artificially Synthesized Probe
  source 1..80: mol_type = other DNA

SEQ ID NO: 125845 - DNA, 80 bp, synthetic construct
  misc_feature 1..80: note = Artificially Synthesized Probe
  source 1..80: mol_type = other DNA
aataatagtttggccgggcgcggtggctcacgcctataatcccagcactttgggaggctgaggtgggtggattatgaggt

SEQ ID NO: 125846 - DNA, 80 bp, synthetic construct; identical to SEQ ID NO: 40464
  misc_feature 1..80: note = Artificially Synthesized Probe
  source 1..80: mol_type = other DNA

SEQ ID NO: 125847 - DNA, 80 bp, synthetic construct
  misc_feature 1..80: note = Artificially Synthesized Probe
  source 1..80: mol_type = other DNA
gcttcatcatgacatgtcatactttcggaaagcaaaagcggcttgcgaagtcccctaagccccttttattccccctaaca

SEQ ID NO: 125848 - DNA, 80 bp, synthetic construct; identical to SEQ ID NO: 40467
  misc_feature 1..80: note = Artificially Synthesized Probe
  source 1..80: mol_type = other DNA

SEQ ID NO: 125849 - DNA, 80 bp, synthetic construct
  misc_feature 1..80: note = Artificially Synthesized Probe
  source 1..80: mol_type = other DNA
actccgctaacaagggcttataaagagtcctttacttgtacacttagatttttccctcgaaatccagttcttcctactat

SEQ ID NO: 125850 - DNA, 80 bp, synthetic construct
  misc_feature 1..80: note = Artificially Synthesized Probe
  source 1..80: mol_type = other DNA
ttcgggagacaaatgggacaattagaaaatactcagaaaattgcacagaaaggaaggggtgttttgtccccgaaagaaag

SEQ ID NO: 125851 - DNA, 80 bp, synthetic construct
  misc_feature 1..80: note = Artificially Synthesized Probe
  source 1..80: mol_type = other DNA
gacacagaacgacgatttctataaccaaatatatatactacatttggtggggaaggaaagggaacacaaaacccaggtcc

SEQ ID NO: 125852 - DNA, 80 bp, synthetic construct; identical to SEQ ID NO: 40468
  misc_feature 1..80: note = Artificially Synthesized Probe
  source 1..80: mol_type = other DNA

SEQ ID NO: 125853 - DNA, 80 bp, synthetic construct
  misc_feature 1..80: note = Artificially Synthesized Probe
  source 1..80: mol_type = other DNA
tcccatgtaaatattgatttagatgtctttatattaatgtaaggtcctgcccttcacatggcatagagaaacccgtgatg

SEQ ID NO: 125854 - DNA, 80 bp, synthetic construct
  misc_feature 1..80: note = Artificially Synthesized Probe
  source 1..80: mol_type = other DNA
ctttctaggctctaaaaaatggcttttgaaattcaaaatgtgatacaactactcaggccaatgtgcctgcactaatatat

SEQ ID NO: 125855 - DNA, 80 bp, synthetic construct
  misc_feature 1..80: note = Artificially Synthesized Probe
  source 1..80: mol_type = other DNA
taacttttaggtctaactttcctaactgtgctttctgtcacaagccaaaatctgctttttgtctcaagttagctttccgt

SEQ ID NO: 125856 - DNA, 80 bp, synthetic construct; identical to SEQ ID NO: 40469
  misc_feature 1..80: note = Artificially Synthesized Probe
  source 1..80: mol_type = other DNA

SEQ ID NO: 125857 - DNA, 80 bp, synthetic construct
  misc_feature 1..80: note = Artificially Synthesized Probe
  source 1..80: mol_type = other DNA
ccgagatcgcgccactgccctccagcctgggcgacagagcaagactctgtctcaaacaaacaaacaaacaaacaaaaaaa

SEQ ID NO: 125858 - DNA, 80 bp, synthetic construct
  misc_feature 1..80: note = Artificially Synthesized Probe
  source 1..80: mol_type = other DNA
ccctgctgttgagattaggaccgcaggtgtgcagcagagaatccagttgttttgctttagaaagtgcctgaagaacaaat

SEQ ID NO: 125859 - DNA, 80 bp, synthetic construct
  misc_feature 1..80: note = Artificially Synthesized Probe
  source 1..80: mol_type = other DNA
gtccttcaaattacttcaagaatttagatttccctgttatcaatgataaataatctcccaaggccacttagagagactcc

SEQ ID NO: 125860 - DNA, 80 bp, synthetic construct
  misc_feature 1..80: note = Artificially Synthesized Probe
  source 1..80: mol_type = other DNA
aggtttaacccttatactcctttgaggaggatcgtgtgtactaagtgaggtttaacccttagagtcctttgaggaggatc

SEQ ID NO: 125861 - DNA, 80 bp, synthetic construct; identical to SEQ ID NO: 40470
  misc_feature 1..80: note = Artificially Synthesized Probe
  source 1..80: mol_type = other DNA

SEQ ID NO: 125862 - DNA, 80 bp, synthetic construct
  misc_feature 1..80: note = Artificially Synthesized Probe
  source 1..80: mol_type = other DNA
cttatactcctttgagaagaatcgtgtgtactaactgaggtttaatcctcacagtacttggaggaggatcatgtatacta

SEQ ID NO: 125863 - DNA, 80 bp, synthetic construct
  misc_feature 1..80: note = Artificially Synthesized Probe
  source 1..80: mol_type = other DNA
agtgaggtttaacacttacagttcattgaggaggattttgtgtactaagtgaggtttaaacctcacagtcctttgtgaag

SEQ ID NO: 125864 - DNA, 80 bp, synthetic construct
  misc_feature 1..80: note = Artificially Synthesized Probe
  source 1..80: mol_type = other DNA
gggttaacccttacagtcctttgaggagaatcatgtgtactaagtgagggttaacccttacagtcctttgaggaggatcg

SEQ ID NO: 125865 - DNA, 80 bp, synthetic construct; identical to SEQ ID NO: 40471
  misc_feature 1..80: note = Artificially Synthesized Probe
  source 1..80: mol_type = other DNA

SEQ ID NO: 125866 - DNA, 80 bp, synthetic construct
  misc_feature 1..80: note = Artificially Synthesized Probe
  source 1..80: mol_type = other DNA
tacagtcctttgaggaggatcgtgggtactaagtgaggtttaacccttacagtcctttgagaaggatcgtgtgtactgag

SEQ ID NO: 125867 - DNA, 80 bp, synthetic construct
  misc_feature 1..80: note = Artificially Synthesized Probe
  source 1..80: mol_type = other DNA
ttgaaaaggatcgtgtgtactaaggtttaaccactatagtccttttatgagaaccatgtgtactaagtgaggtttaaccc

SEQ ID NO: 125868 - DNA, 80 bp, synthetic construct
  misc_feature 1..80: note = Artificially Synthesized Probe
  source 1..80: mol_type = other DNA
tgtgtactaagtgaggtttaacccttacagtcctttgaggaggatcatgtgtactaagtgaggtttaacccttacagtcc

SEQ ID NO: 125869 - DNA, 80 bp, synthetic construct
  misc_feature 1..80: note = Artificially Synthesized Probe
  source 1..80: mol_type = other DNA
caggcagaccagggacaggagtgcagactctgtgtgtgtttcttttatttctcttttagcaactggtactctttttcttt

SEQ ID NO: 125870 - DNA, 80 bp, synthetic construct
  misc_feature 1..80: note = Artificially Synthesized Probe
  source 1..80: mol_type = other DNA
tttgaggaggatcatgggtactgaggattaacccttatagtcctttgagaagaatggtgtgtactaagtgaaatttaaca

SEQ ID NO: 125871 - DNA, 80 bp, synthetic construct; identical to SEQ ID NO: 40472
  misc_feature 1..80: note = Artificially Synthesized Probe
  source 1..80: mol_type = other DNA

SEQ ID NO: 125872 - DNA, 80 bp, synthetic construct
  misc_feature 1..80: note = Artificially Synthesized Probe
  source 1..80: mol_type = other DNA
tgtgtaactaagtgaggtttaacccttacggtcctttgaggaggatcttgtgtactaagtgaggtttaacccttacagtc

SEQ ID NO: 125873 - DNA, 80 bp, synthetic construct
  misc_feature 1..80: note = Artificially Synthesized Probe
  source 1..80: mol_type = other DNA
tactaagtgaggtttaacccttacagtcctttaaggaggatcttttgaactaagtgaggtttaacccttacagtcctttg

SEQ ID NO: 125874 - DNA, 80 bp, synthetic construct
  misc_feature 1..80: note = Artificially Synthesized Probe
  source 1..80: mol_type = other DNA
agtgaggtttaacccttacagtcctttgagaaggatcgtgtgtactcatgtttaacccctatagtcctttgaggagaatt

SEQ ID NO: 125875 - DNA, 80 bp, synthetic construct
  misc_feature 1..80: note = Artificially Synthesized Probe
  source 1..80: mol_type = other DNA
taacccttacagtcctttgaggagggtcttgtgtactacgtgaggtttaacccttacagtcctttgagaaggatcgtgtg

SEQ ID NO: 125876 - DNA, 80 bp, synthetic construct; identical to SEQ ID NO: 40473
  misc_feature 1..80: note = Artificially Synthesized Probe
  source 1..80: mol_type = other DNA

SEQ ID NO: 125877 - DNA, 80 bp, synthetic construct
  misc_feature 1..80: note = Artificially Synthesized Probe
  source 1..80: mol_type = other DNA
gagaaggattgtgtgtactaaggtttaacccctatagtccttttaggagaattgtgtttactaagtgaggttttaccctt

SEQ ID NO: 125878 - DNA, 80 bp, synthetic construct
  misc_feature 1..80: note = Artificially Synthesized Probe
  source 1..80: mol_type = other DNA
actaagtgaggtttgtcccttactgtcctttgagaagaatcgtatgtactaagtgaggtttaacccttacagtcctttga

SEQ ID NO: 125879 - DNA, 80 bp, synthetic construct; identical to SEQ ID NO: 40474
  misc_feature 1..80: note = Artificially Synthesized Probe
  source 1..80: mol_type = other DNA

SEQ ID NO: 125880 - DNA, 80 bp, synthetic construct
  misc_feature 1..80: note = Artificially Synthesized Probe
  source 1..80: mol_type = other DNA
atcatgataaatttatgactgaaacaccttacgtttgtgcagttcacgtacacaatggggatgtaatcgtaggtggttgg

SEQ ID NO: 125881 - DNA, 80 bp, synthetic construct
  misc_feature 1..80: note = Artificially Synthesized Probe
  source 1..80: mol_type = other DNA
ttggttgatgaagttcccttctcttagtttaatgagatttttatcaggagtggatgttgaatatggtgaaatgtgtttct

SEQ ID NO: 125882 - DNA, 80 bp, synthetic construct
  misc_feature 1..80: note = Artificially Synthesized Probe
  source 1..80: mol_type = other DNA
gagtctgtaatgtttttctcttattcactagaacactttatcagcctgacaacattggaaaggaaacagaagctgccagg

SEQ ID NO: 125883 - DNA, 80 bp, synthetic construct
  misc_feature 1..80: note = Artificially Synthesized Probe
  source 1..80: mol_type = other DNA
cctggtgtgtgtgtggtctggtgtgtgggtgctccagtgtatgagtgccctggtgtgtgggtgctctggtatgtgggtgc

SEQ ID NO: 125884 - DNA, 80 bp, synthetic construct; identical to SEQ ID NO: 40475
  misc_feature 1..80: note = Artificially Synthesized Probe
  source 1..80: mol_type = other DNA

SEQ ID NO: 125885 - DNA, 80 bp, synthetic construct
  misc_feature 1..80: note = Artificially Synthesized Probe
  source 1..80: mol_type = other DNA
ctggcatgtgggtgctctggtgtacgagtgccctggtgtgtgggtgctctggtgtgtgagtgccctggtgtgtgggtgct

SEQ ID NO: 125886 - DNA, 80 bp, synthetic construct
  misc_feature 1..80: note = Artificially Synthesized Probe
  source 1..80: mol_type = other DNA
gatgattgagtctttttctaattccaaaggcactttaaggtttcagagagccttggattgtttaatagagaagacatggc

SEQ ID NO: 125887 - DNA, 80 bp, synthetic construct
  misc_feature 1..80: note = Artificially Synthesized Probe
  source 1..80: mol_type = other DNA
tttttctttctcgttgaaatgaagacttaacatcaaattcagcaaaacagatgaaatcaattaaaatataacatggcgtg

SEQ ID NO: 125888 - DNA, 80 bp, synthetic construct
  misc_feature 1..80: note = Artificially Synthesized Probe
  source 1..80: mol_type = other DNA
agctccctgaaactggacgagctccccagagttcaagctacagaggttcctgcctccccagggcatggagtcctcactgc

SEQ ID NO: 125889 - DNA, 80 bp, synthetic construct; identical to SEQ ID NO: 40476
  misc_feature 1..80: note = Artificially Synthesized Probe
  source 1..80: mol_type = other DNA

SEQ ID NO: 125890 - DNA, 80 bp, synthetic construct
  misc_feature 1..80: note = Artificially Synthesized Probe
  source 1..80: mol_type = other DNA
cttgagcaccggatgccacaagggcttcacgtcaccccagggccctggttccacagctgccctgtgcacctgtgccctgg

SEQ ID NO: 125891 - DNA, 80 bp, synthetic construct
  misc_feature 1..80: note = Artificially Synthesized Probe
  source 1..80: mol_type = other DNA
tgaattcctgcagcctatgccacttagacacccacagtcattcctgacattcattacaactgaagaacctgcacagagac

SEQ ID NO: 125892 - DNA, 80 bp, synthetic construct; identical to SEQ ID NO: 40314
  misc_feature 1..80: note = Artificially Synthesized Probe
  source 1..80: mol_type = other DNA

SEQ ID NO: 125893 - DNA, 80 bp, synthetic construct
  misc_feature 1..80: note = Artificially Synthesized Probe
  source 1..80: mol_type = other DNA
taaaaaaattcagtagaggacttcaatagcagacctagattaagcagcagaaaaaaaaaatctgtgaacttgaagagagg

SEQ ID NO: 125894 - DNA, 80 bp, synthetic construct; identical to SEQ ID NO: 40477
  misc_feature 1..80: note = Artificially Synthesized Probe
  source 1..80: mol_type = other DNA

SEQ ID NO: 125895 - DNA, 80 bp, synthetic construct
  misc_feature 1..80: note = Artificially Synthesized Probe
  source 1..80: mol_type = other DNA
gaaagccaggaaagaatagtatgatacctacagggaaaacaaacaaacacaaaaaccattagctaagaattctgtgctca

SEQ ID NO: 125896 - DNA, 80 bp, synthetic construct
  misc_feature 1..80: note = Artificially Synthesized Probe
  source 1..80: mol_type = other DNA
agcagctagaaaagtgtaatcactatcacaaatacacttgaaggtaccaaactcacgggtagaaggaagtacgtagtcaa

SEQ ID NO: 125897 - DNA, 80 bp, synthetic construct
  misc_feature 1..80: note = Artificially Synthesized Probe
  source 1..80: mol_type = other DNA
caaaagatgcaaatcgtgacatcaagaacataaactgtggaggagaagttaaaggctcgttttttttttttttgtataaa

SEQ ID NO: 125898 - DNA, 80 bp, synthetic construct; identical to SEQ ID NO: 40478
  misc_feature 1..80: note = Artificially Synthesized Probe
  source 1..80: mol_type = other DNA

SEQ ID NO: 125899 - DNA, 80 bp, synthetic construct
  misc_feature 1..80: note = Artificially Synthesized Probe
  source 1..80: mol_type = other DNA
acaacaagaaaatgagaaaatggcattgataattccttctctatcaataaacaccttgactattacaacaagaaaataag

SEQ ID NO: 125900 - DNA, 80 bp, synthetic construct
  misc_feature 1..80: note = Artificially Synthesized Probe
  source 1..80: mol_type = other DNA
cgccttgaatattacaaaacaacaagagaagaaaatggtattggttattacttatctatcaataattactttgaatatta

SEQ ID NO: 125901 - DNA, 80 bp, synthetic construct; identical to SEQ ID NO: 40479
  misc_feature 1..80: note = Artificially Synthesized Probe
  source 1..80: mol_type = other DNA

SEQ ID NO: 125902 - DNA, 80 bp, synthetic construct
  misc_feature 1..80: note = Artificially Synthesized Probe
  source 1..80: mol_type = other DNA
caggaggacataacaatcataaacatatatgcatccgacattggagtacttaaatacataaagcaaatattaatgaacat

SEQ ID NO: 125903 - DNA, 80 bp, synthetic construct
  misc_feature 1..80: note = Artificially Synthesized Probe
  source 1..80: mol_type = other DNA
ccccatctctactaaaaatacaaaaattagccaggcatagtggcaggcacctgtaatcgcagttactcaggagaggcagg

SEQ ID NO: 125904 - DNA, 80 bp, synthetic construct
  misc_feature 1..80: note = Artificially Synthesized Probe
  source 1..80: mol_type = other DNA
gcaatagcagcaaaatacacatttttctatagcacacatggaacacacacatggatagaccatatattaggccataaaac

SEQ ID NO: 125905 - DNA, 80 bp, synthetic construct
  misc_feature 1..80: note = Artificially Synthesized Probe
  source 1..80: mol_type = other DNA
aaagtgaaatttgaaaactatctatcttgagacaaacaacaacagaaatacaacctaccagaacttctgggatgccgcaa

SEQ ID NO: 125906 - DNA, 80 bp, synthetic construct
  misc_feature 1..80: note = Artificially Synthesized Probe
  source 1..80: mol_type = other DNA
acagacaatagtaaacaataaaaagaattagtaaaactaagaattgtttttaaaaaaaaataaaattggcaaactcttca

SEQ ID NO: 125907 - DNA, 80 bp, synthetic construct; identical to SEQ ID NO: 40480
  misc_feature 1..80: note = Artificially Synthesized Probe
  source 1..80: mol_type = other DNA

SEQ ID NO: 125908 - DNA, 80 bp, synthetic construct
  misc_feature 1..80: note = Artificially Synthesized Probe
  source 1..80: mol_type = other DNA
agaagtttcaaataaataaaaaaagtgaaggcattaccatggacacctcagaaatgaaaggatcataagggactattatg

SEQ ID NO: 125909 - DNA, 80 bp, synthetic construct
  misc_feature 1..80: note = Artificially Synthesized Probe
  source 1..80: mol_type = other DNA
agcatgggaccagatggcttcatggctgaattataccaaatattcaaagaagaaataatatgaatacttctcaaactctt

SEQ ID NO: 125910 - DNA, 80 bp, synthetic construct
  misc_feature 1..80: note = Artificially Synthesized Probe
  source 1..80: mol_type = other DNA
ccaagtccaacagcacattagaaagattacatgtcatgaccaagtaggattcatccatggcatgtgaggccagtttaaca

SEQ ID NO: 125911 - DNA, 80 bp, synthetic construct; identical to SEQ ID NO: 40481
  misc_feature 1..80: note = Artificially Synthesized Probe
  source 1..80: mol_type = other DNA

SEQ ID NO: 125912 - DNA, 80 bp, synthetic construct
  misc_feature 1..80: note = Artificially Synthesized Probe
  source 1..80: mol_type = other DNA
taaagtttcaggatatgaaattcatatgcaaaaattaatagcattgtcatacacaaataatagctgaaaaagaaatcaaa

SEQ ID NO: 125913 - DNA, 80 bp, synthetic construct; identical to SEQ ID NO: 40298
  misc_feature 1..80: note = Artificially Synthesized Probe
  source 1..80: mol_type = other DNA

SEQ ID NO: 125914 - DNA, 80 bp, synthetic construct
  misc_feature 1..80: note = Artificially Synthesized Probe
  source 1..80: mol_type = other DNA
ctcatgtctgggctcatcataattaatattgctaaaatatctatgagccaaagttatatatagattcagtgtaatcctta

SEQ ID NO: 125915 - DNA, 80 bp, synthetic construct
  misc_feature 1..80: note = Artificially Synthesized Probe
  source 1..80: mol_type = other DNA
cataaaattcatgcagaatgcatttgagcctggaattttatttcaagcgtttttttttaactataaattcagcttctatg

SEQ ID NO: 125916 - DNA, 80 bp, synthetic construct
  misc_feature 1..80: note = Artificially Synthesized Probe
  source 1..80: mol_type = other DNA
ctttctgatttagattatattactatagtaatcaaaacagtatggtgttggtataaaaaacagacacctacaccagtgga

SEQ ID NO: 125917 - DNA, 80 bp, synthetic construct; identical to SEQ ID NO: 40482
  misc_feature 1..80: note = Artificially Synthesized Probe
  source 1..80: mol_type = other DNA

SEQ ID NO: 125918 - DNA, 80 bp, synthetic construct
  misc_feature 1..80: note = Artificially Synthesized Probe
  source 1..80: mol_type = other DNA
acagcaaacaagaccagcagcctatggattgggaaagtatatttgcaaaacatgtatctgataagaggttaatattcaaa

SEQ ID NO: 125919 - DNA, 80 bp, synthetic construct
  misc_feature 1..80: note = Artificially Synthesized Probe
  source 1..80: mol_type = other DNA
gggattggagaatggggagatgacggtcagagggcacagactctcagttgtgcaggaagaattttttttaagttctattg

SEQ ID NO: 125920 - DNA, 80 bp, synthetic construct
  misc_feature 1..80: note = Artificially Synthesized Probe
  source 1..80: mol_type = other DNA
cattatttttaccctgtaagtttatatgattataaattgtcaattacaatttgaaaatatatagggtggaatattactca

SEQ ID NO: 125921 - DNA, 80 bp, synthetic construct
  misc_feature 1..80: note = Artificially Synthesized Probe
  source 1..80: mol_type = other DNA
ccggctaattttttttgtatttttagtagagacggggtttcattgtgttaaccaggatggtctcgatctcttgacctcat

SEQ ID NO: 125922 - DNA, 80 bp, synthetic construct; identical to SEQ ID NO: 40483
  misc_feature 1..80: note = Artificially Synthesized Probe
  source 1..80: mol_type = other DNA

SEQ ID NO: 125923 - DNA, 80 bp, synthetic construct
  misc_feature 1..80: note = Artificially Synthesized Probe
  source 1..80: mol_type = other DNA
ctgctcttgacacacacaaaacaaaacaaaacaaaaatatgggtaatcaggtgagatgatggatatgttaatttgcttca

SEQ ID NO: 125924 - DNA, 80 bp, synthetic construct
  misc_feature 1..80: note = Artificially Synthesized Probe
  source 1..80: mol_type = other DNA
taaaagtcttcattttaatacgctaaatattcagttactataaatagctactaaagtctggctgctcgagagatttcttg

SEQ ID NO: 125925 - DNA, 80 bp, synthetic construct; identical to SEQ ID NO: 40484
  misc_feature 1..80: note = Artificially Synthesized Probe
  source 1..80: mol_type = other DNA

SEQ ID NO: 125926 - DNA, 80 bp, synthetic construct
  misc_feature 1..80: note = Artificially Synthesized Probe
  source 1..80: mol_type = other DNA
ttaaagatttacagtaaatacatgtcagctgttttaattttgatgtgtgttttgcttaatttattctcaattgagaaact

SEQ ID NO: 125927 - DNA, 80 bp, synthetic construct
  misc_feature 1..80: note = Artificially Synthesized Probe
  source 1..80: mol_type = other DNA
ttgtaatactcttaatttaggtcttttctgtctgttttttaaaaataaatcagtctcccagttaattatcaatttttagt

SEQ ID NO: 125928 - DNA, 80 bp, synthetic construct
  misc_feature 1..80: note = Artificially Synthesized Probe
  source 1..80: mol_type = other DNA
atggggtacataatgatgcttcaatacatacaatttatagtgctcagatcaggataattatcatattcatcatctccaac

SEQ ID NO: 125929 - DNA, 80 bp, synthetic construct
  misc_feature 1..80: note = Artificially Synthesized Probe
  source 1..80: mol_type = other DNA
tccacatctctcttacctcctccccttcccaacatctagtaacctctattctactccttagttctatgagaccagcttcc

SEQ ID NO: 125930 - DNA, 80 bp, synthetic construct; identical to SEQ ID NO: 40485
  misc_feature 1..80: note = Artificially Synthesized Probe
  source 1..80: mol_type = other DNA

SEQ ID NO: 125931 - DNA, 80 bp, synthetic construct
  misc_feature 1..80: note = Artificially Synthesized Probe
  source 1..80: mol_type = other DNA
ttagtttttttgagaaagcccatatttttcatgttggctataccagtttacattaccaccagcagtgtgagtttcccttc

SEQ ID NO: 125932 - DNA, 80 bp, synthetic construct
  misc_feature 1..80: note = Artificially Synthesized Probe
  source 1..80: mol_type = other DNA
gaaatgtctattcagctgatatgcatacttttcagtaggattatttgttttttgctgtcgagagatttgagttccttgta

SEQ ID NO: 125933 - DNA, 80 bp, synthetic construct
  misc_feature 1..80: note = Artificially Synthesized Probe
  source 1..80: mol_type = other DNA
gttttatacaattttttctcagaccagtgtccagaaccattgcctctatttttatcatctagtcgttttatagttttggg

SEQ ID NO: 125934 - DNA, 80 bp, synthetic construct
  misc_feature 1..80: note = Artificially Synthesized Probe
  source 1..80: mol_type = other DNA
aaaaaaaatcagttgtctgtagatacatggattaatatctgggatacttatcttgtttgattgctgtatctattttttgc

SEQ ID NO: 125935 - DNA, 80 bp, synthetic construct; identical to SEQ ID NO: 40486
  misc_feature 1..80: note = Artificially Synthesized Probe
  source 1..80: mol_type = other DNA

SEQ ID NO: 125936 - DNA, 80 bp, synthetic construct
  misc_feature 1..80: note = Artificially Synthesized Probe
  source 1..80: mol_type = other DNA
ttggtttactgatttttttcagcaagttcattgttcgtacttagaacactattgatttctgtacgttgattttgtattct

SEQ ID NO: 125937 - DNA, 80 bp, synthetic construct
  misc_feature 1..80: note = Artificially Synthesized Probe
  source 1..80: mol_type = other DNA
aggacttccagtactatgttgagtaagagtggtgagagtgggcatccttgttttgttccagatttcagcttttccattaa

SEQ ID NO: 125938 - DNA, 80 bp, synthetic construct; identical to SEQ ID NO: 40315
  misc_feature 1..80: note = Artificially Synthesized Probe
  source 1..80: mol_type = other DNA

SEQ ID NO: 125939 - DNA, 80 bp, synthetic construct
  misc_feature 1..80: note = Artificially Synthesized Probe
  source 1..80: mol_type = other DNA
ttgccattctataaggaatgcaatttattcattttcgcatactgtgaataatggaatcaagattatatctcgagtctatt

SEQ ID NO: 125940 - DNA, 80 bp, synthetic construct; identical to SEQ ID NO: 40487
  misc_feature 1..80: note = Artificially Synthesized Probe
  source 1..80: mol_type = other DNA

SEQ ID NO: 125941 - DNA, 80 bp, synthetic construct
  misc_feature 1..80: note = Artificially Synthesized Probe
  source 1..80: mol_type = other DNA
tctcagaccgtcacagtttaatctgagtttcctgtgccaactttcaatattgtttatatactgccatgatatggtggagg

SEQ ID NO: 125942 - DNA, 80 bp, synthetic construct
  misc_feature 1..80: note = Artificially Synthesized Probe
  source 1..80: mol_type = other DNA
agagtgcacagggaatgctcagtttgtcttttcacagccacttaatgtgactttctgttattccagttgattttttaaaa

SEQ ID NO: 125943 - DNA, 80 bp, synthetic construct; identical to SEQ ID NO: 40488
  misc_feature 1..80: note = Artificially Synthesized Probe
  source 1..80: mol_type = other DNA

SEQ ID NO: 125944 - DNA, 80 bp, synthetic construct
  misc_feature 1..80: note = Artificially Synthesized Probe
  source 1..80: mol_type = other DNA
tctttgacgctgttttagaaagtcactggcctttaccagaagtctttatgataaatgacaagatgaagtttgtatctgca

SEQ ID NO: 125945 - DNA, 80 bp, synthetic construct
  misc_feature 1..80: note = Artificially Synthesized Probe
  source 1..80: mol_type = other DNA
atttcatcacggttgtctcatctgagacaaaccatagagccaaaccataaagtcaaataagaaggtcaagtttgtgaccg

SEQ ID NO: 125946 - DNA, 80 bp, synthetic construct
  misc_feature 1..80: note = Artificially Synthesized Probe
  source 1..80: mol_type = other DNA
gttgagtagggcttggaggatttctgatgagctgtgcaatagactctgccatcaataatacatcattgcaaagtttattg

SEQ ID NO: 125947 - DNA, 80 bp, synthetic construct
  misc_feature 1..80: note = Artificially Synthesized Probe
  source 1..80: mol_type = other DNA
gttgtaataaaaattcttgcaggccatacatgcacttaacatttgtagggagcaagtctacttcttattgtagagttcct

SEQ ID NO: 125948 - DNA, 80 bp, synthetic construct; identical to SEQ ID NO: 40489
  misc_feature 1..80: note = Artificially Synthesized Probe
  source 1..80: mol_type = other DNA

SEQ ID NO: 125949 - DNA, 80 bp, synthetic construct
  misc_feature 1..80: note = Artificially Synthesized Probe
  source 1..80: mol_type = other DNA
ttacataataaaatctttttttgcattacaatttttccagctagaaaaattcaaaaagaactgtaacactgctgaaatta

SEQ ID NO: 125950 - DNA, 80 bp, synthetic construct
  misc_feature 1..80: note = Artificially Synthesized Probe
  source 1..80: mol_type = other DNA
acatttttggagtaacctgagaaagtcttgtgcccaagtcacaaagcatgtatttcttgccaagaggcttgattcatttg

SEQ ID NO: 125951 - DNA, 80 bp, synthetic construct
  misc_feature 1..80: note = Artificially Synthesized Probe
  source 1..80: mol_type = other DNA
gcgttcacattggcactgtcaatttagagtttcattcgccgcagatagctaaatcctgcagcctatcatcaataccatag

SEQ ID NO: 125952 - DNA, 80 bp, synthetic construct
  misc_feature 1..80: note = Artificially Synthesized Probe
  source 1..80: mol_type = other DNA
gcagaaactctttagtttaattaggtcctatttgtcaatgtttggttttgttccaattgcttttggagtctttgttacga

SEQ ID NO: 125953 - DNA, 80 bp, synthetic construct; identical to SEQ ID NO: 40490
  misc_feature 1..80: note = Artificially Synthesized Probe
  source 1..80: mol_type = other DNA

SEQ ID NO: 125954 - DNA, 80 bp, synthetic construct
  misc_feature 1..80: note = Artificially Synthesized Probe
  source 1..80: mol_type = other DNA
atttaggtgctggagtgctattctttcttatcaggaggtaaaaaggcaatttaagttccagagtcatgctcaggggatgg

SEQ ID NO: 125955 - DNA, 80 bp, synthetic construct
  misc_feature 1..80: note = Artificially Synthesized Probe
  source 1..80: mol_type = other DNA
agtgagctcttttgaaaatgagcacaaacatgggacacactattcatttccctcagtgtaaagtttcagagaaaatgcag

SEQ ID NO: 125956 - DNA, 80 bp, synthetic construct
  misc_feature 1..80: note = Artificially Synthesized Probe
  source 1..80: mol_type = other DNA
caggctggagtgcagtggtgtgatctcagctcactgcaacctccacctcccgggttcacgtgattctcctgcctcagcct

SEQ ID NO: 125957 - DNA, 80 bp, synthetic construct; identical to SEQ ID NO: 40491
  misc_feature 1..80: note = Artificially Synthesized Probe
  source 1..80: mol_type = other DNA

SEQ ID NO: 125958 - DNA, 80 bp, synthetic construct
  misc_feature 1..80: note = Artificially Synthesized Probe
  source 1..80: mol_type = other DNA
agataatctccatatatatgtgtgtgtatatatatgtgtatatatatgtgtatatatgtgtgtgtatatatatacacaca

SEQ ID NO: 125959 - DNA, 80 bp, synthetic construct
  misc_feature 1..80: note = Artificially Synthesized Probe
  source 1..80: mol_type = other DNA
atgacttcagatcaccccagctgctcttgtttcgacaccacgcagactacttgtaaagaaaaaattctctcttgatgtag

SEQ ID NO: 125960 - DNA, 80 bp, synthetic construct
  misc_feature 1..80: note = Artificially Synthesized Probe
  source 1..80: mol_type = other DNA
tggctgcaggtccgccgctgttaggcgggttagccatcctccactgtgtaagctgagtgtaagctgtggaagaagctgag

SEQ ID NO: 125961 - DNA, 80 bp, synthetic construct; identical to SEQ ID NO: 40492
  misc_feature 1..80: note = Artificially Synthesized Probe
  source 1..80: mol_type = other DNA

SEQ ID NO: 125962 - DNA, 80 bp, synthetic construct
  misc_feature 1..80: note = Artificially Synthesized Probe
  source 1..80: mol_type = other DNA
ttacacatggggttgtgatgtggtttaaatacgtccataaggactatgaaggttgtctgacctgtaagaaatgctcagta

SEQ ID NO: 125963 - DNA, 80 bp, synthetic construct
  misc_feature 1..80: note = Artificially Synthesized Probe
  source 1..80: mol_type = other DNA
atcaccagctccatttattgaattggagggtccttcccacactgatggtttatgttgcctttgtcaaagattagatgatt

SEQ ID NO: 125964 - DNA, 80 bp, synthetic construct
  misc_feature 1..80: note = Artificially Synthesized Probe
  source 1..80: mol_type = other DNA
acaattatgttcacgataacacagttgtgttccaaaccttgattatattacctttacatgacctcagataaccctataat

SEQ ID NO: 125965 - DNA, 80 bp, synthetic construct; identical to SEQ ID NO: 40493
  misc_feature 1..80: note = Artificially Synthesized Probe
  source 1..80: mol_type = other DNA

SEQ ID NO: 125966 - DNA, 80 bp, synthetic construct
  misc_feature 1..80: note = Artificially Synthesized Probe
  source 1..80: mol_type = other DNA
ttacctttcatttaataactgggaatgactcttcttcctcctccctttcactgaaccaaaattgcttaagaagattggtt

SEQ ID NO: 125967 - DNA, 80 bp, synthetic construct
  misc_feature 1..80: note = Artificially Synthesized Probe
  source 1..80: mol_type = other DNA
gctggctcaggagtgaagctgcagacctttgtggtgagtgttacagctcttaaggcggtgcgtctggagttgttggttcc

SEQ ID NO: 125968 - DNA, 80 bp, synthetic construct
  misc_feature 1..80: note = Artificially Synthesized Probe
  source 1..80: mol_type = other DNA
ccagcgggttgccactggtggcgccgggatcctgcttttattctcttatctggccccacccacatcctgctgattggtcc

SEQ ID NO: 125969 - DNA, 80 bp, synthetic construct
  misc_feature 1..80: note = Artificially Synthesized Probe
  source 1..80: mol_type = other DNA
gagtgtcgattggtgcattcacaaaccctgagctagacacaggatgctgattggtgtgtttacaaaccttgagctagata

SEQ ID NO: 125970 - DNA, 80 bp, synthetic construct; identical to SEQ ID NO: 40494
  misc_feature 1..80: note = Artificially Synthesized Probe
  source 1..80: mol_type = other DNA

SEQ ID NO: 125971 - DNA, 80 bp, synthetic construct
  misc_feature 1..80: note = Artificially Synthesized Probe
  source 1..80: mol_type = other DNA
cccctcattgagacagacgctgggctgcaattcatcgtcatctcattaaaccccaggccctgcaaaaaagtctgggtcca

SEQ ID NO: 125972 - DNA, 80 bp, synthetic construct
  misc_feature 1..80: note = Artificially Synthesized Probe
  source 1..80: mol_type = other DNA
tggcagctccattctgaaaactctagataccattcttttctgggaatttggttatgcattttggtgcctggctctggaca

SEQ ID NO: 125973 - DNA, 80 bp, synthetic construct; identical to SEQ ID NO: 40495
  misc_feature 1..80: note = Artificially Synthesized Probe
  source 1..80: mol_type = other DNA

SEQ ID NO: 125974 - DNA, 80 bp, synthetic construct
  misc_feature 1..80: note = Artificially Synthesized Probe
  source 1..80: mol_type = other DNA
tgggaggctgaggcaaaagaatcgcttgaacccaggaggcagaggttgcagtgagccagggtcgcgccactgcacttcag

SEQ ID NO: 125975 - DNA, 80 bp, synthetic construct
  misc_feature 1..80: note = Artificially Synthesized Probe
  source 1..80: mol_type = other DNA
tttggctattcaagctctttttttgtgccatatgaattttataatagttttttttctaattctgtgaagaatgtccttgg

SEQ ID NO: 125976 - DNA, 80 bp, synthetic construct
  misc_feature 1..80: note = Artificially Synthesized Probe
  source 1..80: mol_type = other DNA
tctataggtccattcagaccatggggtaaaatactttgataagaacaaccttatccctatactgttagacaagctgaagc

SEQ ID NO: 125977 - DNA, 80 bp, synthetic construct
  misc_feature 1..80: note = Artificially Synthesized Probe
  source 1..80: mol_type = other DNA
taccacatgtgtaatttcacatggaatccacatattctgtgtgtactttcttctgttagcctttgattcccttaaaattt

SEQ ID NO: 125978 - DNA, 80 bp, synthetic construct
  misc_feature 1..80: note = Artificially Synthesized Probe
  source 1..80: mol_type = other DNA
tattccagataatcaatacatgttttcaggatgcagcctaccctcgtgtggctagagaggggaacaacagcatgcgaaga

SEQ ID NO: 125979 - DNA, 80 bp, synthetic construct; identical to SEQ ID NO: 40496
  misc_feature 1..80: note = Artificially Synthesized Probe
  source 1..80: mol_type = other DNA

SEQ ID NO: 125980 - DNA, 80 bp, synthetic construct
  misc_feature 1..80: note = Artificially Synthesized Probe
  source 1..80: mol_type = other DNA
tatgtgaaggcaaaaattggggaaaaaagccttagcttttgtgcagagttgttcagttgtattgaatggggctctgtctg

SEQ ID NO: 125981 - DNA, 80 bp, synthetic construct
  misc_feature 1..80: note = Artificially Synthesized Probe
  source 1..80: mol_type = other DNA
gccgtctctgtacgtttgcttatgagaatgaggggaaatgctaagtggctgagggaattccttgtttattgcacacttaa

SEQ ID NO: 125982 - DNA, 80 bp, synthetic construct; identical to SEQ ID NO: 40497
  misc_feature 1..80: note = Artificially Synthesized Probe
  source 1..80: mol_type = other DNA

SEQ ID NO: 125983 - DNA, 80 bp, synthetic construct
  misc_feature 1..80: note = Artificially Synthesized Probe
  source 1..80: mol_type = other DNA
cacacacatccatgtgtacacacaggcatgcacatatcaacagatccacacactcagactcgcaaatacccatgcatgcc

SEQ ID NO: 125984 - DNA, 80 bp, synthetic construct
  misc_feature 1..80: note = Artificially Synthesized Probe
  source 1..80: mol_type = other DNA
ctgcaagccctgtgcttaaatgactgtcataacaaagcatgtcactgagatttctcttaaaactgttgccacttttgcca

SEQ ID NO: 125985 - DNA, 80 bp, synthetic construct
  misc_feature 1..80: note = Artificially Synthesized Probe
  source 1..80: mol_type = other DNA
tattctcaacattcttactttgtcatctgttcaggttaatggcatacatgtagaaaatgcaactcatgaagaagtggtaa

SEQ ID NO: 125986 - DNA, 80 bp, synthetic construct; identical to SEQ ID NO: 40498
  misc_feature 1..80: note = Artificially Synthesized Probe
  source 1..80: mol_type = other DNA

SEQ ID NO: 125987 - DNA, 80 bp, synthetic construct; identical to SEQ ID NO: 40316
  misc_feature 1..80: note = Artificially Synthesized Probe
  source 1..80: mol_type = other DNA

SEQ ID NO: 125988 - DNA, 80 bp, synthetic construct
  misc_feature 1..80: note = Artificially Synthesized Probe
  source 1..80: mol_type = other DNA
tttgctccctgttggctggcagcagcacacgtgcatagaatgtgtgccgtggaggacaccaggtgagacctctgaggatc

SEQ ID NO: 125989 - DNA, 80 bp, synthetic construct
  misc_feature 1..80: note = Artificially Synthesized Probe
  source 1..80: mol_type = other DNA
atagggctgatgccaggaagcatgtggtggggacgcgtggtcagtctggtgcctgtggggtgggggcggaggtggagaca

SEQ ID NO: 125990 - DNA, 80 bp, synthetic construct
  misc_feature 1..80: note = Artificially Synthesized Probe
  source 1..80: mol_type = other DNA
ctcacgggagtttaattctgtgagttgcagcaaaaggcaagcaggctggtaatttaacttgtcccacgaagattaatagg

SEQ ID NO: 125991 - DNA, 80 bp, synthetic construct; identical to SEQ ID NO: 40499
  misc_feature 1..80: note = Artificially Synthesized Probe
  source 1..80: mol_type = other DNA

SEQ ID NO: 125992 - DNA, 80 bp, synthetic construct
  misc_feature 1..80: note = Artificially Synthesized Probe
  source 1..80: mol_type = other DNA
attgatagagaggcaagacacaccttcatgacttctatcctagcccagagagagtaaaattcttgtgagcaacagttttt

SEQ ID NO: 125993 - DNA, 80 bp, synthetic construct
  misc_feature 1..80: note = Artificially Synthesized Probe
  source 1..80: mol_type = other DNA
gacgcccaccaccatgcctggttaatttttgtagttttttttagtagagatggggttttgccattttggccaggctggtc

SEQ ID NO: 125994 - DNA, 80 bp, synthetic construct
  misc_feature 1..80: note = Artificially Synthesized Probe
  source 1..80: mol_type = other DNA
ccagaggttcaagtccagcctgggcaacatagcaggacctgtctctacaaaaaataaaaacaaaatctagtcaggcatgg

SEQ ID NO: 125995 - DNA, 80 bp, synthetic construct
  misc_feature 1..80: note = Artificially Synthesized Probe
  source 1..80: mol_type = other DNA
ctagtaaattatatgtaaatcttataaatggagctattacaatattggactgatacaaatatactttttgaaccagactg

SEQ ID NO: 125996 - DNA, 80 bp, synthetic construct; identical to SEQ ID NO: 40500
  misc_feature 1..80: note = Artificially Synthesized Probe
  source 1..80: mol_type = other DNA

SEQ ID NO: 125997 - DNA, 80 bp, synthetic construct
  misc_feature 1..80: note = Artificially Synthesized Probe
  source 1..80: mol_type = other DNA
tttttagtacatctatgcattttcatccacactggcatataatactgtagccagctacagccgagtaaactgtccgtatg

SEQ ID NO: 125998 - DNA, 80 bp, synthetic construct
  misc_feature 1..80: note = Artificially Synthesized Probe
  source 1..80: mol_type = other DNA
ataattcaactttcactcttcctatttgtatgccttttaattctgtctcttgcctaattgctctggctaggaatttccaa

SEQ ID NO: 125999 - DNA, 80 bp, synthetic construct
  misc_feature 1..80: note = Artificially Synthesized Probe
  source 1..80: mol_type = other DNA
atgggaccactgatcccgagtgaggcgctctgggaggtggtgggctgctctccagcgcccccacaggcagggcgcagaac

SEQ ID NO: 126000 - DNA, 80 bp, synthetic construct
  misc_feature 1..80: note = Artificially Synthesized Probe
  source 1..80: mol_type = other DNA
tcacttctagtctaagttacagtctaagttcttaagtgctatgaaaaccattgataaaaattgacctaattggaaaaaaa

SEQ ID NO: 126001 - DNA, 80 bp, synthetic construct; identical to SEQ ID NO: 40501
  misc_feature 1..80: note = Artificially Synthesized Probe
  source 1..80: mol_type = other DNA

SEQ ID NO: 126002 - DNA, 80 bp, synthetic construct
  misc_feature 1..80: note = Artificially Synthesized Probe
  source 1..80: mol_type = other DNA
atactgaaacaggacgttacatcctgtgtaagcaaggcctttttcctcaagaatgagtacgttctggcttcggtgccgga

SEQ ID NO: 126003 - DNA, 80 bp, synthetic construct
  misc_feature 1..80: note = Artificially Synthesized Probe
  source 1..80: mol_type = other DNA
caatagctggaactggagttccatctgttgatatttacaatagagcactcccttgctaataatttatttgctttttgcct

SEQ ID NO: 126004 - DNA, 80 bp, synthetic construct
  misc_feature 1..80: note = Artificially Synthesized Probe
  source 1..80: mol_type = other DNA
acaccaacgtggaggttccaccagtaggacacatatctgttcagctctgtactcaggggagttaaagagccccaaggcgt

SEQ ID NO: 126005 - DNA, 80 bp, synthetic construct; identical to SEQ ID NO: 40502
  misc_feature 1..80: note = Artificially Synthesized Probe
  source 1..80: mol_type = other DNA

SEQ ID NO: 126006 - DNA, 80 bp, synthetic construct
  misc_feature 1..80: note = Artificially Synthesized Probe
  source 1..80: mol_type = other DNA
ttccccatctatttcaaacctaagagctccatgatcaattagccatggctagatagatctgcaggtcaaaccatcagccc

SEQ ID NO: 126007 - DNA, 80 bp, synthetic construct
  misc_feature 1..80: note = Artificially Synthesized Probe
  source 1..80: mol_type = other DNA
agcagagttcctgggatggtggagccttcctcacttagggttttttcaatttttttggcaaagaaatgaatgtagattca

SEQ ID NO: 126008 - DNA, 80 bp, synthetic construct
  misc_feature 1..80: note = Artificially Synthesized Probe
  source 1..80: mol_type = other DNA
ttttttcaatttttttggcaaagaaatgaatgtagattcagcaagggagcaggtatgggagtatgcaccctacttccata

SEQ ID NO: 126009 - DNA, 80 bp, synthetic construct; identical to SEQ ID NO: 40503
  misc_feature 1..80: note = Artificially Synthesized Probe
  source 1..80: mol_type = other DNA

SEQ ID NO: 126010 - DNA, 80 bp, synthetic construct
  misc_feature 1..80: note = Artificially Synthesized Probe
  source 1..80: mol_type = other DNA
gagggcttttaatatgaagggatgttgaattttatcaaaagccttttctgcatctattgagatgatcatgtggttttggt

SEQ ID NO: 126011 - DNA, 80 bp, synthetic construct
  misc_feature 1..80: note = Artificially Synthesized Probe
  source 1..80: mol_type = other DNA
tatggggagtggccagatgcatattgaggaaagtcagcattgtcctgctaaattgttgcctcagaaaacataattctagg

SEQ ID NO: 126012 - DNA, 80 bp, synthetic construct
  misc_feature 1..80: note = Artificially Synthesized Probe
  source 1..80: mol_type = other DNA
gaattactcagccacctgcaaaatcagatatgggcttgagttttcagaagtcttaactctgtagttataagaaataagga

SEQ ID NO: 126013 - DNA, 80 bp, synthetic construct
  misc_feature 1..80: note = Artificially Synthesized Probe
  source 1..80: mol_type = other DNA
ttgtcaggaaaatgggagcagctccaggaattctagctgtaacagtttgaagatggggataaacgggttcttaccaagtt

SEQ ID NO: 126014 - DNA, 80 bp, synthetic construct
  misc_feature 1..80: note = Artificially Synthesized Probe
  source 1..80: mol_type = other DNA
accccatctctattaaaatacaaaaaaacattagctgggaatggtggcggatgcctgtaatcccagctacttgggaggct

SEQ ID NO: 126015 - DNA, 80 bp, synthetic construct; identical to SEQ ID NO: 40504
  misc_feature 1..80: note = Artificially Synthesized Probe
  source 1..80: mol_type = other DNA

SEQ ID NO: 126016 - DNA, 80 bp, synthetic construct
  misc_feature 1..80: note = Artificially Synthesized Probe
  source 1..80: mol_type = other DNA
taatgagtttctttcagcaaactctcaccccgagacatatgggaaaggatctggagaaacatagaacctggtttctcttt

SEQ ID NO: 126017 - DNA, 80 bp, synthetic construct
  misc_feature 1..80: note = Artificially Synthesized Probe
  source 1..80: mol_type = other DNA
tctacagactacttcacccgacaacagcagaataacattcttctgaagatcacatgaagaattcaccaagacagaccaca

SEQ ID NO: 126018 - DNA, 80 bp, synthetic construct
  misc_feature 1..80: note = Artificially Synthesized Probe
  source 1..80: mol_type = other DNA
catggtggaaggcgaaaggcacatcttacatggtggcagacaaaagagaatgagaaacaagcaaaaggggtttcccctta

SEQ ID NO: 126019 - DNA, 80 bp, synthetic construct; identical to SEQ ID NO: 40505
  misc_feature 1..80: note = Artificially Synthesized Probe
  source 1..80: mol_type = other DNA

SEQ ID NO: 126020 - DNA, 80 bp, synthetic construct
  misc_feature 1..80: note = Artificially Synthesized Probe
  source 1..80: mol_type = other DNA
attgaaagcatatattagaagaaatgtcaaaataatttttttttcaacagcaggagtttatttccccaaagctctaagct

SEQ ID NO: 126021 - DNA, 80 bp, synthetic construct
  misc_feature 1..80: note = Artificially Synthesized Probe
  source 1..80: mol_type = other DNA
ttgtagggtacatgtgcacaatgtgcaggttagttacatatgtatacatgtgccatgctggtgcgctgcacccactaact

SEQ ID NO: 126022 - DNA, 80 bp, synthetic construct
  misc_feature 1..80: note = Artificially Synthesized Probe
  source 1..80: mol_type = other DNA
aatagccaggctacatatgcaaagagagaacacaagttaataatattagaaatcaaagagaggatattactatagatcct

SEQ ID NO: 126023 - DNA, 80 bp, synthetic construct; identical to SEQ ID NO: 40506
  misc_feature 1..80: note = Artificially Synthesized Probe
  source 1..80: mol_type = other DNA

SEQ ID NO: 126024 - DNA, 80 bp, synthetic construct
  misc_feature 1..80: note = Artificially Synthesized Probe
  source 1..80: mol_type = other DNA
gtctcatgaacatagatgcaaaaaatcctcaacaaaatattagcaaatggaattcagcaacgtctaaaaagaattacaca

SEQ ID NO: 126025 - DNA, 80 bp, synthetic construct
  misc_feature 1..80: note = Artificially Synthesized Probe
  source 1..80: mol_type = other DNA
aaactctcagtaagctaacagtagagaaggacctccttaactcgataaagattaactgcaaaaaatcccacagctaacat

SEQ ID NO: 126026 - DNA, 80 bp, synthetic construct
  misc_feature 1..80: note = Artificially Synthesized Probe
  source 1..80: mol_type = other DNA
gaaatgaaaaactggactttgaaatttaaaaagcacaataccatttacattagcactaaaagaaataaattacttaggtg

SEQ ID NO: 126027 - DNA, 80 bp, synthetic construct
  misc_feature 1..80: note = Artificially Synthesized Probe
  source 1..80: mol_type = other DNA
aatatgatatcaaccaaaattctagcaaaaagttttgtggatattgacaaattgagtctaaagtttatatggagatggaa

SEQ ID NO: 126028 - DNA, 80 bp, synthetic construct; identical to SEQ ID NO: 40507
  misc_feature 1..80: note = Artificially Synthesized Probe
  source 1..80: mol_type = other DNA

SEQ ID NO: 126029 - DNA, 80 bp, synthetic construct
  misc_feature 1..80: note = Artificially Synthesized Probe
  source 1..80: mol_type = other DNA
taaaacgaatctgttaagtattggtgttggcaggtttgtcttgaaaacatgaatgttcttagtatacaatgtcatcctta

SEQ ID NO: 126030 - DNA, 80 bp, synthetic construct
  misc_feature 1..80: note = Artificially Synthesized Probe
  source 1..80: mol_type = other DNA
aaaatgtcttcactttatttcctttctcctttatcatgtgacataagatttattgacttcatatcagcatttaagtattg

SEQ ID NO: 126031 - DNA, 80 bp, synthetic construct
  misc_feature 1..80: note = Artificially Synthesized Probe
  source 1..80: mol_type = other DNA
tgggcttgtgatggttaatactgagtgtcaacttgattggattgaaggatgcaaattattgatcctcagtgtgtctgtga

SEQ ID NO: 126032 - DNA, 80 bp, synthetic construct
  misc_feature 1..80: note = Artificially Synthesized Probe
  source 1..80: mol_type = other DNA
catctttctcccatgctggatgcttcctgcccttgaacatcagacttcaagttcttcagctttggaactcagactggctt

SEQ ID NO: 126033 - DNA, 80 bp, synthetic construct
  misc_feature 1..80: note = Artificially Synthesized Probe
  source 1..80: mol_type = other DNA
ttgcgatagtttactgagaatgatgatttccaatttcatccatgtccctacaaaggacatgaactcatcattttttatgg

SEQ ID NO: 126034 - DNA, 80 bp, synthetic construct; identical to SEQ ID NO: 40508
  misc_feature 1..80: note = Artificially Synthesized Probe
  source 1..80: mol_type = other DNA

SEQ ID NO: 126035 - DNA, 80 bp, synthetic construct
  misc_feature 1..80: note = Artificially Synthesized Probe
  source 1..80: mol_type = other DNA
aatgtgattttaaaagaagagagccaattacttgaagaattcatctgtttttgcattataaggaccgaagtagtaacctt

SEQ ID NO: 126036 - DNA, 80 bp, synthetic construct
  misc_feature 1..80: note = Artificially Synthesized Probe
  source 1..80: mol_type = other DNA
agaaacattgtgaggctctgtcattccaaatgaaagtgttggaaaactgtgaaatacggaatggccttagtgatttcctg

SEQ ID NO: 126037 - DNA, 80 bp, synthetic construct
  misc_feature 1..80: note = Artificially Synthesized Probe
  source 1..80: mol_type = other DNA
agaagtgggaacccagagctggggaggctgcggggctgctgtgctgctgctgtgtgtgttttgtgttaggcccagcacca

SEQ ID NO: 126038 - DNA, 80 bp, synthetic construct; identical to SEQ ID NO: 40509
  misc_feature 1..80: note = Artificially Synthesized Probe
  source 1..80: mol_type = other DNA

SEQ ID NO: 126039 - DNA, 80 bp, synthetic construct
  misc_feature 1..80: note = Artificially Synthesized Probe
  source 1..80: mol_type = other DNA
gcctggcaggtacaccctctgcagatgaaagggacaggagtctcgaggtttcacagctgcttgatgcttctgtgcatcgc

SEQ ID NO: 126040 - DNA, 80 bp, synthetic construct
  misc_feature 1..80: note = Artificially Synthesized Probe
  source 1..80: mol_type = other DNA
gcaaagtaaattctggattccatggttcatacaccaggggtcgctgggcaagttggcagttagattgaaattaaaacata

SEQ ID NO: 126041 - DNA, 80 bp, synthetic construct
  misc_feature 1..80: note = Artificially Synthesized Probe
  source 1..80: mol_type = other DNA
tttcattgtacaaaggaagagatactgaaagtggccaaggattgtgaataggattagaaaaaaggacagttgtgaataca

SEQ ID NO: 126042 - DNA, 80 bp, synthetic construct; identical to SEQ ID NO: 40510
  misc_feature 1..80: note = Artificially Synthesized Probe
  source 1..80: mol_type = other DNA

SEQ ID NO: 126043 - DNA, 80 bp, synthetic construct
  misc_feature 1..80: note = Artificially Synthesized Probe
  source 1..80: mol_type = other DNA
agtagctgggactacaggctcccgccaccgcgcctggctaatttttttgtatttttagtagagacggggtttcaccatgt

SEQ ID NO: 126044 - DNA, 80 bp, synthetic construct
  misc_feature 1..80: note = Artificially Synthesized Probe
  source 1..80: mol_type = other DNA
ttctttaaatatttcacaatcacagatctctgagcgaatggtgacttaatttaacagcaagcatttgaaggtttagggaa

SEQ ID NO: 126045 - DNA, 80 bp, synthetic construct; identical to SEQ ID NO: 40317
  misc_feature 1..80: note = Artificially Synthesized Probe
  source 1..80: mol_type = other DNA

SEQ ID NO: 126046 - DNA, 80 bp, synthetic construct; identical to SEQ ID NO: 40511
  misc_feature 1..80: note = Artificially Synthesized Probe
  source 1..80: mol_type = other DNA

SEQ ID NO: 126047 - DNA, 80 bp, synthetic construct
  misc_feature 1..80: note = Artificially Synthesized Probe
  source 1..80: mol_type = other DNA
aggaggacagagcaggatggggtcaggccaagatgaatggggaggagatgtttttctgttgtgagagagcaaaacatgct

SEQ ID NO: 126048 - DNA, 80 bp, synthetic construct
  misc_feature 1..80: note = Artificially Synthesized Probe
  source 1..80: mol_type = other DNA
tagagggtcagtatctatgcctgagagacttcagccttttctagttgtggaacagaagttgtcaagggaagaccagacct

SEQ ID NO: 126049 - DNA, 80 bp, synthetic construct
  misc_feature 1..80: note = Artificially Synthesized Probe
  source 1..80: mol_type = other DNA
gtggtttgggctcagtgactgacactctctgggtgatgcatttgatttgtcaaatttgggagtggttttgtcaaaacctc

SEQ ID NO: 126050 - DNA, 80 bp, synthetic construct
  misc_feature 1..80: note = Artificially Synthesized Probe
  source 1..80: mol_type = other DNA
gaagaaacaagccttaactgcacagttactgttccttcaattgttctcatattgtggaaatgagctctgtcttcagccca

SEQ ID NO: 126051 - DNA, 80 bp, synthetic construct; identical to SEQ ID NO: 40512
  misc_feature 1..80: note = Artificially Synthesized Probe
  source 1..80: mol_type = other DNA

SEQ ID NO: 126052 - DNA, 80 bp, synthetic construct
  misc_feature 1..80: note = Artificially Synthesized Probe
  source 1..80: mol_type = other DNA
ttcctgttcatatttagatttttatgacttatattattctttaggctgctccgaaagcctttgcgtcctggatttgctgc

SEQ ID NO: 126053 - DNA, 80 bp, synthetic construct
  misc_feature 1..80: note = Artificially Synthesized Probe
  source 1..80: mol_type = other DNA
cgtgtgtaagtggcataaattgggttttcaagagcactaagcatcagaactaagaattgaaaacagatttgctcaattct

SEQ ID NO: 126054 - DNA, 80 bp, synthetic construct
  misc_feature 1..80: note = Artificially Synthesized Probe
  source 1..80: mol_type = other DNA
ttatttatctggattataaagagatcatcaatgtgctgactcctaattagatggttacaggccaggcaatcagtcaatca

SEQ ID NO: 126055 - DNA, 80 bp, synthetic construct; identical to SEQ ID NO: 40513
  misc_feature 1..80: note = Artificially Synthesized Probe
  source 1..80: mol_type = other DNA

SEQ ID NO: 126056 - DNA, 80 bp, synthetic construct
  misc_feature 1..80: note = Artificially Synthesized Probe
  source 1..80: mol_type = other DNA
gatgtggagaaataggaacacttttacactgttggtgggattgtttgaggacttttgcatctatgttcatcaaggagatt

SEQ ID NO: 126057 - DNA, 80 bp, synthetic construct
  misc_feature 1..80: note = Artificially Synthesized Probe
  source 1..80: mol_type = other DNA
tcatgtgtgcacacacgtatgtttctaggtgtgcacatgtgcatgtgtgtgtgtgcacatgtgcatgtgtgtatgtgtgc

SEQ ID NO: 126058 - DNA, 80 bp, synthetic construct
  misc_feature 1..80: note = Artificially Synthesized Probe
  source 1..80: mol_type = other DNA
gggtaatttcatttacttaaagttaactgatcatagatgttgaccacatctataaaatgccttcacaaggccaggcatgg

SEQ ID NO: 126059 - DNA, 80 bp, synthetic construct
  misc_feature 1..80: note = Artificially Synthesized Probe
  source 1..80: mol_type = other DNA
ctcaggaggctgaggtgggagaattgcttgaacccaggaggcggaggttgcagtgagtcgagatcgcaccattgcactcc

SEQ ID NO: 126060 - DNA, 80 bp, synthetic construct; identical to SEQ ID NO: 40514
  misc_feature 1..80: note = Artificially Synthesized Probe
  source 1..80: mol_type = other DNA

SEQ ID NO: 126061 - DNA, 80 bp, synthetic construct
  misc_feature 1..80: note = Artificially Synthesized Probe
  source 1..80: mol_type = other DNA
taggaatgtcagtaaaatgtctaaaaagtgcgtacacagtcatctcatgcccagggatggtgattccacaaagggaaagc

SEQ ID NO: 126062 - DNA, 80 bp, synthetic construct
  misc_feature 1..80: note = Artificially Synthesized Probe
  source 1..80: mol_type = other DNA
tttaaggaaaaaaacactattgatgctgaaaatgttagctgtttctcaatgcgggtgatggaagactgaatacattttcc

SEQ ID NO: 126063 - DNA, 80 bp, synthetic construct; identical to SEQ ID NO: 40515
  misc_feature 1..80: note = Artificially Synthesized Probe
  source 1..80: mol_type = other DNA

SEQ ID NO: 126064 - DNA, 80 bp, synthetic construct
  misc_feature 1..80: note = Artificially Synthesized Probe
  source 1..80: mol_type = other DNA
ggaggctgacattagggaccaccagaggcactggctgcagctgccatcacatgcagctgaggcgctggcacgggcgtgga

SEQ ID NO: 126065 - DNA, 80 bp, synthetic construct
  misc_feature 1..80: note = Artificially Synthesized Probe
  source 1..80: mol_type = other DNA
ttctacatatatgttgaaaaacgctgatgagaagttgggtgaaggagcaagtgtgacagacacaatgtaggccggataaa

SEQ ID NO: 126066 - DNA, 80 bp, synthetic construct
  misc_feature 1..80: note = Artificially Synthesized Probe
  source 1..80: mol_type = other DNA
taccgtagcagtaagtgtaaatgagattaattccccctatttaaggaaaatggactctcctactggctgagaaactcaga

SEQ ID NO: 126067 - DNA, 80 bp, synthetic construct
  misc_feature 1..80: note = Artificially Synthesized Probe
  source 1..80: mol_type = other DNA
tttgtctggtcctggggattttctggttgataggcttttattgtttgtttgtttttttatcactgatttaattttggaac

SEQ ID NO: 126068 - DNA, 80 bp, synthetic construct
  misc_feature 1..80: note = Artificially Synthesized Probe
  source 1..80: mol_type = other DNA
acaccacacacataaactcacaccacacacaaagacatataccacatacaccacacatatacacacacacaaacaacaca

SEQ ID NO: 126069 - DNA, 80 bp, synthetic construct; identical to SEQ ID NO: 40516
  misc_feature 1..80: note = Artificially Synthesized Probe
  source 1..80: mol_type = other DNA

SEQ ID NO: 126070 - DNA, 80 bp, synthetic construct
  misc_feature 1..80: note = Artificially Synthesized Probe
  source 1..80: mol_type = other DNA
tcacacacacgtgtacacacaccacatatgtacacacacaccagacacaagcatattccgtctaccagagaaatactaca

SEQ ID NO: 126071 - DNA, 80 bp, synthetic construct
  misc_feature 1..80: note = Artificially Synthesized Probe
  source 1..80: mol_type = other DNA
gcaagtgcctctcccattgcttgggggacctgctgctgggcaaagcggggctctgagaaggcttcccaatcacccccaag

SEQ ID NO: 126072 - DNA, 80 bp, synthetic construct
  misc_feature 1..80: note = Artificially Synthesized Probe
  source 1..80: mol_type = other DNA
ggaatgcaagcgctgctccccatggaccccagcgttcagagctcaggaagcagagcagggccagcagacagaggggacac

SEQ ID NO: 126073 - DNA, 80 bp, synthetic construct; identical to SEQ ID NO: 40517
  misc_feature 1..80: note = Artificially Synthesized Probe
  source 1..80: mol_type = other DNA

SEQ ID NO: 126074 - DNA, 80 bp, synthetic construct
  misc_feature 1..80: note = Artificially Synthesized Probe
  source 1..80: mol_type = other DNA
ttcacttttatttgcacagtgaactgagagctgtgatcagcagctgaacaggtggaggcttcagtgaagagaaggaagga

SEQ ID NO: 126075 - DNA, 80 bp, synthetic construct
  misc_feature 1..80: note = Artificially Synthesized Probe
  source 1..80: mol_type = other DNA
ggaagagacctggagttaagtcccttgtttctgaaccagtgaccatgacaggtgagggcagaaggacgagggaccagggg

SEQ ID NO: 126076 - DNA, 80 bp, synthetic construct
  misc_feature 1..80: note = Artificially Synthesized Probe
  source 1..80: mol_type = other DNA
gcggtgaaagaggacccaagatgctcagaataaagattccagcgcagggcggcaactcttggtgaaacagaggtttccac

SEQ ID NO: 126077 - DNA, 80 bp, synthetic construct; identical to SEQ ID NO: 40518
  misc_feature 1..80: note = Artificially Synthesized Probe
  source 1..80: mol_type = other DNA

SEQ ID NO: 126078 - DNA, 80 bp, synthetic construct
  misc_feature 1..80: note = Artificially Synthesized Probe
  source 1..80: mol_type = other DNA
caggaatcatcgagtcctgccctggctctacccctgacccctgcagaacccagaggtgcagctgaagtgcaccccggcac

SEQ ID NO: 126079 - DNA, 80 bp, synthetic construct
  misc_feature 1..80: note = Artificially Synthesized Probe
  source 1..80: mol_type = other DNA
ggtaatgtcttttttgtcatttctgattgtttttatttagatcttttctctttttttaaattagtctggctagcagtata

SEQ ID NO: 126080 - DNA, 80 bp, synthetic construct
  misc_feature 1..80: note = Artificially Synthesized Probe
  source 1..80: mol_type = other DNA
tagaaaaagtccagggctgtgcacgtccctcacatccataagtaggttccttatgtataacagagactgggtttcaatgt

SEQ ID NO: 126081 - DNA, 80 bp, synthetic construct; identical to SEQ ID NO: 40519
  misc_feature 1..80: note = Artificially Synthesized Probe
  source 1..80: mol_type = other DNA

SEQ ID NO: 126082 - DNA, 80 bp, synthetic construct
  misc_feature 1..80: note = Artificially Synthesized Probe
  source 1..80: mol_type = other DNA
atcacttaataagggagaaggagtttgccttaggcagttttctttaaaagtctcattgctctaggcacaaaagttagcat

SEQ ID NO: 126083 - DNA, 80 bp, synthetic construct
  misc_feature 1..80: note = Artificially Synthesized Probe
  source 1..80: mol_type = other DNA
cccagttgcataaactgttttttgtcttaaatgatgtgctgctgactatggcagtatgtaaggatacttgaatcatttct

SEQ ID NO: 126084 - DNA, 80 bp, synthetic construct
  misc_feature 1..80: note = Artificially Synthesized Probe
  source 1..80: mol_type = other DNA
gagtacactatgagaagtggttcaaggaaagaggatgaattagtgggatgtgactgtccacagggactccccatttctgg

SEQ ID NO: 126085 - DNA, 80 bp, synthetic construct; identical to SEQ ID NO: 40520
  misc_feature 1..80: note = Artificially Synthesized Probe
  source 1..80: mol_type = other DNA

SEQ ID NO: 126086 - DNA, 80 bp, synthetic construct
  misc_feature 1..80: note = Artificially Synthesized Probe
  source 1..80: mol_type = other DNA
agggaagggttacagtgatggatcttggaatttagcctgaataaaggggaatgtaaggctgcggcatggtgagaacaaga

SEQ ID NO: 126087 - DNA, 80 bp, synthetic construct
  misc_feature 1..80: note = Artificially Synthesized Probe
  source 1..80: mol_type = other DNA
acagaacccttgcagatgttgacaacagcaaggtctaatgcaaggtcttggaatgtgttactaaagtggggcgtatggca

SEQ ID NO: 126088 - DNA, 80 bp, synthetic construct
  misc_feature 1..80: note = Artificially Synthesized Probe
  source 1..80: mol_type = other DNA
gtgtgcatatgtggggggggtgtgtgagtgcatgagtgcgtatgtggaattacgtctgaatgtatgagtgcatgagtgtt

SEQ ID NO: 126089 - DNA, 80 bp, synthetic construct; identical to SEQ ID NO: 40521
  misc_feature 1..80: note = Artificially Synthesized Probe
  source 1..80: mol_type = other DNA

SEQ ID NO: 126090 - DNA, 80 bp, synthetic construct
  misc_feature 1..80: note = Artificially Synthesized Probe
  source 1..80: mol_type = other DNA
caagtagggcttaagggaagactggtaatttgtagatatgtttattagaaaacaagaaagcaaaggaaaaagagccatgt

SEQ ID NO: 126091 - DNA, 80 bp, synthetic construct; identical to SEQ ID NO: 40318
  misc_feature 1..80: note = Artificially Synthesized Probe
  source 1..80: mol_type = other DNA

SEQ ID NO: 126092 - DNA, 80 bp, synthetic construct
  misc_feature 1..80: note = Artificially Synthesized Probe
  source 1..80: mol_type = other DNA
aaataatactaaaactccgtctcccaaggtgggcttgtaataacgcaagatgcagaggcctctgaaaagactgatgaaga

SEQ ID NO: 126093 - DNA, 80 bp, synthetic construct
  misc_feature 1..80: note = Artificially Synthesized Probe
  source 1..80: mol_type = other DNA
tgggataagctgtcagatgtgttagataaagaaagtatcatgtctaacagagttcagggcctgtttcaagtgaaaatggg

SEQ ID NO: 126094 - DNA, 80 bp, synthetic construct; identical to SEQ ID NO: 40522
  misc_feature 1..80: note = Artificially Synthesized Probe
  source 1..80: mol_type = other DNA

SEQ ID NO: 126095 - DNA, 80 bp, synthetic construct
  misc_feature 1..80: note = Artificially Synthesized Probe
  source 1..80: mol_type = other DNA
tgtgtagaatcatgtgttgtgctcttctctgctcccctggaagcctccgtcaacaggtcgagtttgcgactccacggaga

SEQ ID NO: 126096 - DNA, 80 bp, synthetic construct
  misc_feature 1..80: note = Artificially Synthesized Probe
  source 1..80: mol_type = other DNA
ggtgatgaagatggcatcctggtgatgggatcagtgcctgcaagaagaagccctctggagcgcacttcctctctccacca

SEQ ID NO: 126097 - DNA, 80 bp, synthetic construct
  misc_feature 1..80: note = Artificially Synthesized Probe
  source 1..80: mol_type = other DNA
tccaatggcttcagagtcattttacaggtgttgggagatttcatttcatagttgactcctttctaaggaagaaatggact

SEQ ID NO: 126098 - DNA, 80 bp, synthetic construct
  misc_feature 1..80: note = Artificially Synthesized Probe
  source 1..80: mol_type = other DNA
ctacggggccaaggcgggaggatcacttgagtccagaaggccaagtctgcagtgagctatgattgcaccactgccttcca

SEQ ID NO: 126099 - DNA, 80 bp, synthetic construct; identical to SEQ ID NO: 40523
  misc_feature 1..80: note = Artificially Synthesized Probe
  source 1..80: mol_type = other DNA

SEQ ID NO: 126100 - DNA, 80 bp, synthetic construct
  misc_feature 1..80: note = Artificially Synthesized Probe
  source 1..80: mol_type = other DNA
gactgataacaaattgaatgcctttgtcttgttcgggtattttaaagtccccaaaaaatcaaggcaaggtaaacatttgg

SEQ ID NO: 126101 - DNA, 80 bp, synthetic construct
  misc_feature 1..80: note = Artificially Synthesized Probe
  source 1..80: mol_type = other DNA
gaaaccccgtctctactaaaaatacaaaaaattagccaggcgagatggcgggcgcctgtagtcccagctacttgggaggc

SEQ ID NO: 126102 - DNA, 80 bp, synthetic construct
  misc_feature 1..80: note = Artificially Synthesized Probe
  source 1..80: mol_type = other DNA
ttgttattgatttctatttttattgtggtcaaagaatgtggttgatattcttttttaatttgctgagaattgttttatgg

SEQ ID NO: 126103 - DNA, 80 bp, synthetic construct; identical to SEQ ID NO: 40524
  misc_feature 1..80: note = Artificially Synthesized Probe
  source 1..80: mol_type = other DNA

SEQ ID NO: 126104 - DNA, 80 bp, synthetic construct
  misc_feature 1..80: note = Artificially Synthesized Probe
  source 1..80: mol_type = other DNA
tgtgtggcctggtcctttgggaggagggcagcctgtttaaggatggggcacggtgagcttcatgaatctcaaactgctct

SEQ ID NO: 126105 - DNA, 80 bp, synthetic construct
  misc_feature 1..80: note = Artificially Synthesized Probe
  source 1..80: mol_type = other DNA
acgagggcttgcagggccttgtgagagtccagcccttccatgtagaaaggaagggtgtcgtcgccgtcatgaacctcgtt

SEQ ID NO: 126106 - DNA, 80 bp, synthetic construct
  misc_feature 1..80: note = Artificially Synthesized Probe
  source 1..80: mol_type = other DNA
gttaagctttgacactttctgggagttggtcagaggagggcttctatttcacagtcactttgtactgcagcagcctgtat

SEQ ID NO: 126107 - DNA, 80 bp, synthetic construct; identical to SEQ ID NO: 40525
  misc_feature 1..80: note = Artificially Synthesized Probe
  source 1..80: mol_type = other DNA

SEQ ID NO: 126108 - DNA, 80 bp, synthetic construct
  misc_feature 1..80: note = Artificially Synthesized Probe
  source 1..80: mol_type = other DNA
gtgtgtgaggcctcccaataggaagtgggcatgggaagcctcccaacaggaagtgggtgtgtgaagtcttcccaacagga

SEQ ID NO: 126109 - DNA, 80 bp, synthetic construct
  misc_feature 1..80: note = Artificially Synthesized Probe
  source 1..80: mol_type = other DNA
tgtgaggcctcccaacaggaagtggcatgtgaggccttccaacaggaagtgggcgtgtgaagcctcccaacagcacctgc

SEQ ID NO: 126110 - DNA, 80 bp, synthetic construct
  misc_feature 1..80: note = Artificially Synthesized Probe
  source 1..80: mol_type = other DNA
ccagtctggagtttttagtgggatttcatgaggtaaaagggatgaggctgtcctatgaggtcaagatctatgtgaagcac

SEQ ID NO: 126111 - DNA, 80 bp, synthetic construct; identical to SEQ ID NO: 40526
  misc_feature 1..80: note = Artificially Synthesized Probe
  source 1..80: mol_type = other DNA

SEQ ID NO: 126112 - DNA, 80 bp, synthetic construct
  misc_feature 1..80: note = Artificially Synthesized Probe
  source 1..80: mol_type = other DNA
aggaacctgccgaaattgtgggcagtctctgtgtagaggagagtgcgaggtgggatatgcctggcctaggaggatgaagt

SEQ ID NO: 126113 - DNA, 80 bp, synthetic construct
  misc_feature 1..80: note = Artificially Synthesized Probe
  source 1..80: mol_type = other DNA
agtatgaagtgaggtaggaacctgcccaaactgtgggcagtctctgtgtagacgagagggcggggtgggatatgcctggc

SEQ ID NO: 126114 - DNA, 80 bp, synthetic construct
  misc_feature 1..80: note = Artificially Synthesized Probe
  source 1..80: mol_type = other DNA
tctttctaatactaccagtgtggtgttaaagtctcccactcttactgtacttagtctcctcataagtttctaagtacgtg

SEQ ID NO: 126115 - DNA, 80 bp, synthetic construct
  misc_feature 1..80: note = Artificially Synthesized Probe
  source 1..80: mol_type = other DNA
tacacctgccctaggaggatgaagtaaggcaggaacctgctcaaattttggacagtctccatgtagaggggagggtgaga

SEQ ID NO: 126116 - DNA, 80 bp, synthetic construct
  misc_feature 1..80: note = Artificially Synthesized Probe
  source 1..80: mol_type = other DNA
tgcagtgaattctgacacacacagctttgcagcatctagacttttagtgtctcaatcagatttaaacaatggcaaataca

SEQ ID NO: 126117 - DNA, 80 bp, synthetic construct; identical to SEQ ID NO: 40527
  misc_feature 1..80: note = Artificially Synthesized Probe
  source 1..80: mol_type = other DNA

SEQ ID NO: 126118 - DNA, 80 bp, synthetic construct
  misc_feature 1..80: note = Artificially Synthesized Probe
  source 1..80: mol_type = other DNA
ggtgataaccactcttctttactccagctgaagcccacaaagttttccgtgtttcagaggtaactatgaactttgaattc

SEQ ID NO: 126119 - DNA, 80 bp, synthetic construct
  misc_feature 1..80: note = Artificially Synthesized Probe
  source 1..80: mol_type = other DNA
gcatttctgaagctcccgttaggtaagtgggaagaggagaaatgccagggtgctggagaaattcctttcttgccacatta

SEQ ID NO: 126120 - DNA, 80 bp, synthetic construct; identical to SEQ ID NO: 40528
  misc_feature 1..80: note = Artificially Synthesized Probe
  source 1..80: mol_type = other DNA

SEQ ID NO: 126121 - DNA, 80 bp, synthetic construct
  misc_feature 1..80: note = Artificially Synthesized Probe
  source 1..80: mol_type = other DNA
tggtacatttatgctatgaagtccctgacatattttggcacaaagcttgtaatcctctattatacttgaattgtgaccca

SEQ ID NO: 126122 - DNA, 80 bp, synthetic construct
  misc_feature 1..80: note = Artificially Synthesized Probe
  source 1..80: mol_type = other DNA
atcgggaaaggcctcgaaggcaaggcccaggctcccctgaagtcaacatctgctggtggctcaaaccccagggcatccga

SEQ ID NO: 126123 - DNA, 80 bp, synthetic construct
  misc_feature 1..80: note = Artificially Synthesized Probe
  source 1..80: mol_type = other DNA
attgtcaatgccttccttctctcctgccccgagtggcccggctgtagctctcaggcacatcagtagttgagttctgatca

SEQ ID NO: 126124 - DNA, 80 bp, synthetic construct
  misc_feature 1..80: note = Artificially Synthesized Probe
  source 1..80: mol_type = other DNA
ccctggcctaccacgcccccatcctatgcctataacaaccccaagaccctagtgggcagagacacaagtggccggatgtg

SEQ ID NO: 126125 - DNA, 80 bp, synthetic construct
  misc_feature 1..80: note = Artificially Synthesized Probe
  source 1..80: mol_type = other DNA
gcttttttttacacatctaacaagcaaacagaaaaaacagcaggagttacagatgatgtgttataatatacatcttccac

SEQ ID NO: 126126 - DNA, 80 bp, synthetic construct; identical to SEQ ID NO: 40529
  misc_feature 1..80: note = Artificially Synthesized Probe
  source 1..80: mol_type = other DNA

SEQ ID NO: 126127 - DNA, 80 bp, synthetic construct; identical to SEQ ID NO: 40530
  misc_feature 1..80: note = Artificially Synthesized Probe
  source 1..80: mol_type = other DNA

SEQ ID NO: 126128 - DNA, 80 bp, synthetic construct
  misc_feature 1..80: note = Artificially Synthesized Probe
  source 1..80: mol_type = other DNA
cctacaagccgcccacagacggcagaactgaagcctagaagccgcccacagacggcagaactgaaacctacaggccgccc

SEQ ID NO: 126129 - DNA, 80 bp, synthetic construct
  misc_feature 1..80: note = Artificially Synthesized Probe
  source 1..80: mol_type = other DNA
cgcccacagacggcagaactgaagcctagaagccgcccacagacggcagaactgaagcctagaagccgcccacagacggc

SEQ ID NO: 126130 - DNA, 80 bp, synthetic construct
  misc_feature 1..80: note = Artificially Synthesized Probe
  source 1..80: mol_type = other DNA
acggcagaactgaagcctacaagccgcccacagacggcagaactgaagcctacaggccgcccacagacggcagaactgaa

SEQ ID NO: 126131 - DNA, 80 bp, synthetic construct
  misc_feature 1..80: note = Artificially Synthesized Probe
  source 1..80: mol_type = other DNA
ctgaagcctagaagctgcccacagacggcagaactgaagcctacaggccgcccacagacggcagaactgaagcctacagg

SEQ ID NO: 126132 - DNA, 80 bp, synthetic construct
  misc_feature 1..80: note = Artificially Synthesized Probe
  source 1..80: mol_type = other DNA
ggtcagagccccaaagccggcccatctctatggcacccccgccagaggtttgagtagtggggcaccgaagaagcgagcca

SEQ ID NO: 126133 - DNA, 80 bp, synthetic construct; identical to SEQ ID NO: 40531
  misc_feature 1..80: note = Artificially Synthesized Probe
  source 1..80: mol_type = other DNA

SEQ ID NO: 126134 - DNA, 80 bp, synthetic construct
  misc_feature 1..80: note = Artificially Synthesized Probe
  source 1..80: mol_type = other DNA
tagcaatggggcaaaggtttaagggagcgaaatgtcacacgcggcacagtggtgcacccctggggttttgagaaacgttg

SEQ ID NO: 126135 - DNA, 80 bp, synthetic construct
  misc_feature 1..80: note = Artificially Synthesized Probe
  source 1..80: mol_type = other DNA
gcagcagctgtgaccatacaggctcacgaaggaagaaactaagacttttcatagatttttgccagaaagaaaagaagaga

SEQ ID NO: 126136 - DNA, 80 bp, synthetic construct; identical to SEQ ID NO: 40319
  misc_feature 1..80: note = Artificially Synthesized Probe
  source 1..80: mol_type = other DNA

SEQ ID NO: 126137 - DNA, 80 bp, synthetic construct
  misc_feature 1..80: note = Artificially Synthesized Probe
  source 1..80: mol_type = other DNA
gagtgagatgggtgctgcgtctaagccagcttccctgggtgcctttgaaggagcagaatttaagcaacagcagcagcaac

SEQ ID NO: 126138 - DNA, 80 bp, synthetic construct
  misc_feature 1..80: note = Artificially Synthesized Probe
  source 1..80: mol_type = other DNA
agattcacatcctgacttctgtccgtgggctccactaaaacctgcaggctccggggtccattgccagtcacatagtgact

SEQ ID NO: 126139 - DNA, 80 bp, synthetic construct; identical to SEQ ID NO: 40532
  misc_feature 1..80: note = Artificially Synthesized Probe
  source 1..80: mol_type = other DNA

SEQ ID NO: 126140 - DNA, 80 bp, synthetic construct
  misc_feature 1..80: note = Artificially Synthesized Probe
  source 1..80: mol_type = other DNA
gaaatccaccgagcagctccagtgagtggggaaagagagtatcacggcagatctgtgcggaaaatgtccagtttccacat

SEQ ID NO: 126141 - DNA, 80 bp, synthetic construct
  misc_feature 1..80: note = Artificially Synthesized Probe
  source 1..80: mol_type = other DNA
ttcactacgttgtagaggcattgctactgtctaattccaaaacatttccctcatcccaaaaataaaccctgtgccagtta

SEQ ID NO: 126142 - DNA, 80 bp, synthetic construct
  misc_feature 1..80: note = Artificially Synthesized Probe
  source 1..80: mol_type = other DNA
atctccgtctgcgccggacgttttctgtaatggaatcccgcacaaagatgcctttgtgtctggcatcttcccccagtgta

SEQ ID NO: 126143 - DNA, 80 bp, synthetic construct; identical to SEQ ID NO: 40533
  misc_feature 1..80: note = Artificially Synthesized Probe
  source 1..80: mol_type = other DNA

SEQ ID NO: 126144 - DNA, 80 bp, synthetic construct
  misc_feature 1..80: note = Artificially Synthesized Probe
  source 1..80: mol_type = other DNA
tcaaaactatacacattctttatcatgactgcttgtttgaatcatggaatttggccacgtttgaaggtctcctgttcggt

SEQ ID NO: 126145 - DNA, 80 bp, synthetic construct
  misc_feature 1..80: note = Artificially Synthesized Probe
  source 1..80: mol_type = other DNA
ttttttttaagattaggtgttttaataaacattgatcatatactacatgttttctaatatgattgtttatttttgacacc

SEQ ID NO: 126146 - DNA, 80 bp, synthetic construct
  misc_feature 1..80: note = Artificially Synthesized Probe
  source 1..80: mol_type = other DNA
tagaaatttagagtggaagcgtgactgtcaaatgtaaatttattgactatttacctgttagctcattcagtcaatggtgg

SEQ ID NO: 126147 - DNA, 80 bp, synthetic construct; identical to SEQ ID NO: 40534
  misc_feature 1..80: note = Artificially Synthesized Probe
  source 1..80: mol_type = other DNA

SEQ ID NO: 126148 - DNA, 80 bp, synthetic construct
  misc_feature 1..80: note = Artificially Synthesized Probe
  source 1..80: mol_type = other DNA
tgagaacagactaatacaagtatctactactatgtgacagtataccattttagtgtcttgtaacatttacatatatttct

SEQ ID NO: 126149 - DNA, 80 bp, synthetic construct
  misc_feature 1..80: note = Artificially Synthesized Probe
  source 1..80: mol_type = other DNA
attcttatttcccccagagttctccaagtttctcaatatcttaattttcacaaaggaatatggtatgaagtgttttctaa

SEQ ID NO: 126150 - DNA, 80 bp, synthetic construct
  misc_feature 1..80: note = Artificially Synthesized Probe
  source 1..80: mol_type = other DNA
tggtggtcacattatgactttgcatatgtggtgccgattgttcttcactttaatcccaggaaatagacggcacaacaggg

SEQ ID NO: 126151 - DNA, 80 bp, synthetic construct
  misc_feature 1..80: note = Artificially Synthesized Probe
  source 1..80: mol_type = other DNA
tagtgctgttctcagtgcttctttcctctttccaggcactcaggtgatctaacaacagggcctgctctccactcagggat

SEQ ID NO: 126152 - DNA, 80 bp, synthetic construct
  misc_feature 1..80: note = Artificially Synthesized Probe
  source 1..80: mol_type = other DNA
agtccagcctgaagatattggtgggaagggacaataaaggaacaaatacagcctttctccctgagctgttcccaggacct

SEQ ID NO: 126153 - DNA, 80 bp, synthetic construct; identical to SEQ ID NO: 40535
  misc_feature 1..80: note = Artificially Synthesized Probe
  source 1..80: mol_type = other DNA

SEQ ID NO: 126154 - DNA, 80 bp, synthetic construct
  misc_feature 1..80: note = Artificially Synthesized Probe
  source 1..80: mol_type = other DNA
gaggtcagatcttggtgaggagaccatatcacagcaggaaagtgagaggccattggggatgacccagcccataactggac

SEQ ID NO: 126155 - DNA, 80 bp, synthetic construct
  misc_feature 1..80: note = Artificially Synthesized Probe
  source 1..80: mol_type = other DNA
ctcccctctttgacagcggtttgcatctgaacggaaactccagtaccacagtaagcatatagatttttgttaaattttat

SEQ ID NO: 126156 - DNA, 80 bp, synthetic construct; identical to SEQ ID NO: 40536
  misc_feature 1..80: note = Artificially Synthesized Probe
  source 1..80: mol_type = other DNA

SEQ ID NO: 126157 - DNA, 80 bp, synthetic construct
  misc_feature 1..80: note = Artificially Synthesized Probe
  source 1..80: mol_type = other DNA
aaaccagacttgagcaaaaaggagaacctgcagctccctgggacatggggctcccgccctcctccctcagaagcctgggc

SEQ ID NO: 126158 - DNA, 80 bp, synthetic construct
  misc_feature 1..80: note = Artificially Synthesized Probe
  source 1..80: mol_type = other DNA
tctttttgatatactgtcctttatccctttatttaatccgtatttctgtctgacatcacagttcttcctggagaacatcc

SEQ ID NO: 126159 - DNA, 80 bp, synthetic construct
  misc_feature 1..80: note = Artificially Synthesized Probe
  source 1..80: mol_type = other DNA
ccccttggggaattcatcatccacagaggcattagtgcacgagaaatgtagaatcctgtaagcagtttgaaaaaatgttt

SEQ ID NO: 126160 - DNA, 80 bp, synthetic construct
  misc_feature 1..80: note = Artificially Synthesized Probe
  source 1..80: mol_type = other DNA
tagactctgtgtcagttatgaagcaaaataataaaacaaatgcccatgaaattgcagttctaagcaataattagaatatt

SEQ ID NO: 126161 - DNA, 80 bp, synthetic construct
  misc_feature 1..80: note = Artificially Synthesized Probe
  source 1..80: mol_type = other DNA
cttataaaatattattcttccatagtcttctgagatttgcatgtttacttactgtttgtttctgtgaggttttttgctgt

SEQ ID NO: 126162 - DNA, 80 bp, synthetic construct; identical to SEQ ID NO: 40537
  misc_feature 1..80: note = Artificially Synthesized Probe
  source 1..80: mol_type = other DNA

SEQ ID NO: 126163 - DNA, 80 bp, synthetic construct
  misc_feature 1..80: note = Artificially Synthesized Probe
  source 1..80: mol_type = other DNA
ttggtttttcctcttctgtgaaatgctgtttatctctttggcacatttactgttaaggtgatcttttttcttacaaatcc

SEQ ID NO: 126164 - DNA, 80 bp, synthetic construct
  misc_feature 1..80: note = Artificially Synthesized Probe
  source 1..80: mol_type = other DNA
tcataaagacacttccttatattttcctctaaatattgttaacgtttgcttttcacattagatctctaaatcccatgaga

SEQ ID NO: 126165 - DNA, 80 bp, synthetic construct; identical to SEQ ID NO: 40538
  misc_feature 1..80: note = Artificially Synthesized Probe
  source 1..80: mol_type = other DNA

SEQ ID NO: 126166 - DNA, 80 bp, synthetic construct
  misc_feature 1..80: note = Artificially Synthesized Probe
  source 1..80: mol_type = other DNA
gccagatttactggggagaatcaaacctttctgactcacctttcctgcttatggaaagcatatttatttgtgctatcttt

SEQ ID NO: 126167 - DNA, 80 bp, synthetic construct
  misc_feature 1..80: note = Artificially Synthesized Probe
  source 1..80: mol_type = other DNA
tctgtgcagttatcctcagggtttttctcccattgtgtggctgtagcttgttgagtggactctaaactcttcctggaagg

SEQ ID NO: 126168 - DNA, 80 bp, synthetic construct
  misc_feature 1..80: note = Artificially Synthesized Probe
  source 1..80: mol_type = other DNA
ctggttcttcaggctttggtggatgtgatcctcatgtcaaggagtaattgtggaattatggaggggacatgggtagagtg

SEQ ID NO: 126169 - DNA, 80 bp, synthetic construct
  misc_feature 1..80: note = Artificially Synthesized Probe
  source 1..80: mol_type = other DNA
tactttcagggagttttctttacctttggctttctggagttgagtgtaaggttgaggttttgttttgttttgttgagttt

SEQ ID NO: 126170 - DNA, 80 bp, synthetic construct; identical to SEQ ID NO: 40539
  misc_feature 1..80: note = Artificially Synthesized Probe
  source 1..80: mol_type = other DNA

SEQ ID NO: 126171 - DNA, 80 bp, synthetic construct
  misc_feature 1..80: note = Artificially Synthesized Probe
  source 1..80: mol_type = other DNA
aagtttgtttttattttaaataaaaacttaaacaaaagttgacaaatgggatctaattaaagagcttctgcacagcaaaa

SEQ ID NO: 126172 - DNA, 80 bp, synthetic construct
  misc_feature 1..80: note = Artificially Synthesized Probe
  source 1..80: mol_type = other DNA
cttctcaaaagaagacattcatgtggccaacaagcagatgaagaaaggctcatcatcactgatccccagagaaatgcaaa

SEQ ID NO: 126173 - DNA, 80 bp, synthetic construct
  misc_feature 1..80: note = Artificially Synthesized Probe
  source 1..80: mol_type = other DNA
ggtctagaaccagaaataccatttgacttagcaatcctattactgggtatatacccaaaggaatgcaaattattctatta

SEQ ID NO: 126174 - DNA, 80 bp, synthetic construct
  misc_feature 1..80: note = Artificially Synthesized Probe
  source 1..80: mol_type = other DNA
ttgcagggacatggatgaagctggaagccattatcctcagcaaaataaggcaggaacagaaaagcaaacaccacatattc

SEQ ID NO: 126175 - DNA, 80 bp, synthetic construct; identical to SEQ ID NO: 40540
  misc_feature 1..80: note = Artificially Synthesized Probe
  source 1..80: mol_type = other DNA

SEQ ID NO: 126176 - DNA, 80 bp, synthetic construct
  misc_feature 1..80: note = Artificially Synthesized Probe
  source 1..80: mol_type = other DNA
cagcaaacgtgcttcaaaagaaaaaaataatatattttctgacaaaaaagagataattatttccagtagaccagcacttt

SEQ ID NO: 126177 - DNA, 80 bp, synthetic construct
  misc_feature 1..80: note = Artificially Synthesized Probe
  source 1..80: mol_type = other DNA
ttgcatctgttgttaaatatgagataatttttatattagccagactactgtattgttggaatttgggacaataaacactt

SEQ ID NO: 126178 - DNA, 80 bp, synthetic construct; identical to SEQ ID NO: 40541
  misc_feature 1..80: note = Artificially Synthesized Probe
  source 1..80: mol_type = other DNA

SEQ ID NO: 126179 - DNA, 80 bp, synthetic construct
  misc_feature 1..80: note = Artificially Synthesized Probe
  source 1..80: mol_type = other DNA
ttgtgccagttttcaaagggaatgcttccagtttttgcccattcagtatgatattggctgtgggtttgtcatagatagct

SEQ ID NO: 126180 - DNA, 80 bp, synthetic construct; identical to SEQ ID NO: 40320
  misc_feature 1..80: note = Artificially Synthesized Probe
  source 1..80: mol_type = other DNA

SEQ ID NO: 126181 - DNA, 80 bp, synthetic construct
  misc_feature 1..80: note = Artificially Synthesized Probe
  source 1..80: mol_type = other DNA
tgcgtatgttgaaccaggcttgcatcccagggatgaagcccacttgatcatggtggataagctttttgatgtgctgctgg

SEQ ID NO: 126182 - DNA, 80 bp, synthetic construct
  misc_feature 1..80: note = Artificially Synthesized Probe
  source 1..80: mol_type = other DNA
actggaatagtttcagaaggaatggtaccagctcctccttgtacctctggtagaattcagctttgaatccatctggtcct

SEQ ID NO: 126183 - DNA, 80 bp, synthetic construct; identical to SEQ ID NO: 40542
  misc_feature 1..80: note = Artificially Synthesized Probe
  source 1..80: mol_type = other DNA

SEQ ID NO: 126184 - DNA, 80 bp, synthetic construct
  misc_feature 1..80: note = Artificially Synthesized Probe
  source 1..80: mol_type = other DNA
aatctccttaagctgataagcaacttcagcaaagtctcaggatacaaaatcaatgtgcaaaaatcacaagcattcttata

SEQ ID NO: 126185 - DNA, 80 bp, synthetic construct
  misc_feature 1..80: note = Artificially Synthesized Probe
  source 1..80: mol_type = other DNA
aacaaatggaagaacattccatgctcatgggtaggaagaatcaatatcgtgaaaatgaccatactgcccaaggtaattta

SEQ ID NO: 126186 - DNA, 80 bp, synthetic construct
  misc_feature 1..80: note = Artificially Synthesized Probe
  source 1..80: mol_type = other DNA
ctatactacaaggctacagtaaccaaaacagcatggtactggtaccaaaacagagatatagatcaatggaacagaacaga

SEQ ID NO: 126187 - DNA, 80 bp, synthetic construct
  misc_feature 1..80: note = Artificially Synthesized Probe
  source 1..80: mol_type = other DNA
acaaaaattaattcaagatggattaaagacttaaacattagacctaaaaccataaaaaccctagaagaaaacctaggcat

SEQ ID NO: 126188 - DNA, 80 bp, synthetic construct; identical to SEQ ID NO: 40543
  misc_feature 1..80: note = Artificially Synthesized Probe
  source 1..80: mol_type = other DNA

SEQ ID NO: 126189 - DNA, 80 bp, synthetic construct
  misc_feature 1..80: note = Artificially Synthesized Probe
  source 1..80: mol_type = other DNA
gttagaatggcaaacattgaaaagtcaggaaacaacaggttctggagaggatgtggagaaataggaacacttttacactg

SEQ ID NO: 126190 - DNA, 80 bp, synthetic construct
  misc_feature 1..80: note = Artificially Synthesized Probe
  source 1..80: mol_type = other DNA
tttattgtggcactattcacaatagcgaagacttggaaccaacccaaatgtccaacaatgatagactggattaagaaaat

SEQ ID NO: 126191 - DNA, 80 bp, synthetic construct
  misc_feature 1..80: note = Artificially Synthesized Probe
  source 1..80: mol_type = other DNA
atttagttttgtcttttaaatgtctaggttttcagctttttttgctcagattttccatctgtccatgtgtttcattaaac

SEQ ID NO: 126192 - DNA, 80 bp, synthetic construct
  misc_feature 1..80: note = Artificially Synthesized Probe
  source 1..80: mol_type = other DNA
caatgagaacacatggacacaggaaggggaacatcaaactctggggactgtagtggggtgggggaaggggagagggatag

SEQ ID NO: 126193 - DNA, 80 bp, synthetic construct; identical to SEQ ID NO: 40544
  misc_feature 1..80: note = Artificially Synthesized Probe
  source 1..80: mol_type = other DNA

SEQ ID NO: 126194 - DNA, 80 bp, synthetic construct
  misc_feature 1..80: note = Artificially Synthesized Probe
  source 1..80: mol_type = other DNA
agcaaccttgtaatcacaagaaacccagaggaatggtttctgtctttacaagtggatacctctgacccctgctgcattag

SEQ ID NO: 126195 - DNA, 80 bp, synthetic construct
  misc_feature 1..80: note = Artificially Synthesized Probe
  source 1..80: mol_type = other DNA
tcatttctttttcttctgcctcctaaaagctgaagcttgcagggagcttttgtttctagttgccacatatcctttcccag

SEQ ID NO: 126196 - DNA, 80 bp, synthetic construct
  misc_feature 1..80: note = Artificially Synthesized Probe
  source 1..80: mol_type = other DNA
tcacctgttgctgaatccattgctgcttcttcccatcttctgcaaattctgtcctgactggcttgttaattggttagtgt

SEQ ID NO: 126197 - DNA, 80 bp, synthetic construct; identical to SEQ ID NO: 40545
  misc_feature 1..80: note = Artificially Synthesized Probe
  source 1..80: mol_type = other DNA

SEQ ID NO: 126198 - DNA, 80 bp, synthetic construct
  misc_feature 1..80: note = Artificially Synthesized Probe
  source 1..80: mol_type = other DNA
gaatgaatcaagaagggtataggaaaaaagtctcaaaacaaaaattacaaaaggcgtaatagaacagatgagaaacttgt

SEQ ID NO: 126199 - DNA, 80 bp, synthetic construct
  misc_feature 1..80: note = Artificially Synthesized Probe
  source 1..80: mol_type = other DNA
actctgaagtgaaaacttaaactttacagcatctttgtcgaggatagcatgtctctagaatctggaagtattccccccaa

SEQ ID NO: 126200 - DNA, 80 bp, synthetic construct
  misc_feature 1..80: note = Artificially Synthesized Probe
  source 1..80: mol_type = other DNA
aggtgtgcgctaccatgcctagataatttttgtatcctttttgtaaagatggagtttcaccatgttgcccaggctggtct

SEQ ID NO: 126201 - DNA, 80 bp, synthetic construct; identical to SEQ ID NO: 40546
  misc_feature 1..80: note = Artificially Synthesized Probe
  source 1..80: mol_type = other DNA

SEQ ID NO: 126202 - DNA, 80 bp, synthetic construct
  misc_feature 1..80: note = Artificially Synthesized Probe
  source 1..80: mol_type = other DNA
aactaagaaagaaggaagtggtggcctcttctttggccggatgttaccgagagtgttgagttgagctgggtggttgatct

SEQ ID NO: 126203 - DNA, 80 bp, synthetic construct
  misc_feature 1..80: note = Artificially Synthesized Probe
  source 1..80: mol_type = other DNA
ataaaaccattatgattcatttgtgcacatgtcttttaggggatgtagtatccatttcttctgggtgtctgctcaggagt

SEQ ID NO: 126204 - DNA, 80 bp, synthetic construct
  misc_feature 1..80: note = Artificially Synthesized Probe
  source 1..80: mol_type = other DNA
cacattcttgcatcatttcatgtcatatgccttcaccagtaaggctggacagatagagaatagtatttctttagcatcat

SEQ ID NO: 126205 - DNA, 80 bp, synthetic construct
  misc_feature 1..80: note = Artificially Synthesized Probe
  source 1..80: mol_type = other DNA
gaagtttttctttttcaaaaaactcagatgcaaaaggcatttattcttgctgaaggaaaaattaaggaaacctagaatat

SEQ ID NO: 126206 - DNA, 80 bp, synthetic construct; identical to SEQ ID NO: 40547
  misc_feature 1..80: note = Artificially Synthesized Probe
  source 1..80: mol_type = other DNA

SEQ ID NO: 126207 - DNA, 80 bp, synthetic construct
  misc_feature 1..80: note = Artificially Synthesized Probe
  source 1..80: mol_type = other DNA
cccagctcacagcacaagtaactgaaaacacatttaatttaggccccaagttatccgtaatttaagttcaaccaaatatg

SEQ ID NO: 126208 - DNA, 80 bp, synthetic construct
  misc_feature 1..80: note = Artificially Synthesized Probe
  source 1..80: mol_type = other DNA
ataaagaagtaccagaaactgggaaattcataaagaaaagaggtttaattggctcatatttccataggctgtacaggaag

SEQ ID NO: 126209 - DNA, 80 bp, synthetic construct; identical to SEQ ID NO: 40548
  misc_feature 1..80: note = Artificially Synthesized Probe
  source 1..80: mol_type = other DNA

SEQ ID NO: 126210 - DNA, 80 bp, synthetic construct
  misc_feature 1..80: note = Artificially Synthesized Probe
  source 1..80: mol_type = other DNA
aagtctcatctaagacaaagcaagtcccttccacctataagcctgtaaaataattttaaaaagttagttacttccaagat

SEQ ID NO: 126211 - DNA, 80 bp, synthetic construct
  misc_feature 1..80: note = Artificially Synthesized Probe
  source 1..80: mol_type = other DNA
caggccactctgatgcaaggggtgggctcttaaggccttgggcagccccactgctgtggctctcaaaggctcagctccta

SEQ ID NO: 126212 - DNA, 80 bp, synthetic construct
  misc_feature 1..80: note = Artificially Synthesized Probe
  source 1..80: mol_type = other DNA
ccgcacatttcccctctgcactgccctagtagaggttctccatgaaggcttctcccctgcagcagacttctgcctggaca

SEQ ID NO: 126213 - DNA, 80 bp, synthetic construct
  misc_feature 1..80: note = Artificially Synthesized Probe
  source 1..80: mol_type = other DNA
accatggtgggagctggagtggctgggaggcagggagcagtgtcccaagattgcacagggcagcagggccccgggcctgg

SEQ ID NO: 126214 - DNA, 80 bp, synthetic construct
  misc_feature 1..80: note = Artificially Synthesized Probe
  source 1..80: mol_type = other DNA
gaaggacagggcctccccacgagtgttcccccacaggaagctgcacccgttacctggccgtggtaaggcactgcttggtt

SEQ ID NO: 126215 - DNA, 80 bp, synthetic construct; identical to SEQ ID NO: 40549
  misc_feature 1..80: note = Artificially Synthesized Probe
  source 1..80: mol_type = other DNA

SEQ ID NO: 126216 - DNA, 80 bp, synthetic construct
  misc_feature 1..80: note = Artificially Synthesized Probe
  source 1..80: mol_type = other DNA
gcaggggcacaatgcctccaacctctttgctataagtgtaacaaaagtgatgacctttgctactgtttctaataagtccc

SEQ ID NO: 126217 - DNA, 80 bp, synthetic construct
  misc_feature 1..80: note = Artificially Synthesized Probe
  source 1..80: mol_type = other DNA
gtcactttcacattttcaggtatctttatagcaataccttagcagtattcgtggtaccaattttctgtattagtctgttc

SEQ ID NO: 126218 - DNA, 80 bp, synthetic construct; identical to SEQ ID NO: 40550
  misc_feature 1..80: note = Artificially Synthesized Probe
  source 1..80: mol_type = other DNA

SEQ ID NO: 126219 - DNA, 80 bp, synthetic construct
  misc_feature 1..80: note = Artificially Synthesized Probe
  source 1..80: mol_type = other DNA
gactcacatgactgcaaaaattataaatcaagtgactctactagatattataaatatttaaacagaaacatcagttcact

SEQ ID NO: 126220 - DNA, 80 bp, synthetic construct
  misc_feature 1..80: note = Artificially Synthesized Probe
  source 1..80: mol_type = other DNA
acatgctcacccatcaaggtgtctgaaccatgtgctacttgaaaggatggaggagaggcaacatttgaatacataattaa

SEQ ID NO: 126221 - DNA, 80 bp, synthetic construct
  misc_feature 1..80: note = Artificially Synthesized Probe
  source 1..80: mol_type = other DNA
gtacccagataggtggtcaaacatgattctagatttttctgtgaaggtttttagatgagattaacagatcagtgctttcg

SEQ ID NO: 126222 - DNA, 80 bp, synthetic construct
  misc_feature 1..80: note = Artificially Synthesized Probe
  source 1..80: mol_type = other DNA
tcccttcagattttggatttctcaagcctccacaatcacataaagcagtcccttaaaataaatttatctctctacacaca

SEQ ID NO: 126223 - DNA, 80 bp, synthetic construct; identical to SEQ ID NO: 40551
  misc_feature 1..80: note = Artificially Synthesized Probe
  source 1..80: mol_type = other DNA

SEQ ID NO: 126224 - DNA, 80 bp, synthetic construct
  misc_feature 1..80: note = Artificially Synthesized Probe
  source 1..80: mol_type = other DNA
acagactttcgctagtagaatttctgaaggacacacttcaggaagataaataaacatgattctagaagggcggctggaga

SEQ ID NO: 126225 - DNA, 80 bp, synthetic construct; identical to SEQ ID NO: 40321
  misc_feature 1..80: note = Artificially Synthesized Probe
  source 1..80: mol_type = other DNA

SEQ ID NO: 126226 - DNA, 80 bp, synthetic construct
  misc_feature 1..80: note = Artificially Synthesized Probe
  source 1..80: mol_type = other DNA
cattctgaagtgctcatattgttaagatacttcacgaattataataggtatgcctagtaaaacatcagagatacatagtt

SEQ ID NO: 126227 - DNA, 80 bp, synthetic construct; identical to SEQ ID NO: 40552
  misc_feature 1..80: note = Artificially Synthesized Probe
  source 1..80: mol_type = other DNA

SEQ ID NO: 126228 - DNA, 80 bp, synthetic construct
  misc_feature 1..80: note = Artificially Synthesized Probe
  source 1..80: mol_type = other DNA
gtcaacttaaatagctacaaaatacataaatttttaaagttaatacagtgaaaacttaatctactgtctccttttggggt

SEQ ID NO: 126229 - DNA, 80 bp, synthetic construct
  misc_feature 1..80: note = Artificially Synthesized Probe
  source 1..80: mol_type = other DNA
tgaattcccattaaaatcaaaaataagacaaagatacctacgttatttattgtgaaagaaatattgaaatggaggttctg

SEQ ID NO: 126230 - DNA, 80 bp, synthetic construct
  misc_feature 1..80: note = Artificially Synthesized Probe
  source 1..80: mol_type = other DNA
agtcaactacaattatattcaaaaatagaaagcgtaataaaaatatgttaaaatataaataaagtataaggtagcaaatc

SEQ ID NO: 126231 - DNA, 80 bp, synthetic construct; identical to SEQ ID NO: 40553
  misc_feature 1..80: note = Artificially Synthesized Probe
  source 1..80: mol_type = other DNA

SEQ ID NO: 126232 - DNA, 80 bp, synthetic construct
  misc_feature 1..80: note = Artificially Synthesized Probe
  source 1..80: mol_type = other DNA
agtggcacaatcttgactcactgcaacctctgcctcccgggttcaagtgattctcctgcctcagcctcccaagtaggtgc

SEQ ID NO: 126233 - DNA, 80 bp, synthetic construct
  misc_feature 1..80: note = Artificially Synthesized Probe
  source 1..80: mol_type = other DNA
tatcttatatggaatacttcatataacagagggtgtcttagagaacacttggaaaaataaggaagcttagaataaaaaat

SEQ ID NO: 126234 - DNA, 80 bp, synthetic construct
  misc_feature 1..80: note = Artificially Synthesized Probe
  source 1..80: mol_type = other DNA
cactttgttgccttgaagccatagttctggtgggttcaagttaatttgtgcttttacactctctgacattctctgtggtt

SEQ ID NO: 126235 - DNA, 80 bp, synthetic construct
  misc_feature 1..80: note = Artificially Synthesized Probe
  source 1..80: mol_type = other DNA
tctgttaaacacgatagtaatgtggaaagaccaaccgaatttggggaaaatattatatatacacacagtcatcccttggt

SEQ ID NO: 126236 - DNA, 80 bp, synthetic construct
  misc_feature 1..80: note = Artificially Synthesized Probe
  source 1..80: mol_type = other DNA
aaatgctgtgtaaatagttcctactctctatttttctattctatatatttctatttctctatttttcatttggatcattt

SEQ ID NO: 126237 - DNA, 80 bp, synthetic construct
  misc_feature 1..80: note = Artificially Synthesized Probe
  source 1..80: mol_type = other DNA
ctgtaaatgtatatatataatacttaaccatatatatatttggaatataagaatatttacaattacaataaaggacagca

SEQ ID NO: 126238 - DNA, 80 bp, synthetic construct
  misc_feature 1..80: note = Artificially Synthesized Probe
  source 1..80: mol_type = other DNA
tgctgccacgatgtgtattgatgtgtattgatgggaatactcattcatagaggaagcagatataaattagtgcaaccact

SEQ ID NO: 126239 - DNA, 80 bp, synthetic construct
  misc_feature 1..80: note = Artificially Synthesized Probe
  source 1..80: mol_type = other DNA
tgctcattaagattaaaatggaagcaaagaacaagaaagaaaatgagggcttcagggccccttaattgcattgggcccta

SEQ ID NO: 126240 - DNA, 80 bp, synthetic construct
  misc_feature 1..80: note = Artificially Synthesized Probe
  source 1..80: mol_type = other DNA
tcacctccggccccccttccctctccttcgcgcccttctccccccgcccctcctccctccacgccccctcgctccccgcg

SEQ ID NO: 126241 - DNA, 80 bp, synthetic construct; identical to SEQ ID NO: 40554
  misc_feature 1..80: note = Artificially Synthesized Probe
  source 1..80: mol_type = other DNA

SEQ ID NO: 126242 - DNA, 80 bp, synthetic construct
  misc_feature 1..80: note = Artificially Synthesized Probe
  source 1..80: mol_type = other DNA
ttagaaatgttctaatttgtggctgggcgtggtggctcacacctgtaatcccagcactttgggaggctgaggtgaacgga

SEQ ID NO: 126243 - DNA, 80 bp, synthetic construct
  misc_feature 1..80: note = Artificially Synthesized Probe
  source 1..80: mol_type = other DNA
gcagtgagccgacatcgtgccactgcactccagcctggcgacagagcgagactctgtctcaaaataaaaagttctaattt

SEQ ID NO: 126244 - DNA, 80 bp, synthetic construct
  misc_feature 1..80: note = Artificially Synthesized Probe
  source 1..80: mol_type = other DNA
gtaaataacttaggatcttcaaattggaaaggggttgcttggcagaagacagtaaattgtttccttccctatatattaac

SEQ ID NO: 126245 - DNA, 80 bp, synthetic construct
  misc_feature 1..80: note = Artificially Synthesized Probe
  source 1..80: mol_type = other DNA
ttaggtcatttgaaacagagagtgcatgaagaaggtgaaacatacacatggatatcacacacacacttgcactcactcac

SEQ ID NO: 126246 - DNA, 80 bp, synthetic construct; identical to SEQ ID NO: 40555
  misc_feature 1..80: note = Artificially Synthesized Probe
  source 1..80: mol_type = other DNA

SEQ ID NO: 126247 - DNA, 80 bp, synthetic construct
  misc_feature 1..80: note = Artificially Synthesized Probe
  source 1..80: mol_type = other DNA
tagatttaatctaacttctcaagaataggaaaataactatgtggtgacacagtcgtgtgatgaaatttgtcagtattttc

SEQ ID NO: 126248 - DNA, 80 bp, synthetic construct
  misc_feature 1..80: note = Artificially Synthesized Probe
  source 1..80: mol_type = other DNA
ggaaatttcgagcttgcgttaatcagttgtgttgctccaagggaaaacatactaaggtgacttctcggactcatctgatc

SEQ ID NO: 126249 - DNA, 80 bp, synthetic construct
  misc_feature 1..80: note = Artificially Synthesized Probe
  source 1..80: mol_type = other DNA
gtcctgttaatcagaaggtgccctgtcctctgtgagtagtgggtggaagagagcagtcagacacctgcaggtcagcctct

SEQ ID NO: 126250 - DNA, 80 bp, synthetic construct; identical to SEQ ID NO: 40556
  misc_feature 1..80: note = Artificially Synthesized Probe
  source 1..80: mol_type = other DNA

SEQ ID NO: 126251 - DNA, 80 bp, synthetic construct
  misc_feature 1..80: note = Artificially Synthesized Probe
  source 1..80: mol_type = other DNA
aaggattggaaagcgtagcccaggcttcatcactgatacccgaggacctgcctgcttttgtttgattgttcccttgtcta

SEQ ID NO: 126252 - DNA, 80 bp, synthetic construct
  misc_feature 1..80: note = Artificially Synthesized Probe
  source 1..80: mol_type = other DNA
atttttatgtgttacattttggacatgggtttccatttcttttcagccataaagaagaaagtcctgagcatttctaggcc

SEQ ID NO: 126253 - DNA, 80 bp, synthetic construct
  misc_feature 1..80: note = Artificially Synthesized Probe
  source 1..80: mol_type = other DNA
aaaacaaaacaacttctcactgttattaagaccttgatttgtagttggtatattctgactttccgagtggagctttggct

SEQ ID NO: 126254 - DNA, 80 bp, synthetic construct
  misc_feature 1..80: note = Artificially Synthesized Probe
  source 1..80: mol_type = other DNA
tttattgttggaagtagcaaaagagtgttgtttccacttttcattttttatcattcattatcctctctttataagaagct

SEQ ID NO: 126255 - DNA, 80 bp, synthetic construct; identical to SEQ ID NO: 40557
  misc_feature 1..80: note = Artificially Synthesized Probe
  source 1..80: mol_type = other DNA

SEQ ID NO: 126256 - DNA, 80 bp, synthetic construct
  misc_feature 1..80: note = Artificially Synthesized Probe
  source 1..80: mol_type = other DNA
acgcttggactcacacctgtgagcaaacaccacatgcttgcactcacacccatgagcaaacaccacacgcttggactcac

SEQ ID NO: 126257 - DNA, 80 bp, synthetic construct
  misc_feature 1..80: note = Artificially Synthesized Probe
  source 1..80: mol_type = other DNA
tacagttttggccactttcaactaagatttcttagtgatgtcgtgttgccgcctgcaatagttaaattctttccccatta

SEQ ID NO: 126258 - DNA, 80 bp, synthetic construct
  misc_feature 1..80: note = Artificially Synthesized Probe
  source 1..80: mol_type = other DNA
acgtgcagttttgttacataggtatacacgtgccatggtggtttgctgcacccatcaacctgccatctacgttaggtatt

SEQ ID NO: 126259 - DNA, 80 bp, synthetic construct
  misc_feature 1..80: note = Artificially Synthesized Probe
  source 1..80: mol_type = other DNA
tagcttcaaagactactattggttgatgtttacagcacatttgctgcttttaaatgacaacacttcttcagtctggggcg

SEQ ID NO: 126260 - DNA, 80 bp, synthetic construct; identical to SEQ ID NO: 40558
  misc_feature 1..80: note = Artificially Synthesized Probe
  source 1..80: mol_type = other DNA

SEQ ID NO: 126261 - DNA, 80 bp, synthetic construct
  misc_feature 1..80: note = Artificially Synthesized Probe
  source 1..80: mol_type = other DNA
tgctgggtcaaatggtagttctagttctagatccttgaggagttgccacactgtcttcacaatggttgaactaatctaca

SEQ ID NO: 126262 - DNA, 80 bp, synthetic construct
  misc_feature 1..80: note = Artificially Synthesized Probe
  source 1..80: mol_type = other DNA
tatggttgttggctgcataaatgtcttcttttgagaagtgtctgttcatatctgccacccactttttgatggggttattt

SEQ ID NO: 126263 - DNA, 80 bp, synthetic construct
  misc_feature 1..80: note = Artificially Synthesized Probe
  source 1..80: mol_type = other DNA
ccatttgtctattttggcttttgttgccattgcttttggtgttttagccatgaagtctttgcccaaggcaaaattatttt

SEQ ID NO: 126264 - DNA, 80 bp, synthetic construct; identical to SEQ ID NO: 40559
  misc_feature 1..80: note = Artificially Synthesized Probe
  source 1..80: mol_type = other DNA

SEQ ID NO: 126265 - DNA, 80 bp, synthetic construct
  misc_feature 1..80: note = Artificially Synthesized Probe
  source 1..80: mol_type = other DNA
ctcaatggatgatataaaaaatacaaatgagaacttcagcaataaagtagatcaagcaaaataatgaatttctgaacttg

SEQ ID NO: 126266 - DNA, 80 bp, synthetic construct
  misc_feature 1..80: note = Artificially Synthesized Probe
  source 1..80: mol_type = other DNA
tttaataaagtaagacctgaaagcttctcaagtctggcaaaagatttagacatctagatatagaaagcttaacaatcacc

SEQ ID NO: 126267 - DNA, 80 bp, synthetic construct
  misc_feature 1..80: note = Artificially Synthesized Probe
  source 1..80: mol_type = other DNA
agaacctccatcaagccatcagttgatttatcagcaaaaatcatacaggctgggagaaaatgagatgatacattcaaagt

SEQ ID NO: 126268 - DNA, 80 bp, synthetic construct; identical to SEQ ID NO: 40560
  misc_feature 1..80: note = Artificially Synthesized Probe
  source 1..80: mol_type = other DNA

SEQ ID NO: 126269 - DNA, 80 bp, synthetic construct; identical to SEQ ID NO: 40322
  misc_feature 1..80: note = Artificially Synthesized Probe
  source 1..80: mol_type = other DNA

SEQ ID NO: 126270 - DNA, 80 bp, synthetic construct
  misc_feature 1..80: note = Artificially Synthesized Probe
  source 1..80: mol_type = other DNA
acaggaataagtcctcacctatcaataactaccttaaatgtaaatgaattaaatttcccacttaaaagatacagactgga

SEQ ID NO: 126271 - DNA, 80 bp, synthetic construct
  misc_feature 1..80: note = Artificially Synthesized Probe
  source 1..80: mol_type = other DNA
gataaaatagactttaagtcaaaaacaaaaaaaagacacaaagaagatctttataaaatgataaaaggatcaattcatca

SEQ ID NO: 126272 - DNA, 80 bp, synthetic construct
  misc_feature 1..80: note = Artificially Synthesized Probe
  source 1..80: mol_type = other DNA
tcactcagtctggggtgcagtggcatgatcatggcttactgcagcttcaaccttcctgggctcaggtgatcctcccacct

SEQ ID NO: 126273 - DNA, 80 bp, synthetic construct
  misc_feature 1..80: note = Artificially Synthesized Probe
  source 1..80: mol_type = other DNA
tgagccaacatgcctgacccagagcacccataaatatatagcaactatttattagttctaaataatgaaataaactccaa

SEQ ID NO: 126274 - DNA, 80 bp, synthetic construct; identical to SEQ ID NO: 40561
  misc_feature 1..80: note = Artificially Synthesized Probe
  source 1..80: mol_type = other DNA

SEQ ID NO: 126275 - DNA, 80 bp, synthetic construct
  misc_feature 1..80: note = Artificially Synthesized Probe
  source 1..80: mol_type = other DNA
tattgaaacaaatgaaaactgaaacacaatatacaaaaatctataggatatagcaaaaacaatactaagcagaaagtctg

SEQ ID NO: 126276 - DNA, 80 bp, synthetic construct
  misc_feature 1..80: note = Artificially Synthesized Probe
  source 1..80: mol_type = other DNA
agccaaaagtagcagaagggaaaaataatacagagatcagagcagaattaaatagagactaaaaaagcacaaagattaat

SEQ ID NO: 126277 - DNA, 80 bp, synthetic construct
  misc_feature 1..80: note = Artificially Synthesized Probe
  source 1..80: mol_type = other DNA
gaaaacagagacaatagataaattcctagaaatatacaacctaccaagattgaaccatgaaaaaaaagtctaaaacctga

SEQ ID NO: 126278 - DNA, 80 bp, synthetic construct; identical to SEQ ID NO: 40562
  misc_feature 1..80: note = Artificially Synthesized Probe
  source 1..80: mol_type = other DNA

SEQ ID NO: 126279 - DNA, 80 bp, synthetic construct
  misc_feature 1..80: note = Artificially Synthesized Probe
  source 1..80: mol_type = other DNA
cacatcaatataataaagaacaaaaaccatatgaccatctcagtagaagcagaaaaagcatttgatagaattcaacaatg

SEQ ID NO: 126280 - DNA, 80 bp, synthetic construct
  misc_feature 1..80: note = Artificially Synthesized Probe
  source 1..80: mol_type = other DNA
aagactggaattaattgtgtgttcatcctgaatgtatttagtaaattgtgagtttagctatgtaactttttaaataaatg

SEQ ID NO: 126281 - DNA, 80 bp, synthetic construct
  misc_feature 1..80: note = Artificially Synthesized Probe
  source 1..80: mol_type = other DNA
cagcatagtcctggaagtcctagacagaacaatgaagcaggagaaagaaacaaaaggcattcacattgaaaaataggaag

SEQ ID NO: 126282 - DNA, 80 bp, synthetic construct; identical to SEQ ID NO: 40563
  misc_feature 1..80: note = Artificially Synthesized Probe
  source 1..80: mol_type = other DNA

SEQ ID NO: 126283 - DNA, 80 bp, synthetic construct
  misc_feature 1..80: note = Artificially Synthesized Probe
  source 1..80: mol_type = other DNA
aaaaataccaataaaattctttacagaaatagaagatataattttattaatttgtatggaaccacaagagagcatgaata

SEQ ID NO: 126284 - DNA, 80 bp, synthetic construct
  misc_feature 1..80: note = Artificially Synthesized Probe
  source 1..80: mol_type = other DNA
catattggcagccaactaatttttgacaaagataccaagaacatacattggtgaaaggatactctcttcaatacatggtt

SEQ ID NO: 126285 - DNA, 80 bp, synthetic construct
  misc_feature 1..80: note = Artificially Synthesized Probe
  source 1..80: mol_type = other DNA
actagaagtaaacatagtagaaacacttcaggacgctggtttaggaaaagattttatgactgagacctcaaaagcactga

SEQ ID NO: 126286 - DNA, 80 bp, synthetic construct
  misc_feature 1..80: note = Artificially Synthesized Probe
  source 1..80: mol_type = other DNA
gggactcaacagcaaaaacaataagaaaaacaaactaatcctattaatactgggcaaagtatctgaatagaaaattctca

SEQ ID NO: 126287 - DNA, 80 bp, synthetic construct; identical to SEQ ID NO: 40564
  misc_feature 1..80: note = Artificially Synthesized Probe
  source 1..80: mol_type = other DNA

SEQ ID NO: 126288 - DNA, 80 bp, synthetic construct
  misc_feature 1..80: note = Artificially Synthesized Probe
  source 1..80: mol_type = other DNA
cccacatgtttattgcatcattatccacaagagtaagatgtggtgttaacctaagtgtccattattaggtgaatagataa

SEQ ID NO: 126289 - DNA, 80 bp, synthetic construct
  misc_feature 1..80: note = Artificially Synthesized Probe
  source 1..80: mol_type = other DNA
agctaaaaaagttgatttcatgaagtagagggtagaaggatggttatcagaggctggaaagggtgtggggggaggtgaag

SEQ ID NO: 126290 - DNA, 80 bp, synthetic construct
  misc_feature 1..80: note = Artificially Synthesized Probe
  source 1..80: mol_type = other DNA
atgcatttgaaatgcatatttcaaaatacctagaagaaaatatccgaaatgttcccaacacaatgaaatgataaatgttt

SEQ ID NO: 126291 - DNA, 80 bp, synthetic construct
  misc_feature 1..80: note = Artificially Synthesized Probe
  source 1..80: mol_type = other DNA
acaatggcttcttagataatattgcacataagacaacatcaggacagtctgttgtctcttggttacgtataattatggcg

SEQ ID NO: 126292 - DNA, 80 bp, synthetic construct; identical to SEQ ID NO: 40565
  misc_feature 1..80: note = Artificially Synthesized Probe
  source 1..80: mol_type = other DNA

SEQ ID NO: 126293 - DNA, 80 bp, synthetic construct
  misc_feature 1..80: note = Artificially Synthesized Probe
  source 1..80: mol_type = other DNA
aatactaaaacatgctcttcaagctggaaggacattaaaccacgtggaaacttgatacataggaagaagtgaagagcact

SEQ ID NO: 126294 - DNA, 80 bp, synthetic construct
  misc_feature 1..80: note = Artificially Synthesized Probe
  source 1..80: mol_type = other DNA
accaagggcacagtcagttgaggtttttatatttgtgaagtgaggtataggaagattgatgtgtcaatatgaagtttaaa

SEQ ID NO: 126295 - DNA, 80 bp, synthetic construct; identical to SEQ ID NO: 40566
  misc_feature 1..80: note = Artificially Synthesized Probe
  source 1..80: mol_type = other DNA

SEQ ID NO: 126296 - DNA, 80 bp, synthetic construct
  misc_feature 1..80: note = Artificially Synthesized Probe
  source 1..80: mol_type = other DNA
taaagatacccacaggtgggaattagaagaatggagagcatgtattttataaacaataaccataaaaatatcagtctatt

SEQ ID NO: 126297 - DNA, 80 bp, synthetic construct
  misc_feature 1..80: note = Artificially Synthesized Probe
  source 1..80: mol_type = other DNA
ataacagagctcccaaatacaaaccaaaaactggcagagatgggaaaaacacagagaaatccacaatcaaaatgggagat

SEQ ID NO: 126298 - DNA, 80 bp, synthetic construct
  misc_feature 1..80: note = Artificially Synthesized Probe
  source 1..80: mol_type = other DNA
tccaaagtctccagaatgcaatttcttttcatgtgagcatggaacattcaacaagatagatggaatgctgggccatgatc

SEQ ID NO: 126299 - DNA, 80 bp, synthetic construct; identical to SEQ ID NO: 40567
  misc_feature 1..80: note = Artificially Synthesized Probe
  source 1..80: mol_type = other DNA

SEQ ID NO: 126300 - DNA, 80 bp, synthetic construct
  misc_feature 1..80: note = Artificially Synthesized Probe
  source 1..80: mol_type = other DNA
cttaaaaaaaaaaagccaggcatggtggtgcgtatctgtaatcccagcttctcaggaggctggggcacgagaattgtttg

SEQ ID NO: 126301 - DNA, 80 bp, synthetic construct
  misc_feature 1..80: note = Artificially Synthesized Probe
  source 1..80: mol_type = other DNA
ggcgatgaatctggagtttgtggtgtgcttatcaacagaataattagaagcaattcatattcaaggtaaatagaaaaatt

SEQ ID NO: 126302 - DNA, 80 bp, synthetic construct
  misc_feature 1..80: note = Artificially Synthesized Probe
  source 1..80: mol_type = other DNA
atatatatggaccaatagccctcatgaatgtagatgcagaaattcttcaacaacatattaacaaatcgaaagaaggatca

SEQ ID NO: 126303 - DNA, 80 bp, synthetic construct
  misc_feature 1..80: note = Artificially Synthesized Probe
  source 1..80: mol_type = other DNA
acacacacattaacatggatgcatcttccaggctttatgctgagagaagaaaggtttacacacaagtgatagtgcatcat

SEQ ID NO: 126304 - DNA, 80 bp, synthetic construct; identical to SEQ ID NO: 40568
  misc_feature 1..80: note = Artificially Synthesized Probe
  source 1..80: mol_type = other DNA

SEQ ID NO: 126305 - DNA, 80 bp, synthetic construct
  misc_feature 1..80: note = Artificially Synthesized Probe
  source 1..80: mol_type = other DNA
aacatgtaaaaagttggcttcaaacctcttatttaaacacaaagtattaaaacaccaagtgtatggtgatgcctctctta

SEQ ID NO: 126306 - DNA, 80 bp, synthetic construct
  misc_feature 1..80: note = Artificially Synthesized Probe
  source 1..80: mol_type = other DNA
aaggagacggaggagtacagtaaataagctctttatagagagaccacattctcatcacgttctttacagaatagcgatgt

SEQ ID NO: 126307 - DNA, 80 bp, synthetic construct
  misc_feature 1..80: note = Artificially Synthesized Probe
  source 1..80: mol_type = other DNA
attcaagaaatgcttattattaaagcagaaaggctcagaagcctcctgaaagcaaagatttgtcttcagattccactttt

SEQ ID NO: 126308 - DNA, 80 bp, synthetic construct; identical to SEQ ID NO: 40569
  misc_feature 1..80: note = Artificially Synthesized Probe
  source 1..80: mol_type = other DNA

SEQ ID NO: 126309 - DNA, 80 bp, synthetic construct
  misc_feature 1..80: note = Artificially Synthesized Probe
  source 1..80: mol_type = other DNA
tcgagttttcaaaatgcacccatctgggcacagtgccctctagagatccacctccattcagaatgtttatcttgtgagtg

SEQ ID NO: 126310 - DNA, 80 bp, synthetic construct
  misc_feature 1..80: note = Artificially Synthesized Probe
  source 1..80: mol_type = other DNA
gaatacaatgctttagaaagagcacctgcccagtgacctgatgccaattcttgctttgagtctctgaacctgatggcctt

SEQ ID NO: 126311 - DNA, 80 bp, synthetic construct
  misc_feature 1..80: note = Artificially Synthesized Probe
  source 1..80: mol_type = other DNA
ttgacaatcttataataactgtggcatctcatagtaaatgccgtgtgagttggttggtcagtcacatataaatgctacag

SEQ ID NO: 126312 - DNA, 80 bp, synthetic construct; identical to SEQ ID NO: 40570
  misc_feature 1..80: note = Artificially Synthesized Probe
  source 1..80: mol_type = other DNA

SEQ ID NO: 126313 - DNA, 80 bp, synthetic construct; identical to SEQ ID NO: 40323
  misc_feature 1..80: note = Artificially Synthesized Probe
  source 1..80: mol_type = other DNA

SEQ ID NO: 126314 - DNA, 80 bp, synthetic construct
  misc_feature 1..80: note = Artificially Synthesized Probe
  source 1..80: mol_type = other DNA
acaggaccagaaggcctttccgggcaccctgcacatactcttctcctaaggagaggatgctggaggcatttcctccaatg

SEQ ID NO: 126315 - DNA, 80 bp, synthetic construct
  misc_feature 1..80: note = Artificially Synthesized Probe
  source 1..80: mol_type = other DNA
agcatttgaccccgctgagctaagcattagctcacagagacctgacttctcccctagctgctaggttatagaaaatattt

SEQ ID NO: 126316 - DNA, 80 bp, synthetic construct
  misc_feature 1..80: note = Artificially Synthesized Probe
  source 1..80: mol_type = other DNA
aagctgcacctacaagctctgcatgcagcctgattttataaagaaaaaatgggttttctcagtggggaattgcttttgat

SEQ ID NO: 126317 - DNA, 80 bp, synthetic construct
  misc_feature 1..80: note = Artificially Synthesized Probe
  source 1..80: mol_type = other DNA
tagcaaacctttgaatcagcaacaaggggtacagagtatgtggctaaacacacagcagcattactaggatgaactcctat

SEQ ID NO: 126318 - DNA, 80 bp, synthetic construct; identical to SEQ ID NO: 40571
  misc_feature 1..80: note = Artificially Synthesized Probe
  source 1..80: mol_type = other DNA

SEQ ID NO: 126319 - DNA, 80 bp, synthetic construct
  misc_feature 1..80: note = Artificially Synthesized Probe
  source 1..80: mol_type = other DNA
acaatgttaggatgataacccaaacccaacctctggctatgtgagtttttttttctgccttcagacacatctgtagatgg

SEQ ID NO: 126320 - DNA, 80 bp, synthetic construct
  misc_feature 1..80: note = Artificially Synthesized Probe
  source 1..80: mol_type = other DNA
gacgaaaaataaatcacacactctttctgttaagcgtaagcattgtgtagagagtcgtatggaaacctcatccacgtgga

SEQ ID NO: 126321 - DNA, 80 bp, synthetic construct; identical to SEQ ID NO: 40572
  misc_feature 1..80: note = Artificially Synthesized Probe
  source 1..80: mol_type = other DNA

SEQ ID NO: 126322 - DNA, 80 bp, synthetic construct
  misc_feature 1..80: note = Artificially Synthesized Probe
  source 1..80: mol_type = other DNA
ttacagaaagtcttcttgcagacagatgctcggattccaggtgcaacagtccctggaccctatggtccacagagcccgga

SEQ ID NO: 126323 - DNA, 80 bp, synthetic construct
  misc_feature 1..80: note = Artificially Synthesized Probe
  source 1..80: mol_type = other DNA
tgtgaggcacgcccatgagtgtggggcacacctgtgagtgtgaggcacatctgtgtgaggcacgtccatgagtgtggggc

SEQ ID NO: 126324 - DNA, 80 bp, synthetic construct
  misc_feature 1..80: note = Artificially Synthesized Probe
  source 1..80: mol_type = other DNA
aagctaaaatagcgcatcttctatcacccatttcggaacacatcagtgatgagtgttgttcagtaatgtcatccctacac

SEQ ID NO: 126325 - DNA, 80 bp, synthetic construct
  misc_feature 1..80: note = Artificially Synthesized Probe
  source 1..80: mol_type = other DNA
gaccctttcgttgttggactcttgcggggctgctgcgtggtgctgtggtggttgcatggctccttcaccttcccagacgg

SEQ ID NO: 126326 - DNA, 80 bp, synthetic construct
  misc_feature 1..80: note = Artificially Synthesized Probe
  source 1..80: mol_type = other DNA
cgttggaatgtcatcagccattctatcgtgtgtctctcgacctaaactcgctgagtggacatttcaggttgttttggttt

SEQ ID NO: 126327 - DNA, 80 bp, synthetic construct; identical to SEQ ID NO: 40573
  misc_feature 1..80: note = Artificially Synthesized Probe
  source 1..80: mol_type = other DNA

SEQ ID NO: 126328 - DNA, 80 bp, synthetic construct
  misc_feature 1..80: note = Artificially Synthesized Probe
  source 1..80: mol_type = other DNA
tctgtacaggccccatcgtcaccttcctcgcccatagctaaggacccgaggtatgagaagcgctggctggacaccttgtc

SEQ ID NO: 126329 - DNA, 80 bp, synthetic construct
  misc_feature 1..80: note = Artificially Synthesized Probe
  source 1..80: mol_type = other DNA
gcaagtgtgcgtgctgtcttctggtagatttagcatttggaataaacaagttaaagataaagagaaaatgagaagtcagg

SEQ ID NO: 126330 - DNA, 80 bp, synthetic construct; identical to SEQ ID NO: 40574
  misc_feature 1..80: note = Artificially Synthesized Probe
  source 1..80: mol_type = other DNA

SEQ ID NO: 126331 - DNA, 80 bp, synthetic construct
  misc_feature 1..80: note = Artificially Synthesized Probe
  source 1..80: mol_type = other DNA
tgctatttaattactgtggaaaggcccacaagtaatgagttggtgaatttcctttttctgttctttagacagatgtgtag

SEQ ID NO: 126332 - DNA, 80 bp, synthetic construct
  misc_feature 1..80: note = Artificially Synthesized Probe
  source 1..80: mol_type = other DNA
atagtatgtatgatgggcagacagtacaacctgaaattccctttactggtccttaaatggaaggaaaagtctagcaaaca

SEQ ID NO: 126333 - DNA, 80 bp, synthetic construct
  misc_feature 1..80: note = Artificially Synthesized Probe
  source 1..80: mol_type = other DNA
gacagtaagcttgattttcagatttgtgcccatctttggtaaagagagacaaacctagtaaaagatgtgtgtattgctag

SEQ ID NO: 126334 - DNA, 80 bp, synthetic construct; identical to SEQ ID NO: 40575
  misc_feature 1..80: note = Artificially Synthesized Probe
  source 1..80: mol_type = other DNA

SEQ ID NO: 126335 - DNA, 80 bp, synthetic construct
  misc_feature 1..80: note = Artificially Synthesized Probe
  source 1..80: mol_type = other DNA
tccctccctgccttactgcttccactcctgccacaccccctcccccatcttccagatttgctcagtttacccagcagctc

SEQ ID NO: 126336 - DNA, 80 bp, synthetic construct
  misc_feature 1..80: note = Artificially Synthesized Probe
  source 1..80: mol_type = other DNA
ttccagtcctgaaggctctattcatggtgagtttcctgcacaggtgtgtcattttttaacttttataccctatttttact

SEQ ID NO: 126337 - DNA, 80 bp, synthetic construct
  misc_feature 1..80: note = Artificially Synthesized Probe
  source 1..80: mol_type = other DNA
ggtgtgttgtagcctgtatcatctaggtttctgtaagtgcaccctacgatgtaaacacaatgacaaaatcacctaatgac

SEQ ID NO: 126338 - DNA, 80 bp, synthetic construct
  misc_feature 1..80: note = Artificially Synthesized Probe
  source 1..80: mol_type = other DNA
cagttcgtgctctaactgtgaattccttttaaagtgtgtgcttgtggctttcttacaacatgtttctttggtttggggtt

SEQ ID NO: 126339 - DNA, 80 bp, synthetic construct; identical to SEQ ID NO: 40576
  misc_feature 1..80: note = Artificially Synthesized Probe
  source 1..80: mol_type = other DNA

SEQ ID NO: 126340 - DNA, 80 bp, synthetic construct
  misc_feature 1..80: note = Artificially Synthesized Probe
  source 1..80: mol_type = other DNA
aaggcatgtcttacatggcggcagggaagagcatgtgtgcagggaaactgccctttataaaaccatcagatctcgtgatt

SEQ ID NO: 126341 - DNA, 80 bp, synthetic construct
  misc_feature 1..80: note = Artificially Synthesized Probe
  source 1..80: mol_type = other DNA
ctaaatgcagacttgataacccattctggcagcttgagaacatgtagaaacacatgtgttattcttggtgacaaaatatt

SEQ ID NO: 126342 - DNA, 80 bp, synthetic construct
  misc_feature 1..80: note = Artificially Synthesized Probe
  source 1..80: mol_type = other DNA
caaacctcatgtggaaatgtattccccagtgttggaggtggggcctggtgggattagatcatggggcagattctcatgaa

SEQ ID NO: 126343 - DNA, 80 bp, synthetic construct; identical to SEQ ID NO: 40577
  misc_feature 1..80: note = Artificially Synthesized Probe
  source 1..80: mol_type = other DNA

SEQ ID NO: 126344 - DNA, 80 bp, synthetic construct
  misc_feature 1..80: note = Artificially Synthesized Probe
  source 1..80: mol_type = other DNA
gactgttttatgatttttaagcaagatttagtatgggcaggaaagggcaaataataaaacgcataagggcttaagctatg

SEQ ID NO: 126345 - DNA, 80 bp, synthetic construct
  misc_feature 1..80: note = Artificially Synthesized Probe
  source 1..80: mol_type = other DNA
agttctaaaattcctgtgtatcttctcctgagggctcctcagtctaaggagggtaaggaataagtttagaaattgtcaat

SEQ ID NO: 126346 - DNA, 80 bp, synthetic construct; identical to SEQ ID NO: 40324
  misc_feature 1..80: note = Artificially Synthesized Probe
  source 1..80: mol_type = other DNA

SEQ ID NO: 126347 - DNA, 80 bp, synthetic construct
  misc_feature 1..80: note = Artificially Synthesized Probe
  source 1..80: mol_type = other DNA
tgtgggtgtcccctctgactctgtccttgtccaagtataggacctcaatctataaccactaccttctgggtcctttctaa

SEQ ID NO: 126348 - DNA, 80 bp, synthetic construct
  misc_feature 1..80: note = Artificially Synthesized Probe
  source 1..80: mol_type = other DNA
tttgaaatatacaatacagtacttactcacttaacatcattgattggtcctcagaaactgcaacttggagtgaaaagatg

SEQ ID NO: 126349 - DNA, 80 bp, synthetic construct; identical to SEQ ID NO: 40578
  misc_feature 1..80: note = Artificially Synthesized Probe
  source 1..80: mol_type = other DNA

SEQ ID NO: 126350 - DNA, 80 bp, synthetic construct
  misc_feature 1..80: note = Artificially Synthesized Probe
  source 1..80: mol_type = other DNA
cccatgcagacagacacagagcaaacatgcaaacctcacaaagatattgtttcttctgtcacctgtgcttttgggtcata

SEQ ID NO: 126351 - DNA, 80 bp, synthetic construct
  misc_feature 1..80: note = Artificially Synthesized Probe
  source 1..80: mol_type = other DNA
tccagttctctgaacaccatatatggaagagactgtcatttcctcatgatatgttcctggcacttttgttgaaatcaatt

SEQ ID NO: 126352 - DNA, 80 bp, synthetic construct; identical to SEQ ID NO: 40579
  misc_feature 1..80: note = Artificially Synthesized Probe
  source 1..80: mol_type = other DNA

SEQ ID NO: 126353 - DNA, 80 bp, synthetic construct
  misc_feature 1..80: note = Artificially Synthesized Probe
  source 1..80: mol_type = other DNA
tttcatctctttcgttaaatttactcctaggtattttatatttttatactactgtaaatgggattgttttattaatttct

SEQ ID NO: 126354 - DNA, 80 bp, synthetic construct
  misc_feature 1..80: note = Artificially Synthesized Probe
  source 1..80: mol_type = other DNA
ttcacttcttccttttctatttagatgtgttttatttctttttcataattgttcttgttagcacttccagtactatgttg

SEQ ID NO: 126355 - DNA, 80 bp, synthetic construct
  misc_feature 1..80: note = Artificially Synthesized Probe
  source 1..80: mol_type = other DNA
tgatgatgaaaggataatgaattttgtcaaatgtttttctgcatctattgctacaatgttatggtttttgtctttcattt

SEQ ID NO: 126356 - DNA, 80 bp, synthetic construct; identical to SEQ ID NO: 40580
  misc_feature 1..80: note = Artificially Synthesized Probe
  source 1..80: mol_type = other DNA

SEQ ID NO: 126357 - DNA, 80 bp, synthetic construct
  misc_feature 1..80: note = Artificially Synthesized Probe
  source 1..80: mol_type = other DNA
attttcaaacatgttagtaaaggtgcctgcctggtaatgtctgtgaaggtggtccagggagcagcgtgaatggtggcagg

SEQ ID NO: 126358 - DNA, 80 bp, synthetic construct
  misc_feature 1..80: note = Artificially Synthesized Probe
  source 1..80: mol_type = other DNA
ctgatttgatctccttacctgttattagtttatttagatgatctgtttcctcttaattccattgtgataggttgtatgtt

SEQ ID NO: 126359 - DNA, 80 bp, synthetic construct
  misc_feature 1..80: note = Artificially Synthesized Probe
  source 1..80: mol_type = other DNA
attaactcatcatttacattatgcatatctcctaatgctatccctcccccctcccccaaccccatgacaggccctggtgt

SEQ ID NO: 126360 - DNA, 80 bp, synthetic construct
  misc_feature 1..80: note = Artificially Synthesized Probe
  source 1..80: mol_type = other DNA
ttatggctgcatggtatttcatggtgtatatgtgccacattttcttaatccagtctatcagtgatggacattcgggttgg

SEQ ID NO: 126361 - DNA, 80 bp, synthetic construct; identical to SEQ ID NO: 40581
  misc_feature 1..80: note = Artificially Synthesized Probe
  source 1..80: mol_type = other DNA

SEQ ID NO: 126362 - DNA, 80 bp, synthetic construct
  misc_feature 1..80: note = Artificially Synthesized Probe
  source 1..80: mol_type = other DNA
tgtccttcgctcactttttgatggggttgtttgtttttttcttgtaaatttgtttgagttctttgtagattctggatatt

SEQ ID NO: 126363 - DNA, 80 bp, synthetic construct
  misc_feature 1..80: note = Artificially Synthesized Probe
  source 1..80: mol_type = other DNA
atctgttgacatataattgtccagggcccattcagcatctacagtgggatgggaacccaccagcatgctggaggcacaga

SEQ ID NO: 126364 - DNA, 80 bp, synthetic construct
  misc_feature 1..80: note = Artificially Synthesized Probe
  source 1..80: mol_type = other DNA
gttctcatgatagcgagtgaattctcatcagatctgatggttttgtaaggggctctttccctttcactcctcactcttct

SEQ ID NO: 126365 - DNA, 80 bp, synthetic construct
  misc_feature 1..80: note = Artificially Synthesized Probe
  source 1..80: mol_type = other DNA
gttgaggttccttagttttctcagttctttttttaaaaaaaaaagactataaagagtagatgcatactgaagtctaattc

SEQ ID NO: 126366 - DNA, 80 bp, synthetic construct; identical to SEQ ID NO: 40582
  misc_feature 1..80: note = Artificially Synthesized Probe
  source 1..80: mol_type = other DNA

SEQ ID NO: 126367 - DNA, 80 bp, synthetic construct
  misc_feature 1..80: note = Artificially Synthesized Probe
  source 1..80: mol_type = other DNA
gtcgttatgcagcatcacaggtaacttagcataaccatgcgatcctgactactggcttatatagacattatgtagtctac

SEQ ID NO: 126368 - DNA, 80 bp, synthetic construct
  misc_feature 1..80: note = Artificially Synthesized Probe
  source 1..80: mol_type = other DNA
gcacttgcactagttaataaaataaccgacagcttccctcccacttgggaacctttgccatctctgtcgctcaatggtcc

SEQ ID NO: 126369 - DNA, 80 bp, synthetic construct
  misc_feature 1..80: note = Artificially Synthesized Probe
  source 1..80: mol_type = other DNA
ctttaccatatcagttttctattgccatgtaacaaacctgtgcaaacttagcaggtaacacaagactgttttattatctc

SEQ ID NO: 126370 - DNA, 80 bp, synthetic construct
  misc_feature 1..80: note = Artificially Synthesized Probe
  source 1..80: mol_type = other DNA
gctggcagaattcagtcccttgactttataggactcagttccccacctttgtcagccaagggctgctctccaccaccaga

SEQ ID NO: 126371 - DNA, 80 bp, synthetic construct; identical to SEQ ID NO: 40583
  misc_feature 1..80: note = Artificially Synthesized Probe
  source 1..80: mol_type = other DNA

SEQ ID NO: 126372 - DNA, 80 bp, synthetic construct
  misc_feature 1..80: note = Artificially Synthesized Probe
  source 1..80: mol_type = other DNA
agaaattcatccttttaaaacaaaagtggcttggatgatggttggctgttcttccacatggtaccgttggacaaagctgg

SEQ ID NO: 126373 - DNA, 80 bp, synthetic construct
  misc_feature 1..80: note = Artificially Synthesized Probe
  source 1..80: mol_type = other DNA
gcctctgggatgtgcccctggggaagcaggtggtatgaaggaatagtacggggataggaactaagagatttctaatcctg

SEQ ID NO: 126374 - DNA, 80 bp, synthetic construct; identical to SEQ ID NO: 40299
  misc_feature 1..80: note = Artificially Synthesized Probe
  source 1..80: mol_type = other DNA

SEQ ID NO: 126375 - DNA, 80 bp, synthetic construct
  misc_feature 1..80: note = Artificially Synthesized Probe
  source 1..80: mol_type = other DNA
tatgaaggtaagaaaaaataaaactgtacgtttaaaggaggtttgaagcagcaggagttcagtgatttttaattgtgatg

SEQ ID NO: 126376 - DNA, 80 bp, synthetic construct; identical to SEQ ID NO: 40584
  misc_feature 1..80: note = Artificially Synthesized Probe
  source 1..80: mol_type = other DNA

SEQ ID NO: 126377 - DNA, 80 bp, synthetic construct
  misc_feature 1..80: note = Artificially Synthesized Probe
  source 1..80: mol_type = other DNA
atggaccaatacaaattgtttatggaataaggaatgactgaacagaaggcaggaaattcagatttgagtgattatcccca

SEQ ID NO: 126378 - DNA, 80 bp, synthetic construct
  misc_feature 1..80: note = Artificially Synthesized Probe
  source 1..80: mol_type = other DNA
taggcaggcctcaaattgattaaaagtaattgactttcttttttttttctaaaacatagaaggaaagaaagggaagggag

SEQ ID NO: 126379 - DNA, 80 bp, synthetic construct; identical to SEQ ID NO: 40585
  misc_feature 1..80: note = Artificially Synthesized Probe
  source 1..80: mol_type = other DNA

SEQ ID NO: 126380 - DNA, 80 bp, synthetic construct
  misc_feature 1..80: note = Artificially Synthesized Probe
  source 1..80: mol_type = other DNA
atgtggttcttccataacctcatttccgccctccacaatctccgctctgttttctgaggatggcagagccttcccgcctc

SEQ ID NO: 126381 - DNA, 80 bp, synthetic construct
  misc_feature 1..80: note = Artificially Synthesized Probe
  source 1..80: mol_type = other DNA
cccaagagcacagcactcgatgctctgagctcgcgcgtcccgcacacagggcactccttacccgggcttccagggagaca

SEQ ID NO: 126382 - DNA, 80 bp, synthetic construct
  misc_feature 1..80: note = Artificially Synthesized Probe
  source 1..80: mol_type = other DNA
ggagcatgagacaggaagtggcaggatccaggccaggcttgtgggagcagcagcccctccctcaggccagcagcccgcca

SEQ ID NO: 126383 - DNA, 80 bp, synthetic construct
  misc_feature 1..80: note = Artificially Synthesized Probe
  source 1..80: mol_type = other DNA
ggtgacagagctgctgtttctttctcattacgccatctttaaattttctgaaaactttcttttgacgatagaagattagg

SEQ ID NO: 126384 - DNA, 80 bp, synthetic construct
  misc_feature 1..80: note = Artificially Synthesized Probe
  source 1..80: mol_type = other DNA
ggcagttctggtgggggtgtcttccgtggtgcccagccctgggccgccccctccacgggcacgtaggtgaatcagggtgg

SEQ ID NO: 126385 - DNA, 80 bp, synthetic construct; identical to SEQ ID NO: 40586
  misc_feature 1..80: note = Artificially Synthesized Probe
  source 1..80: mol_type = other DNA

SEQ ID NO: 126386 - DNA, 80 bp, synthetic construct
  misc_feature 1..80: note = Artificially Synthesized Probe
  source 1..80: mol_type = other DNA
ctctcagaggtctgtctctgtctctgcctctctctgtctctctgtccctctctgtctctgtctctccctgtctctgtctc

SEQ ID NO: 126387 - DNA, 80 bp, synthetic construct
  misc_feature 1..80: note = Artificially Synthesized Probe
  source 1..80: mol_type = other DNA
tctctgtctctctctctctctctgtctctctctatctctgtctctatctctgtctctgtgtgtcctctctctctctctct

SEQ ID NO: 126388 - DNA, 80 bp, synthetic construct; identical to SEQ ID NO: 40587
  misc_feature 1..80: note = Artificially Synthesized Probe
  source 1..80: mol_type = other DNA

SEQ ID NO: 126389 - DNA, 80 bp, synthetic construct
  misc_feature 1..80: note = Artificially Synthesized Probe
  source 1..80: mol_type = other DNA
tgtctctgtctgtctctgtctctgtctctctctgtctctgtctctgtctctctctgtctctgtctctgtctctctctgtc

SEQ ID NO: 126390 - DNA, 80 bp, synthetic construct
  misc_feature 1..80: note = Artificially Synthesized Probe
  source 1..80: mol_type = other DNA
tttttctccctctgcagcctctcagtcgaggatcttttcttttcacctctgaggattattcgttttttttcattttgact

SEQ ID NO: 126391 - DNA, 80 bp, synthetic construct
  misc_feature 1..80: note = Artificially Synthesized Probe
  source 1..80: mol_type = other DNA
aatttgatttttctttcctttgtgtgtggagatttcataggctatcagagtttgtgatgaaaatgaacaggaggggcttc

SEQ ID NO: 126392 - DNA, 80 bp, synthetic construct; identical to SEQ ID NO: 40325
  misc_feature 1..80: note = Artificially Synthesized Probe
  source 1..80: mol_type = other DNA

SEQ ID NO: 126393 - DNA, 80 bp, synthetic construct
  misc_feature 1..80: note = Artificially Synthesized Probe
  source 1..80: mol_type = other DNA
cgctgtagaggaaagcggtgcagtgatggagggcgtctccctgtcctgcctgctggtggaggtgctggatcgctgtagag

SEQ ID NO: 126394 - DNA, 80 bp, synthetic construct
  misc_feature 1..80: note = Artificially Synthesized Probe
  source 1..80: mol_type = other DNA
gggcgtctccctgtcctgcctgctgctggaggtgctggatcgctgtagaggaaagcggtgcagtgatggagggcgtctcc

SEQ ID NO: 126395 - DNA, 80 bp, synthetic construct; identical to SEQ ID NO: 40588
  misc_feature 1..80: note = Artificially Synthesized Probe
  source 1..80: mol_type = other DNA

SEQ ID NO: 126396 - DNA, 80 bp, synthetic construct
  misc_feature 1..80: note = Artificially Synthesized Probe
  source 1..80: mol_type = other DNA
cagtgatggagggcgtctccctgtcctgccgtggaggtgctgaatcgctgtagaggaaagcagcgcagtgatggagggcg

SEQ ID NO: 126397 - DNA, 80 bp, synthetic construct
  misc_feature 1..80: note = Artificially Synthesized Probe
  source 1..80: mol_type = other DNA
ctccccattacaactaaacatgaaccaaagtcactgagttttcctgatgctgaaaggggagaactatcagtgacatcatt

SEQ ID NO: 126398 - DNA, 80 bp, synthetic construct; identical to SEQ ID NO: 40589
  misc_feature 1..80: note = Artificially Synthesized Probe
  source 1..80: mol_type = other DNA

SEQ ID NO: 126399 - DNA, 80 bp, synthetic construct
  misc_feature 1..80: note = Artificially Synthesized Probe
  source 1..80: mol_type = other DNA
gtctggtgagggcctgtcctgcattgcagatggcaccttctctctgtgtctccctgtggaggaaggggtgagggtctccc

SEQ ID NO: 126400 - DNA, 80 bp, synthetic construct
  misc_feature 1..80: note = Artificially Synthesized Probe
  source 1..80: mol_type = other DNA
gacttggggatgggagttgctagggacactccacttttaggaattaggccaaacttttccattactatggaagtcacact

SEQ ID NO: 126401 - DNA, 80 bp, synthetic construct
  misc_feature 1..80: note = Artificially Synthesized Probe
  source 1..80: mol_type = other DNA
tctcgcctcctctgctgcatggccacccctcctgttacctgctctgtgcttacctcagagaccaaatctccccatgctct

SEQ ID NO: 126402 - DNA, 80 bp, synthetic construct
  misc_feature 1..80: note = Artificially Synthesized Probe
  source 1..80: mol_type = other DNA
ctcacctcattctcagtcttatctggaaacgcaaaactatcctcctggctgaatggtttcctgttgtagagatttttatg

SEQ ID NO: 126403 - DNA, 80 bp, synthetic construct
  misc_feature 1..80: note = Artificially Synthesized Probe
  source 1..80: mol_type = other DNA
ttcccacactttatcatagctcagtatacgtggaaaatagtggagaaaagtacattagtaaaagtgattcaggcattatt

SEQ ID NO: 126404 - DNA, 80 bp, synthetic construct; identical to SEQ ID NO: 40590
  misc_feature 1..80: note = Artificially Synthesized Probe
  source 1..80: mol_type = other DNA

SEQ ID NO: 126405 - DNA, 80 bp, synthetic construct
  misc_feature 1..80: note = Artificially Synthesized Probe
  source 1..80: mol_type = other DNA
gtgtgtccctgccttaaccacttctggccttatgagtcaccttgggaaaattggtgaatctacatcctccttgatttctt

SEQ ID NO: 126406 - DNA, 80 bp, synthetic construct
  misc_feature 1..80: note = Artificially Synthesized Probe
  source 1..80: mol_type = other DNA
gctggttctttttatcctcgttttaaatgcagttgttagtaatctatgtgttatccgtcctcatttctcccaaaagtatt

SEQ ID NO: 126407 - DNA, 80 bp, synthetic construct
  misc_feature 1..80: note = Artificially Synthesized Probe
  source 1..80: mol_type = other DNA
agagtcggcttttactgcttttgtggttctgtaaagtccgtagcttacggttggcaggaaacattgacgggcggctcttt

SEQ ID NO: 126408 - DNA, 80 bp, synthetic construct; identical to SEQ ID NO: 40591
  misc_feature 1..80: note = Artificially Synthesized Probe
  source 1..80: mol_type = other DNA

SEQ ID NO: 126409 - DNA, 80 bp, synthetic construct
  misc_feature 1..80: note = Artificially Synthesized Probe
  source 1..80: mol_type = other DNA
accatttaataccattcactacactggaaaaaagaaaaaaaaaaaccttgctgtggattatgtgattaaatgataacttt

SEQ ID NO: 126410 - DNA, 80 bp, synthetic construct
  misc_feature 1..80: note = Artificially Synthesized Probe
  source 1..80: mol_type = other DNA
tatgtcattagaaaggtggatttggattttaaaatgaaggttgatccctggaagaggacctggaggactgttgaacacaa

SEQ ID NO: 126411 - DNA, 80 bp, synthetic construct
  misc_feature 1..80: note = Artificially Synthesized Probe
  source 1..80: mol_type = other DNA
gcggcatttccgttggaatcaccccatcagtatggaaagacacaggaaaccaaagctctgctaaatggaggtgcaaggcc

SEQ ID NO: 126412 - DNA, 80 bp, synthetic construct; identical to SEQ ID NO: 40592
  misc_feature 1..80: note = Artificially Synthesized Probe
  source 1..80: mol_type = other DNA

SEQ ID NO: 126413 - DNA, 80 bp, synthetic construct
  misc_feature 1..80: note = Artificially Synthesized Probe
  source 1..80: mol_type = other DNA
cttaaaatgtgtttgttttttcaaacatgaggaatttgagcccataatcaagcccattagacacacttcacagcacctgt

SEQ ID NO: 126414 - DNA, 80 bp, synthetic construct
  misc_feature 1..80: note = Artificially Synthesized Probe
  source 1..80: mol_type = other DNA
cactgaaagaggttctgcggtgttttctcctaagttaattctgcatttgcccttaacaacaaaaccaaaccaaacataca

SEQ ID NO: 126415 - DNA, 80 bp, synthetic construct
  misc_feature 1..80: note = Artificially Synthesized Probe
  source 1..80: mol_type = other DNA
ataaacttaaggaggtataaattttccctgtcttgtttttaattctccgcttatcaagtaataagattcaaccttctagg

SEQ ID NO: 126416 - DNA, 80 bp, synthetic construct
  misc_feature 1..80: note = Artificially Synthesized Probe
  source 1..80: mol_type = other DNA
aggactaacagcctgtccagctgatggctgctatgccgaggccacggatgggtggaggacagtcggcccctggctggtgt

SEQ ID NO: 126417 - DNA, 80 bp, synthetic construct; identical to SEQ ID NO: 40593
  misc_feature 1..80: note = Artificially Synthesized Probe
  source 1..80: mol_type = other DNA

SEQ ID NO: 126418 - DNA, 80 bp, synthetic construct
  misc_feature 1..80: note = Artificially Synthesized Probe
  source 1..80: mol_type = other DNA
cttgtataaaatataaacaagttccctggtgattcttctgctcatactggtgccgctattaaagttctgctgggtgtaag

SEQ ID NO: 126419 - DNA, 80 bp, synthetic construct
  misc_feature 1..80: note = Artificially Synthesized Probe
  source 1..80: mol_type = other DNA
cagtgtccaggcctttctgcgactcaaggctggggtctgagtgtctgagtgctgcactgtgtggactgagtgctgtacca

SEQ ID NO: 126420 - DNA, 80 bp, synthetic construct; identical to SEQ ID NO: 40594
  misc_feature 1..80: note = Artificially Synthesized Probe
  source 1..80: mol_type = other DNA

SEQ ID NO: 126421 - DNA, 80 bp, synthetic construct
  misc_feature 1..80: note = Artificially Synthesized Probe
  source 1..80: mol_type = other DNA
tctgggcttccttttatcaacagatctcaacattttctcacgttacttagaaattactgctgtgtcccgggccctgagcc

SEQ ID NO: 126422 - DNA, 80 bp, synthetic construct
  misc_feature 1..80: note = Artificially Synthesized Probe
  source 1..80: mol_type = other DNA
ggctactgtgtccagaattggtgggttcttggtctcactgacttcaagaacgaagccgcggaccctcgcggtgagtgtta

SEQ ID NO: 126423 - DNA, 80 bp, synthetic construct
  misc_feature 1..80: note = Artificially Synthesized Probe
  source 1..80: mol_type = other DNA
tttgttcctcctggtgggctcgtggtctctctggcttcaggagtgaagctgcagacctctgtgatgagtgttacagctca

SEQ ID NO: 126424 - DNA, 80 bp, synthetic construct
  misc_feature 1..80: note = Artificially Synthesized Probe
  source 1..80: mol_type = other DNA
gattggtagagcctagtggtctgttttgacagggtgctgattggtgcgtttacaatccctgagctagatacaaaggttct

SEQ ID NO: 126425 - DNA, 80 bp, synthetic construct; identical to SEQ ID NO: 40595
  misc_feature 1..80: note = Artificially Synthesized Probe
  source 1..80: mol_type = other DNA

SEQ ID NO: 126426 - DNA, 80 bp, synthetic construct
  misc_feature 1..80: note = Artificially Synthesized Probe
  source 1..80: mol_type = other DNA
ttatgcacaaaaggagttctgaaattctgagtacaggtaagtctcgcaatgagaagatggctgagtcttagtctcatgtt

SEQ ID NO: 126427 - DNA, 80 bp, synthetic construct
  misc_feature 1..80: note = Artificially Synthesized Probe
  source 1..80: mol_type = other DNA
gggggtgggaggctcaggcgtggcgggctgcaggtcctaagtcctgccccgccggaaggcagccaaggcccagtgagaaa

SEQ ID NO: 126428 - DNA, 80 bp, synthetic construct
  misc_feature 1..80: note = Artificially Synthesized Probe
  source 1..80: mol_type = other DNA
ccgcaagcgccgcacgcagcccccgttcccgctcgtgcctctccctccacacctccctgcaagctgagggagtggactcc

SEQ ID NO: 126429 - DNA, 80 bp, synthetic construct
  misc_feature 1..80: note = Artificially Synthesized Probe
  source 1..80: mol_type = other DNA
cattgttttaatgatgaagttttattctttgaaatggaaaaaggaaacaaagatcagtgagcaaacttaggcatgctgtt

SEQ ID NO: 126430 - DNA, 80 bp, synthetic construct; identical to SEQ ID NO: 40596
  misc_feature 1..80: note = Artificially Synthesized Probe
  source 1..80: mol_type = other DNA

SEQ ID NO: 126431 - DNA, 80 bp, synthetic construct
  misc_feature 1..80: note = Artificially Synthesized Probe
  source 1..80: mol_type = other DNA
acgcagataaccattccaccttgtgggcagcgcagtgcccagatccatgggtcccaccttacggatagcacagtgccctg

SEQ ID NO: 126432 - DNA, 80 bp, synthetic construct
  misc_feature 1..80: note = Artificially Synthesized Probe
  source 1..80: mol_type = other DNA
gaaatgacagtgcctcttccatagggtcactgcaggggtgaaatagatctgaaacataagttacttaggataatgacagt

SEQ ID NO: 126433 - DNA, 80 bp, synthetic construct
  misc_feature 1..80: note = Artificially Synthesized Probe
  source 1..80: mol_type = other DNA
acttaggataatgacagtgcctcttccatagggtcactgcgagggtgaaatagatccgaaaggtgaattacttaggataa

SEQ ID NO: 126434 - DNA, 80 bp, synthetic construct; identical to SEQ ID NO: 40597
  misc_feature 1..80: note = Artificially Synthesized Probe
  source 1..80: mol_type = other DNA

SEQ ID NO: 126435 - DNA, 80 bp, synthetic construct
  misc_feature 1..80: note = Artificially Synthesized Probe
  source 1..80: mol_type = other DNA
atatgaccagttcttataatcaggtgacatgccccgcagtgtgggtatgaaaggaagcacaagccattcaatgcagcact

SEQ ID NO: 126436 - DNA, 80 bp, synthetic construct
  misc_feature 1..80: note = Artificially Synthesized Probe
  source 1..80: mol_type = other DNA
tattatgtattcattttaaaaaatgagcacttggtgtgttgcaggctccctgcgttgaggattggatgtgtgtaaaccaa

SEQ ID NO: 126437 - DNA, 80 bp, synthetic construct
  misc_feature 1..80: note = Artificially Synthesized Probe
  source 1..80: mol_type = other DNA
gcgtggctgagatagggtggagtcagtcctaccagcaggcagcaggcagaggggagtgtagacaccaccttcccgtgaca

SEQ ID NO: 126438 - DNA, 80 bp, synthetic construct
  misc_feature 1..80: note = Artificially Synthesized Probe
  source 1..80: mol_type = other DNA
tcgtgatggctccacggcaagatgcatggacgtgcacagcattcctgaaggctgcttcctgttcttcccatccataggga

SEQ ID NO: 126439 - DNA, 80 bp, synthetic construct; identical to SEQ ID NO: 40598
  misc_feature 1..80: note = Artificially Synthesized Probe
  source 1..80: mol_type = other DNA

SEQ ID NO: 126440 - DNA, 80 bp, synthetic construct
  misc_feature 1..80: note = Artificially Synthesized Probe
  source 1..80: mol_type = other DNA
ctcagcctcccaagcagctgggactacaggcccgccaccatgcctggctatgttttgtatttttagtagagacggggttt

SEQ ID NO: 126441 - DNA, 80 bp, synthetic construct
  misc_feature 1..80: note = Artificially Synthesized Probe
  source 1..80: mol_type = other DNA
tctttattaatatttaatatggactatttagaaatgccactgcatgacagggaagtagaaaaaatatatttttctaaatt

SEQ ID NO: 126442 - DNA, 80 bp, synthetic construct; identical to SEQ ID NO: 40599
  misc_feature 1..80: note = Artificially Synthesized Probe
  source 1..80: mol_type = other DNA

SEQ ID NO: 126443 - DNA, 80 bp, synthetic construct
  misc_feature 1..80: note = Artificially Synthesized Probe
  source 1..80: mol_type = other DNA
aaaaggcgatttacacattttgactttctccggcattgaagctttgacgagcaattaagaattctcagtttttagggtca

SEQ ID NO: 126444 - DNA, 80 bp, synthetic construct
  misc_feature 1..80: note = Artificially Synthesized Probe
  source 1..80: mol_type = other DNA
gtgattggtttccgctgaaacagatgatttgaaaaagggtcaaatctgttgaggtgtgttttgtgacaggaagattccca

SEQ ID NO: 126445 - DNA, 80 bp, synthetic construct
  misc_feature 1..80: note = Artificially Synthesized Probe
  source 1..80: mol_type = other DNA
gcgcaggaagaacggcttaaacagactggctgtcctccacaggaggtggagacctgagcacgtaacttcaattccttaat

SEQ ID NO: 126446 - DNA, 80 bp, synthetic construct
  misc_feature 1..80: note = Artificially Synthesized Probe
  source 1..80: mol_type = other DNA
tttctagagtataagtctattttcagttttctctttggaattgaaaaattctctaagggcacgaggaaaccctgggagga

SEQ ID NO: 126447 - DNA, 80 bp, synthetic construct; identical to SEQ ID NO: 40600
  misc_feature 1..80: note = Artificially Synthesized Probe
  source 1..80: mol_type = other DNA

SEQ ID NO: 126448 - DNA, 80 bp, synthetic construct; identical to SEQ ID NO: 40326
  misc_feature 1..80: note = Artificially Synthesized Probe
  source 1..80: mol_type = other DNA

SEQ ID NO: 126449 - DNA, 80 bp, synthetic construct
  misc_feature 1..80: note = Artificially Synthesized Probe
  source 1..80: mol_type = other DNA
cagacgtgcctgaaagcagattgcgtgacttacactagttacccggcttctataacaataaaccaaacagtgaaccaaca

SEQ ID NO: 126450 - DNA, 80 bp, synthetic construct
  misc_feature 1..80: note = Artificially Synthesized Probe
  source 1..80: mol_type = other DNA
cgggcttacaaataactttgtttcagttatcccatttgttcctctcagtattcctattttgtggtacggttggcatttga

SEQ ID NO: 126451 - DNA, 80 bp, synthetic construct
  misc_feature 1..80: note = Artificially Synthesized Probe
  source 1..80: mol_type = other DNA
acgtgcattcactgcctcagggggcaaagctgatgatctttctcaagaccacagcatcgataaagggtccttcatggagc

SEQ ID NO: 126452 - DNA, 80 bp, synthetic construct; identical to SEQ ID NO: 40601
  misc_feature 1..80: note = Artificially Synthesized Probe
  source 1..80: mol_type = other DNA

SEQ ID NO: 126453 - DNA, 80 bp, synthetic construct
  misc_feature 1..80: note = Artificially Synthesized Probe
  source 1..80: mol_type = other DNA
cctaccccactctgccctgaggtccctacaggccccaccaggcacccccgattcatgagagggggcgcccctaccccatg

SEQ ID NO: 126454 - DNA, 80 bp, synthetic construct
  misc_feature 1..80: note = Artificially Synthesized Probe
  source 1..80: mol_type = other DNA
ccaccaggcacccccgattcatgagagggggcgcccctaccccatgctgccctgaggtccctgcaggccccaccaggcac

SEQ ID NO: 126455 - DNA, 80 bp, synthetic construct
  misc_feature 1..80: note = Artificially Synthesized Probe
  source 1..80: mol_type = other DNA
ccttacccccacgctgccccaggatccctgcaggccccctagtctagctggatccaggaaaagctgcccctggcccacac

SEQ ID NO: 126456 - DNA, 80 bp, synthetic construct; identical to SEQ ID NO: 40602
  misc_feature 1..80: note = Artificially Synthesized Probe
  source 1..80: mol_type = other DNA

SEQ ID NO: 126457 - DNA, 80 bp, synthetic construct
  misc_feature 1..80: note = Artificially Synthesized Probe
  source 1..80: mol_type = other DNA
acttgacccagctgtttattaaccactagattaaggtcagccttgctttgtatatgtcgcaccagttaacatgaacaaat

SEQ ID NO: 126458 - DNA, 80 bp, synthetic construct
  misc_feature 1..80: note = Artificially Synthesized Probe
  source 1..80: mol_type = other DNA
tgaagtgtaaaaattaatttattatagcagacatccaggaccaaaggccccacgggaagcgatggatcctgagggacagg

SEQ ID NO: 126459 - DNA, 80 bp, synthetic construct
  misc_feature 1..80: note = Artificially Synthesized Probe
  source 1..80: mol_type = other DNA
ggaaggcagggtggggtttgaaggaggaatgggagcttgcccgtcgggctgtgcccagccttgctggccatgttggtcac

SEQ ID NO: 126460 - DNA, 80 bp, synthetic construct; identical to SEQ ID NO: 40603
  misc_feature 1..80: note = Artificially Synthesized Probe
  source 1..80: mol_type = other DNA

SEQ ID NO: 126461 - DNA, 80 bp, synthetic construct
  misc_feature 1..80: note = Artificially Synthesized Probe
  source 1..80: mol_type = other DNA
taattagaatgagaatgacccctagacagggatgtcagctttttaaaagaatgacttttaaaatagcaaactctggtctg

SEQ ID NO: 126462 - DNA, 80 bp, synthetic construct
  misc_feature 1..80: note = Artificially Synthesized Probe
  source 1..80: mol_type = other DNA
tgtttgctttgttctgtattttatcttcagttagctgcttgagaccatggaggtattatgagtcatatacattaatatgc

SEQ ID NO: 126463 - DNA, 80 bp, synthetic construct
  misc_feature 1..80: note = Artificially Synthesized Probe
  source 1..80: mol_type = other DNA
caccatgcccggctaatttttgtatttttcgtagagatgggacttcaccatgttggccaggctgatttcgaactcctgac

SEQ ID NO: 126464 - DNA, 80 bp, synthetic construct
  misc_feature 1..80: note = Artificially Synthesized Probe
  source 1..80: mol_type = other DNA
aatattgcatgacagggaagaactactgaatttgagacggttggttgttaatactttgccatgattgagttctcagcaag

SEQ ID NO: 126465 - DNA, 80 bp, synthetic construct; identical to SEQ ID NO: 40604
  misc_feature 1..80: note = Artificially Synthesized Probe
  source 1..80: mol_type = other DNA

SEQ ID NO: 126466 - DNA, 80 bp, synthetic construct
  misc_feature 1..80: note = Artificially Synthesized Probe
  source 1..80: mol_type = other DNA
cagcctcgaaactcacggaggcaggcccgctcccgtcgctgcggggcctcctggacagctctctccctccccaggtggaa

SEQ ID NO: 126467 - DNA, 80 bp, synthetic construct
  misc_feature 1..80: note = Artificially Synthesized Probe
  source 1..80: mol_type = other DNA
cattcgtgcatgaaaaataatggagacatcatgtttctgatgatttatgattaacccgaaacagaaaatcatgtacttgt

SEQ ID NO: 126468 - DNA, 80 bp, synthetic construct
  misc_feature 1..80: note = Artificially Synthesized Probe
  source 1..80: mol_type = other DNA
ctctttctctccacacacatatacagaaatagttatatgtcataattttatattttacccaaatgcattgatacagtgtg

SEQ ID NO: 126469 - DNA, 80 bp, synthetic construct; identical to SEQ ID NO: 40605
  misc_feature 1..80: note = Artificially Synthesized Probe
  source 1..80: mol_type = other DNA

SEQ ID NO: 126470 - DNA, 80 bp, synthetic construct
  misc_feature 1..80: note = Artificially Synthesized Probe
  source 1..80: mol_type = other DNA
ctctgttccttcgcagcctggaggctgcagaggctgggtccagcttgcagactggccaggcgtggcccaccctgcggccc

SEQ ID NO: 126471 - DNA, 80 bp, synthetic construct
  misc_feature 1..80: note = Artificially Synthesized Probe
  source 1..80: mol_type = other DNA
ctttttctgctctcctttaaaaagacatttgcttttctcaagaccgggaacaaatcagccctacttatgcaaatgtgtgg

SEQ ID NO: 126472 - DNA, 80 bp, synthetic construct
  misc_feature 1..80: note = Artificially Synthesized Probe
  source 1..80: mol_type = other DNA
aagcagagaaggaagtaccaggaccttcctaacattgtagttttcaaacgcaacactttaaattccaaagttatctcaat

SEQ ID NO: 126473 - DNA, 80 bp, synthetic construct; identical to SEQ ID NO: 40606
  misc_feature 1..80: note = Artificially Synthesized Probe
  source 1..80: mol_type = other DNA

SEQ ID NO: 126474 - DNA, 80 bp, synthetic construct
  misc_feature 1..80: note = Artificially Synthesized Probe
  source 1..80: mol_type = other DNA
aagtgtaacttcacttacataaatgctgatatttgaaaaagaggaattgaagcctgctagtaaagttgttttctactgct

SEQ ID NO: 126475 - DNA, 80 bp, synthetic construct
  misc_feature 1..80: note = Artificially Synthesized Probe
  source 1..80: mol_type = other DNA
acagatgaagatggcgaacaaatgctgctctccttccgaccaggtagggtttgtattttctgcttcatgatgtaacacat

SEQ ID NO: 126476 - DNA, 80 bp, synthetic construct
  misc_feature 1..80: note = Artificially Synthesized Probe
  source 1..80: mol_type = other DNA
tggtggtctctgccctgcctgttaattctataaaactgctctttctgtgggaatagcataggtcattctgatctcctgtg

SEQ ID NO: 126477 - DNA, 80 bp, synthetic construct; identical to SEQ ID NO: 40607
  misc_feature 1..80: note = Artificially Synthesized Probe
  source 1..80: mol_type = other DNA

SEQ ID NO: 126478 - DNA, 80 bp, synthetic construct
  misc_feature 1..80: note = Artificially Synthesized Probe
  source 1..80: mol_type = other DNA
aaaactctatggtaatcaagctgtttcaatatcagccaaatcagtttttaagccactgtgttattcttctgtttccttta

SEQ ID NO: 126479 - DNA, 80 bp, synthetic construct
  misc_feature 1..80: note = Artificially Synthesized Probe
  source 1..80: mol_type = other DNA
aagactttaaatagtgcttagcaagaatatttgaattcacgatggaggacttgagaagagcaggtcctctgcctatgaaa

SEQ ID NO: 126480 - DNA, 80 bp, synthetic construct
  misc_feature 1..80: note = Artificially Synthesized Probe
  source 1..80: mol_type = other DNA
agatattttatgattaatatttctataaattcttcaaattaatataggattcatttcatattcttatacataaaatatca

SEQ ID NO: 126481 - DNA, 80 bp, synthetic construct
  misc_feature 1..80: note = Artificially Synthesized Probe
  source 1..80: mol_type = other DNA
catcttattcacacacgcaaaattagcaaaatgtttcctgagatcctctttatggcaaagctgagactcttccgagatct

SEQ ID NO: 126482 - DNA, 80 bp, synthetic construct
  misc_feature 1..80: note = Artificially Synthesized Probe
  source 1..80: mol_type = other DNA
tatgttaaatacattatgaaagaattatgccacattttgttaataattaagtatataaataattaagtatataaaaacaa

SEQ ID NO: 126483 - DNA, 80 bp, synthetic construct; identical to SEQ ID NO: 40608
  misc_feature 1..80: note = Artificially Synthesized Probe
  source 1..80: mol_type = other DNA

SEQ ID NO: 126484 - DNA, 80 bp, synthetic construct
  misc_feature 1..80: note = Artificially Synthesized Probe
  source 1..80: mol_type = other DNA
actcatcatttaacattaagtatatctccaaatgctatccttcaccctctccccaccccttaatcctccttatcatcaac

SEQ ID NO: 126485 - DNA, 80 bp, synthetic construct
  misc_feature 1..80: note = Artificially Synthesized Probe
  source 1..80: mol_type = other DNA
taagccttgtgtatttcacatcgatcttggtggccttgtttgacaaagcaaaaagccaaaggcaaaccctggacctgata

SEQ ID NO: 126486 - DNA, 80 bp, synthetic construct; identical to SEQ ID NO: 40609
  misc_feature 1..80: note = Artificially Synthesized Probe
  source 1..80: mol_type = other DNA

SEQ ID NO: 126487 - DNA, 80 bp, synthetic construct
  misc_feature 1..80: note = Artificially Synthesized Probe
  source 1..80: mol_type = other DNA
gtgagataattgttaatgtgaaaaatgcgaattttatgtcaaaaaaatttatgtgaaaggataaataaaggtgtttaaca

SEQ ID NO: 126488 - DNA, 80 bp, synthetic construct
  misc_feature 1..80: note = Artificially Synthesized Probe
  source 1..80: mol_type = other DNA
catacaaaccagagcacttttgtctgggacaaagactaacctgaaaacattaccaagataactgcaaacaaacatatgct

SEQ ID NO: 126489 - DNA, 80 bp, synthetic construct
  misc_feature 1..80: note = Artificially Synthesized Probe
  source 1..80: mol_type = other DNA
tgcagaaaaccctaaataacacaggtaattctggctttttctagctaaaggaaaagaccagctgcatgttatcatctggt

SEQ ID NO: 126490 - DNA, 80 bp, synthetic construct
  misc_feature 1..80: note = Artificially Synthesized Probe
  source 1..80: mol_type = other DNA
tttgtttttttccaacatgggatgttaaaattgccttgttttctgaatggtgtatgtggagcaacagcttcttgtctctg

SEQ ID NO: 126491 - DNA, 80 bp, synthetic construct
  misc_feature 1..80: note = Artificially Synthesized Probe
  source 1..80: mol_type = other DNA
aggtggtacagtcagggagatgtttctaaaagtataatacacacttcttggaatgtgtaattagaaaattcataatgtag

SEQ ID NO: 126492 - DNA, 80 bp, synthetic construct; identical to SEQ ID NO: 40610
  misc_feature 1..80: note = Artificially Synthesized Probe
  source 1..80: mol_type = other DNA

SEQ ID NO: 126493 - DNA, 80 bp, synthetic construct
  misc_feature 1..80: note = Artificially Synthesized Probe
  source 1..80: mol_type = other DNA
attccagctggtacctgcagctcctcagaaacagagtaactctgctcaatcagaattagatggtaattccacccttgatc

SEQ ID NO: 126494 - DNA, 80 bp, synthetic construct
  misc_feature 1..80: note = Artificially Synthesized Probe
  source 1..80: mol_type = other DNA
ttagatattcctgagtgttacggccgttagattaagttcctgcacatcagtttcctattcatagttcatcccttgtgaaa

SEQ ID NO: 126495 - DNA, 80 bp, synthetic construct; identical to SEQ ID NO: 40327
  misc_feature 1..80: note = Artificially Synthesized Probe
  source 1..80: mol_type = other DNA

SEQ ID NO: 126496 - DNA, 80 bp, synthetic construct
  misc_feature 1..80: note = Artificially Synthesized Probe
  source 1..80: mol_type = other DNA
cgtctctactaaaaatacaaaaattagccgggcgtggtggcacgcgcctgtaatcccagctacctgggaggctgaggcag

SEQ ID NO: 126497 - DNA, 80 bp, synthetic construct; identical to SEQ ID NO: 40611
  misc_feature 1..80: note = Artificially Synthesized Probe
  source 1..80: mol_type = other DNA

SEQ ID NO: 126498 - DNA, 80 bp, synthetic construct
  misc_feature 1..80: note = Artificially Synthesized Probe
  source 1..80: mol_type = other DNA
ggatattggtgtgactcctcgtaataaatatggggtcaaaccagactttttgtgcttgttgctgattcttaaaagtttgc

SEQ ID NO: 126499 - DNA, 80 bp, synthetic construct
  misc_feature 1..80: note = Artificially Synthesized Probe
  source 1..80: mol_type = other DNA
tggtcccagctactcgggaggctgaggcaggagaatggcgtgaacctgggaggcagagcttgcagtgagccaagattgca

SEQ ID NO: 126500 - DNA, 80 bp, synthetic construct; identical to SEQ ID NO: 40612
  misc_feature 1..80: note = Artificially Synthesized Probe
  source 1..80: mol_type = other DNA

SEQ ID NO: 126501 - DNA, 80 bp, synthetic construct
  misc_feature 1..80: note = Artificially Synthesized Probe
  source 1..80: mol_type = other DNA
agatgggaattgaacaatgagaacacatggacacaggaaggggaacatcacactctggggactgttgtcgggtgggggga

SEQ ID NO: 126502 - DNA, 80 bp, synthetic construct
  misc_feature 1..80: note = Artificially Synthesized Probe
  source 1..80: mol_type = other DNA
aataagtcctcctcaagagctttagcaaggcactcaaatgtgcgtaagatgacctgggcagcctgctcagggccatgtgc

SEQ ID NO: 126503 - DNA, 80 bp, synthetic construct
  misc_feature 1..80: note = Artificially Synthesized Probe
  source 1..80: mol_type = other DNA
tagtgagctggaattaatcacgcattgaattcatgttaattatggaaacatcaagcatctgctaaatttgctagaaaaag

SEQ ID NO: 126504 - DNA, 80 bp, synthetic construct
  misc_feature 1..80: note = Artificially Synthesized Probe
  source 1..80: mol_type = other DNA
ggagtaaattacacatcagtggcttttccaggtatgaatgtccctggcatttgcccccagctagtgccttatgagggatt

SEQ ID NO: 126505 - DNA, 80 bp, synthetic construct; identical to SEQ ID NO: 40613
  misc_feature 1..80: note = Artificially Synthesized Probe
  source 1..80: mol_type = other DNA

SEQ ID NO: 126506 - DNA, 80 bp, synthetic construct
  misc_feature 1..80: note = Artificially Synthesized Probe
  source 1..80: mol_type = other DNA
aacgattctgtttcctatggatctgtgtggaagatagtactagaaggaaatatggtatttctaagtcattgggactctgc

SEQ ID NO: 126507 - DNA, 80 bp, synthetic construct
  misc_feature 1..80: note = Artificially Synthesized Probe
  source 1..80: mol_type = other DNA
ctttcccattgctagaaataccgtttgtagaaatctgattctgtcctctagcatctcgacttcccaggaagtctctccag

SEQ ID NO: 126508 - DNA, 80 bp, synthetic construct
  misc_feature 1..80: note = Artificially Synthesized Probe
  source 1..80: mol_type = other DNA
cccagctggttctcaacttttaatagctcatcggtcagtgtcatttggtaaagtggttgggatctctgtgataacttatt

SEQ ID NO: 126509 - DNA, 80 bp, synthetic construct
  misc_feature 1..80: note = Artificially Synthesized Probe
  source 1..80: mol_type = other DNA
tgaattcactgaattcttaaattggattattatttaaatgtttttgaatcatattctgattttgataggttggattttat

SEQ ID NO: 126510 - DNA, 80 bp, synthetic construct; identical to SEQ ID NO: 40614
  misc_feature 1..80: note = Artificially Synthesized Probe
  source 1..80: mol_type = other DNA

SEQ ID NO: 126511 - DNA, 80 bp, synthetic construct
  misc_feature 1..80: note = Artificially Synthesized Probe
  source 1..80: mol_type = other DNA
tgattctgggtgtgttgacctgatgggatcatggcttgctcatgtgcttaactctgctgctgtgacagtatgccctcatt

SEQ ID NO: 126512 - DNA, 80 bp, synthetic construct
  misc_feature 1..80: note = Artificially Synthesized Probe
  source 1..80: mol_type = other DNA
ccgtccttctacgttttcagcactcctccggtaaggatgcttttgacactccacagggaggggctgctgggagggctatt

SEQ ID NO: 126513 - DNA, 80 bp, synthetic construct
  misc_feature 1..80: note = Artificially Synthesized Probe
  source 1..80: mol_type = other DNA
aaatagccattaagatattgtagagcttattccttcctcaaattccagctggtttggaggtgggatgcagaggctctgtg

SEQ ID NO: 126514 - DNA, 80 bp, synthetic construct; identical to SEQ ID NO: 40615
  misc_feature 1..80: note = Artificially Synthesized Probe
  source 1..80: mol_type = other DNA

SEQ ID NO: 126515 - DNA, 80 bp, synthetic construct
  misc_feature 1..80: note = Artificially Synthesized Probe
  source 1..80: mol_type = other DNA
tttctacagagctcacattttactacctgatgcttatctgaaattttagcttcatacaagccatccagtatgtgtaagta

SEQ ID NO: 126516 - DNA, 80 bp, synthetic construct
  misc_feature 1..80: note = Artificially Synthesized Probe
  source 1..80: mol_type = other DNA
aaaggaaatgaaaagataaaaccaagttttacctccagacatcaagacagtaataccctgcctgtcttttcgttgataag

SEQ ID NO: 126517 - DNA, 80 bp, synthetic construct
  misc_feature 1..80: note = Artificially Synthesized Probe
  source 1..80: mol_type = other DNA
gcagcattactaaccacacttcgccctccagtcaaacttcagtttttctactaatgcactttttctgccccagagataac

SEQ ID NO: 126518 - DNA, 80 bp, synthetic construct
  misc_feature 1..80: note = Artificially Synthesized Probe
  source 1..80: mol_type = other DNA
ttcaagtcccagaggtgaacgtctgattggctgggctgattttgtttttgagcagagctaagatattcatgccagctcat

SEQ ID NO: 126519 - DNA, 80 bp, synthetic construct; identical to SEQ ID NO: 40616
  misc_feature 1..80: note = Artificially Synthesized Probe
  source 1..80: mol_type = other DNA

SEQ ID NO: 126520 - DNA, 80 bp, synthetic construct
  misc_feature 1..80: note = Artificially Synthesized Probe
  source 1..80: mol_type = other DNA
ctcctttgtagcttgtagtgcacttctgtccattatataatttgattcttgagacaactgaaggcccctcattttagtga

SEQ ID NO: 126521 - DNA, 80 bp, synthetic construct
  misc_feature 1..80: note = Artificially Synthesized Probe
  source 1..80: mol_type = other DNA
agtcttgcttttacagatgaaggtcatgtgtaaataaaatagtaaacaaatatacttgaccgaggattgttttggataat

SEQ ID NO: 126522 - DNA, 80 bp, synthetic construct
  misc_feature 1..80: note = Artificially Synthesized Probe
  source 1..80: mol_type = other DNA
ccggtgggaaccacctaagtatgtggcctgtcattgttcttcttgatacttgctctcataatttgtttgaaactggctga

SEQ ID NO: 126523 - DNA, 80 bp, synthetic construct; identical to SEQ ID NO: 40617
  misc_feature 1..80: note = Artificially Synthesized Probe
  source 1..80: mol_type = other DNA

SEQ ID NO: 126524 - DNA, 80 bp, synthetic construct
  misc_feature 1..80: note = Artificially Synthesized Probe
  source 1..80: mol_type = other DNA
ccaaagccacaggaccagccgtgcgtgccgggaagccaaagtcacatttctatgtgtccaggaaggaactggaaatcgca

SEQ ID NO: 126525 - DNA, 80 bp, synthetic construct
  misc_feature 1..80: note = Artificially Synthesized Probe
  source 1..80: mol_type = other DNA
tggtcatttaaactatttgaaaacaataaaaaactagcagacaaaccctgtatgtttcctctggcaacatctgcttgtcc

SEQ ID NO: 126526 - DNA, 80 bp, synthetic construct
  misc_feature 1..80: note = Artificially Synthesized Probe
  source 1..80: mol_type = other DNA
cattaacgggttagataataaaggatagtagcttcttttccccatccatgctgtcagtactacgttccagatacctagga

SEQ ID NO: 126527 - DNA, 80 bp, synthetic construct
  misc_feature 1..80: note = Artificially Synthesized Probe
  source 1..80: mol_type = other DNA
tgactcatctctctgtctctttctgtcgtctccttctctgcccactctttgctcctctcaaggtctctctctttctccat

SEQ ID NO: 126528 - DNA, 80 bp, synthetic construct
  misc_feature 1..80: note = Artificially Synthesized Probe
  source 1..80: mol_type = other DNA
tctttctctctgtctctccttctctgcccactctttgctcttctcgaggtctcttcctttacttgctttccagtccctca

SEQ ID NO: 126529 - DNA, 80 bp, synthetic construct; identical to SEQ ID NO: 40618
  misc_feature 1..80: note = Artificially Synthesized Probe
  source 1..80: mol_type = other DNA

SEQ ID NO: 126530 - DNA, 80 bp, synthetic construct
  misc_feature 1..80: note = Artificially Synthesized Probe
  source 1..80: mol_type = other DNA
tacgcatccatccaaaatggtcattgacagtttagctgcccagatctctgaaatataaaaattttgttatcctcaagtaa

SEQ ID NO: 126531 - DNA, 80 bp, synthetic construct
  misc_feature 1..80: note = Artificially Synthesized Probe
  source 1..80: mol_type = other DNA
acacacaccacacacacaccactcatgcacacaccacacgcacaccacatgcacacaccacacacatgcacataccacac

SEQ ID NO: 126532 - DNA, 80 bp, synthetic construct
  misc_feature 1..80: note = Artificially Synthesized Probe
  source 1..80: mol_type = other DNA
ccatgcacaccacacacacaacacaaatagacacacaccccccacaggcacacaccacacacacactacacgcacaccac

SEQ ID NO: 126533 - DNA, 80 bp, synthetic construct; identical to SEQ ID NO: 40619
  misc_feature 1..80: note = Artificially Synthesized Probe
  source 1..80: mol_type = other DNA

SEQ ID NO: 126534 - DNA, 80 bp, synthetic construct
  misc_feature 1..80: note = Artificially Synthesized Probe
  source 1..80: mol_type = other DNA
actggatccttgatgatccacgagaaagaagccactcatttcttctggatctggataatttgtactttttcagtggtaat

SEQ ID NO: 126535 - DNA, 80 bp, synthetic construct
  misc_feature 1..80: note = Artificially Synthesized Probe
  source 1..80: mol_type = other DNA
tcacctgtaaaatgagaatagaggactgtaaatgcctacctgagagggttgtagggagattaaggaaggatgattagtac

SEQ ID NO: 126536 - DNA, 80 bp, synthetic construct; identical to SEQ ID NO: 40620
  misc_feature 1..80: note = Artificially Synthesized Probe
  source 1..80: mol_type = other DNA

SEQ ID NO: 126537 - DNA, 80 bp, synthetic construct
  misc_feature 1..80: note = Artificially Synthesized Probe
  source 1..80: mol_type = other DNA
tctaacagacaaaatcatgtattagtattcaccaacttctcattgcaaaatcaatacacacaatatggtgaataaattta

SEQ ID NO: 126538 - DNA, 80 bp, synthetic construct; identical to SEQ ID NO: 40328
  misc_feature 1..80: note = Artificially Synthesized Probe
  source 1..80: mol_type = other DNA

SEQ ID NO: 126539 - DNA, 80 bp, synthetic construct
  misc_feature 1..80: note = Artificially Synthesized Probe
  source 1..80: mol_type = other DNA
taaacatgaggtttttggatcagagacaggttgttaattactcacagaacgtctcaatgctggttccccatccctgcccc

SEQ ID NO: 126540 - DNA, 80 bp, synthetic construct
  misc_feature 1..80: note = Artificially Synthesized Probe
  source 1..80: mol_type = other DNA
cgaggtctctcttccatcacactttggaatataaaccaaaggcttcaggggccatccgtgtaaatgtccctgaatgattc

SEQ ID NO: 126541 - DNA, 80 bp, synthetic construct
  misc_feature 1..80: note = Artificially Synthesized Probe
  source 1..80: mol_type = other DNA
aggacccaaagattatcatggcaacttaggaaaaactaaaaggtaaagtccttctttgaacggtggcttttgatctcgtt

SEQ ID NO: 126542 - DNA, 80 bp, synthetic construct; identical to SEQ ID NO: 40621
  misc_feature 1..80: note = Artificially Synthesized Probe
  source 1..80: mol_type = other DNA

SEQ ID NO: 126543 - DNA, 80 bp, synthetic construct
  misc_feature 1..80: note = Artificially Synthesized Probe
  source 1..80: mol_type = other DNA
ggggaagtaggcacatcttacatggccagagaaggaggaagagagggagcgggaggagatgtcacacttttaaacaatca

SEQ ID NO: 126544 - DNA, 80 bp, synthetic construct
  misc_feature 1..80: note = Artificially Synthesized Probe
  source 1..80: mol_type = other DNA
tcccaccaggctccacctccaacagtgaggattataatttgacatgagatttgggcggagtcacagaccccaaccgtatc

SEQ ID NO: 126545 - DNA, 80 bp, synthetic construct
  misc_feature 1..80: note = Artificially Synthesized Probe
  source 1..80: mol_type = other DNA
attaaagccgggactctcaacaactcacacaccctactctccctcgttagccagagtatttatttctgatttgtacatta

SEQ ID NO: 126546 - DNA, 80 bp, synthetic construct
  misc_feature 1..80: note = Artificially Synthesized Probe
  source 1..80: mol_type = other DNA
aattacataggtatattctatcattaaaaatattacttggaaaaaataattcaaatgaagatttgtagatggagcaaact

SEQ ID NO: 126547 - DNA, 80 bp, synthetic construct
  misc_feature 1..80: note = Artificially Synthesized Probe
  source 1..80: mol_type = other DNA
tatatagttacaaaaccacccatcttgtctaccatccgttacgtctcttttgttccatgagagtctggagaaaatccagg

SEQ ID NO: 126548 - DNA, 80 bp, synthetic construct
  misc_feature 1..80: note = Artificially Synthesized Probe
  source 1..80: mol_type = other DNA
caagcaaatggcagtggtttgggtgatttccaggctgggccctgttgattcacatgaaatatgctttccattgtagtata

SEQ ID NO: 126549 - DNA, 80 bp, synthetic construct
  misc_feature 1..80: note = Artificially Synthesized Probe
  source 1..80: mol_type = other DNA
cctcttagcagagggtttcccctcttttaacataagaggtgcggtcctggaaaatcgtgtaaactaagccatgatgactg

SEQ ID NO: 126550 - DNA, 80 bp, synthetic construct
  misc_feature 1..80: note = Artificially Synthesized Probe
  source 1..80: mol_type = other DNA
gctgcttccatcccaccctcggccttcctttccttttaaaaggtgtcaggcttcttatcctcaggttgttttcccacaag

SEQ ID NO: 126551 - DNA, 80 bp, synthetic construct; identical to SEQ ID NO: 40622
  misc_feature 1..80: note = Artificially Synthesized Probe
  source 1..80: mol_type = other DNA

SEQ ID NO: 126552 - DNA, 80 bp, synthetic construct
  misc_feature 1..80: note = Artificially Synthesized Probe
  source 1..80: mol_type = other DNA
ctatgcacacctagaattttgagctttacattaatcttctaattatatgtgtgtgtgtgtatatatatatatacacaaag

SEQ ID NO: 126553 - DNA, 80 bp, synthetic construct
  misc_feature 1..80: note = Artificially Synthesized Probe
  source 1..80: mol_type = other DNA
gtatgtatagccacgcattgcttaaggacaggtatatattccagaaaatgcacagttaggcaattttgtcgttgtgcaaa

SEQ ID NO: 126554 - DNA, 80 bp, synthetic construct
  misc_feature 1..80: note = Artificially Synthesized Probe
  source 1..80: mol_type = other DNA
gtatatgctccattagaacctatggggccaccgtggtctgtgcagttcattgttaactgaagtgtcgtgacgtggtgcat

SEQ ID NO: 126555 - DNA, 80 bp, synthetic construct
  misc_feature 1..80: note = Artificially Synthesized Probe
  source 1..80: mol_type = other DNA
acgagatgctcttcttggataccttggacatggttttatcttaaataacccccttctgttacatggtcatgttcggcctt

SEQ ID NO: 126556 - DNA, 80 bp, synthetic construct; identical to SEQ ID NO: 40623
  misc_feature 1..80: note = Artificially Synthesized Probe
  source 1..80: mol_type = other DNA

SEQ ID NO: 126557 - DNA, 80 bp, synthetic construct
  misc_feature 1..80: note = Artificially Synthesized Probe
  source 1..80: mol_type = other DNA
tgcatatgcacacatgctcacacatgcacatgagtgcacatgtgtcctacacatgcaagcactcacacatgttccaaact

SEQ ID NO: 126558 - DNA, 80 bp, synthetic construct
  misc_feature 1..80: note = Artificially Synthesized Probe
  source 1..80: mol_type = other DNA
agctgagtccttaagccatgcggttcaggtaagcagggaaagaacaatgatgagaaagacccacttcttctttttttttt

SEQ ID NO: 126559 - DNA, 80 bp, synthetic construct
  misc_feature 1..80: note = Artificially Synthesized Probe
  source 1..80: mol_type = other DNA
cccataacatccatgtggctcaaggggacttcccacagctctcagggtggcagcattttcttcaagtccacaatagaaat

SEQ ID NO: 126560 - DNA, 80 bp, synthetic construct
  misc_feature 1..80: note = Artificially Synthesized Probe
  source 1..80: mol_type = other DNA
gggagcggagaagggatccccagggggagacacggccactggcaggaggaataaacgagtaggaggaaggcaggactacg

SEQ ID NO: 126561 - DNA, 80 bp, synthetic construct; identical to SEQ ID NO: 40624
  misc_feature 1..80: note = Artificially Synthesized Probe
  source 1..80: mol_type = other DNA

SEQ ID NO: 126562 - DNA, 80 bp, synthetic construct
  misc_feature 1..80: note = Artificially Synthesized Probe
  source 1..80: mol_type = other DNA
tccacacggaaattctaagctgtagttacagttgtatttctgaataacatttaatgacatgggaaaatgctgatattact

SEQ ID NO: 126563 - DNA, 80 bp, synthetic construct
  misc_feature 1..80: note = Artificially Synthesized Probe
  source 1..80: mol_type = other DNA
agataaaaatggtggatccacaattctgtatttgccagtaataaaaccagcacctgagctctgacattaggcagtagcat

SEQ ID NO: 126564 - DNA, 80 bp, synthetic construct; identical to SEQ ID NO: 40625
  misc_feature 1..80: note = Artificially Synthesized Probe
  source 1..80: mol_type = other DNA

SEQ ID NO: 126565 - DNA, 80 bp, synthetic construct
  misc_feature 1..80: note = Artificially Synthesized Probe
  source 1..80: mol_type = other DNA
agttgtgatgacttgaaaaatgtcttgaaaattttgtttgctgcaaggattaccagaaggtccccaattaattaaagcca

SEQ ID NO: 126566 - DNA, 80 bp, synthetic construct
  misc_feature 1..80: note = Artificially Synthesized Probe
  source 1..80: mol_type = other DNA
tatctgagcttgaattgtgaaacatacagcattattcgacagtgagattagtttggccattattattgttaaaatagttg

SEQ ID NO: 126567 - DNA, 80 bp, synthetic construct
  misc_feature 1..80: note = Artificially Synthesized Probe
  source 1..80: mol_type = other DNA
tcattcactttcacatgcattaaatgttacccaaaattaatccctaatttaatctaaaaggaatccaaaatggttttcta

SEQ ID NO: 126568 - DNA, 80 bp, synthetic construct
  misc_feature 1..80: note = Artificially Synthesized Probe
  source 1..80: mol_type = other DNA
cagcagtacgtaaagtttaatgttaccaatttatactaatggggcttaggatttaattgaggtggacacacatgcagtca

SEQ ID NO: 126569 - DNA, 80 bp, synthetic construct
  misc_feature 1..80: note = Artificially Synthesized Probe
  source 1..80: mol_type = other DNA
tatacacatgcacacacaaacaagtcgtacacacatgcacattaatgcatgtccctacatgaacatgagtacacacatgc

SEQ ID NO: 126570 - DNA, 80 bp, synthetic construct; identical to SEQ ID NO: 40626
  misc_feature 1..80: note = Artificially Synthesized Probe
  source 1..80: mol_type = other DNA

SEQ ID NO: 126571 - DNA, 80 bp, synthetic construct
  misc_feature 1..80: note = Artificially Synthesized Probe
  source 1..80: mol_type = other DNA
acagggtgtgtctgtgtttatgtggtatgtggtgtttgtgtgtgttttacgggagagatgtgttttatgacatccactta

SEQ ID NO: 126572 - DNA, 80 bp, synthetic construct
  misc_feature 1..80: note = Artificially Synthesized Probe
  source 1..80: mol_type = other DNA
ctgctgttattgaaattgttttcaacaaatcagatacaaatttgccccagggtctggccagtttgctgctcatggttcct

SEQ ID NO: 126573 - DNA, 80 bp, synthetic construct; identical to SEQ ID NO: 40627
  misc_feature 1..80: note = Artificially Synthesized Probe
  source 1..80: mol_type = other DNA

SEQ ID NO: 126574 - DNA, 80 bp, synthetic construct
  misc_feature 1..80: note = Artificially Synthesized Probe
  source 1..80: mol_type = other DNA
tattctctatctgtagttgctttattttaaatttaaatctggaatttcagactgcctttaatggaaacatgtacaaggga

SEQ ID NO: 126575 - DNA, 80 bp, synthetic construct
  misc_feature 1..80: note = Artificially Synthesized Probe
  source 1..80: mol_type = other DNA
agatgaaggaaaaggccggatgtatttaaattaagactcctaattacaggttgtaataaacaatcattgatcagaaagtg

SEQ ID NO: 126576 - DNA, 80 bp, synthetic construct
  misc_feature 1..80: note = Artificially Synthesized Probe
  source 1..80: mol_type = other DNA
aaaatggcaaaaaggaagccttatgttaacatgagcctcttggtcgtagatgatatgcaggtcatttcatccatcacatt

SEQ ID NO: 126577 - DNA, 80 bp, synthetic construct; identical to SEQ ID NO: 40628
  misc_feature 1..80: note = Artificially Synthesized Probe
  source 1..80: mol_type = other DNA

SEQ ID NO: 126578 - DNA, 80 bp, synthetic construct
  misc_feature 1..80: note = Artificially Synthesized Probe
  source 1..80: mol_type = other DNA
aaaagagattaaattatatgagttgaatgtcctatttggaagtcttaaaatagtgatcttacaaaatcatattgactgct

SEQ ID NO: 126579 - DNA, 80 bp, synthetic construct
  misc_feature 1..80: note = Artificially Synthesized Probe
  source 1..80: mol_type = other DNA
agtacactcattaatatttagaccagaaatcaaattctgaagttgtgattttgttttttctctgataccttctaaaaatt

SEQ ID NO: 126580 - DNA, 80 bp, synthetic construct
  misc_feature 1..80: note = Artificially Synthesized Probe
  source 1..80: mol_type = other DNA
ctgtgtgaaatccacgggtccatcctctcaacctaaagataccccattaaattttcaggaaaagtcaatattctcatatg

SEQ ID NO: 126581 - DNA, 80 bp, synthetic construct
  misc_feature 1..80: note = Artificially Synthesized Probe
  source 1..80: mol_type = other DNA
gcacatgaacacacatgtccacacagatgtacacagatgcacactcacatgcacttgtgcacacacgtgtccacacagat

SEQ ID NO: 126582 - DNA, 80 bp, synthetic construct
  misc_feature 1..80: note = Artificially Synthesized Probe
  source 1..80: mol_type = other DNA
ttgagttaattctctccccacctaaggagcactctgttttgtagctaagaactcagaagcagggaagtggacgaggactt

SEQ ID NO: 126583 - DNA, 80 bp, synthetic construct; identical to SEQ ID NO: 40629
  misc_feature 1..80: note = Artificially Synthesized Probe
  source 1..80: mol_type = other DNA

SEQ ID NO: 126584 - DNA, 80 bp, synthetic construct
  misc_feature 1..80: note = Artificially Synthesized Probe
  source 1..80: mol_type = other DNA
attggcctcctgcaaagaaacagagagcttcccccatcttcatgacaggaggtggttgcacagcttagagccaagcaccc

SEQ ID NO: 126585 - DNA, 80 bp, synthetic construct
  misc_feature 1..80: note = Artificially Synthesized Probe
  source 1..80: mol_type = other DNA
aaagaacatacaataatacattttctaaagcaaatgctctaaagatagggagttccaggtcccagaggtgggaagaagcc

SEQ ID NO: 126586 - DNA, 80 bp, synthetic construct
  misc_feature 1..80: note = Artificially Synthesized Probe
  source 1..80: mol_type = other DNA
caaccggaaggctccgtgcagacgaggcaacccgaaggctccgtgcagacgaggtaaccggaaggctcggtccagacgac

SEQ ID NO: 126587 - DNA, 80 bp, synthetic construct; identical to SEQ ID NO: 40630
  misc_feature 1..80: note = Artificially Synthesized Probe
  source 1..80: mol_type = other DNA

SEQ ID NO: 126588 - DNA, 80 bp, synthetic construct
  misc_feature 1..80: note = Artificially Synthesized Probe
  source 1..80: mol_type = other DNA
gagaatgtttaaggatattccttaaattaatgatatttgaagaataatcaaaagaccattgagaaatattttaaaatctt

SEQ ID NO: 126589 - DNA, 80 bp, synthetic construct
  misc_feature 1..80: note = Artificially Synthesized Probe
  source 1..80: mol_type = other DNA
atcttttaaattccctttattgttgctataattgtttcataataaatataaatagaaaaaatatgtaattttagaataca

SEQ ID NO: 126590 - DNA, 80 bp, synthetic construct; identical to SEQ ID NO: 40631
  misc_feature 1..80: note = Artificially Synthesized Probe
  source 1..80: mol_type = other DNA

SEQ ID NO: 126591 - DNA, 80 bp, synthetic construct; identical to SEQ ID NO: 40329
  misc_feature 1..80: note = Artificially Synthesized Probe
  source 1..80: mol_type = other DNA

SEQ ID NO: 126592 - DNA, 80 bp, synthetic construct
  misc_feature 1..80: note = Artificially Synthesized Probe
  source 1..80: mol_type = other DNA
atctgactccaaaacctggtgttcttctattataatacacagctgcccaaatatagcaagtgataggaaagaaacacaat

SEQ ID NO: 126593 - DNA, 80 bp, synthetic construct
  misc_feature 1..80: note = Artificially Synthesized Probe
  source 1..80: mol_type = other DNA
tagagatgtcgtgaattcatacaatatatgtagatactagtctatttcatcatttactcctgtaaaatataaatcaatca

SEQ ID NO: 126594 - DNA, 80 bp, synthetic construct
  misc_feature 1..80: note = Artificially Synthesized Probe
  source 1..80: mol_type = other DNA
taatcatccctgtggaagcaatttctctctccagtaaattgcagagcatggtaacgagtgatctctcagagttcttgtgt

SEQ ID NO: 126595 - DNA, 80 bp, synthetic construct; identical to SEQ ID NO: 40632
  misc_feature 1..80: note = Artificially Synthesized Probe
  source 1..80: mol_type = other DNA

SEQ ID NO: 126596 - DNA, 80 bp, synthetic construct
  misc_feature 1..80: note = Artificially Synthesized Probe
  source 1..80: mol_type = other DNA
gcctcccaattagttgtgattacaggtgtaagccactgtgcctgaattcacttattctattctaagaatgtagtatatta

SEQ ID NO: 126597 - DNA, 80 bp, synthetic construct
  misc_feature 1..80: note = Artificially Synthesized Probe
  source 1..80: mol_type = other DNA
aaggcccaactataatgagccattcaatgggggatgtgcgttcccacataaatatcttccaaaagtttttctttatcagt

SEQ ID NO: 126598 - DNA, 80 bp, synthetic construct
  misc_feature 1..80: note = Artificially Synthesized Probe
  source 1..80: mol_type = other DNA
actcaaggctcatttagggttagcaacgtatgcacactacacacattcacgtacacacacattcatgttcacatacattt

SEQ ID NO: 126599 - DNA, 80 bp, synthetic construct
  misc_feature 1..80: note = Artificially Synthesized Probe
  source 1..80: mol_type = other DNA
catctgcggggccaggagagccagggcatccccccggagagtccagaaggcccacctgagacacaccagtcgtagctttt

SEQ ID NO: 126600 - DNA, 80 bp, synthetic construct
  misc_feature 1..80: note = Artificially Synthesized Probe
  source 1..80: mol_type = other DNA
tttgagaataattggtgtttcaaagatgtgccctattaatctggatgctccctgcacaccccctcggtacacggaggaca

SEQ ID NO: 126601 - DNA, 80 bp, synthetic construct; identical to SEQ ID NO: 40633
  misc_feature 1..80: note = Artificially Synthesized Probe
  source 1..80: mol_type = other DNA

SEQ ID NO: 126602 - DNA, 80 bp, synthetic construct
  misc_feature 1..80: note = Artificially Synthesized Probe
  source 1..80: mol_type = other DNA
atgggtgagctgagaactgaggtgggtccagagagagacagacagagacagagagaaggatagagagagacagagaaaca

SEQ ID NO: 126603 - DNA, 80 bp, synthetic construct
  misc_feature 1..80: note = Artificially Synthesized Probe
  source 1..80: mol_type = other DNA
ctgttgacctagtaattgtgacaactgggacccccagtctttctcttctgcccttgataaaatgaatcccgaagtggggt

SEQ ID NO: 126604 - DNA, 80 bp, synthetic construct; identical to SEQ ID NO: 40634
  misc_feature 1..80: note = Artificially Synthesized Probe
  source 1..80: mol_type = other DNA

SEQ ID NO: 126605 - DNA, 80 bp, synthetic construct
  misc_feature 1..80: note = Artificially Synthesized Probe
  source 1..80: mol_type = other DNA
cagggggcacgcttagttagagtggtggtggtattttcagtgttttctggttttatgataaacacaagcatcaatgtctc

SEQ ID NO: 126606 - DNA, 80 bp, synthetic construct
  misc_feature 1..80: note = Artificially Synthesized Probe
  source 1..80: mol_type = other DNA
tttactaaatgggtatattcaggatagacttactaagcagtgtgattttctggctttcctgttagctcatgtagcatgtg

SEQ ID NO: 126607 - DNA, 80 bp, synthetic construct
  misc_feature 1..80: note = Artificially Synthesized Probe
  source 1..80: mol_type = other DNA
caagcgtgtgctgccacacctggctaatttgttgtattttatttattcatttatttttgtgaagacaaggtcttgccatg

SEQ ID NO: 126608 - DNA, 80 bp, synthetic construct
  misc_feature 1..80: note = Artificially Synthesized Probe
  source 1..80: mol_type = other DNA
cttacagagaattaagcatttgacaaaatttatttacagatatttgtctgtggaccacttccgcaccagctgtgcatgag

SEQ ID NO: 126609 - DNA, 80 bp, synthetic construct
  misc_feature 1..80: note = Artificially Synthesized Probe
  source 1..80: mol_type = other DNA
acagaggactgctggttgcaagcaaacttgtatctgggtcttcaagattttgactttgaggaccagaggccctattgctt

SEQ ID NO: 126610 - DNA, 80 bp, synthetic construct; identical to SEQ ID NO: 40635
  misc_feature 1..80: note = Artificially Synthesized Probe
  source 1..80: mol_type = other DNA

SEQ ID NO: 126611 - DNA, 80 bp, synthetic construct
  misc_feature 1..80: note = Artificially Synthesized Probe
  source 1..80: mol_type = other DNA
atgtggcgctcaagttcctgagaagtgatgacacttctagcctgtgctccgggagacagaacacctagcttacaaatgag

SEQ ID NO: 126612 - DNA, 80 bp, synthetic construct
  misc_feature 1..80: note = Artificially Synthesized Probe
  source 1..80: mol_type = other DNA
ttccaatcaaaaacatcttcagattgtgagactaataccatgaacacccttcatattaaagtcagcgtgcatgcagtggg

SEQ ID NO: 126613 - DNA, 80 bp, synthetic construct
  misc_feature 1..80: note = Artificially Synthesized Probe
  source 1..80: mol_type = other DNA
gaatgtataccatgtgaagggatgaggaagaatgcattataatcctccttatcctaaatagcgggatgatccttcaggga

SEQ ID NO: 126614 - DNA, 80 bp, synthetic construct
  misc_feature 1..80: note = Artificially Synthesized Probe
  source 1..80: mol_type = other DNA
tacatatataccttgaatgtgaaactattctgtgttatttatctttcattcacgttgtcaaaatgtatccaggctccttg

SEQ ID NO: 126615 - DNA, 80 bp, synthetic construct; identical to SEQ ID NO: 40636
  misc_feature 1..80: note = Artificially Synthesized Probe
  source 1..80: mol_type = other DNA

SEQ ID NO: 126616 - DNA, 80 bp, synthetic construct
  misc_feature 1..80: note = Artificially Synthesized Probe
  source 1..80: mol_type = other DNA
aggcaaagtgaaagagcgtttctgggacaaggtgacctttctgcttgttttctttagatgatagcagtaatcattttgct

SEQ ID NO: 126617 - DNA, 80 bp, synthetic construct
  misc_feature 1..80: note = Artificially Synthesized Probe
  source 1..80: mol_type = other DNA
tatcctgaataagagcaatcatagaattacagtgttggagggagggtgaaaggttagtaatttcatctagtacccagatg

SEQ ID NO: 126618 - DNA, 80 bp, synthetic construct; identical to SEQ ID NO: 40637
  misc_feature 1..80: note = Artificially Synthesized Probe
  source 1..80: mol_type = other DNA

SEQ ID NO: 126619 - DNA, 80 bp, synthetic construct
  misc_feature 1..80: note = Artificially Synthesized Probe
  source 1..80: mol_type = other DNA
ctgggccacagagtgagaccctgtctcaaaaaaaaaggtatagggtagggtgggagtggggtcagagctggggttggact

SEQ ID NO: 126620 - DNA, 80 bp, synthetic construct
  misc_feature 1..80: note = Artificially Synthesized Probe
  source 1..80: mol_type = other DNA
ggactcagcaggcagcaatgtgcccaggtgaattttagaggaaacattttcaataatccaggattgagataatgaagacc

SEQ ID NO: 126621 - DNA, 80 bp, synthetic construct
  misc_feature 1..80: note = Artificially Synthesized Probe
  source 1..80: mol_type = other DNA
atgctgcccatgactgacttgccggatcttcacaactcagcaaagtggatgccctcaaagaagccccgggtggatgcttc

SEQ ID NO: 126622 - DNA, 80 bp, synthetic construct; identical to SEQ ID NO: 40330
  misc_feature 1..80: note = Artificially Synthesized Probe
  source 1..80: mol_type = other DNA

SEQ ID NO: 126623 - DNA, 80 bp, synthetic construct; identical to SEQ ID NO: 40638
  misc_feature 1..80: note = Artificially Synthesized Probe
  source 1..80: mol_type = other DNA

SEQ ID NO: 126624 - DNA, 80 bp, synthetic construct
  misc_feature 1..80: note = Artificially Synthesized Probe
  source 1..80: mol_type = other DNA
gcagttgttcttttcttttcccttttattttacaaatggtaaatgaaagttcagaagggctatgttacttctccacagtc

SEQ ID NO: 126625 - DNA, 80 bp, synthetic construct
  misc_feature 1..80: note = Artificially Synthesized Probe
  source 1..80: mol_type = other DNA
gtaaatgtgttcttcttgattcagtagcactgctggatttcttttctccaccttctgtctctgttttgcttgttttgcta

SEQ ID NO: 126626 - DNA, 80 bp, synthetic construct
  misc_feature 1..80: note = Artificially Synthesized Probe
  source 1..80: mol_type = other DNA
cttttccagcagtgattagcgtgttcattccttctctaaaaggatttctgaaaggaaagccctgcatccttcacaggctc

SEQ ID NO: 126627 - DNA, 80 bp, synthetic construct; identical to SEQ ID NO: 40639
  misc_feature 1..80: note = Artificially Synthesized Probe
  source 1..80: mol_type = other DNA

SEQ ID NO: 126628 - DNA, 80 bp, synthetic construct
  misc_feature 1..80: note = Artificially Synthesized Probe
  source 1..80: mol_type = other DNA
catgttgttctgcaatttacaagacttttgtacattttcatgtcaatttatctaaatttgtatgtcaatttatttaaatt

SEQ ID NO: 126629 - DNA, 80 bp, synthetic construct
  misc_feature 1..80: note = Artificially Synthesized Probe
  source 1..80: mol_type = other DNA
tattgttgctattattttccataacaaggtttccatactccaccttgctgagttttgaggtctagattgtgcctcggtgt

SEQ ID NO: 126630 - DNA, 80 bp, synthetic construct
  misc_feature 1..80: note = Artificially Synthesized Probe
  source 1..80: mol_type = other DNA
gggaatgccattggctgattggcttctcatcaagggaacaccattggctaattggcttctcatcaagggaatgccattgg

SEQ ID NO: 126631 - DNA, 80 bp, synthetic construct
  misc_feature 1..80: note = Artificially Synthesized Probe
  source 1..80: mol_type = other DNA
aatgacagtttttccacggacagggccagggggatggtttggggatgattcaagcacattacatttattgtgcactttat

SEQ ID NO: 126632 - DNA, 80 bp, synthetic construct; identical to SEQ ID NO: 40640
  misc_feature 1..80: note = Artificially Synthesized Probe
  source 1..80: mol_type = other DNA

SEQ ID NO: 126633 - DNA, 80 bp, synthetic construct
  misc_feature 1..80: note = Artificially Synthesized Probe
  source 1..80: mol_type = other DNA
gcagaggtgatgtcaggatgaagaagctgcagaggtggtgtcaggatgaagaagttgcagaggtggaggttgggatgaag

SEQ ID NO: 126634 - DNA, 80 bp, synthetic construct
  misc_feature 1..80: note = Artificially Synthesized Probe
  source 1..80: mol_type = other DNA
gaaacaggtacagaaaggacaccccagggaacaggtgtagaaaggatatcccagggagcaggtgtagaaaggacacccca

SEQ ID NO: 126635 - DNA, 80 bp, synthetic construct
  misc_feature 1..80: note = Artificially Synthesized Probe
  source 1..80: mol_type = other DNA
cagggagcgggtgcagaaaggacaccccagggagcgggtgcagaaagggcatcccagggaagaggtgtagaaaggacatc

SEQ ID NO: 126636 - DNA, 80 bp, synthetic construct
  misc_feature 1..80: note = Artificially Synthesized Probe
  source 1..80: mol_type = other DNA
tcaccatcaccgcgcagtgggtctcctgttagaggagccggtcacgcacggtgctccgtggattttccactgccaagtcc

SEQ ID NO: 126637 - DNA, 80 bp, synthetic construct; identical to SEQ ID NO: 40641
  misc_feature 1..80: note = Artificially Synthesized Probe
  source 1..80: mol_type = other DNA

SEQ ID NO: 126638 - DNA, 80 bp, synthetic construct
  misc_feature 1..80: note = Artificially Synthesized Probe
  source 1..80: mol_type = other DNA
taatgcctttaccactcctaccgtactatcaagacaagcacagccaaaaagagattctgtgtatggcagatgtgcaaagg

SEQ ID NO: 126639 - DNA, 80 bp, synthetic construct
  misc_feature 1..80: note = Artificially Synthesized Probe
  source 1..80: mol_type = other DNA
aactataaaacttttagaagaataaacagcataaagtctttgtgacctctggttatgcaaatatttctcagatacaaaac

SEQ ID NO: 126640 - DNA, 80 bp, synthetic construct
  misc_feature 1..80: note = Artificially Synthesized Probe
  source 1..80: mol_type = other DNA
caaggcatataactggcaaaggacttctatatgtaatgcataaaaagatctcaaagctcaatgattagaaaaacaataag

SEQ ID NO: 126641 - DNA, 80 bp, synthetic construct; identical to SEQ ID NO: 40642
  misc_feature 1..80: note = Artificially Synthesized Probe
  source 1..80: mol_type = other DNA

SEQ ID NO: 126642 - DNA, 80 bp, synthetic construct
  misc_feature 1..80: note = Artificially Synthesized Probe
  source 1..80: mol_type = other DNA
acagcttcatttgtaaacaacaataactaaaaacagcccaaatggtcactgatgtaggaatctatcaaaaatgtgtgtgt

SEQ ID NO: 126643 - DNA, 80 bp, synthetic construct
  misc_feature 1..80: note = Artificially Synthesized Probe
  source 1..80: mol_type = other DNA
cagaagctgcagaggtggaggttgggatgaagaagttgcagaggtggaggttgggatgaagcagaggctctcttccatag

SEQ ID NO: 126644 - DNA, 80 bp, synthetic construct
  misc_feature 1..80: note = Artificially Synthesized Probe
  source 1..80: mol_type = other DNA
attgtgtttttggtgtcacacctaagaacttacccttccaccctcgatcaggatgattctgccctggattttgttctaag

SEQ ID NO: 126645 - DNA, 80 bp, synthetic construct
  misc_feature 1..80: note = Artificially Synthesized Probe
  source 1..80: mol_type = other DNA
gtagatggaaggggaatcggcctggctgctgggcccctgcacaaaggctcagtgggagagtcttagtttatttagtgttg

SEQ ID NO: 126646 - DNA, 80 bp, synthetic construct; identical to SEQ ID NO: 40643
  misc_feature 1..80: note = Artificially Synthesized Probe
  source 1..80: mol_type = other DNA

SEQ ID NO: 126647 - DNA, 80 bp, synthetic construct
  misc_feature 1..80: note = Artificially Synthesized Probe
  source 1..80: mol_type = other DNA
tccacctcccaacatccttacctcggcaactacagactcagcttgttttattgtgctttgctttgttaagctctgaagat

SEQ ID NO: 126648 - DNA, 80 bp, synthetic construct
  misc_feature 1..80: note = Artificially Synthesized Probe
  source 1..80: mol_type = other DNA
atatctgtcaccgtgatatgtgttcagtttttgttgttactgttgtaattggtttcaggcaccaccagtgttgctcatat

SEQ ID NO: 126649 - DNA, 80 bp, synthetic construct
  misc_feature 1..80: note = Artificially Synthesized Probe
  source 1..80: mol_type = other DNA
tattaggccagttaacaaccctggaatggccttgaagtgttcaaatgaaaggaagagtcacatgtctctcactttaaatc

SEQ ID NO: 126650 - DNA, 80 bp, synthetic construct; identical to SEQ ID NO: 40644
  misc_feature 1..80: note = Artificially Synthesized Probe
  source 1..80: mol_type = other DNA

SEQ ID NO: 126651 - DNA, 80 bp, synthetic construct
  misc_feature 1..80: note = Artificially Synthesized Probe
  source 1..80: mol_type = other DNA
taaggaaagaatctgtctccaaaacactgaagtgcaaagtgaagcagcaagtgctgatcaagaagctgcagcaagttctc

SEQ ID NO: 126652 - DNA, 80 bp, synthetic construct
  misc_feature 1..80: note = Artificially Synthesized Probe
  source 1..80: mol_type = other DNA
tctcttattagggtccaatgtatatggagactttaagttgaagtgaagcttcatttaccattctgaaaagactagggccc

SEQ ID NO: 126653 - DNA, 80 bp, synthetic construct
  misc_feature 1..80: note = Artificially Synthesized Probe
  source 1..80: mol_type = other DNA
cattgacaatgcaattggtcactcaggagctcttgtggagatgtccaagattaatgttgttttcatgcctgataatacaa

SEQ ID NO: 126654 - DNA, 80 bp, synthetic construct; identical to SEQ ID NO: 40645
  misc_feature 1..80: note = Artificially Synthesized Probe
  source 1..80: mol_type = other DNA

SEQ ID NO: 126655 - DNA, 80 bp, synthetic construct
  misc_feature 1..80: note = Artificially Synthesized Probe
  source 1..80: mol_type = other DNA
aggtgctgcctcccacccttcctgcccaacttggtgcctcctgcatgactttcaggggggctgcgaagcaggtgtcccag

SEQ ID NO: 126656 - DNA, 80 bp, synthetic construct
  misc_feature 1..80: note = Artificially Synthesized Probe
  source 1..80: mol_type = other DNA
aaacttagaacagatgaggagttactcttatggataagcaaagaaagtggtttcttgagatggaatctactcctggtaaa

SEQ ID NO: 126657 - DNA, 80 bp, synthetic construct
  misc_feature 1..80: note = Artificially Synthesized Probe
  source 1..80: mol_type = other DNA
ttttcatgaaaagaagagtaaatcgatgaggcagacttcattgttgtcttatcttaagaaactaccacagccgctccaac

SEQ ID NO: 126658 - DNA, 80 bp, synthetic construct; identical to SEQ ID NO: 40646
  misc_feature 1..80: note = Artificially Synthesized Probe
  source 1..80: mol_type = other DNA

SEQ ID NO: 126659 - DNA, 80 bp, synthetic construct
  misc_feature 1..80: note = Artificially Synthesized Probe
  source 1..80: mol_type = other DNA
aagaggcagctggtgacatgcaagctgggcacctgcaggaggtttttgtgcagggctatgcaggggaggagggaagacag

SEQ ID NO: 126660 - DNA, 80 bp, synthetic construct
  misc_feature 1..80: note = Artificially Synthesized Probe
  source 1..80: mol_type = other DNA
gagtagcattctctctgacacttcgtggcaagtattaacttcaccacattactaaaatggtgattatttcatttatcaaa

SEQ ID NO: 126661 - DNA, 80 bp, synthetic construct
  misc_feature 1..80: note = Artificially Synthesized Probe
  source 1..80: mol_type = other DNA
caagtaactggccatgtcagttaatgcaacatattgtttatggagggcagaaggtgttagtgaggtgtgttgttacctga

SEQ ID NO: 126662 - DNA, 80 bp, synthetic construct; identical to SEQ ID NO: 40647
  misc_feature 1..80: note = Artificially Synthesized Probe
  source 1..80: mol_type = other DNA

SEQ ID NO: 126663 - DNA, 80 bp, synthetic construct
  misc_feature 1..80: note = Artificially Synthesized Probe
  source 1..80: mol_type = other DNA
caaagaaaacccaagtgaagatgtaaagcctgtttatgtaagtgtgacatacagtagtctcctttcaattctgttttgct

SEQ ID NO: 126664 - DNA, 80 bp, synthetic construct
  misc_feature 1..80: note = Artificially Synthesized Probe
  source 1..80: mol_type = other DNA
tgtcagtgcgcgaatcacccctgtcagtgcataacaccctgtcagcgcgcgaatcacccctctgtcagtgcgtgaataac

SEQ ID NO: 126665 - DNA, 80 bp, synthetic construct
  misc_feature 1..80: note = Artificially Synthesized Probe
  source 1..80: mol_type = other DNA
cccagtagtcacttagcaacggtctctttgatcagattgactcttacagcgttgcagtgcttgtattcaagtcactctta

SEQ ID NO: 126666 - DNA, 80 bp, synthetic construct; identical to SEQ ID NO: 40331
  misc_feature 1..80: note = Artificially Synthesized Probe
  source 1..80: mol_type = other DNA

SEQ ID NO: 126667 - DNA, 80 bp, synthetic construct
  misc_feature 1..80: note = Artificially Synthesized Probe
  source 1..80: mol_type = other DNA
gttaaactttattgcaggtatgcatgtatgtaggaagaaacatcgtatagagcacagatagggttccttacctccatgct

SEQ ID NO: 126668 - DNA, 80 bp, synthetic construct; identical to SEQ ID NO: 40648
  misc_feature 1..80: note = Artificially Synthesized Probe
  source 1..80: mol_type = other DNA

SEQ ID NO: 126669 - DNA, 80 bp, synthetic construct
  misc_feature 1..80: note = Artificially Synthesized Probe
  source 1..80: mol_type = other DNA
gagagactgatgcacatgctgcctttttaaaattcataagtggctgggaagatcgttttgaataagtcactgaaccttcc

SEQ ID NO: 126670 - DNA, 80 bp, synthetic construct
  misc_feature 1..80: note = Artificially Synthesized Probe
  source 1..80: mol_type = other DNA
cttttttgaattatttaaaaaaccactattgttaatgagtttgaaatatgatatagaataatactacaaatgtatttttg

SEQ ID NO: 126671 - DNA, 80 bp, synthetic construct
  misc_feature 1..80: note = Artificially Synthesized Probe
  source 1..80: mol_type = other DNA
acatgaaccttatcacaattctaatttacctcatctctttcagagctggttcagcagccagctttattttaagttaaaac

SEQ ID NO: 126672 - DNA, 80 bp, synthetic construct; identical to SEQ ID NO: 40649
  misc_feature 1..80: note = Artificially Synthesized Probe
  source 1..80: mol_type = other DNA

SEQ ID NO: 126673 - DNA, 80 bp, synthetic construct
  misc_feature 1..80: note = Artificially Synthesized Probe
  source 1..80: mol_type = other DNA
ctgaaagtatctaactgatgcctattattctactgctagtgctttgcttttaataagtgtattgtgtaattatagaaact

SEQ ID NO: 126674 - DNA, 80 bp, synthetic construct
  misc_feature 1..80: note = Artificially Synthesized Probe
  source 1..80: mol_type = other DNA
tttactccaagtagttttttattcagttgtgcttgtcgcggggtcaagtgtcttaggggtgagtgtgataaatgctgaag

SEQ ID NO: 126675 - DNA, 80 bp, synthetic construct
  misc_feature 1..80: note = Artificially Synthesized Probe
  source 1..80: mol_type = other DNA
gtggtggtatgtgtgtgcttgtgtatttggtgtttatggtgtatatggtgtgtggtgtgtgtgtttgtgtggtgtgtgtg

SEQ ID NO: 126676 - DNA, 80 bp, synthetic construct; identical to SEQ ID NO: 40650
  misc_feature 1..80: note = Artificially Synthesized Probe
  source 1..80: mol_type = other DNA

SEQ ID NO: 126677 - DNA, 80 bp, synthetic construct
  misc_feature 1..80: note = Artificially Synthesized Probe
  source 1..80: mol_type = other DNA
ggcctctgagatgtctgtgtccctgtgtccctgagggtcagtgtcaagaggaggccagactgtgtctgaaagagctgtgg

SEQ ID NO: 126678 - DNA, 80 bp, synthetic construct
  misc_feature 1..80: note = Artificially Synthesized Probe
  source 1..80: mol_type = other DNA
caaattgcacctcaggagacagcactggaaatggtgatttagttcacagacaggggacccttgccctgcctgaacatttg

SEQ ID NO: 126679 - DNA, 80 bp, synthetic construct
  misc_feature 1..80: note = Artificially Synthesized Probe
  source 1..80: mol_type = other DNA
ttgtttctataggaaaatctcctgactctgaaaatctggcttgcatataaacatccagccttatagcctgcctggagctg

SEQ ID NO: 126680 - DNA, 80 bp, synthetic construct
  misc_feature 1..80: note = Artificially Synthesized Probe
  source 1..80: mol_type = other DNA
gcgaagtgaattgcacttgtaggggagtagtttacgtgcaccgccgagtttctccaaatataaaagcccattttcattcc

SEQ ID NO: 126681 - DNA, 80 bp, synthetic construct; identical to SEQ ID NO: 40651
  misc_feature 1..80: note = Artificially Synthesized Probe
  source 1..80: mol_type = other DNA

SEQ ID NO: 126682 - DNA, 80 bp, synthetic construct
  misc_feature 1..80: note = Artificially Synthesized Probe
  source 1..80: mol_type = other DNA
gaactccccccgcccccacgtcagtgagctgggcgctctccaagggctgcctcccccgcactgtgcatccctccaggatc

SEQ ID NO: 126683 - DNA, 80 bp, synthetic construct
  misc_feature 1..80: note = Artificially Synthesized Probe
  source 1..80: mol_type = other DNA
tcacacagatgccgtttgctacagagaacctgcacatctattttctaaattaagatcaaaaatagccaaaaggcacaaaa

SEQ ID NO: 126684 - DNA, 80 bp, synthetic construct
  misc_feature 1..80: note = Artificially Synthesized Probe
  source 1..80: mol_type = other DNA
tggcctgctccttccgggaaaggcaggtgaactgtggcctcctgctactgctgccgcccacgccctaactcctcagccgc

SEQ ID NO: 126685 - DNA, 80 bp, synthetic construct; identical to SEQ ID NO: 40652
  misc_feature 1..80: note = Artificially Synthesized Probe
  source 1..80: mol_type = other DNA

SEQ ID NO: 126686 - DNA, 80 bp, synthetic construct
  misc_feature 1..80: note = Artificially Synthesized Probe
  source 1..80: mol_type = other DNA
ctgcatcccagcctggatgccctctcctcaccacagcctgtgtgtggccctggcttctctgtgtcttccacagttctctg

SEQ ID NO: 126687 - DNA, 80 bp, synthetic construct
  misc_feature 1..80: note = Artificially Synthesized Probe
  source 1..80: mol_type = other DNA
taaagagcccgctgtcttctttacctatccaaatataaaatagagctgctgagagaaacagggctagaacattggtgctg

SEQ ID NO: 126688 - DNA, 80 bp, synthetic construct
  misc_feature 1..80: note = Artificially Synthesized Probe
  source 1..80: mol_type = other DNA
tacaaaccagatgcacttttggagaagaaaaataagcctcacttatttcgaacagccttcccacttttacccaaaagaaa

SEQ ID NO: 126689 - DNA, 80 bp, synthetic construct; identical to SEQ ID NO: 40653
  misc_feature 1..80: note = Artificially Synthesized Probe
  source 1..80: mol_type = other DNA

SEQ ID NO: 126690 - DNA, 80 bp, synthetic construct
  misc_feature 1..80: note = Artificially Synthesized Probe
  source 1..80: mol_type = other DNA
ctgggaagagcatggccaaattagcttttattaattgtttacattgtaacgttccctctctctccaacttttagctgttc

SEQ ID NO: 126691 - DNA, 80 bp, synthetic construct
  misc_feature 1..80: note = Artificially Synthesized Probe
  source 1..80: mol_type = other DNA
aagcacccctcgaaaaacttacaaaaccacccaaaaagagaatatatttctcaccatctactttcctttgatggagacgc

SEQ ID NO: 126692 - DNA, 80 bp, synthetic construct
  misc_feature 1..80: note = Artificially Synthesized Probe
  source 1..80: mol_type = other DNA
aaacaagtagaaagttaaagctgacgtcaactaaatcaccaattctaaatactggaaccatattatatttctaaaataga

SEQ ID NO: 126693 - DNA, 80 bp, synthetic construct
  misc_feature 1..80: note = Artificially Synthesized Probe
  source 1..80: mol_type = other DNA
gttttacaactctatataaatataaatataactatataaatatatatatgtatatatgggagtttattaactcacacgat

SEQ ID NO: 126694 - DNA, 80 bp, synthetic construct; identical to SEQ ID NO: 40654
  misc_feature 1..80: note = Artificially Synthesized Probe
  source 1..80: mol_type = other DNA

SEQ ID NO: 126695 - DNA, 80 bp, synthetic construct
  misc_feature 1..80: note = Artificially Synthesized Probe
  source 1..80: mol_type = other DNA
taatcttcaaataaagacaatcatgtcataattacacctaacataatacaactttccttggtaggactggaaacgcacca

SEQ ID NO: 126696 - DNA, 80 bp, synthetic construct
  misc_feature 1..80: note = Artificially Synthesized Probe
  source 1..80: mol_type = other DNA
aggaaatgctcatgacaattacaatccccatttctgcatctggtcacatggtcatagctggtattaatgacttccttctt

SEQ ID NO: 126697 - DNA, 80 bp, synthetic construct
  misc_feature 1..80: note = Artificially Synthesized Probe
  source 1..80: mol_type = other DNA
tagggcatggtaataccaagaaatgcctgaatggagctcctgcattccttgcgtactcttccttacctctgttgtggagt

SEQ ID NO: 126698 - DNA, 80 bp, synthetic construct; identical to SEQ ID NO: 40655
  misc_feature 1..80: note = Artificially Synthesized Probe
  source 1..80: mol_type = other DNA

SEQ ID NO: 126699 - DNA, 80 bp, synthetic construct
  misc_feature 1..80: note = Artificially Synthesized Probe
  source 1..80: mol_type = other DNA
tgtcacctagttggcattgtgacttcaaaaggccattccaccattctgtcaatccagctgtttccagctgatggggaaca

SEQ ID NO: 126700 - DNA, 80 bp, synthetic construct
  misc_feature 1..80: note = Artificially Synthesized Probe
  source 1..80: mol_type = other DNA
ttttcatttcactcatttctccacggtccaagcaggagctctgtgctgtttgctgggtagaagatactcggtgcttcctt

SEQ ID NO: 126701 - DNA, 80 bp, synthetic construct
  misc_feature 1..80: note = Artificially Synthesized Probe
  source 1..80: mol_type = other DNA
caggataggcaaacccatatttagagtaagtgtccattccagtgaggacaaacctctgccctttccatgatggaagaggt

SEQ ID NO: 126702 - DNA, 80 bp, synthetic construct
  misc_feature 1..80: note = Artificially Synthesized Probe
  source 1..80: mol_type = other DNA
aaccatcacacttgctctgaagaacattcgtcaacaggttacctgagtgtcactgtggctgtcatgacttgctcactgaa

SEQ ID NO: 126703 - DNA, 80 bp, synthetic construct
  misc_feature 1..80: note = Artificially Synthesized Probe
  source 1..80: mol_type = other DNA
aagggcaggcgtgtttggaaggaactctgggttggggaggagaatatctttgctcactctgtgcttttcccgccgaggag

SEQ ID NO: 126704 - DNA, 80 bp, synthetic construct; identical to SEQ ID NO: 40656
  misc_feature 1..80: note = Artificially Synthesized Probe
  source 1..80: mol_type = other DNA

SEQ ID NO: 126705 - DNA, 80 bp, synthetic construct
  misc_feature 1..80: note = Artificially Synthesized Probe
  source 1..80: mol_type = other DNA
ttattcgagaaatgagccccagcccacacattgcttggtgctgcatctggttgagcaggggtggagaatagcagcagggg

SEQ ID NO: 126706 - DNA, 80 bp, synthetic construct
  misc_feature 1..80: note = Artificially Synthesized Probe
  source 1..80: mol_type = other DNA
gacctgttgttttcaccctctggccaccgctgaagagtctgccgtcatgaaaagggcccaagcagcatttccacttgaaa

SEQ ID NO: 126707 - DNA, 80 bp, synthetic construct
  misc_feature 1..80: note = Artificially Synthesized Probe
  source 1..80: mol_type = other DNA
gagcccagcttccatcctgaccacctggaacctcggacaagtttttaagaagtcctttgcctcagttttcttctctagaa

SEQ ID NO: 126708 - DNA, 80 bp, synthetic construct; identical to SEQ ID NO: 40657
  misc_feature 1..80: note = Artificially Synthesized Probe
  source 1..80: mol_type = other DNA

SEQ ID NO: 126709 - DNA, 80 bp, synthetic construct
  misc_feature 1..80: note = Artificially Synthesized Probe
  source 1..80: mol_type = other DNA
tcccaagctcaccgacaagctacaaacacaccacacccacgcattcacacacagaggcatatacatggacatgtgcacac

SEQ ID NO: 126710 - DNA, 80 bp, synthetic construct
  misc_feature 1..80: note = Artificially Synthesized Probe
  source 1..80: mol_type = other DNA
atgaggtcagctgtggccctgccgtcctgaaattgctccttcacttggcacatcctgccatcatcagcggcctccatgag

SEQ ID NO: 126711 - DNA, 80 bp, synthetic construct
  misc_feature 1..80: note = Artificially Synthesized Probe
  source 1..80: mol_type = other DNA
atatgtatgcccacacacatgcagaccaaggaaaatgtgtgtaaacatgacacacctcacacacatgtacacatgcacac

SEQ ID NO: 126712 - DNA, 80 bp, synthetic construct; identical to SEQ ID NO: 40658
  misc_feature 1..80: note = Artificially Synthesized Probe
  source 1..80: mol_type = other DNA

SEQ ID NO: 126713 - DNA, 80 bp, synthetic construct
  misc_feature 1..80: note = Artificially Synthesized Probe
  source 1..80: mol_type = other DNA
tatcacacccttagatattccaaattagcaatgatgccaatctttacttgtctgcagctcattctggaacctcagaccca

SEQ ID NO: 126714 - DNA, 80 bp, synthetic construct
  misc_feature 1..80: note = Artificially Synthesized Probe
  source 1..80: mol_type = other DNA
tactcactgcccgcatgtgtctctccacaatttctctgactgccccttcctccgtctcactcctgccacctgctctgtgt

SEQ ID NO: 126715 - DNA, 80 bp, synthetic construct
  misc_feature 1..80: note = Artificially Synthesized Probe
  source 1..80: mol_type = other DNA
aatagtcacgggccatactcaaacctgtagccatgtttggagtaggacccttattttaaaaatgtggtgaaatatacatc

SEQ ID NO: 126716 - DNA, 80 bp, synthetic construct
  misc_feature 1..80: note = Artificially Synthesized Probe
  source 1..80: mol_type = other DNA
gtagccactattccactccccgtctctatgaatctgaggactgcagatatttcgtatgagcagactcgtgcagtgtccgt

SEQ ID NO: 126717 - DNA, 80 bp, synthetic construct; identical to SEQ ID NO: 40659
  misc_feature 1..80: note = Artificially Synthesized Probe
  source 1..80: mol_type = other DNA

SEQ ID NO: 126718 - DNA, 80 bp, synthetic construct
  misc_feature 1..80: note = Artificially Synthesized Probe
  source 1..80: mol_type = other DNA
agaaagctgtcttcacatggtggagagggacagagagggagcatgaaggggaagttctacatcctttttttttttttttg

SEQ ID NO: 126719 - DNA, 80 bp, synthetic construct; identical to SEQ ID NO: 40332
  misc_feature 1..80: note = Artificially Synthesized Probe
  source 1..80: mol_type = other DNA

SEQ ID NO: 126720 - DNA, 80 bp, synthetic construct
  misc_feature 1..80: note = Artificially Synthesized Probe
  source 1..80: mol_type = other DNA
tagtagagacggggttttgccatgttgtccagactggtcttgagctcctgacccaagcaatccacccaccttggcctccc

SEQ ID NO: 126721 - DNA, 80 bp, synthetic construct; identical to SEQ ID NO: 40660
  misc_feature 1..80: note = Artificially Synthesized Probe
  source 1..80: mol_type = other DNA

SEQ ID NO: 126722 - DNA, 80 bp, synthetic construct
  misc_feature 1..80: note = Artificially Synthesized Probe
  source 1..80: mol_type = other DNA
taatttcttcatagcctcatcatcacttgttattttctgttgtatttgcttgtttgtattttatagtagccatcctagca

SEQ ID NO: 126723 - DNA, 80 bp, synthetic construct
  misc_feature 1..80: note = Artificially Synthesized Probe
  source 1..80: mol_type = other DNA
ttctggttcagttgtaggagttcttatgtattctagacatcaaccccttaatagatatatgatttacaaactttcacatt

SEQ ID NO: 126724 - DNA, 80 bp, synthetic construct
  misc_feature 1..80: note = Artificially Synthesized Probe
  source 1..80: mol_type = other DNA
tcattgccaagtccagtgtcatgcagtattccccctatttttaatcacaagaattttacaattttagctgtgacatttag

SEQ ID NO: 126725 - DNA, 80 bp, synthetic construct; identical to SEQ ID NO: 40661
  misc_feature 1..80: note = Artificially Synthesized Probe
  source 1..80: mol_type = other DNA

SEQ ID NO: 126726 - DNA, 80 bp, synthetic construct
  misc_feature 1..80: note = Artificially Synthesized Probe
  source 1..80: mol_type = other DNA
ttttctatttctggaaaaaggtctttgggattttgataatgactgcattgaatttgcagatagctttgagtggtatggac

SEQ ID NO: 126727 - DNA, 80 bp, synthetic construct
  misc_feature 1..80: note = Artificially Synthesized Probe
  source 1..80: mol_type = other DNA
ttctaggctgcacaatttgctgggggagtttttctgtgcagaagcatattatatgtccatttttttccccaaaaacaatc

SEQ ID NO: 126728 - DNA, 80 bp, synthetic construct
  misc_feature 1..80: note = Artificially Synthesized Probe
  source 1..80: mol_type = other DNA
tattgtaaatgagattgttttctcaatatccttttcaggttgttcgttgttagcatatagaaataaaactgatttttgag

SEQ ID NO: 126729 - DNA, 80 bp, synthetic construct
  misc_feature 1..80: note = Artificially Synthesized Probe
  source 1..80: mol_type = other DNA
cttgtttgtttttcttcacagttgctgtagctcggatgtctagtattgtgtggaatataattggcagcagtaggcatcct

SEQ ID NO: 126730 - DNA, 80 bp, synthetic construct
  misc_feature 1..80: note = Artificially Synthesized Probe
  source 1..80: mol_type = other DNA
gttacttttttgcatctattaagatgatacagatttttctttttccttccttttgttcacatggcatgttgcattgatag

SEQ ID NO: 126731 - DNA, 80 bp, synthetic construct; identical to SEQ ID NO: 40662
  misc_feature 1..80: note = Artificially Synthesized Probe
  source 1..80: mol_type = other DNA

SEQ ID NO: 126732 - DNA, 80 bp, synthetic construct
  misc_feature 1..80: note = Artificially Synthesized Probe
  source 1..80: mol_type = other DNA
cttcttgatttagttttgataaattgtgtgtgtcacacgaattttttcattgaatccaagttattcaatttgttagtgta

SEQ ID NO: 126733 - DNA, 80 bp, synthetic construct
  misc_feature 1..80: note = Artificially Synthesized Probe
  source 1..80: mol_type = other DNA
gtcaatacagataaagcattgccattttaaaaaatatttttgaagaatcaagttttgcatccattgattttctatattgt

SEQ ID NO: 126734 - DNA, 80 bp, synthetic construct
  misc_feature 1..80: note = Artificially Synthesized Probe
  source 1..80: mol_type = other DNA
gctataagtttcccttttggccctagttttactgtgttgtgtgaattctggtgtgttgtgttttttatttaggttatttt

SEQ ID NO: 126735 - DNA, 80 bp, synthetic construct; identical to SEQ ID NO: 40663
  misc_feature 1..80: note = Artificially Synthesized Probe
  source 1..80: mol_type = other DNA

SEQ ID NO: 126736 - DNA, 80 bp, synthetic construct
  misc_feature 1..80: note = Artificially Synthesized Probe
  source 1..80: mol_type = other DNA
tgccatttggttgatccgaaactggaacccagaacagtcctctaagcctgtggactaagaacattcaagatgttcctgaa

SEQ ID NO: 126737 - DNA, 80 bp, synthetic construct
  misc_feature 1..80: note = Artificially Synthesized Probe
  source 1..80: mol_type = other DNA
ccctgcaatctcaccctctccagatcgtctgtccctgaagtcctcagtggctcctattttttggaggagatggaatggta

SEQ ID NO: 126738 - DNA, 80 bp, synthetic construct
  misc_feature 1..80: note = Artificially Synthesized Probe
  source 1..80: mol_type = other DNA
ccatgcccaaggaatgcagctttgagaatttcatctaatctctctaaacatggtacattttatgtgctcaaatgtttgag

SEQ ID NO: 126739 - DNA, 80 bp, synthetic construct
  misc_feature 1..80: note = Artificially Synthesized Probe
  source 1..80: mol_type = other DNA
gaatttatatcgggttccatcaaagaaaagcgacggaaatgcatgtgcctgcagccattaaacagaaagacaagttgatt

SEQ ID NO: 126740 - DNA, 80 bp, synthetic construct; identical to SEQ ID NO: 40664
  misc_feature 1..80: note = Artificially Synthesized Probe
  source 1..80: mol_type = other DNA

SEQ ID NO: 126741 - DNA, 80 bp, synthetic construct
  misc_feature 1..80: note = Artificially Synthesized Probe
  source 1..80: mol_type = other DNA
agtgtcatcgtttgctttataaataacacagtgtctggaggaagaaatcaagcctgcagaatcataaaaccactcgctaa

SEQ ID NO: 126742 - DNA, 80 bp, synthetic construct
  misc_feature 1..80: note = Artificially Synthesized Probe
  source 1..80: mol_type = other DNA
cctgtggaatgtgtgcttgggttccgaaggtcactttgtatctgattccaaatccctcagaaactcactctttaattagt

SEQ ID NO: 126743 - DNA, 80 bp, synthetic construct
  misc_feature 1..80: note = Artificially Synthesized Probe
  source 1..80: mol_type = other DNA
gcatggagtgctggggagatgatgatgctggggaatgactgagtgggcagtgtcagagtctctctctcatgctagggtgg

SEQ ID NO: 126744 - DNA, 80 bp, synthetic construct
  misc_feature 1..80: note = Artificially Synthesized Probe
  source 1..80: mol_type = other DNA
cctcctgtcttctccccgttcactctgagggaactctcttcccagaataattttttccaacaggtgctgaaacttgtata

SEQ ID NO: 126745 - DNA, 80 bp, synthetic construct; identical to SEQ ID NO: 40665
  misc_feature 1..80: note = Artificially Synthesized Probe
  source 1..80: mol_type = other DNA

SEQ ID NO: 126746 - DNA, 80 bp, synthetic construct
  misc_feature 1..80: note = Artificially Synthesized Probe
  source 1..80: mol_type = other DNA
tcaccatcgatggcttccactgtagaaggctgagtctcctgtattggggtgggagggtcaggcagatgtcaccatcaatg

SEQ ID NO: 126747 - DNA, 80 bp, synthetic construct
  misc_feature 1..80: note = Artificially Synthesized Probe
  source 1..80: mol_type = other DNA
tcccatgttggggtgggagggccaggcagacgtcaccatcgatggctttcactgtagaaggctgagtctcccgtgttggg

SEQ ID NO: 126748 - DNA, 80 bp, synthetic construct
  misc_feature 1..80: note = Artificially Synthesized Probe
  source 1..80: mol_type = other DNA
ctaaaatagaagggtttgtgtgagctcagggatgtgtcttttttctttcctaggaagtggaaaaaccagaccctcaaatt

SEQ ID NO: 126749 - DNA, 80 bp, synthetic construct
  misc_feature 1..80: note = Artificially Synthesized Probe
  source 1..80: mol_type = other DNA
ctcatcctggaattggttagaataatgacagcaagcacagctgctgaccaactgggtgcttattgcctactaggcactgt

SEQ ID NO: 126750 - DNA, 80 bp, synthetic construct; identical to SEQ ID NO: 40666
  misc_feature 1..80: note = Artificially Synthesized Probe
  source 1..80: mol_type = other DNA

SEQ ID NO: 126751 - DNA, 80 bp, synthetic construct
  misc_feature 1..80: note = Artificially Synthesized Probe
  source 1..80: mol_type = other DNA
agcagctctgcctttgtgtaggaacctgcttccgggtcagcacagggcagactccccagcacgctctttaggaacagacc

SEQ ID NO: 126752 - DNA, 80 bp, synthetic construct
  misc_feature 1..80: note = Artificially Synthesized Probe
  source 1..80: mol_type = other DNA
aaaattatttgacactttctcaagaaagcagaacagaacatccagcctcacagagattccgggtgcctaacttcactgtc

SEQ ID NO: 126753 - DNA, 80 bp, synthetic construct
  misc_feature 1..80: note = Artificially Synthesized Probe
  source 1..80: mol_type = other DNA
agcctcaggttccctcccaccttgtgtatctgcaagtgaggggaataagcttttctgtcttcatgcagaatccatactca

SEQ ID NO: 126754 - DNA, 80 bp, synthetic construct; identical to SEQ ID NO: 40667
  misc_feature 1..80: note = Artificially Synthesized Probe
  source 1..80: mol_type = other DNA

SEQ ID NO: 126755 - DNA, 80 bp, synthetic construct
  misc_feature 1..80: note = Artificially Synthesized Probe
  source 1..80: mol_type = other DNA
cttcccagtggcccagcctggcgcatccgcagttccttcctggctcttgtaggtcgttttccagcctttccctggaagca

SEQ ID NO: 126756 - DNA, 80 bp, synthetic construct
  misc_feature 1..80: note = Artificially Synthesized Probe
  source 1..80: mol_type = other DNA
gtctcctaggagactccatctcacactagacaggcagaagttaacaagtttgaaaataccgagtatcagcaaggaacgga

SEQ ID NO: 126757 - DNA, 80 bp, synthetic construct; identical to SEQ ID NO: 40668
  misc_feature 1..80: note = Artificially Synthesized Probe
  source 1..80: mol_type = other DNA

SEQ ID NO: 126758 - DNA, 80 bp, synthetic construct
  misc_feature 1..80: note = Artificially Synthesized Probe
  source 1..80: mol_type = other DNA
tcctgagtagctggaattacagatgcccaccaccacacccagataattttttgtatttttggtagagatggggattttcc

SEQ ID NO: 126759 - DNA, 80 bp, synthetic construct
  misc_feature 1..80: note = Artificially Synthesized Probe
  source 1..80: mol_type = other DNA
attaatatgtaaacagaagacaggccaaagtcacagacattctaaaacagtgaagcagaattaaaccagtaagcattggt

SEQ ID NO: 126760 - DNA, 80 bp, synthetic construct; identical to SEQ ID NO: 40333
  misc_feature 1..80: note = Artificially Synthesized Probe
  source 1..80: mol_type = other DNA

SEQ ID NO: 126761 - DNA, 80 bp, synthetic construct
  misc_feature 1..80: note = Artificially Synthesized Probe
  source 1..80: mol_type = other DNA
tttaccatcctgcgccactccagaaatgtgatggttgatactgagtgtcaacttgattggcttgaaggacacaaagtatt

SEQ ID NO: 126762 - DNA, 80 bp, synthetic construct
  misc_feature 1..80: note = Artificially Synthesized Probe
  source 1..80: mol_type = other DNA
ctcccagcctacatctttctcccatgctgggtgcttcctgcccttgaacatcagactccaagttcttcagttttgaggtt

SEQ ID NO: 126763 - DNA, 80 bp, synthetic construct; identical to SEQ ID NO: 40669
  misc_feature 1..80: note = Artificially Synthesized Probe
  source 1..80: mol_type = other DNA

SEQ ID NO: 126764 - DNA, 80 bp, synthetic construct
  misc_feature 1..80: note = Artificially Synthesized Probe
  source 1..80: mol_type = other DNA
aggttcagaaggtggatccttcctgcctcttcctgctttgggtggctcctgcagtccctggcattcctcaatctgcagct

SEQ ID NO: 126765 - DNA, 80 bp, synthetic construct
  misc_feature 1..80: note = Artificially Synthesized Probe
  source 1..80: mol_type = other DNA
actgggggctaagactccagcatgactttcggagggacacaagtcatccctgtgaagcaacccacaagaaacgtggagca

SEQ ID NO: 126766 - DNA, 80 bp, synthetic construct; identical to SEQ ID NO: 40670
  misc_feature 1..80: note = Artificially Synthesized Probe
  source 1..80: mol_type = other DNA

SEQ ID NO: 126767 - DNA, 80 bp, synthetic construct
  misc_feature 1..80: note = Artificially Synthesized Probe
  source 1..80: mol_type = other DNA
aagggcgtgcaagaagggtgccttaaatgagggcactattaccatcaccactctgaagggcatgcaagaagtgtgcctca

SEQ ID NO: 126768 - DNA, 80 bp, synthetic construct
  misc_feature 1..80: note = Artificially Synthesized Probe
  source 1..80: mol_type = other DNA
tcaaagtccactcactcttggctgatggtcttcgttagctaaagcgttttctgcaggtctccttccacaatccagtctgc

SEQ ID NO: 126769 - DNA, 80 bp, synthetic construct
  misc_feature 1..80: note = Artificially Synthesized Probe
  source 1..80: mol_type = other DNA
cctgcttgtaaggtggctctcagtctatcccagaagagctacctgtgcccatgtgatttctctcccttcccataccccat

SEQ ID NO: 126770 - DNA, 80 bp, synthetic construct
  misc_feature 1..80: note = Artificially Synthesized Probe
  source 1..80: mol_type = other DNA
ttgaaaatgaacttgagtgtgctatttaataccacattttgttttatcacatcctaattacgtttactagctattgtcct

SEQ ID NO: 126771 - DNA, 80 bp, synthetic construct
  misc_feature 1..80: note = Artificially Synthesized Probe
  source 1..80: mol_type = other DNA
gaatgattaatattgagacagccaagtgttatcacagtttcatggacaagaaagagacaatatgtggaagaaaagtactg

SEQ ID NO: 126772 - DNA, 80 bp, synthetic construct; identical to SEQ ID NO: 40671
  misc_feature 1..80: note = Artificially Synthesized Probe
  source 1..80: mol_type = other DNA

SEQ ID NO: 126773 - DNA, 80 bp, synthetic construct
  misc_feature 1..80: note = Artificially Synthesized Probe
  source 1..80: mol_type = other DNA
acatgcatggagctctcagtggatggtggggaagggtcatgggattgggcaccttacttagtttgagggagagtcacaga

SEQ ID NO: 126774 - DNA, 80 bp, synthetic construct
  misc_feature 1..80: note = Artificially Synthesized Probe
  source 1..80: mol_type = other DNA
agtactcaaaaaatattatggcctcaaacttccccacattggctagagacgtaaacctacatattccagaaactgaacaa

SEQ ID NO: 126775 - DNA, 80 bp, synthetic construct; identical to SEQ ID NO: 40672
  misc_feature 1..80: note = Artificially Synthesized Probe
  source 1..80: mol_type = other DNA

SEQ ID NO: 126776 - DNA, 80 bp, synthetic construct
  misc_feature 1..80: note = Artificially Synthesized Probe
  source 1..80: mol_type = other DNA
gaagaagggccatggtgagcgagagtgcaggtgacaccacagacatttcttgtcctactgagttttcttacttttttttt

SEQ ID NO: 126777 - DNA, 80 bp, synthetic construct
  misc_feature 1..80: note = Artificially Synthesized Probe
  source 1..80: mol_type = other DNA
tgtatttagtagagacagggtttcatcatgttagccaggctggtctcgatctcctgagctcgtgatcctcccacctcagc

SEQ ID NO: 126778 - DNA, 80 bp, synthetic construct
  misc_feature 1..80: note = Artificially Synthesized Probe
  source 1..80: mol_type = other DNA
aaaaggaaggtgaaggggagtgaggtttctatacttcaactaaactcatggaggaaggaccactgtgtatatagaatgtg

SEQ ID NO: 126779 - DNA, 80 bp, synthetic construct
  misc_feature 1..80: note = Artificially Synthesized Probe
  source 1..80: mol_type = other DNA
tatacaactgcgtatagagaaccagagcaatttctaaaaaggccatccaaagagacactcaaaaaaatacagataaattg

SEQ ID NO: 126780 - DNA, 80 bp, synthetic construct; identical to SEQ ID NO: 40673
  misc_feature 1..80: note = Artificially Synthesized Probe
  source 1..80: mol_type = other DNA

SEQ ID NO: 126781 - DNA, 80 bp, synthetic construct
  misc_feature 1..80: note = Artificially Synthesized Probe
  source 1..80: mol_type = other DNA
aagacccagccatcctaagtgagtattcacaaaacaacggggctgcaaaatatgggaagcaaaaactgagaactgaaaca

SEQ ID NO: 126782 - DNA, 80 bp, synthetic construct
  misc_feature 1..80: note = Artificially Synthesized Probe
  source 1..80: mol_type = other DNA
acatactacgggataataaacattatcttcaagtgtccatgcaacttttagcaggatcagccatatctgggggcataaac

SEQ ID NO: 126783 - DNA, 80 bp, synthetic construct
  misc_feature 1..80: note = Artificially Synthesized Probe
  source 1..80: mol_type = other DNA
agagagagagagagagatcagaggatttcccatgtgctgagtatcaattttcctttcacacagtcttgcatggggggctg

SEQ ID NO: 126784 - DNA, 80 bp, synthetic construct; identical to SEQ ID NO: 40674
  misc_feature 1..80: note = Artificially Synthesized Probe
  source 1..80: mol_type = other DNA

SEQ ID NO: 126785 - DNA, 80 bp, synthetic construct
  misc_feature 1..80: note = Artificially Synthesized Probe
  source 1..80: mol_type = other DNA
cagtaaaacaaagagctgtttctttgaagatatcattaaatttggcaaatgtttagaagaaagactcacaaaaaaaagag

SEQ ID NO: 126786 - DNA, 80 bp, synthetic construct
  misc_feature 1..80: note = Artificially Synthesized Probe
  source 1..80: mol_type = other DNA
ctgccacaactccatcactgtagagtctttgggtagccttaccattactaagaaaacttatttgtagcttaaaaactttc

SEQ ID NO: 126787 - DNA, 80 bp, synthetic construct
  misc_feature 1..80: note = Artificially Synthesized Probe
  source 1..80: mol_type = other DNA
aacactccagaaaataaactacagaccaatattctccattaatacagacactcaatcttcaagaaagcactaggtgacct

SEQ ID NO: 126788 - DNA, 80 bp, synthetic construct; identical to SEQ ID NO: 40675
  misc_feature 1..80: note = Artificially Synthesized Probe
  source 1..80: mol_type = other DNA

SEQ ID NO: 126789 - DNA, 80 bp, synthetic construct
  misc_feature 1..80: note = Artificially Synthesized Probe
  source 1..80: mol_type = other DNA
tacttgggagtctgaggcaggagaatcgcttgaacccaggaggtggaggttgcagtgagccgagatcaccccactgcact

SEQ ID NO: 126790 - DNA, 80 bp, synthetic construct
  misc_feature 1..80: note = Artificially Synthesized Probe
  source 1..80: mol_type = other DNA
ctattgctcttggtttattttattccaaaagctgaacttcaaagccatttactttaagctttcattaataagaccatttt

SEQ ID NO: 126791 - DNA, 80 bp, synthetic construct
  misc_feature 1..80: note = Artificially Synthesized Probe
  source 1..80: mol_type = other DNA
tcaccatataatgtgctggagataaagttcagtatgaaaagactgtcctctgtcttcagacaaaccatgaagtgttctgc

SEQ ID NO: 126792 - DNA, 80 bp, synthetic construct
  misc_feature 1..80: note = Artificially Synthesized Probe
  source 1..80: mol_type = other DNA
ctaccagggttgtttgggatgcaatgacaaaggtaactttaccctttagagaagagaaaatctcacctggaatcaggttt

SEQ ID NO: 126793 - DNA, 80 bp, synthetic construct; identical to SEQ ID NO: 40676
  misc_feature 1..80: note = Artificially Synthesized Probe
  source 1..80: mol_type = other DNA

SEQ ID NO: 126794 - DNA, 80 bp, synthetic construct
  misc_feature 1..80: note = Artificially Synthesized Probe
  source 1..80: mol_type = other DNA
cccacatgtcattcattcactaggttgaaagaattgtgtttggaaagttctatgataagactgttttgtgggagttgtat

SEQ ID NO: 126795 - DNA, 80 bp, synthetic construct
  misc_feature 1..80: note = Artificially Synthesized Probe
  source 1..80: mol_type = other DNA
tttccttcatcctaagcccctttggagattatgcaaatgcgttgtgtgcttatgtggccatctggagtaactttgtcctg

SEQ ID NO: 126796 - DNA, 80 bp, synthetic construct
  misc_feature 1..80: note = Artificially Synthesized Probe
  source 1..80: mol_type = other DNA
actagatttaaattctagagattgagtagctttcaaacctgagctgtgagaatgtcacctcctgtggcctttcacataga

SEQ ID NO: 126797 - DNA, 80 bp, synthetic construct; identical to SEQ ID NO: 40677
  misc_feature 1..80: note = Artificially Synthesized Probe
  source 1..80: mol_type = other DNA

SEQ ID NO: 126798 - DNA, 80 bp, synthetic construct
  misc_feature 1..80: note = Artificially Synthesized Probe
  source 1..80: mol_type = other DNA
tgaggaagagcctcccgagctatgcagccacagggccgagcacagcaggagcggggggacagtggaggtcttgtcaggca

SEQ ID NO: 126799 - DNA, 80 bp, synthetic construct
  misc_feature 1..80: note = Artificially Synthesized Probe
  source 1..80: mol_type = other DNA
gtgtgagccacactgtgtgtgtcagccatgtgctgtgtgtcacctgtgtactctgtgtgtgtgagccacatgctgtgtca

SEQ ID NO: 126800 - DNA, 80 bp, synthetic construct
  misc_feature 1..80: note = Artificially Synthesized Probe
  source 1..80: mol_type = other DNA
gtgggtgtgtgtggagtgagagtcatgcactgtgtgtgtctggtgtgtgtcatgtgctgtgtgtgtgtggtgtgtgagcc

SEQ ID NO: 126801 - DNA, 80 bp, synthetic construct
  misc_feature 1..80: note = Artificially Synthesized Probe
  source 1..80: mol_type = other DNA
gtctgtatgtctgtgtctgtggtgggtgagccgtgcattgtgtataagtgtgtgtgtggtatgtgaaccgtgcactgtgt

SEQ ID NO: 126802 - DNA, 80 bp, synthetic construct; identical to SEQ ID NO: 40334
  misc_feature 1..80: note = Artificially Synthesized Probe
  source 1..80: mol_type = other DNA

SEQ ID NO: 126803 - DNA, 80 bp, synthetic construct; identical to SEQ ID NO: 40678
  misc_feature 1..80: note = Artificially Synthesized Probe
  source 1..80: mol_type = other DNA

SEQ ID NO: 126804 - DNA, 80 bp, synthetic construct
  misc_feature 1..80: note = Artificially Synthesized Probe
  source 1..80: mol_type = other DNA
gggtccctgcttctttcgtctggagtcgcatgaaaacatttaaagcacaaatctcgctttcaaccaacatggctgcgagt

SEQ ID NO: 126805 - DNA, 80 bp, synthetic construct
  misc_feature 1..80: note = Artificially Synthesized Probe
  source 1..80: mol_type = other DNA
agactgcagaccttctcgcaccgtgtgaccgatgtagtttttgtttgtttttggtggtatccctgcagtactgcgctgct

SEQ ID NO: 126806 - DNA, 80 bp, synthetic construct; identical to SEQ ID NO: 40679
  misc_feature 1..80: note = Artificially Synthesized Probe
  source 1..80: mol_type = other DNA

SEQ ID NO: 126807 - DNA, 80 bp, synthetic construct
  misc_feature 1..80: note = Artificially Synthesized Probe
  source 1..80: mol_type = other DNA
gtctcccgggaccctgcatcctcctgttttgttccccgtaacttgcatatgagagcattttataatttttgaccaaaggg

SEQ ID NO: 126808 - DNA, 80 bp, synthetic construct
  misc_feature 1..80: note = Artificially Synthesized Probe
  source 1..80: mol_type = other DNA
gagtaagaccaaggtaagaggccaagcaggcatccatgccgccccattgccatgtgcttggttacattccatgggcgtta

SEQ ID NO: 126809 - DNA, 80 bp, synthetic construct
  misc_feature 1..80: note = Artificially Synthesized Probe
  source 1..80: mol_type = other DNA
gtggatagggaagttgaagatgctgctgctaaggagggacccacaacacttgagtaaacgctttgaaaaaaaacactcat

SEQ ID NO: 126810 - DNA, 80 bp, synthetic construct
  misc_feature 1..80: note = Artificially Synthesized Probe
  source 1..80: mol_type = other DNA
tttccaccccatctgagtattctcctaactacgtaagtgttaaggaaatgctttgtgaggacaatccactgttttgtcat

SEQ ID NO: 126811 - DNA, 80 bp, synthetic construct; identical to SEQ ID NO: 40680
  misc_feature 1..80: note = Artificially Synthesized Probe
  source 1..80: mol_type = other DNA

SEQ ID NO: 126812 - DNA, 80 bp, synthetic construct
  misc_feature 1..80: note = Artificially Synthesized Probe
  source 1..80: mol_type = other DNA
aaactggtggttttgcccccgagggacacttgggcatgtctggagacactttctattgtcaggacttggtgggagtttct

SEQ ID NO: 126813 - DNA, 80 bp, synthetic construct
  misc_feature 1..80: note = Artificially Synthesized Probe
  source 1..80: mol_type = other DNA
tagtagaaaagataaaatgtagcagtgttctaatcaaagcacagattgtgttgtttaaagaaaatgtccttggcaataca

SEQ ID NO: 126814 - DNA, 80 bp, synthetic construct
  misc_feature 1..80: note = Artificially Synthesized Probe
  source 1..80: mol_type = other DNA
aaatttaatggagtcattgttcccctccagggcacataccatgtttgcaatgacaatagcacatatttgcataagcattg

SEQ ID NO: 126815 - DNA, 80 bp, synthetic construct; identical to SEQ ID NO: 40681
  misc_feature 1..80: note = Artificially Synthesized Probe
  source 1..80: mol_type = other DNA

SEQ ID NO: 126816 - DNA, 80 bp, synthetic construct
  misc_feature 1..80: note = Artificially Synthesized Probe
  source 1..80: mol_type = other DNA
ctcactgcagcccctggggtcctgtgtgtccctccactggaaggagcctgtgagctcctcctttccaggagcgaaacgct

SEQ ID NO: 126817 - DNA, 80 bp, synthetic construct
  misc_feature 1..80: note = Artificially Synthesized Probe
  source 1..80: mol_type = other DNA
attctgctagagggtctcagcacaggaagatcaactgagtctgcaaaaatgaaaagaacatccatcaccacattcagcca

SEQ ID NO: 126818 - DNA, 80 bp, synthetic construct
  misc_feature 1..80: note = Artificially Synthesized Probe
  source 1..80: mol_type = other DNA
cctgtgcctttcctcctcaagggcatcaccatccttctccggagccttttcccatttccctggcgtggtcaatgccaggc

SEQ ID NO: 126819 - DNA, 80 bp, synthetic construct; identical to SEQ ID NO: 40682
  misc_feature 1..80: note = Artificially Synthesized Probe
  source 1..80: mol_type = other DNA

SEQ ID NO: 126820 - DNA, 80 bp, synthetic construct
  misc_feature 1..80: note = Artificially Synthesized Probe
  source 1..80: mol_type = other DNA
cagctgaggttcttctctgctcgctgtcctctccactctaggtcaactttgtgtaaagattcaatgaagacgtctttttg

SEQ ID NO: 126821 - DNA, 80 bp, synthetic construct
  misc_feature 1..80: note = Artificially Synthesized Probe
  source 1..80: mol_type = other DNA
tccttgttgagtccattcagacaacaactgaacctgaaaatagcacatgacaacataaacaattgttccttgtagtttat

SEQ ID NO: 126822 - DNA, 80 bp, synthetic construct
  misc_feature 1..80: note = Artificially Synthesized Probe
  source 1..80: mol_type = other DNA
tcttgtcactcatgtcaatgtaggatgacatttgtgagtttggcgtcagtaggctttcgattatttgtatattgatagga

SEQ ID NO: 126823 - DNA, 80 bp, synthetic construct
  misc_feature 1..80: note = Artificially Synthesized Probe
  source 1..80: mol_type = other DNA
tacttagattgggagttaccatgcttatattcacaagataattagcacttttacaccacactatcctgttaactgaggac

SEQ ID NO: 126824 - DNA, 80 bp, synthetic construct; identical to SEQ ID NO: 40683
  misc_feature 1..80: note = Artificially Synthesized Probe
  source 1..80: mol_type = other DNA

SEQ ID NO: 126825 - DNA, 80 bp, synthetic construct
  misc_feature 1..80: note = Artificially Synthesized Probe
  source 1..80: mol_type = other DNA
tatgtttttacaaataattttcagacacatgtgtttgaagtgttgctcatgtccttagcatgtgctgggtgctttgggaa

SEQ ID NO: 126826 - DNA, 80 bp, synthetic construct
  misc_feature 1..80: note = Artificially Synthesized Probe
  source 1..80: mol_type = other DNA
accattatctaatctatatggcctaaatctctcgatgcaaagttttttttttaattaaagaggataaactagaacacccc

SEQ ID NO: 126827 - DNA, 80 bp, synthetic construct
  misc_feature 1..80: note = Artificially Synthesized Probe
  source 1..80: mol_type = other DNA
attagcactgacttccctcctgttccatgtaattaatcagaagtgggagaggacatcgacaagaatagaacccacaatgg

SEQ ID NO: 126828 - DNA, 80 bp, synthetic construct; identical to SEQ ID NO: 40684
  misc_feature 1..80: note = Artificially Synthesized Probe
  source 1..80: mol_type = other DNA

SEQ ID NO: 126829 - DNA, 80 bp, synthetic construct
  misc_feature 1..80: note = Artificially Synthesized Probe
  source 1..80: mol_type = other DNA
ggggctgagttaaggttgatggagaggaacaaaaagatcagtttttaaaagctgaaaaggaattgtttgttgtggaagac

SEQ ID NO: 126830 - DNA, 80 bp, synthetic construct
  misc_feature 1..80: note = Artificially Synthesized Probe
  source 1..80: mol_type = other DNA
ttcaaggattatcttccatgatcggtgtgttaacaatcagactgtgttgcagaggaagtattaccttccattgtcagtat

SEQ ID NO: 126831 - DNA, 80 bp, synthetic construct
  misc_feature 1..80: note = Artificially Synthesized Probe
  source 1..80: mol_type = other DNA
agctgctctttaattactaaaactatggaaaaatgttttctgtcttccaagagggagaactaaaaatccggcttcccttc

SEQ ID NO: 126832 - DNA, 80 bp, synthetic construct; identical to SEQ ID NO: 40685
  misc_feature 1..80: note = Artificially Synthesized Probe
  source 1..80: mol_type = other DNA

SEQ ID NO: 126833 - DNA, 80 bp, synthetic construct
  misc_feature 1..80: note = Artificially Synthesized Probe
  source 1..80: mol_type = other DNA
ccaccacgtccggccacacagctctgagaagggcagaaagagagtcacgcctgcgcccatggagccccaacttgtacctg

SEQ ID NO: 126834 - DNA, 80 bp, synthetic construct
  misc_feature 1..80: note = Artificially Synthesized Probe
  source 1..80: mol_type = other DNA
tgcctcatgaggaagggttattctcaaatctgcaaatattgagtacagttgcagtgcaatatcaatggaccataaagaca

SEQ ID NO: 126835 - DNA, 80 bp, synthetic construct
  misc_feature 1..80: note = Artificially Synthesized Probe
  source 1..80: mol_type = other DNA
ctatcctaataggggtagaccactactgcgctctttcttcaaaatcaaatttgaaccaaagactcttactgctgctcaca

SEQ ID NO: 126836 - DNA, 80 bp, synthetic construct
  misc_feature 1..80: note = Artificially Synthesized Probe
  source 1..80: mol_type = other DNA
taaggggctgaagtcacagccttcacttaacagctttcagagaaggtgctttggcgctgcctaggcaaggtggaattggt

SEQ ID NO: 126837 - DNA, 80 bp, synthetic construct
  misc_feature 1..80: note = Artificially Synthesized Probe
  source 1..80: mol_type = other DNA
gggatggttgtgccaggactgagaaggagaggtgaggctagactgcgctgggttaaagccagcaggagaatggcacactg

SEQ ID NO: 126838 - DNA, 80 bp, synthetic construct; identical to SEQ ID NO: 40686
  misc_feature 1..80: note = Artificially Synthesized Probe
  source 1..80: mol_type = other DNA

SEQ ID NO: 126839 - DNA, 80 bp, synthetic construct
  misc_feature 1..80: note = Artificially Synthesized Probe
  source 1..80: mol_type = other DNA
aactgccccttataaaaccatcagatcatgtgagacttagtcactgtcacgagaacagcatgggaaagacctgccctcat

SEQ ID NO: 126840 - DNA, 80 bp, synthetic construct
  misc_feature 1..80: note = Artificially Synthesized Probe
  source 1..80: mol_type = other DNA
ctgatgcccaaagtctgtccaggtgggtgtgggctcagtttcctcactgtgaacgtggaagagacagagaaactattccc

SEQ ID NO: 126841 - DNA, 80 bp, synthetic construct; identical to SEQ ID NO: 40687
  misc_feature 1..80: note = Artificially Synthesized Probe
  source 1..80: mol_type = other DNA

SEQ ID NO: 126842 - DNA, 80 bp, synthetic construct
  misc_feature 1..80: note = Artificially Synthesized Probe
  source 1..80: mol_type = other DNA
gacatccattacgtctttctttgctgcagccttttttatttatgggagtaagagtttgtagagtacatttcatctttaac

SEQ ID NO: 126843 - DNA, 80 bp, synthetic construct
  misc_feature 1..80: note = Artificially Synthesized Probe
  source 1..80: mol_type = other DNA
ttttatctgcacttttgactatgtcttatataatataggaagaactggaacttttagtgattttttctgaagttctccaa

SEQ ID NO: 126844 - DNA, 80 bp, synthetic construct
  misc_feature 1..80: note = Artificially Synthesized Probe
  source 1..80: mol_type = other DNA
ggcgggagagttgagtgggctggaggaggtcagtttgcaaagattgaagaatgagaaagtagagacagacaaatcatcac

SEQ ID NO: 126845 - DNA, 80 bp, synthetic construct
  misc_feature 1..80: note = Artificially Synthesized Probe
  source 1..80: mol_type = other DNA
ttcctttacagaatgtgctctggagatttaaattttcccagcttaagggatcttcagatgatgggaaaactcgagtaaag

SEQ ID NO: 126846 - DNA, 80 bp, synthetic construct; identical to SEQ ID NO: 40688
  misc_feature 1..80: note = Artificially Synthesized Probe
  source 1..80: mol_type = other DNA

SEQ ID NO: 126847 - DNA, 80 bp, synthetic construct
  misc_feature 1..80: note = Artificially Synthesized Probe
  source 1..80: mol_type = other DNA
acttagcatcagggcagcattggagaaggttgggattctggaacatttagcatcaggtcagcattggagaaggttgggat

SEQ ID NO: 126848 - DNA, 80 bp, synthetic construct; identical to SEQ ID NO: 40335
  misc_feature 1..80: note = Artificially Synthesized Probe
  source 1..80: mol_type = other DNA

SEQ ID NO: 126849 - DNA, 80 bp, synthetic construct
  misc_feature 1..80: note = Artificially Synthesized Probe
  source 1..80: mol_type = other DNA
tggagaaggttgggattctggagcatgtagcatatggccagcattggagaaggttgggattctggagcatttagcatcag

SEQ ID NO: 126850 - DNA, 80 bp, synthetic construct; identical to SEQ ID NO: 40689
  misc_feature 1..80: note = Artificially Synthesized Probe
  source 1..80: mol_type = other DNA

SEQ ID NO: 126851 - DNA, 80 bp, synthetic construct
  misc_feature 1..80: note = Artificially Synthesized Probe
  source 1..80: mol_type = other DNA
tggagaaggttgggattctggagcatgtagcatgaggccagcattggagaaggttgggattctggagcatttagcatcag

SEQ ID NO: 126852 - DNA, 80 bp, synthetic construct
  misc_feature 1..80: note = Artificially Synthesized Probe
  source 1..80: mol_type = other DNA
atttagcatcaggtcagcattggagaaggttgggattctggagcatttagcatcaggtcagcattggagaaggttgggat

SEQ ID NO: 126853 - DNA, 80 bp, synthetic construct
  misc_feature 1..80: note = Artificially Synthesized Probe
  source 1..80: mol_type = other DNA
ttgggatgctcaatctgtataggatgtttcctgttagagagacgtttatatcctaaaatggtgaccattgaaacaaagta

SEQ ID NO: 126854 - DNA, 80 bp, synthetic construct
  misc_feature 1..80: note = Artificially Synthesized Probe
  source 1..80: mol_type = other DNA
ctttgttaattaaagaccttagaccttttaaattcattgcctggaggtgacattgtactattgacaggtgttgactttta

SEQ ID NO: 126855 - DNA, 80 bp, synthetic construct; identical to SEQ ID NO: 40690
  misc_feature 1..80: note = Artificially Synthesized Probe
  source 1..80: mol_type = other DNA

SEQ ID NO: 126856 - DNA, 80 bp, synthetic construct
  misc_feature 1..80: note = Artificially Synthesized Probe
  source 1..80: mol_type = other DNA
tgttttggaaattgacaaaagcaaaacctgaatgcagatggtacagacactgtggctcctgggctgggggagagcgatga

SEQ ID NO: 126857 - DNA, 80 bp, synthetic construct
  misc_feature 1..80: note = Artificially Synthesized Probe
  source 1..80: mol_type = other DNA
gatgtgaatggatcagggatgaaaatagaatgttcttcctctggtttgtttatttatgcagctgtttgccttgggcgcca

SEQ ID NO: 126858 - DNA, 80 bp, synthetic construct; identical to SEQ ID NO: 40300
  misc_feature 1..80: note = Artificially Synthesized Probe
  source 1..80: mol_type = other DNA

SEQ ID NO: 126859 - DNA, 80 bp, synthetic construct
  misc_feature 1..80: note = Artificially Synthesized Probe
  source 1..80: mol_type = other DNA
caggacctccagcagctcccatggcatctgaaacacccttttgacagtgtctgttgaggttaaatgtatttgtgttttat

SEQ ID NO: 126860 - DNA, 80 bp, synthetic construct; identical to SEQ ID NO: 40691
  misc_feature 1..80: note = Artificially Synthesized Probe
  source 1..80: mol_type = other DNA

SEQ ID NO: 126861 - DNA, 80 bp, synthetic construct
  misc_feature 1..80: note = Artificially Synthesized Probe
  source 1..80: mol_type = other DNA
ggtcctttgtctcagcagctctaggaaaccaaggggaggctggggagagaggcctggaggacaggagggttgatggggcc

SEQ ID NO: 126862 - DNA, 80 bp, synthetic construct
  misc_feature 1..80: note = Artificially Synthesized Probe
  source 1..80: mol_type = other DNA
gggcacataaatatgtcccaacaaacccaaactaaaaaaacctccacctccatttcccgtgctggatctcagagccgccc

SEQ ID NO: 126863 - DNA, 80 bp, synthetic construct
  misc_feature 1..80: note = Artificially Synthesized Probe
  source 1..80: mol_type = other DNA
gaagaggggacacagatgaggatgacagcatttcccaccttatcccacagagtaggaaacacatatgtggataactgcaa

SEQ ID NO: 126864 - DNA, 80 bp, synthetic construct
  misc_feature 1..80: note = Artificially Synthesized Probe
  source 1..80: mol_type = other DNA
cgggaatgaattctgagttgaaactcatagctattgcaaatcttggatgttagcaatatgttgtcttaagaaataggaac

SEQ ID NO: 126865 - DNA, 80 bp, synthetic construct; identical to SEQ ID NO: 40692
  misc_feature 1..80: note = Artificially Synthesized Probe
  source 1..80: mol_type = other DNA

SEQ ID NO: 126866 - DNA, 80 bp, synthetic construct
  misc_feature 1..80: note = Artificially Synthesized Probe
  source 1..80: mol_type = other DNA
tacaaaaaattagccgggcctggttgcgggcacctgtagtcccagctactcaggaggctgaggcaggagaatggtgtgaa

SEQ ID NO: 126867 - DNA, 80 bp, synthetic construct
  misc_feature 1..80: note = Artificially Synthesized Probe
  source 1..80: mol_type = other DNA
acacagattccaatggctggaaattttaggttgcagtagtttttaaataaaatatttttcttcctctttgactgtttttt

SEQ ID NO: 126868 - DNA, 80 bp, synthetic construct
  misc_feature 1..80: note = Artificially Synthesized Probe
  source 1..80: mol_type = other DNA
gatacccagggaggcccccccatgtttctgtgtatattgcttatattttgcatatttctttataattccatttttgcctc

SEQ ID NO: 126869 - DNA, 80 bp, synthetic construct
  misc_feature 1..80: note = Artificially Synthesized Probe
  source 1..80: mol_type = other DNA
gttctaaggagaaaattgttcctattgtcaggaaaatgggataccttaatgctcactggagtttcatcagttctaaagag

SEQ ID NO: 126870 - DNA, 80 bp, synthetic construct; identical to SEQ ID NO: 40693
  misc_feature 1..80: note = Artificially Synthesized Probe
  source 1..80: mol_type = other DNA

SEQ ID NO: 126871 - DNA, 80 bp, synthetic construct
  misc_feature 1..80: note = Artificially Synthesized Probe
  source 1..80: mol_type = other DNA
agttttcttggcaggagcaccgatcgatgcccacagcatttatcactgaaaagactgaatcgagggtgctgagaaaacta

SEQ ID NO: 126872 - DNA, 80 bp, synthetic construct
  misc_feature 1..80: note = Artificially Synthesized Probe
  source 1..80: mol_type = other DNA
ccaggatgacaccccacgtgggcctctccaggccgctcggctgcccagatgcagcttcttcctgccctcagcctcgccct

SEQ ID NO: 126873 - DNA, 80 bp, synthetic construct
  misc_feature 1..80: note = Artificially Synthesized Probe
  source 1..80: mol_type = other DNA
tgaagcacaacgcccccttccctaatacagatctgaaattatttttaaaattctcatctcaagaaaatgaaaacaaaagc

SEQ ID NO: 126874 - DNA, 80 bp, synthetic construct
  misc_feature 1..80: note = Artificially Synthesized Probe
  source 1..80: mol_type = other DNA
tggatagtcgattcattccagaaaaatgagttgactacttttaggatgtttgaacacaacatctttgttttggttttaag

SEQ ID NO: 126875 - DNA, 80 bp, synthetic construct; identical to SEQ ID NO: 40694
  misc_feature 1..80: note = Artificially Synthesized Probe
  source 1..80: mol_type = other DNA

SEQ ID NO: 126876 - DNA, 80 bp, synthetic construct
  misc_feature 1..80: note = Artificially Synthesized Probe
  source 1..80: mol_type = other DNA
gagctggagttccaatgcagaccccataacactttaactgtttaaacctgagttggccccaggagaaataataaaaatta

SEQ ID NO: 126877 - DNA, 80 bp, synthetic construct
  misc_feature 1..80: note = Artificially Synthesized Probe
  source 1..80: mol_type = other DNA
tttcctactggggtacctgagtaatctgtggtcttggaggctcccctctactgcttggggttgatacaagggaacctatc

SEQ ID NO: 126878 - DNA, 80 bp, synthetic construct; identical to SEQ ID NO: 40695
  misc_feature 1..80: note = Artificially Synthesized Probe
  source 1..80: mol_type = other DNA

SEQ ID NO: 126879 - DNA, 80 bp, synthetic construct
  misc_feature 1..80: note = Artificially Synthesized Probe
  source 1..80: mol_type = other DNA
ttcttaagagttgacctaaggagaggtaggaagtggaaaggaggtgggtagggtctgtctctctgatcagaatctttttc

SEQ ID NO: 126880 - DNA, 80 bp, synthetic construct
  misc_feature 1..80: note = Artificially Synthesized Probe
  source 1..80: mol_type = other DNA
tgggtggaaacaccaataaaactctgaaggacacatggctgagacccccagtaggctgggacatggctaacagtcacatg

SEQ ID NO: 126881 - DNA, 80 bp, synthetic construct
  misc_feature 1..80: note = Artificially Synthesized Probe
  source 1..80: mol_type = other DNA
ctaacagtcacatggctgagaccccctgtaggctgggacatgggtaacagtcacatggctaagaccccccagtagactgg

SEQ ID NO: 126882 - DNA, 80 bp, synthetic construct; identical to SEQ ID NO: 40696
  misc_feature 1..80: note = Artificially Synthesized Probe
  source 1..80: mol_type = other DNA

SEQ ID NO: 126883 - DNA, 80 bp, synthetic construct
  misc_feature 1..80: note = Artificially Synthesized Probe
  source 1..80: mol_type = other DNA
acaccccctagtaggctgggacatgggtaacagtcacatgcctgagaccccccagtagtctgggacatggctaacagtca

SEQ ID NO: 126884 - DNA, 80 bp, synthetic construct
  misc_feature 1..80: note = Artificially Synthesized Probe
  source 1..80: mol_type = other DNA
gaggtcacaccaaagacatgggggaccgaggcgtggacactcaggtggggagagcctgtggccgcccaaggcccatgctc

SEQ ID NO: 126885 - DNA, 80 bp, synthetic construct
  misc_feature 1..80: note = Artificially Synthesized Probe
  source 1..80: mol_type = other DNA
agctgctgttgcttattgaatcatctctagtctttggaatgccacagtttaagttttctcagaagtaaaacaataagaca

SEQ ID NO: 126886 - DNA, 80 bp, synthetic construct
  misc_feature 1..80: note = Artificially Synthesized Probe
  source 1..80: mol_type = other DNA
acttcttggagccaggaaataattcagaattcagcctaagttgtaagcaaataataaaaattcaaaaacaatggtcagcg

SEQ ID NO: 126887 - DNA, 80 bp, synthetic construct; identical to SEQ ID NO: 40697
  misc_feature 1..80: note = Artificially Synthesized Probe
  source 1..80: mol_type = other DNA

SEQ ID NO: 126888 - DNA, 80 bp, synthetic construct
  misc_feature 1..80: note = Artificially Synthesized Probe
  source 1..80: mol_type = other DNA
atcttgtaagggaaccttgtaagcaagtgaccatgccagtctttccaaggtactatttactggccctataaagtcaacgt

SEQ ID NO: 126889 - DNA, 80 bp, synthetic construct
  misc_feature 1..80: note = Artificially Synthesized Probe
  source 1..80: mol_type = other DNA
cttatgcaaataactctgtcaccataaaataagaatactcatgaatggtttctgaattctggagaaataaggtaaaggga

SEQ ID NO: 126890 - DNA, 80 bp, synthetic construct
  misc_feature 1..80: note = Artificially Synthesized Probe
  source 1..80: mol_type = other DNA
atcagttcatgtatttagttctcactctgtttaatgttgtgttagcaatcctcatgaacacatcagttttggttctggtt

SEQ ID NO: 126891 - DNA, 80 bp, synthetic construct; identical to SEQ ID NO: 40698
  misc_feature 1..80: note = Artificially Synthesized Probe
  source 1..80: mol_type = other DNA

SEQ ID NO: 126892 - DNA, 80 bp, synthetic construct
  misc_feature 1..80: note = Artificially Synthesized Probe
  source 1..80: mol_type = other DNA
agtgattctcttgcctcagcctcctgagtaactgggattacaggcacctgtgaccacgcccagctaattttatattttta

SEQ ID NO: 126893 - DNA, 80 bp, synthetic construct
  misc_feature 1..80: note = Artificially Synthesized Probe
  source 1..80: mol_type = other DNA
acatatatttataatatatccaaacaaatataacaaataagttaaaacgactttttatgtgatattgtttctcttatgat

SEQ ID NO: 126894 - DNA, 80 bp, synthetic construct
  misc_feature 1..80: note = Artificially Synthesized Probe
  source 1..80: mol_type = other DNA
aaattttattttggaaagcctatatcaaatatctcaaaggtttaacacacttgaacaaaacagcaacacaagtcactgag

SEQ ID NO: 126895 - DNA, 80 bp, synthetic construct
  misc_feature 1..80: note = Artificially Synthesized Probe
  source 1..80: mol_type = other DNA
aattttaccacgtggagttttgattttttttggcttcttttttcagacttctttggcttatcgcaatgcttccaaaactc

SEQ ID NO: 126896 - DNA, 80 bp, synthetic construct; identical to SEQ ID NO: 40699
  misc_feature 1..80: note = Artificially Synthesized Probe
  source 1..80: mol_type = other DNA

SEQ ID NO: 126897 - DNA, 80 bp, synthetic construct
  misc_feature 1..80: note = Artificially Synthesized Probe
  source 1..80: mol_type = other DNA
tttataacctcttacacatttttccattctctttcttttctcaactttgtatatccttcagtttatctttttctttcttc

SEQ ID NO: 126898 - DNA, 80 bp, synthetic construct
  misc_feature 1..80: note = Artificially Synthesized Probe
  source 1..80: mol_type = other DNA
ctctctgtatatagaattgtttctcctcttatctccagtttttgttgctggaaattagttagaattttaactcttagtag

SEQ ID NO: 126899 - DNA, 80 bp, synthetic construct
  misc_feature 1..80: note = Artificially Synthesized Probe
  source 1..80: mol_type = other DNA
aatatcatttgtttctctgaaataaggcaaaatatataagcttaaactcatatttaataattgctgtcttagtattatat

SEQ ID NO: 126900 - DNA, 80 bp, synthetic construct; identical to SEQ ID NO: 40700
  misc_feature 1..80: note = Artificially Synthesized Probe
  source 1..80: mol_type = other DNA

SEQ ID NO: 126901 - DNA, 80 bp, synthetic construct
  misc_feature 1..80: note = Artificially Synthesized Probe
  source 1..80: mol_type = other DNA
attcttactcaaattacctgaacttggaaaatatttgggtttacttatttatgaacactcacttatctttaagttagttt

SEQ ID NO: 126902 - DNA, 80 bp, synthetic construct
  misc_feature 1..80: note = Artificially Synthesized Probe
  source 1..80: mol_type = other DNA
tcatggtggaaggtgaagggggagccagcacgtcacacagccagagcaaggggggcgagggatgccatccacctttaaac

SEQ ID NO: 126903 - DNA, 80 bp, synthetic construct
  misc_feature 1..80: note = Artificially Synthesized Probe
  source 1..80: mol_type = other DNA
ccatgtcaggtaccatgtaggtaatatacaaacatgtggatagacacgtacatgcatgcagatacaacatatgacatacg

SEQ ID NO: 126904 - DNA, 80 bp, synthetic construct
  misc_feature 1..80: note = Artificially Synthesized Probe
  source 1..80: mol_type = other DNA
tcctctccaaaaaagagttttgtggcaccaattctggtttcctcaagaggtcttagggctgttagaagatttttttaggt

SEQ ID NO: 126905 - DNA, 80 bp, synthetic construct; identical to SEQ ID NO: 40701
  misc_feature 1..80: note = Artificially Synthesized Probe
  source 1..80: mol_type = other DNA

SEQ ID NO: 126906 - DNA, 80 bp, synthetic construct; identical to SEQ ID NO: 40336
  misc_feature 1..80: note = Artificially Synthesized Probe
  source 1..80: mol_type = other DNA

SEQ ID NO: 126907 - DNA, 80 bp, synthetic construct
  misc_feature 1..80: note = Artificially Synthesized Probe
  source 1..80: mol_type = other DNA
cacacatgcacatatacacatacgcacatacacagacacatttacacacccacacacttaatactagctttaattaaggt

SEQ ID NO: 126908 - DNA, 80 bp, synthetic construct
  misc_feature 1..80: note = Artificially Synthesized Probe
  source 1..80: mol_type = other DNA
ttaaagctgtttgtctttggcttaataaaatgtttcctttttctctgagtaaatggttttatttagcttaagagaaaagg

SEQ ID NO: 126909 - DNA, 80 bp, synthetic construct; identical to SEQ ID NO: 40702
  misc_feature 1..80: note = Artificially Synthesized Probe
  source 1..80: mol_type = other DNA

SEQ ID NO: 126910 - DNA, 80 bp, synthetic construct
  misc_feature 1..80: note = Artificially Synthesized Probe
  source 1..80: mol_type = other DNA
ctttccttcatgtgttcttagttttgacactttcctgaaaacaaaagtccgattgacaagaagaaaccagcagaagttta

SEQ ID NO: 126911 - DNA, 80 bp, synthetic construct
  misc_feature 1..80: note = Artificially Synthesized Probe
  source 1..80: mol_type = other DNA
atagtgactaaacaaagaaaagagcatttccaggcttccaagaggtgggaaaatgtgggaggtgaatttatgggaagagt

SEQ ID NO: 126912 - DNA, 80 bp, synthetic construct
  misc_feature 1..80: note = Artificially Synthesized Probe
  source 1..80: mol_type = other DNA
ctggcattttcaccttcttcagctcaacaattctcagtgtttttgagaggaatattttggttttcttcagtagaaaggat

SEQ ID NO: 126913 - DNA, 80 bp, synthetic construct; identical to SEQ ID NO: 40703
  misc_feature 1..80: note = Artificially Synthesized Probe
  source 1..80: mol_type = other DNA

SEQ ID NO: 126914 - DNA, 80 bp, synthetic construct
  misc_feature 1..80: note = Artificially Synthesized Probe
  source 1..80: mol_type = other DNA
aatttaaatctcttattatcagatttcaggtgggacagacagaaagtatgtttcccattcaattagtcgggttccacaac

SEQ ID NO: 126915 - DNA, 80 bp, synthetic construct
  misc_feature 1..80: note = Artificially Synthesized Probe
  source 1..80: mol_type = other DNA
gtgccccttaaaggagagctcagttttggtaagcagtgtcccataattttagcaattccttttcaaaagtgaccaaggct

SEQ ID NO: 126916 - DNA, 80 bp, synthetic construct
  misc_feature 1..80: note = Artificially Synthesized Probe
  source 1..80: mol_type = other DNA
tcagaagctcccatcaccttggggcagcagattgaccatttctttctttacctttccaaaagcaagagtccctaaaatgt

SEQ ID NO: 126917 - DNA, 80 bp, synthetic construct
  misc_feature 1..80: note = Artificially Synthesized Probe
  source 1..80: mol_type = other DNA
atggaaattggtcccaaatgaaatgacaggtcctaattacaaacactagaaagcagctgcaattttaaaagcatgctgtg

SEQ ID NO: 126918 - DNA, 80 bp, synthetic construct
  misc_feature 1..80: note = Artificially Synthesized Probe
  source 1..80: mol_type = other DNA
agatctcctttgaattctaccagccatgttttacaattttcgttgcatgtgtcttgcacatattttgttaagtttatgac

SEQ ID NO: 126919 - DNA, 80 bp, synthetic construct; identical to SEQ ID NO: 40704
  misc_feature 1..80: note = Artificially Synthesized Probe
  source 1..80: mol_type = other DNA

SEQ ID NO: 126920 - DNA, 80 bp, synthetic construct
  misc_feature 1..80: note = Artificially Synthesized Probe
  source 1..80: mol_type = other DNA
ctggctgtgaagtcatcgttttcttattttaaggagtaaaggtatgataagcctgccagataatcagatgtctcaatggt

SEQ ID NO: 126921 - DNA, 80 bp, synthetic construct
  misc_feature 1..80: note = Artificially Synthesized Probe
  source 1..80: mol_type = other DNA
tcacgacacaacccagcctggtgcctgctcggctgcctcttccctccagctgttccaaggacatgcgctgcaacgtctca

SEQ ID NO: 126922 - DNA, 80 bp, synthetic construct; identical to SEQ ID NO: 40705
  misc_feature 1..80: note = Artificially Synthesized Probe
  source 1..80: mol_type = other DNA

SEQ ID NO: 126923 - DNA, 80 bp, synthetic construct
  misc_feature 1..80: note = Artificially Synthesized Probe
  source 1..80: mol_type = other DNA
ctaaaccattatgtgaagccagtatcaccctaatgccaaaaccaggaaaagacagaacaaaaaaagaaaactacagacaa

SEQ ID NO: 126924 - DNA, 80 bp, synthetic construct
  misc_feature 1..80: note = Artificially Synthesized Probe
  source 1..80: mol_type = other DNA
catacgtaagtcaataaatatggtacatcacataaaattaaaaacaaaaaccatattatcatctcaatagatgcaggtaa

SEQ ID NO: 126925 - DNA, 80 bp, synthetic construct
  misc_feature 1..80: note = Artificially Synthesized Probe
  source 1..80: mol_type = other DNA
agaagacagggacgcctactctcaccacttctattcaccatagtactgaagtcctagccagagcaatcagacaagaaaaa

SEQ ID NO: 126926 - DNA, 80 bp, synthetic construct
  misc_feature 1..80: note = Artificially Synthesized Probe
  source 1..80: mol_type = other DNA
gagtagcactgctatacaccaataatgaccaagcttagaattaaatcaagaactcaatcgcttttacaacagctgcaaaa

SEQ ID NO: 126927 - DNA, 80 bp, synthetic construct; identical to SEQ ID NO: 40706
  misc_feature 1..80: note = Artificially Synthesized Probe
  source 1..80: mol_type = other DNA

SEQ ID NO: 126928 - DNA, 80 bp, synthetic construct
  misc_feature 1..80: note = Artificially Synthesized Probe
  source 1..80: mol_type = other DNA
gagaacccagaaacaaagccaaatacttacagccaactgatcttgacaaagcatacaaaaacataaattggggaaagaga

SEQ ID NO: 126929 - DNA, 80 bp, synthetic construct
  misc_feature 1..80: note = Artificially Synthesized Probe
  source 1..80: mol_type = other DNA
tattcaagattttctatgtaggcaatcatgttatctgggataaagatagtgttacttctttctccctaacgtatgacttc

SEQ ID NO: 126930 - DNA, 80 bp, synthetic construct
  misc_feature 1..80: note = Artificially Synthesized Probe
  source 1..80: mol_type = other DNA
aaactcttctagacattggcttaggccaatgagagttcatgaccaagaaccccaaagcaaatgcaacaaaaagcaaaaac

SEQ ID NO: 126931 - DNA, 80 bp, synthetic construct
  misc_feature 1..80: note = Artificially Synthesized Probe
  source 1..80: mol_type = other DNA
aagaagaaaacaaataatctcatcaaaaagtgggcaaaggacatgaataggcaattctcaaaagaaaatatacaaatggc

SEQ ID NO: 126932 - DNA, 80 bp, synthetic construct; identical to SEQ ID NO: 40707
  misc_feature 1..80: note = Artificially Synthesized Probe
  source 1..80: mol_type = other DNA

SEQ ID NO: 126933 - DNA, 80 bp, synthetic construct
  misc_feature 1..80: note = Artificially Synthesized Probe
  source 1..80: mol_type = other DNA
agtatggtacatatactccatggaatattactcaaccatacaaaggaacaaaataatgtcttttgcagcaacttggatgg

SEQ ID NO: 126934 - DNA, 80 bp, synthetic construct
  misc_feature 1..80: note = Artificially Synthesized Probe
  source 1..80: mol_type = other DNA
taaaagactacacattgggtatagtgtacactgcatgggtgacaggtgcaccaaaatctcagaaatcactgctaaacaac

SEQ ID NO: 126935 - DNA, 80 bp, synthetic construct; identical to SEQ ID NO: 40708
  misc_feature 1..80: note = Artificially Synthesized Probe
  source 1..80: mol_type = other DNA

SEQ ID NO: 126936 - DNA, 80 bp, synthetic construct
  misc_feature 1..80: note = Artificially Synthesized Probe
  source 1..80: mol_type = other DNA
tgagaaactttatcaacatataagctaatttttaggagacatgacagaatgggtcctgacatacttcctggctctctcag

SEQ ID NO: 126937 - DNA, 80 bp, synthetic construct
  misc_feature 1..80: note = Artificially Synthesized Probe
  source 1..80: mol_type = other DNA
agagcattaaaacaatagccatgtaggtaagtaaagccagtctgggcccagggaaaaccaagaaaatttctaattacttt

SEQ ID NO: 126938 - DNA, 80 bp, synthetic construct
  misc_feature 1..80: note = Artificially Synthesized Probe
  source 1..80: mol_type = other DNA
tctgtccaatgagcttaaataacttgcttgtgattggatttggcaaaatatgagatggatgttcacactgggagaactgt

SEQ ID NO: 126939 - DNA, 80 bp, synthetic construct
  misc_feature 1..80: note = Artificially Synthesized Probe
  source 1..80: mol_type = other DNA
acgtcaccagatcaaacaaatcatattctcattgctttgttttcctatcttttttatttggaagggaccgtccccattat

SEQ ID NO: 126940 - DNA, 80 bp, synthetic construct; identical to SEQ ID NO: 40337
  misc_feature 1..80: note = Artificially Synthesized Probe
  source 1..80: mol_type = other DNA

SEQ ID NO: 126941 - DNA, 80 bp, synthetic construct; identical to SEQ ID NO: 40709
  misc_feature 1..80: note = Artificially Synthesized Probe
  source 1..80: mol_type = other DNA

SEQ ID NO: 126942 - DNA, 80 bp, synthetic construct
  misc_feature 1..80: note = Artificially Synthesized Probe
  source 1..80: mol_type = other DNA
cacttcattttgtttattatttttattgctgtgcggacactgtttagttcaatggactttaatttgtctgtttgctttca

SEQ ID NO: 126943 - DNA, 80 bp, synthetic construct
  misc_feature 1..80: note = Artificially Synthesized Probe
  source 1..80: mol_type = other DNA
tctgatttcattcttctgaatgtgaatatccagttttccccacatcatttattgaagagactatcttttccccgttgtgt

SEQ ID NO: 126944 - DNA, 80 bp, synthetic construct
  misc_feature 1..80: note = Artificially Synthesized Probe
  source 1..80: mol_type = other DNA
cccctagctttgttctatttacccaataatgcttttgctagtcaaggtcttttgcagttcaatatgaattttagaatttt

SEQ ID NO: 126945 - DNA, 80 bp, synthetic construct; identical to SEQ ID NO: 40710
  misc_feature 1..80: note = Artificially Synthesized Probe
  source 1..80: mol_type = other DNA

SEQ ID NO: 126946 - DNA, 80 bp, synthetic construct
  misc_feature 1..80: note = Artificially Synthesized Probe
  source 1..80: mol_type = other DNA
actggccatcctaatggatggtaaatgttatctcactggagttttatttgtatcttctaatgattattgatgttgaacat

SEQ ID NO: 126947 - DNA, 80 bp, synthetic construct
  misc_feature 1..80: note = Artificially Synthesized Probe
  source 1..80: mol_type = other DNA
atattctagatattagctccttatcaaatgtgtgatttgcggatgtcttctctcattctgggagttttctctttattctt

SEQ ID NO: 126948 - DNA, 80 bp, synthetic construct
  misc_feature 1..80: note = Artificially Synthesized Probe
  source 1..80: mol_type = other DNA
ttgccaaacccaatgtcataagtgtttccctatgttttcttctaaactttttaaagttttaattcttatgtttaggtcct

SEQ ID NO: 126949 - DNA, 80 bp, synthetic construct; identical to SEQ ID NO: 40711
  misc_feature 1..80: note = Artificially Synthesized Probe
  source 1..80: mol_type = other DNA

SEQ ID NO: 126950 - DNA, 80 bp, synthetic construct
  misc_feature 1..80: note = Artificially Synthesized Probe
  source 1..80: mol_type = other DNA
gtattgaatctgaggttcacttttggcaatattaacaccttaataacattatgccttccaacccataaatatgggatgcc

SEQ ID NO: 126951 - DNA, 80 bp, synthetic construct
  misc_feature 1..80: note = Artificially Synthesized Probe
  source 1..80: mol_type = other DNA
gctatttgcagttaactttatgaggcttataatccccaattttctctcataatatatttgctttcgataattctggcatt

SEQ ID NO: 126952 - DNA, 80 bp, synthetic construct
  misc_feature 1..80: note = Artificially Synthesized Probe
  source 1..80: mol_type = other DNA
attataagcagatagaaacaaaatttattttccccttctcccaatccccagctccgggtaacctctattctattgtctgt

SEQ ID NO: 126953 - DNA, 80 bp, synthetic construct
  misc_feature 1..80: note = Artificially Synthesized Probe
  source 1..80: mol_type = other DNA
atgtaccagaacattcttttttagagctgaattatattgcatttcatggatacatcatattttattcaatatttgttgat

SEQ ID NO: 126954 - DNA, 80 bp, synthetic construct; identical to SEQ ID NO: 40712
  misc_feature 1..80: note = Artificially Synthesized Probe
  source 1..80: mol_type = other DNA

SEQ ID NO: 126955 - DNA, 80 bp, synthetic construct
  misc_feature 1..80: note = Artificially Synthesized Probe
  source 1..80: mol_type = other DNA
ttaccatgtgttaaggggacatccgtgtgtcttctttggagaaacttaagtcctctgcccatttttaaagtggatttttt

SEQ ID NO: 126956 - DNA, 80 bp, synthetic construct
  misc_feature 1..80: note = Artificially Synthesized Probe
  source 1..80: mol_type = other DNA
gtccactttatctttttcttttgttgtttgacagcagtgttttaaactccctaatgcatgatacaaaacaatcacttacc

SEQ ID NO: 126957 - DNA, 80 bp, synthetic construct; identical to SEQ ID NO: 40713
  misc_feature 1..80: note = Artificially Synthesized Probe
  source 1..80: mol_type = other DNA

SEQ ID NO: 126958 - DNA, 80 bp, synthetic construct
  misc_feature 1..80: note = Artificially Synthesized Probe
  source 1..80: mol_type = other DNA
ccccctgtccctatgctaacgaccaaatgagagtattggctgctgcagcactcccggatctgcagactagaaactgctta

SEQ ID NO: 126959 - DNA, 80 bp, synthetic construct
  misc_feature 1..80: note = Artificially Synthesized Probe
  source 1..80: mol_type = other DNA
tgtatgttcccaaggtcttctctctcctccccacaaaaaactggagctaacaattaaagcaaatcctcacatctgtctaa

SEQ ID NO: 126960 - DNA, 80 bp, synthetic construct
  misc_feature 1..80: note = Artificially Synthesized Probe
  source 1..80: mol_type = other DNA
tcatcacccaacagcccgattacaaaacgccattctttatcctttccaggatagaaagggcaaacatttcatactaatcg

SEQ ID NO: 126961 - DNA, 80 bp, synthetic construct
  misc_feature 1..80: note = Artificially Synthesized Probe
  source 1..80: mol_type = other DNA
ctaatgtgaaatatctctaatgtaagtgcatatgttcacaaaagtgagccagtacaaaaataaaatgtttgacataaatg

SEQ ID NO: 126962 - DNA, 80 bp, synthetic construct; identical to SEQ ID NO: 40714
  misc_feature 1..80: note = Artificially Synthesized Probe
  source 1..80: mol_type = other DNA

SEQ ID NO: 126963 - DNA, 80 bp, synthetic construct
  misc_feature 1..80: note = Artificially Synthesized Probe
  source 1..80: mol_type = other DNA
aactttggctgttggactctgtcaacgcgcttgtcattttaatctaagttatgcagtttactgcatagagaaaggaagcc

SEQ ID NO: 126964 - DNA, 80 bp, synthetic construct
  misc_feature 1..80: note = Artificially Synthesized Probe
  source 1..80: mol_type = other DNA
tggaaacgtgcctttctgagacctttggctgccaagggaggatggcagctgagctgggtttgcaggagtctacgtgtgtc

SEQ ID NO: 126965 - DNA, 80 bp, synthetic construct
  misc_feature 1..80: note = Artificially Synthesized Probe
  source 1..80: mol_type = other DNA
cagaaacacatgttaacaagagagaagcagagaacatttattacactcacatgtgttcatggaggtcttgggaaatgtga

SEQ ID NO: 126966 - DNA, 80 bp, synthetic construct
  misc_feature 1..80: note = Artificially Synthesized Probe
  source 1..80: mol_type = other DNA
acagggggaaagtctgggcttggtggctgcctccagtctcttctcttctctggaggttgatctttcccagctgtttaatg

SEQ ID NO: 126967 - DNA, 80 bp, synthetic construct; identical to SEQ ID NO: 40715
  misc_feature 1..80: note = Artificially Synthesized Probe
  source 1..80: mol_type = other DNA

SEQ ID NO: 126968 - DNA, 80 bp, synthetic construct
  misc_feature 1..80: note = Artificially Synthesized Probe
  source 1..80: mol_type = other DNA
tttattttcttttaatgaacaacatgctgtagcctgggacttaggtaattcagactctggaaaagatattttcctttaat

SEQ ID NO: 126969 - DNA, 80 bp, synthetic construct
  misc_feature 1..80: note = Artificially Synthesized Probe
  source 1..80: mol_type = other DNA
tgttatgaattatgttatgattacatttgtctcttgagggtcctacatttcaaatagctcctgctctgtaggacagcagc

SEQ ID NO: 126970 - DNA, 80 bp, synthetic construct; identical to SEQ ID NO: 40718
  misc_feature 1..80: note = Artificially Synthesized Probe
  source 1..80: mol_type = other DNA

SEQ ID NO: 126971 - DNA, 80 bp, synthetic construct; identical to SEQ ID NO: 40716
  misc_feature 1..80: note = Artificially Synthesized Probe
  source 1..80: mol_type = other DNA

SEQ ID NO: 126972 - DNA, 80 bp, synthetic construct
  misc_feature 1..80: note = Artificially Synthesized Probe
  source 1..80: mol_type = other DNA
ttccagggaccgtgctgcttcttcaccccatcagcctgaaccttcctgttttctccccttgcacattttaataaatactg

SEQ ID NO: 126973 - DNA, 80 bp, synthetic construct
  misc_feature 1..80: note = Artificially Synthesized Probe
  source 1..80: mol_type = other DNA
ccctgttctgggcacgcctggcccagctctgtaggacagcagcagcttcctctcactgggacttttaatttgggaagcag

SEQ ID NO: 126974 - DNA, 80 bp, synthetic construct
  misc_feature 1..80: note = Artificially Synthesized Probe
  source 1..80: mol_type = other DNA
cacgcctggcccagctctgtaggacagcggcagcttcctctcactgggacttttaatttgggaagcaggacatgcatagg

SEQ ID NO: 126975 - DNA, 80 bp, synthetic construct
  misc_feature 1..80: note = Artificially Synthesized Probe
  source 1..80: mol_type = other DNA
ttcttttaaaaatccgcttttattgctgccatcttttccttctattctttactaaaggcaaagagctcatgggttctcac

SEQ ID NO: 126976 - DNA, 80 bp, synthetic construct
  misc_feature 1..80: note = Artificially Synthesized Probe
  source 1..80: mol_type = other DNA
gctctgtaggacagcagcagcttcctctcactgggacttttaatttgggaagcaggacatgcataggaagagtggactgg

SEQ ID NO: 126977 - DNA, 80 bp, synthetic construct
  misc_feature 1..80: note = Artificially Synthesized Probe
  source 1..80: mol_type = other DNA
gcagcagcttcctctcactgggacttttaatttgggaagcaggacatgcataggaagagtggactggcacttttcccctg

SEQ ID NO: 126978 - DNA, 80 bp, synthetic construct
  misc_feature 1..80: note = Artificially Synthesized Probe
  source 1..80: mol_type = other DNA
tcactgggacttttaatttgggaagcaggacatgcataggaagagtggactggcacttttcccctgttctgggcacgcct

SEQ ID NO: 126979 - DNA, 80 bp, synthetic construct
  misc_feature 1..80: note = Artificially Synthesized Probe
  source 1..80: mol_type = other DNA
taatttgggaagcaggacatgcataggaagagtggactcgcacttttcccctgttctgggcacgcctggcccagctctgt

SEQ ID NO: 126980 - DNA, 80 bp, synthetic construct
  misc_feature 1..80: note = Artificially Synthesized Probe
  source 1..80: mol_type = other DNA
ggacatgcataggaagagtggactcgcacttttcccctgttctgggcacgcctggcccagctctgtaggacagcagcagc

SEQ ID NO: 126981 - DNA, 80 bp, synthetic construct
  misc_feature 1..80: note = Artificially Synthesized Probe
  source 1..80: mol_type = other DNA
agagtggactggcacttttcccctgttctgggcacgcctggcccagctctgtaggacagcagcagcttcctctcactggg

SEQ ID NO: 126982 - DNA, 80 bp, synthetic construct
  misc_feature 1..80: note = Artificially Synthesized Probe
  source 1..80: mol_type = other DNA
acttttcccctgttctgggcacgcctggcccagctctgtaggacagcggcagcttcctctcactgggacttttaatttgg

SEQ ID NO: 126983 - DNA, 80 bp, synthetic construct
  misc_feature 1..80: note = Artificially Synthesized Probe
  source 1..80: mol_type = other DNA
tctgggcacgcctggcccagctctgtaggacagcggcagcttcctctcactgggacttttaatttgggaagcaggacatg

SEQ ID NO: 126984 - DNA, 80 bp, synthetic construct
  misc_feature 1..80: note = Artificially Synthesized Probe
  source 1..80: mol_type = other DNA
ggcccagctctgtaggacagcagcagcttcctctcactgggacttttaatttgggaagcaggacatgcataggaagagtg

SEQ ID NO: 126985 - DNA, 80 bp, synthetic construct
  misc_feature 1..80: note = Artificially Synthesized Probe
  source 1..80: mol_type = other DNA
taggacagcggcagcttcctctcactgggacttttaatttgggaagcaggacatgcataggaagagtggactggcacttt

SEQ ID NO: 126986 - DNA, 80 bp, synthetic construct
  misc_feature 1..80: note = Artificially Synthesized Probe
  source 1..80: mol_type = other DNA
ccaaatcccacagacctggtggcttcaacagattctggaggctagaaattcaagatgtaggtgttgggagttggtagctt

SEQ ID NO: 126987 - DNA, 80 bp, synthetic construct
  misc_feature 1..80: note = Artificially Synthesized Probe
  source 1..80: mol_type = other DNA
cttcctctcactgggacttttaatttgggaagcaggacatgcataggaagagtggactggcactttccccctgttctggg

SEQ ID NO: 126988 - DNA, 80 bp, synthetic construct
  misc_feature 1..80: note = Artificially Synthesized Probe
  source 1..80: mol_type = other DNA
ggacttttaatttgggaagcaggacatgcataggaagagtggactggcacttttccccctgttctgggcacgcctggccc

SEQ ID NO: 126989 - DNA, 80 bp, synthetic construct
  misc_feature 1..80: note = Artificially Synthesized Probe
  source 1..80: mol_type = other DNA
actcctgagagccccccgcatccaaggatgtctctggaggcaggaagccccagtcctagggagggtagagggcaggctca

SEQ ID NO: 126990 - DNA, 80 bp, synthetic construct; identical to SEQ ID NO: 40720
  misc_feature 1..80: note = Artificially Synthesized Probe
  source 1..80: mol_type = other DNA

SEQ ID NO: 126991 - DNA, 80 bp, synthetic construct
  misc_feature 1..80: note = Artificially Synthesized Probe
  source 1..80: mol_type = other DNA
ggctgacagaatctcatgtgaaccgtaagtcagtgcatggagggtgtgcactgcttcagcctggaaaagtgggtatctcc

SEQ ID NO: 126992 - DNA, 80 bp, synthetic construct
  misc_feature 1..80: note = Artificially Synthesized Probe
  source 1..80: mol_type = other DNA
gggtggaaagtcaaccacatcatacagattaattaaaaaaaaaatctgttcaaggggatttaatggtttgtagggcacaa

SEQ ID NO: 126993 - DNA, 80 bp, synthetic construct
  misc_feature 1..80: note = Artificially Synthesized Probe
  source 1..80: mol_type = other DNA
aggcatcaccataacaggtagggggctttgggtccttgagtaagaagatcaaaacttgagaggggttagagctccagcca

SEQ ID NO: 126994 - DNA, 80 bp, synthetic construct; identical to SEQ ID NO: 40721
  misc_feature 1..80: note = Artificially Synthesized Probe
  source 1..80: mol_type = other DNA

SEQ ID NO: 126995 - DNA, 80 bp, synthetic construct
  misc_feature 1..80: note = Artificially Synthesized Probe
  source 1..80: mol_type = other DNA
ccctgggaagagaaaactagctcagaggagtcagctgtgtgaggtttgaagaatttatcagtcccagggagacatgaatt

SEQ ID NO: 126996 - DNA, 80 bp, synthetic construct
  misc_feature 1..80: note = Artificially Synthesized Probe
  source 1..80: mol_type = other DNA
aagaacaaagcatagccaatcaatcagtagcttatggtatttaatttagattttgggtaaacaactcagaaactgcctct

SEQ ID NO: 126997 - DNA, 80 bp, synthetic construct; identical to SEQ ID NO: 40338
  misc_feature 1..80: note = Artificially Synthesized Probe
  source 1..80: mol_type = other DNA

SEQ ID NO: 126998 - DNA, 80 bp, synthetic construct
  misc_feature 1..80: note = Artificially Synthesized Probe
  source 1..80: mol_type = other DNA
atggcaacagccactggaccctgcctggagcacagcatgccctttatatgttttattctaaatgcaagtgtgcacggata

SEQ ID NO: 126999 - DNA, 80 bp, synthetic construct; identical to SEQ ID NO: 40722
  misc_feature 1..80: note = Artificially Synthesized Probe
  source 1..80: mol_type = other DNA

SEQ ID NO: 127000 - DNA, 80 bp, synthetic construct
  misc_feature 1..80: note = Artificially Synthesized Probe
  source 1..80: mol_type = other DNA
ggaagtccttgcttgtagttgtcccacctttctgaaccaaaccaatgtatttcttaaatgtatttgattgaagtctgctg

SEQ ID NO: 127001 - DNA, 80 bp, synthetic construct
  misc_feature 1..80: note = Artificially Synthesized Probe
  source 1..80: mol_type = other DNA
tgttgtacagttgaacagaaatcagcttaaactaatacttgtgcttctagctttcttacctggtgtatttctaatgaatt

SEQ ID NO: 127002 - DNA, 80 bp, synthetic construct
  misc_feature 1..80: note = Artificially Synthesized Probe
  source 1..80: mol_type = other DNA
aactgagcaggaggagacaggaggtacttttcaaatcttccttatgaagaattcagaggctaggattttaaaggatagtc

SEQ ID NO: 127003 - DNA, 80 bp, synthetic construct
  misc_feature 1..80: note = Artificially Synthesized Probe
  source 1..80: mol_type = other DNA
cactggtccaagtggcatcagttgttctactaaaatataaggtctgaaaaactatctcaaacaccagtcttagtctttac

SEQ ID NO: 127004 - DNA, 80 bp, synthetic construct; identical to SEQ ID NO: 40723
  misc_feature 1..80: note = Artificially Synthesized Probe
  source 1..80: mol_type = other DNA

SEQ ID NO: 127005 - DNA, 80 bp, synthetic construct
  misc_feature 1..80: note = Artificially Synthesized Probe
  source 1..80: mol_type = other DNA
tacttttctcaccttcataagtttcacaaaggcagtttcagtctctcttgtatgttaagtgccatccagatgccagggac

SEQ ID NO: 127006 - DNA, 80 bp, synthetic construct
  misc_feature 1..80: note = Artificially Synthesized Probe
  source 1..80: mol_type = other DNA
taagtcatctaagactcacagcccgcccaggctcaggtcttgtcaacatttggaaatgattatttctaaaataatgaatt

SEQ ID NO: 127007 - DNA, 80 bp, synthetic construct; identical to SEQ ID NO: 40724
  misc_feature 1..80: note = Artificially Synthesized Probe
  source 1..80: mol_type = other DNA

SEQ ID NO: 127008 - DNA, 80 bp, synthetic construct
  misc_feature 1..80: note = Artificially Synthesized Probe
  source 1..80: mol_type = other DNA
aggttgccctgcaacacagcttgccccgatacacgtgcaaatgtgttctctgcctcttagaaaagctaccagattgccca

SEQ ID NO: 127009 - DNA, 80 bp, synthetic construct
  misc_feature 1..80: note = Artificially Synthesized Probe
  source 1..80: mol_type = other DNA
ggaaatgccgtcctaagtcagagggaaaagttggcacccttttcttagaaaaaaaaaaagaatgagaaaattcacctttt

SEQ ID NO: 127010 - DNA, 80 bp, synthetic construct
  misc_feature 1..80: note = Artificially Synthesized Probe
  source 1..80: mol_type = other DNA
gaaatataagcacactgtcatttgctggcattgatgacttgagtgaaggctgaggttttggctcagagaaacatgatgaa

SEQ ID NO: 127011 - DNA, 80 bp, synthetic construct
  misc_feature 1..80: note = Artificially Synthesized Probe
  source 1..80: mol_type = other DNA
tataatgactagccttacgaaagcaaatgatattttgagtgaatagggacatgattgacttgaattgatgcctgattttc

SEQ ID NO: 127012 - DNA, 80 bp, synthetic construct
  misc_feature 1..80: note = Artificially Synthesized Probe
  source 1..80: mol_type = other DNA
tctccccacgaaattgaccttgttcggccgataagtgtaggagttatttatctttgtcagaacttggaaatttccaaata

SEQ ID NO: 127013 - DNA, 80 bp, synthetic construct; identical to SEQ ID NO: 40725
  misc_feature 1..80: note = Artificially Synthesized Probe
  source 1..80: mol_type = other DNA

SEQ ID NO: 127014 - DNA, 80 bp, synthetic construct
  misc_feature 1..80: note = Artificially Synthesized Probe
  source 1..80: mol_type = other DNA
ggaggtaaatcacggagtaacctgttcacgattacagagaacactgccaaggaaggtagatctttgaatctaacccgacg

SEQ ID NO: 127015 - DNA, 80 bp, synthetic construct
  misc_feature 1..80: note = Artificially Synthesized Probe
  source 1..80: mol_type = other DNA
tctgccattctgggggaaaagcacctgctcatttacactgtttaccattgaagccttcatcccactgctctgaagtgtct

SEQ ID NO: 127016 - DNA, 80 bp, synthetic construct
  misc_feature 1..80: note = Artificially Synthesized Probe
  source 1..80: mol_type = other DNA
ctcagtctttccctcatgtctcatgatggacagctgtcctcaccccatggacatggttcggtgtcttccagccgacctgg

SEQ ID NO: 127017 - DNA, 80 bp, synthetic construct; identical to SEQ ID NO: 40726
  misc_feature 1..80: note = Artificially Synthesized Probe
  source 1..80: mol_type = other DNA

SEQ ID NO: 127018 - DNA, 80 bp, synthetic construct
  misc_feature 1..80: note = Artificially Synthesized Probe
  source 1..80: mol_type = other DNA
attgagctcctgggcacagtgaggctgggcctgtgcaggcctcctcctagcagctgggccccgtgtcaggtttgagcaca

SEQ ID NO: 127019 - DNA, 80 bp, synthetic construct
  misc_feature 1..80: note = Artificially Synthesized Probe
  source 1..80: mol_type = other DNA
ttcaaggttctgaaatcttcagtgagtgaaacagctggtcccactgggctaaggatcagattctacttcaagtgccagtc

SEQ ID NO: 127020 - DNA, 80 bp, synthetic construct
  misc_feature 1..80: note = Artificially Synthesized Probe
  source 1..80: mol_type = other DNA
aaaccttaagatatgctgatgatatatatctggtcacactacagagaagactttctcttaatttgcctgtttctgctggt

SEQ ID NO: 127021 - DNA, 80 bp, synthetic construct; identical to SEQ ID NO: 40727
  misc_feature 1..80: note = Artificially Synthesized Probe
  source 1..80: mol_type = other DNA

SEQ ID NO: 127022 - DNA, 80 bp, synthetic construct
  misc_feature 1..80: note = Artificially Synthesized Probe
  source 1..80: mol_type = other DNA
aaactggctgtggcgggagcacatatacctcagcagtgagcaaaggctgcacatcaggccccctccatccccaggacagc

SEQ ID NO: 127023 - DNA, 80 bp, synthetic construct
  misc_feature 1..80: note = Artificially Synthesized Probe
  source 1..80: mol_type = other DNA
tggaattgagttccggggtgtggctgttcctcgtgattgttgcatttcatcctatacttcttgggcttattctaagacaa

SEQ ID NO: 127024 - DNA, 80 bp, synthetic construct
  misc_feature 1..80: note = Artificially Synthesized Probe
  source 1..80: mol_type = other DNA
cagattgctgtggcccagtggaaacggttctcttcaatgctgattgacttcacctttgccccctttcccatagggccatt

SEQ ID NO: 127025 - DNA, 80 bp, synthetic construct; identical to SEQ ID NO: 40728
  misc_feature 1..80: note = Artificially Synthesized Probe
  source 1..80: mol_type = other DNA

SEQ ID NO: 127026 - DNA, 80 bp, synthetic construct
  misc_feature 1..80: note = Artificially Synthesized Probe
  source 1..80: mol_type = other DNA
gtgggtcatatttaaaatcattgtttcagccaccgttaaatattaaaaaactttataaaaatctaaggcattaggacaga

SEQ ID NO: 127027 - DNA, 80 bp, synthetic construct
  misc_feature 1..80: note = Artificially Synthesized Probe
  source 1..80: mol_type = other DNA
aagaccccgggctggagctcagggactgggtgttccgtggcagagcggctgcctgagttccctgagcctcatctgtaaag

SEQ ID NO: 127028 - DNA, 80 bp, synthetic construct
  misc_feature 1..80: note = Artificially Synthesized Probe
  source 1..80: mol_type = other DNA
tcagggactggctgttccgaggcagagcggctgcctgagttccctgagcctccgctttctcatctgtaaagtgggtacgt

SEQ ID NO: 127029 - DNA, 80 bp, synthetic construct; identical to SEQ ID NO: 40729
  misc_feature 1..80: note = Artificially Synthesized Probe
  source 1..80: mol_type = other DNA

SEQ ID NO: 127030 - DNA, 80 bp, synthetic construct
  misc_feature 1..80: note = Artificially Synthesized Probe
  source 1..80: mol_type = other DNA
aacatgagcagggccctggccaagccctacaacacatttcacaccgtggttcttattcatctctcaacgttagtgccatt

SEQ ID NO: 127031 - DNA, 80 bp, synthetic construct
  misc_feature 1..80: note = Artificially Synthesized Probe
  source 1..80: mol_type = other DNA
aagtcttgcctcattgttaaaatagtcagtacattaaattgaagttgtggagaagggagcttataagttctgtaatatta

SEQ ID NO: 127032 - DNA, 80 bp, synthetic construct
  misc_feature 1..80: note = Artificially Synthesized Probe
  source 1..80: mol_type = other DNA
cctgcgcccctttatctcacatgaccgaaactgcacccgtggaacggcaactcccgtgtccccagctcctgcccctggca

SEQ ID NO: 127033 - DNA, 80 bp, synthetic construct
  misc_feature 1..80: note = Artificially Synthesized Probe
  source 1..80: mol_type = other DNA
taaggctgaataacgtacctgcatacaccatacttctttatccattcttgctgttgactgatgtttaggctgtttcccta

SEQ ID NO: 127034 - DNA, 80 bp, synthetic construct; identical to SEQ ID NO: 40730
  misc_feature 1..80: note = Artificially Synthesized Probe
  source 1..80: mol_type = other DNA

SEQ ID NO: 127035 - DNA, 80 bp, synthetic construct
  misc_feature 1..80: note = Artificially Synthesized Probe
  source 1..80: mol_type = other DNA
acttgaatgtcatctttagagaaatgtctattcaagtcccttgcgtattttgaaaatcaggttttttgttttttactatt

SEQ ID NO: 127036 - DNA, 80 bp, synthetic construct
  misc_feature 1..80: note = Artificially Synthesized Probe
  source 1..80: mol_type = other DNA
gcttttgttgcctgtggttatggtgtcatatctgtgaaaatcagtgccaagatcaatgtgatgaatcttttccactgttt

SEQ ID NO: 127037 - DNA, 80 bp, synthetic construct
  misc_feature 1..80: note = Artificially Synthesized Probe
  source 1..80: mol_type = other DNA
ctgtatagcgttagccctttgtggaagatcacctgacaatgtaggtataagtatatttctgggctctctattctgttcca

SEQ ID NO: 127038 - DNA, 80 bp, synthetic construct; identical to SEQ ID NO: 40731
  misc_feature 1..80: note = Artificially Synthesized Probe
  source 1..80: mol_type = other DNA

SEQ ID NO: 127039 - DNA, 80 bp, synthetic construct
  misc_feature 1..80: note = Artificially Synthesized Probe
  source 1..80: mol_type = other DNA
gggtttttttttttcttaatgtctattttggatcgtctgttgttagtgcgtagaaatgcaactttattgtgtgtatcaat

SEQ ID NO: 127040 - DNA, 80 bp, synthetic construct
  misc_feature 1..80: note = Artificially Synthesized Probe
  source 1..80: mol_type = other DNA
ctggctaggatgtctagcgctgtgttgaacagaaggggcaaaagtgggcataatcttagagaaaaagatttcagcctctc

SEQ ID NO: 127041 - DNA, 80 bp, synthetic construct
  misc_feature 1..80: note = Artificially Synthesized Probe
  source 1..80: mol_type = other DNA
atgcttttcatgagtcttaaaatcatgtgatttgtacccctatgtcccagggataaattccacatatttgtagaatatga

SEQ ID NO: 127042 - DNA, 80 bp, synthetic construct; identical to SEQ ID NO: 40732
  misc_feature 1..80: note = Artificially Synthesized Probe
  source 1..80: mol_type = other DNA

SEQ ID NO: 127043 - DNA, 80 bp, synthetic construct; identical to SEQ ID NO: 40339
  misc_feature 1..80: note = Artificially Synthesized Probe
  source 1..80: mol_type = other DNA

SEQ ID NO: 127044 - DNA, 80 bp, synthetic construct
  misc_feature 1..80: note = Artificially Synthesized Probe
  source 1..80: mol_type = other DNA
agtagtctcataattgtttttttcttctgtggcatcatttatgtcttctctcatttctgactttgagttttctctatttt

SEQ ID NO: 127045 - DNA, 80 bp, synthetic construct
  misc_feature 1..80: note = Artificially Synthesized Probe
  source 1..80: mol_type = other DNA
gattcagttcctgaggatggatttctttctctattgcagatgttcactttttttctgtgccctcacatgcagagacagtg

SEQ ID NO: 127046 - DNA, 80 bp, synthetic construct
  misc_feature 1..80: note = Artificially Synthesized Probe
  source 1..80: mol_type = other DNA
tgtagtttaggacatcagcatatgaactttgggtgaacaaaacattcagtccgtaacattagtctagttaaatattgctg

SEQ ID NO: 127047 - DNA, 80 bp, synthetic construct
  misc_feature 1..80: note = Artificially Synthesized Probe
  source 1..80: mol_type = other DNA
ttatttgaaatcttttttaacataggtgtttaccaccataaacttccctcttggcactgtttttgctgcatcccacaaat

SEQ ID NO: 127048 - DNA, 80 bp, synthetic construct; identical to SEQ ID NO: 40733
  misc_feature 1..80: note = Artificially Synthesized Probe
  source 1..80: mol_type = other DNA

SEQ ID NO: 127049 - DNA, 80 bp, synthetic construct
  misc_feature 1..80: note = Artificially Synthesized Probe
  source 1..80: mol_type = other DNA
gaactctgctcctattgttgtgttgttgtctacttctaccttcagttttgtcaatgtttgtttcatacacaggttgaata

SEQ ID NO: 127050 - DNA, 80 bp, synthetic construct
  misc_feature 1..80: note = Artificially Synthesized Probe
  source 1..80: mol_type = other DNA
acatagtttgtgttcaccgaactatcagaaatcaaaggtgtcaggtgtgagttttctacttgaggtgtcatatcagtgct

SEQ ID NO: 127051 - DNA, 80 bp, synthetic construct; identical to SEQ ID NO: 40734
  misc_feature 1..80: note = Artificially Synthesized Probe
  source 1..80: mol_type = other DNA

SEQ ID NO: 127052 - DNA, 80 bp, synthetic construct
  misc_feature 1..80: note = Artificially Synthesized Probe
  source 1..80: mol_type = other DNA
tggctttttacatgctgggaaagatgactgcttttacacaacatcaatatccttaaattgcgaatttctatttaggttct

SEQ ID NO: 127053 - DNA, 80 bp, synthetic construct
  misc_feature 1..80: note = Artificially Synthesized Probe
  source 1..80: mol_type = other DNA
atattaccaaaaacaagcaaacaaagaaactaaagctcaatttattcaaccaaaaatggttatttatcttcatttcttta

SEQ ID NO: 127054 - DNA, 80 bp, synthetic construct
  misc_feature 1..80: note = Artificially Synthesized Probe
  source 1..80: mol_type = other DNA
gaccaggcagcagtggtgacagcaaattcattctcggttcattgtaattatcaataaatgataagaaatttcgtgagaga

SEQ ID NO: 127055 - DNA, 80 bp, synthetic construct
  misc_feature 1..80: note = Artificially Synthesized Probe
  source 1..80: mol_type = other DNA
tctctaagaacttgtctcttagggctaaaatcaaggtgttggctgctttctcctgcagcctctgggggacagtctgtttt

SEQ ID NO: 127056 - DNA, 80 bp, synthetic construct
  misc_feature 1..80: note = Artificially Synthesized Probe
  source 1..80: mol_type = other DNA
agctctctctggggtgtgttccttccagcagcacagcttagaaggaaggtatagggtggaagttcaaaaggatcaagata

SEQ ID NO: 127057 - DNA, 80 bp, synthetic construct; identical to SEQ ID NO: 40735
  misc_feature 1..80: note = Artificially Synthesized Probe
  source 1..80: mol_type = other DNA

SEQ ID NO: 127058 - DNA, 80 bp, synthetic construct
  misc_feature 1..80: note = Artificially Synthesized Probe
  source 1..80: mol_type = other DNA
ctgcgtgtcccagtggttttttgtcttacttaagagagttcttttggagatcccacccacaggctctgaccttatggaat

SEQ ID NO: 127059 - DNA, 80 bp, synthetic construct
  misc_feature 1..80: note = Artificially Synthesized Probe
  source 1..80: mol_type = other DNA
tggattcagattccattgtcccatctgtgggggccaacgtgaagctttaaataaacatgtaaacatcttttatttgttac

SEQ ID NO: 127060 - DNA, 80 bp, synthetic construct
  misc_feature 1..80: note = Artificially Synthesized Probe
  source 1..80: mol_type = other DNA
gttgacccatttaaaaaaaaaaactcacagaattttgaaaaccacagcatggcaaatcattattggagacagacagtgca

SEQ ID NO: 127061 - DNA, 80 bp, synthetic construct; identical to SEQ ID NO: 40736
  misc_feature 1..80: note = Artificially Synthesized Probe
  source 1..80: mol_type = other DNA

SEQ ID NO: 127062 - DNA, 80 bp, synthetic construct
  misc_feature 1..80: note = Artificially Synthesized Probe
  source 1..80: mol_type = other DNA
cagtagaacttccatgaaggtcaccgatgctgagcatttcagtagaacttccatgaaagtcacggatgctgagcatttca

SEQ ID NO: 127063 - DNA, 80 bp, synthetic construct
  misc_feature 1..80: note = Artificially Synthesized Probe
  source 1..80: mol_type = other DNA
aacttccatgaaagtcattgatgctgagcatttcagtagaacttccatgagagtcactgaggctgagcatttcagtagaa

SEQ ID NO: 127064 - DNA, 80 bp, synthetic construct
  misc_feature 1..80: note = Artificially Synthesized Probe
  source 1..80: mol_type = other DNA
cgtgaaagtcaccgacgctaagcatttcaatagaacttccatgaaggtcaccgacactgagcatttcagtagaacttccg

SEQ ID NO: 127065 - DNA, 80 bp, synthetic construct
  misc_feature 1..80: note = Artificially Synthesized Probe
  source 1..80: mol_type = other DNA
aggcatgtgatgcagatgaaggaaataacacaccgtgacccagcatgcacctgcagcatgaggcatgcgaagcagataat

SEQ ID NO: 127066 - DNA, 80 bp, synthetic construct; identical to SEQ ID NO: 40737
  misc_feature 1..80: note = Artificially Synthesized Probe
  source 1..80: mol_type = other DNA

SEQ ID NO: 127067 - DNA, 80 bp, synthetic construct
  misc_feature 1..80: note = Artificially Synthesized Probe
  source 1..80: mol_type = other DNA
cgacgctgagcatttcaatagaacttccacgaaggtcaccgacgctgagcatttcaatagaacttccgtgaaagtcaccg

SEQ ID NO: 127068 - DNA, 80 bp, synthetic construct
  misc_feature 1..80: note = Artificially Synthesized Probe
  source 1..80: mol_type = other DNA
ctgagcatttcagtagaacttccacgaaaatgactgacactgagcatttcagtagaatttccatggaagtcaccaacgct

SEQ ID NO: 127069 - DNA, 80 bp, synthetic construct
  misc_feature 1..80: note = Artificially Synthesized Probe
  source 1..80: mol_type = other DNA
gaagtaccacaaaagaccctggcaacaccacaagctgcacaaagaccactgcaaccttgtgcaaagacaagtcttctatg

SEQ ID NO: 127070 - DNA, 80 bp, synthetic construct; identical to SEQ ID NO: 40738
  misc_feature 1..80: note = Artificially Synthesized Probe
  source 1..80: mol_type = other DNA

SEQ ID NO: 127071 - DNA, 80 bp, synthetic construct
  misc_feature 1..80: note = Artificially Synthesized Probe
  source 1..80: mol_type = other DNA
tttgttcaaacaaaatgtcaaaatgtgatttcaatcagctctagttaaaaattcataattcaagatagccttgctggtaa

SEQ ID NO: 127072 - DNA, 80 bp, synthetic construct
  misc_feature 1..80: note = Artificially Synthesized Probe
  source 1..80: mol_type = other DNA
gctttcagtactactcattgagttttagtgtggaatttagtggtgtgaccgatttcactgctagctagtaatttctttta

SEQ ID NO: 127073 - DNA, 80 bp, synthetic construct
  misc_feature 1..80: note = Artificially Synthesized Probe
  source 1..80: mol_type = other DNA
ttaatttttagtatttttttttttttttggtagggacagcatttcaccatgttggccaggctggtgtcaaactcctaact

SEQ ID NO: 127074 - DNA, 80 bp, synthetic construct; identical to SEQ ID NO: 40739
  misc_feature 1..80: note = Artificially Synthesized Probe
  source 1..80: mol_type = other DNA

SEQ ID NO: 127075 - DNA, 80 bp, synthetic construct
  misc_feature 1..80: note = Artificially Synthesized Probe
  source 1..80: mol_type = other DNA
caggcatggtggtgggcgcctgtagtcccagctacttgggaggccgagatgggcggatcacgaggtcaggaggttgagac

SEQ ID NO: 127076 - DNA, 80 bp, synthetic construct
  misc_feature 1..80: note = Artificially Synthesized Probe
  source 1..80: mol_type = other DNA
gagtggaggttgtgccactgcactccagcctgggcgacagagtgagattccgtctcaaaaaaaataaaattaacccaaaa

SEQ ID NO: 127077 - DNA, 80 bp, synthetic construct
  misc_feature 1..80: note = Artificially Synthesized Probe
  source 1..80: mol_type = other DNA
tgatatggagaaaattatgctaagaaaaaaagacaagtaaaaatatgagatagtggatagtaggtacaaaggacaaaaca

SEQ ID NO: 127078 - DNA, 80 bp, synthetic construct
  misc_feature 1..80: note = Artificially Synthesized Probe
  source 1..80: mol_type = other DNA
ttttttcctctaacagggataagtcaaaatgaataaaagattttgagtacagtctcacgctttgggtatgattggcgaat

SEQ ID NO: 127079 - DNA, 80 bp, synthetic construct
  misc_feature 1..80: note = Artificially Synthesized Probe
  source 1..80: mol_type = other DNA
ttgctcatcacaatttgaaatgatcaaaataattagtgttgtagctgtcaatgttaagagtcattcacatgcataggaag

SEQ ID NO: 127080 - DNA, 80 bp, synthetic construct; identical to SEQ ID NO: 40740
  misc_feature 1..80: note = Artificially Synthesized Probe
  source 1..80: mol_type = other DNA

SEQ ID NO: 127081 - DNA, 80 bp, synthetic construct
  misc_feature 1..80: note = Artificially Synthesized Probe
  source 1..80: mol_type = other DNA
gtcagggaagtttgaagtcatttttgagatgtcacgtctttgagttataaagaaaagcagctccgaaaagctgagatgga

SEQ ID NO: 127082 - DNA, 80 bp, synthetic construct
  misc_feature 1..80: note = Artificially Synthesized Probe
  source 1..80: mol_type = other DNA
agcttaaaggagcatgtctgtggaactgacaggccttagcgttgctcttcttcttgaaaatgatttatctttctttctgg

SEQ ID NO: 127083 - DNA, 80 bp, synthetic construct; identical to SEQ ID NO: 40741
  misc_feature 1..80: note = Artificially Synthesized Probe
  source 1..80: mol_type = other DNA

SEQ ID NO: 127084 - DNA, 80 bp, synthetic construct
  misc_feature 1..80: note = Artificially Synthesized Probe
  source 1..80: mol_type = other DNA
gttgatttgacacagggactttatgtggggcagtttgtggagagaagatgaaccttttgtgggtcatttttgcttttaca

SEQ ID NO: 127085 - DNA, 80 bp, synthetic construct
  misc_feature 1..80: note = Artificially Synthesized Probe
  source 1..80: mol_type = other DNA
ctgctctcccgtagccatggggacagggtgggtgaacaaggcccctcctcgcttcccgccgtgctgtgcacactgcctat

SEQ ID NO: 127086 - DNA, 80 bp, synthetic construct
  misc_feature 1..80: note = Artificially Synthesized Probe
  source 1..80: mol_type = other DNA
atgaagcccacacgcacccatacaaaaggcacggcggcctgagacacaatggctagttctgccaactcacacagcacagg

SEQ ID NO: 127087 - DNA, 80 bp, synthetic construct
  misc_feature 1..80: note = Artificially Synthesized Probe
  source 1..80: mol_type = other DNA
gcttcttatttaggggatactgttctaaacatttgtaaaatgtaaagttatatttttagtgcaaaaactattaaacttca

SEQ ID NO: 127088 - DNA, 80 bp, synthetic construct
  misc_feature 1..80: note = Artificially Synthesized Probe
  source 1..80: mol_type = other DNA
aaataaaggaagtgagcattagcccccgttaggtgcaagaaaacaagtaagttacattctcagcgttgtaataaaaaata

SEQ ID NO: 127089 - DNA, 80 bp, synthetic construct; identical to SEQ ID NO: 40340
  misc_feature 1..80: note = Artificially Synthesized Probe
  source 1..80: mol_type = other DNA

SEQ ID NO: 127090 - DNA, 80 bp, synthetic construct; identical to SEQ ID NO: 40742
  misc_feature 1..80: note = Artificially Synthesized Probe
  source 1..80: mol_type = other DNA

SEQ ID NO: 127091 - DNA, 80 bp, synthetic construct
  misc_feature 1..80: note = Artificially Synthesized Probe
  source 1..80: mol_type = other DNA
ctgaaaaattaaattattttcgtaagaaatgattctttcctgcagaatattgcaactttgtgttgttttatgatgagcct

SEQ ID NO: 127092 - DNA, 80 bp, synthetic construct
  misc_feature 1..80: note = Artificially Synthesized Probe
  source 1..80: mol_type = other DNA
tttatgacaattaagttcatgttgaaaagcagctgccaacatattgtctctttgaggccatcacacagtggcctgtccaa

SEQ ID NO: 127093 - DNA, 80 bp, synthetic construct
  misc_feature 1..80: note = Artificially Synthesized Probe
  source 1..80: mol_type = other DNA
caatttaagaactctttagcacccttaatataaaaccccatgtccattaagcaatcagtcctgattacccctccccccaa

SEQ ID NO: 127094 - DNA, 80 bp, synthetic construct
  misc_feature 1..80: note = Artificially Synthesized Probe
  source 1..80: mol_type = other DNA
ctctaagttttagggtacatgtgcacattgtgcaggttagttacatatgtatacatgtgccatgctggtgtgctgcaccc

SEQ ID NO: 127095 - DNA, 80 bp, synthetic construct; identical to SEQ ID NO: 40341
  misc_feature 1..80: note = Artificially Synthesized Probe
  source 1..80: mol_type = other DNA

SEQ ID NO: 127096 - DNA, 80 bp, synthetic construct
  misc_feature 1..80: note = Artificially Synthesized Probe
  source 1..80: mol_type = other DNA
ggccacactgtttccaattatatttcattattttcaaaactcctaaaatcagtagtgtctctgatgtgatcataatactg

SEQ ID NO: 127097 - DNA, 80 bp, synthetic construct
  misc_feature 1..80: note = Artificially Synthesized Probe
  source 1..80: mol_type = other DNA
aatgttaagtatcttcacatgtaattatttgccatttgtatattttctaatgtttccatttttaattggattatttatct

SEQ ID NO: 127098 - DNA, 80 bp, synthetic construct
  misc_feature 1..80: note = Artificially Synthesized Probe
  source 1..80: mol_type = other DNA
atttttacttttgctatagtttttttcttattttacctagcaaacaattgtctgacccaagattataaagatacactcct

SEQ ID NO: 127099 - DNA, 80 bp, synthetic construct; identical to SEQ ID NO: 40342
  misc_feature 1..80: note = Artificially Synthesized Probe
  source 1..80: mol_type = other DNA

SEQ ID NO: 127100 - DNA, 80 bp, synthetic construct
  misc_feature 1..80: note = Artificially Synthesized Probe
  source 1..80: mol_type = other DNA
aattaggaaatgtgaacctccaactttgttcttctttgttaggattgtttctgacagtcctgggttcctggaacatccat

SEQ ID NO: 127101 - DNA, 80 bp, synthetic construct
  misc_feature 1..80: note = Artificially Synthesized Probe
  source 1..80: mol_type = other DNA
aaattttaactgtattgccttcaatccatgaacatggactgtctttctatttatttagttcttccatttatttagttatt

SEQ ID NO: 127102 - DNA, 80 bp, synthetic construct
  misc_feature 1..80: note = Artificially Synthesized Probe
  source 1..80: mol_type = other DNA
gtttttagaatgttaattgcaaacatatataaatacaattggcttttgcttattgatctcgtatcctgccacattgccaa

SEQ ID NO: 127103 - DNA, 80 bp, synthetic construct
  misc_feature 1..80: note = Artificially Synthesized Probe
  source 1..80: mol_type = other DNA
cctccactgtcaagattctgagtatcaactctgggagttaccaacattcactcgacatttgggtgaacatcatttgatga

SEQ ID NO: 127104 - DNA, 80 bp, synthetic construct; identical to SEQ ID NO: 40343
  misc_feature 1..80: note = Artificially Synthesized Probe
  source 1..80: mol_type = other DNA

SEQ ID NO: 127105 - DNA, 80 bp, synthetic construct
  misc_feature 1..80: note = Artificially Synthesized Probe
  source 1..80: mol_type = other DNA
tgctttttctgcatctcttgaggtgatcatatgattttgtcttttatttactgcatatggggtggggtattggataaatt

SEQ ID NO: 127106 - DNA, 80 bp, synthetic construct
  misc_feature 1..80: note = Artificially Synthesized Probe
  source 1..80: mol_type = other DNA
gtctgatctgtgtcagggtaatatttgtcccatagaataagttggaaattatttcctcttgatgtttttagaagagtttg

SEQ ID NO: 127107 - DNA, 80 bp, synthetic construct; identical to SEQ ID NO: 40344
  misc_feature 1..80: note = Artificially Synthesized Probe
  source 1..80: mol_type = other DNA

SEQ ID NO: 127108 - DNA, 80 bp, synthetic construct
  misc_feature 1..80: note = Artificially Synthesized Probe
  source 1..80: mol_type = other DNA
ttatttttttgttgttgtttgccttgtaatgaggaaacacttttattgtctttcttaacctctagtgatggatagatagg

SEQ ID NO: 127109 - DNA, 80 bp, synthetic construct
  misc_feature 1..80: note = Artificially Synthesized Probe
  source 1..80: mol_type = other DNA
taagagaacttttcaaacacttacctttctggcaacttcgactgccagaaatcagctcagaagtgagcaacttctttcct

SEQ ID NO: 127110 - DNA, 80 bp, synthetic construct
  misc_feature 1..80: note = Artificially Synthesized Probe
  source 1..80: mol_type = other DNA
gtgggaaagtaaaatgtagatatgcttatgctgccacaaacattgtgtgtatctatatatctacatatagacatacacat

SEQ ID NO: 127111 - DNA, 80 bp, synthetic construct
  misc_feature 1..80: note = Artificially Synthesized Probe
  source 1..80: mol_type = other DNA
caagaaagacattttggagatgctggggtacctaaaattttcctctattaacatgagggttgctctgtagcagtgaatga

SEQ ID NO: 127112 - DNA, 80 bp, synthetic construct; identical to SEQ ID NO: 40345
  misc_feature 1..80: note = Artificially Synthesized Probe
  source 1..80: mol_type = other DNA

SEQ ID NO: 127113 - DNA, 80 bp, synthetic construct
  misc_feature 1..80: note = Artificially Synthesized Probe
  source 1..80: mol_type = other DNA
tgtaggatatagagcagaaggatatgagaacatgtactgggggcgtgacaagctctaggttaagctgggtgccctctcta

SEQ ID NO: 127114 - DNA, 80 bp, synthetic construct; identical to SEQ ID NO: 40301
  misc_feature 1..80: note = Artificially Synthesized Probe
  source 1..80: mol_type = other DNA

SEQ ID NO: 127115 - DNA, 80 bp, synthetic construct
  misc_feature 1..80: note = Artificially Synthesized Probe
  source 1..80: mol_type = other DNA
gacagtgacttgacatgcagaaaatgaagtgagagatgtaggattgtgcagataatggcaatggatttgaattgcattct

SEQ ID NO: 127116 - DNA, 80 bp, synthetic construct
  misc_feature 1..80: note = Artificially Synthesized Probe
  source 1..80: mol_type = other DNA
tgagacctccccatcactcacctcagcagttcttgcatttctacatagtgtggtctggcaggcctgccctgtctagctct

SEQ ID NO: 127117 - DNA, 80 bp, synthetic construct; identical to SEQ ID NO: 40346
  misc_feature 1..80: note = Artificially Synthesized Probe
  source 1..80: mol_type = other DNA

SEQ ID NO: 127118 - DNA, 80 bp, synthetic construct
  misc_feature 1..80: note = Artificially Synthesized Probe
  source 1..80: mol_type = other DNA
agccaaggagttcacgcagaatctttgccattgaaggcacctaaaaagccagatgactctacacaacatacattatagtc

SEQ ID NO: 127119 - DNA, 80 bp, synthetic construct
  misc_feature 1..80: note = Artificially Synthesized Probe
  source 1..80: mol_type = other DNA
cagcccccaaatatcacactaattctctagcagtatatcctaaccaaaatgaaaacatggaaatacagatagagaataca

SEQ ID NO: 127120 - DNA, 80 bp, synthetic construct
  misc_feature 1..80: note = Artificially Synthesized Probe
  source 1..80: mol_type = other DNA
actgaaggaattacaaaatactgttgaaggcagtaacaatagactagaccaagcagaagaaagaatctcaagagtttgaa

SEQ ID NO: 127121 - DNA, 80 bp, synthetic construct; identical to SEQ ID NO: 40347
  misc_feature 1..80: note = Artificially Synthesized Probe
  source 1..80: mol_type = other DNA

SEQ ID NO: 127122 - DNA, 80 bp, synthetic construct
  misc_feature 1..80: note = Artificially Synthesized Probe
  source 1..80: mol_type = other DNA
ctgattacctgtaaaggagagtccatcaaatttctaagcctatcaatggacttataaagagaaacctcacaaaccagaag

SEQ ID NO: 127123 - DNA, 80 bp, synthetic construct
  misc_feature 1..80: note = Artificially Synthesized Probe
  source 1..80: mol_type = other DNA
gaggcgcccgggcttccctttactgcgtgggaagtagtgctttccagaatttgggatttgagattggcccggcattgctt

SEQ ID NO: 127124 - DNA, 80 bp, synthetic construct
  misc_feature 1..80: note = Artificially Synthesized Probe
  source 1..80: mol_type = other DNA
actaaagtaattttcaccaagagactggccctgcaacaaatggagagttctaaacgtggaaacaaaatgttgataccata

SEQ ID NO: 127125 - DNA, 80 bp, synthetic construct; identical to SEQ ID NO: 40348
  misc_feature 1..80: note = Artificially Synthesized Probe
  source 1..80: mol_type = other DNA

SEQ ID NO: 127126 - DNA, 80 bp, synthetic construct
  misc_feature 1..80: note = Artificially Synthesized Probe
  source 1..80: mol_type = other DNA
aattccacaggaagctataacaatcataaatatacatgccccaacactggatcacctagattcataaaacaaatagtagt

SEQ ID NO: 127127 - DNA, 80 bp, synthetic construct
  misc_feature 1..80: note = Artificially Synthesized Probe
  source 1..80: mol_type = other DNA
aaataatctgcatttttgaagtgggatacagctgccagttgttctgaacaaaatcatcacttattttggatttggcagca

SEQ ID NO: 127128 - DNA, 80 bp, synthetic construct
  misc_feature 1..80: note = Artificially Synthesized Probe
  source 1..80: mol_type = other DNA
cagattatatactcttctcttcagtgcatagaacattttccaagacagacaacatataaggtcgcaaaacaagtctaagt

SEQ ID NO: 127129 - DNA, 80 bp, synthetic construct
  misc_feature 1..80: note = Artificially Synthesized Probe
  source 1..80: mol_type = other DNA
acctggtcctgaatgatcgtggggtgaaaaatgctattaagatggaaaatttttaaattttctttacctgaatgaaaatg

SEQ ID NO: 127130 - DNA, 80 bp, synthetic construct; identical to SEQ ID NO: 40349
  misc_feature 1..80: note = Artificially Synthesized Probe
  source 1..80: mol_type = other DNA

SEQ ID NO: 127131 - DNA, 80 bp, synthetic construct
  misc_feature 1..80: note = Artificially Synthesized Probe
  source 1..80: mol_type = other DNA
cacagaaatacaaaagatcctcagagactactgtgaacatttctgttcacacagactagaaaacctagaggaaatacata

SEQ ID NO: 127132 - DNA, 80 bp, synthetic construct
  misc_feature 1..80: note = Artificially Synthesized Probe
  source 1..80: mol_type = other DNA
aagaactggtaccaatcttactgaaactattttaaaaaatgaggaggaaggactcatttctcactcattctatgaaacca

SEQ ID NO: 127133 - DNA, 80 bp, synthetic construct
  misc_feature 1..80: note = Artificially Synthesized Probe
  source 1..80: mol_type = other DNA
gagttttaactccagaaatgcaatgaaggtatatgcaaatcaacaaatgtgattcgccacgtaaacaaaaagtaaaaacc

SEQ ID NO: 127134 - DNA, 80 bp, synthetic construct; identical to SEQ ID NO: 40350
  misc_feature 1..80: note = Artificially Synthesized Probe
  source 1..80: mol_type = other DNA

SEQ ID NO: 127135 - DNA, 80 bp, synthetic construct
  misc_feature 1..80: note = Artificially Synthesized Probe
  source 1..80: mol_type = other DNA
ataaagtttcaagataaaaataaatgtacaaaaatcagtagcatttttatacaacaataatgatcaagctgagaaccaat

SEQ ID NO: 127136 - DNA, 80 bp, synthetic construct
  misc_feature 1..80: note = Artificially Synthesized Probe
  source 1..80: mol_type = other DNA
ttgaaaaaaatcaatattattaaaataaccatactacccaaagcaatctagagattcagtgcaattctcaccaaaatatt

SEQ ID NO: 127137 - DNA, 80 bp, synthetic construct
  misc_feature 1..80: note = Artificially Synthesized Probe
  source 1..80: mol_type = other DNA
atggtcctgatataaaaatagacatgtagatcaaggaacagaatagagaacccagacataaagccacatacatacaggca

SEQ ID NO: 127138 - DNA, 80 bp, synthetic construct
  misc_feature 1..80: note = Artificially Synthesized Probe
  source 1..80: mol_type = other DNA
cctgcatctgcatctgcatctgccctggccccacccactgcccttgtgactgtgctggcccctgcccctgcccctgcccc

SEQ ID NO: 127139 - DNA, 80 bp, synthetic construct
  misc_feature 1..80: note = Artificially Synthesized Probe
  source 1..80: mol_type = other DNA
atataacacctgaaactataaaaaaaccagaagaaaatctaggaaaatctcttctggacattgccatgatcaaataattt

SEQ ID NO: 127140 - DNA, 80 bp, synthetic construct; identical to SEQ ID NO: 40351
  misc_feature 1..80: note = Artificially Synthesized Probe
  source 1..80: mol_type = other DNA

SEQ ID NO: 127141 - DNA, 80 bp, synthetic construct
  misc_feature 1..80: note = Artificially Synthesized Probe
  source 1..80: mol_type = other DNA
gtggagaaaatacttatctatggttggttgaaatataaatagaacaacctctatgaaaaagggtatgaatatttctcaaa

SEQ ID NO: 127142 - DNA, 80 bp, synthetic construct
  misc_feature 1..80: note = Artificially Synthesized Probe
  source 1..80: mol_type = other DNA
actattcacagtagcaaatatctagaatcaatgtgttcttcaatgaatgaatgactaggtaaagaaaatgttatatatat

SEQ ID NO: 127143 - DNA, 80 bp, synthetic construct; identical to SEQ ID NO: 40352
  misc_feature 1..80: note = Artificially Synthesized Probe
  source 1..80: mol_type = other DNA

SEQ ID NO: 127144 - DNA, 80 bp, synthetic construct
  misc_feature 1..80: note = Artificially Synthesized Probe
  source 1..80: mol_type = other DNA
aagaaaaaaataatggatttgcacgagtatatgaatctattatgggaggatgacagtgtatagtcaagagtgtggcctgg

SEQ ID NO: 127145 - DNA, 80 bp, synthetic construct
  misc_feature 1..80: note = Artificially Synthesized Probe
  source 1..80: mol_type = other DNA
catcatgtctagacttcattacatatgacattatgatttctattgtattggagtctagagagaggcccaggatttctgta

SEQ ID NO: 127146 - DNA, 80 bp, synthetic construct
  misc_feature 1..80: note = Artificially Synthesized Probe
  source 1..80: mol_type = other DNA
atgagtttcggaaggagctgctgtgacgatctattaatagatggtccctaatatgatgcacttttaagcatcactcgtgt

SEQ ID NO: 127147 - DNA, 80 bp, synthetic construct; identical to SEQ ID NO: 40353
  misc_feature 1..80: note = Artificially Synthesized Probe
  source 1..80: mol_type = other DNA

SEQ ID NO: 127148 - DNA, 80 bp, synthetic construct
  misc_feature 1..80: note = Artificially Synthesized Probe
  source 1..80: mol_type = other DNA
accatgttttattcttaatgatagtgcctgacatgactgtcctgtgacaaaaactaaatcattagtccctgtaacaggaa

SEQ ID NO: 127149 - DNA, 80 bp, synthetic construct
  misc_feature 1..80: note = Artificially Synthesized Probe
  source 1..80: mol_type = other DNA
taatgaaaagacaagccaaagacttgtagaaagtatttgaaaaataatctctgataaatggcttgtacacaggatataca

SEQ ID NO: 127150 - DNA, 80 bp, synthetic construct
  misc_feature 1..80: note = Artificially Synthesized Probe
  source 1..80: mol_type = other DNA
cctgccccgcccctgccccacccctgccccgccccgcccctgcgcctccccctgccctgcccctgcacctccccctgcgc

SEQ ID NO: 127151 - DNA, 80 bp, synthetic construct
  misc_feature 1..80: note = Artificially Synthesized Probe
  source 1..80: mol_type = other DNA
acatgtcagggaattgcaaattacagccgcaatgagacaaccctacaccactgttagctggctaaaatccaaaacgctga

SEQ ID NO: 127152 - DNA, 80 bp, synthetic construct; identical to SEQ ID NO: 40354
  misc_feature 1..80: note = Artificially Synthesized Probe
  source 1..80: mol_type = other DNA

SEQ ID NO: 127153 - DNA, 80 bp, synthetic construct
  misc_feature 1..80: note = Artificially Synthesized Probe
  source 1..80: mol_type = other DNA
atgaactatcaagccacaaaaaaatggaggaaatttacatgcaaattactaagaaagaagtcaatctgaaaaggctgcag

SEQ ID NO: 127154 - DNA, 80 bp, synthetic construct
  misc_feature 1..80: note = Artificially Synthesized Probe
  source 1..80: mol_type = other DNA
tgaaactgagttgtatgatcctgtagtggtggacaggtgtcattatctgtctgtccaaatccacagaatgcacaacacct

SEQ ID NO: 127155 - DNA, 80 bp, synthetic construct
  misc_feature 1..80: note = Artificially Synthesized Probe
  source 1..80: mol_type = other DNA
cctctcagtttctctgtgaagctaaaacccctctaagaatgaaatctattttaaaatattaacgttggagctgggcacag

SEQ ID NO: 127156 - DNA, 80 bp, synthetic construct
  misc_feature 1..80: note = Artificially Synthesized Probe
  source 1..80: mol_type = other DNA
ctcaggaggctgaggcaggggaattgcttgaagctgggaggcggaggttgcagtgagccgagattgcaccattgcactcc

SEQ ID NO: 127157 - DNA, 80 bp, synthetic construct; identical to SEQ ID NO: 40355
  misc_feature 1..80: note = Artificially Synthesized Probe
  source 1..80: mol_type = other DNA

SEQ ID NO: 127158 - DNA, 80 bp, synthetic construct
  misc_feature 1..80: note = Artificially Synthesized Probe
  source 1..80: mol_type = other DNA
ggggggagggatagcattgggagatatacctaatgctagatgacaagttagtgggtgcagcgcactagcatggcacatgt

SEQ ID NO: 127159 - DNA, 80 bp, synthetic construct
  misc_feature 1..80: note = Artificially Synthesized Probe
  source 1..80: mol_type = other DNA
aaaattctattaatacgtatttggatgctaatcttgtgttttggtgaaaaattccttttttattttgagtggacctcagt

SEQ ID NO: 127160 - DNA, 80 bp, synthetic construct; identical to SEQ ID NO: 40356
  misc_feature 1..80: note = Artificially Synthesized Probe
  source 1..80: mol_type = other DNA

SEQ ID NO: 127161 - DNA, 80 bp, synthetic construct
  misc_feature 1..80: note = Artificially Synthesized Probe
  source 1..80: mol_type = other DNA
gtggagcgctgcctgccctggcccagggcctttgctcagctgcctctcctggaggctgcatctcaccaggcgcagcacct

SEQ ID NO: 127162 - DNA, 80 bp, synthetic construct
  misc_feature 1..80: note = Artificially Synthesized Probe
  source 1..80: mol_type = other DNA
tgacacatgcctgtaatcccagctactagagaggctgaggcaggagaatcgcttgaacctgggaagtgaaagtttcagtg

SEQ ID NO: 127163 - DNA, 80 bp, synthetic construct
  misc_feature 1..80: note = Artificially Synthesized Probe
  source 1..80: mol_type = other DNA
ggacttgagtatgtgtgggtttgggtatctggggaggtcctggaatccatcccccacagatcccaaaggacactgcatga

SEQ ID NO: 127164 - DNA, 80 bp, synthetic construct
  misc_feature 1..80: note = Artificially Synthesized Probe
  source 1..80: mol_type = other DNA
aaggttttggtgtttgatggactcacatttagacctgacttgccctttccagctgaggatgttgggcaggaaacaaaact

SEQ ID NO: 127165 - DNA, 80 bp, synthetic construct
  misc_feature 1..80: note = Artificially Synthesized Probe
  source 1..80: mol_type = other DNA
tgcttctcttaaacgatttcctaaaaatcatcatagaatgatgtactatatgggagagcactcagtaagcgttcaggtct

SEQ ID NO: 127166 - DNA, 80 bp, synthetic construct; identical to SEQ ID NO: 40357
  misc_feature 1..80: note = Artificially Synthesized Probe
  source 1..80: mol_type = other DNA

SEQ ID NO: 127167 - DNA, 80 bp, synthetic construct
  misc_feature 1..80: note = Artificially Synthesized Probe
  source 1..80: mol_type = other DNA
ctgatcttggcatttatttaaaaggcttgataataacttatattgaagacactgttttacacacacaaatagtactcgtt

SEQ ID NO: 127168 - DNA, 80 bp, synthetic construct
  misc_feature 1..80: note = Artificially Synthesized Probe
  source 1..80: mol_type = other DNA
gagcaaactagtattacttatctccattcttgactatttttagtgcttcacaaaattatagtcatttctataatagcttt

SEQ ID NO: 127169 - DNA, 80 bp, synthetic construct
  misc_feature 1..80: note = Artificially Synthesized Probe
  source 1..80: mol_type = other DNA
tatctacgtcatcaaaccgtttttattatttatatgtattaacattacagaaacctgtaatgtcgtagaactaatgatag

SEQ ID NO: 127170 - DNA, 80 bp, synthetic construct; identical to SEQ ID NO: 40358
  misc_feature 1..80: note = Artificially Synthesized Probe
  source 1..80: mol_type = other DNA

SEQ ID NO: 127171 - DNA, 80 bp, synthetic construct
  misc_feature 1..80: note = Artificially Synthesized Probe
  source 1..80: mol_type = other DNA
agaaatgcacctttttttagagcacctaggaaaatattttctagagaaactcctggtatcaaaatccctaaagctgtgtg

SEQ ID NO: 127172 - DNA, 80 bp, synthetic construct
  misc_feature 1..80: note = Artificially Synthesized Probe
  source 1..80: mol_type = other DNA
tgggtcgtgtgtatggcagccacacctgtgtccccaggaagactgctggttctgatactggtgtgggtcgtgtgtatggc

SEQ ID NO: 127173 - DNA, 80 bp, synthetic construct; identical to SEQ ID NO: 40302
  misc_feature 1..80: note = Artificially Synthesized Probe
  source 1..80: mol_type = other DNA

SEQ ID NO: 127174 - DNA, 80 bp, synthetic construct
  misc_feature 1..80: note = Artificially Synthesized Probe
  source 1..80: mol_type = other DNA
tgatactggtgggtcgtgtgtatggcagccacacctgtgtccccaggaagactgctggttctgatactggtgtgggttgt

SEQ ID NO: 127175 - DNA, 80 bp, synthetic construct; identical to SEQ ID NO: 40359
  misc_feature 1..80: note = Artificially Synthesized Probe
  source 1..80: mol_type = other DNA

SEQ ID NO: 127176 - DNA, 80 bp, synthetic construct
  misc_feature 1..80: note = Artificially Synthesized Probe
  source 1..80: mol_type = other DNA
accgtttgggggaaggagcagtacttttgctggtatcatttacatttgtactaacaggtgagatattatcagaacacact

SEQ ID NO: 127177 - DNA, 80 bp, synthetic construct
  misc_feature 1..80: note = Artificially Synthesized Probe
  source 1..80: mol_type = other DNA
aagatgggacccagaactcaggctgcaaaaatgaaggataaagagtgaagcttctacagtaaaagtcaacctacttgcat

SEQ ID NO: 127178 - DNA, 80 bp, synthetic construct; identical to SEQ ID NO: 40360
  misc_feature 1..80: note = Artificially Synthesized Probe
  source 1..80: mol_type = other DNA

SEQ ID NO: 127179 - DNA, 80 bp, synthetic construct
  misc_feature 1..80: note = Artificially Synthesized Probe
  source 1..80: mol_type = other DNA
ttttcattggaagagtgaacagtcacactttttttcagatggtgcttggttgtgggagaaaggattgttagaacgtgatt

SEQ ID NO: 127180 - DNA, 80 bp, synthetic construct
  misc_feature 1..80: note = Artificially Synthesized Probe
  source 1..80: mol_type = other DNA
tcaagctagaatgcagaaagggaagcacttactgtgtaggccctagagtcttccgactctggacagaaaatagaaaagtg

SEQ ID NO: 127181 - DNA, 80 bp, synthetic construct
  misc_feature 1..80: note = Artificially Synthesized Probe
  source 1..80: mol_type = other DNA
aagacagatttagttataaaaacatgatcagcaagtatgagctctgtctgcctcactgtatctgaagtcccaagaagcca

SEQ ID NO: 127182 - DNA, 80 bp, synthetic construct
  misc_feature 1..80: note = Artificially Synthesized Probe
  source 1..80: mol_type = other DNA
tggttacacagataagctttggtgaaagaatagaacaattcaagacatgccttttagtacataaatacaattgaccattc

SEQ ID NO: 127183 - DNA, 80 bp, synthetic construct; identical to SEQ ID NO: 40361
  misc_feature 1..80: note = Artificially Synthesized Probe
  source 1..80: mol_type = other DNA

SEQ ID NO: 127184 - DNA, 80 bp, synthetic construct
  misc_feature 1..80: note = Artificially Synthesized Probe
  source 1..80: mol_type = other DNA
agcataagtttaatggtaaatataattctatttctcagctgtatcctgctcaagattatccttcatgacttctctgcaga

SEQ ID NO: 127185 - DNA, 80 bp, synthetic construct
  misc_feature 1..80: note = Artificially Synthesized Probe
  source 1..80: mol_type = other DNA
tgaagagataaatgcttattatcaactaaaaaacacatttaaaaaacacattttaattattagtagatgcgtattagtaa

SEQ ID NO: 127186 - DNA, 80 bp, synthetic construct
  misc_feature 1..80: note = Artificially Synthesized Probe
  source 1..80: mol_type = other DNA
tcttttccccagtgaataccaaacagttagattcctggatcttcctctaaatcaagcaatctctaaatcataagcaaatt

SEQ ID NO: 127187 - DNA, 80 bp, synthetic construct
  misc_feature 1..80: note = Artificially Synthesized Probe
  source 1..80: mol_type = other DNA
gagcttccattagatccacaaaacaacatcttgaaataacgttgttcatctctgtttctatttcatgagttctctcatcc

SEQ ID NO: 127188 - DNA, 80 bp, synthetic construct; identical to SEQ ID NO: 40362
  misc_feature 1..80: note = Artificially Synthesized Probe
  source 1..80: mol_type = other DNA

SEQ ID NO: 127189 - DNA, 80 bp, synthetic construct; identical to SEQ ID NO: 40364
  misc_feature 1..80: note = Artificially Synthesized Probe
  source 1..80: mol_type = other DNA

SEQ ID NO: 127190 - DNA, 80 bp, synthetic construct
  misc_feature 1..80: note = Artificially Synthesized Probe
  source 1..80: mol_type = other DNA
tggtctgtagagggatttatatgggcagagagaagggtggtctggagagggatttatatgggcagagagaagggtggtct

SEQ ID NO: 127191 - DNA, 80 bp, synthetic construct
  misc_feature 1..80: note = Artificially Synthesized Probe
  source 1..80: mol_type = other DNA
ataagggcagagagaagggtggtctgtagagggatttataagggcagagagaagggtggtctggagagggatttatatgg

SEQ ID NO: 127192 - DNA, 80 bp, synthetic construct
  misc_feature 1..80: note = Artificially Synthesized Probe
  source 1..80: mol_type = other DNA
gtggtctgtagagggatttataagggcagagagaagggtggtctgtagagggatttataagggcagagagaagggtggtc

SEQ ID NO: 127193 - DNA, 80 bp, synthetic construct
  misc_feature 1..80: note = Artificially Synthesized Probe
  source 1..80: mol_type = other DNA
tatatgggcagagagaagggtggtctggagagggatttatatgggcagagagaagggtggtctgtagagggatttataag

SEQ ID NO: 127194 - DNA, 80 bp, synthetic construct
  misc_feature 1..80: note = Artificially Synthesized Probe
  source 1..80: mol_type = other DNA
ggtggtctgtagagggatttatatgggcagagagaagggtggtctggagagggatttatatgggcagagagaagggtggt

SEQ ID NO: 127195 - DNA, 80 bp, synthetic construct
  misc_feature 1..80: note = Artificially Synthesized Probe
  source 1..80: mol_type = other DNA
gtcatagttagcataggtcatatggtcttgaaagaaatccaagtctggttttattcctaaaacgatcatggtctgcagca

SEQ ID NO: 127196 - DNA, 80 bp, synthetic construct
  misc_feature 1..80: note = Artificially Synthesized Probe
  source 1..80: mol_type = other DNA
ttatatgggcagagagaagggtggtctggagaaggatttatatgggcagagagaagggtggtctgtagagggatttatat

SEQ ID NO: 127197 - DNA, 80 bp, synthetic construct; identical to SEQ ID NO: 40363
  misc_feature 1..80: note = Artificially Synthesized Probe
  source 1..80: mol_type = other DNA

SEQ ID NO: 127198 - DNA, 80 bp, synthetic construct
  misc_feature 1..80: note = Artificially Synthesized Probe
  source 1..80: mol_type = other DNA
tttatatgggcagagagaagggtggtctgtagagggatttatatgggcagagagaagggtggtctgtaggggaatttata

SEQ ID NO: 127199 - DNA, 80 bp, synthetic construct
  misc_feature 1..80: note = Artificially Synthesized Probe
  source 1..80: mol_type = other DNA
gggtgggagttgaggagatggagaactggctagaacccgaggggcagccttgaggggtggagggggagcctgaggaagcc

SEQ ID NO: 127200 - DNA, 80 bp, synthetic construct
  misc_feature 1..80: note = Artificially Synthesized Probe
  source 1..80: mol_type = other DNA
agagactggagcgggagcaggtatcctggtcccgcaggcttgtccgaggtagagatgtgggcagctgggaccatgttggt

SEQ ID NO: 127201 - DNA, 80 bp, synthetic construct; identical to SEQ ID NO: 40365
  misc_feature 1..80: note = Artificially Synthesized Probe
  source 1..80: mol_type = other DNA

SEQ ID NO: 127202 - DNA, 80 bp, synthetic construct
  misc_feature 1..80: note = Artificially Synthesized Probe
  source 1..80: mol_type = other DNA
aaatataaatttccatcaatggggatgtcttcttcccagctaggagactgaaaaataaaacgtgttaaacccaaatgttg

SEQ ID NO: 127203 - DNA, 80 bp, synthetic construct
  misc_feature 1..80: note = Artificially Synthesized Probe
  source 1..80: mol_type = other DNA
gcatcatctgtatctgctgccctgcaagacaaaagacttgcagatggcccatgcagcagatagtccatgtttataaatgg

SEQ ID NO: 127204 - DNA, 80 bp, synthetic construct
  misc_feature 1..80: note = Artificially Synthesized Probe
  source 1..80: mol_type = other DNA
aacatatctaaatatgttacagctttgagaaaggcagttatagagcacagtatatagtatgacccccttcctgtaattaa

SEQ ID NO: 127205 - DNA, 80 bp, synthetic construct
  misc_feature 1..80: note = Artificially Synthesized Probe
  source 1..80: mol_type = other DNA
caggttccagccattctcctgcctcagcctcctgggtagctgagattacaggcgcatgccacgtgcctggctaatttttg

SEQ ID NO: 127206 - DNA, 80 bp, synthetic construct; identical to SEQ ID NO: 40303
  misc_feature 1..80: note = Artificially Synthesized Probe
  source 1..80: mol_type = other DNA

SEQ ID NO: 127207 - DNA, 80 bp, synthetic construct; identical to SEQ ID NO: 40366
  misc_feature 1..80: note = Artificially Synthesized Probe
  source 1..80: mol_type = other DNA

SEQ ID NO: 127208 - DNA, 80 bp, synthetic construct
  misc_feature 1..80: note = Artificially Synthesized Probe
  source 1..80: mol_type = other DNA
ttcactttggggtgtggacttaacattaaaatgtagcaaaattaggctctgtgtgttgaaaggtgaagctggtacatgaa

SEQ ID NO: 127209 - DNA, 80 bp, synthetic construct
  misc_feature 1..80: note = Artificially Synthesized Probe
  source 1..80: mol_type = other DNA
atgagtattttaatctttcttatctctaggctagtgctggttcagctgctacagaaaaagaaaatcttgtggcagtgagt

SEQ ID NO: 127210 - DNA, 80 bp, synthetic construct
  misc_feature 1..80: note = Artificially Synthesized Probe
  source 1..80: mol_type = other DNA
tgtgtcataaaagtctaaaaacttcattagaaaatgaaattgactctgtaaagcaaaaggtatgtaataaggggaattct

SEQ ID NO: 127211 - DNA, 80 bp, synthetic construct; identical to SEQ ID NO: 40367
  misc_feature 1..80: note = Artificially Synthesized Probe
  source 1..80: mol_type = other DNA

SEQ ID NO: 127212 - DNA, 80 bp, synthetic construct
  misc_feature 1..80: note = Artificially Synthesized Probe
  source 1..80: mol_type = other DNA
ttaaaaagaagagttaccgtatcttcttttaatttacttggtttctgatcacagataagcattgctagacagctctgtga

SEQ ID NO: 127213 - DNA, 80 bp, synthetic construct
  misc_feature 1..80: note = Artificially Synthesized Probe
  source 1..80: mol_type = other DNA
tgacctgtggtgtctggtcagctcataacttccatatttttctttaggctcttccccttcagagagtgccccacgccatc

SEQ ID NO: 127214 - DNA, 80 bp, synthetic construct
  misc_feature 1..80: note = Artificially Synthesized Probe
  source 1..80: mol_type = other DNA
tatgtatgttgtagtatggtaacgagcctctgttgactcccactttttactggtagggataaaatttgaaaatgattaat

SEQ ID NO: 127215 - DNA, 80 bp, synthetic construct; identical to SEQ ID NO: 40368
  misc_feature 1..80: note = Artificially Synthesized Probe
  source 1..80: mol_type = other DNA

SEQ ID NO: 127216 - DNA, 80 bp, synthetic construct
  misc_feature 1..80: note = Artificially Synthesized Probe
  source 1..80: mol_type = other DNA
aacatcagtgagaaagtttggaaaaggaggaaggagcaggaatgagagctgtttagacccagggcgtgaacttctcacct

SEQ ID NO: 127217 - DNA, 80 bp, synthetic construct
  misc_feature 1..80: note = Artificially Synthesized Probe
  source 1..80: mol_type = other DNA
tttttttgtaaaatgttggcaaaggcctgagcacaacgtgctttcacttaatgggccatcacattacagcccctgttggc

SEQ ID NO: 127218 - DNA, 80 bp, synthetic construct
  misc_feature 1..80: note = Artificially Synthesized Probe
  source 1..80: mol_type = other DNA
ttctatagatgaggtcgggcaacatttgtcttccggcacatggaaggcgagactggtactgagactgagactgagactga

SEQ ID NO: 127219 - DNA, 80 bp, synthetic construct
  misc_feature 1..80: note = Artificially Synthesized Probe
  source 1..80: mol_type = other DNA
ttgatgagaatacagcacgcatgcagagctctatctacagtgctgacagcgctgcatgttttactagaaggacctggcat

SEQ ID NO: 127220 - DNA, 80 bp, synthetic construct; identical to SEQ ID NO: 40369
  misc_feature 1..80: note = Artificially Synthesized Probe
  source 1..80: mol_type = other DNA

SEQ ID NO: 127221 - DNA, 80 bp, synthetic construct
  misc_feature 1..80: note = Artificially Synthesized Probe
  source 1..80: mol_type = other DNA
gaagatggctttgtgaatctgagtgagtgttgtgggaagaggccataggtgtgctgggaatgtggagggagtgaccaggt

SEQ ID NO: 127222 - DNA, 80 bp, synthetic construct
  misc_feature 1..80: note = Artificially Synthesized Probe
  source 1..80: mol_type = other DNA
agcaggctgttgaaactctacagacattctctaagttaatgatagttccactggtaattatgctgcaggattaggcagtt

SEQ ID NO: 127223 - DNA, 80 bp, synthetic construct
  misc_feature 1..80: note = Artificially Synthesized Probe
  source 1..80: mol_type = other DNA
cgaggcaggtggatcacctgaggtcaggagactagtgtggccaacatggtgaaaccccgtctctacaaaaaaaagaaaaa

SEQ ID NO: 127224 - DNA, 80 bp, synthetic construct; identical to SEQ ID NO: 40370
  misc_feature 1..80: note = Artificially Synthesized Probe
  source 1..80: mol_type = other DNA

SEQ ID NO: 127225 - DNA, 80 bp, synthetic construct
  misc_feature 1..80: note = Artificially Synthesized Probe
  source 1..80: mol_type = other DNA
ggcatctgggcttgggcccagctcccctggctccagcatgaatgcctttcctcccacttctggcccctggactggccaga

SEQ ID NO: 127226 - DNA, 80 bp, synthetic construct
  misc_feature 1..80: note = Artificially Synthesized Probe
  source 1..80: mol_type = other DNA
gcactgtccgaatgggatctgattgtgctgggtctgtgtactcattcctgcacttctccaaatttgtaggaatttttttt

SEQ ID NO: 127227 - DNA, 80 bp, synthetic construct; identical to SEQ ID NO: 40371
  misc_feature 1..80: note = Artificially Synthesized Probe
  source 1..80: mol_type = other DNA

SEQ ID NO: 127228 - DNA, 80 bp, synthetic construct
  misc_feature 1..80: note = Artificially Synthesized Probe
  source 1..80: mol_type = other DNA
acatttttaatgacctttctccaaagaagaatagcttttcctcatcaactatagagacactgtggttcctcttaaaatga

SEQ ID NO: 127229 - DNA, 80 bp, synthetic construct
  misc_feature 1..80: note = Artificially Synthesized Probe
  source 1..80: mol_type = other DNA
gtcagttacggtagctactatctttgacagttaaatagacccaaatgtgattagtaggaggttcaagctggtttctgtat

SEQ ID NO: 127230 - DNA, 80 bp, synthetic construct
  misc_feature 1..80: note = Artificially Synthesized Probe
  source 1..80: mol_type = other DNA
tgaggaagtgttgtcatagcagccgtgggaagctaatcagtctttttaggtaagtaatatagcttttagggaatatcttc

SEQ ID NO: 127231 - DNA, 80 bp, synthetic construct
  misc_feature 1..80: note = Artificially Synthesized Probe
  source 1..80: mol_type = other DNA
tccaaggagatatattgctttttaaaatccatcattttaacagggtatttggaaaccaaaagcttgcagggacattttct

SEQ ID NO: 127232 - DNA, 80 bp, synthetic construct
  misc_feature 1..80: note = Artificially Synthesized Probe
  source 1..80: mol_type = other DNA
tgctttagggccagagtctttctgtgtcatccagactgaagtgcagcactatgatcataactcattgcagcctccacctc

SEQ ID NO: 127233 - DNA, 80 bp, synthetic construct; identical to SEQ ID NO: 40372
  misc_feature 1..80: note = Artificially Synthesized Probe
  source 1..80: mol_type = other DNA

SEQ ID NO: 127234 - DNA, 80 bp, synthetic construct
  misc_feature 1..80: note = Artificially Synthesized Probe
  source 1..80: mol_type = other DNA
ttagaaatgtagggaatttgagcccagaacccccaggttagaacttacctaattgctaacatctactaggtactaagagc

SEQ ID NO: 127235 - DNA, 80 bp, synthetic construct
  misc_feature 1..80: note = Artificially Synthesized Probe
  source 1..80: mol_type = other DNA
cataaagttatgaatagagcacagaggtgaactgaaaactatgaattgagccagtgttcccattactgggcatttatccg

SEQ ID NO: 127236 - DNA, 80 bp, synthetic construct
  misc_feature 1..80: note = Artificially Synthesized Probe
  source 1..80: mol_type = other DNA
tgtgttcccgtgagcctgtgcgttcccgtgaatccctgcattcccgtgaggacctgcgttctcaggagcctctgcgttct

SEQ ID NO: 127237 - DNA, 80 bp, synthetic construct
  misc_feature 1..80: note = Artificially Synthesized Probe
  source 1..80: mol_type = other DNA
tgattccgagtttctgattccctgtgttcctctgagtccctgtatcctcgagtattcctgtacccttgtgaagcccccga

SEQ ID NO: 127238 - DNA, 80 bp, synthetic construct; identical to SEQ ID NO: 40373
  misc_feature 1..80: note = Artificially Synthesized Probe
  source 1..80: mol_type = other DNA

SEQ ID NO: 127239 - DNA, 80 bp, synthetic construct
  misc_feature 1..80: note = Artificially Synthesized Probe
  source 1..80: mol_type = other DNA
ccgctgggacgccaactgggtaatacggatttcttttttgaagtctattctggttcccaccctaaataactccctcttca

SEQ ID NO: 127240 - DNA, 80 bp, synthetic construct
  misc_feature 1..80: note = Artificially Synthesized Probe
  source 1..80: mol_type = other DNA
ccaggcacacacaagcctctgagctgctacaagtgggagacaccaggaaagaggattttttaatgtggttcagaaataaa

SEQ ID NO: 127241 - DNA, 80 bp, synthetic construct
  misc_feature 1..80: note = Artificially Synthesized Probe
  source 1..80: mol_type = other DNA
tgtcttgaggagagaattagtctgggcccatgttatttatcctgtttgaaatgagggatttgagtaatcaccccccagcc

SEQ ID NO: 127242 - DNA, 80 bp, synthetic construct; identical to SEQ ID NO: 40374
  misc_feature 1..80: note = Artificially Synthesized Probe
  source 1..80: mol_type = other DNA

SEQ ID NO: 127243 - DNA, 80 bp, synthetic construct
  misc_feature 1..80: note = Artificially Synthesized Probe
  source 1..80: mol_type = other DNA
ttgcaaggacactcgcgttgcccagccctggctccgtcactgtgccactgtcagcacatctgcaccccgcgtagtctggg

SEQ ID NO: 127244 - DNA, 80 bp, synthetic construct
  misc_feature 1..80: note = Artificially Synthesized Probe
  source 1..80: mol_type = other DNA
tgaaagctttccacggatgagcaacgttacatggagtatccactgacaatgtggaaaaactggtgtgtgctttacaccag

SEQ ID NO: 127245 - DNA, 80 bp, synthetic construct
  misc_feature 1..80: note = Artificially Synthesized Probe
  source 1..80: mol_type = other DNA
cgtggcaccacaggggcctcccagattcaatccgtgggccacagattgaaaatgaagcagaaaaagatatttatttgaaa

SEQ ID NO: 127246 - DNA, 80 bp, synthetic construct
  misc_feature 1..80: note = Artificially Synthesized Probe
  source 1..80: mol_type = other DNA
agactaagtttttttagacagggtctccatctgttgcccaggctggagtgcagtggcatgatcatggctcactgtagcct

SEQ ID NO: 127247 - DNA, 80 bp, synthetic construct; identical to SEQ ID NO: 40304
  misc_feature 1..80: note = Artificially Synthesized Probe
  source 1..80: mol_type = other DNA

SEQ ID NO: 127248 - DNA, 80 bp, synthetic construct; identical to SEQ ID NO: 40375
  misc_feature 1..80: note = Artificially Synthesized Probe
  source 1..80: mol_type = other DNA

SEQ ID NO: 127249 - DNA, 80 bp, synthetic construct
  misc_feature 1..80: note = Artificially Synthesized Probe
  source 1..80: mol_type = other DNA
aggtggcactgaggtgacataggtaatacaggtccacattgtgtactctaccaagaaataaaaagaaagcagaaactaat

SEQ ID NO: 127250 - DNA, 80 bp, synthetic construct
  misc_feature 1..80: note = Artificially Synthesized Probe
  source 1..80: mol_type = other DNA
taacttatctaaaagatcaaaatatgaaacacccccactcacactgccaaaatcaaactatgttccccaccagaacactg

SEQ ID NO: 127251 - DNA, 80 bp, synthetic construct
  misc_feature 1..80: note = Artificially Synthesized Probe
  source 1..80: mol_type = other DNA
cccagctgggagcaacttcaagagactcatggaatagaacaagggcccggttggtaaacatagcacaggacggggtgagg

SEQ ID NO: 127252 - DNA, 80 bp, synthetic construct; identical to SEQ ID NO: 40376
  misc_feature 1..80: note = Artificially Synthesized Probe
  source 1..80: mol_type = other DNA

SEQ ID NO: 127253 - DNA, 80 bp, synthetic construct
  misc_feature 1..80: note = Artificially Synthesized Probe
  source 1..80: mol_type = other DNA
cagcgtctccaaatctcactgtgaccctggccctcctgtcccctctctgccttatggaggcccctgtgatgacactgggc

SEQ ID NO: 127254 - DNA, 80 bp, synthetic construct
  misc_feature 1..80: note = Artificially Synthesized Probe
  source 1..80: mol_type = other DNA
accctgagactggtcaaccgcatttgagagatttgaaaatttgggctctgcaggaataattgacttgctgaactagttgt

SEQ ID NO: 127255 - DNA, 80 bp, synthetic construct
  misc_feature 1..80: note = Artificially Synthesized Probe
  source 1..80: mol_type = other DNA
tttgtttgttactggataattttgaaaagtttgttgttgttgttgattttcccagtgctccaacaccagatgcagacacg

SEQ ID NO: 127256 - DNA, 80 bp, synthetic construct; identical to SEQ ID NO: 40377
  misc_feature 1..80: note = Artificially Synthesized Probe
  source 1..80: mol_type = other DNA

SEQ ID NO: 127257 - DNA, 80 bp, synthetic construct
  misc_feature 1..80: note = Artificially Synthesized Probe
  source 1..80: mol_type = other DNA
atggatggctcttcgtgttttcctaggcatgaaattgttgacaaccctgcactcacccagcatgtctcattctcccgagt

SEQ ID NO: 127258 - DNA, 80 bp, synthetic construct
  misc_feature 1..80: note = Artificially Synthesized Probe
  source 1..80: mol_type = other DNA
cctgcccttcctcttcctgctctttgcctcctccttttgcctgtggcctccccctgcccttggcctccttctctcctgac

SEQ ID NO: 127259 - DNA, 80 bp, synthetic construct
  misc_feature 1..80: note = Artificially Synthesized Probe
  source 1..80: mol_type = other DNA
attctccagatttggtgcttcaagatggatttttcataaaaagactctgcaaagatatgacattttattgaagctgaact

SEQ ID NO: 127260 - DNA, 80 bp, synthetic construct; identical to SEQ ID NO: 40378
  misc_feature 1..80: note = Artificially Synthesized Probe
  source 1..80: mol_type = other DNA

SEQ ID NO: 127261 - DNA, 80 bp, synthetic construct
  misc_feature 1..80: note = Artificially Synthesized Probe
  source 1..80: mol_type = other DNA
cccagcaagtaactcatgcatctctgttgtgtaaagagataagcaggtgtatcattgaaggtgtgtctgacccacagaca

SEQ ID NO: 127262 - DNA, 80 bp, synthetic construct
  misc_feature 1..80: note = Artificially Synthesized Probe
  source 1..80: mol_type = other DNA
gcatcactgaaggtgcgtctgacccacagtcactatccagcaagtaactcatgcatctctgttgagtaaagagataagca

SEQ ID NO: 127263 - DNA, 80 bp, synthetic construct
  misc_feature 1..80: note = Artificially Synthesized Probe
  source 1..80: mol_type = other DNA
acccagcaagtaactcatgcatctctgttgagtaagtaggtcagtaggtgcatcattgaagatgcgtctgacccacagac

SEQ ID NO: 127264 - DNA, 80 bp, synthetic construct
  misc_feature 1..80: note = Artificially Synthesized Probe
  source 1..80: mol_type = other DNA
aagagataagcaggtgcatctgacccacagacactacccagcaagtaactcatgcatctctgttgagtaaagagataagc

SEQ ID NO: 127265 - DNA, 80 bp, synthetic construct; identical to SEQ ID NO: 40379
  misc_feature 1..80: note = Artificially Synthesized Probe
  source 1..80: mol_type = other DNA

SEQ ID NO: 127266 - DNA, 80 bp, synthetic construct
  misc_feature 1..80: note = Artificially Synthesized Probe
  source 1..80: mol_type = other DNA
aacctttagaaatacctgggtattcactgactgcaggtatcctgatagggtagcacctgaatggacatctgtagtgttta

SEQ ID NO: 127267 - DNA, 80 bp, synthetic construct
  misc_feature 1..80: note = Artificially Synthesized Probe
  source 1..80: mol_type = other DNA
catgtggatctatctttccttatgctttactcgaaaagactctgggtcttacaacactgagtagttagaactccaacaca

SEQ ID NO: 127268 - DNA, 80 bp, synthetic construct; identical to SEQ ID NO: 40380
  misc_feature 1..80: note = Artificially Synthesized Probe
  source 1..80: mol_type = other DNA

SEQ ID NO: 127269 - DNA, 80 bp, synthetic construct
  misc_feature 1..80: note = Artificially Synthesized Probe
  source 1..80: mol_type = other DNA
caaccccagcctacttatctttatctccccaaatcatatatcgaaaaccccagtttatttctataaataattcatattta

SEQ ID NO: 127270 - DNA, 80 bp, synthetic construct
  misc_feature 1..80: note = Artificially Synthesized Probe
  source 1..80: mol_type = other DNA
tttttttaaagtggttcatttgaaatccagagagatatgaaaaaaattgtgtggacttccaaattattttctattttagc

SEQ ID NO: 127271 - DNA, 80 bp, synthetic construct
  misc_feature 1..80: note = Artificially Synthesized Probe
  source 1..80: mol_type = other DNA
gattttctttgcaggtgagggaggtcaggaaaatatattgcagtggtacaagaaatatacttgacacttgattaaacaag

SEQ ID NO: 127272 - DNA, 80 bp, synthetic construct
  misc_feature 1..80: note = Artificially Synthesized Probe
  source 1..80: mol_type = other DNA
tttttgaaggaaattaagaaatggaatttggtcattgtagaagtttccgctaatcagcaatgttgtcctgatcagttgac

SEQ ID NO: 127273 - DNA, 80 bp, synthetic construct
  misc_feature 1..80: note = Artificially Synthesized Probe
  source 1..80: mol_type = other DNA
cctctgctaagtcagccctgactcttcttagaccttgatgcatgtcattggcaagagtcacctttccagaaccttcagtg

SEQ ID NO: 127274 - DNA, 80 bp, synthetic construct; identical to SEQ ID NO: 40381
  misc_feature 1..80: note = Artificially Synthesized Probe
  source 1..80: mol_type = other DNA

SEQ ID NO: 127275 - DNA, 80 bp, synthetic construct
  misc_feature 1..80: note = Artificially Synthesized Probe
  source 1..80: mol_type = other DNA
taacttgtagctctcattgcatgcactggttgttgctttagctgtttgcattttcctgtgtcactggctgtatttgatgc

SEQ ID NO: 127276 - DNA, 80 bp, synthetic construct
  misc_feature 1..80: note = Artificially Synthesized Probe
  source 1..80: mol_type = other DNA
tcagacacaattcaattaaaaaaagggcaagggacacacagagacacttggcctgtgatgacacatggatggtacaaaca

SEQ ID NO: 127277 - DNA, 80 bp, synthetic construct; identical to SEQ ID NO: 40382
  misc_feature 1..80: note = Artificially Synthesized Probe
  source 1..80: mol_type = other DNA

SEQ ID NO: 127278 - DNA, 80 bp, synthetic construct
  misc_feature 1..80: note = Artificially Synthesized Probe
  source 1..80: mol_type = other DNA
cgtgcaccgatgactattcgtgtgaccccagattcactgatttccacttttatgaactcttttaagctgcagttgtgaaa

SEQ ID NO: 127279 - DNA, 80 bp, synthetic construct
  misc_feature 1..80: note = Artificially Synthesized Probe
  source 1..80: mol_type = other DNA
tgaatttgcaggctccaatattgcatgaaacagtgtgaaatttaacatattttgaaatgtttactttaggtagcaaatat

SEQ ID NO: 127280 - DNA, 80 bp, synthetic construct
  misc_feature 1..80: note = Artificially Synthesized Probe
  source 1..80: mol_type = other DNA
tcccctctcagggaacagtcctcagagtgtcagatgggcacactctaattgtagcttcctaagatgtgctttaattgaca

SEQ ID NO: 127281 - DNA, 80 bp, synthetic construct
  misc_feature 1..80: note = Artificially Synthesized Probe
  source 1..80: mol_type = other DNA
aggctggagtgcagtggtgcgatcttggctcactgcaacctccgcctccagggttcaagcaattctcctgcctcagcctc

SEQ ID NO: 127282 - DNA, 80 bp, synthetic construct
  misc_feature 1..80: note = Artificially Synthesized Probe
  source 1..80: mol_type = other DNA
aactctgaaactgctaataacaaaaggtaataaaggataaggactcacacacagataagaccactttttctctgtatata

SEQ ID NO: 127283 - DNA, 80 bp, synthetic construct; identical to SEQ ID NO: 40383
  misc_feature 1..80: note = Artificially Synthesized Probe
  source 1..80: mol_type = other DNA

SEQ ID NO: 127284 - DNA, 80 bp, synthetic construct
  misc_feature 1..80: note = Artificially Synthesized Probe
  source 1..80: mol_type = other DNA
ttattaaataaaagtagctactgacagcattgcttgtgacaggtggaagggggacctgaaatgaagcgtcatcaacacca

SEQ ID NO: 127285 - DNA, 80 bp, synthetic construct
  misc_feature 1..80: note = Artificially Synthesized Probe
  source 1..80: mol_type = other DNA
cgcaaaagccaaataagtaggccagattacactgtacagtgaaacacacagtgaataaatgtaaccgagaaatgacagat

SEQ ID NO: 127286 - DNA, 80 bp, synthetic construct
  misc_feature 1..80: note = Artificially Synthesized Probe
  source 1..80: mol_type = other DNA
aaatataaacaggtataggcaagggaactcaggtaatgggtaattgggacactttcaattgttccctaacttatttgata

SEQ ID NO: 127287 - DNA, 80 bp, synthetic construct; identical to SEQ ID NO: 40384
  misc_feature 1..80: note = Artificially Synthesized Probe
  source 1..80: mol_type = other DNA

SEQ ID NO: 127288 - DNA, 80 bp, synthetic construct
  misc_feature 1..80: note = Artificially Synthesized Probe
  source 1..80: mol_type = other DNA
gctcaggaatcttccaatcgcggcagaatgcaaagctggggcagtcatgtcacatggtgggaatggaagtgagagagggg

SEQ ID NO: 127289 - DNA, 80 bp, synthetic construct
  misc_feature 1..80: note = Artificially Synthesized Probe
  source 1..80: mol_type = other DNA
caacatgagatttggaggaaacagcatcccagttggtactgcagcctcaggcaattgtgatgctaaacagtggccactga

SEQ ID NO: 127290 - DNA, 80 bp, synthetic construct
  misc_feature 1..80: note = Artificially Synthesized Probe
  source 1..80: mol_type = other DNA
acagttttttggagatgggacttttggagaaactccacaaatgcctgtcccttcttcaagggctgctacgttgcctgtgg

SEQ ID NO: 127291 - DNA, 80 bp, synthetic construct; identical to SEQ ID NO: 40385
  misc_feature 1..80: note = Artificially Synthesized Probe
  source 1..80: mol_type = other DNA

SEQ ID NO: 127292 - DNA, 80 bp, synthetic construct
  misc_feature 1..80: note = Artificially Synthesized Probe
  source 1..80: mol_type = other DNA
actcacaggcattttcacaaagtaactcaagattgtttggcttagttactggtccagcctgtgctccctgcaataacaca

SEQ ID NO: 127293 - DNA, 80 bp, synthetic construct
  misc_feature 1..80: note = Artificially Synthesized Probe
  source 1..80: mol_type = other DNA
ggtacatgtgcaggtttgtatatgggtaaattcatgtcacgggtttgttgtacaggtttttgtcacccaggtattaaacc

SEQ ID NO: 127294 - DNA, 80 bp, synthetic construct
  misc_feature 1..80: note = Artificially Synthesized Probe
  source 1..80: mol_type = other DNA
agctgaaaaaaggaagtaaactgaaagctttcctatcagaacaagatacaaacccactaggaaacagctgcatatgtgaa

SEQ ID NO: 127295 - DNA, 80 bp, synthetic construct; identical to SEQ ID NO: 40386
  misc_feature 1..80: note = Artificially Synthesized Probe
  source 1..80: mol_type = other DNA

SEQ ID NO: 127296 - DNA, 80 bp, synthetic construct
  misc_feature 1..80: note = Artificially Synthesized Probe
  source 1..80: mol_type = other DNA
atttctttgggtatatacccagtaatgcaatggctgggtcaaatggtagttctgtttttcaatctttgaggaatcaccac

SEQ ID NO: 127297 - DNA, 80 bp, synthetic construct
  misc_feature 1..80: note = Artificially Synthesized Probe
  source 1..80: mol_type = other DNA
actggtgtgagatggtatctcattgtgattttgatttgcatttctctaatgatcagcaatcttgagcattttttcattag

SEQ ID NO: 127298 - DNA, 80 bp, synthetic construct
  misc_feature 1..80: note = Artificially Synthesized Probe
  source 1..80: mol_type = other DNA
ctggacaaaatggatctgatggacctctaaacaactttccacccaaccacaatagaatattcttctcatcaccacatggt

SEQ ID NO: 127299 - DNA, 80 bp, synthetic construct; identical to SEQ ID NO: 40297
  misc_feature 1..80: note = Artificially Synthesized Probe
  source 1..80: mol_type = other DNA

SEQ ID NO: 127300 - DNA, 80 bp, synthetic construct
  misc_feature 1..80: note = Artificially Synthesized Probe
  source 1..80: mol_type = other DNA
caaactactcctgaatgacttttgggtaaataatgaaattaaggcagaaaacaagaagttctttgaaattaatgagaaca

SEQ ID NO: 127301 - DNA, 80 bp, synthetic construct; identical to SEQ ID NO: 40387
  misc_feature 1..80: note = Artificially Synthesized Probe
  source 1..80: mol_type = other DNA

SEQ ID NO: 127302 - DNA, 80 bp, synthetic construct
  misc_feature 1..80: note = Artificially Synthesized Probe
  source 1..80: mol_type = other DNA
gaatgcttgctgggtttgcatatggtgttggttgctatatcttcttgatttattgttcatttcaccagtgtttagttgtt

SEQ ID NO: 127303 - DNA, 80 bp, synthetic construct
  misc_feature 1..80: note = Artificially Synthesized Probe
  source 1..80: mol_type = other DNA
ttttgtctgcacatcttatctgaaggggatggagatggaacatgagtatttgtctacatgggaaatctatttttttccaa

SEQ ID NO: 127304 - DNA, 80 bp, synthetic construct; identical to SEQ ID NO: 40388
  misc_feature 1..80: note = Artificially Synthesized Probe
  source 1..80: mol_type = other DNA

SEQ ID NO: 127305 - DNA, 80 bp, synthetic construct
  misc_feature 1..80: note = Artificially Synthesized Probe
  source 1..80: mol_type = other DNA
ttttcaaacatagcaggaatcacttcctcttatctatactctgatattctttacaaggcatagtatttttttctcaaacg

SEQ ID NO: 127306 - DNA, 80 bp, synthetic construct; identical to SEQ ID NO: 40305
  misc_feature 1..80: note = Artificially Synthesized Probe
  source 1..80: mol_type = other DNA

SEQ ID NO: 127307 - DNA, 80 bp, synthetic construct
  misc_feature 1..80: note = Artificially Synthesized Probe
  source 1..80: mol_type = other DNA
actccccactgtggtttttaatttgattctatgtttctatggcaggttattttacccatattcctttctgcctgggttta

SEQ ID NO: 127308 - DNA, 80 bp, synthetic construct
  misc_feature 1..80: note = Artificially Synthesized Probe
  source 1..80: mol_type = other DNA
tcactgtctgcaatattccccttatcaaaggtaaacaagaccttgcccagcgtttgtcttgagcttagttctttcagaat

SEQ ID NO: 127309 - DNA, 80 bp, synthetic construct; identical to SEQ ID NO: 40389
  misc_feature 1..80: note = Artificially Synthesized Probe
  source 1..80: mol_type = other DNA

SEQ ID NO: 127310 - DNA, 80 bp, synthetic construct
  misc_feature 1..80: note = Artificially Synthesized Probe
  source 1..80: mol_type = other DNA
tggctcgcagctgcacgctgccatttctgtggccaagtgggaacattctgtcagcactcagggctctccatctgccttct

SEQ ID NO: 127311 - DNA, 80 bp, synthetic construct
  misc_feature 1..80: note = Artificially Synthesized Probe
  source 1..80: mol_type = other DNA
atccccaggctatgctgccatagccctggcccacagatctgagccagacatggatttaaagggtgtgattcagtgttttt

SEQ ID NO: 127312 - DNA, 80 bp, synthetic construct
  misc_feature 1..80: note = Artificially Synthesized Probe
  source 1..80: mol_type = other DNA
ctttatatacacagaatcataggacgtctggtgctttatatacacagaatcataggacgtctggtgctttatatacacag

SEQ ID NO: 127313 - DNA, 80 bp, synthetic construct; identical to SEQ ID NO: 40390
  misc_feature 1..80: note = Artificially Synthesized Probe
  source 1..80: mol_type = other DNA

SEQ ID NO: 127314 - DNA, 80 bp, synthetic construct
  misc_feature 1..80: note = Artificially Synthesized Probe
  source 1..80: mol_type = other DNA
cccagtggtatatgaaagttccctcacgtctgagcaattatgtatccgttgtcaaaacctggccctacttttggtcagag

SEQ ID NO: 127315 - DNA, 80 bp, synthetic construct
  misc_feature 1..80: note = Artificially Synthesized Probe
  source 1..80: mol_type = other DNA
tcattttctgtaaccacgttctcatagaatgaacctaggagtttctactttcagactggcaaaaataaagcccacagcta

SEQ ID NO: 127316 - DNA, 80 bp, synthetic construct
  misc_feature 1..80: note = Artificially Synthesized Probe
  source 1..80: mol_type = other DNA
gctttactggccttgggctgaatggagaaggtgaacggagcagaccagtgtcacagaattgcatcgtgcaggccttgcct

SEQ ID NO: 127317 - DNA, 80 bp, synthetic construct
  misc_feature 1..80: note = Artificially Synthesized Probe
  source 1..80: mol_type = other DNA
cctacagttctgtcttccttttgttcatgtttggcagcatccaaattaaccttttctgccattttccttttaaataagtt

SEQ ID NO: 127318 - DNA, 80 bp, synthetic construct
  misc_feature 1..80: note = Artificially Synthesized Probe
  source 1..80: mol_type = other DNA
gtgagcatgaaaagcctggtaaatcaagtaactaaagtttttattatttaaaggaaagctagaagcctagtcttaattta

SEQ ID NO: 127319 - DNA, 80 bp, synthetic construct; identical to SEQ ID NO: 40391
  misc_feature 1..80: note = Artificially Synthesized Probe
  source 1..80: mol_type = other DNA

SEQ ID NO: 127320 - DNA, 80 bp, synthetic construct
  misc_feature 1..80: note = Artificially Synthesized Probe
  source 1..80: mol_type = other DNA
atgataaataacaattcctttattttcttgtgatagttttaatgcattctctgactctgaaatatgtgtacaagcctttc

SEQ ID NO: 127321 - DNA, 80 bp, synthetic construct
  misc_feature 1..80: note = Artificially Synthesized Probe
  source 1..80: mol_type = other DNA
agcattccatttttacaaaaataggagtcattcaacagcatgaagttctaccattatttttctttgaaaatgccccctaa

SEQ ID NO: 127322 - DNA, 80 bp, synthetic construct; identical to SEQ ID NO: 40392
  misc_feature 1..80: note = Artificially Synthesized Probe
  source 1..80: mol_type = other DNA

SEQ ID NO: 127323 - DNA, 80 bp, synthetic construct
  misc_feature 1..80: note = Artificially Synthesized Probe
  source 1..80: mol_type = other DNA
ttttggctctgagcagatgggacactctgggattgagctggctgtcagagggcttcagttgaaagagaaggtctctgggg

SEQ ID NO: 127324 - DNA, 80 bp, synthetic construct
  misc_feature 1..80: note = Artificially Synthesized Probe
  source 1..80: mol_type = other DNA
ccacttacgcctgcatcattctcttacagtcaattgttgttaacttgcctgtcccatagaatcacctgcaggcaggataa

SEQ ID NO: 127325 - DNA, 80 bp, synthetic construct
  misc_feature 1..80: note = Artificially Synthesized Probe
  source 1..80: mol_type = other DNA
cctcacctgctcgcctccctatagcctaaacctctcctcggattccggctcccatggccctctttcctcctgtctttctc

SEQ ID NO: 127326 - DNA, 80 bp, synthetic construct
  misc_feature 1..80: note = Artificially Synthesized Probe
  source 1..80: mol_type = other DNA
aggggtctttctggttggagtttctgccggccattgccgaaatccacattgatctaccaaacacattaacctgttgataa

SEQ ID NO: 127327 - DNA, 80 bp, synthetic construct; identical to SEQ ID NO: 40393
  misc_feature 1..80: note = Artificially Synthesized Probe
  source 1..80: mol_type = other DNA

SEQ ID NO: 127328 - DNA, 80 bp, synthetic construct
  misc_feature 1..80: note = Artificially Synthesized Probe
  source 1..80: mol_type = other DNA
agtactgaaagtgaatatgagatggaaaaatacaaggaaggaaagttcctgtgacctggtctatacctatctagcagctc

SEQ ID NO: 127329 - DNA, 80 bp, synthetic construct
  misc_feature 1..80: note = Artificially Synthesized Probe
  source 1..80: mol_type = other DNA
acggctttttggtggaggctaatgttaaattccgggactggcagagaaaagggaataccttttgtcaggcacatgctaag

SEQ ID NO: 127330 - DNA, 80 bp, synthetic construct
  misc_feature 1..80: note = Artificially Synthesized Probe
  source 1..80: mol_type = other DNA
gaacagttaaccatagttggatttgtcagcctttaccacgtggtgtttgctttttctgcctgcaaggaaactttgctaag

SEQ ID NO: 127331 - DNA, 80 bp, synthetic construct; identical to SEQ ID NO: 40394
  misc_feature 1..80: note = Artificially Synthesized Probe
  source 1..80: mol_type = other DNA

SEQ ID NO: 127332 - DNA, 80 bp, synthetic construct
  misc_feature 1..80: note = Artificially Synthesized Probe
  source 1..80: mol_type = other DNA
ccttgaggcctccccagaagccaagcaatgctggtgccatgcgtcctacacagcctgcagatctgtgggctggttaactt

SEQ ID NO: 127333 - DNA, 80 bp, synthetic construct
  misc_feature 1..80: note = Artificially Synthesized Probe
  source 1..80: mol_type = other DNA
cctgcaccatctttttcccagagttccaattattatgacttaataataccatatttcttcagttctaagatgccattaac

SEQ ID NO: 127334 - DNA, 80 bp, synthetic construct
  misc_feature 1..80: note = Artificially Synthesized Probe
  source 1..80: mol_type = other DNA
ggattagctcctcttgggactttacatttccttaaattttagggccttttttgtcaagtttcaaactaattcatgctttg

SEQ ID NO: 127335 - DNA, 80 bp, synthetic construct
  misc_feature 1..80: note = Artificially Synthesized Probe
  source 1..80: mol_type = other DNA
tatgttagaggggtaagttttgtgtcatgggggtttggtgtacagcttattttgtcactcaggtaataatagtactcaat

SEQ ID NO: 127336 - DNA, 80 bp, synthetic construct; identical to SEQ ID NO: 40395
  misc_feature 1..80: note = Artificially Synthesized Probe
  source 1..80: mol_type = other DNA

SEQ ID NO: 127337 - DNA, 80 bp, synthetic construct; identical to SEQ ID NO: 40306
  misc_feature 1..80: note = Artificially Synthesized Probe
  source 1..80: mol_type = other DNA

SEQ ID NO: 127338 - DNA, 80 bp, synthetic construct
  misc_feature 1..80: note = Artificially Synthesized Probe
  source 1..80: mol_type = other DNA
gattgctgggttgaatggtaatgtgattttaagtaacttaagaaatctacagactactttccacagttattgaactaatt

SEQ ID NO: 127339 - DNA, 80 bp, synthetic construct
  misc_feature 1..80: note = Artificially Synthesized Probe
  source 1..80: mol_type = other DNA
ttgtttcatatgcttgttggccacatatacgtctttttttgagaagtgcctgttcatgtcctttgcccatttttaaaatg

SEQ ID NO: 127340 - DNA, 80 bp, synthetic construct; identical to SEQ ID NO: 40396
  misc_feature 1..80: note = Artificially Synthesized Probe
  source 1..80: mol_type = other DNA

SEQ ID NO: 127341 - DNA, 80 bp, synthetic construct
  misc_feature 1..80: note = Artificially Synthesized Probe
  source 1..80: mol_type = other DNA
ttcaatcttctgcatatggctagccagttatcccagcacgatttactgaataggaagttctttacccattgcttgttact

SEQ ID NO: 127342 - DNA, 80 bp, synthetic construct
  misc_feature 1..80: note = Artificially Synthesized Probe
  source 1..80: mol_type = other DNA
ccaggtttgttctttttgcttacaattgatttggctatttaggctatatttggtttcctatgaattttataattggtttt

SEQ ID NO: 127343 - DNA, 80 bp, synthetic construct
  misc_feature 1..80: note = Artificially Synthesized Probe
  source 1..80: mol_type = other DNA
tttgtaattcttattgtagggagctttcaccaccgctgcccccccaccccggttagctgtattcctaggtattttattgt

SEQ ID NO: 127344 - DNA, 80 bp, synthetic construct; identical to SEQ ID NO: 40397
  misc_feature 1..80: note = Artificially Synthesized Probe
  source 1..80: mol_type = other DNA

SEQ ID NO: 127345 - DNA, 80 bp, synthetic construct
  misc_feature 1..80: note = Artificially Synthesized Probe
  source 1..80: mol_type = other DNA
gtttgttgagggtttttaaaatgcaaagatgttgaattttattgaaagctttttatgtgtttattgagatgataatatgt

SEQ ID NO: 127346 - DNA, 80 bp, synthetic construct
  misc_feature 1..80: note = Artificially Synthesized Probe
  source 1..80: mol_type = other DNA
tcatctgtgtttatcagggatattggactgacgttttcttttttttgatgtgtcgctgagaggttttggtatgatgctgg

SEQ ID NO: 127347 - DNA, 80 bp, synthetic construct
  misc_feature 1..80: note = Artificially Synthesized Probe
  source 1..80: mol_type = other DNA
agaattcaattttggaaactaacattggtatattcagggtttcagtttcttcctggttcaatcttgatagattgcaagtt

SEQ ID NO: 127348 - DNA, 80 bp, synthetic construct
  misc_feature 1..80: note = Artificially Synthesized Probe
  source 1..80: mol_type = other DNA
tggggaatgctgggcttctgggccccacagttctcccgagagctcgggctgcctgttctcctttgttctctcctttgttg

SEQ ID NO: 127349 - DNA, 80 bp, synthetic construct
  misc_feature 1..80: note = Artificially Synthesized Probe
  source 1..80: mol_type = other DNA
ttgtctatctagtggtctaacaattttattcactaaaaaaaaacttttggtttcgttcatctcctatggtttttcacatc

SEQ ID NO: 127350 - DNA, 80 bp, synthetic construct; identical to SEQ ID NO: 40398
  misc_feature 1..80: note = Artificially Synthesized Probe
  source 1..80: mol_type = other DNA

SEQ ID NO: 127351 - DNA, 80 bp, synthetic construct
  misc_feature 1..80: note = Artificially Synthesized Probe
  source 1..80: mol_type = other DNA
gttgagaattgccttaaggctgagcatgtggttaattttagagtgtcatgtccatataaggagaatgtatttttcttgtt

SEQ ID NO: 127352 - DNA, 80 bp, synthetic construct
  misc_feature 1..80: note = Artificially Synthesized Probe
  source 1..80: mol_type = other DNA
gtctctaagaacttgttttatgaatctgggtccttgagtactggttgcatatatacatatttaggtggttaagtcatctt

SEQ ID NO: 127353 - DNA, 80 bp, synthetic construct; identical to SEQ ID NO: 40399
  misc_feature 1..80: note = Artificially Synthesized Probe
  source 1..80: mol_type = other DNA

SEQ ID NO: 127354 - DNA, 80 bp, synthetic construct
  misc_feature 1..80: note = Artificially Synthesized Probe
  source 1..80: mol_type = other DNA
caaccttttgtttccacgttttgcacttttttaaggacctcttgtaaagtaggtctggtggtaacaaattcccttggcat

SEQ ID NO: 127355 - DNA, 80 bp, synthetic construct
  misc_feature 1..80: note = Artificially Synthesized Probe
  source 1..80: mol_type = other DNA
ctgatgagattctctttgtaggggatcttcctcttctctctctctgtctttaacattttttcttttgtattgaccttgga

SEQ ID NO: 127356 - DNA, 80 bp, synthetic construct
  misc_feature 1..80: note = Artificially Synthesized Probe
  source 1..80: mol_type = other DNA
ttcttctctttcaggaatgtcagtcagtcataggttttgtctctttatgtagtctcatattccttggagatgttcttcag

SEQ ID NO: 127357 - DNA, 80 bp, synthetic construct
  misc_feature 1..80: note = Artificially Synthesized Probe
  source 1..80: mol_type = other DNA
tttaaaatgggtatttcatctttaatctcttggatagttttactggattccataaattctttggcttgggtttcaacttt

SEQ ID NO: 127358 - DNA, 80 bp, synthetic construct
  misc_feature 1..80: note = Artificially Synthesized Probe
  source 1..80: mol_type = other DNA
gcagacagaggactctgccctcgtggaggagctgggagcacggtgagctctgagggttccggggcacggctataggttct

SEQ ID NO: 127359 - DNA, 80 bp, synthetic construct; identical to SEQ ID NO: 40400
  misc_feature 1..80: note = Artificially Synthesized Probe
  source 1..80: mol_type = other DNA

SEQ ID NO: 127360 - DNA, 80 bp, synthetic construct
  misc_feature 1..80: note = Artificially Synthesized Probe
  source 1..80: mol_type = other DNA
acatgggagtaaattctcaaagtattttggtgttgcagtttgggctgcaatctagtaggtggtgattaagtgtcattgct

SEQ ID NO: 127361 - DNA, 80 bp, synthetic construct
  misc_feature 1..80: note = Artificially Synthesized Probe
  source 1..80: mol_type = other DNA
tacacacacagaaaatgctgaatgccagcataaaagcagagattttaaagtgtcaccgcttagaataatgtttattgcag

SEQ ID NO: 127362 - DNA, 80 bp, synthetic construct
  misc_feature 1..80: note = Artificially Synthesized Probe
  source 1..80: mol_type = other DNA
agtcttcatccctatttcaattctttccttcacctcatcatagtcattcgcattgtctctttctattgataagtttctac

SEQ ID NO: 127363 - DNA, 80 bp, synthetic construct; identical to SEQ ID NO: 40401
  misc_feature 1..80: note = Artificially Synthesized Probe
  source 1..80: mol_type = other DNA

SEQ ID NO: 127364 - DNA, 80 bp, synthetic construct
  misc_feature 1..80: note = Artificially Synthesized Probe
  source 1..80: mol_type = other DNA
cttgttgctggacactggtgctgttatgtggtctcggttgtagtagatgacactttaaacatcctttcatatgtctttag

SEQ ID NO: 127365 - DNA, 80 bp, synthetic construct
  misc_feature 1..80: note = Artificially Synthesized Probe
  source 1..80: mol_type = other DNA
ataaacccagcaactgtaaatgagaattgtgattgtaccacaccttttgtaaaccttgatattcattcaccctctttgat

SEQ ID NO: 127366 - DNA, 80 bp, synthetic construct
  misc_feature 1..80: note = Artificially Synthesized Probe
  source 1..80: mol_type = other DNA
agttttaggtttacagcaaaatgggacataaaatatacagatttcctatgtactcctagtcccccttccccaaacagcct

SEQ ID NO: 127367 - DNA, 80 bp, synthetic construct; identical to SEQ ID NO: 40402
  misc_feature 1..80: note = Artificially Synthesized Probe
  source 1..80: mol_type = other DNA

SEQ ID NO: 127368 - DNA, 80 bp, synthetic construct
  misc_feature 1..80: note = Artificially Synthesized Probe
  source 1..80: mol_type = other DNA
gtgtgccttttccaggtcagatagttggactcgcacaatatggagcctttacagactggctctttcccttactaacatga

SEQ ID NO: 127369 - DNA, 80 bp, synthetic construct
  misc_feature 1..80: note = Artificially Synthesized Probe
  source 1..80: mol_type = other DNA
aggcttttgtgtggacatgttttcagctcctttgggtaaatagcaaaaagcatgcctgctggatgatatggtgaaactat

SEQ ID NO: 127370 - DNA, 80 bp, synthetic construct
  misc_feature 1..80: note = Artificially Synthesized Probe
  source 1..80: mol_type = other DNA
gctcatgggagcacggtgagctctgagggttcccacgcacggctgtaggttctgaagggggtgctcctaatgcctgttca

SEQ ID NO: 127371 - DNA, 80 bp, synthetic construct; identical to SEQ ID NO: 40403
  misc_feature 1..80: note = Artificially Synthesized Probe
  source 1..80: mol_type = other DNA

SEQ ID NO: 127372 - DNA, 80 bp, synthetic construct
  misc_feature 1..80: note = Artificially Synthesized Probe
  source 1..80: mol_type = other DNA
atgtatgagtctttatcaaacatatgagacacaaagatctgtcactctatgggttcccttttactctcttggtaatattc

SEQ ID NO: 127373 - DNA, 80 bp, synthetic construct
  misc_feature 1..80: note = Artificially Synthesized Probe
  source 1..80: mol_type = other DNA
ttagatcaaaattccagctagagttttttcttctgtatgctctgaattagggttcaaagtttgtttccttcctatttatt

SEQ ID NO: 127374 - DNA, 80 bp, synthetic construct
  misc_feature 1..80: note = Artificially Synthesized Probe
  source 1..80: mol_type = other DNA
agttcctgatatctggcaatatgaatcttaaactttgttttcttccaggatttccttgactatagttggccctttgcatt

SEQ ID NO: 127375 - DNA, 80 bp, synthetic construct
  misc_feature 1..80: note = Artificially Synthesized Probe
  source 1..80: mol_type = other DNA
ctgtaattcatttaggtcttcttaaattcctcccaataatgttttgtaatttttatcacagaaattttgcacatctttca

SEQ ID NO: 127376 - DNA, 80 bp, synthetic construct; identical to SEQ ID NO: 40743
  misc_feature 1..80: note = Artificially Synthesized Probe
  source 1..80: mol_type = other DNA

SEQ ID NO: 127377 - DNA, 80 bp, synthetic construct
  misc_feature 1..80: note = Artificially Synthesized Probe
  source 1..80: mol_type = other DNA
ggagtccggggtacagcgtgtgtgaggagcaggtgctctgagggtggacagtgacttggtgatgtccttgggaagtgggc

SEQ ID NO: 127378 - DNA, 80 bp, synthetic construct
  misc_feature 1..80: note = Artificially Synthesized Probe
  source 1..80: mol_type = other DNA
attctgctggagtttatcacctaccctgctgggcctgacctgctccagacgagccggcaggacagtgtcctcagggtcca

SEQ ID NO: 127379 - DNA, 80 bp, synthetic construct
  misc_feature 1..80: note = Artificially Synthesized Probe
  source 1..80: mol_type = other DNA
gcagccgccggcagtggagggatgtcaggcgtcaggcttggggagggagcaggacctgggcttggctgggctcgggagcg

SEQ ID NO: 127380 - DNA, 80 bp, synthetic construct; identical to SEQ ID NO: 40754
  misc_feature 1..80: note = Artificially Synthesized Probe
  source 1..80: mol_type = other DNA

SEQ ID NO: 127381 - DNA, 80 bp, synthetic construct
  misc_feature 1..80: note = Artificially Synthesized Probe
  source 1..80: mol_type = other DNA
ggctccagagaggagctcctggccttccagtttgcaggggtcttcacgggcctctggcctccaggctccctgctcccacc

SEQ ID NO: 127382 - DNA, 80 bp, synthetic construct; identical to SEQ ID NO: 40744
  misc_feature 1..80: note = Artificially Synthesized Probe
  source 1..80: mol_type = other DNA

SEQ ID NO: 127383 - DNA, 80 bp, synthetic construct
  misc_feature 1..80: note = Artificially Synthesized Probe
  source 1..80: mol_type = other DNA
tactatcagccaaaacaaatgacaattaggaagacaaaagtgtttccagaaacacacattagaaagccacacggcaaggc

SEQ ID NO: 127384 - DNA, 80 bp, synthetic construct
  misc_feature 1..80: note = Artificially Synthesized Probe
  source 1..80: mol_type = other DNA
caggcgtgcacaccacctgggcactcacccggcctcctgcgccagcatggggtcctccttggctggctcccccagaggtg

SEQ ID NO: 127385 - DNA, 80 bp, synthetic construct
  misc_feature 1..80: note = Artificially Synthesized Probe
  source 1..80: mol_type = other DNA
ttctgggagagaagtcagatgcgggtcagccttccctgcccagccccacaggctgcccccgaggacctcgtgactcacgg

SEQ ID NO: 127386 - DNA, 80 bp, synthetic construct
  misc_feature 1..80: note = Artificially Synthesized Probe
  source 1..80: mol_type = other DNA
agagggggtgctggcttggccagccgcaaggggcttggatctggggaccctctcagcaccgcctcccggacctcgagctc

SEQ ID NO: 127387 - DNA, 80 bp, synthetic construct
  misc_feature 1..80: note = Artificially Synthesized Probe
  source 1..80: mol_type = other DNA
cagggccaggcctgcacagtccacatccaggccccacggctccagagggctgtcctggagctcctgggagccaagctcag

SEQ ID NO: 127388 - DNA, 80 bp, synthetic construct; identical to SEQ ID NO: 40745
  misc_feature 1..80: note = Artificially Synthesized Probe
  source 1..80: mol_type = other DNA

SEQ ID NO: 127389 - DNA, 80 bp, synthetic construct
  misc_feature 1..80: note = Artificially Synthesized Probe
  source 1..80: mol_type = other DNA
aacagatctccggccacatccaaaacacaccagccacaggcgggtgagagaagcagggccacaaagctggacggagcaac

SEQ ID NO: 127390 - DNA, 80 bp, synthetic construct
  misc_feature 1..80: note = Artificially Synthesized Probe
  source 1..80: mol_type = other DNA
ggatggggccaagtccctctacgtccccatgcttcccagcagacccagggacccagggaggagaagatcaggccctccct

SEQ ID NO: 127391 - DNA, 80 bp, synthetic construct; identical to SEQ ID NO: 40746
  misc_feature 1..80: note = Artificially Synthesized Probe
  source 1..80: mol_type = other DNA

SEQ ID NO: 127392 - DNA, 80 bp, synthetic construct
  misc_feature 1..80: note = Artificially Synthesized Probe
  source 1..80: mol_type = other DNA
ggacgtgcagctcgcggggtcccactgcctggaggacgcaaggatgtgcggcacgggctctgggctggccgacgctggat

SEQ ID NO: 127393 - DNA, 80 bp, synthetic construct
  misc_feature 1..80: note = Artificially Synthesized Probe
  source 1..80: mol_type = other DNA
ccaggcaccacccagcatcaagccagcctctgcccaggggccctgggccagccaagctccacagctgtctacccagtttc

SEQ ID NO: 127394 - DNA, 80 bp, synthetic construct
  misc_feature 1..80: note = Artificially Synthesized Probe
  source 1..80: mol_type = other DNA
aaattatcttgacttcagaaaactgcattcctgaagctgcccatggggaggagtatgacacctcactgaccacctgtaaa

SEQ ID NO: 127395 - DNA, 80 bp, synthetic construct
  misc_feature 1..80: note = Artificially Synthesized Probe
  source 1..80: mol_type = other DNA
caccacctgcggaggccaagccgggcctccaggccacaccctcccgaggacatgccagggggctttgggtctgctgctcc

SEQ ID NO: 127396 - DNA, 80 bp, synthetic construct; identical to SEQ ID NO: 40747
  misc_feature 1..80: note = Artificially Synthesized Probe
  source 1..80: mol_type = other DNA

SEQ ID NO: 127397 - DNA, 80 bp, synthetic construct
  misc_feature 1..80: note = Artificially Synthesized Probe
  source 1..80: mol_type = other DNA
acccctgacctcacagatgacaacacagtttcattccccacacaggtcctcagccccagcactcacggggtcagccagag

SEQ ID NO: 127398 - DNA, 80 bp, synthetic construct
  misc_feature 1..80: note = Artificially Synthesized Probe
  source 1..80: mol_type = other DNA
gacaggtggggtcggaggaacagagctcccacctcagtccgtctgccctgccctgtccccgctgcacagaggctgtgatg

SEQ ID NO: 127399 - DNA, 80 bp, synthetic construct
  misc_feature 1..80: note = Artificially Synthesized Probe
  source 1..80: mol_type = other DNA
caggagggctggaaaggaaggcttgctcctttccaggaacagaataacaacaggtaaggcttgaacaaatcaggaagtgc

SEQ ID NO: 127400 - DNA, 80 bp, synthetic construct
  misc_feature 1..80: note = Artificially Synthesized Probe
  source 1..80: mol_type = other DNA
gtgctgctcctgactgggccccagggcgctggcaagccgcaggaactgcacagacatctccaggaccgaggccatgtcct

SEQ ID NO: 127401 - DNA, 80 bp, synthetic construct; identical to SEQ ID NO: 40748
  misc_feature 1..80: note = Artificially Synthesized Probe
  source 1..80: mol_type = other DNA

SEQ ID NO: 127402 - DNA, 80 bp, synthetic construct
  misc_feature 1..80: note = Artificially Synthesized Probe
  source 1..80: mol_type = other DNA
aaggcttcaggataaagaggggctgcaggatgttccccaacagggcttttctggtttacttggagatgtgcagtctgtcc

SEQ ID NO: 127403 - DNA, 80 bp, synthetic construct
  misc_feature 1..80: note = Artificially Synthesized Probe
  source 1..80: mol_type = other DNA
aggagctgggaccctcggccaccgtaggggccttgggcgggcccgagccccgggccgagtcctcgcagcaggagagggca

SEQ ID NO: 127404 - DNA, 80 bp, synthetic construct; identical to SEQ ID NO: 40749
  misc_feature 1..80: note = Artificially Synthesized Probe
  source 1..80: mol_type = other DNA

SEQ ID NO: 127405 - DNA, 80 bp, synthetic construct
  misc_feature 1..80: note = Artificially Synthesized Probe
  source 1..80: mol_type = other DNA
caggcagccccgccccctcacgtgtgctctgcccacctgccacgtgctttccacctagcccaccccacccccacttgcaa

SEQ ID NO: 127406 - DNA, 80 bp, synthetic construct
  misc_feature 1..80: note = Artificially Synthesized Probe
  source 1..80: mol_type = other DNA
gcccaggtggccctgcctctacccttaccttcccgggggtcgcctcggttcccacttatgcggtggtctcggtgcccttg

SEQ ID NO: 127407 - DNA, 80 bp, synthetic construct
  misc_feature 1..80: note = Artificially Synthesized Probe
  source 1..80: mol_type = other DNA
cattttcccccaaatctagtacgcttgcagacgctgcgcctcagggtagggtcaccatccacacttctgggtcgcccaga

SEQ ID NO: 127408 - DNA, 80 bp, synthetic construct; identical to SEQ ID NO: 40750
  misc_feature 1..80: note = Artificially Synthesized Probe
  source 1..80: mol_type = other DNA

SEQ ID NO: 127409 - DNA, 80 bp, synthetic construct
  misc_feature 1..80: note = Artificially Synthesized Probe
  source 1..80: mol_type = other DNA
caggggcctcgctgacacagggtcaaggggaagaatacagggctccaagcaccgccagctctcatgcaggctcgtccaca

SEQ ID NO: 127410 - DNA, 80 bp, synthetic construct
  misc_feature 1..80: note = Artificially Synthesized Probe
  source 1..80: mol_type = other DNA
gggtggggggtgaggctggactgttgggaggacatccctggcctggctcgtgctgaggtcgtagcgggaggaggtggggt

SEQ ID NO: 127411 - DNA, 80 bp, synthetic construct
  misc_feature 1..80: note = Artificially Synthesized Probe
  source 1..80: mol_type = other DNA
gatgggtgaagggtgtttggagcagagggaggttatgtaatataaggtggtgtctccatccctgctccgcccagccttgg

SEQ ID NO: 127412 - DNA, 80 bp, synthetic construct
  misc_feature 1..80: note = Artificially Synthesized Probe
  source 1..80: mol_type = other DNA
aaagccctcggaatgtcatcaaacctgtgactctcctgccgttgacaacacgtgtaattactgctaattaatcacagatg

SEQ ID NO: 127413 - DNA, 80 bp, synthetic construct
  misc_feature 1..80: note = Artificially Synthesized Probe
  source 1..80: mol_type = other DNA
acgagctgtgtggcgggggcacaggctgaacctctgctggggacttagcatcctagacttccccgagtgttccccaccca

SEQ ID NO: 127414 - DNA, 80 bp, synthetic construct; identical to SEQ ID NO: 40751
  misc_feature 1..80: note = Artificially Synthesized Probe
  source 1..80: mol_type = other DNA

SEQ ID NO: 127415 - DNA, 80 bp, synthetic construct
  misc_feature 1..80: note = Artificially Synthesized Probe
  source 1..80: mol_type = other DNA
cagggcggggtgcagtcatccccctcccccaggccaagcccaggatgtggcgcccacccacagatgccgcagcctgcggg

SEQ ID NO: 127416 - DNA, 80 bp, synthetic construct
  misc_feature 1..80: note = Artificially Synthesized Probe
  source 1..80: mol_type = other DNA
ccaaggacccagagccccctgagcccccgcccaccacggagccctcccaggggtgtagggcccggtggcggcgcgcttgg

SEQ ID NO: 127417 - DNA, 80 bp, synthetic construct; identical to SEQ ID NO: 40752
  misc_feature 1..80: note = Artificially Synthesized Probe
  source 1..80: mol_type = other DNA

SEQ ID NO: 127418 - DNA, 80 bp, synthetic construct
  misc_feature 1..80: note = Artificially Synthesized Probe
  source 1..80: mol_type = other DNA
gtttgacgacggccaatgcgcccccaggtacagtctgctgcgccctccccacgcggggaggccccggtctaacctaagac

SEQ ID NO: 127419 - DNA, 80 bp, synthetic construct
  misc_feature 1..80: note = Artificially Synthesized Probe
  source 1..80: mol_type = other DNA
gcagcagcgtccgtccccatctgtcctcgacctggtaagaagctggggggagcggccgtggctacatgggggtcctgagc

SEQ ID NO: 127420 - DNA, 80 bp, synthetic construct
  misc_feature 1..80: note = Artificially Synthesized Probe
  source 1..80: mol_type = other DNA
ctcatatcaggtgcttacgcggggggaccagccctgaacccagggccccactcacccggccacgagctgggaccagcagt

SEQ ID NO: 127421 - DNA, 80 bp, synthetic construct
  misc_feature 1..80: note = Artificially Synthesized Probe
  source 1..80: mol_type = other DNA
ggttaccccacacagtagggggtttccagagcaaccttccaaggaagagtccccagtgggaagtgggctaagtggctgtc

SEQ ID NO: 127422 - DNA, 80 bp, synthetic construct
  misc_feature 1..80: note = Artificially Synthesized Probe
  source 1..80: mol_type = other DNA
acccagtgaccagtgcagaggcacggaccggcagctgagtgggacagtcctgagcggaggttgccccagggtccaggttc

SEQ ID NO: 127423 - DNA, 80 bp, synthetic construct; identical to SEQ ID NO: 40753
  misc_feature 1..80: note = Artificially Synthesized Probe
  source 1..80: mol_type = other DNA

SEQ ID NO: 127424 - DNA, 80 bp, synthetic construct
  misc_feature 1..80: note = Artificially Synthesized Probe
  source 1..80: mol_type = other DNA
ctagaaagcaatgcgcctattcacatggagaatcttccctttcctctaaaattacttagtgcctcatcactaaacacccc

SEQ ID NO: 127425 - DNA, 80 bp, synthetic construct; identical to SEQ ID NO: 40756
  misc_feature 1..80: note = Artificially Synthesized Probe
  source 1..80: mol_type = other DNA

SEQ ID NO: 127426 - DNA, 80 bp, synthetic construct
  misc_feature 1..80: note = Artificially Synthesized Probe
  source 1..80: mol_type = other DNA
ttaaaaaatagtaagacaaacgttattcagagggattattgcaatagatatagagattactgcaatagggtcttgcagta

SEQ ID NO: 127427 - DNA, 80 bp, synthetic construct
  misc_feature 1..80: note = Artificially Synthesized Probe
  source 1..80: mol_type = other DNA
tatcacctggggatggtagacaataagaaaaccaattagataccaatggtggtcagatatgaagatggaggaagactcca

SEQ ID NO: 127428 - DNA, 80 bp, synthetic construct
  misc_feature 1..80: note = Artificially Synthesized Probe
  source 1..80: mol_type = other DNA
aaacttttgccctgcataagagcctgttaataaaaagacagggtaaaaactggaagaaaagtgcaaaccacacctgataa

SEQ ID NO: 127429 - DNA, 80 bp, synthetic construct; identical to SEQ ID NO: 40757
  misc_feature 1..80: note = Artificially Synthesized Probe
  source 1..80: mol_type = other DNA

SEQ ID NO: 127430 - DNA, 80 bp, synthetic construct
  misc_feature 1..80: note = Artificially Synthesized Probe
  source 1..80: mol_type = other DNA
tcccagctactcgggaggctgaggcaggagaatggcatgaacccaggacgcacaggttgcagtgagccaagagcgtgcca

SEQ ID NO: 127431 - DNA, 80 bp, synthetic construct
  misc_feature 1..80: note = Artificially Synthesized Probe
  source 1..80: mol_type = other DNA
gagcttgattctcttctttctttttattattagttccacctttccaaatccagtggagacttctgcgatgggaagtctca

SEQ ID NO: 127432 - DNA, 80 bp, synthetic construct
  misc_feature 1..80: note = Artificially Synthesized Probe
  source 1..80: mol_type = other DNA
tttgattcaaagtgagatagaaggatgggcgcagtggctcatgcctgtaatcccagcactttgggaggcagaggcgggca

SEQ ID NO: 127433 - DNA, 80 bp, synthetic construct
  misc_feature 1..80: note = Artificially Synthesized Probe
  source 1..80: mol_type = other DNA
cggagcttgcagtgagccaagatcacgccactgcactccagcctgggcgacagagagggactccgtctcaaaaaaataaa

SEQ ID NO: 127434 - DNA, 80 bp, synthetic construct; identical to SEQ ID NO: 40758
  misc_feature 1..80: note = Artificially Synthesized Probe
  source 1..80: mol_type = other DNA

SEQ ID NO: 127435 - DNA, 80 bp, synthetic construct
  misc_feature 1..80: note = Artificially Synthesized Probe
  source 1..80: mol_type = other DNA
ttggagggtggggaggggctgtgcttcggcctccccctcctactgcccctccccaacaaaggagccctttgtgatgtgaa

SEQ ID NO: 127436 - DNA, 80 bp, synthetic construct
  misc_feature 1..80: note = Artificially Synthesized Probe
  source 1..80: mol_type = other DNA
catgggtgttggatatcttcctcaccttggtgtttgccctggggctcttcttcctattactcccctacttctcttacctc

SEQ ID NO: 127437 - DNA, 80 bp, synthetic construct
  misc_feature 1..80: note = Artificially Synthesized Probe
  source 1..80: mol_type = other DNA
aacagcatgcttccagggagaggcagggcagccaggggttggtaggggtagatcgtgtactgggatttccatcccaagct

SEQ ID NO: 127438 - DNA, 80 bp, synthetic construct; identical to SEQ ID NO: 40759
  misc_feature 1..80: note = Artificially Synthesized Probe
  source 1..80: mol_type = other DNA

SEQ ID NO: 127439 - DNA, 80 bp, synthetic construct
  misc_feature 1..80: note = Artificially Synthesized Probe
  source 1..80: mol_type = other DNA
ccctgtgtgtgtgcgtgtgtgtttgtgtgttatttttatttattttgttttttgtgcaggctgcagtgaaatgaagcgat

SEQ ID NO: 127440 - DNA, 80 bp, synthetic construct
  misc_feature 1..80: note = Artificially Synthesized Probe
  source 1..80: mol_type = other DNA
tcaaactcttgacctcaggtgatccacctgcctcggcctcccaaagtgcttggattataggcgtgagccaccgcacccga

SEQ ID NO: 127441 - DNA, 80 bp, synthetic construct
  misc_feature 1..80: note = Artificially Synthesized Probe
  source 1..80: mol_type = other DNA
agccggtcctagctcctcgccatttcttgtctcccagcgtcatcttgtctcccagcgtcatcttgtctcccagtgtccaa

SEQ ID NO: 127442 - DNA, 80 bp, synthetic construct
  misc_feature 1..80: note = Artificially Synthesized Probe
  source 1..80: mol_type = other DNA
ccggtcatgagacgggggaggtctctggtcatgagacgggaggtctctgtccgaggccaggccctgagccctggctcatc

SEQ ID NO: 127443 - DNA, 80 bp, synthetic construct
  misc_feature 1..80: note = Artificially Synthesized Probe
  source 1..80: mol_type = other DNA
tcctaggaaggaaatcagaaccctgggtccttctcagattctgtgccgccggaatgaagccatggtgggccagggactga

SEQ ID NO: 127444 - DNA, 80 bp, synthetic construct; identical to SEQ ID NO: 40760
  misc_feature 1..80: note = Artificially Synthesized Probe
  source 1..80: mol_type = other DNA

SEQ ID NO: 127445 - DNA, 80 bp, synthetic construct
  misc_feature 1..80: note = Artificially Synthesized Probe
  source 1..80: mol_type = other DNA
tgtagagagtgcccgagaggcctggaggagacttgggacctgctttcacaactgcagaggtgaggcacttccccttccct

SEQ ID NO: 127446 - DNA, 80 bp, synthetic construct
  misc_feature 1..80: note = Artificially Synthesized Probe
  source 1..80: mol_type = other DNA
tggagagggtgtggcgtggtggaggggctgtggcccaagcgcccactctgccctccgaacccatctggctcctggctgca

SEQ ID NO: 127447 - DNA, 80 bp, synthetic construct
  misc_feature 1..80: note = Artificially Synthesized Probe
  source 1..80: mol_type = other DNA
tgctcccattgtctccccgttagcttccccggatcctcgaaccaagcatcctcaggatctggcctccaccccaccaccag

SEQ ID NO: 127448 - DNA, 80 bp, synthetic construct; identical to SEQ ID NO: 40761
  misc_feature 1..80: note = Artificially Synthesized Probe
  source 1..80: mol_type = other DNA

SEQ ID NO: 127449 - DNA, 80 bp, synthetic construct
  misc_feature 1..80: note = Artificially Synthesized Probe
  source 1..80: mol_type = other DNA
tttcccgccaaagggacaccacaatgtccccactgcttttccaggcccagcccctgtcccatctggggcctgagtcccaa

SEQ ID NO: 127450 - DNA, 80 bp, synthetic construct
  misc_feature 1..80: note = Artificially Synthesized Probe
  source 1..80: mol_type = other DNA
ctctctccttacctgaaactcagcaccctgaaaggcctttgttgaggaaacaactagaaggtgggttggctttaccctct

SEQ ID NO: 127451 - DNA, 80 bp, synthetic construct
  misc_feature 1..80: note = Artificially Synthesized Probe
  source 1..80: mol_type = other DNA
atctgatgcagcttcaggatgaattgccagggacaagtcaggccaagggcaaacccaggccctggcagtcctccacgtcc

SEQ ID NO: 127452 - DNA, 80 bp, synthetic construct; identical to SEQ ID NO: 40762
  misc_feature 1..80: note = Artificially Synthesized Probe
  source 1..80: mol_type = other DNA

SEQ ID NO: 127453 - DNA, 80 bp, synthetic construct
  misc_feature 1..80: note = Artificially Synthesized Probe
  source 1..80: mol_type = other DNA
ctgagcctgggtgttcctggagcagaggaacagggactgatggcgtccatggtggacctcatattgaaaatccctgtgtg

SEQ ID NO: 127454 - DNA, 80 bp, synthetic construct
  misc_feature 1..80: note = Artificially Synthesized Probe
  source 1..80: mol_type = other DNA
aggaaagcctgtgtaaacacagcccaggtgctttccttccttgagctgtgtactcagcaggtgctggaagcccatattgt

SEQ ID NO: 127455 - DNA, 80 bp, synthetic construct
  misc_feature 1..80: note = Artificially Synthesized Probe
  source 1..80: mol_type = other DNA
acgctccttggagagccaccaatggcaagtctgagaaagcaagtgctgaccaaaccatctgttcacatgccagagaggct

SEQ ID NO: 127456 - DNA, 80 bp, synthetic construct; identical to SEQ ID NO: 40763
  misc_feature 1..80: note = Artificially Synthesized Probe
  source 1..80: mol_type = other DNA

SEQ ID NO: 127457 - DNA, 80 bp, synthetic construct
  misc_feature 1..80: note = Artificially Synthesized Probe
  source 1..80: mol_type = other DNA
aatttgagcctggaatggccacgaagtcagagacccagcctcaagtttctgccgctgttgtgctccttccagatgggcaa

SEQ ID NO: 127458 - DNA, 80 bp, synthetic construct
  misc_feature 1..80: note = Artificially Synthesized Probe
  source 1..80: mol_type = other DNA
aggaacccaaactgtcaaggctcatgcaagagccaaagcccaatgtttccccctactcacaagagggagaactctaggaa

SEQ ID NO: 127459 - DNA, 80 bp, synthetic construct
  misc_feature 1..80: note = Artificially Synthesized Probe
  source 1..80: mol_type = other DNA
aaacatcaagcaattttttgagacgattttttcaaagaaagaaaggaagccagcaccagtcactgctgagagccaaaaaa

SEQ ID NO: 127460 - DNA, 80 bp, synthetic construct
  misc_feature 1..80: note = Artificially Synthesized Probe
  source 1..80: mol_type = other DNA
cagtctgtgggtttccctgcaaccacagacacccgttctactcagaccacagcagaatgctgagctatgcagccagcagt

SEQ ID NO: 127461 - DNA, 80 bp, synthetic construct; identical to SEQ ID NO: 40764
  misc_feature 1..80: note = Artificially Synthesized Probe
  source 1..80: mol_type = other DNA

SEQ ID NO: 127462 - DNA, 80 bp, synthetic construct; identical to SEQ ID NO: 40755
  misc_feature 1..80: note = Artificially Synthesized Probe
  source 1..80: mol_type = other DNA

SEQ ID NO: 127463 - DNA, 80 bp, synthetic construct; identical to SEQ ID NO: 40765
  misc_feature 1..80: note = Artificially Synthesized Probe
  source 1..80: mol_type = other DNA

SEQ ID NO: 127464 - DNA, 80 bp, synthetic construct
  misc_feature 1..80: note = Artificially Synthesized Probe
  source 1..80: mol_type = other DNA
gcccaatggatacctcgcctttacctgtgatttggtgctcaggcaattatgtaataaatactgtctggtaggcagaaata

SEQ ID NO: 127465 - DNA, 80 bp, synthetic construct
  misc_feature 1..80: note = Artificially Synthesized Probe
  source 1..80: mol_type = other DNA
ttcaggggtcacccatatgcccccttagcatgactctcagctcctcgaaagaatataatgtcatttgcataacatctgga

SEQ ID NO: 127466 - DNA, 80 bp, synthetic construct; identical to SEQ ID NO: 40776
  misc_feature 1..80: note = Artificially Synthesized Probe
  source 1..80: mol_type = other DNA

SEQ ID NO: 127467 - DNA, 80 bp, synthetic construct
  misc_feature 1..80: note = Artificially Synthesized Probe
  source 1..80: mol_type = other DNA
tatcttttgcataggaggaatctatggctcagagaagttaagtcctttgcagcagatattgatagaatcaggacccaaac

SEQ ID NO: 127468 - DNA, 80 bp, synthetic construct
  misc_feature 1..80: note = Artificially Synthesized Probe
  source 1..80: mol_type = other DNA
ggaatgcagtggcacgatctcggctcactgcaacctccgcctcctgggttcaagtgattcttctgcctcagcctcccaag

SEQ ID NO: 127469 - DNA, 80 bp, synthetic construct
  misc_feature 1..80: note = Artificially Synthesized Probe
  source 1..80: mol_type = other DNA
gcacccagccaacactgagagattttaatgagtacttttatccacctgaccaccatcattacccatcacctgtcattctt

SEQ ID NO: 127470 - DNA, 80 bp, synthetic construct
  misc_feature 1..80: note = Artificially Synthesized Probe
  source 1..80: mol_type = other DNA
catcttcatctctcatttcctctctctaaaccagttcttaatctggggccaaagtcctacccacacatccctagtcttac

SEQ ID NO: 127471 - DNA, 80 bp, synthetic construct; identical to SEQ ID NO: 40777
  misc_feature 1..80: note = Artificially Synthesized Probe
  source 1..80: mol_type = other DNA

SEQ ID NO: 127472 - DNA, 80 bp, synthetic construct
  misc_feature 1..80: note = Artificially Synthesized Probe
  source 1..80: mol_type = other DNA
ctggccgacatgttgaaaccctgtctctactaaaaatagaaaaaaaattagctgggcgtggtggcaggcatctgtaatcc

SEQ ID NO: 127473 - DNA, 80 bp, synthetic construct
  misc_feature 1..80: note = Artificially Synthesized Probe
  source 1..80: mol_type = other DNA
agaacagagaactgaaggtttcggggcacttgttactctctaccttggattctaattattagagttttaattcttttcct

SEQ ID NO: 127474 - DNA, 80 bp, synthetic construct; identical to SEQ ID NO: 40766
  misc_feature 1..80: note = Artificially Synthesized Probe
  source 1..80: mol_type = other DNA

SEQ ID NO: 127475 - DNA, 80 bp, synthetic construct
  misc_feature 1..80: note = Artificially Synthesized Probe
  source 1..80: mol_type = other DNA
ggctaagtggatgattagatgggtgtgtgaataaattaatgaatgtgtagatggttagtgctatgaaaggatgaagaagt

SEQ ID NO: 127476 - DNA, 80 bp, synthetic construct
  misc_feature 1..80: note = Artificially Synthesized Probe
  source 1..80: mol_type = other DNA
ggagtttgagaccagcctggtcaacatggtgaaaccccgtctctactagaaatacaaaaagtagccgggcgtggtggcat

SEQ ID NO: 127477 - DNA, 80 bp, synthetic construct; identical to SEQ ID NO: 40778
  misc_feature 1..80: note = Artificially Synthesized Probe
  source 1..80: mol_type = other DNA

SEQ ID NO: 127478 - DNA, 80 bp, synthetic construct
  misc_feature 1..80: note = Artificially Synthesized Probe
  source 1..80: mol_type = other DNA
tcagctcactgcaagctccacctcccaggttcacaccattctcctgcgtcagcctcctgagtagctgggactacaggcac

SEQ ID NO: 127479 - DNA, 80 bp, synthetic construct
  misc_feature 1..80: note = Artificially Synthesized Probe
  source 1..80: mol_type = other DNA
tttaataaaactaaaaataggccgggcgcagtggctcacacctgtattcccagcactttgcgaggccaagacgggcagat

SEQ ID NO: 127480 - DNA, 80 bp, synthetic construct
  misc_feature 1..80: note = Artificially Synthesized Probe
  source 1..80: mol_type = other DNA
cagtcagctgagatcgtaccactccactccagcctgggtgacagggtgagactccgtctcaaaaaaataaaaatagaatt

SEQ ID NO: 127481 - DNA, 80 bp, synthetic construct; identical to SEQ ID NO: 40779
  misc_feature 1..80: note = Artificially Synthesized Probe
  source 1..80: mol_type = other DNA

SEQ ID NO: 127482 - DNA, 80 bp, synthetic construct
  misc_feature 1..80: note = Artificially Synthesized Probe
  source 1..80: mol_type = other DNA
tcagtgaatacagagtctccgttttgcaagatgaaaataattatagagatggatggtgatgataacgtgaatatatttaa

SEQ ID NO: 127483 - DNA, 80 bp, synthetic construct
  misc_feature 1..80: note = Artificially Synthesized Probe
  source 1..80: mol_type = other DNA
cacctgaggtcaggacttcaagaccagcctggccaacatggtgaaaccctgtctctactaaaaatacacacaaagaaatt

SEQ ID NO: 127484 - DNA, 80 bp, synthetic construct
  misc_feature 1..80: note = Artificially Synthesized Probe
  source 1..80: mol_type = other DNA
caaacaaaaagcataataaacaatagcaaatcctgtaagcccttcaaagtctatcttgaatctgtccccccctttctgtc

SEQ ID NO: 127485 - DNA, 80 bp, synthetic construct
  misc_feature 1..80: note = Artificially Synthesized Probe
  source 1..80: mol_type = other DNA
aacccacactgcatctgcttacacattcacaacccactcacacacacctggtcacacccactcatgctcacacctcattc

SEQ ID NO: 127486 - DNA, 80 bp, synthetic construct; identical to SEQ ID NO: 40780
  misc_feature 1..80: note = Artificially Synthesized Probe
  source 1..80: mol_type = other DNA

SEQ ID NO: 127487 - DNA, 80 bp, synthetic construct
  misc_feature 1..80: note = Artificially Synthesized Probe
  source 1..80: mol_type = other DNA
aacatggagtggtatcagacttcataggaaaaactctagtaaccagaagacagtagaaaaatgctttccaatttctaagg

SEQ ID NO: 127488 - DNA, 80 bp, synthetic construct
  misc_feature 1..80: note = Artificially Synthesized Probe
  source 1..80: mol_type = other DNA
acctcacctcccacacaccctttcttaggagacgaccatgataacaaatctgtacaaaacatttgctatttccaggcact

SEQ ID NO: 127489 - DNA, 80 bp, synthetic construct
  misc_feature 1..80: note = Artificially Synthesized Probe
  source 1..80: mol_type = other DNA
tagcaatggaggagatgggggatgagtttcagcagcctggtttcagaagagttcttatctccttgctacatttcccctca

SEQ ID NO: 127490 - DNA, 80 bp, synthetic construct; identical to SEQ ID NO: 40781
  misc_feature 1..80: note = Artificially Synthesized Probe
  source 1..80: mol_type = other DNA

SEQ ID NO: 127491 - DNA, 80 bp, synthetic construct
  misc_feature 1..80: note = Artificially Synthesized Probe
  source 1..80: mol_type = other DNA
tagcctggccaacatggcgaaaccccatctctactaaaaatacaaaaattagctgggcgtggtggcgggcacctgtaatc

SEQ ID NO: 127492 - DNA, 80 bp, synthetic construct
  misc_feature 1..80: note = Artificially Synthesized Probe
  source 1..80: mol_type = other DNA
acaggtaaagaaaggatgccatgtggctcagctgtgagtaatagccacatggtcataacagtggaaaattcaaatactga

SEQ ID NO: 127493 - DNA, 80 bp, synthetic construct
  misc_feature 1..80: note = Artificially Synthesized Probe
  source 1..80: mol_type = other DNA
cactcaataaatatttgccaataaataatgctctaagtctctattccacatcttcatttgtacatttacatagcactgga

SEQ ID NO: 127494 - DNA, 80 bp, synthetic construct; identical to SEQ ID NO: 40782
  misc_feature 1..80: note = Artificially Synthesized Probe
  source 1..80: mol_type = other DNA

SEQ ID NO: 127495 - DNA, 80 bp, synthetic construct
  misc_feature 1..80: note = Artificially Synthesized Probe
  source 1..80: mol_type = other DNA
gagaccagcctggccaacatggtgaaaccccatctctactaaaaaatacaacattagctgggcatggtggtgcacacctg

SEQ ID NO: 127496 - DNA, 80 bp, synthetic construct
  misc_feature 1..80: note = Artificially Synthesized Probe
  source 1..80: mol_type = other DNA
ttcacacactcatgttcacacacctgctcatacacctcacaccaggtctcataatcacacctgcttatacttgcttacac

SEQ ID NO: 127497 - DNA, 80 bp, synthetic construct
  misc_feature 1..80: note = Artificially Synthesized Probe
  source 1..80: mol_type = other DNA
tcagcacacacacatacacagaaggttattcagatcatggtcatgtcatttccctgctcagaactccccagtggcttccc

SEQ ID NO: 127498 - DNA, 80 bp, synthetic construct
  misc_feature 1..80: note = Artificially Synthesized Probe
  source 1..80: mol_type = other DNA
cagggtcctttctgcttttgcattttctgttccctttaccttgaatacctctcccctacctatggtcacatgtgaattac

SEQ ID NO: 127499 - DNA, 80 bp, synthetic construct; identical to SEQ ID NO: 40783
  misc_feature 1..80: note = Artificially Synthesized Probe
  source 1..80: mol_type = other DNA

SEQ ID NO: 127500 - DNA, 80 bp, synthetic construct
  misc_feature 1..80: note = Artificially Synthesized Probe
  source 1..80: mol_type = other DNA
tatttctagtagagatggggtttcaccatgttggccaggatagcctctatctcttgacctcgtgatccacccacctcagc

SEQ ID NO: 127501 - DNA, 80 bp, synthetic construct
  misc_feature 1..80: note = Artificially Synthesized Probe
  source 1..80: mol_type = other DNA
atcatggactccccagagcctacaagagtgtctgatactcagaaactatttaatggatggaatagggaggaaaagtggat

SEQ ID NO: 127502 - DNA, 80 bp, synthetic construct
  misc_feature 1..80: note = Artificially Synthesized Probe
  source 1..80: mol_type = other DNA
cgctttgtccctcctgccttgaggaatgcagtgaagctagcacgggcctcgtcctctgcacgttaccttacctcagagat

SEQ ID NO: 127503 - DNA, 80 bp, synthetic construct; identical to SEQ ID NO: 40784
  misc_feature 1..80: note = Artificially Synthesized Probe
  source 1..80: mol_type = other DNA

SEQ ID NO: 127504 - DNA, 80 bp, synthetic construct
  misc_feature 1..80: note = Artificially Synthesized Probe
  source 1..80: mol_type = other DNA
tactaaaaatacaaaaaattagctgagcgtggtggcaggcgcctgtaatcctagctacttgggaggctgaggcaggagaa

SEQ ID NO: 127505 - DNA, 80 bp, synthetic construct
  misc_feature 1..80: note = Artificially Synthesized Probe
  source 1..80: mol_type = other DNA
atcacttgaggtcaggagtttgagagcagcctggccaacatggtaaaacctcatctctactaaaaatacaaaaattagcc

SEQ ID NO: 127506 - DNA, 80 bp, synthetic construct
  misc_feature 1..80: note = Artificially Synthesized Probe
  source 1..80: mol_type = other DNA
gcaacagagcaagactgtcctaaaaaaaaaaaaaaaagaaaaggacagcccaaatgccctgattggcagtgattaagagt

SEQ ID NO: 127507 - DNA, 80 bp, synthetic construct; identical to SEQ ID NO: 40785
  misc_feature 1..80: note = Artificially Synthesized Probe
  source 1..80: mol_type = other DNA

SEQ ID NO: 127508 - DNA, 80 bp, synthetic construct
  misc_feature 1..80: note = Artificially Synthesized Probe
  source 1..80: mol_type = other DNA
actgtctgtggtgacccgagccaccagggggcgcctgtcccagggcccagcgggacctcctggagtcctggaaccgcttg

SEQ ID NO: 127509 - DNA, 80 bp, synthetic construct
  misc_feature 1..80: note = Artificially Synthesized Probe
  source 1..80: mol_type = other DNA
ctcacacacacttgcacgcacacacctgcttacacacatctcacgttactcagccccacacgcacacacctgctcacaca

SEQ ID NO: 127510 - DNA, 80 bp, synthetic construct
  misc_feature 1..80: note = Artificially Synthesized Probe
  source 1..80: mol_type = other DNA
aattaaaaaggatattttaaaggctttctagccctgaaagattctaaaagatgcctgtgcgttcccagctgtggcctgga

SEQ ID NO: 127511 - DNA, 80 bp, synthetic construct
  misc_feature 1..80: note = Artificially Synthesized Probe
  source 1..80: mol_type = other DNA
gcaggggtggccttcaggagtgacaccttcctaggctgtgggcctctgccctctgaggtgcagacaccccagtcgctggt

SEQ ID NO: 127512 - DNA, 80 bp, synthetic construct
  misc_feature 1..80: note = Artificially Synthesized Probe
  source 1..80: mol_type = other DNA
tctcccatcccctgaatttgctccaggacggaggctgggctatggggcagacagtcagacccagaaggactggacagaca

SEQ ID NO: 127513 - DNA, 80 bp, synthetic construct; identical to SEQ ID NO: 40786
  misc_feature 1..80: note = Artificially Synthesized Probe
  source 1..80: mol_type = other DNA

SEQ ID NO: 127514 - DNA, 80 bp, synthetic construct
  misc_feature 1..80: note = Artificially Synthesized Probe
  source 1..80: mol_type = other DNA
agaaaaaaaagcacaggacctggagcggacagacctgggttccacccagcagccgtgtgaccttgtgcaagtctcctagc

SEQ ID NO: 127515 - DNA, 80 bp, synthetic construct
  misc_feature 1..80: note = Artificially Synthesized Probe
  source 1..80: mol_type = other DNA
agagcaaacttgatctgattctcagaattccaaagaagtcctgggaatcatttattctttttctctctccagaccccagg

SEQ ID NO: 127516 - DNA, 80 bp, synthetic construct
  misc_feature 1..80: note = Artificially Synthesized Probe
  source 1..80: mol_type = other DNA
gtgtcagggcctgcaccatggtgggagaccccagccaggcctgcagcacccccgcacgctgggtccccatcaccttccct

SEQ ID NO: 127517 - DNA, 80 bp, synthetic construct; identical to SEQ ID NO: 40787
  misc_feature 1..80: note = Artificially Synthesized Probe
  source 1..80: mol_type = other DNA

SEQ ID NO: 127518 - DNA, 80 bp, synthetic construct
  misc_feature 1..80: note = Artificially Synthesized Probe
  source 1..80: mol_type = other DNA
acactcagctcatgcacacacgcagagtctccttgattgacactcacatgacaccacgttccagccatcaacacacacac

SEQ ID NO: 127519 - DNA, 80 bp, synthetic construct
  misc_feature 1..80: note = Artificially Synthesized Probe
  source 1..80: mol_type = other DNA
aggcagacttaggggccgagcgcatggagggccttgatcccctcactctccctcctgagtcctccctatcctcctccttc

SEQ ID NO: 127520 - DNA, 80 bp, synthetic construct; identical to SEQ ID NO: 40767
  misc_feature 1..80: note = Artificially Synthesized Probe
  source 1..80: mol_type = other DNA

SEQ ID NO: 127521 - DNA, 80 bp, synthetic construct
  misc_feature 1..80: note = Artificially Synthesized Probe
  source 1..80: mol_type = other DNA
ccgtgcacacccaggagccttcccaacagtcatcaggcctccccgcccccgcagcgtgtggcccaggattgcataacagt

SEQ ID NO: 127522 - DNA, 80 bp, synthetic construct; identical to SEQ ID NO: 40788
  misc_feature 1..80: note = Artificially Synthesized Probe
  source 1..80: mol_type = other DNA

SEQ ID NO: 127523 - DNA, 80 bp, synthetic construct
  misc_feature 1..80: note = Artificially Synthesized Probe
  source 1..80: mol_type = other DNA
gtagtacagcctcgctgcaggatgtcagcccggctctggtcgggttggtgtgatgtcaggcctggggtgcctcccagcct

SEQ ID NO: 127524 - DNA, 80 bp, synthetic construct
  misc_feature 1..80: note = Artificially Synthesized Probe
  source 1..80: mol_type = other DNA
cgagggaccctggtctgacacctgcctaaggctgcaactgtcactgagagtgaggagcagtggcgatctgcccttctctt

SEQ ID NO: 127525 - DNA, 80 bp, synthetic construct; identical to SEQ ID NO: 40789
  misc_feature 1..80: note = Artificially Synthesized Probe
  source 1..80: mol_type = other DNA

SEQ ID NO: 127526 - DNA, 80 bp, synthetic construct
  misc_feature 1..80: note = Artificially Synthesized Probe
  source 1..80: mol_type = other DNA
gcctcctgccttcaaccccttcccatccaggggaccggcctcccccaagccagtccccccatctccctcctctacctctc

SEQ ID NO: 127527 - DNA, 80 bp, synthetic construct
  misc_feature 1..80: note = Artificially Synthesized Probe
  source 1..80: mol_type = other DNA
atggccccctcgctgggtctcaggccaggagttccagggaggaaaccctgacttcccactgatagcaagccaggagggca

SEQ ID NO: 127528 - DNA, 80 bp, synthetic construct
  misc_feature 1..80: note = Artificially Synthesized Probe
  source 1..80: mol_type = other DNA
gcctcggtgggggccaatgcagagcccctcaggatggggtgccccgtcaggggctggacggtcgtggggcgggtgcaggg

SEQ ID NO: 127529 - DNA, 80 bp, synthetic construct
  misc_feature 1..80: note = Artificially Synthesized Probe
  source 1..80: mol_type = other DNA
tgctcacacctcacagctgctcacttatcactcacacgctcacaccagctctttcacacctcattgacacctgctcactc

SEQ ID NO: 127530 - DNA, 80 bp, synthetic construct
  misc_feature 1..80: note = Artificially Synthesized Probe
  source 1..80: mol_type = other DNA
gcccggcccgccacagtcctgcctctgggccccgggagcgtcctccctgtgtccgggccgggcgagggcttaatgctatg

SEQ ID NO: 127531 - DNA, 80 bp, synthetic construct
  misc_feature 1..80: note = Artificially Synthesized Probe
  source 1..80: mol_type = other DNA
cactcacagcagctcacactcatgcatgctcacacacacctgctctcacactcacacatcacacccattctcttgttttt

SEQ ID NO: 127532 - DNA, 80 bp, synthetic construct
  misc_feature 1..80: note = Artificially Synthesized Probe
  source 1..80: mol_type = other DNA
tagtggagacggggtttcgccatgttggccaggctggtctcgaacacctgacctcaggtgatccgcctgcctcagcctcc

SEQ ID NO: 127533 - DNA, 80 bp, synthetic construct
  misc_feature 1..80: note = Artificially Synthesized Probe
  source 1..80: mol_type = other DNA
ccacacacacctgctcacacatgggaacacacacatgcttacacatgttaaaacacatatccactcacatacatgcacag

SEQ ID NO: 127534 - DNA, 80 bp, synthetic construct; identical to SEQ ID NO: 40768
  misc_feature 1..80: note = Artificially Synthesized Probe
  source 1..80: mol_type = other DNA

SEQ ID NO: 127535 - DNA, 80 bp, synthetic construct
  misc_feature 1..80: note = Artificially Synthesized Probe
  source 1..80: mol_type = other DNA
acatcatacgtgcacagctgctcacacgcactgaaatacattcatgtgttgacagacacacaaacatggccacacccact

SEQ ID NO: 127536 - DNA, 80 bp, synthetic construct
  misc_feature 1..80: note = Artificially Synthesized Probe
  source 1..80: mol_type = other DNA
tggcacacttcatggagatgcccgtatgcactacacagcagatacacacacacagagacagccacagacagccccacaaa

SEQ ID NO: 127537 - DNA, 80 bp, synthetic construct
  misc_feature 1..80: note = Artificially Synthesized Probe
  source 1..80: mol_type = other DNA
caggcccgggctccaggccatccgcctcgccgtcagacacctccagtggggggctctgccgctcgccctcctcctcatct

SEQ ID NO: 127538 - DNA, 80 bp, synthetic construct; identical to SEQ ID NO: 40769
  misc_feature 1..80: note = Artificially Synthesized Probe
  source 1..80: mol_type = other DNA

SEQ ID NO: 127539 - DNA, 80 bp, synthetic construct
  misc_feature 1..80: note = Artificially Synthesized Probe
  source 1..80: mol_type = other DNA
tgctagggaccggtgcgttgggtctggaagggggtttcataggtgggatgatgagtgagtggagggaccctggaggtcag

SEQ ID NO: 127540 - DNA, 80 bp, synthetic construct
  misc_feature 1..80: note = Artificially Synthesized Probe
  source 1..80: mol_type = other DNA
acaacaaggcgttgggatggggaggcttggtgagggtgcgagaattatctggggtctgtccatactcggggtgagatgag

SEQ ID NO: 127541 - DNA, 80 bp, synthetic construct
  misc_feature 1..80: note = Artificially Synthesized Probe
  source 1..80: mol_type = other DNA
agcgcgcgcgccatcttctggtaggtcatcttcttgcggttgcccttctggatgccccagcggtgcgccagcgcctcctt

SEQ ID NO: 127542 - DNA, 80 bp, synthetic construct
  misc_feature 1..80: note = Artificially Synthesized Probe
  source 1..80: mol_type = other DNA
gggggacggggcaggcggtggcatgcacctggtggccaagactgggatggggtggcaccatgggggtatcgaggacgtgc

SEQ ID NO: 127543 - DNA, 80 bp, synthetic construct; identical to SEQ ID NO: 40770
  misc_feature 1..80: note = Artificially Synthesized Probe
  source 1..80: mol_type = other DNA

SEQ ID NO: 127544 - DNA, 80 bp, synthetic construct
  misc_feature 1..80: note = Artificially Synthesized Probe
  source 1..80: mol_type = other DNA
tccatcctgattcctgtgcagtcacacagaccgagcgtctaatcctggctctgccatttacttgctgtgtgacctcaggc

SEQ ID NO: 127545 - DNA, 80 bp, synthetic construct
  misc_feature 1..80: note = Artificially Synthesized Probe
  source 1..80: mol_type = other DNA
gggccgcgcgcggtggctcacgcctgtaaacccagcattttgggaggcggaggcgggcggatcatgaggtcaggagattg

SEQ ID NO: 127546 - DNA, 80 bp, synthetic construct; identical to SEQ ID NO: 40771
  misc_feature 1..80: note = Artificially Synthesized Probe
  source 1..80: mol_type = other DNA

SEQ ID NO: 127547 - DNA, 80 bp, synthetic construct
  misc_feature 1..80: note = Artificially Synthesized Probe
  source 1..80: mol_type = other DNA
gcaggagaatggtgtgaacccaggaggcggaggctgcagtgagccgagattgcgccactgcactccagcctgggcgacgg

SEQ ID NO: 127548 - DNA, 80 bp, synthetic construct
  misc_feature 1..80: note = Artificially Synthesized Probe
  source 1..80: mol_type = other DNA
agggctgacattcctcacacactagaacttgtccaggcacacggtggcccttcctcttcaaagccatgaccttaagcagt

SEQ ID NO: 127549 - DNA, 80 bp, synthetic construct
  misc_feature 1..80: note = Artificially Synthesized Probe
  source 1..80: mol_type = other DNA
cttttccaggaacaaaaactgccacacatctgcgggacttcctgggcgcaattcggggtccaaaatgaagcgtggtaata

SEQ ID NO: 127550 - DNA, 80 bp, synthetic construct; identical to SEQ ID NO: 40772
  misc_feature 1..80: note = Artificially Synthesized Probe
  source 1..80: mol_type = other DNA

SEQ ID NO: 127551 - DNA, 80 bp, synthetic construct
  misc_feature 1..80: note = Artificially Synthesized Probe
  source 1..80: mol_type = other DNA
gcttttagacctgggtagttactgaggccttgtctacatgtataattatttggcctcacagtccagacaacccagactcc

SEQ ID NO: 127552 - DNA, 80 bp, synthetic construct
  misc_feature 1..80: note = Artificially Synthesized Probe
  source 1..80: mol_type = other DNA
ccacatgggagccgcccccaccgccttgcgtacgcacaggggcccggggacggggtggccgggaagggcaggggaacggc

SEQ ID NO: 127553 - DNA, 80 bp, synthetic construct
  misc_feature 1..80: note = Artificially Synthesized Probe
  source 1..80: mol_type = other DNA
aggcttgttttgagaagcaaatgacctattgcttgcaaagtgcttagactagaacttggcacaaagacagaccttgataa

SEQ ID NO: 127554 - DNA, 80 bp, synthetic construct
  misc_feature 1..80: note = Artificially Synthesized Probe
  source 1..80: mol_type = other DNA
catagtgagaccctatctctacaaaaaatgtttaaaaatttgccagacatggtggcacacacttctagtcccagctactt

SEQ ID NO: 127555 - DNA, 80 bp, synthetic construct
  misc_feature 1..80: note = Artificially Synthesized Probe
  source 1..80: mol_type = other DNA
gagtgcagtggcacgatatcggctcactgcaacctccacctcccgggttcaagtgattctcctgcctcagcctcccaagt

SEQ ID NO: 127556 - DNA, 80 bp, synthetic construct; identical to SEQ ID NO: 40773
  misc_feature 1..80: note = Artificially Synthesized Probe
  source 1..80: mol_type = other DNA

SEQ ID NO: 127557 - DNA, 80 bp, synthetic construct
  misc_feature 1..80: note = Artificially Synthesized Probe
  source 1..80: mol_type = other DNA
ggcaccatgagggcagggactggttttgttcacctccgtcttcccagtgcctaagtagagtgggcactcaacaaacattt

SEQ ID NO: 127558 - DNA, 80 bp, synthetic construct
  misc_feature 1..80: note = Artificially Synthesized Probe
  source 1..80: mol_type = other DNA
gaggtcaggagtccgagatcaacctggccaacatgatgaaaccccgtctctactgaaaatacaaaaattagctgggtgtg

SEQ ID NO: 127559 - DNA, 80 bp, synthetic construct
  misc_feature 1..80: note = Artificially Synthesized Probe
  source 1..80: mol_type = other DNA
ttgagatggaatctcactatgttgcctccaactcctgggctcaagtgatcctcccacctcagcctccccaaatgcttgga

SEQ ID NO: 127560 - DNA, 80 bp, synthetic construct; identical to SEQ ID NO: 40774
  misc_feature 1..80: note = Artificially Synthesized Probe
  source 1..80: mol_type = other DNA

SEQ ID NO: 127561 - DNA, 80 bp, synthetic construct
  misc_feature 1..80: note = Artificially Synthesized Probe
  source 1..80: mol_type = other DNA
agcgaaaacaaaacaaaacttaatttgcattttcttttttttttgagatggagtctggctctgtcgcccaggctggagtg

SEQ ID NO: 127562 - DNA, 80 bp, synthetic construct
  misc_feature 1..80: note = Artificially Synthesized Probe
  source 1..80: mol_type = other DNA
tggtcgcgatctcctgacctcgtgatccacccgcctcggcctcccaaagtgctgggattacaggcgtctggccttaattt

SEQ ID NO: 127563 - DNA, 80 bp, synthetic construct
  misc_feature 1..80: note = Artificially Synthesized Probe
  source 1..80: mol_type = other DNA
acatgctcacatccacataacgcacccacacctccttacacatgctcacacatcacgcccacacccactcacacacgtgc

SEQ ID NO: 127564 - DNA, 80 bp, synthetic construct
  misc_feature 1..80: note = Artificially Synthesized Probe
  source 1..80: mol_type = other DNA
tgcccatttttgccttctcctgcccaagttggagtgccctggtataatgccgaatggatcctgccatcaaacccccatcc

SEQ ID NO: 127565 - DNA, 80 bp, synthetic construct; identical to SEQ ID NO: 40775
  misc_feature 1..80: note = Artificially Synthesized Probe
  source 1..80: mol_type = other DNA

SEQ ID NO: 127566 - DNA, 80 bp, synthetic construct; identical to SEQ ID NO: 40790
  misc_feature 1..80: note = Artificially Synthesized Probe
  source 1..80: mol_type = other DNA

SEQ ID NO: 127567 - DNA, 80 bp, synthetic construct
  misc_feature 1..80: note = Artificially Synthesized Probe
  source 1..80: mol_type = other DNA
agggagaacccctcctaccctggatgagtgggtgactggagagctagagaacgtggcagacccaagacctctcagtgctg

SEQ ID NO: 127568 - DNA, 80 bp, synthetic construct
  misc_feature 1..80: note = Artificially Synthesized Probe
  source 1..80: mol_type = other DNA
gggcgctgggccccgccactggccccctgcttgctttggggtctgagttagctcctggctccactgagcaggccgtcagc

SEQ ID NO: 127569 - DNA, 80 bp, synthetic construct
  misc_feature 1..80: note = Artificially Synthesized Probe
  source 1..80: mol_type = other DNA
tgtgatccctgaatgtgaacctgaagttcaaaggacttggaaagctctggaatgtgttggtttttcccccccaaaatggg

SEQ ID NO: 127570 - DNA, 80 bp, synthetic construct; identical to SEQ ID NO: 40792
  misc_feature 1..80: note = Artificially Synthesized Probe
  source 1..80: mol_type = other DNA

SEQ ID NO: 127571 - DNA, 80 bp, synthetic construct
  misc_feature 1..80: note = Artificially Synthesized Probe
  source 1..80: mol_type = other DNA
ttgggttcctggccttggcacctccctttgggcggcgatggagcgtggctgggcggttggtacaggagccacaggcagct

SEQ ID NO: 127572 - DNA, 80 bp, synthetic construct
  misc_feature 1..80: note = Artificially Synthesized Probe
  source 1..80: mol_type = other DNA
accgtgggcaagggaggaagggggagcccaggccggaggatcctgggggatggcgcgggccgggggccagatgtggtccc

SEQ ID NO: 127573 - DNA, 80 bp, synthetic construct
  misc_feature 1..80: note = Artificially Synthesized Probe
  source 1..80: mol_type = other DNA
agatgtgggggcccctccagccccattatagtgcacctgaaggggtccacagcctgtgtcctagaagagggaagaggaag

SEQ ID NO: 127574 - DNA, 80 bp, synthetic construct
  misc_feature 1..80: note = Artificially Synthesized Probe
  source 1..80: mol_type = other DNA
tcctcgtcctccaggccgcgttccccgggtcccgcggcccttctccagcccgagcccgccgccaggcccgcggccgctcc

SEQ ID NO: 127575 - DNA, 80 bp, synthetic construct; identical to SEQ ID NO: 40793
  misc_feature 1..80: note = Artificially Synthesized Probe
  source 1..80: mol_type = other DNA

SEQ ID NO: 127576 - DNA, 80 bp, synthetic construct
  misc_feature 1..80: note = Artificially Synthesized Probe
  source 1..80: mol_type = other DNA
ggtttaacctctagcatcagggacttaggcctgggggaggcgctgggaagtggcaggtggggcaggagggttctgcacct

SEQ ID NO: 127577 - DNA, 80 bp, synthetic construct
  misc_feature 1..80: note = Artificially Synthesized Probe
  source 1..80: mol_type = other DNA
ttgtgtttggaggacgcggtagccgggaccaagagctggctcagatcagggtctggaacggggacgggccgtgcctgggc

SEQ ID NO: 127578 - DNA, 80 bp, synthetic construct
  misc_feature 1..80: note = Artificially Synthesized Probe
  source 1..80: mol_type = other DNA
tagttcagcagctggctgggggcgggacggggtcgagttgcggggccgcgtccagacacggctgtgcgggcgacagctgc

SEQ ID NO: 127579 - DNA, 80 bp, synthetic construct
  misc_feature 1..80: note = Artificially Synthesized Probe
  source 1..80: mol_type = other DNA
gagcgggaaggagcgggcgggcggcggcgcggaccctcagccggagcgcggagccgcggcgcctgggttttgcgcgaggc

SEQ ID NO: 127580 - DNA, 80 bp, synthetic construct
  misc_feature 1..80: note = Artificially Synthesized Probe
  source 1..80: mol_type = other DNA
tggctgcctctgctgccccataccccacacactcatcagcctgaagttagcccctgagtgccacctgcatcgtgccataa

SEQ ID NO: 127581 - DNA, 80 bp, synthetic construct
  misc_feature 1..80: note = Artificially Synthesized Probe
  source 1..80: mol_type = other DNA
gcatctgcaaagttgagggggctccggtgggtctctctgctgtgaggagactcagaccaccccctgcctcctgggggaaa

SEQ ID NO: 127582 - DNA, 80 bp, synthetic construct; identical to SEQ ID NO: 40791
  misc_feature 1..80: note = Artificially Synthesized Probe
  source 1..80: mol_type = other DNA

SEQ ID NO: 127583 - DNA, 80 bp, synthetic construct
  misc_feature 1..80: note = Artificially Synthesized Probe
  source 1..80: mol_type = other DNA
tgaccacgcctcggcagtgctagtcacacctccaagttttgccagctcctccccctcattccgggcctctcgggatcagc

SEQ ID NO: 127584 - DNA, 80 bp, synthetic construct
  misc_feature 1..80: note = Artificially Synthesized Probe
  source 1..80: mol_type = other DNA
gcttcctggccaagacacgcagcaccaaggaccagcaattcaagtaggggctctgtggctattactctctgagaccttgg

SEQ ID NO: 127585 - DNA, 80 bp, synthetic construct
  misc_feature 1..80: note = Artificially Synthesized Probe
  source 1..80: mol_type = other DNA
tgaaccatgctaataataacagcaaacttgtttatagctctgttgccaggcatgctactaagggctttacatatatgtta

SEQ ID NO: 127586 - DNA, 80 bp, synthetic construct
  misc_feature 1..80: note = Artificially Synthesized Probe
  source 1..80: mol_type = other DNA
cacacacactcacactcacacacccctagtaaatagtagagctggaattcaaacccaggcagtctggctgcagggtctat

SEQ ID NO: 127587 - DNA, 80 bp, synthetic construct; identical to SEQ ID NO: 40900
  misc_feature 1..80: note = Artificially Synthesized Probe
  source 1..80: mol_type = other DNA

SEQ ID NO: 127588 - DNA, 80 bp, synthetic construct
  misc_feature 1..80: note = Artificially Synthesized Probe
  source 1..80: mol_type = other DNA
acagtccacagcaggggtgtccaatcttttggtctccctgggccacattggaagaagaagaattgtcttgggccacccat

SEQ ID NO: 127589 - DNA, 80 bp, synthetic construct
  misc_feature 1..80: note = Artificially Synthesized Probe
  source 1..80: mol_type = other DNA
tctctccattccaatctgcctgctccattgtgatcggagttaatcttcctggaacacactggcgatcagagaatttcttt

SEQ ID NO: 127590 - DNA, 80 bp, synthetic construct
  misc_feature 1..80: note = Artificially Synthesized Probe
  source 1..80: mol_type = other DNA
ctcagcctacctcctgagtagctgggactgcaggtgtgcaccatcatacccagctatttttattttattttaatttttgt

SEQ ID NO: 127591 - DNA, 80 bp, synthetic construct; identical to SEQ ID NO: 40901
  misc_feature 1..80: note = Artificially Synthesized Probe
  source 1..80: mol_type = other DNA

SEQ ID NO: 127592 - DNA, 80 bp, synthetic construct
  misc_feature 1..80: note = Artificially Synthesized Probe
  source 1..80: mol_type = other DNA
tgtttctgttccactatacccgagccaaacagaacattcactccagtgggtcactggcatcctgttacttgaggttatgt

SEQ ID NO: 127593 - DNA, 80 bp, synthetic construct
  misc_feature 1..80: note = Artificially Synthesized Probe
  source 1..80: mol_type = other DNA
ggatggagtgagaaagaaaagaaaaaaaatcatggccatgttaggagtggacaaatgacagtgtctgtttccatatagag

SEQ ID NO: 127594 - DNA, 80 bp, synthetic construct
  misc_feature 1..80: note = Artificially Synthesized Probe
  source 1..80: mol_type = other DNA
tgaattcttacagcattttatttgttcttctcttagggcattcagcactatctaccttctgttatcttctctgagtggac

SEQ ID NO: 127595 - DNA, 80 bp, synthetic construct; identical to SEQ ID NO: 40902
  misc_feature 1..80: note = Artificially Synthesized Probe
  source 1..80: mol_type = other DNA

SEQ ID NO: 127596 - DNA, 80 bp, synthetic construct
  misc_feature 1..80: note = Artificially Synthesized Probe
  source 1..80: mol_type = other DNA
tattttagtatgtgataaatgaagacttaggggaggaatcatttgctttagaaaatgattcaaagttggatttattctgt

SEQ ID NO: 127597 - DNA, 80 bp, synthetic construct
  misc_feature 1..80: note = Artificially Synthesized Probe
  source 1..80: mol_type = other DNA
aatgaggctgcggacccttgcggtgagtgttacagctcttaaggtggtgtgtctggagtctgtcccttctgatgttcaga

SEQ ID NO: 127598 - DNA, 80 bp, synthetic construct
  misc_feature 1..80: note = Artificially Synthesized Probe
  source 1..80: mol_type = other DNA
ctgcagatctttgcggtgagtgttacagctcataaaagcagcgtggacccaaaaagtgagcactagcaagatttattgca

SEQ ID NO: 127599 - DNA, 80 bp, synthetic construct
  misc_feature 1..80: note = Artificially Synthesized Probe
  source 1..80: mol_type = other DNA
tttacaatctctgagatagatacaaaggttctccacctccccatcagattagttagatacagagttttgacacacaggtt

SEQ ID NO: 127600 - DNA, 80 bp, synthetic construct; identical to SEQ ID NO: 40903
  misc_feature 1..80: note = Artificially Synthesized Probe
  source 1..80: mol_type = other DNA

SEQ ID NO: 127601 - DNA, 80 bp, synthetic construct
  misc_feature 1..80: note = Artificially Synthesized Probe
  source 1..80: mol_type = other DNA
attggtgtgtttacaaaccttgagctagatatagagtgccgattggtgtatttacaatccttgagctagacataaaggtt

SEQ ID NO: 127602 - DNA, 80 bp, synthetic construct
  misc_feature 1..80: note = Artificially Synthesized Probe
  source 1..80: mol_type = other DNA
ctagtggatcccgcaccggggctgcaggtggagctgcctgccagtcctgcgctgtgcgctcgcattcctcagcccttggg

SEQ ID NO: 127603 - DNA, 80 bp, synthetic construct
  misc_feature 1..80: note = Artificially Synthesized Probe
  source 1..80: mol_type = other DNA
agcacagcgccgatgggccggcactgctgggggactcagtacaccctccgcagccactggcccgggtgctaagtccccca

SEQ ID NO: 127604 - DNA, 80 bp, synthetic construct
  misc_feature 1..80: note = Artificially Synthesized Probe
  source 1..80: mol_type = other DNA
tgcctgtaatcccagctactcaggaggctgagggaggagaatcgcttgaatccaggaggcagaggttgcagtgagccgag

SEQ ID NO: 127605 - DNA, 80 bp, synthetic construct; identical to SEQ ID NO: 40904
  misc_feature 1..80: note = Artificially Synthesized Probe
  source 1..80: mol_type = other DNA

SEQ ID NO: 127606 - DNA, 80 bp, synthetic construct
  misc_feature 1..80: note = Artificially Synthesized Probe
  source 1..80: mol_type = other DNA
cttggcaacattttttcctcaaataaccagtgagtatttattgattgaccagttctgtgcttgtacaaggcattggaaaa

SEQ ID NO: 127607 - DNA, 80 bp, synthetic construct
  misc_feature 1..80: note = Artificially Synthesized Probe
  source 1..80: mol_type = other DNA
tgagaggtcagagatggttaaaggttctggaatagtctggaaagttgtcatgaagcaggtgggacctaggcttgagaggt

SEQ ID NO: 127608 - DNA, 80 bp, synthetic construct
  misc_feature 1..80: note = Artificially Synthesized Probe
  source 1..80: mol_type = other DNA
cctttgtgccttggagtgtagcagggaacaaactgctacacttagcacttagcacttagatgaagaaatgggcatttaac

SEQ ID NO: 127609 - DNA, 80 bp, synthetic construct; identical to SEQ ID NO: 40905
  misc_feature 1..80: note = Artificially Synthesized Probe
  source 1..80: mol_type = other DNA

SEQ ID NO: 127610 - DNA, 80 bp, synthetic construct
  misc_feature 1..80: note = Artificially Synthesized Probe
  source 1..80: mol_type = other DNA
gcatggtgatgcacgcctgtagtcctaacttctcaggaggtgggaagatcgcttcactccaggagttggagcctacagtg

SEQ ID NO: 127611 - DNA, 80 bp, synthetic construct
  misc_feature 1..80: note = Artificially Synthesized Probe
  source 1..80: mol_type = other DNA
agagcagtggaaaataaggttaaataagtagagtagaccccaaatgatagctctttgatagcaagcagagaagttcagat

SEQ ID NO: 127612 - DNA, 80 bp, synthetic construct
  misc_feature 1..80: note = Artificially Synthesized Probe
  source 1..80: mol_type = other DNA
tattcagaaggtattcaagaaactaaataggactggataactgactggataaagcatagaaccataatggtcagaggtga

SEQ ID NO: 127613 - DNA, 80 bp, synthetic construct; identical to SEQ ID NO: 40906
  misc_feature 1..80: note = Artificially Synthesized Probe
  source 1..80: mol_type = other DNA

SEQ ID NO: 127614 - DNA, 80 bp, synthetic construct
  misc_feature 1..80: note = Artificially Synthesized Probe
  source 1..80: mol_type = other DNA
aaggtgggaaagtggcgtctgatggaactagaagtgttttaagtagaagatctgtaagagcaatttcttattgatactct

SEQ ID NO: 127615 - DNA, 80 bp, synthetic construct; identical to SEQ ID NO: 40804
  misc_feature 1..80: note = Artificially Synthesized Probe
  source 1..80: mol_type = other DNA

SEQ ID NO: 127616 - DNA, 80 bp, synthetic construct
  misc_feature 1..80: note = Artificially Synthesized Probe
  source 1..80: mol_type = other DNA
acatatgtacaaatgcatttaatacaggcaaggtggtgagaaactcaataagagaggctcaggcaacatcctactttcat

SEQ ID NO: 127617 - DNA, 80 bp, synthetic construct; identical to SEQ ID NO: 40907
  misc_feature 1..80: note = Artificially Synthesized Probe
  source 1..80: mol_type = other DNA

SEQ ID NO: 127618 - DNA, 80 bp, synthetic construct
  misc_feature 1..80: note = Artificially Synthesized Probe
  source 1..80: mol_type = other DNA
gagacaaccatcctgctgaaacagaattggtacctggcagtcagcatcactaagacaagcttgaaacatttgctggcaac

SEQ ID NO: 127619 - DNA, 80 bp, synthetic construct
  misc_feature 1..80: note = Artificially Synthesized Probe
  source 1..80: mol_type = other DNA
tgtcaggcttcttattccatcccgagagtgttatccttttctgtatgacccaagatggctcactgccaccatgttctcat

SEQ ID NO: 127620 - DNA, 80 bp, synthetic construct
  misc_feature 1..80: note = Artificially Synthesized Probe
  source 1..80: mol_type = other DNA
gttattgttctgggtgactataaagtagaatttctctaaatatagaagaaggggaaatattgggggacaatcagcagcat

SEQ ID NO: 127621 - DNA, 80 bp, synthetic construct; identical to SEQ ID NO: 40908
  misc_feature 1..80: note = Artificially Synthesized Probe
  source 1..80: mol_type = other DNA

SEQ ID NO: 127622 - DNA, 80 bp, synthetic construct
  misc_feature 1..80: note = Artificially Synthesized Probe
  source 1..80: mol_type = other DNA
aacctggaaaagataggggccagaagattaaagaggtctatgaatgccaggcgacagggttcgggctttattctgtaagc

SEQ ID NO: 127623 - DNA, 80 bp, synthetic construct
  misc_feature 1..80: note = Artificially Synthesized Probe
  source 1..80: mol_type = other DNA
aactgaggtcatacccttggaaatagacaagatggggccaagtgtgaggacaagaatcaatggaattcaaagaagctggg

SEQ ID NO: 127624 - DNA, 80 bp, synthetic construct
  misc_feature 1..80: note = Artificially Synthesized Probe
  source 1..80: mol_type = other DNA
cccggagctgtagcagctgttgggctagcaatgccatgaatttgtcttcctgtactgccaggagagcagctgccagcagc

SEQ ID NO: 127625 - DNA, 80 bp, synthetic construct
  misc_feature 1..80: note = Artificially Synthesized Probe
  source 1..80: mol_type = other DNA
cattctttaaacacatagactactagctaacatttgctgtctgttggatgtttaccacttactaagcattatgctaaata

SEQ ID NO: 127626 - DNA, 80 bp, synthetic construct
  misc_feature 1..80: note = Artificially Synthesized Probe
  source 1..80: mol_type = other DNA
gtattttcttacagttctaagtgattgcatttagggatggacgctgctgaactgcgttcttcatcttttggacacctcct

SEQ ID NO: 127627 - DNA, 80 bp, synthetic construct; identical to SEQ ID NO: 40909
  misc_feature 1..80: note = Artificially Synthesized Probe
  source 1..80: mol_type = other DNA

SEQ ID NO: 127628 - DNA, 80 bp, synthetic construct
  misc_feature 1..80: note = Artificially Synthesized Probe
  source 1..80: mol_type = other DNA
ctttggctccttgaagagcataaatgtattcctatttgttgctgagcctttgattgtctcttttaagtggaatctgtgtt

SEQ ID NO: 127629 - DNA, 80 bp, synthetic construct
  misc_feature 1..80: note = Artificially Synthesized Probe
  source 1..80: mol_type = other DNA
gagtttttagagcaatacttctacatttctgtcctgctgtgttccttgcagagaccttctgctattttataacccactgt

SEQ ID NO: 127630 - DNA, 80 bp, synthetic construct
  misc_feature 1..80: note = Artificially Synthesized Probe
  source 1..80: mol_type = other DNA
taaattcaaatacaagaatacaaatcttcaacataaggctatatgtagtaagtactaagtatatgctgcagaagagatga

SEQ ID NO: 127631 - DNA, 80 bp, synthetic construct; identical to SEQ ID NO: 40910
  misc_feature 1..80: note = Artificially Synthesized Probe
  source 1..80: mol_type = other DNA

SEQ ID NO: 127632 - DNA, 80 bp, synthetic construct
  misc_feature 1..80: note = Artificially Synthesized Probe
  source 1..80: mol_type = other DNA
aggaaaccagttgctgcagtagatcataaggatctaaattaggttgggatggtaggaatgaaaagaaggggaatttatcc

SEQ ID NO: 127633 - DNA, 80 bp, synthetic construct
  misc_feature 1..80: note = Artificially Synthesized Probe
  source 1..80: mol_type = other DNA
aatctacaggaattgctgactgatgggattcaggtttcaagtgagcttggaagccataaaagaaagaggtctgtaaagtg

SEQ ID NO: 127634 - DNA, 80 bp, synthetic construct
  misc_feature 1..80: note = Artificially Synthesized Probe
  source 1..80: mol_type = other DNA
ttagatggagtttcgctcttgttgcccaggctggagtgcaatggcacgatctcagctcactgcatcctctgcctcccagg

SEQ ID NO: 127635 - DNA, 80 bp, synthetic construct
  misc_feature 1..80: note = Artificially Synthesized Probe
  source 1..80: mol_type = other DNA
agctggtgaataatggaataggaaccttggttgtcgccagagtctaagttctacgtgttgctcatgaaatgccccttttt

SEQ ID NO: 127636 - DNA, 80 bp, synthetic construct; identical to SEQ ID NO: 40911
  misc_feature 1..80: note = Artificially Synthesized Probe
  source 1..80: mol_type = other DNA

SEQ ID NO: 127637 - DNA, 80 bp, synthetic construct
  misc_feature 1..80: note = Artificially Synthesized Probe
  source 1..80: mol_type = other DNA
taaagagattttttggctgttggtagagatttgcacacgtgcacagaggggatggttgaaactgtggaaatatttgtgat

SEQ ID NO: 127638 - DNA, 80 bp, synthetic construct
  misc_feature 1..80: note = Artificially Synthesized Probe
  source 1..80: mol_type = other DNA
tacattttgggaacctaattatgtatcaggaattgggtttagtactggagatagagaagaataagacaatctcctatttt

SEQ ID NO: 127639 - DNA, 80 bp, synthetic construct
  misc_feature 1..80: note = Artificially Synthesized Probe
  source 1..80: mol_type = other DNA
agtgggaggttagttacacaattaattaaagaaaaattattgtagagtctgtgttctcggcttcaggcccagtatttgaa

SEQ ID NO: 127640 - DNA, 80 bp, synthetic construct; identical to SEQ ID NO: 40912
  misc_feature 1..80: note = Artificially Synthesized Probe
  source 1..80: mol_type = other DNA

SEQ ID NO: 127641 - DNA, 80 bp, synthetic construct
  misc_feature 1..80: note = Artificially Synthesized Probe
  source 1..80: mol_type = other DNA
tggcttcccttctccatggctcaagatgcctttgttcagaaattaacagaaggttctttggtgtgttttgcatgggccca

SEQ ID NO: 127642 - DNA, 80 bp, synthetic construct
  misc_feature 1..80: note = Artificially Synthesized Probe
  source 1..80: mol_type = other DNA
taaaagttctttgggaagctttgtgactttgtgtgggaaaaaccagagctttgagccagaaaaacttgggtctgaatctt

SEQ ID NO: 127643 - DNA, 80 bp, synthetic construct; identical to SEQ ID NO: 40913
  misc_feature 1..80: note = Artificially Synthesized Probe
  source 1..80: mol_type = other DNA

SEQ ID NO: 127644 - DNA, 80 bp, synthetic construct
  misc_feature 1..80: note = Artificially Synthesized Probe
  source 1..80: mol_type = other DNA
gttgttatgctggttaagtgaattaataatatgtgaaacacttaggacagcttggcacatagtaaatgtaaatagtagca

SEQ ID NO: 127645 - DNA, 80 bp, synthetic construct
  misc_feature 1..80: note = Artificially Synthesized Probe
  source 1..80: mol_type = other DNA
tcatgaatgacaaattcatcccctaccctgatttttatggtatagctacattgggcaggacataggcaattatgtgactc

SEQ ID NO: 127646 - DNA, 80 bp, synthetic construct
  misc_feature 1..80: note = Artificially Synthesized Probe
  source 1..80: mol_type = other DNA
aatcccagctacttgggaggctgaggcaggagaatggctggaacccaggagttggaggttgctgtgagccgagatcgtgc

SEQ ID NO: 127647 - DNA, 80 bp, synthetic construct
  misc_feature 1..80: note = Artificially Synthesized Probe
  source 1..80: mol_type = other DNA
gaagacatttgtcatacaaccactctctgattttctcgtcctcttggagttaatagttagccctattgccaaattgctga

SEQ ID NO: 127648 - DNA, 80 bp, synthetic construct; identical to SEQ ID NO: 40914
  misc_feature 1..80: note = Artificially Synthesized Probe
  source 1..80: mol_type = other DNA

SEQ ID NO: 127649 - DNA, 80 bp, synthetic construct
  misc_feature 1..80: note = Artificially Synthesized Probe
  source 1..80: mol_type = other DNA
gatcacgttccttgacaacagtgctagtgtgcggggagcttttagttttccttttctctgctcctgtaagccccataata

SEQ ID NO: 127650 - DNA, 80 bp, synthetic construct
  misc_feature 1..80: note = Artificially Synthesized Probe
  source 1..80: mol_type = other DNA
ttcaaggcaaaagctgtgtcatcttattgggagctgactgtgttaagtgggagggtttacaagataagaagaaaagacag

SEQ ID NO: 127651 - DNA, 80 bp, synthetic construct
  misc_feature 1..80: note = Artificially Synthesized Probe
  source 1..80: mol_type = other DNA
agtcaccaggaaaagaagaaaggtggagtactcaggagggacttgtacttggttcagtcagggaaaggtaaaagatagta

SEQ ID NO: 127652 - DNA, 80 bp, synthetic construct; identical to SEQ ID NO: 40915
  misc_feature 1..80: note = Artificially Synthesized Probe
  source 1..80: mol_type = other DNA

SEQ ID NO: 127653 - DNA, 80 bp, synthetic construct
  misc_feature 1..80: note = Artificially Synthesized Probe
  source 1..80: mol_type = other DNA
aagcagtcgggacagggcatccttgcatgaaattcagacatccctccctggcagcctctgtggtaaagtagaggttgcag

SEQ ID NO: 127654 - DNA, 80 bp, synthetic construct
  misc_feature 1..80: note = Artificially Synthesized Probe
  source 1..80: mol_type = other DNA
tttctgcagtgtacaggtagaaatgatgcctcatggatttccttgaagacaaagcacaggctattgtgtggactctaaaa

SEQ ID NO: 127655 - DNA, 80 bp, synthetic construct
  misc_feature 1..80: note = Artificially Synthesized Probe
  source 1..80: mol_type = other DNA
aatgtgtgtcctttcttaccacagagtcctagatacatgtgcatacaaatacacagtgtattaggccattttttgcgatg

SEQ ID NO: 127656 - DNA, 80 bp, synthetic construct; identical to SEQ ID NO: 40916
  misc_feature 1..80: note = Artificially Synthesized Probe
  source 1..80: mol_type = other DNA

SEQ ID NO: 127657 - DNA, 80 bp, synthetic construct
  misc_feature 1..80: note = Artificially Synthesized Probe
  source 1..80: mol_type = other DNA
gaaaaacacacaggaagagcacacaggtgcacttcccttagtgccctctgaaggacgcaactcaggtttttatgatatac

SEQ ID NO: 127658 - DNA, 80 bp, synthetic construct; identical to SEQ ID NO: 40805
  misc_feature 1..80: note = Artificially Synthesized Probe
  source 1..80: mol_type = other DNA

SEQ ID NO: 127659 - DNA, 80 bp, synthetic construct
  misc_feature 1..80: note = Artificially Synthesized Probe
  source 1..80: mol_type = other DNA
cacgaggtcaggagatcgagaccatcctggctaatacggcgaaaccccatctctactaaaaatacaaaaaattatccggg

SEQ ID NO: 127660 - DNA, 80 bp, synthetic construct
  misc_feature 1..80: note = Artificially Synthesized Probe
  source 1..80: mol_type = other DNA
aacagaggtgagtgatgagaatatggcttatgaagacttcagtgctgcctcttcttgatccccatcccctagtccccaag

SEQ ID NO: 127661 - DNA, 80 bp, synthetic construct; identical to SEQ ID NO: 40917
  misc_feature 1..80: note = Artificially Synthesized Probe
  source 1..80: mol_type = other DNA

SEQ ID NO: 127662 - DNA, 80 bp, synthetic construct
  misc_feature 1..80: note = Artificially Synthesized Probe
  source 1..80: mol_type = other DNA
cgattctcgtgcctcagcctcccaagtacctgggattacaggtgcgcaccaccatgcctggctactttttatatttttag

SEQ ID NO: 127663 - DNA, 80 bp, synthetic construct
  misc_feature 1..80: note = Artificially Synthesized Probe
  source 1..80: mol_type = other DNA
tggctgttttgtccatttgtacgaatttggtgaacaccaatcctggtatgtgaggttcacttaatctttcagcaaacatt

SEQ ID NO: 127664 - DNA, 80 bp, synthetic construct
  misc_feature 1..80: note = Artificially Synthesized Probe
  source 1..80: mol_type = other DNA
atacatttgtatgtgctctgataaggcgtagacttccaggttgaggagacagaattgttgggttatgagtcaccctgtta

SEQ ID NO: 127665 - DNA, 80 bp, synthetic construct; identical to SEQ ID NO: 40918
  misc_feature 1..80: note = Artificially Synthesized Probe
  source 1..80: mol_type = other DNA

SEQ ID NO: 127666 - DNA, 80 bp, synthetic construct
  misc_feature 1..80: note = Artificially Synthesized Probe
  source 1..80: mol_type = other DNA
ttactacatttgctttatacttcacccttttcatacccaattctcacacacatattttgtttttctgaaacacttgagag

SEQ ID NO: 127667 - DNA, 80 bp, synthetic construct
  misc_feature 1..80: note = Artificially Synthesized Probe
  source 1..80: mol_type = other DNA
gttgttctaaaaatggccttttttggcaaacgaaagtccaagattatgcaattcattcaattgtcttatctctttacttt

SEQ ID NO: 127668 - DNA, 80 bp, synthetic construct
  misc_feature 1..80: note = Artificially Synthesized Probe
  source 1..80: mol_type = other DNA
tagattcaagtcacacacttttggcaggaataccataaaatgtaatgtcacgttcttctcagtgcatcatatcaggaagc

SEQ ID NO: 127669 - DNA, 80 bp, synthetic construct
  misc_feature 1..80: note = Artificially Synthesized Probe
  source 1..80: mol_type = other DNA
ctccttttctgtgatgtggagataatgagacctgccttgctattaattgcagttgtgttaagagtactggctcagtgtat

SEQ ID NO: 127670 - DNA, 80 bp, synthetic construct
  misc_feature 1..80: note = Artificially Synthesized Probe
  source 1..80: mol_type = other DNA
ccttcaactcttatactcactagttttagcatccattataatttcttgcttgaatcactttctattatgatggttaccaa

SEQ ID NO: 127671 - DNA, 80 bp, synthetic construct; identical to SEQ ID NO: 40919
  misc_feature 1..80: note = Artificially Synthesized Probe
  source 1..80: mol_type = other DNA

SEQ ID NO: 127672 - DNA, 80 bp, synthetic construct
  misc_feature 1..80: note = Artificially Synthesized Probe
  source 1..80: mol_type = other DNA
aaatatgctctttgtaactgaagtaccattatttatagtccctttcagcagacagaggtagtagatatatgtatgtacac

SEQ ID NO: 127673 - DNA, 80 bp, synthetic construct
  misc_feature 1..80: note = Artificially Synthesized Probe
  source 1..80: mol_type = other DNA
tgaacagtgagaaacctggttcctattatccataacacacattttcacttaattgctcagtcctagagtgtacagaaagt

SEQ ID NO: 127674 - DNA, 80 bp, synthetic construct
  misc_feature 1..80: note = Artificially Synthesized Probe
  source 1..80: mol_type = other DNA
ttagccgggcgtggtggcaggcgcctgtggtcccagctactggggaggctgaggcaggagaatggggtgaacccgggagg

SEQ ID NO: 127675 - DNA, 80 bp, synthetic construct; identical to SEQ ID NO: 40920
  misc_feature 1..80: note = Artificially Synthesized Probe
  source 1..80: mol_type = other DNA

SEQ ID NO: 127676 - DNA, 80 bp, synthetic construct
  misc_feature 1..80: note = Artificially Synthesized Probe
  source 1..80: mol_type = other DNA
aggctagggaatgagtgaaaagaaagcaaacactaggaagaagcttgctttacaacaactcactctctcaggaactaatc

SEQ ID NO: 127677 - DNA, 80 bp, synthetic construct
  misc_feature 1..80: note = Artificially Synthesized Probe
  source 1..80: mol_type = other DNA
caaaccatagcatccctcaacctccagaccttcaatgtagttatattatttgtttgaaatataatttggtttatttattt

SEQ ID NO: 127678 - DNA, 80 bp, synthetic construct
  misc_feature 1..80: note = Artificially Synthesized Probe
  source 1..80: mol_type = other DNA
agattaagtcagggctttagcagaagtcagtgatggggacataggccagacatgcactgagaacaaaccaaccattttcc

SEQ ID NO: 127679 - DNA, 80 bp, synthetic construct
  misc_feature 1..80: note = Artificially Synthesized Probe
  source 1..80: mol_type = other DNA
gctccgcgctcccgcttgcgtccctccagccccctgggcctcgtccggggccggatcttctcgggcaccgcctggtgcga

SEQ ID NO: 127680 - DNA, 80 bp, synthetic construct; identical to SEQ ID NO: 40921
  misc_feature 1..80: note = Artificially Synthesized Probe
  source 1..80: mol_type = other DNA

SEQ ID NO: 127681 - DNA, 80 bp, synthetic construct
  misc_feature 1..80: note = Artificially Synthesized Probe
  source 1..80: mol_type = other DNA
gaaatagtttaattgtatcttgacactgtgtcttgcacaatgtcaccagagtgatttttaaaaactcattttttttttgc

SEQ ID NO: 127682 - DNA, 80 bp, synthetic construct
  misc_feature 1..80: note = Artificially Synthesized Probe
  source 1..80: mol_type = other DNA
tgaaatccttgaaatttctcctcctggactttcttcagttacatgctttggcctctctaatagctcttttgcatcaattc

SEQ ID NO: 127683 - DNA, 80 bp, synthetic construct
  misc_feature 1..80: note = Artificially Synthesized Probe
  source 1..80: mol_type = other DNA
tgaatcttgtgtacagcttaagttcaaaaacagatgggcccaaagtatcctagatgctgtgccaatttccactgcatgaa

SEQ ID NO: 127684 - DNA, 80 bp, synthetic construct; identical to SEQ ID NO: 40922
  misc_feature 1..80: note = Artificially Synthesized Probe
  source 1..80: mol_type = other DNA

SEQ ID NO: 127685 - DNA, 80 bp, synthetic construct
  misc_feature 1..80: note = Artificially Synthesized Probe
  source 1..80: mol_type = other DNA
aaggctggggcctctgtgtctgtgggtacatttgtaggtcaaataattcaccagcttgcaaataaagtagatattcttct

SEQ ID NO: 127686 - DNA, 80 bp, synthetic construct
  misc_feature 1..80: note = Artificially Synthesized Probe
  source 1..80: mol_type = other DNA
caactgctttctcccagtgttctgtaggacattgtttagctttggcattcctagtcaccctaaaaataagaggaaaacaa

SEQ ID NO: 127687 - DNA, 80 bp, synthetic construct
  misc_feature 1..80: note = Artificially Synthesized Probe
  source 1..80: mol_type = other DNA
acattgtaggaactgtcttcaagagaagcccttgagggataggcttctagaagttcaggtacatgctggatttatctatg

SEQ ID NO: 127688 - DNA, 80 bp, synthetic construct; identical to SEQ ID NO: 40923
  misc_feature 1..80: note = Artificially Synthesized Probe
  source 1..80: mol_type = other DNA

SEQ ID NO: 127689 - DNA, 80 bp, synthetic construct
  misc_feature 1..80: note = Artificially Synthesized Probe
  source 1..80: mol_type = other DNA
tggagtgtaatggcgccatcttggctcactgcaacctctgcctcctgagctcaagtgatcctcccacctcagcctcccga

SEQ ID NO: 127690 - DNA, 80 bp, synthetic construct
  misc_feature 1..80: note = Artificially Synthesized Probe
  source 1..80: mol_type = other DNA
cactgcatccaggctacttttttctgttattctcttctactgttgcctacttaattttttgagaaatgctagttggtgac

SEQ ID NO: 127691 - DNA, 80 bp, synthetic construct
  misc_feature 1..80: note = Artificially Synthesized Probe
  source 1..80: mol_type = other DNA
ttgaaaggcagattcctgggcatcagtccacccctagtaagttgtaatctctggcagacgagcataagaatccacatttt

SEQ ID NO: 127692 - DNA, 80 bp, synthetic construct; identical to SEQ ID NO: 40924
  misc_feature 1..80: note = Artificially Synthesized Probe
  source 1..80: mol_type = other DNA

SEQ ID NO: 127693 - DNA, 80 bp, synthetic construct
  misc_feature 1..80: note = Artificially Synthesized Probe
  source 1..80: mol_type = other DNA
tcctcttccttgaacctgtaaaacttattcatcctttaaagcagctcagatgccacccctccaggaagccttccctgctc

SEQ ID NO: 127694 - DNA, 80 bp, synthetic construct
  misc_feature 1..80: note = Artificially Synthesized Probe
  source 1..80: mol_type = other DNA
gtgggattcaaaactgcttttcctattcacttgcctttcatgtgtaaccacatgcagtgtgtcaacatgctttcaggcgc

SEQ ID NO: 127695 - DNA, 80 bp, synthetic construct
  misc_feature 1..80: note = Artificially Synthesized Probe
  source 1..80: mol_type = other DNA
caccagccctttgagatgctaagggcttttgaatgaaatgtaataaccaccacaatgaaataagaaaacggttactagtc

SEQ ID NO: 127696 - DNA, 80 bp, synthetic construct
  misc_feature 1..80: note = Artificially Synthesized Probe
  source 1..80: mol_type = other DNA
ctctggccttttctctttgcacatgattctttcgtttaaagtctcagctgcattaggcacagaagattcactgagtttgg

SEQ ID NO: 127697 - DNA, 80 bp, synthetic construct; identical to SEQ ID NO: 40925
  misc_feature 1..80: note = Artificially Synthesized Probe
  source 1..80: mol_type = other DNA

SEQ ID NO: 127698 - DNA, 80 bp, synthetic construct
  misc_feature 1..80: note = Artificially Synthesized Probe
  source 1..80: mol_type = other DNA
gcaggagaatcgcttgaacccaggaggcggaggttgcggtgagccgagatcacaccattgcactctagcctggacaacaa

SEQ ID NO: 127699 - DNA, 80 bp, synthetic construct
  misc_feature 1..80: note = Artificially Synthesized Probe
  source 1..80: mol_type = other DNA
cagacatgattctagtcactttgttttgtgggtatgaattcattgtgtgggctgttgagtaatgatagttgtcataatta

SEQ ID NO: 127700 - DNA, 80 bp, synthetic construct
  misc_feature 1..80: note = Artificially Synthesized Probe
  source 1..80: mol_type = other DNA
tttatttatttatttttttaaaagataaacagttattcatttttgtttaagacatcaggagtactaataaagaaccaact

SEQ ID NO: 127701 - DNA, 80 bp, synthetic construct; identical to SEQ ID NO: 40926
  misc_feature 1..80: note = Artificially Synthesized Probe
  source 1..80: mol_type = other DNA

SEQ ID NO: 127702 - DNA, 80 bp, synthetic construct
  misc_feature 1..80: note = Artificially Synthesized Probe
  source 1..80: mol_type = other DNA
ggctgcatagtattccatggtgtatatgtgccacattttcttaatccagtctatcattgttggacatttgggttggttcc

SEQ ID NO: 127703 - DNA, 80 bp, synthetic construct
  misc_feature 1..80: note = Artificially Synthesized Probe
  source 1..80: mol_type = other DNA
ccacaatggttgaactagtttacagtcccaccaacagtgtaaaagtgttcctatttctccacatcctctccagcacctgt

SEQ ID NO: 127704 - DNA, 80 bp, synthetic construct; identical to SEQ ID NO: 40806
  misc_feature 1..80: note = Artificially Synthesized Probe
  source 1..80: mol_type = other DNA

SEQ ID NO: 127705 - DNA, 80 bp, synthetic construct
  misc_feature 1..80: note = Artificially Synthesized Probe
  source 1..80: mol_type = other DNA
cttcgcccactttttgatggggttgtttgtttttttcttgtaaatttgtttgagttcattgcagattctggatattagcc

SEQ ID NO: 127706 - DNA, 80 bp, synthetic construct; identical to SEQ ID NO: 40927
  misc_feature 1..80: note = Artificially Synthesized Probe
  source 1..80: mol_type = other DNA

SEQ ID NO: 127707 - DNA, 80 bp, synthetic construct
  misc_feature 1..80: note = Artificially Synthesized Probe
  source 1..80: mol_type = other DNA
atagttgtaggtatgcggcgttatttctgagggctctgttctgttccattgatctatatctctgttttggtaccagtacc

SEQ ID NO: 127708 - DNA, 80 bp, synthetic construct
  misc_feature 1..80: note = Artificially Synthesized Probe
  source 1..80: mol_type = other DNA
cattggtagcttgatggggatggcattgaatctgtaaattaccttgggcagtatggccattttcacgatattgattcttc

SEQ ID NO: 127709 - DNA, 80 bp, synthetic construct
  misc_feature 1..80: note = Artificially Synthesized Probe
  source 1..80: mol_type = other DNA
catgatttggctctctgtctgttgttggtgtataagaatgcttgtgatttttgtacattgattttgtatcctgagacttt

SEQ ID NO: 127710 - DNA, 80 bp, synthetic construct
  misc_feature 1..80: note = Artificially Synthesized Probe
  source 1..80: mol_type = other DNA
tccaacactatgttgaataggagtggtgagagagggcatccctgtcttgtgccagttttcaaagggaatgcttccagttt

SEQ ID NO: 127711 - DNA, 80 bp, synthetic construct
  misc_feature 1..80: note = Artificially Synthesized Probe
  source 1..80: mol_type = other DNA
tttttgtctttggctctgtttatatgctggattacatttattgatttgcgtatattgaaccagccttgcatcccagggat

SEQ ID NO: 127712 - DNA, 80 bp, synthetic construct
  misc_feature 1..80: note = Artificially Synthesized Probe
  source 1..80: mol_type = other DNA
ctggcctcataaaatgagttagggaggattccctctttttctattgattggaatagtttcagaaggaatggtaccagttc

SEQ ID NO: 127713 - DNA, 80 bp, synthetic construct
  misc_feature 1..80: note = Artificially Synthesized Probe
  source 1..80: mol_type = other DNA
aggaatgtatccatttcttctagattttctagtttatttgcgtagaggtgtttgtagtattctctgatggtagtttgtat

SEQ ID NO: 127714 - DNA, 80 bp, synthetic construct
  misc_feature 1..80: note = Artificially Synthesized Probe
  source 1..80: mol_type = other DNA
ttgtgtctctatttccttcagttctgctctgattttagttatttcttgccttctgctagcttttgaatgtgtttgctctt

SEQ ID NO: 127715 - DNA, 80 bp, synthetic construct
  misc_feature 1..80: note = Artificially Synthesized Probe
  source 1..80: mol_type = other DNA
tatatttgcattatacaaggacaagtacaaactacatagccttatggatcctcccccacgggggtgtgtttctccttaaa

SEQ ID NO: 127716 - DNA, 80 bp, synthetic construct
  misc_feature 1..80: note = Artificially Synthesized Probe
  source 1..80: mol_type = other DNA
gaacatctttatttctgccttcattttgttatgtacccagtagtcattcaggagcaggttgttcagtttccatgtagttg

SEQ ID NO: 127717 - DNA, 80 bp, synthetic construct
  misc_feature 1..80: note = Artificially Synthesized Probe
  source 1..80: mol_type = other DNA
aaatgtatattctgttgatttggggtggagagttctgtagatgtctattaggtccgcttggtgcagagctgagttcaatt

SEQ ID NO: 127718 - DNA, 80 bp, synthetic construct
  misc_feature 1..80: note = Artificially Synthesized Probe
  source 1..80: mol_type = other DNA
atttaggatagttagctcctcatgttgaattgatccctttaccattatgtaacggccttctttgtctcttttgatctttg

SEQ ID NO: 127719 - DNA, 80 bp, synthetic construct
  misc_feature 1..80: note = Artificially Synthesized Probe
  source 1..80: mol_type = other DNA
actctttatccaacttgccagtctgtgtcttttaagtggagaatttagtccatttacatttaaagttaatattgttatgt

SEQ ID NO: 127720 - DNA, 80 bp, synthetic construct
  misc_feature 1..80: note = Artificially Synthesized Probe
  source 1..80: mol_type = other DNA
tagggcaggcctggtggtgacaaaatctctcagcatttgcttgtctgtaaagtattttatttctccttcacttatgaagc

SEQ ID NO: 127721 - DNA, 80 bp, synthetic construct; identical to SEQ ID NO: 40930
  misc_feature 1..80: note = Artificially Synthesized Probe
  source 1..80: mol_type = other DNA

SEQ ID NO: 127722 - DNA, 80 bp, synthetic construct
  misc_feature 1..80: note = Artificially Synthesized Probe
  source 1..80: mol_type = other DNA
cacatagtcccatatttcttggaggctttgctcatttctttttattcttttttctctaaacttcccttctcgcttccttt

SEQ ID NO: 127723 - DNA, 80 bp, synthetic construct
  misc_feature 1..80: note = Artificially Synthesized Probe
  source 1..80: mol_type = other DNA
taaatttttttcaaagttttcaacttctttgcctttggtttgaatgtgctcctgtagctcagagtaatttgatcgtctga

SEQ ID NO: 127724 - DNA, 80 bp, synthetic construct
  misc_feature 1..80: note = Artificially Synthesized Probe
  source 1..80: mol_type = other DNA
tggtctttgatgatggtgatgtacagatgggttttcggtgtggatgtcctttctgtttgttagttttccttctaacagac

SEQ ID NO: 127725 - DNA, 80 bp, synthetic construct
  misc_feature 1..80: note = Artificially Synthesized Probe
  source 1..80: mol_type = other DNA
gagaaccactgctctcttcaaagctcagatggaaatgcagaaatcacccgtcttctgcgtcgctcacgctgggagctgta

SEQ ID NO: 127726 - DNA, 80 bp, synthetic construct
  misc_feature 1..80: note = Artificially Synthesized Probe
  source 1..80: mol_type = other DNA
ggctttctgtaattgaagcaaaaacacattctacgtttgtccaggatttattcaccattttaatcaggcactaaaagtct

SEQ ID NO: 127727 - DNA, 80 bp, synthetic construct; identical to SEQ ID NO: 40931
  misc_feature 1..80: note = Artificially Synthesized Probe
  source 1..80: mol_type = other DNA

SEQ ID NO: 127728 - DNA, 80 bp, synthetic construct
  misc_feature 1..80: note = Artificially Synthesized Probe
  source 1..80: mol_type = other DNA
cacgtgtcaccatacctggcttccatttactttttaaaacaggtgaagagattttgagacccagaatgcatttgtgactt

SEQ ID NO: 127729 - DNA, 80 bp, synthetic construct
  misc_feature 1..80: note = Artificially Synthesized Probe
  source 1..80: mol_type = other DNA
aaggacctgaacttgctaatttgatctactaacctggaaattgactagggcttctcttataccactcagccctttaaagt

SEQ ID NO: 127730 - DNA, 80 bp, synthetic construct
  misc_feature 1..80: note = Artificially Synthesized Probe
  source 1..80: mol_type = other DNA
aactagtcattaaatgaatcatggtctttctgtcctcaacatttacaggattgctttggctctggcatctgttgttagtc

SEQ ID NO: 127731 - DNA, 80 bp, synthetic construct; identical to SEQ ID NO: 40932
  misc_feature 1..80: note = Artificially Synthesized Probe
  source 1..80: mol_type = other DNA

SEQ ID NO: 127732 - DNA, 80 bp, synthetic construct
  misc_feature 1..80: note = Artificially Synthesized Probe
  source 1..80: mol_type = other DNA
tttcttctcagtggcttattgctatttggcatactaaagtacaatttgctagccaggaggagtttctggctgtagatcaa

SEQ ID NO: 127733 - DNA, 80 bp, synthetic construct
  misc_feature 1..80: note = Artificially Synthesized Probe
  source 1..80: mol_type = other DNA
ctgcctcagtcatttcccaaggtttcatttattttaaaaatctgctaacacatctgtgtgtattttttttctctgtatgt

SEQ ID NO: 127734 - DNA, 80 bp, synthetic construct
  misc_feature 1..80: note = Artificially Synthesized Probe
  source 1..80: mol_type = other DNA
gctgagaaacgtataaattttatgttcctcggtcattgatcacacctttgttctgtcttttacccttgctatggtgtttt

SEQ ID NO: 127735 - DNA, 80 bp, synthetic construct; identical to SEQ ID NO: 40933
  misc_feature 1..80: note = Artificially Synthesized Probe
  source 1..80: mol_type = other DNA

SEQ ID NO: 127736 - DNA, 80 bp, synthetic construct
  misc_feature 1..80: note = Artificially Synthesized Probe
  source 1..80: mol_type = other DNA
aggaaagccatgtcttggatccaggaagtctgcaaacatgggagaagcaggtcagaaaaaagaatgttgatcctgttatt

SEQ ID NO: 127737 - DNA, 80 bp, synthetic construct
  misc_feature 1..80: note = Artificially Synthesized Probe
  source 1..80: mol_type = other DNA
ggcaagaaatgtggatggcagagattcaaatcttgtgtagacccccgtgtctggtcttatgggatccatagatctatctt

SEQ ID NO: 127738 - DNA, 80 bp, synthetic construct
  misc_feature 1..80: note = Artificially Synthesized Probe
  source 1..80: mol_type = other DNA
ggaacaagcaggaaaatggtcccttatgatttttcaagtcatttggtatgaaatagccttgaccttatttatacgttgtg

SEQ ID NO: 127739 - DNA, 80 bp, synthetic construct
  misc_feature 1..80: note = Artificially Synthesized Probe
  source 1..80: mol_type = other DNA
tgtctacgatagcttaaatttggggaccattcctagttctctgacctaacccacaagaaccttggtcctataatcattca

SEQ ID NO: 127740 - DNA, 80 bp, synthetic construct
  misc_feature 1..80: note = Artificially Synthesized Probe
  source 1..80: mol_type = other DNA
atggaactaatccagagccacaagaatcttattttcatacagtccttcccccaaacctgattataggggacaatttaggc

SEQ ID NO: 127741 - DNA, 80 bp, synthetic construct; identical to SEQ ID NO: 40934
  misc_feature 1..80: note = Artificially Synthesized Probe
  source 1..80: mol_type = other DNA

SEQ ID NO: 127742 - DNA, 80 bp, synthetic construct
  misc_feature 1..80: note = Artificially Synthesized Probe
  source 1..80: mol_type = other DNA
tttaccccctccttcttttaacaccttccccagcaaatccaatccatcctctggcttatctgggtcagcaagggtctgat

SEQ ID NO: 127743 - DNA, 80 bp, synthetic construct
  misc_feature 1..80: note = Artificially Synthesized Probe
  source 1..80: mol_type = other DNA
tcatttcattttaatcaaggtgccaggagggaatttaggttaaaaaatccaacctccttcttgtcacaagttccctgtcc

SEQ ID NO: 127744 - DNA, 80 bp, synthetic construct
  misc_feature 1..80: note = Artificially Synthesized Probe
  source 1..80: mol_type = other DNA
cttagatgtattgatagttgccatctctctatgcagattggcgggtttgataggaattctgagacaggggatgggagctt

SEQ ID NO: 127745 - DNA, 80 bp, synthetic construct; identical to SEQ ID NO: 40935
  misc_feature 1..80: note = Artificially Synthesized Probe
  source 1..80: mol_type = other DNA

SEQ ID NO: 127746 - DNA, 80 bp, synthetic construct
  misc_feature 1..80: note = Artificially Synthesized Probe
  source 1..80: mol_type = other DNA
atagttcttttgcatccatcatttcatttgatccacacaacagccctgagaggtgagcaacttagagactattggcccaa

SEQ ID NO: 127747 - DNA, 80 bp, synthetic construct
  misc_feature 1..80: note = Artificially Synthesized Probe
  source 1..80: mol_type = other DNA
tgaagatctttgaggagtgagatgtataccaatagggcacgtgtccattttatagatgagatgataaaaaccaaacagag

SEQ ID NO: 127748 - DNA, 80 bp, synthetic construct
  misc_feature 1..80: note = Artificially Synthesized Probe
  source 1..80: mol_type = other DNA
ataaatagtccaaggtgagggagaaaagctggtctaatgtcttcgaagctaatgattcagctatgcaggtttatctcttt

SEQ ID NO: 127749 - DNA, 80 bp, synthetic construct; identical to SEQ ID NO: 40807
  misc_feature 1..80: note = Artificially Synthesized Probe
  source 1..80: mol_type = other DNA

SEQ ID NO: 127750 - DNA, 80 bp, synthetic construct; identical to SEQ ID NO: 40936
  misc_feature 1..80: note = Artificially Synthesized Probe
  source 1..80: mol_type = other DNA

SEQ ID NO: 127751 - DNA, 80 bp, synthetic construct
  misc_feature 1..80: note = Artificially Synthesized Probe
  source 1..80: mol_type = other DNA
gcaaagcttctggagcaggaaaccactctagcagagccttaatatgctccctatgaaatcacgtctcgttgccgtgctta

SEQ ID NO: 127752 - DNA, 80 bp, synthetic construct
  misc_feature 1..80: note = Artificially Synthesized Probe
  source 1..80: mol_type = other DNA
aatatgtctgagaaagcttacagactcaaaggaccagaaatattgtgtgaaaagctgcattaatagtaggagaggctgag

SEQ ID NO: 127753 - DNA, 80 bp, synthetic construct
  misc_feature 1..80: note = Artificially Synthesized Probe
  source 1..80: mol_type = other DNA
acttattatactgtcagtcaatgagaacaatgaggctgttttcatgaactaaaaatattgagatcaggattatgaatcag

SEQ ID NO: 127754 - DNA, 80 bp, synthetic construct; identical to SEQ ID NO: 40937
  misc_feature 1..80: note = Artificially Synthesized Probe
  source 1..80: mol_type = other DNA

SEQ ID NO: 127755 - DNA, 80 bp, synthetic construct
  misc_feature 1..80: note = Artificially Synthesized Probe
  source 1..80: mol_type = other DNA
agttataggctcacctgtacagctttattggaggaggcacacacaggcttgaatgaaaaaataaacctatgcaaagctac

SEQ ID NO: 127756 - DNA, 80 bp, synthetic construct
  misc_feature 1..80: note = Artificially Synthesized Probe
  source 1..80: mol_type = other DNA
gttgctcatttgaatggatgtgtcaccgttttttaaattgaaatgtgattttctgctaattccagagtatctcagaacac

SEQ ID NO: 127757 - DNA, 80 bp, synthetic construct
  misc_feature 1..80: note = Artificially Synthesized Probe
  source 1..80: mol_type = other DNA
ccaggctggagtgcagtggcatgatctcagctcactgcaacctctgcctccagggttcaagtgattctcctgcctcagcc

SEQ ID NO: 127758 - DNA, 80 bp, synthetic construct; identical to SEQ ID NO: 40938
  misc_feature 1..80: note = Artificially Synthesized Probe
  source 1..80: mol_type = other DNA

SEQ ID NO: 127759 - DNA, 80 bp, synthetic construct
  misc_feature 1..80: note = Artificially Synthesized Probe
  source 1..80: mol_type = other DNA
tgtttgtaccaccattaaagttctactttactataggtctttctttgtctcccttactatattgcagcatttgcactttt

SEQ ID NO: 127760 - DNA, 80 bp, synthetic construct
  misc_feature 1..80: note = Artificially Synthesized Probe
  source 1..80: mol_type = other DNA
gattgaaaccagttgtcaatgtaaagtctcatgagatctgcccctttaaaaagcatgcttactgaggacatgggtatctt

SEQ ID NO: 127761 - DNA, 80 bp, synthetic construct
  misc_feature 1..80: note = Artificially Synthesized Probe
  source 1..80: mol_type = other DNA
ccatgacaagccatgccataagctttaagaaatatgtcttgtttctgaagagttggctgttgccaactcttctccaaaca

SEQ ID NO: 127762 - DNA, 80 bp, synthetic construct; identical to SEQ ID NO: 40939
  misc_feature 1..80: note = Artificially Synthesized Probe
  source 1..80: mol_type = other DNA

SEQ ID NO: 127763 - DNA, 80 bp, synthetic construct
  misc_feature 1..80: note = Artificially Synthesized Probe
  source 1..80: mol_type = other DNA
tttggactctaatattaattggtttgaagtaacttcttggttgggttagacagatatttgatttgtctgatgtattctga

SEQ ID NO: 127764 - DNA, 80 bp, synthetic construct
  misc_feature 1..80: note = Artificially Synthesized Probe
  source 1..80: mol_type = other DNA
tttctttgtagtaggagtctgactggagcagggaagagaggaaagggggaaagaaacagatagttattatttgcagtgaa

SEQ ID NO: 127765 - DNA, 80 bp, synthetic construct
  misc_feature 1..80: note = Artificially Synthesized Probe
  source 1..80: mol_type = other DNA
ttaagtcaaacaacatgtataaagggcccagatatgtgtacagtatcccttgataaatagtactgcaaattattcctact

SEQ ID NO: 127766 - DNA, 80 bp, synthetic construct
  misc_feature 1..80: note = Artificially Synthesized Probe
  source 1..80: mol_type = other DNA
attttgggaggccaaggtgggtggatcacttgaggtcgggagttcaagatcagcatggtcaacatggtgaaaacccatct

SEQ ID NO: 127767 - DNA, 80 bp, synthetic construct; identical to SEQ ID NO: 40940
  misc_feature 1..80: note = Artificially Synthesized Probe
  source 1..80: mol_type = other DNA

SEQ ID NO: 127768 - DNA, 80 bp, synthetic construct
  misc_feature 1..80: note = Artificially Synthesized Probe
  source 1..80: mol_type = other DNA
atggatacatttgtggggattttgtagtgctgtagtgatttttgtctctagacaaaatctctaactttggtttctaaccc

SEQ ID NO: 127769 - DNA, 80 bp, synthetic construct
  misc_feature 1..80: note = Artificially Synthesized Probe
  source 1..80: mol_type = other DNA
cttcagttttctaatcagttgaagggggataatggtagttctttccttaaaatgaaatgatagagcttagatgagatgag

SEQ ID NO: 127770 - DNA, 80 bp, synthetic construct; identical to SEQ ID NO: 40941
  misc_feature 1..80: note = Artificially Synthesized Probe
  source 1..80: mol_type = other DNA

SEQ ID NO: 127771 - DNA, 80 bp, synthetic construct
  misc_feature 1..80: note = Artificially Synthesized Probe
  source 1..80: mol_type = other DNA
taatatcattcctcgatttgtacaagtcagcgaggactcaggaagactctttaaaaaggtacagagatatttctagtcac

SEQ ID NO: 127772 - DNA, 80 bp, synthetic construct
  misc_feature 1..80: note = Artificially Synthesized Probe
  source 1..80: mol_type = other DNA
atttcttttgggccaatacagtactttgttacgcgttgagctacaggattctacacaggcagaatgatcctaagggaaag

SEQ ID NO: 127773 - DNA, 80 bp, synthetic construct
  misc_feature 1..80: note = Artificially Synthesized Probe
  source 1..80: mol_type = other DNA
gttggaaagaaaaaataaaagaaagaatatcttattggcccacttcataggctttccactagtcattccctaccacatac

SEQ ID NO: 127774 - DNA, 80 bp, synthetic construct
  misc_feature 1..80: note = Artificially Synthesized Probe
  source 1..80: mol_type = other DNA
ttcttaaagtgatttgtgaagctgttgagcttaaggggccaacactgtcattttatgttttcctattctagttcatttag

SEQ ID NO: 127775 - DNA, 80 bp, synthetic construct
  misc_feature 1..80: note = Artificially Synthesized Probe
  source 1..80: mol_type = other DNA
taggttgaacaatttgacaaaggaaaactcaaaataatcatgataatcttaaggagccaattcaccttacctgtcaacga

SEQ ID NO: 127776 - DNA, 80 bp, synthetic construct; identical to SEQ ID NO: 40942
  misc_feature 1..80: note = Artificially Synthesized Probe
  source 1..80: mol_type = other DNA

SEQ ID NO: 127777 - DNA, 80 bp, synthetic construct
  misc_feature 1..80: note = Artificially Synthesized Probe
  source 1..80: mol_type = other DNA
ttttctgtaattaccagcctgatcaaataactgatttggaatcttccatctacctaattgcatccgtgaaggtgctttcc

SEQ ID NO: 127778 - DNA, 80 bp, synthetic construct
  misc_feature 1..80: note = Artificially Synthesized Probe
  source 1..80: mol_type = other DNA
ctcctccatggtttccagcatcagcttcagcttggttgtcattaatttgaattattctgcaatacttggtgatgcatgtg

SEQ ID NO: 127779 - DNA, 80 bp, synthetic construct
  misc_feature 1..80: note = Artificially Synthesized Probe
  source 1..80: mol_type = other DNA
acctagctagacttcacccagtctctcagctccctttttaccaagccttagaaggttagagaaaaaccaggctagataat

SEQ ID NO: 127780 - DNA, 80 bp, synthetic construct; identical to SEQ ID NO: 40943
  misc_feature 1..80: note = Artificially Synthesized Probe
  source 1..80: mol_type = other DNA

SEQ ID NO: 127781 - DNA, 80 bp, synthetic construct
  misc_feature 1..80: note = Artificially Synthesized Probe
  source 1..80: mol_type = other DNA
ccctcatattcccttctagtcatctccccaccctaaatccccaaggataacaactgtcttgacttttaacagcagagatt

SEQ ID NO: 127782 - DNA, 80 bp, synthetic construct
  misc_feature 1..80: note = Artificially Synthesized Probe
  source 1..80: mol_type = other DNA
taaattgtagttgattagagacatgcccagggttgttgaatggccaatgattactatcccacagggtgaataatctcttt

SEQ ID NO: 127783 - DNA, 80 bp, synthetic construct
  misc_feature 1..80: note = Artificially Synthesized Probe
  source 1..80: mol_type = other DNA
gatgatggttagcgtttatcaagtgcttcttatgtctcagctctgttttaggtgctttacatatatgaactcatgaattt

SEQ ID NO: 127784 - DNA, 80 bp, synthetic construct; identical to SEQ ID NO: 40944
  misc_feature 1..80: note = Artificially Synthesized Probe
  source 1..80: mol_type = other DNA

SEQ ID NO: 127785 - DNA, 80 bp, synthetic construct
  misc_feature 1..80: note = Artificially Synthesized Probe
  source 1..80: mol_type = other DNA
gtttgaggatgcagtgagctgtaatcatgccactgcactccagcctgggcaacagagagagaccctgatggtttgaggat

SEQ ID NO: 127786 - DNA, 80 bp, synthetic construct
  misc_feature 1..80: note = Artificially Synthesized Probe
  source 1..80: mol_type = other DNA
agtaatgggcaaacaaacattcttcataccacaccccagttttttaacctcttttgtttagagtgtcgttgcacatgaat

SEQ ID NO: 127787 - DNA, 80 bp, synthetic construct
  misc_feature 1..80: note = Artificially Synthesized Probe
  source 1..80: mol_type = other DNA
ctctgagaccttggacaatgacttctttctgtgcctcagttccctaaactttaaaaaaagagtgtggtctatgtgatctc

SEQ ID NO: 127788 - DNA, 80 bp, synthetic construct
  misc_feature 1..80: note = Artificially Synthesized Probe
  source 1..80: mol_type = other DNA
cacagataaggacaaacaaaagtggatataggtgtggagagggctagcttaagcaaatgaagaccagatttcttgaagaa

SEQ ID NO: 127789 - DNA, 80 bp, synthetic construct; identical to SEQ ID NO: 40945
  misc_feature 1..80: note = Artificially Synthesized Probe
  source 1..80: mol_type = other DNA

SEQ ID NO: 127790 - DNA, 80 bp, synthetic construct
  misc_feature 1..80: note = Artificially Synthesized Probe
  source 1..80: mol_type = other DNA
taatccttaccataattttataaagtagttactattgtcatcatcgctgttttatgaaggaagaaactatggcttaaaga

SEQ ID NO: 127791 - DNA, 80 bp, synthetic construct
  misc_feature 1..80: note = Artificially Synthesized Probe
  source 1..80: mol_type = other DNA
catggtggtacacacctgtaggcctagctacccaggaggctgagacgggaaggatcacttgagcccagaaatttgaggct

SEQ ID NO: 127792 - DNA, 80 bp, synthetic construct
  misc_feature 1..80: note = Artificially Synthesized Probe
  source 1..80: mol_type = other DNA
gcagatcacctgaggtcaggagttcaagaccagcttggccaacatggtgaaaccccgtctctacaaaaacacaaaaatta

SEQ ID NO: 127793 - DNA, 80 bp, synthetic construct
  misc_feature 1..80: note = Artificially Synthesized Probe
  source 1..80: mol_type = other DNA
gccgccccccggttttcccggctccgaccctatcctctaacccgtttcctgcttcagctgaccacattgttttcctggat

SEQ ID NO: 127794 - DNA, 80 bp, synthetic construct; identical to SEQ ID NO: 40946
  misc_feature 1..80: note = Artificially Synthesized Probe
  source 1..80: mol_type = other DNA

SEQ ID NO: 127795 - DNA, 80 bp, synthetic construct; identical to SEQ ID NO: 40808
  misc_feature 1..80: note = Artificially Synthesized Probe
  source 1..80: mol_type = other DNA

SEQ ID NO: 127796 - DNA, 80 bp, synthetic construct
  misc_feature 1..80: note = Artificially Synthesized Probe
  source 1..80: mol_type = other DNA
attggattgtttttcctacctggggttggggcaagcagctggaagttgggaatgaaatagggcagcatgtttatactccc

SEQ ID NO: 127797 - DNA, 80 bp, synthetic construct
  misc_feature 1..80: note = Artificially Synthesized Probe
  source 1..80: mol_type = other DNA
ctccttgctagccctctggtttgtggtaatgtctgctggtacatattttacattttgcatgaagccatgttggagattcc

SEQ ID NO: 127798 - DNA, 80 bp, synthetic construct
  misc_feature 1..80: note = Artificially Synthesized Probe
  source 1..80: mol_type = other DNA
tgtaatgaaagctcagtctgtctaacctctgttggaaccagggtttgggcaaatattattgctgccaccttcatttgttt

SEQ ID NO: 127799 - DNA, 80 bp, synthetic construct; identical to SEQ ID NO: 40947
  misc_feature 1..80: note = Artificially Synthesized Probe
  source 1..80: mol_type = other DNA

SEQ ID NO: 127800 - DNA, 80 bp, synthetic construct
  misc_feature 1..80: note = Artificially Synthesized Probe
  source 1..80: mol_type = other DNA
ttaggttaaattgaaaaagccaagtcagattccctatagaccagtagctttcaactttgcctgggcatgaaagttacttg

SEQ ID NO: 127801 - DNA, 80 bp, synthetic construct
  misc_feature 1..80: note = Artificially Synthesized Probe
  source 1..80: mol_type = other DNA
agactgggagaaaatatttgtaatatgtatctgacatggacttatatcagattatagaataaagaactctgagaactcag

SEQ ID NO: 127802 - DNA, 80 bp, synthetic construct; identical to SEQ ID NO: 40948
  misc_feature 1..80: note = Artificially Synthesized Probe
  source 1..80: mol_type = other DNA

SEQ ID NO: 127803 - DNA, 80 bp, synthetic construct
  misc_feature 1..80: note = Artificially Synthesized Probe
  source 1..80: mol_type = other DNA
aataaaagcatatgtctaaacaaagacttgcacctgaatattcataaagcttttgtgataggctgagtaatgcctccctc

SEQ ID NO: 127804 - DNA, 80 bp, synthetic construct
  misc_feature 1..80: note = Artificially Synthesized Probe
  source 1..80: mol_type = other DNA
cataagaaggagattacagataaaagagaggaaggtcatgtgatagaagcagagggaaacagagtcatagagagaggatg

SEQ ID NO: 127805 - DNA, 80 bp, synthetic construct
  misc_feature 1..80: note = Artificially Synthesized Probe
  source 1..80: mol_type = other DNA
ttctgacctccagaactctaagagaacaaatgtatgttgttttaagccaccatgtttgcagtaatttgttacagctgcct

SEQ ID NO: 127806 - DNA, 80 bp, synthetic construct
  misc_feature 1..80: note = Artificially Synthesized Probe
  source 1..80: mol_type = other DNA
ataaaaagaagccaagcacaatgagtacattctgtatgattctgtttctataaaattttagaaaaaacaaatctgatcta

SEQ ID NO: 127807 - DNA, 80 bp, synthetic construct
  misc_feature 1..80: note = Artificially Synthesized Probe
  source 1..80: mol_type = other DNA
tggctgggtggctcaagcctgtaatcccagcactttgggaggccgaggcaggcggatcacctaaggtcaggagttcaaga

SEQ ID NO: 127808 - DNA, 80 bp, synthetic construct; identical to SEQ ID NO: 40949
  misc_feature 1..80: note = Artificially Synthesized Probe
  source 1..80: mol_type = other DNA

SEQ ID NO: 127809 - DNA, 80 bp, synthetic construct
  misc_feature 1..80: note = Artificially Synthesized Probe
  source 1..80: mol_type = other DNA
atatctgatgccctaagatcctgtctatctgtatgtgagccatgtttgcctctgcaacagacagtgttaaagcatctagg

SEQ ID NO: 127810 - DNA, 80 bp, synthetic construct
  misc_feature 1..80: note = Artificially Synthesized Probe
  source 1..80: mol_type = other DNA
atgtaagaggctcagttaatacttttctccggggccttggagatgttaaacatgtccttttgccattagtgaatcagtca

SEQ ID NO: 127811 - DNA, 80 bp, synthetic construct
  misc_feature 1..80: note = Artificially Synthesized Probe
  source 1..80: mol_type = other DNA
tccagctgtttggcatgtgtgagaagagtggatgatgaaactgtgagagggcattttgggtggtgtgatggtcataaata

SEQ ID NO: 127812 - DNA, 80 bp, synthetic construct; identical to SEQ ID NO: 40950
  misc_feature 1..80: note = Artificially Synthesized Probe
  source 1..80: mol_type = other DNA

SEQ ID NO: 127813 - DNA, 80 bp, synthetic construct
  misc_feature 1..80: note = Artificially Synthesized Probe
  source 1..80: mol_type = other DNA
agaatagaatgtgaagctgagcttatttgagtaggggatggaaggctgccagctacttcaaaggtatctctgctgataag

SEQ ID NO: 127814 - DNA, 80 bp, synthetic construct
  misc_feature 1..80: note = Artificially Synthesized Probe
  source 1..80: mol_type = other DNA
ggaaggtgcagctcaaagggaatgtgtgcatcaaagatgtctgtagtcttttgcttaggttagtttgtgtgtttgccttt

SEQ ID NO: 127815 - DNA, 80 bp, synthetic construct
  misc_feature 1..80: note = Artificially Synthesized Probe
  source 1..80: mol_type = other DNA
agagaggtgcagtagacaaaaaataaaagtgtccatatgcaaccttgtattggaatactaccctaaattaggagattata

SEQ ID NO: 127816 - DNA, 80 bp, synthetic construct; identical to SEQ ID NO: 40951
  misc_feature 1..80: note = Artificially Synthesized Probe
  source 1..80: mol_type = other DNA

SEQ ID NO: 127817 - DNA, 80 bp, synthetic construct
  misc_feature 1..80: note = Artificially Synthesized Probe
  source 1..80: mol_type = other DNA
atgttactagtatcccatgaaccctccttctctccacttcaagtcattactctctgaagggtaaccattatcctgacttc

SEQ ID NO: 127818 - DNA, 80 bp, synthetic construct
  misc_feature 1..80: note = Artificially Synthesized Probe
  source 1..80: mol_type = other DNA
ccattgcactccagcctaggtgacagagcaagactccgtctcaaaaacaaacaacaaaaaagatgttgaagatgatgatt

SEQ ID NO: 127819 - DNA, 80 bp, synthetic construct
  misc_feature 1..80: note = Artificially Synthesized Probe
  source 1..80: mol_type = other DNA
tgtatgtaatatatcatctttttgtttgtttgtttgtttgttttaaagagatggagtctctgtcccccaggctggagtcc

SEQ ID NO: 127820 - DNA, 80 bp, synthetic construct
  misc_feature 1..80: note = Artificially Synthesized Probe
  source 1..80: mol_type = other DNA
ttttagttctttgattatcataagagtgtaagcgtggttttcattgtattcctttggcttggttaaatataatatccaga

SEQ ID NO: 127821 - DNA, 80 bp, synthetic construct; identical to SEQ ID NO: 40952
  misc_feature 1..80: note = Artificially Synthesized Probe
  source 1..80: mol_type = other DNA

SEQ ID NO: 127822 - DNA, 80 bp, synthetic construct
  misc_feature 1..80: note = Artificially Synthesized Probe
  source 1..80: mol_type = other DNA
accccgtctctactaaaaatacaaaaattagctgggcatggtggtacgtgcctgtaatcccagctgctcaggaggctgag

SEQ ID NO: 127823 - DNA, 80 bp, synthetic construct
  misc_feature 1..80: note = Artificially Synthesized Probe
  source 1..80: mol_type = other DNA
aataaataaataattaaaacaaccaattctttcttttgttcacctaagatgctataaatgccatccaatgaatttttttt

SEQ ID NO: 127824 - DNA, 80 bp, synthetic construct; identical to SEQ ID NO: 40953
  misc_feature 1..80: note = Artificially Synthesized Probe
  source 1..80: mol_type = other DNA

SEQ ID NO: 127825 - DNA, 80 bp, synthetic construct
  misc_feature 1..80: note = Artificially Synthesized Probe
  source 1..80: mol_type = other DNA
ttgcatattggacatcatagataatatgtcatagaaactctaggtgtacttatcttcctctgaagagtatgaagttttat

SEQ ID NO: 127826 - DNA, 80 bp, synthetic construct
  misc_feature 1..80: note = Artificially Synthesized Probe
  source 1..80: mol_type = other DNA
aggcatggcctttctggggttttcatgggaagcccaagatgtttatcaagcccctctaacttggcaggctttgaatgcca

SEQ ID NO: 127827 - DNA, 80 bp, synthetic construct
  misc_feature 1..80: note = Artificially Synthesized Probe
  source 1..80: mol_type = other DNA
taatgctgctatgaacattataatgggaagttattctttccaatgtatggttgaacctggtcacaagccaggctttaaga

SEQ ID NO: 127828 - DNA, 80 bp, synthetic construct
  misc_feature 1..80: note = Artificially Synthesized Probe
  source 1..80: mol_type = other DNA
ctcccttccttttctctattcttttgaataatcttttaaattttatagtagatgtatgttatagaaaatttaaaaataca

SEQ ID NO: 127829 - DNA, 80 bp, synthetic construct; identical to SEQ ID NO: 40809
  misc_feature 1..80: note = Artificially Synthesized Probe
  source 1..80: mol_type = other DNA

SEQ ID NO: 127830 - DNA, 80 bp, synthetic construct; identical to SEQ ID NO: 40954
  misc_feature 1..80: note = Artificially Synthesized Probe
  source 1..80: mol_type = other DNA

SEQ ID NO: 127831 - DNA, 80 bp, synthetic construct
  misc_feature 1..80: note = Artificially Synthesized Probe
  source 1..80: mol_type = other DNA
tgtaaattggaagttggttctaaaggtccaagtggattcaagtgacttagaatgcataataagtgatgttagtacttcat

SEQ ID NO: 127832 - DNA, 80 bp, synthetic construct
  misc_feature 1..80: note = Artificially Synthesized Probe
  source 1..80: mol_type = other DNA
tggtgccagcctacaaatattgggtgccagttcagtcattcgtctgataattttagtatcagttgataattttagacaag

SEQ ID NO: 127833 - DNA, 80 bp, synthetic construct
  misc_feature 1..80: note = Artificially Synthesized Probe
  source 1..80: mol_type = other DNA
accctgtctctactaaaaatacagaaattagccaggcatcgtggtgtattcctgtaatctcagctactcaggaggcttag

SEQ ID NO: 127834 - DNA, 80 bp, synthetic construct; identical to SEQ ID NO: 40955
  misc_feature 1..80: note = Artificially Synthesized Probe
  source 1..80: mol_type = other DNA

SEQ ID NO: 127835 - DNA, 80 bp, synthetic construct
  misc_feature 1..80: note = Artificially Synthesized Probe
  source 1..80: mol_type = other DNA
gagtactggttttatcatccccatttgtagataagagcatgggcaaagggtttaagcaatttactgaagattatacagct

SEQ ID NO: 127836 - DNA, 80 bp, synthetic construct
  misc_feature 1..80: note = Artificially Synthesized Probe
  source 1..80: mol_type = other DNA
gtcatatgttgctgtgcttctgtcaggtcagaatttccattgtgctattctgattctgcttcttgcccagcttgtccaga

SEQ ID NO: 127837 - DNA, 80 bp, synthetic construct
  misc_feature 1..80: note = Artificially Synthesized Probe
  source 1..80: mol_type = other DNA
tgacacagcgtcttcagttttttttcattttcatcttctttccttacaatactggactttctctggtcttttagtttttc

SEQ ID NO: 127838 - DNA, 80 bp, synthetic construct; identical to SEQ ID NO: 40956
  misc_feature 1..80: note = Artificially Synthesized Probe
  source 1..80: mol_type = other DNA

SEQ ID NO: 127839 - DNA, 80 bp, synthetic construct
  misc_feature 1..80: note = Artificially Synthesized Probe
  source 1..80: mol_type = other DNA
gcttcagttaaggctatgaaagaaaagaaaaaattttaaaaagtagtaacgtgtttttttcaagatattgtgggtaaaaa

SEQ ID NO: 127840 - DNA, 80 bp, synthetic construct
  misc_feature 1..80: note = Artificially Synthesized Probe
  source 1..80: mol_type = other DNA
catccatgttggtaggtcagaaatggaatttgtgtaactcttagtattacagatatttatgttgttgtgtgcagtactta

SEQ ID NO: 127841 - DNA, 80 bp, synthetic construct
  misc_feature 1..80: note = Artificially Synthesized Probe
  source 1..80: mol_type = other DNA
catgtcattgcatcttcttttaaatgttgcctatatgatcatacagcagtctgtagtctggctgtcccttaggtttttca

SEQ ID NO: 127842 - DNA, 80 bp, synthetic construct
  misc_feature 1..80: note = Artificially Synthesized Probe
  source 1..80: mol_type = other DNA
gtagccgggattacaggcgtgggctaccacatccagctaagttttttgtgtttttttagtagaggtggggtttcaccatg

SEQ ID NO: 127843 - DNA, 80 bp, synthetic construct
  misc_feature 1..80: note = Artificially Synthesized Probe
  source 1..80: mol_type = other DNA
attgttgtctttttggaaatcacttgtttttaggatgactaggtagccaaggctttcatttggaaataccctacttccat

SEQ ID NO: 127844 - DNA, 80 bp, synthetic construct; identical to SEQ ID NO: 40957
  misc_feature 1..80: note = Artificially Synthesized Probe
  source 1..80: mol_type = other DNA

SEQ ID NO: 127845 - DNA, 80 bp, synthetic construct
  misc_feature 1..80: note = Artificially Synthesized Probe
  source 1..80: mol_type = other DNA
gaaatacagagaacaaactgggagatccagtctccaactttaatcatctcttctccaaagccaagataatccaagccttc

SEQ ID NO: 127846 - DNA, 80 bp, synthetic construct
  misc_feature 1..80: note = Artificially Synthesized Probe
  source 1..80: mol_type = other DNA
aaccacatagtctacctgagctttcagggactgaaggaaaaaaaaaagtattgctttactcaaattcaggaccacaaata

SEQ ID NO: 127847 - DNA, 80 bp, synthetic construct; identical to SEQ ID NO: 40958
  misc_feature 1..80: note = Artificially Synthesized Probe
  source 1..80: mol_type = other DNA

SEQ ID NO: 127848 - DNA, 80 bp, synthetic construct
  misc_feature 1..80: note = Artificially Synthesized Probe
  source 1..80: mol_type = other DNA
atcttttgaagatttccatattatctgattccaagttcctttcctgcctctttgtccccattagagatgtcactcatgag

SEQ ID NO: 127849 - DNA, 80 bp, synthetic construct
  misc_feature 1..80: note = Artificially Synthesized Probe
  source 1..80: mol_type = other DNA
agagagccattgacaattttaggcagggcaatgaaatcttgaaaaccatgatttccagtggcattggcagcagtactcag

SEQ ID NO: 127850 - DNA, 80 bp, synthetic construct
  misc_feature 1..80: note = Artificially Synthesized Probe
  source 1..80: mol_type = other DNA
gacattatagacaggactgagtggcctgacatgaggtgggaggaggtcattcaacttagtcattcagcagttcacttagt

SEQ ID NO: 127851 - DNA, 80 bp, synthetic construct; identical to SEQ ID NO: 40959
  misc_feature 1..80: note = Artificially Synthesized Probe
  source 1..80: mol_type = other DNA

SEQ ID NO: 127852 - DNA, 80 bp, synthetic construct
  misc_feature 1..80: note = Artificially Synthesized Probe
  source 1..80: mol_type = other DNA
tcgggaagtgacttcaggcccttttaggatgtggagtggcctcttgcctcttacattgctctttatgtattaggcctttt

SEQ ID NO: 127853 - DNA, 80 bp, synthetic construct
  misc_feature 1..80: note = Artificially Synthesized Probe
  source 1..80: mol_type = other DNA
cgcccgccactacgcccggctaattttttgtatttttagtagagacggggtttcaccgttttagccaggatggtctcgat

SEQ ID NO: 127854 - DNA, 80 bp, synthetic construct
  misc_feature 1..80: note = Artificially Synthesized Probe
  source 1..80: mol_type = other DNA
aaattggcattggaactgattcttggaggaaatgagggattttgctgtttagctctttgaggaaggtatttcaggcagag

SEQ ID NO: 127855 - DNA, 80 bp, synthetic construct
  misc_feature 1..80: note = Artificially Synthesized Probe
  source 1..80: mol_type = other DNA
ggactggagaggcatgatacagtctgacttctgtttaaatgggattattccagcttctgtgtgaagagagtgctttagga

SEQ ID NO: 127856 - DNA, 80 bp, synthetic construct
  misc_feature 1..80: note = Artificially Synthesized Probe
  source 1..80: mol_type = other DNA
tgcttgattgatatggtgtatgaaaaaaatagcagtcgaagatgaccccaagcattctggcctgaacaattcgaagttgg

SEQ ID NO: 127857 - DNA, 80 bp, synthetic construct; identical to SEQ ID NO: 40960
  misc_feature 1..80: note = Artificially Synthesized Probe
  source 1..80: mol_type = other DNA

SEQ ID NO: 127858 - DNA, 80 bp, synthetic construct
  misc_feature 1..80: note = Artificially Synthesized Probe
  source 1..80: mol_type = other DNA
aatatggctcaaaggacttaagagagaagaagactcaatgatgagttctatgaaggggtcaggaagaatgggaactgaac

SEQ ID NO: 127859 - DNA, 80 bp, synthetic construct
  misc_feature 1..80: note = Artificially Synthesized Probe
  source 1..80: mol_type = other DNA
caactcctgcattaccttcttgtgaatcctacacaagaatttgactttcccagactcccatatgcccatctataaactga

SEQ ID NO: 127860 - DNA, 80 bp, synthetic construct
  misc_feature 1..80: note = Artificially Synthesized Probe
  source 1..80: mol_type = other DNA
gtcacaaaaaactttactttagagatacactaaatgcaggacgtgttgactgataaaatagatattcttcttggaaacaa

SEQ ID NO: 127861 - DNA, 80 bp, synthetic construct; identical to SEQ ID NO: 40961
  misc_feature 1..80: note = Artificially Synthesized Probe
  source 1..80: mol_type = other DNA

SEQ ID NO: 127862 - DNA, 80 bp, synthetic construct
  misc_feature 1..80: note = Artificially Synthesized Probe
  source 1..80: mol_type = other DNA
agttatcagtgcgtatcccctcttgggccaggaagattaaaaaggctgttgtaatcagagcacatgatttctgacacact

SEQ ID NO: 127863 - DNA, 80 bp, synthetic construct
  misc_feature 1..80: note = Artificially Synthesized Probe
  source 1..80: mol_type = other DNA
ttatcattacagcatttaaaaaatatcattcatagggaggaagaaatgtagggtaatggaggaccagctatgtaatgttg

SEQ ID NO: 127864 - DNA, 80 bp, synthetic construct
  misc_feature 1..80: note = Artificially Synthesized Probe
  source 1..80: mol_type = other DNA
tggaaaatcaggccttctcacttaagactagtgtattctggctgcgcattcctcacaagatgtagtcaggttaggttaga

SEQ ID NO: 127865 - DNA, 80 bp, synthetic construct; identical to SEQ ID NO: 40962
  misc_feature 1..80: note = Artificially Synthesized Probe
  source 1..80: mol_type = other DNA

SEQ ID NO: 127866 - DNA, 80 bp, synthetic construct
  misc_feature 1..80: note = Artificially Synthesized Probe
  source 1..80: mol_type = other DNA
aaagtgcttggcaaaccattgggctattatgatagttctaagtggaaacagtatgtttcctcaatacacagtgaattgag

SEQ ID NO: 127867 - DNA, 80 bp, synthetic construct
  misc_feature 1..80: note = Artificially Synthesized Probe
  source 1..80: mol_type = other DNA
ggagggaaatatgaggtgaggtttgccttatgatgtcctttgtatcttaggaagaatgggagtgtaggagaggggagcat

SEQ ID NO: 127868 - DNA, 80 bp, synthetic construct
  misc_feature 1..80: note = Artificially Synthesized Probe
  source 1..80: mol_type = other DNA
gcctgccacatcaaagggcttataccctgaagccagtgaagcagaagcccctgtaatgttattgttttaacttcttattt

SEQ ID NO: 127869 - DNA, 80 bp, synthetic construct; identical to SEQ ID NO: 40963
  misc_feature 1..80: note = Artificially Synthesized Probe
  source 1..80: mol_type = other DNA

SEQ ID NO: 127870 - DNA, 80 bp, synthetic construct
  misc_feature 1..80: note = Artificially Synthesized Probe
  source 1..80: mol_type = other DNA
gtttggtttcctcatggttggattcagtttaagcaattttggcaagaacaccgtagaagcgatgtcatatttttcttagt

SEQ ID NO: 127871 - DNA, 80 bp, synthetic construct
  misc_feature 1..80: note = Artificially Synthesized Probe
  source 1..80: mol_type = other DNA
tttagcatgcttgttaactgaaacaatcctactagcggattttaccaagagagtgccatggacagatttgccttttagaa

SEQ ID NO: 127872 - DNA, 80 bp, synthetic construct
  misc_feature 1..80: note = Artificially Synthesized Probe
  source 1..80: mol_type = other DNA
gaagagccatttaggctatgtttggaatcaataagcagggtttacattttgtgctatagatttaaatgctggaaaaattc

SEQ ID NO: 127873 - DNA, 80 bp, synthetic construct
  misc_feature 1..80: note = Artificially Synthesized Probe
  source 1..80: mol_type = other DNA
tcccaggttcaagtgattctcttgcctcagcctcccgagtagctgggattatagtatgtgccaccatgcctggctaattt

SEQ ID NO: 127874 - DNA, 80 bp, synthetic construct; identical to SEQ ID NO: 40810
  misc_feature 1..80: note = Artificially Synthesized Probe
  source 1..80: mol_type = other DNA

SEQ ID NO: 127875 - DNA, 80 bp, synthetic construct; identical to SEQ ID NO: 40964
  misc_feature 1..80: note = Artificially Synthesized Probe
  source 1..80: mol_type = other DNA

SEQ ID NO: 127876 - DNA, 80 bp, synthetic construct
  misc_feature 1..80: note = Artificially Synthesized Probe
  source 1..80: mol_type = other DNA
aatgcctgctctttgccctaatacaaaacctagagctgtaggccatgttcttatgatttgacagtatcagggaagcattt

SEQ ID NO: 127877 - DNA, 80 bp, synthetic construct
  misc_feature 1..80: note = Artificially Synthesized Probe
  source 1..80: mol_type = other DNA
gagggtggtgaatttttgcactatagctttgtgagggagctggaaagagcctttcagtttttcatgactgggagtttaat

SEQ ID NO: 127878 - DNA, 80 bp, synthetic construct
  misc_feature 1..80: note = Artificially Synthesized Probe
  source 1..80: mol_type = other DNA
agttgagctttttgctccaaaatctatagagggtacacccctcttatattctggagtcttactgggtttctgaaaatgcc

SEQ ID NO: 127879 - DNA, 80 bp, synthetic construct; identical to SEQ ID NO: 40965
  misc_feature 1..80: note = Artificially Synthesized Probe
  source 1..80: mol_type = other DNA

SEQ ID NO: 127880 - DNA, 80 bp, synthetic construct
  misc_feature 1..80: note = Artificially Synthesized Probe
  source 1..80: mol_type = other DNA
acattagaccaggaatcaggtaacctggttggggacccagggctctagatggtttatttttttattttccttattggtta

SEQ ID NO: 127881 - DNA, 80 bp, synthetic construct
  misc_feature 1..80: note = Artificially Synthesized Probe
  source 1..80: mol_type = other DNA
tttgcaaaattatggagagtgcagactaggagaaaaaggacaggcatagttgtgacaaggagctcttttttctagttctg

SEQ ID NO: 127882 - DNA, 80 bp, synthetic construct; identical to SEQ ID NO: 40966
  misc_feature 1..80: note = Artificially Synthesized Probe
  source 1..80: mol_type = other DNA

SEQ ID NO: 127883 - DNA, 80 bp, synthetic construct
  misc_feature 1..80: note = Artificially Synthesized Probe
  source 1..80: mol_type = other DNA
gtcaaggggggtggagagaaaggcacagtgacacaaagggtgttttgaggagccctgtagcgcctgtggagaatgaatgt

SEQ ID NO: 127884 - DNA, 80 bp, synthetic construct
  misc_feature 1..80: note = Artificially Synthesized Probe
  source 1..80: mol_type = other DNA
actacagcaagcaattctttgatcatggtccttgtgtttgtgtttggaagggatcaagaagcgatttcctttcccctggg

SEQ ID NO: 127885 - DNA, 80 bp, synthetic construct
  misc_feature 1..80: note = Artificially Synthesized Probe
  source 1..80: mol_type = other DNA
cagtgcctacccttgtcatttacccaccatcctcatctcatttatccttaagtcccaagaccaaagcaaagaacacatgg

SEQ ID NO: 127886 - DNA, 80 bp, synthetic construct
  misc_feature 1..80: note = Artificially Synthesized Probe
  source 1..80: mol_type = other DNA
gcaattttaaatcaaacattgaagcattttgggtagatgacgtgttactttgattaatgaggttcttgatctggatattt

SEQ ID NO: 127887 - DNA, 80 bp, synthetic construct
  misc_feature 1..80: note = Artificially Synthesized Probe
  source 1..80: mol_type = other DNA
ttttgccatttgccctttgaactgccaacaatcccaatgtagcaaatggatttaaagctgattgagttttagatttcttt

SEQ ID NO: 127888 - DNA, 80 bp, synthetic construct; identical to SEQ ID NO: 40967
  misc_feature 1..80: note = Artificially Synthesized Probe
  source 1..80: mol_type = other DNA

SEQ ID NO: 127889 - DNA, 80 bp, synthetic construct
  misc_feature 1..80: note = Artificially Synthesized Probe
  source 1..80: mol_type = other DNA
ggacaaattttttgacctctctaagctttagcgtctgtaagtactaagtgctttttgtgcagagagatgtagagaggtga

SEQ ID NO: 127890 - DNA, 80 bp, synthetic construct
  misc_feature 1..80: note = Artificially Synthesized Probe
  source 1..80: mol_type = other DNA
tcagagggtggtgagtaaaaatagtttggctaaatcagagtgttaatgaggagagcagcttgaaacaaagccgaaaagag

SEQ ID NO: 127891 - DNA, 80 bp, synthetic construct
  misc_feature 1..80: note = Artificially Synthesized Probe
  source 1..80: mol_type = other DNA
gacaggaggaatgaaaagaaggagacagatgccagacatatcatgaaggagaaatgaacagcgtatggccacttattgga

SEQ ID NO: 127892 - DNA, 80 bp, synthetic construct; identical to SEQ ID NO: 40968
  misc_feature 1..80: note = Artificially Synthesized Probe
  source 1..80: mol_type = other DNA

SEQ ID NO: 127893 - DNA, 80 bp, synthetic construct
  misc_feature 1..80: note = Artificially Synthesized Probe
  source 1..80: mol_type = other DNA
ctctcttgttttaccagaatgctttggttaccacgtcctgggaaatgaacaacttaaaacgtaagtgtggcaagccttca

SEQ ID NO: 127894 - DNA, 80 bp, synthetic construct
  misc_feature 1..80: note = Artificially Synthesized Probe
  source 1..80: mol_type = other DNA
tagaagaaaattcagaccaatccttttgcttcatgggagctgctttccttgaagaggcttctgccattttagaaaatatt

SEQ ID NO: 127895 - DNA, 80 bp, synthetic construct; identical to SEQ ID NO: 40969
  misc_feature 1..80: note = Artificially Synthesized Probe
  source 1..80: mol_type = other DNA

SEQ ID NO: 127896 - DNA, 80 bp, synthetic construct
  misc_feature 1..80: note = Artificially Synthesized Probe
  source 1..80: mol_type = other DNA
ccaaaagctaagagaaacagctagacccacaggagatcctagtaatggtgttaacagatgcaaactttaaattaactatg

SEQ ID NO: 127897 - DNA, 80 bp, synthetic construct
  misc_feature 1..80: note = Artificially Synthesized Probe
  source 1..80: mol_type = other DNA
ttcttacatatgacaccaaagcacaagcgacaaaagaaaaaataaataaattgaacttcatcaaagtcagaaacctctgt

SEQ ID NO: 127898 - DNA, 80 bp, synthetic construct
  misc_feature 1..80: note = Artificially Synthesized Probe
  source 1..80: mol_type = other DNA
ctgccagtccagaaaggccagctcttctggattcagtagcaaaagagttaatcattaagcagagacagaaacctcccaag

SEQ ID NO: 127899 - DNA, 80 bp, synthetic construct
  misc_feature 1..80: note = Artificially Synthesized Probe
  source 1..80: mol_type = other DNA
agacttgaataggcatttctccacagaagttacacaaatggccaacaagcacatttttgacactgttatttattgggcta

SEQ ID NO: 127900 - DNA, 80 bp, synthetic construct; identical to SEQ ID NO: 40970
  misc_feature 1..80: note = Artificially Synthesized Probe
  source 1..80: mol_type = other DNA

SEQ ID NO: 127901 - DNA, 80 bp, synthetic construct
  misc_feature 1..80: note = Artificially Synthesized Probe
  source 1..80: mol_type = other DNA
ctggctaacatggtgaaaccctgcctctactaaaaatacaaaaaaattggccaggcgtgatggcaggcacctgtggtccc

SEQ ID NO: 127902 - DNA, 80 bp, synthetic construct
  misc_feature 1..80: note = Artificially Synthesized Probe
  source 1..80: mol_type = other DNA
caacccaaatgttaatgaagtgatttatggaacaaacttaaagtatggcatacctatacaatttaaacaaaatgtgtcat

SEQ ID NO: 127903 - DNA, 80 bp, synthetic construct
  misc_feature 1..80: note = Artificially Synthesized Probe
  source 1..80: mol_type = other DNA
tctatagagacagaaagtagattagtggttgctaggagctgggggaaggagagatggggagtgactactaacaggtttga

SEQ ID NO: 127904 - DNA, 80 bp, synthetic construct
  misc_feature 1..80: note = Artificially Synthesized Probe
  source 1..80: mol_type = other DNA
caaaaaatgcagtaactaaaagagctcaatgtgtagatcaagtagcagattagatggtgctgaataaatagttaatgaac

SEQ ID NO: 127905 - DNA, 80 bp, synthetic construct; identical to SEQ ID NO: 40971
  misc_feature 1..80: note = Artificially Synthesized Probe
  source 1..80: mol_type = other DNA

SEQ ID NO: 127906 - DNA, 80 bp, synthetic construct
  misc_feature 1..80: note = Artificially Synthesized Probe
  source 1..80: mol_type = other DNA
ggtgaactaaagatgttttcagacaagaaaaatatgagaaaatatatcgccagcagacttgcactaaaagaaatactaaa

SEQ ID NO: 127907 - DNA, 80 bp, synthetic construct
  misc_feature 1..80: note = Artificially Synthesized Probe
  source 1..80: mol_type = other DNA
tcccctttgatgtacagggaggtgccccggccgggggtctggggccacgtcgggggctaggtcgggagggctccctcggg

SEQ ID NO: 127908 - DNA, 80 bp, synthetic construct
  misc_feature 1..80: note = Artificially Synthesized Probe
  source 1..80: mol_type = other DNA
acgaggtcaggagattgagaccatcctggataacatggtgaaaccccatctctactaaaaatacaaaaaaattagccagg

SEQ ID NO: 127909 - DNA, 80 bp, synthetic construct; identical to SEQ ID NO: 40972
  misc_feature 1..80: note = Artificially Synthesized Probe
  source 1..80: mol_type = other DNA

SEQ ID NO: 127910 - DNA, 80 bp, synthetic construct
  misc_feature 1..80: note = Artificially Synthesized Probe
  source 1..80: mol_type = other DNA
attacttgggagggatacttgtgttctgcaggcttagtgggcacgatgtgaaagcaaggctatttggcctgtggagattg

SEQ ID NO: 127911 - DNA, 80 bp, synthetic construct
  misc_feature 1..80: note = Artificially Synthesized Probe
  source 1..80: mol_type = other DNA
tttttattttttgtaaagagagggtctatctgttgcccagcctggtcttgaactcctggcttcaagtgatcttcctgcct

SEQ ID NO: 127912 - DNA, 80 bp, synthetic construct
  misc_feature 1..80: note = Artificially Synthesized Probe
  source 1..80: mol_type = other DNA
gtctgggtgggggtagggaaatgggtttaaagatattttcagaaagtggtaaaagtagtaatttgtattaggtgttggca

SEQ ID NO: 127913 - DNA, 80 bp, synthetic construct
  misc_feature 1..80: note = Artificially Synthesized Probe
  source 1..80: mol_type = other DNA
ttccagtggttaagggtagcggagagtttgactctaaaggtgcaggatacaagaggtttttggtgggtgatggaactgtt

SEQ ID NO: 127914 - DNA, 80 bp, synthetic construct; identical to SEQ ID NO: 40973
  misc_feature 1..80: note = Artificially Synthesized Probe
  source 1..80: mol_type = other DNA

SEQ ID NO: 127915 - DNA, 80 bp, synthetic construct
  misc_feature 1..80: note = Artificially Synthesized Probe
  source 1..80: mol_type = other DNA
ctttctttctttctttctttctttctttctttctttctttctttcttttctttcctttctttctttctttctttctttct

SEQ ID NO: 127916 - DNA, 80 bp, synthetic construct
  misc_feature 1..80: note = Artificially Synthesized Probe
  source 1..80: mol_type = other DNA
agtagtgcaatctcagctcactgcaacctctgcctcccgggttcaagcagttctcccgcctcagcctcccagatagctgg

SEQ ID NO: 127917 - DNA, 80 bp, synthetic construct
  misc_feature 1..80: note = Artificially Synthesized Probe
  source 1..80: mol_type = other DNA
caggcagtccaggtagatttcaatgcaaaaagtatttttcgttataaagagagacatttccaggctgggcatggtggctc

SEQ ID NO: 127918 - DNA, 80 bp, synthetic construct
  misc_feature 1..80: note = Artificially Synthesized Probe
  source 1..80: mol_type = other DNA
aggctgaggcaggggaatcacttgaacccaggaggcggaggttgcagtgagccgagatggcgccactgcactccagcctg

SEQ ID NO: 127919 - DNA, 80 bp, synthetic construct; identical to SEQ ID NO: 40974
  misc_feature 1..80: note = Artificially Synthesized Probe
  source 1..80: mol_type = other DNA

SEQ ID NO: 127920 - DNA, 80 bp, synthetic construct
  misc_feature 1..80: note = Artificially Synthesized Probe
  source 1..80: mol_type = other DNA
gcctcccgggttcacgccattctcctgcctcagcctcccgaatagctgggactacaggcgcccgccactacgcccggcta

SEQ ID NO: 127921 - DNA, 80 bp, synthetic construct
  misc_feature 1..80: note = Artificially Synthesized Probe
  source 1..80: mol_type = other DNA
ctcactagccaaatatgtttgcctaggccgagagtgtcagatctctgagagatcttgacagagtatttaaatacattctg

SEQ ID NO: 127922 - DNA, 80 bp, synthetic construct
  misc_feature 1..80: note = Artificially Synthesized Probe
  source 1..80: mol_type = other DNA
tacaaagtttaaacctgaaatggggaggaaaaatcgaagagcttaggggagaaattagagctggagattggaaatctcca

SEQ ID NO: 127923 - DNA, 80 bp, synthetic construct
  misc_feature 1..80: note = Artificially Synthesized Probe
  source 1..80: mol_type = other DNA
gtggacaaagacaagaggcttcaaaccaccattgtagctgaagaaagctgatacaggctcaaatcttcatcccagtccct

SEQ ID NO: 127924 - DNA, 80 bp, synthetic construct; identical to SEQ ID NO: 40975
  misc_feature 1..80: note = Artificially Synthesized Probe
  source 1..80: mol_type = other DNA

SEQ ID NO: 127925 - DNA, 80 bp, synthetic construct
  misc_feature 1..80: note = Artificially Synthesized Probe
  source 1..80: mol_type = other DNA
ccacacaggcattctttccatcccccagctcatagatttccttattgtagaagggcatatgttttcaagtaccttatcat

SEQ ID NO: 127926 - DNA, 80 bp, synthetic construct
  misc_feature 1..80: note = Artificially Synthesized Probe
  source 1..80: mol_type = other DNA
cacctagataccatttctactctgtgcttttagtgtcctgcttgggaaatggggtgatcactcatcttcagaatgacctc

SEQ ID NO: 127927 - DNA, 80 bp, synthetic construct; identical to SEQ ID NO: 40976
  misc_feature 1..80: note = Artificially Synthesized Probe
  source 1..80: mol_type = other DNA

SEQ ID NO: 127928 - DNA, 80 bp, synthetic construct
  misc_feature 1..80: note = Artificially Synthesized Probe
  source 1..80: mol_type = other DNA
acagagggtaggagctgagtccacaaagttcacatcatgccaaggaatggatttcctcccagggccactagcattacttg

SEQ ID NO: 127929 - DNA, 80 bp, synthetic construct
  misc_feature 1..80: note = Artificially Synthesized Probe
  source 1..80: mol_type = other DNA
gggagctccttcctttggatgtttcctttatgcccacagtcgaaccatatcctagttgtacagccaagaaggatcttttc

SEQ ID NO: 127930 - DNA, 80 bp, synthetic construct
  misc_feature 1..80: note = Artificially Synthesized Probe
  source 1..80: mol_type = other DNA
gctgaattatttcttacagagtcatttagttcttactgaaactggggaagaaaaagattatgcaacagcaggcataagga

SEQ ID NO: 127931 - DNA, 80 bp, synthetic construct
  misc_feature 1..80: note = Artificially Synthesized Probe
  source 1..80: mol_type = other DNA
cactcaagtgagtgttgagggggctggattctaatattaatattagccaacatttattgaacaggctaggtgctagattc

SEQ ID NO: 127932 - DNA, 80 bp, synthetic construct; identical to SEQ ID NO: 40811
  misc_feature 1..80: note = Artificially Synthesized Probe
  source 1..80: mol_type = other DNA

SEQ ID NO: 127933 - DNA, 80 bp, synthetic construct; identical to SEQ ID NO: 40977
  misc_feature 1..80: note = Artificially Synthesized Probe
  source 1..80: mol_type = other DNA

SEQ ID NO: 127934 - DNA, 80 bp, synthetic construct
  misc_feature 1..80: note = Artificially Synthesized Probe
  source 1..80: mol_type = other DNA
taaactttgatctcattgattcagcaactgattattttatggccactgtgcacaaagcaatgggctgggtaccacagagg

SEQ ID NO: 127935 - DNA, 80 bp, synthetic construct
  misc_feature 1..80: note = Artificially Synthesized Probe
  source 1..80: mol_type = other DNA
aattcaaaaactattcatattccagaagaggaatcctgaaacaagtattgggccttagactagtcaagtttctgacattt

SEQ ID NO: 127936 - DNA, 80 bp, synthetic construct
  misc_feature 1..80: note = Artificially Synthesized Probe
  source 1..80: mol_type = other DNA
attataacctgaaatatccattagtaacttagaaagacaaactcaaagaaaaagaatttactatgtaatagctggatttt

SEQ ID NO: 127937 - DNA, 80 bp, synthetic construct; identical to SEQ ID NO: 40978
  misc_feature 1..80: note = Artificially Synthesized Probe
  source 1..80: mol_type = other DNA

SEQ ID NO: 127938 - DNA, 80 bp, synthetic construct
  misc_feature 1..80: note = Artificially Synthesized Probe
  source 1..80: mol_type = other DNA
ccacttcaagacggcaagttattttagctcctgtctaaataagttagtgggctccagtccttaaaccactattttcttta

SEQ ID NO: 127939 - DNA, 80 bp, synthetic construct
  misc_feature 1..80: note = Artificially Synthesized Probe
  source 1..80: mol_type = other DNA
taagaggctgaggtggagggatctttaggccaggagtttgagaccagcctggggaaacatcacgagactccatatctgaa

SEQ ID NO: 127940 - DNA, 80 bp, synthetic construct; identical to SEQ ID NO: 40979
  misc_feature 1..80: note = Artificially Synthesized Probe
  source 1..80: mol_type = other DNA

SEQ ID NO: 127941 - DNA, 80 bp, synthetic construct
  misc_feature 1..80: note = Artificially Synthesized Probe
  source 1..80: mol_type = other DNA
ctttgtattgaacaagaagatcatgagctaatttcaacctggcagccatttatttagcacctactgtatgttgtcttttt

SEQ ID NO: 127942 - DNA, 80 bp, synthetic construct
  misc_feature 1..80: note = Artificially Synthesized Probe
  source 1..80: mol_type = other DNA
gtcttggagaacttttctgtctagctagaggattgtaaatgcaccaatcagcactctgtaaaaacgcaccaatcagcgct

SEQ ID NO: 127943 - DNA, 80 bp, synthetic construct
  misc_feature 1..80: note = Artificially Synthesized Probe
  source 1..80: mol_type = other DNA
gtgagaccaagaacccaccagaaggaaccaactccggacacataagtacttttattatagacacatattatgctgtattg

SEQ ID NO: 127944 - DNA, 80 bp, synthetic construct
  misc_feature 1..80: note = Artificially Synthesized Probe
  source 1..80: mol_type = other DNA
aaggtcctaactggagttcagtctttctcagagccgtctcatggtatcctcactgatgaatgaatgctgaatagaaagag

SEQ ID NO: 127945 - DNA, 80 bp, synthetic construct; identical to SEQ ID NO: 40980
  misc_feature 1..80: note = Artificially Synthesized Probe
  source 1..80: mol_type = other DNA

SEQ ID NO: 127946 - DNA, 80 bp, synthetic construct
  misc_feature 1..80: note = Artificially Synthesized Probe
  source 1..80: mol_type = other DNA
gttttaaactggattttttttttaacagttggtctctgaacaatctttagggtggggaggggatagtagtggttgttggg

SEQ ID NO: 127947 - DNA, 80 bp, synthetic construct
  misc_feature 1..80: note = Artificially Synthesized Probe
  source 1..80: mol_type = other DNA
ctgaaatgagctctcgccacatggcagagacatgccttcctctttttattcttctttcttacaaatagggggtacttttg

SEQ ID NO: 127948 - DNA, 80 bp, synthetic construct
  misc_feature 1..80: note = Artificially Synthesized Probe
  source 1..80: mol_type = other DNA
cctattgagaacaggtctgaaacctctttcataattggtgttctttgggaaacgctaatagacaaacccatccaagctca

SEQ ID NO: 127949 - DNA, 80 bp, synthetic construct; identical to SEQ ID NO: 40981
  misc_feature 1..80: note = Artificially Synthesized Probe
  source 1..80: mol_type = other DNA

SEQ ID NO: 127950 - DNA, 80 bp, synthetic construct
  misc_feature 1..80: note = Artificially Synthesized Probe
  source 1..80: mol_type = other DNA
gaaccagcattgttaactgtaccacatctctattctaaatttaggcatctttttttttttccaggcaaagattactatgc

SEQ ID NO: 127951 - DNA, 80 bp, synthetic construct
  misc_feature 1..80: note = Artificially Synthesized Probe
  source 1..80: mol_type = other DNA
tgtatgttagtacacaaagactgctctgtaaattctttttcttccctgtctagaaaccccttgcctttttatagagaacg

SEQ ID NO: 127952 - DNA, 80 bp, synthetic construct
  misc_feature 1..80: note = Artificially Synthesized Probe
  source 1..80: mol_type = other DNA
cgctttcccccaaaggcacacagttaaggtttctgaaacagagaacgaatggccttttatcatctgtgaaaggagagaca

SEQ ID NO: 127953 - DNA, 80 bp, synthetic construct
  misc_feature 1..80: note = Artificially Synthesized Probe
  source 1..80: mol_type = other DNA
tttaaatttttagtagagacagggtttcaccatgttgttcaggctggtctcgaactcctgacctcatgatccgcctgcct

SEQ ID NO: 127954 - DNA, 80 bp, synthetic construct
  misc_feature 1..80: note = Artificially Synthesized Probe
  source 1..80: mol_type = other DNA
gcagtaagtcagatcacttcagcagcctgttcaaataaacagggataatagttgagtggtcctcccaactaatcagtaca

SEQ ID NO: 127955 - DNA, 80 bp, synthetic construct; identical to SEQ ID NO: 40982
  misc_feature 1..80: note = Artificially Synthesized Probe
  source 1..80: mol_type = other DNA

SEQ ID NO: 127956 - DNA, 80 bp, synthetic construct
  misc_feature 1..80: note = Artificially Synthesized Probe
  source 1..80: mol_type = other DNA
aaggacaggctggtatgtgagatcacagatgaaaggcattccctcttgtggcttcttccagcagttgaggtcattggatg

SEQ ID NO: 127957 - DNA, 80 bp, synthetic construct
  misc_feature 1..80: note = Artificially Synthesized Probe
  source 1..80: mol_type = other DNA
caggcagaagatcatgtagaatcatagaatggcagaggttggaaaagactttagaaatgttttagctgaagcttttcatt

SEQ ID NO: 127958 - DNA, 80 bp, synthetic construct; identical to SEQ ID NO: 40983
  misc_feature 1..80: note = Artificially Synthesized Probe
  source 1..80: mol_type = other DNA

SEQ ID NO: 127959 - DNA, 80 bp, synthetic construct
  misc_feature 1..80: note = Artificially Synthesized Probe
  source 1..80: mol_type = other DNA
tattttaaattggtaccgtttttctcaaaggcattttagtggtataaatggtagtctttgacccagcaatgttatttcta

SEQ ID NO: 127960 - DNA, 80 bp, synthetic construct
  misc_feature 1..80: note = Artificially Synthesized Probe
  source 1..80: mol_type = other DNA
gtttacaacatatgtttaagtgaataagttacaaaacaggatttataatgcaatcccaattttgtaaaactagaaaagat

SEQ ID NO: 127961 - DNA, 80 bp, synthetic construct
  misc_feature 1..80: note = Artificially Synthesized Probe
  source 1..80: mol_type = other DNA
tgtaccttgaaaaaaagcaagatcttaaatgattgtgtatctgacatgaaagtccttcctttttttgcctgggagctagc

SEQ ID NO: 127962 - DNA, 80 bp, synthetic construct; identical to SEQ ID NO: 40984
  misc_feature 1..80: note = Artificially Synthesized Probe
  source 1..80: mol_type = other DNA

SEQ ID NO: 127963 - DNA, 80 bp, synthetic construct
  misc_feature 1..80: note = Artificially Synthesized Probe
  source 1..80: mol_type = other DNA
agtagctgggactacaggcgtgtgccatcaggcccggctaatttttgtatttttagtagagatggggtttcactatgttg

SEQ ID NO: 127964 - DNA, 80 bp, synthetic construct
  misc_feature 1..80: note = Artificially Synthesized Probe
  source 1..80: mol_type = other DNA
ataacacaatgcctgaaactgggtaatttgcaaagaaaccattttttttttccggttctggaggctgggaagtccaagat

SEQ ID NO: 127965 - DNA, 80 bp, synthetic construct
  misc_feature 1..80: note = Artificially Synthesized Probe
  source 1..80: mol_type = other DNA
caggagccatcactgctcaagattaactagttggagaccccttaacatatattttcagcatctagtaacagctaatctca

SEQ ID NO: 127966 - DNA, 80 bp, synthetic construct
  misc_feature 1..80: note = Artificially Synthesized Probe
  source 1..80: mol_type = other DNA
cttactttcctttgaaatcttctggaatgcttgactgcaagtatctgagaaaccgtgttccacctaacaacagttgctag

SEQ ID NO: 127967 - DNA, 80 bp, synthetic construct
  misc_feature 1..80: note = Artificially Synthesized Probe
  source 1..80: mol_type = other DNA
taaaactctttgagtaatctgaccataattgggtctgattggagtggttatctgatttgctgggttaaataatgggcctt

SEQ ID NO: 127968 - DNA, 80 bp, synthetic construct; identical to SEQ ID NO: 40985
  misc_feature 1..80: note = Artificially Synthesized Probe
  source 1..80: mol_type = other DNA

SEQ ID NO: 127969 - DNA, 80 bp, synthetic construct
  misc_feature 1..80: note = Artificially Synthesized Probe
  source 1..80: mol_type = other DNA
ctcgtcttttcaaaacggaatgagtcaaaaaatacttcctcaaaataagttttctcctcagctatgcaagctcaccctgg

SEQ ID NO: 127970 - DNA, 80 bp, synthetic construct
  misc_feature 1..80: note = Artificially Synthesized Probe
  source 1..80: mol_type = other DNA
tttttcatcagatcttggattgatgtatggctttgagactagaacaaatgctctagagggcagcacagagtcctaaatgt

SEQ ID NO: 127971 - DNA, 80 bp, synthetic construct
  misc_feature 1..80: note = Artificially Synthesized Probe
  source 1..80: mol_type = other DNA
gtgcgtgttaattcatgcgcagagaggtggtggtggtggttgttccccagccatgtttttctaattataatgaaaacaaa

SEQ ID NO: 127972 - DNA, 80 bp, synthetic construct; identical to SEQ ID NO: 40986
  misc_feature 1..80: note = Artificially Synthesized Probe
  source 1..80: mol_type = other DNA

SEQ ID NO: 127973 - DNA, 80 bp, synthetic construct
  misc_feature 1..80: note = Artificially Synthesized Probe
  source 1..80: mol_type = other DNA
gacttatctccagagatgttcagtttgttttgaatttctactctgtgacacttctgctctgaagccaagcatagatagat

SEQ ID NO: 127974 - DNA, 80 bp, synthetic construct
  misc_feature 1..80: note = Artificially Synthesized Probe
  source 1..80: mol_type = other DNA
gcgccaagaagagctattactcctttctcctagcagagaattccctaagatagaaaatgacacatgtagtcattgtataa

SEQ ID NO: 127975 - DNA, 80 bp, synthetic construct; identical to SEQ ID NO: 40987
  misc_feature 1..80: note = Artificially Synthesized Probe
  source 1..80: mol_type = other DNA

SEQ ID NO: 127976 - DNA, 80 bp, synthetic construct; identical to SEQ ID NO: 40812
  misc_feature 1..80: note = Artificially Synthesized Probe
  source 1..80: mol_type = other DNA

SEQ ID NO: 127977 - DNA, 80 bp, synthetic construct
  misc_feature 1..80: note = Artificially Synthesized Probe
  source 1..80: mol_type = other DNA
gcctgagtgtggtatcccctgccataaggtgagctggaatacaccttcataatctgttaaaggccaaaattaaaatgtga

SEQ ID NO: 127978 - DNA, 80 bp, synthetic construct
  misc_feature 1..80: note = Artificially Synthesized Probe
  source 1..80: mol_type = other DNA
tgttttcctctagtaggcaatggaaagagggaaaaaaaagagtagaggcactaggaagtttcagagaagtcaaaacattc

SEQ ID NO: 127979 - DNA, 80 bp, synthetic construct
  misc_feature 1..80: note = Artificially Synthesized Probe
  source 1..80: mol_type = other DNA
ggcagctcccacaacaaagaattatctgacccacaatgtcaatacagagacattgacaatcttctgacccacaagattga

SEQ ID NO: 127980 - DNA, 80 bp, synthetic construct; identical to SEQ ID NO: 40988
  misc_feature 1..80: note = Artificially Synthesized Probe
  source 1..80: mol_type = other DNA

SEQ ID NO: 127981 - DNA, 80 bp, synthetic construct
  misc_feature 1..80: note = Artificially Synthesized Probe
  source 1..80: mol_type = other DNA
tgcctgtagtcccagctactggggaggctgaggcaggagaatggcgtgaacctgggaggcagagcttgcagtgagccgag

SEQ ID NO: 127982 - DNA, 80 bp, synthetic construct
  misc_feature 1..80: note = Artificially Synthesized Probe
  source 1..80: mol_type = other DNA
tcaggagatcgagaccatcctggctaacacggtgaaaacccatctctactaaaaatgtattaaaaactagccaggcatgg

SEQ ID NO: 127983 - DNA, 80 bp, synthetic construct
  misc_feature 1..80: note = Artificially Synthesized Probe
  source 1..80: mol_type = other DNA
cagttcagagaatagaattatttcttctggagattaagataggtttaggactggtctgaataaggcaccatgggattacg

SEQ ID NO: 127984 - DNA, 80 bp, synthetic construct
  misc_feature 1..80: note = Artificially Synthesized Probe
  source 1..80: mol_type = other DNA
ctttgggaagctgcttgctgtatgcacacctttgaggagtcaagaagagaacaagggagagtttcttagaaggagctttc

SEQ ID NO: 127985 - DNA, 80 bp, synthetic construct; identical to SEQ ID NO: 40989
  misc_feature 1..80: note = Artificially Synthesized Probe
  source 1..80: mol_type = other DNA

SEQ ID NO: 127986 - DNA, 80 bp, synthetic construct
  misc_feature 1..80: note = Artificially Synthesized Probe
  source 1..80: mol_type = other DNA
agagcaatcctagcgagcattcttctccacgtgttttccccccataatgagctggcttgtatgtaagccatggcataagt

SEQ ID NO: 127987 - DNA, 80 bp, synthetic construct
  misc_feature 1..80: note = Artificially Synthesized Probe
  source 1..80: mol_type = other DNA
gccagtgtggattggctgagtatgaagagtcaaggaagctctagaattgagaaaaaagaggctttgggacactttggggc

SEQ ID NO: 127988 - DNA, 80 bp, synthetic construct
  misc_feature 1..80: note = Artificially Synthesized Probe
  source 1..80: mol_type = other DNA
ggaagatgatgatgttacctagtatttacagggcacaaggcagtcgaagtgccttgccatactttatctcatttaacctc

SEQ ID NO: 127989 - DNA, 80 bp, synthetic construct
  misc_feature 1..80: note = Artificially Synthesized Probe
  source 1..80: mol_type = other DNA
tatttgactctggcactaggcactagggagacaagaacaaataagagatgtttctgacctcaaggcgtttagttttaata

SEQ ID NO: 127990 - DNA, 80 bp, synthetic construct; identical to SEQ ID NO: 40990
  misc_feature 1..80: note = Artificially Synthesized Probe
  source 1..80: mol_type = other DNA

SEQ ID NO: 127991 - DNA, 80 bp, synthetic construct
  misc_feature 1..80: note = Artificially Synthesized Probe
  source 1..80: mol_type = other DNA
tttcctttaaatgcctggtcattcttagctgcctattcacattttaaagtgaggcactaaaagattctatgtcagctgtg

SEQ ID NO: 127992 - DNA, 80 bp, synthetic construct
  misc_feature 1..80: note = Artificially Synthesized Probe
  source 1..80: mol_type = other DNA
tcaaaatttaacatagacttcagctaatcctcctgttgaagttcagtatacccctatcctcagctgaaccttgtatcccc

SEQ ID NO: 127993 - DNA, 80 bp, synthetic construct
  misc_feature 1..80: note = Artificially Synthesized Probe
  source 1..80: mol_type = other DNA
gtggcgtgatctcggctcactgcaagctccacctcccaggttcatgccattctcctgcctcagcctcccgagtagctggg

SEQ ID NO: 127994 - DNA, 80 bp, synthetic construct; identical to SEQ ID NO: 40991
  misc_feature 1..80: note = Artificially Synthesized Probe
  source 1..80: mol_type = other DNA

SEQ ID NO: 127995 - DNA, 80 bp, synthetic construct
  misc_feature 1..80: note = Artificially Synthesized Probe
  source 1..80: mol_type = other DNA
ttttcctattattttagtgtggctgtcagagggagcagagctaaatatgtgacttcagtgtttagtttttcaaagtaaag

SEQ ID NO: 127996 - DNA, 80 bp, synthetic construct
  misc_feature 1..80: note = Artificially Synthesized Probe
  source 1..80: mol_type = other DNA
tatagatatacatacatttacatatgtatatgtacatagatatatatatctaagtcctatcttggctttctctaagtcct

SEQ ID NO: 127997 - DNA, 80 bp, synthetic construct; identical to SEQ ID NO: 40992
  misc_feature 1..80: note = Artificially Synthesized Probe
  source 1..80: mol_type = other DNA

SEQ ID NO: 127998 - DNA, 80 bp, synthetic construct
  misc_feature 1..80: note = Artificially Synthesized Probe
  source 1..80: mol_type = other DNA
taaattgttgatttttgttacttcatttgttgacttggtagcgctattctttgaccccttttttatctcatgtttattca

SEQ ID NO: 127999 - DNA, 80 bp, synthetic construct
  misc_feature 1..80: note = Artificially Synthesized Probe
  source 1..80: mol_type = other DNA
tgcaaaactataacacaatatcataatcaggaccttgacattgatacagtcaaaattctaaacagttccatcactgcaag

SEQ ID NO: 128000 - DNA, 80 bp, synthetic construct
  misc_feature 1..80: note = Artificially Synthesized Probe
  source 1..80: mol_type = other DNA
tcagctgagataacagatgcctcttttccacttcttagttaacctggaaagctgggggtctgtttgaattacttagaaag

SEQ ID NO: 128001 - DNA, 80 bp, synthetic construct
  misc_feature 1..80: note = Artificially Synthesized Probe
  source 1..80: mol_type = other DNA
atgtactttgattttgtcagtgtcccagtattctttattctttcatctgcctctagctgatcgtaggggctagattagta

SEQ ID NO: 128002 - DNA, 80 bp, synthetic construct
  misc_feature 1..80: note = Artificially Synthesized Probe
  source 1..80: mol_type = other DNA
aatcaaaaatatttccagacactgccacatttcccctgggggccaaaatagccccaggttgagacacttctctaactcag

SEQ ID NO: 128003 - DNA, 80 bp, synthetic construct; identical to SEQ ID NO: 40993
  misc_feature 1..80: note = Artificially Synthesized Probe
  source 1..80: mol_type = other DNA

SEQ ID NO: 128004 - DNA, 80 bp, synthetic construct
  misc_feature 1..80: note = Artificially Synthesized Probe
  source 1..80: mol_type = other DNA
acacacacacatgcacacacacacccaacttctactctctaattctccatctcaaagaaatcttatggcatcacactttc

SEQ ID NO: 128005 - DNA, 80 bp, synthetic construct
  misc_feature 1..80: note = Artificially Synthesized Probe
  source 1..80: mol_type = other DNA
cctccctgttaagagaaaggattggactcctagatggttgctttgatggaaaatcatccttcaccttttatactacttcc

SEQ ID NO: 128006 - DNA, 80 bp, synthetic construct; identical to SEQ ID NO: 40994
  misc_feature 1..80: note = Artificially Synthesized Probe
  source 1..80: mol_type = other DNA

SEQ ID NO: 128007 - DNA, 80 bp, synthetic construct
  misc_feature 1..80: note = Artificially Synthesized Probe
  source 1..80: mol_type = other DNA
ccttggggcctgagagtggtggtgttgtttcccatctactcagtattatgaggtgactaagtgatagaaatcacctggcc

SEQ ID NO: 128008 - DNA, 80 bp, synthetic construct
  misc_feature 1..80: note = Artificially Synthesized Probe
  source 1..80: mol_type = other DNA
acttctggatttttcccttaggggtgtgaggatattgcttcatgggggagagctccagctgagtctgttagtctgtaaag

SEQ ID NO: 128009 - DNA, 80 bp, synthetic construct
  misc_feature 1..80: note = Artificially Synthesized Probe
  source 1..80: mol_type = other DNA
aagcaggaggaccggcagaccccacgctcccctgactccacggccaacgttcgcattgaggagaaacatgtccggaggag

SEQ ID NO: 128010 - DNA, 80 bp, synthetic construct; identical to SEQ ID NO: 40813
  misc_feature 1..80: note = Artificially Synthesized Probe
  source 1..80: mol_type = other DNA

SEQ ID NO: 128011 - DNA, 80 bp, synthetic construct; identical to SEQ ID NO: 40995
  misc_feature 1..80: note = Artificially Synthesized Probe
  source 1..80: mol_type = other DNA

SEQ ID NO: 128012 - DNA, 80 bp, synthetic construct
  misc_feature 1..80: note = Artificially Synthesized Probe
  source 1..80: mol_type = other DNA
tcagagtggcattgcaagaatgaagaatgatatttgaagatagaatcaaagtggggcacgcatcttaagtagggagcctc

SEQ ID NO: 128013 - DNA, 80 bp, synthetic construct
  misc_feature 1..80: note = Artificially Synthesized Probe
  source 1..80: mol_type = other DNA
aaaaggtaaaagtgaacttctgtttccttttcagcgtcaagccaagtacacggagaataagctgaaggccatcaaagccc

SEQ ID NO: 128014 - DNA, 80 bp, synthetic construct
  misc_feature 1..80: note = Artificially Synthesized Probe
  source 1..80: mol_type = other DNA
ttctggtttcagaatactcgtcagacattccccgatactattgttcaggaatctggtgcattttgagaacaattaggaag

SEQ ID NO: 128015 - DNA, 80 bp, synthetic construct; identical to SEQ ID NO: 40996
  misc_feature 1..80: note = Artificially Synthesized Probe
  source 1..80: mol_type = other DNA

SEQ ID NO: 128016 - DNA, 80 bp, synthetic construct
  misc_feature 1..80: note = Artificially Synthesized Probe
  source 1..80: mol_type = other DNA
attgtcctacctcagcctccccagtaactgggactacaggcatgcatcaccatgcccagctaatttttgtatttttagta

SEQ ID NO: 128017 - DNA, 80 bp, synthetic construct
  misc_feature 1..80: note = Artificially Synthesized Probe
  source 1..80: mol_type = other DNA
tgcacagaagtgagtggcaagaacttaactaaagagttacaatgccatcccttatatttgtatagcatttaaggtttctc

SEQ ID NO: 128018 - DNA, 80 bp, synthetic construct
  misc_feature 1..80: note = Artificially Synthesized Probe
  source 1..80: mol_type = other DNA
acatctggcccattttttaaaatatgtgatgcaaaggggattgaggaaagcggctaataggcacatgtgttttgcaaggg

SEQ ID NO: 128019 - DNA, 80 bp, synthetic construct; identical to SEQ ID NO: 40997
  misc_feature 1..80: note = Artificially Synthesized Probe
  source 1..80: mol_type = other DNA

SEQ ID NO: 128020 - DNA, 80 bp, synthetic construct
  misc_feature 1..80: note = Artificially Synthesized Probe
  source 1..80: mol_type = other DNA
gagtcttgctgttatatcaccacctgggtcatctaggcttgtcactgaattgttctgaaacccagctttgtttctcaccc

SEQ ID NO: 128021 - DNA, 80 bp, synthetic construct
  misc_feature 1..80: note = Artificially Synthesized Probe
  source 1..80: mol_type = other DNA
ctaggtgtcattgtctcactgggttagtagagccttgctccctgttctggtacctctttgttctctctgcttattgatga

SEQ ID NO: 128022 - DNA, 80 bp, synthetic construct
  misc_feature 1..80: note = Artificially Synthesized Probe
  source 1..80: mol_type = other DNA
taagccaggcatggtgatgtgtacctatagtcccagctactctggaggctgaggcaggagaatctcttgagcccaggggt

SEQ ID NO: 128023 - DNA, 80 bp, synthetic construct; identical to SEQ ID NO: 40795
  misc_feature 1..80: note = Artificially Synthesized Probe
  source 1..80: mol_type = other DNA

SEQ ID NO: 128024 - DNA, 80 bp, synthetic construct
  misc_feature 1..80: note = Artificially Synthesized Probe
  source 1..80: mol_type = other DNA
ttggtaaaaattcagactgtgctgtctgccacaccactgctattggttagccctcttctctttttttgtactcaaggcaa

SEQ ID NO: 128025 - DNA, 80 bp, synthetic construct; identical to SEQ ID NO: 40998
  misc_feature 1..80: note = Artificially Synthesized Probe
  source 1..80: mol_type = other DNA

SEQ ID NO: 128026 - DNA, 80 bp, synthetic construct
  misc_feature 1..80: note = Artificially Synthesized Probe
  source 1..80: mol_type = other DNA
ctcccaggttcacgccattctcctgcctcagcctcccgagtagctgggactacaggcacccgccaccacgcccagctaat

SEQ ID NO: 128027 - DNA, 80 bp, synthetic construct
  misc_feature 1..80: note = Artificially Synthesized Probe
  source 1..80: mol_type = other DNA
ctgggatatggacacattcattattttttttaaagttgtattattctgctctataaatgttcagtaaatatttatttagg

SEQ ID NO: 128028 - DNA, 80 bp, synthetic construct
  misc_feature 1..80: note = Artificially Synthesized Probe
  source 1..80: mol_type = other DNA
ctagatgagactagaataagaaagaaaatattagagtacatcacattggtaagattatgtgaaacttttatgttagatat

SEQ ID NO: 128029 - DNA, 80 bp, synthetic construct; identical to SEQ ID NO: 40999
  misc_feature 1..80: note = Artificially Synthesized Probe
  source 1..80: mol_type = other DNA

SEQ ID NO: 128030 - DNA, 80 bp, synthetic construct
  misc_feature 1..80: note = Artificially Synthesized Probe
  source 1..80: mol_type = other DNA
tagaataaatattttgataagagatatctttccattgcctcagaaagtttctcttgtctcttcccagccaatcccccacc

SEQ ID NO: 128031 - DNA, 80 bp, synthetic construct
  misc_feature 1..80: note = Artificially Synthesized Probe
  source 1..80: mol_type = other DNA
ctttttcttgctgacctatgagataaaaagggccaaaaggatgcagttagagcaggactaagtgaggagcctgggatatt

SEQ ID NO: 128032 - DNA, 80 bp, synthetic construct
  misc_feature 1..80: note = Artificially Synthesized Probe
  source 1..80: mol_type = other DNA
tatttttgttgatgccattacattgaccaaggactagcctccgacttctttttatagtatagtgcaagatttaaacttca

SEQ ID NO: 128033 - DNA, 80 bp, synthetic construct; identical to SEQ ID NO: 41000
  misc_feature 1..80: note = Artificially Synthesized Probe
  source 1..80: mol_type = other DNA

SEQ ID NO: 128034 - DNA, 80 bp, synthetic construct
  misc_feature 1..80: note = Artificially Synthesized Probe
  source 1..80: mol_type = other DNA
catttaagttgtctcaatttccttatcaagaaactggcataatatatgttctgcctacatcccagggtggttgtatagat

SEQ ID NO: 128035 - DNA, 80 bp, synthetic construct
  misc_feature 1..80: note = Artificially Synthesized Probe
  source 1..80: mol_type = other DNA
atcagctgggaaagggttaatgagctatcaactcaagtcatcatacatctggatgggctgtcattaacttcttacaaaaa

SEQ ID NO: 128036 - DNA, 80 bp, synthetic construct
  misc_feature 1..80: note = Artificially Synthesized Probe
  source 1..80: mol_type = other DNA
ttggaacaggatgaaatattcaaatctcatttacctaaccttgccagatattgcttcttcgctgaaggctcggtttctgg

SEQ ID NO: 128037 - DNA, 80 bp, synthetic construct
  misc_feature 1..80: note = Artificially Synthesized Probe
  source 1..80: mol_type = other DNA
tgtgccagcctgggaaaactcccagcctccctttggccatagagtaagcaaaacaaatggcttcactggccccatctacc

SEQ ID NO: 128038 - DNA, 80 bp, synthetic construct
  misc_feature 1..80: note = Artificially Synthesized Probe
  source 1..80: mol_type = other DNA
ggggtgatatgacatggcaagtcatagaatgaagaagcgtattccttgtcatatgaaagctgtagattagtgtgtttcta

SEQ ID NO: 128039 - DNA, 80 bp, synthetic construct; identical to SEQ ID NO: 41001
  misc_feature 1..80: note = Artificially Synthesized Probe
  source 1..80: mol_type = other DNA

SEQ ID NO: 128040 - DNA, 80 bp, synthetic construct
  misc_feature 1..80: note = Artificially Synthesized Probe
  source 1..80: mol_type = other DNA
gggagttgatgttggatgggtagattgaagacagattacagtttgttctggctattgaaccttgctcaaattatttaact

SEQ ID NO: 128041 - DNA, 80 bp, synthetic construct
  misc_feature 1..80: note = Artificially Synthesized Probe
  source 1..80: mol_type = other DNA
aactgaggaaggtggattttaccttggggaaaaaaaatgagaggtattttaggttcttcaacaggaaagtgccataatta

SEQ ID NO: 128042 - DNA, 80 bp, synthetic construct; identical to SEQ ID NO: 41002
  misc_feature 1..80: note = Artificially Synthesized Probe
  source 1..80: mol_type = other DNA

SEQ ID NO: 128043 - DNA, 80 bp, synthetic construct
  misc_feature 1..80: note = Artificially Synthesized Probe
  source 1..80: mol_type = other DNA
ttccctcccaactgaatttaatgtctttccatcctctgcctctagttaagttgtaactgctgttattccactgcagccag

SEQ ID NO: 128044 - DNA, 80 bp, synthetic construct
  misc_feature 1..80: note = Artificially Synthesized Probe
  source 1..80: mol_type = other DNA
tagctgcttccaatgtgatcatgatgagaggaaaaggctgtggggagagttaatttgatgcttgcttgtgcaatgaaatg

SEQ ID NO: 128045 - DNA, 80 bp, synthetic construct
  misc_feature 1..80: note = Artificially Synthesized Probe
  source 1..80: mol_type = other DNA
cccaaagtgctgggattacaggcgtgagccaccgtgcccggcctcagagtagttcttaaattgcaatctagagacaactc

SEQ ID NO: 128046 - DNA, 80 bp, synthetic construct
  misc_feature 1..80: note = Artificially Synthesized Probe
  source 1..80: mol_type = other DNA
gttacagaatgccattgctgaagagggccttagggattacatttagtccaaggattttcagacttttctctaacagaaga

SEQ ID NO: 128047 - DNA, 80 bp, synthetic construct; identical to SEQ ID NO: 41003
  misc_feature 1..80: note = Artificially Synthesized Probe
  source 1..80: mol_type = other DNA

SEQ ID NO: 128048 - DNA, 80 bp, synthetic construct
  misc_feature 1..80: note = Artificially Synthesized Probe
  source 1..80: mol_type = other DNA
tagagctttttagtcttataaatgctatttctgtagtgcaggggcatctgttgtcagatgccaggaaggaggaggcatgt

SEQ ID NO: 128049 - DNA, 80 bp, synthetic construct
  misc_feature 1..80: note = Artificially Synthesized Probe
  source 1..80: mol_type = other DNA
atggcctggcttggttgctatatagtgatttaaccacagtaaccctcagtgagtggcaggttgtatttttattgttgaat

SEQ ID NO: 128050 - DNA, 80 bp, synthetic construct
  misc_feature 1..80: note = Artificially Synthesized Probe
  source 1..80: mol_type = other DNA
tcttcttcctcctaaccgcctcacagccctctagggtgtgtttaactgttgaattgggagtcaagaactgagaactctca

SEQ ID NO: 128051 - DNA, 80 bp, synthetic construct; identical to SEQ ID NO: 41004
  misc_feature 1..80: note = Artificially Synthesized Probe
  source 1..80: mol_type = other DNA

SEQ ID NO: 128052 - DNA, 80 bp, synthetic construct
  misc_feature 1..80: note = Artificially Synthesized Probe
  source 1..80: mol_type = other DNA
ccctcaaggggcttgagtggacttgtctagattaattacacagaaggcacattattctggggtgggagaggcctgggccc

SEQ ID NO: 128053 - DNA, 80 bp, synthetic construct
  misc_feature 1..80: note = Artificially Synthesized Probe
  source 1..80: mol_type = other DNA
aaactatgcatagagaggggtatccaaaggggcccagcaggatcaaagaaggtgaaaaacagcaggtatattctaaaaac

SEQ ID NO: 128054 - DNA, 80 bp, synthetic construct
  misc_feature 1..80: note = Artificially Synthesized Probe
  source 1..80: mol_type = other DNA
gttctgaataatcttattctcctgaaattagaagactgtgatgaagtgtatagtttgggtattgaataaaaaagaatggg

SEQ ID NO: 128055 - DNA, 80 bp, synthetic construct
  misc_feature 1..80: note = Artificially Synthesized Probe
  source 1..80: mol_type = other DNA
tcctcggttttcattgttctgaatcttttggttccacttgtgtggttgtgtgtacaagtcagagtgaacctcattcctgt

SEQ ID NO: 128056 - DNA, 80 bp, synthetic construct
  misc_feature 1..80: note = Artificially Synthesized Probe
  source 1..80: mol_type = other DNA
caagcatggtggctaacacctgcaatcccagcactttgggaggccatggtgggaggatcacttgagtccaggagtttgag

SEQ ID NO: 128057 - DNA, 80 bp, synthetic construct; identical to SEQ ID NO: 41005
  misc_feature 1..80: note = Artificially Synthesized Probe
  source 1..80: mol_type = other DNA

SEQ ID NO: 128058 - DNA, 80 bp, synthetic construct
  misc_feature 1..80: note = Artificially Synthesized Probe
  source 1..80: mol_type = other DNA
ctaccaaaaaaaggaggagtggacgccggggaccaaaaaacagcaacatgtgtgctcctcaggaatgatgcttcccttaa

SEQ ID NO: 128059 - DNA, 80 bp, synthetic construct
  misc_feature 1..80: note = Artificially Synthesized Probe
  source 1..80: mol_type = other DNA
caaaccatttacagttcatttccattgctgtggcttaggaaatgtcagtgtctgaacagatggagaagtgagatggcagc

SEQ ID NO: 128060 - DNA, 80 bp, synthetic construct
  misc_feature 1..80: note = Artificially Synthesized Probe
  source 1..80: mol_type = other DNA
gagtgatacattttctggtgttagtgactgagttgccttctgagccaaacagcttgtctccataaaggaggaatccagat

SEQ ID NO: 128061 - DNA, 80 bp, synthetic construct; identical to SEQ ID NO: 41006
  misc_feature 1..80: note = Artificially Synthesized Probe
  source 1..80: mol_type = other DNA

SEQ ID NO: 128062 - DNA, 80 bp, synthetic construct
  misc_feature 1..80: note = Artificially Synthesized Probe
  source 1..80: mol_type = other DNA
cagtgtgggttgtctgcagattgtggaggcaacaggagggagctgcctggaagtcgttgaactagggccaaagattgggt

SEQ ID NO: 128063 - DNA, 80 bp, synthetic construct
  misc_feature 1..80: note = Artificially Synthesized Probe
  source 1..80: mol_type = other DNA
ctgactggtgacatcaggcagccagagaatttcactcttggcgctaaccggttctggccactgagctttctccattgtgt

SEQ ID NO: 128064 - DNA, 80 bp, synthetic construct
  misc_feature 1..80: note = Artificially Synthesized Probe
  source 1..80: mol_type = other DNA
ttcttttcaagcaagggaatggtccgtgggcatgtgaatgtgcccactctttgctgaggaggaaggagaccatttctatc

SEQ ID NO: 128065 - DNA, 80 bp, synthetic construct; identical to SEQ ID NO: 41007
  misc_feature 1..80: note = Artificially Synthesized Probe
  source 1..80: mol_type = other DNA

SEQ ID NO: 128066 - DNA, 80 bp, synthetic construct
  misc_feature 1..80: note = Artificially Synthesized Probe
  source 1..80: mol_type = other DNA
tttgtaaacacatgctggctgccagcagtggcaagttagcctcctgacccacttctctcctgctttcactctggtgtatg

SEQ ID NO: 128067 - DNA, 80 bp, synthetic construct; identical to SEQ ID NO: 40814
  misc_feature 1..80: note = Artificially Synthesized Probe
  source 1..80: mol_type = other DNA

SEQ ID NO: 128068 - DNA, 80 bp, synthetic construct
  misc_feature 1..80: note = Artificially Synthesized Probe
  source 1..80: mol_type = other DNA
ccctgccgggctccaaacagatccccctacccattcctttcatgtactgtttggtcctggaagaggctcacacaagttgg

SEQ ID NO: 128069 - DNA, 80 bp, synthetic construct
  misc_feature 1..80: note = Artificially Synthesized Probe
  source 1..80: mol_type = other DNA
agcctgtccagagtgagctggtacagagatgccaacaactgcagtctcgcttatccactctaaagattgaaaacgaagag

SEQ ID NO: 128070 - DNA, 80 bp, synthetic construct; identical to SEQ ID NO: 41008
  misc_feature 1..80: note = Artificially Synthesized Probe
  source 1..80: mol_type = other DNA

SEQ ID NO: 128071 - DNA, 80 bp, synthetic construct
  misc_feature 1..80: note = Artificially Synthesized Probe
  source 1..80: mol_type = other DNA
ctttgactttgacacttcaaacatctccatcctcttaggaaagggtgagtttcttctgggctcagtgtatttgctttcaa

SEQ ID NO: 128072 - DNA, 80 bp, synthetic construct
  misc_feature 1..80: note = Artificially Synthesized Probe
  source 1..80: mol_type = other DNA
tagtttgcaaatgagcaaacaagttcatcagtttgttgaaggtcatgaaacagaacctggggctttgcagtactaggccc

SEQ ID NO: 128073 - DNA, 80 bp, synthetic construct
  misc_feature 1..80: note = Artificially Synthesized Probe
  source 1..80: mol_type = other DNA
gcatgaagggttgtagtggcttttaggttttcactgtagagagtagcatgctgtagcagagtccatgtgatgtttacctc

SEQ ID NO: 128074 - DNA, 80 bp, synthetic construct; identical to SEQ ID NO: 41009
  misc_feature 1..80: note = Artificially Synthesized Probe
  source 1..80: mol_type = other DNA

SEQ ID NO: 128075 - DNA, 80 bp, synthetic construct
  misc_feature 1..80: note = Artificially Synthesized Probe
  source 1..80: mol_type = other DNA
agatttggaactcagagtccttgttaagtgtctgaaggacaggcgttgaatatcttagatacgaatgtgggcatactcag

SEQ ID NO: 128076 - DNA, 80 bp, synthetic construct
  misc_feature 1..80: note = Artificially Synthesized Probe
  source 1..80: mol_type = other DNA
caggcacaggggatcctgaaaggggaacttcatcttttagttcttggagagtacatacaaatattcataataacacatat

SEQ ID NO: 128077 - DNA, 80 bp, synthetic construct
  misc_feature 1..80: note = Artificially Synthesized Probe
  source 1..80: mol_type = other DNA
cttattcatgtatctctagtcttcttttagacagttggacccttttttctttttctttttttttttttttttaagtattg

SEQ ID NO: 128078 - DNA, 80 bp, synthetic construct; identical to SEQ ID NO: 41010
  misc_feature 1..80: note = Artificially Synthesized Probe
  source 1..80: mol_type = other DNA

SEQ ID NO: 128079 - DNA, 80 bp, synthetic construct
  misc_feature 1..80: note = Artificially Synthesized Probe
  source 1..80: mol_type = other DNA
aacagcgtgaggtagggatctaactttattttatattccatgtggctatatttattaaagggttcatctttttccccatt

SEQ ID NO: 128080 - DNA, 80 bp, synthetic construct
  misc_feature 1..80: note = Artificially Synthesized Probe
  source 1..80: mol_type = other DNA
actgctaaaagggaatgatatatcagtactattcttctaaaacaactttttaaaaatgattatacaaagccaaatatgct

SEQ ID NO: 128081 - DNA, 80 bp, synthetic construct
  misc_feature 1..80: note = Artificially Synthesized Probe
  source 1..80: mol_type = other DNA
ggatactgctgtacatattgttttacaatctaagtcatataattataatattctttaagcatatttatgagtaaaatatt

SEQ ID NO: 128082 - DNA, 80 bp, synthetic construct
  misc_feature 1..80: note = Artificially Synthesized Probe
  source 1..80: mol_type = other DNA
tcattgatcattttttgaggatttactattgccagacactgtgctacaagctgggaatgctgacagtataagataaagag

SEQ ID NO: 128083 - DNA, 80 bp, synthetic construct; identical to SEQ ID NO: 41011
  misc_feature 1..80: note = Artificially Synthesized Probe
  source 1..80: mol_type = other DNA

SEQ ID NO: 128084 - DNA, 80 bp, synthetic construct
  misc_feature 1..80: note = Artificially Synthesized Probe
  source 1..80: mol_type = other DNA
aggagtttgttgaacactctctagaggcttttaataataggattgtttagctggtctgtctggactgcttagatataaca

SEQ ID NO: 128085 - DNA, 80 bp, synthetic construct
  misc_feature 1..80: note = Artificially Synthesized Probe
  source 1..80: mol_type = other DNA
ttagtaaaagcaggaatggccatattcaaactggtaacctcgcaaatcctgcccaccctttcactttctgtctcaataca

SEQ ID NO: 128086 - DNA, 80 bp, synthetic construct; identical to SEQ ID NO: 41012
  misc_feature 1..80: note = Artificially Synthesized Probe
  source 1..80: mol_type = other DNA

SEQ ID NO: 128087 - DNA, 80 bp, synthetic construct
  misc_feature 1..80: note = Artificially Synthesized Probe
  source 1..80: mol_type = other DNA
aacatcagagcagcacatcctggaagatcctatcttttgtaagtttaagaagcagcctcttgtcacagcttgactcctag

SEQ ID NO: 128088 - DNA, 80 bp, synthetic construct
  misc_feature 1..80: note = Artificially Synthesized Probe
  source 1..80: mol_type = other DNA
agttgcttgcaagagtctcaggaaaataattgtggagttaagaaacttgaagcgatttttaaaaattacctaacccaacc

SEQ ID NO: 128089 - DNA, 80 bp, synthetic construct
  misc_feature 1..80: note = Artificially Synthesized Probe
  source 1..80: mol_type = other DNA
aattagctgggtgtggtggcaggcgcctgtaatcccagctactcaggaggctaaggtgggaggattacttgaaccgggga

SEQ ID NO: 128090 - DNA, 80 bp, synthetic construct
  misc_feature 1..80: note = Artificially Synthesized Probe
  source 1..80: mol_type = other DNA
ctgtccccacagctccaaccagaatagctctgcttttatgttcacgatattgggtgtcccgctaagattttatttgaata

SEQ ID NO: 128091 - DNA, 80 bp, synthetic construct
  misc_feature 1..80: note = Artificially Synthesized Probe
  source 1..80: mol_type = other DNA
ggcggatcacctgaggtcgggagtttgagaccagcctgatcaacatggagaaacctcgtctctactaaaaacacaaaaaa

SEQ ID NO: 128092 - DNA, 80 bp, synthetic construct; identical to SEQ ID NO: 41013
  misc_feature 1..80: note = Artificially Synthesized Probe
  source 1..80: mol_type = other DNA

SEQ ID NO: 128093 - DNA, 80 bp, synthetic construct
  misc_feature 1..80: note = Artificially Synthesized Probe
  source 1..80: mol_type = other DNA
ttatttgccctcagtggtgacatgtttcctgatcttcttggctttgtgtttatcgcttatcttttataacacatagttca

SEQ ID NO: 128094 - DNA, 80 bp, synthetic construct
  misc_feature 1..80: note = Artificially Synthesized Probe
  source 1..80: mol_type = other DNA
accagtttcttctgtgtccttccagagatactctatgcatggacaacaactgacgtatctgtaaataccctttaatatga

SEQ ID NO: 128095 - DNA, 80 bp, synthetic construct; identical to SEQ ID NO: 41014
  misc_feature 1..80: note = Artificially Synthesized Probe
  source 1..80: mol_type = other DNA

SEQ ID NO: 128096 - DNA, 80 bp, synthetic construct
  misc_feature 1..80: note = Artificially Synthesized Probe
  source 1..80: mol_type = other DNA
gctgggattgcaggcacacgccaccacgcctggctaattttttgtatttttagtagagacggggtttcactatgttggcc

SEQ ID NO: 128097 - DNA, 80 bp, synthetic construct
  misc_feature 1..80: note = Artificially Synthesized Probe
  source 1..80: mol_type = other DNA
ttaggttcttttatgggggatagaacagtgaaggggttaaggatcatggccgataaagtaacaaagctaaacagtctgaa

SEQ ID NO: 128098 - DNA, 80 bp, synthetic construct
  misc_feature 1..80: note = Artificially Synthesized Probe
  source 1..80: mol_type = other DNA
gtgaatgcccctgtgctgtcaattaaactggggagacatgctccatttaaagtttactctattatgtattctatctgaca

SEQ ID NO: 128099 - DNA, 80 bp, synthetic construct; identical to SEQ ID NO: 41015
  misc_feature 1..80: note = Artificially Synthesized Probe
  source 1..80: mol_type = other DNA

SEQ ID NO: 128100 - DNA, 80 bp, synthetic construct
  misc_feature 1..80: note = Artificially Synthesized Probe
  source 1..80: mol_type = other DNA
aagacaacacagaactcagaacctagcagcgagggaagtgcatgtttttcaaagggaaaggaatgtgttattttgcagtt

SEQ ID NO: 128101 - DNA, 80 bp, synthetic construct
  misc_feature 1..80: note = Artificially Synthesized Probe
  source 1..80: mol_type = other DNA
attctgcttttattttagcacaaagcaaagatgcttagggaagggatgcttttaggttcactgaggaggtgattcaggta

SEQ ID NO: 128102 - DNA, 80 bp, synthetic construct
  misc_feature 1..80: note = Artificially Synthesized Probe
  source 1..80: mol_type = other DNA
atggaaaaactaagactcagggggttaaatgatttgcccaaggttaggagagttagtaagtggtaggactagaatattcc

SEQ ID NO: 128103 - DNA, 80 bp, synthetic construct
  misc_feature 1..80: note = Artificially Synthesized Probe
  source 1..80: mol_type = other DNA
aaactgaattgaagtttcacaatggcactaaacaaaatgcccaatagactctttgcctcccttcctactttttgaagaaa

SEQ ID NO: 128104 - DNA, 80 bp, synthetic construct; identical to SEQ ID NO: 41016
  misc_feature 1..80: note = Artificially Synthesized Probe
  source 1..80: mol_type = other DNA

SEQ ID NO: 128105 - DNA, 80 bp, synthetic construct
  misc_feature 1..80: note = Artificially Synthesized Probe
  source 1..80: mol_type = other DNA
tctctgtgttgtctgtccaacagcaacagaaaccttctaactcacttccaccaattaaagacaaggtcacttatccccaa

SEQ ID NO: 128106 - DNA, 80 bp, synthetic construct
  misc_feature 1..80: note = Artificially Synthesized Probe
  source 1..80: mol_type = other DNA
agttcataccttgacacagttatgatccttcaggatttaatgaaacccgaagaggtaatccatcatacatctttaccaga

SEQ ID NO: 128107 - DNA, 80 bp, synthetic construct
  misc_feature 1..80: note = Artificially Synthesized Probe
  source 1..80: mol_type = other DNA
ttgttttgaaggttacagcttcttggtgaattttcctcattaggaaacctttagagtctcctgggataaccttccaaaga

SEQ ID NO: 128108 - DNA, 80 bp, synthetic construct
  misc_feature 1..80: note = Artificially Synthesized Probe
  source 1..80: mol_type = other DNA
gatggaaaagggaaggtgataacagagcctctttccttgcagaagttcttgtgcaaaagcataaaaggacagagggaaca

SEQ ID NO: 128109 - DNA, 80 bp, synthetic construct; identical to SEQ ID NO: 41017
  misc_feature 1..80: note = Artificially Synthesized Probe
  source 1..80: mol_type = other DNA

SEQ ID NO: 128110 - DNA, 80 bp, synthetic construct
  misc_feature 1..80: note = Artificially Synthesized Probe
  source 1..80: mol_type = other DNA
atgggagggctagggactgcatcccagagaaagcagatttttcttttgtttttaaacaagagagagaatcagatgcaagc

SEQ ID NO: 128111 - DNA, 80 bp, synthetic construct
  misc_feature 1..80: note = Artificially Synthesized Probe
  source 1..80: mol_type = other DNA
gctcaggctggagtgcagtggtgcaatcttggctcgctgcaagctccgcctcccaggttcaagcaattctcccgcctcag

SEQ ID NO: 128112 - DNA, 80 bp, synthetic construct; identical to SEQ ID NO: 40815
  misc_feature 1..80: note = Artificially Synthesized Probe
  source 1..80: mol_type = other DNA

SEQ ID NO: 128113 - DNA, 80 bp, synthetic construct
  misc_feature 1..80: note = Artificially Synthesized Probe
  source 1..80: mol_type = other DNA
aagtgatccatctgtctcagcctccaaaagtgctgggattataggcctgagccactgcacctggctctgttcaccttctc

SEQ ID NO: 128114 - DNA, 80 bp, synthetic construct; identical to SEQ ID NO: 41018
  misc_feature 1..80: note = Artificially Synthesized Probe
  source 1..80: mol_type = other DNA

SEQ ID NO: 128115 - DNA, 80 bp, synthetic construct
  misc_feature 1..80: note = Artificially Synthesized Probe
  source 1..80: mol_type = other DNA
cttgctagcttgcaatgatcagcaatttatttgatacctcccctcccctgagataatcttatctgtaataaggaaataat

SEQ ID NO: 128116 - DNA, 80 bp, synthetic construct
  misc_feature 1..80: note = Artificially Synthesized Probe
  source 1..80: mol_type = other DNA
ggggcattttgtcgtaatggttaagagcacatgctgtattgtcaaactgcctgtatttggatactaactttaccactcac

SEQ ID NO: 128117 - DNA, 80 bp, synthetic construct; identical to SEQ ID NO: 41019
  misc_feature 1..80: note = Artificially Synthesized Probe
  source 1..80: mol_type = other DNA

SEQ ID NO: 128118 - DNA, 80 bp, synthetic construct
  misc_feature 1..80: note = Artificially Synthesized Probe
  source 1..80: mol_type = other DNA
gaggatatggctcaaagatgctccacatcctgggcttgcagctgaggcagggactgagcctgccattggcactgctcctg

SEQ ID NO: 128119 - DNA, 80 bp, synthetic construct
  misc_feature 1..80: note = Artificially Synthesized Probe
  source 1..80: mol_type = other DNA
ggggctctaggaaacaatttctttatactggccatcatagaactcccagaaaaaacctggagaaggatattaatccacca

SEQ ID NO: 128120 - DNA, 80 bp, synthetic construct
  misc_feature 1..80: note = Artificially Synthesized Probe
  source 1..80: mol_type = other DNA
gatttttttcttcttcttcaggagtctgattgctctttttcctcctcctctcttacagaaaatgaaagagtacctggagg

SEQ ID NO: 128121 - DNA, 80 bp, synthetic construct; identical to SEQ ID NO: 41020
  misc_feature 1..80: note = Artificially Synthesized Probe
  source 1..80: mol_type = other DNA

SEQ ID NO: 128122 - DNA, 80 bp, synthetic construct
  misc_feature 1..80: note = Artificially Synthesized Probe
  source 1..80: mol_type = other DNA
gaggggttatttattctccagacactttgttaaaactcctagctcctctgaggcagcactgagactggagcaagaaggta

SEQ ID NO: 128123 - DNA, 80 bp, synthetic construct
  misc_feature 1..80: note = Artificially Synthesized Probe
  source 1..80: mol_type = other DNA
gtggctatgctgaggccttggtgctgaatggactgtcttgtctcatagaatgattttaaccagaccctggaaagtagcaa

SEQ ID NO: 128124 - DNA, 80 bp, synthetic construct
  misc_feature 1..80: note = Artificially Synthesized Probe
  source 1..80: mol_type = other DNA
ctaatacaatgatggttttatccaccctcacccccacccccacgctccttcccccagactacactcactaccagaaagct

SEQ ID NO: 128125 - DNA, 80 bp, synthetic construct
  misc_feature 1..80: note = Artificially Synthesized Probe
  source 1..80: mol_type = other DNA
gcctctgaatgccgcccccccctccctgccccactaatctaatctcctcacttaaagataggagggagtggaagggagaa

SEQ ID NO: 128126 - DNA, 80 bp, synthetic construct; identical to SEQ ID NO: 41021
  misc_feature 1..80: note = Artificially Synthesized Probe
  source 1..80: mol_type = other DNA

SEQ ID NO: 128127 - DNA, 80 bp, synthetic construct
  misc_feature 1..80: note = Artificially Synthesized Probe
  source 1..80: mol_type = other DNA
gtaactgggattacaggcacgtgccaccacgcctgggtaagttttgtattttcagttgagatggggttttgccatgttgg

SEQ ID NO: 128128 - DNA, 80 bp, synthetic construct
  misc_feature 1..80: note = Artificially Synthesized Probe
  source 1..80: mol_type = other DNA
gcagtggtgtgatcttggcttattgcaaactccacctcccaggttaaagcaattctaccacctcagcctcctgaatagct

SEQ ID NO: 128129 - DNA, 80 bp, synthetic construct
  misc_feature 1..80: note = Artificially Synthesized Probe
  source 1..80: mol_type = other DNA
ggcccagcacaatcttatggcttttaagacattttcttttatgtgaagaaagctggttagataatttctattcttcttcc

SEQ ID NO: 128130 - DNA, 80 bp, synthetic construct
  misc_feature 1..80: note = Artificially Synthesized Probe
  source 1..80: mol_type = other DNA
acaaatgcattcatatgcgctcacatttgtgtgtgtgagtgaatgggtttactcacacatttatgcaccaaatgtgctac

SEQ ID NO: 128131 - DNA, 80 bp, synthetic construct; identical to SEQ ID NO: 41022
  misc_feature 1..80: note = Artificially Synthesized Probe
  source 1..80: mol_type = other DNA

SEQ ID NO: 128132 - DNA, 80 bp, synthetic construct
  misc_feature 1..80: note = Artificially Synthesized Probe
  source 1..80: mol_type = other DNA
tccagaatggaaatggaacagatgtagaaaataatggctcagaataatatttttgcacataagagctgagcctttggtaa

SEQ ID NO: 128133 - DNA, 80 bp, synthetic construct
  misc_feature 1..80: note = Artificially Synthesized Probe
  source 1..80: mol_type = other DNA
tttttacttcccccagctcagcacctgctagggtttgcccctggtttaaataatgcagatctaaaacagattgagcttca

SEQ ID NO: 128134 - DNA, 80 bp, synthetic construct
  misc_feature 1..80: note = Artificially Synthesized Probe
  source 1..80: mol_type = other DNA
tttaaaagctagcaatgacccattaaactcctaaggcccactgttagattgagaaccatgatttgctagcagtatcaaca

SEQ ID NO: 128135 - DNA, 80 bp, synthetic construct; identical to SEQ ID NO: 41023
  misc_feature 1..80: note = Artificially Synthesized Probe
  source 1..80: mol_type = other DNA

SEQ ID NO: 128136 - DNA, 80 bp, synthetic construct
  misc_feature 1..80: note = Artificially Synthesized Probe
  source 1..80: mol_type = other DNA
gaactggatagtttttgatgaccttgaagatcagccagagtctggcttcatactggggcaacaaagaacagtgggggcac

SEQ ID NO: 128137 - DNA, 80 bp, synthetic construct
  misc_feature 1..80: note = Artificially Synthesized Probe
  source 1..80: mol_type = other DNA
aatttattctattaagtatgatctgtgctgctattgttccactacctccatctctatgttcccattgggaagcagaattg

SEQ ID NO: 128138 - DNA, 80 bp, synthetic construct
  misc_feature 1..80: note = Artificially Synthesized Probe
  source 1..80: mol_type = other DNA
ctctctctctcctctcttttgccacacactgttatactgtggctgtctaggggagataggcatggtagttactaggagtg

SEQ ID NO: 128139 - DNA, 80 bp, synthetic construct
  misc_feature 1..80: note = Artificially Synthesized Probe
  source 1..80: mol_type = other DNA
agcctctacgacaaaaaaccgcgaagcacgcccagccctcccccggcaccccgaaaagcacccactccctcccggggaca

SEQ ID NO: 128140 - DNA, 80 bp, synthetic construct
  misc_feature 1..80: note = Artificially Synthesized Probe
  source 1..80: mol_type = other DNA
tgatagaggcttggtgggtagagcaatcttactctgggagagagccaaggagttgagttgtaaaggcattgaatgacttt

SEQ ID NO: 128141 - DNA, 80 bp, synthetic construct; identical to SEQ ID NO: 41024
  misc_feature 1..80: note = Artificially Synthesized Probe
  source 1..80: mol_type = other DNA

SEQ ID NO: 128142 - DNA, 80 bp, synthetic construct
  misc_feature 1..80: note = Artificially Synthesized Probe
  source 1..80: mol_type = other DNA
gaaaagaaggcagcccctaattagtagtgactgttgctggataatgaaatattacattgcattggctcgccaaagagtat

SEQ ID NO: 128143 - DNA, 80 bp, synthetic construct
  misc_feature 1..80: note = Artificially Synthesized Probe
  source 1..80: mol_type = other DNA
atttgtgagctgtcggagagcaaggtattcattcatccagcagttctcagatgcctagaaatgtgctgatttaactagag

SEQ ID NO: 128144 - DNA, 80 bp, synthetic construct
  misc_feature 1..80: note = Artificially Synthesized Probe
  source 1..80: mol_type = other DNA
aattacaataaagatcccattaatataccagtcttgatgactggagggaaccaggataatgggattctctggaacacatc

SEQ ID NO: 128145 - DNA, 80 bp, synthetic construct
  misc_feature 1..80: note = Artificially Synthesized Probe
  source 1..80: mol_type = other DNA
taggccgctcttttcccctctctgaactctggtttcctcttatagaagaccagagcactccactagattcaaggtgtcgt

SEQ ID NO: 128146 - DNA, 80 bp, synthetic construct; identical to SEQ ID NO: 41025
  misc_feature 1..80: note = Artificially Synthesized Probe
  source 1..80: mol_type = other DNA

SEQ ID NO: 128147 - DNA, 80 bp, synthetic construct
  misc_feature 1..80: note = Artificially Synthesized Probe
  source 1..80: mol_type = other DNA
tctcctattctaattttgagtagtggtagacattaaaagcagggacgtctgtgcttttgtgaaaaaaaagagctttcgta

SEQ ID NO: 128148 - DNA, 80 bp, synthetic construct
  misc_feature 1..80: note = Artificially Synthesized Probe
  source 1..80: mol_type = other DNA
tgggtttaagagtgattgtttatctcattcgtcccaattttctctttttctcccttgttgctggattggtccaatctgat

SEQ ID NO: 128149 - DNA, 80 bp, synthetic construct; identical to SEQ ID NO: 41026
  misc_feature 1..80: note = Artificially Synthesized Probe
  source 1..80: mol_type = other DNA

SEQ ID NO: 128150 - DNA, 80 bp, synthetic construct; identical to SEQ ID NO: 40816
  misc_feature 1..80: note = Artificially Synthesized Probe
  source 1..80: mol_type = other DNA

SEQ ID NO: 128151 - DNA, 80 bp, synthetic construct
  misc_feature 1..80: note = Artificially Synthesized Probe
  source 1..80: mol_type = other DNA
gacacttcctacatttgtgctaacatatcagtaactcacagcacctaattagctagaccagacaatctcgctttaagttg

SEQ ID NO: 128152 - DNA, 80 bp, synthetic construct
  misc_feature 1..80: note = Artificially Synthesized Probe
  source 1..80: mol_type = other DNA
actgggcagccagctctcattacccatattaggagggctcttagagagcagtggcatggataatccacatcaatggataa

SEQ ID NO: 128153 - DNA, 80 bp, synthetic construct
  misc_feature 1..80: note = Artificially Synthesized Probe
  source 1..80: mol_type = other DNA
gagagctcagaaatgtctttgtgtctgctcaggggaaagctaatccaggctttaaaaaatcattttgggtaattctcagt

SEQ ID NO: 128154 - DNA, 80 bp, synthetic construct
  misc_feature 1..80: note = Artificially Synthesized Probe
  source 1..80: mol_type = other DNA
cactattttccccttctctactttgaatctcgtcttaatgagtatgccatcagatgcaattacacattttttaaattata

SEQ ID NO: 128155 - DNA, 80 bp, synthetic construct; identical to SEQ ID NO: 41027
  misc_feature 1..80: note = Artificially Synthesized Probe
  source 1..80: mol_type = other DNA

SEQ ID NO: 128156 - DNA, 80 bp, synthetic construct
  misc_feature 1..80: note = Artificially Synthesized Probe
  source 1..80: mol_type = other DNA
caggcaaagtgtgtttgcctggtgctagatttgcgtaggagttacaagatataccaaaatccccaatccaataaagacct

SEQ ID NO: 128157 - DNA, 80 bp, synthetic construct
  misc_feature 1..80: note = Artificially Synthesized Probe
  source 1..80: mol_type = other DNA
ggcaaatcaggcaaacaagaggaagaagctagtagtttttgtttttgagggtctttaatgggttccggtcatttttgacc

SEQ ID NO: 128158 - DNA, 80 bp, synthetic construct
  misc_feature 1..80: note = Artificially Synthesized Probe
  source 1..80: mol_type = other DNA
ttcatatcttctttgttggcctttctccattcctctaaattgaagcatttctccagggctctgtcctctcacgatgtctc

SEQ ID NO: 128159 - DNA, 80 bp, synthetic construct; identical to SEQ ID NO: 41028
  misc_feature 1..80: note = Artificially Synthesized Probe
  source 1..80: mol_type = other DNA

SEQ ID NO: 128160 - DNA, 80 bp, synthetic construct
  misc_feature 1..80: note = Artificially Synthesized Probe
  source 1..80: mol_type = other DNA
taacaaatgtagtacaaataagtacctaacaaaaactctaaccctcttactcatgtgaaattatgccagataatgcatat

SEQ ID NO: 128161 - DNA, 80 bp, synthetic construct
  misc_feature 1..80: note = Artificially Synthesized Probe
  source 1..80: mol_type = other DNA
taagactcaggaatgcctgaggtttttagtttgggagacagggagaacgatggtggcaatggcagaaatagacatatgga

SEQ ID NO: 128162 - DNA, 80 bp, synthetic construct
  misc_feature 1..80: note = Artificially Synthesized Probe
  source 1..80: mol_type = other DNA
actacaggtgcacaccaccacgcctggctaatttatgtattttttttttttttttttttttttatagagactgagtttca

SEQ ID NO: 128163 - DNA, 80 bp, synthetic construct
  misc_feature 1..80: note = Artificially Synthesized Probe
  source 1..80: mol_type = other DNA
ctgcaaattactggaccactgctttactatgttttccaacttaggccctacctttctccctctacttttggtttaaagtt

SEQ ID NO: 128164 - DNA, 80 bp, synthetic construct; identical to SEQ ID NO: 41029
  misc_feature 1..80: note = Artificially Synthesized Probe
  source 1..80: mol_type = other DNA

SEQ ID NO: 128165 - DNA, 80 bp, synthetic construct
  misc_feature 1..80: note = Artificially Synthesized Probe
  source 1..80: mol_type = other DNA
cagccatggtagtgggcacctgtaatcccagctactcatgagtctgaggcaggagaatcacttgaacctgggaagcggag

SEQ ID NO: 128166 - DNA, 80 bp, synthetic construct
  misc_feature 1..80: note = Artificially Synthesized Probe
  source 1..80: mol_type = other DNA
cacatcccagggaaattaatttactcattgctcagaaacattataaggagagaggaggatggcaggagcgttcaaagcct

SEQ ID NO: 128167 - DNA, 80 bp, synthetic construct; identical to SEQ ID NO: 41030
  misc_feature 1..80: note = Artificially Synthesized Probe
  source 1..80: mol_type = other DNA

SEQ ID NO: 128168 - DNA, 80 bp, synthetic construct
  misc_feature 1..80: note = Artificially Synthesized Probe
  source 1..80: mol_type = other DNA
ggtcataatatataaacctaggaccaacaaaactatgcaaacgctcatatcactaacttcattatcactgctgctactat

SEQ ID NO: 128169 - DNA, 80 bp, synthetic construct
  misc_feature 1..80: note = Artificially Synthesized Probe
  source 1..80: mol_type = other DNA
ttccaaatcttctatctgttttgaaatatccaataaattattattaactattattatcctactgtgctatcaaacattag

SEQ ID NO: 128170 - DNA, 80 bp, synthetic construct
  misc_feature 1..80: note = Artificially Synthesized Probe
  source 1..80: mol_type = other DNA
ttcaagcagttctcatgcctcgacctcccaagtagctgggattacaggcgcgcaccacaacgcctggcttatttttgtat

SEQ ID NO: 128171 - DNA, 80 bp, synthetic construct
  misc_feature 1..80: note = Artificially Synthesized Probe
  source 1..80: mol_type = other DNA
ccgcctttcattaaatctgtcattttcttttcttctaaattgggaatgttgcagagaaactgtgaaatagatgacacccc

SEQ ID NO: 128172 - DNA, 80 bp, synthetic construct
  misc_feature 1..80: note = Artificially Synthesized Probe
  source 1..80: mol_type = other DNA
agtttcactcttgtcgcccaggctggggtgcaatggtgcaatcttgcctcactgcaacctccacctcctggattgaagca

SEQ ID NO: 128173 - DNA, 80 bp, synthetic construct; identical to SEQ ID NO: 41031
  misc_feature 1..80: note = Artificially Synthesized Probe
  source 1..80: mol_type = other DNA

SEQ ID NO: 128174 - DNA, 80 bp, synthetic construct
  misc_feature 1..80: note = Artificially Synthesized Probe
  source 1..80: mol_type = other DNA
cacattttacccattcatctattgatggacacttaggttgcttccatatctcagctattgtgaataatgcagcaataaac

SEQ ID NO: 128175 - DNA, 80 bp, synthetic construct
  misc_feature 1..80: note = Artificially Synthesized Probe
  source 1..80: mol_type = other DNA
gccagcagtgtacaagcattcccctttctctgcatccttgccagcatttgttattttttggctttttgataattgccatt

SEQ ID NO: 128176 - DNA, 80 bp, synthetic construct
  misc_feature 1..80: note = Artificially Synthesized Probe
  source 1..80: mol_type = other DNA
agttgtttgagttccttatatattctagttattaatcccttatcaggtggatagtttgcagatatcttctcccattcttt

SEQ ID NO: 128177 - DNA, 80 bp, synthetic construct; identical to SEQ ID NO: 41032
  misc_feature 1..80: note = Artificially Synthesized Probe
  source 1..80: mol_type = other DNA

SEQ ID NO: 128178 - DNA, 80 bp, synthetic construct
  misc_feature 1..80: note = Artificially Synthesized Probe
  source 1..80: mol_type = other DNA
tggaacccagtttcttccttagaatagggaagagaagacaaagattcttcccctgagatcaccctagcctaaccagccag

SEQ ID NO: 128179 - DNA, 80 bp, synthetic construct
  misc_feature 1..80: note = Artificially Synthesized Probe
  source 1..80: mol_type = other DNA
tggttcccagaaagcttgagaggtagaggctaagccagcttttctctcagcctgacttttttgtgagacccagctgcttg

SEQ ID NO: 128180 - DNA, 80 bp, synthetic construct; identical to SEQ ID NO: 41033
  misc_feature 1..80: note = Artificially Synthesized Probe
  source 1..80: mol_type = other DNA

SEQ ID NO: 128181 - DNA, 80 bp, synthetic construct
  misc_feature 1..80: note = Artificially Synthesized Probe
  source 1..80: mol_type = other DNA
actcaggaggctgaggcaggaggatcacttgagactatttgctcaaggttacattgagctatgatcgcaccactgcactc

SEQ ID NO: 128182 - DNA, 80 bp, synthetic construct
  misc_feature 1..80: note = Artificially Synthesized Probe
  source 1..80: mol_type = other DNA
aactggagttctgagctgccttgctccgagtttggttggaggccccttatgagggtcagctgggaatgaaagaaaagtca

SEQ ID NO: 128183 - DNA, 80 bp, synthetic construct
  misc_feature 1..80: note = Artificially Synthesized Probe
  source 1..80: mol_type = other DNA
acaatgaaaccctgtctctactaaaaatacaaaaaaattagctgggcatagtggcaggtgcctgtattcccagctactcg

SEQ ID NO: 128184 - DNA, 80 bp, synthetic construct
  misc_feature 1..80: note = Artificially Synthesized Probe
  source 1..80: mol_type = other DNA
tactagttttgagtaatacttggtatgcacacctggcaatgtttgctgaatgcctagggtgcagtatgggtagtggcaaa

SEQ ID NO: 128185 - DNA, 80 bp, synthetic construct; identical to SEQ ID NO: 41034
  misc_feature 1..80: note = Artificially Synthesized Probe
  source 1..80: mol_type = other DNA

SEQ ID NO: 128186 - DNA, 80 bp, synthetic construct
  misc_feature 1..80: note = Artificially Synthesized Probe
  source 1..80: mol_type = other DNA
tagctgggaccacaggtgtgcaacaccatgccaggctatttttagtagagacagagtctgttgcccaggctggtctcaca

SEQ ID NO: 128187 - DNA, 80 bp, synthetic construct
  misc_feature 1..80: note = Artificially Synthesized Probe
  source 1..80: mol_type = other DNA
ccataggattgttaccagcactagtccatctaaaggacttagtacatggcctcacacctctttaaattcctctataaatg

SEQ ID NO: 128188 - DNA, 80 bp, synthetic construct
  misc_feature 1..80: note = Artificially Synthesized Probe
  source 1..80: mol_type = other DNA
aagcaaaacaacagagcaaagattgacatctgggaggcctgcttctttgcttagtacctgttagtccccactatttagag

SEQ ID NO: 128189 - DNA, 80 bp, synthetic construct
  misc_feature 1..80: note = Artificially Synthesized Probe
  source 1..80: mol_type = other DNA
cttgtgaagtttgagctgtagtggtgacaagtgccaacaaatattcacatccacacattggagtcacagtcagggttgag

SEQ ID NO: 128190 - DNA, 80 bp, synthetic construct; identical to SEQ ID NO: 41035
  misc_feature 1..80: note = Artificially Synthesized Probe
  source 1..80: mol_type = other DNA

SEQ ID NO: 128191 - DNA, 80 bp, synthetic construct
  misc_feature 1..80: note = Artificially Synthesized Probe
  source 1..80: mol_type = other DNA
gacatgacagaatattaattaattaggtggtggagaaggtggtgagaaactggtttggggcagaagatgatcagttttgt

SEQ ID NO: 128192 - DNA, 80 bp, synthetic construct
  misc_feature 1..80: note = Artificially Synthesized Probe
  source 1..80: mol_type = other DNA
agacagttctgcacggtttggcccgttttctctgaccctgggctatccctgtttgaatattctaatgttgtgtttccctt

SEQ ID NO: 128193 - DNA, 80 bp, synthetic construct
  misc_feature 1..80: note = Artificially Synthesized Probe
  source 1..80: mol_type = other DNA
ttcccatcctggcattctcagaaaaggaataaattcttacttgtccacataacttttgctacctcaaaatagccacacct

SEQ ID NO: 128194 - DNA, 80 bp, synthetic construct; identical to SEQ ID NO: 41036
  misc_feature 1..80: note = Artificially Synthesized Probe
  source 1..80: mol_type = other DNA

SEQ ID NO: 128195 - DNA, 80 bp, synthetic construct
  misc_feature 1..80: note = Artificially Synthesized Probe
  source 1..80: mol_type = other DNA
gcagaagtggttgatctccttaatttgaataactttggaatggggagatggcgctttgatagaggatttgattggagatt

SEQ ID NO: 128196 - DNA, 80 bp, synthetic construct
  misc_feature 1..80: note = Artificially Synthesized Probe
  source 1..80: mol_type = other DNA
ctctcttctacttggatgaagctgaatcttataaacaccattcctcaccagctactggtctcattggacagaatttagcg

SEQ ID NO: 128197 - DNA, 80 bp, synthetic construct
  misc_feature 1..80: note = Artificially Synthesized Probe
  source 1..80: mol_type = other DNA
tctgtgataggaaaaggggcagagtgacctttctggagctaaggaggtagataaaatattgcttgtctaaattcagaggc

SEQ ID NO: 128198 - DNA, 80 bp, synthetic construct; identical to SEQ ID NO: 41037
  misc_feature 1..80: note = Artificially Synthesized Probe
  source 1..80: mol_type = other DNA

SEQ ID NO: 128199 - DNA, 80 bp, synthetic construct
  misc_feature 1..80: note = Artificially Synthesized Probe
  source 1..80: mol_type = other DNA
tcaaacagtttgcaaagaaaagtccaaacggagttcaggggaggatgaattatttgtgcctaagagacaataggaagaag

SEQ ID NO: 128200 - DNA, 80 bp, synthetic construct
  misc_feature 1..80: note = Artificially Synthesized Probe
  source 1..80: mol_type = other DNA
atgtcaggtattggtgaatgtcatgaagaaaagtaaagcagggtgaggggatggagaaggaagagggaacactgtttgaa

SEQ ID NO: 128201 - DNA, 80 bp, synthetic construct
  misc_feature 1..80: note = Artificially Synthesized Probe
  source 1..80: mol_type = other DNA
aaaaaggaagcggcaggagatgaagctggaagccagactcttagggcctcatgtgctaggattggattttattctgagga

SEQ ID NO: 128202 - DNA, 80 bp, synthetic construct; identical to SEQ ID NO: 41038
  misc_feature 1..80: note = Artificially Synthesized Probe
  source 1..80: mol_type = other DNA

SEQ ID NO: 128203 - DNA, 80 bp, synthetic construct
  misc_feature 1..80: note = Artificially Synthesized Probe
  source 1..80: mol_type = other DNA
tcaccattactgtggtgaagctctggggaaacaggcacatttatatgttactaatgggaatgcaaactgatacaactctt

SEQ ID NO: 128204 - DNA, 80 bp, synthetic construct
  misc_feature 1..80: note = Artificially Synthesized Probe
  source 1..80: mol_type = other DNA
caaggttatttgtgacagcattgtttgtagttgcaaagtattagaaacaacctaaatgcccatacatagaggagtggttg

SEQ ID NO: 128205 - DNA, 80 bp, synthetic construct; identical to SEQ ID NO: 40817
  misc_feature 1..80: note = Artificially Synthesized Probe
  source 1..80: mol_type = other DNA

SEQ ID NO: 128206 - DNA, 80 bp, synthetic construct
  misc_feature 1..80: note = Artificially Synthesized Probe
  source 1..80: mol_type = other DNA
taatggggttacgtacgcataaatccatagtaagttgaaaatgtactcaatatacctagcctagggaacatcagagctta

SEQ ID NO: 128207 - DNA, 80 bp, synthetic construct
  misc_feature 1..80: note = Artificially Synthesized Probe
  source 1..80: mol_type = other DNA
gaatatcgtactatattttgctagcacaagaaaagatcaacattggaagtatttctcctgaatgcatatcattttggtac

SEQ ID NO: 128208 - DNA, 80 bp, synthetic construct; identical to SEQ ID NO: 41039
  misc_feature 1..80: note = Artificially Synthesized Probe
  source 1..80: mol_type = other DNA

SEQ ID NO: 128209 - DNA, 80 bp, synthetic construct
  misc_feature 1..80: note = Artificially Synthesized Probe
  source 1..80: mol_type = other DNA
gagttcaagaccagcctggccaacatggcgaaaccctgtctctactaaaaatacaaaaaaattagctgggtgtggtgttg

SEQ ID NO: 128210 - DNA, 80 bp, synthetic construct
  misc_feature 1..80: note = Artificially Synthesized Probe
  source 1..80: mol_type = other DNA
agagtatgggtacaacccaaaatggaatgcagacagtaacatataaacctaactgtattacaagtgaataacgtaaccac

SEQ ID NO: 128211 - DNA, 80 bp, synthetic construct
  misc_feature 1..80: note = Artificially Synthesized Probe
  source 1..80: mol_type = other DNA
aggatcaagcaaatatattgtggattttttaacaattgagcacatagtagctgctcaaaaaacatctgttccactaaatt

SEQ ID NO: 128212 - DNA, 80 bp, synthetic construct; identical to SEQ ID NO: 41040
  misc_feature 1..80: note = Artificially Synthesized Probe
  source 1..80: mol_type = other DNA

SEQ ID NO: 128213 - DNA, 80 bp, synthetic construct
  misc_feature 1..80: note = Artificially Synthesized Probe
  source 1..80: mol_type = other DNA
gaacaacttttggcaatggttggatcccgtgcacaatggaaggttttgtgccatttccaaatagcttagtccaagtctga

SEQ ID NO: 128214 - DNA, 80 bp, synthetic construct
  misc_feature 1..80: note = Artificially Synthesized Probe
  source 1..80: mol_type = other DNA
ctagaatctagagattctgtctgttgagcaagaacacatagtagtccctccaaaacataagttctcaggaggaaacagag

SEQ ID NO: 128215 - DNA, 80 bp, synthetic construct
  misc_feature 1..80: note = Artificially Synthesized Probe
  source 1..80: mol_type = other DNA
cctaccaaaaagtatcaagatgatgacgctctttcaagaatttgtgcaatggcttcaccaactagaacatagtgagtagc

SEQ ID NO: 128216 - DNA, 80 bp, synthetic construct
  misc_feature 1..80: note = Artificially Synthesized Probe
  source 1..80: mol_type = other DNA
gccctgggtaagtctctaacctctcctggcctcagcctcttcagatataggatgaacatataattcctacatctaggagt

SEQ ID NO: 128217 - DNA, 80 bp, synthetic construct; identical to SEQ ID NO: 41041
  misc_feature 1..80: note = Artificially Synthesized Probe
  source 1..80: mol_type = other DNA

SEQ ID NO: 128218 - DNA, 80 bp, synthetic construct
  misc_feature 1..80: note = Artificially Synthesized Probe
  source 1..80: mol_type = other DNA
tccattttgttttcctaaaataaaatttgagatttctccagcatgtcaaggtttttgaaggattgtgccgtaacagaggg

SEQ ID NO: 128219 - DNA, 80 bp, synthetic construct
  misc_feature 1..80: note = Artificially Synthesized Probe
  source 1..80: mol_type = other DNA
tggatttctcacccgttttgcagttgtgtgtgtggtgctgtctgtaaagccatgtccatgctcagactgaccaatgtggt

SEQ ID NO: 128220 - DNA, 80 bp, synthetic construct; identical to SEQ ID NO: 41042
  misc_feature 1..80: note = Artificially Synthesized Probe
  source 1..80: mol_type = other DNA

SEQ ID NO: 128221 - DNA, 80 bp, synthetic construct
  misc_feature 1..80: note = Artificially Synthesized Probe
  source 1..80: mol_type = other DNA
gtagtcaggaaccagtgcctagcacaatgtctggcaatactatctgttgactgatcacttcatagcaagcttgttcaacc

SEQ ID NO: 128222 - DNA, 80 bp, synthetic construct
  misc_feature 1..80: note = Artificially Synthesized Probe
  source 1..80: mol_type = other DNA
gctcctgacttatagtttcatgttctctctttttcatgagtattgaaagcattgcccccttgaacaatcaaaccgtgtta

SEQ ID NO: 128223 - DNA, 80 bp, synthetic construct
  misc_feature 1..80: note = Artificially Synthesized Probe
  source 1..80: mol_type = other DNA
cccaggctggagggcagtggtgtgatcatagctcattgtagcttctaacttccaggttcaagtgaacctcctacctgagc

SEQ ID NO: 128224 - DNA, 80 bp, synthetic construct; identical to SEQ ID NO: 41043
  misc_feature 1..80: note = Artificially Synthesized Probe
  source 1..80: mol_type = other DNA

SEQ ID NO: 128225 - DNA, 80 bp, synthetic construct
  misc_feature 1..80: note = Artificially Synthesized Probe
  source 1..80: mol_type = other DNA
attccagtgacttttccaacatccttgcacatgtttttctcctttggcctaaagaagagagacagcgtgcttaaatacat

SEQ ID NO: 128226 - DNA, 80 bp, synthetic construct
  misc_feature 1..80: note = Artificially Synthesized Probe
  source 1..80: mol_type = other DNA
ttgttttgatgagacttgacctatataacactggctcaagtatgtttgttaaagtgaatcacctgttgctttctgggcca

SEQ ID NO: 128227 - DNA, 80 bp, synthetic construct
  misc_feature 1..80: note = Artificially Synthesized Probe
  source 1..80: mol_type = other DNA
gtgtcaggatcccaggtggaagtgaatgacatcaaaaatgcctttgagagaggtaaggaaacagtcttgaagataaaacc

SEQ ID NO: 128228 - DNA, 80 bp, synthetic construct
  misc_feature 1..80: note = Artificially Synthesized Probe
  source 1..80: mol_type = other DNA
tccttcttctttcgtagccctacccatcctgcctctttcacgccgatgatctgccaaaacccaagaagttaactatgata

SEQ ID NO: 128229 - DNA, 80 bp, synthetic construct; identical to SEQ ID NO: 41044
  misc_feature 1..80: note = Artificially Synthesized Probe
  source 1..80: mol_type = other DNA

SEQ ID NO: 128230 - DNA, 80 bp, synthetic construct
  misc_feature 1..80: note = Artificially Synthesized Probe
  source 1..80: mol_type = other DNA
atacagttgctgtgtcccatcctcagcccatagggaatgtccctgagccaggctggcacaagagagtttatattggtgga

SEQ ID NO: 128231 - DNA, 80 bp, synthetic construct
  misc_feature 1..80: note = Artificially Synthesized Probe
  source 1..80: mol_type = other DNA
tgtttttgcctctctcactctctttccttttcgtgggggttgcttatcctcaggagaggaccccctggctggggaccaga

SEQ ID NO: 128232 - DNA, 80 bp, synthetic construct
  misc_feature 1..80: note = Artificially Synthesized Probe
  source 1..80: mol_type = other DNA
agagagaaaaagtttccacagggtctgtgtgttctcataagcttttcaatgaagtttttcttttccccagtgaaatttct

SEQ ID NO: 128233 - DNA, 80 bp, synthetic construct
  misc_feature 1..80: note = Artificially Synthesized Probe
  source 1..80: mol_type = other DNA
ggaaagacttttcagtaagaatctaggaccccccaagtcagtactcctggcctttttttttttcttctgattcatctctg

SEQ ID NO: 128234 - DNA, 80 bp, synthetic construct
  misc_feature 1..80: note = Artificially Synthesized Probe
  source 1..80: mol_type = other DNA
gcttgttgcattaaacaagacatggcttacctgctaaatgtattaatatgtgttctaggaacaaaagccctctgcacatt

SEQ ID NO: 128235 - DNA, 80 bp, synthetic construct; identical to SEQ ID NO: 41045
  misc_feature 1..80: note = Artificially Synthesized Probe
  source 1..80: mol_type = other DNA

SEQ ID NO: 128236 - DNA, 80 bp, synthetic construct
  misc_feature 1..80: note = Artificially Synthesized Probe
  source 1..80: mol_type = other DNA
ttatcctgagaaatgcccagggcatttgggaagctggctctctggtttgttttgttgacttctgtttgtgggagtctagt

SEQ ID NO: 128237 - DNA, 80 bp, synthetic construct; identical to SEQ ID NO: 41046
  misc_feature 1..80: note = Artificially Synthesized Probe
  source 1..80: mol_type = other DNA

SEQ ID NO: 128238 - DNA, 80 bp, synthetic construct
  misc_feature 1..80: note = Artificially Synthesized Probe
  source 1..80: mol_type = other DNA
cctcttgcctcaggccactttttactcattcatagtgcagataagggagggagaagataagccacacttgtccagaggat

SEQ ID NO: 128239 - DNA, 80 bp, synthetic construct
  misc_feature 1..80: note = Artificially Synthesized Probe
  source 1..80: mol_type = other DNA
gctggtaaatatgtgattaataatggagatttggcctaagcatgagtgcgagcctctgaatacggatgggtaaatgctaa

SEQ ID NO: 128240 - DNA, 80 bp, synthetic construct
  misc_feature 1..80: note = Artificially Synthesized Probe
  source 1..80: mol_type = other DNA
aacatttctaaccccatttcctgtgcccaaatccaaatccaaacttgttattaataacaatgagattacaacaaccctag

SEQ ID NO: 128241 - DNA, 80 bp, synthetic construct
  misc_feature 1..80: note = Artificially Synthesized Probe
  source 1..80: mol_type = other DNA
ttcagtttaatattaataatgtgtaataacgagtttggatttggatttggcacagttccctgtgcccaagaagtatacac

SEQ ID NO: 128242 - DNA, 80 bp, synthetic construct
  misc_feature 1..80: note = Artificially Synthesized Probe
  source 1..80: mol_type = other DNA
tctgatcattactgcctgggatcccagtcatagtggaggataacacatggctttcttcttttcagcaatggacaacctgc

SEQ ID NO: 128243 - DNA, 80 bp, synthetic construct; identical to SEQ ID NO: 41047
  misc_feature 1..80: note = Artificially Synthesized Probe
  source 1..80: mol_type = other DNA

SEQ ID NO: 128244 - DNA, 80 bp, synthetic construct
  misc_feature 1..80: note = Artificially Synthesized Probe
  source 1..80: mol_type = other DNA
ggtagaataagtgcttagaagaaaaataaaaaagagtaaagagaggggaaagagtaaaggggtctgaatgaaaggaggga

SEQ ID NO: 128245 - DNA, 80 bp, synthetic construct
  misc_feature 1..80: note = Artificially Synthesized Probe
  source 1..80: mol_type = other DNA
agtgccacggggccatttaaaaccccagagtcatggtaatagcgagtttggatttggatttgggaagcaattagaagatt

SEQ ID NO: 128246 - DNA, 80 bp, synthetic construct
  misc_feature 1..80: note = Artificially Synthesized Probe
  source 1..80: mol_type = other DNA
ctgagtagctgggacccaggcgcatgccaccacgcccagctaatttttgtatttttagtagacatggggtttcaccacgt

SEQ ID NO: 128247 - DNA, 80 bp, synthetic construct
  misc_feature 1..80: note = Artificially Synthesized Probe
  source 1..80: mol_type = other DNA
tttttttaaaaactgccaactgctttgtggagaagttactggaaagggtcatgaagagaaacagggagaccctatcccaa

SEQ ID NO: 128248 - DNA, 80 bp, synthetic construct; identical to SEQ ID NO: 41048
  misc_feature 1..80: note = Artificially Synthesized Probe
  source 1..80: mol_type = other DNA

SEQ ID NO: 128249 - DNA, 80 bp, synthetic construct
  misc_feature 1..80: note = Artificially Synthesized Probe
  source 1..80: mol_type = other DNA
tctacaacaaaggtctgaggagcagagggggccgcgggtgtggatggggcatttcttctcgtccaagcagcatgtccttg

SEQ ID NO: 128250 - DNA, 80 bp, synthetic construct; identical to SEQ ID NO: 40818
  misc_feature 1..80: note = Artificially Synthesized Probe
  source 1..80: mol_type = other DNA

SEQ ID NO: 128251 - DNA, 80 bp, synthetic construct
  misc_feature 1..80: note = Artificially Synthesized Probe
  source 1..80: mol_type = other DNA
agataaagccgaagatgtgttctcttcaggtgtctattgtgtcttgagaacaatgaaatcatacttacatttggggaaat

SEQ ID NO: 128252 - DNA, 80 bp, synthetic construct
  misc_feature 1..80: note = Artificially Synthesized Probe
  source 1..80: mol_type = other DNA
ccccgttgtcccccaatcctgaggctgaattcagttgctatttatcatcactcttgttttgtggttttcatagagaacaa

SEQ ID NO: 128253 - DNA, 80 bp, synthetic construct; identical to SEQ ID NO: 41049
  misc_feature 1..80: note = Artificially Synthesized Probe
  source 1..80: mol_type = other DNA

SEQ ID NO: 128254 - DNA, 80 bp, synthetic construct
  misc_feature 1..80: note = Artificially Synthesized Probe
  source 1..80: mol_type = other DNA
ctcagcaccaccactgcctttgggttgaacaccccagtgagtcacacagcgtgttcatgtgcagcctggaaactctgcta

SEQ ID NO: 128255 - DNA, 80 bp, synthetic construct
  misc_feature 1..80: note = Artificially Synthesized Probe
  source 1..80: mol_type = other DNA
tatgtgacagtacagtggggagaaacaatagaataagcatccatgcagggttgctgcttgcagagatggcagccactatt

SEQ ID NO: 128256 - DNA, 80 bp, synthetic construct
  misc_feature 1..80: note = Artificially Synthesized Probe
  source 1..80: mol_type = other DNA
gcattaataaagtgttttctaaaataataaatagaatgcaagacacaaatgataaagcagaccacctccacaggaagaca

SEQ ID NO: 128257 - DNA, 80 bp, synthetic construct
  misc_feature 1..80: note = Artificially Synthesized Probe
  source 1..80: mol_type = other DNA
atgtatgtgtactttatttctggctactgtttgttcttggattggacacattgtcaatctcaaggaaccaaaaaagctaa

SEQ ID NO: 128258 - DNA, 80 bp, synthetic construct
  misc_feature 1..80: note = Artificially Synthesized Probe
  source 1..80: mol_type = other DNA
gcaggggccctctggagaggtaattgcatatcattaaaaagttaaaaatccagaaaagtgcatgctaaaaagtaagtttc

SEQ ID NO: 128259 - DNA, 80 bp, synthetic construct; identical to SEQ ID NO: 41050
  misc_feature 1..80: note = Artificially Synthesized Probe
  source 1..80: mol_type = other DNA

SEQ ID NO: 128260 - DNA, 80 bp, synthetic construct
  misc_feature 1..80: note = Artificially Synthesized Probe
  source 1..80: mol_type = other DNA
cagccgccgccgcacccggccccagcgcccaccgtctgcatgtgcccgccgtagccgtctgcccagcccgcagcccgcgc

SEQ ID NO: 128261 - DNA, 80 bp, synthetic construct
  misc_feature 1..80: note = Artificially Synthesized Probe
  source 1..80: mol_type = other DNA
ttcaagcgattctcctgcctcagtctcccgagtagctgggattacaggtgcatacctccacgccagactaatttttttgt

SEQ ID NO: 128262 - DNA, 80 bp, synthetic construct
  misc_feature 1..80: note = Artificially Synthesized Probe
  source 1..80: mol_type = other DNA
gaggagagctctgagtgggaagcggagccgggggcctgggacccgtcgcgtcagagccaggtaaaggctccttccctctt

SEQ ID NO: 128263 - DNA, 80 bp, synthetic construct
  misc_feature 1..80: note = Artificially Synthesized Probe
  source 1..80: mol_type = other DNA
ccagttttttatactcttacactagacacagccttcagggacttcaaagattattaacaccatgacattttacacaaaac

SEQ ID NO: 128264 - DNA, 80 bp, synthetic construct
  misc_feature 1..80: note = Artificially Synthesized Probe
  source 1..80: mol_type = other DNA
gtcttctcaactgtagaccttcatataagggaaagacctatttacgcatagttgagttgcagctgctgctgccctggcct

SEQ ID NO: 128265 - DNA, 80 bp, synthetic construct
  misc_feature 1..80: note = Artificially Synthesized Probe
  source 1..80: mol_type = other DNA
tggccaaggcgggtggatcacctgaggtcaggagtttgagaccagcctggccaacatggcgaaaccctctctctactaaa

SEQ ID NO: 128266 - DNA, 80 bp, synthetic construct; identical to SEQ ID NO: 41051
  misc_feature 1..80: note = Artificially Synthesized Probe
  source 1..80: mol_type = other DNA

SEQ ID NO: 128267 - DNA, 80 bp, synthetic construct
  misc_feature 1..80: note = Artificially Synthesized Probe
  source 1..80: mol_type = other DNA
tctcaggactagagtttgtttccctttgaccatcaggcttcccagacactactggttttcttttatgttaccaaaacatt

SEQ ID NO: 128268 - DNA, 80 bp, synthetic construct
  misc_feature 1..80: note = Artificially Synthesized Probe
  source 1..80: mol_type = other DNA
ctctgaggttaccaaggtaattatcctcctgtccctccccagttttaatttgactaggaagtagacttagaaacttcccc

SEQ ID NO: 128269 - DNA, 80 bp, synthetic construct; identical to SEQ ID NO: 41052
  misc_feature 1..80: note = Artificially Synthesized Probe
  source 1..80: mol_type = other DNA

SEQ ID NO: 128270 - DNA, 80 bp, synthetic construct
  misc_feature 1..80: note = Artificially Synthesized Probe
  source 1..80: mol_type = other DNA
taatgtgaggctggatgaggggtacactacagaaacaaactctgcaatcagttctgaagaacagctactcagatggagac

SEQ ID NO: 128271 - DNA, 80 bp, synthetic construct
  misc_feature 1..80: note = Artificially Synthesized Probe
  source 1..80: mol_type = other DNA
gggaggtatccagagctggcccagccctcaatgcctggacgggcaaggcccaatgggactcatcaggtgcagtggctcat

SEQ ID NO: 128272 - DNA, 80 bp, synthetic construct
  misc_feature 1..80: note = Artificially Synthesized Probe
  source 1..80: mol_type = other DNA
agcccgagcagaagccaaatggcatgctgaccttttcctgaaaaaatcctgaatgtaataatctagaaggagattatgaa

SEQ ID NO: 128273 - DNA, 80 bp, synthetic construct
  misc_feature 1..80: note = Artificially Synthesized Probe
  source 1..80: mol_type = other DNA
atttgattattttgttatgcaagaaggtacacaatgcacagtgcctgtgcctctgaccatatctttaccagggcagcctg

SEQ ID NO: 128274 - DNA, 80 bp, synthetic construct; identical to SEQ ID NO: 41053
  misc_feature 1..80: note = Artificially Synthesized Probe
  source 1..80: mol_type = other DNA

SEQ ID NO: 128275 - DNA, 80 bp, synthetic construct
  misc_feature 1..80: note = Artificially Synthesized Probe
  source 1..80: mol_type = other DNA
catgcgagagctttccagcttgccccctttcccttctcctccagtttatcacagttcagtgaagagaacatgatggaccc

SEQ ID NO: 128276 - DNA, 80 bp, synthetic construct
  misc_feature 1..80: note = Artificially Synthesized Probe
  source 1..80: mol_type = other DNA
attcctcttctcttttccagtgcttgtccagtaacctcaaggaaatctgttccaacgcttctttgctgttggtgtattcc

SEQ ID NO: 128277 - DNA, 80 bp, synthetic construct
  misc_feature 1..80: note = Artificially Synthesized Probe
  source 1..80: mol_type = other DNA
agcagaggaggaagcatggaggattactggtaggggggcttgggacgggaggaggggagggattcactagcacacactgg

SEQ ID NO: 128278 - DNA, 80 bp, synthetic construct
  misc_feature 1..80: note = Artificially Synthesized Probe
  source 1..80: mol_type = other DNA
cagactaaatgccacttcttgccacctccctttttgatgagttctgagtggcaagggactattctgaaagatattgacaa

SEQ ID NO: 128279 - DNA, 80 bp, synthetic construct
  misc_feature 1..80: note = Artificially Synthesized Probe
  source 1..80: mol_type = other DNA
gtttagataaaaggcataatttcctgaccgtgagtttgtaagctggcacttcagaatgattttagaaatttgtgaagaga

SEQ ID NO: 128280 - DNA, 80 bp, synthetic construct; identical to SEQ ID NO: 41054
  misc_feature 1..80: note = Artificially Synthesized Probe
  source 1..80: mol_type = other DNA

SEQ ID NO: 128281 - DNA, 80 bp, synthetic construct
  misc_feature 1..80: note = Artificially Synthesized Probe
  source 1..80: mol_type = other DNA
ccctcccttcttcccctaaatagtatttcagcctgagctgaaagcacaagccagcccaaatcggattctgtctgaattca

SEQ ID NO: 128282 - DNA, 80 bp, synthetic construct
  misc_feature 1..80: note = Artificially Synthesized Probe
  source 1..80: mol_type = other DNA
tgtgaacttagtaataccagtgacatccctgggttcatccctctctgctgtactgcagatttcagtgtctgggtccaagc

SEQ ID NO: 128283 - DNA, 80 bp, synthetic construct
  misc_feature 1..80: note = Artificially Synthesized Probe
  source 1..80: mol_type = other DNA
ccccttgcatgcgtggtgaaaagctgtagaatagcattcccttccttctaaagtcaggcagaacctccgccctcacttct

SEQ ID NO: 128284 - DNA, 80 bp, synthetic construct; identical to SEQ ID NO: 41055
  misc_feature 1..80: note = Artificially Synthesized Probe
  source 1..80: mol_type = other DNA

SEQ ID NO: 128285 - DNA, 80 bp, synthetic construct
  misc_feature 1..80: note = Artificially Synthesized Probe
  source 1..80: mol_type = other DNA
aaggcagtaaggaggtgagtgagggtggtagaaggggagatagagcactaagaagagaatggagaatgatcaggagaccc

SEQ ID NO: 128286 - DNA, 80 bp, synthetic construct
  misc_feature 1..80: note = Artificially Synthesized Probe
  source 1..80: mol_type = other DNA
tatttttgggtctggtgggtgcacaagagcaaaggctggggatggagtgtgtttcaagagaagcataggattttagggct

SEQ ID NO: 128287 - DNA, 80 bp, synthetic construct
  misc_feature 1..80: note = Artificially Synthesized Probe
  source 1..80: mol_type = other DNA
agtgcccctaagcctccttttgaatcactaaaagttttcacttacctccctgtctttctcaaataaaatttcctctttct

SEQ ID NO: 128288 - DNA, 80 bp, synthetic construct; identical to SEQ ID NO: 41056
  misc_feature 1..80: note = Artificially Synthesized Probe
  source 1..80: mol_type = other DNA

SEQ ID NO: 128289 - DNA, 80 bp, synthetic construct
  misc_feature 1..80: note = Artificially Synthesized Probe
  source 1..80: mol_type = other DNA
ccgtttatattcttctagaatgttctctggagcctgggaaacctccttggaagtgacttgctctacacaggatgagttct

SEQ ID NO: 128290 - DNA, 80 bp, synthetic construct
  misc_feature 1..80: note = Artificially Synthesized Probe
  source 1..80: mol_type = other DNA
ctgcctactaccagaggaagaactttagaaatgaacagtttctctacttttcaggaagtaagaacttcctggtgcccatc

SEQ ID NO: 128291 - DNA, 80 bp, synthetic construct
  misc_feature 1..80: note = Artificially Synthesized Probe
  source 1..80: mol_type = other DNA
gcacgatcatggctcactgcagcctcgacttcccaggcttaaccaatcctcccacctcagcctccagagtagctagaacc

SEQ ID NO: 128292 - DNA, 80 bp, synthetic construct; identical to SEQ ID NO: 41057
  misc_feature 1..80: note = Artificially Synthesized Probe
  source 1..80: mol_type = other DNA

SEQ ID NO: 128293 - DNA, 80 bp, synthetic construct
  misc_feature 1..80: note = Artificially Synthesized Probe
  source 1..80: mol_type = other DNA
ctctgtgccaaacttgtgactaaattactttattaaatcctcacacagctgaggatatagatctttatcttcagtatata

SEQ ID NO: 128294 - DNA, 80 bp, synthetic construct
  misc_feature 1..80: note = Artificially Synthesized Probe
  source 1..80: mol_type = other DNA
agagaatcagaccttgaggagttgagttgttctctattttctaaagaatttagtttataccttcaaaagggcttcccttt

SEQ ID NO: 128295 - DNA, 80 bp, synthetic construct
  misc_feature 1..80: note = Artificially Synthesized Probe
  source 1..80: mol_type = other DNA
gaggctgtatgaaggggaagacaagaattttatgagcacatgttaatgtccctgtcactcttgcttctgttgcagtgata

SEQ ID NO: 128296 - DNA, 80 bp, synthetic construct
  misc_feature 1..80: note = Artificially Synthesized Probe
  source 1..80: mol_type = other DNA
cagaaggaagtgattatatatcctgtgcatctgatgaacctgtctgcccagcggtcccctgagggcaggcagagagctcc

SEQ ID NO: 128297 - DNA, 80 bp, synthetic construct; identical to SEQ ID NO: 41058
  misc_feature 1..80: note = Artificially Synthesized Probe
  source 1..80: mol_type = other DNA

SEQ ID NO: 128298 - DNA, 80 bp, synthetic construct; identical to SEQ ID NO: 40819
  misc_feature 1..80: note = Artificially Synthesized Probe
  source 1..80: mol_type = other DNA

SEQ ID NO: 128299 - DNA, 80 bp, synthetic construct
  misc_feature 1..80: note = Artificially Synthesized Probe
  source 1..80: mol_type = other DNA
cctgtagtgccagctacttgggaggctgcggtaggaagatcccttaagcccaggagttcaaggctgcaacaagctatgat

SEQ ID NO: 128300 - DNA, 80 bp, synthetic construct
  misc_feature 1..80: note = Artificially Synthesized Probe
  source 1..80: mol_type = other DNA
tgctttcacgcctaccgactggaaaaactgaccctttccaaagtacagacatgcgagtgccgagcagcgtggtgggcgtg

SEQ ID NO: 128301 - DNA, 80 bp, synthetic construct
  misc_feature 1..80: note = Artificially Synthesized Probe
  source 1..80: mol_type = other DNA
tcagaattttctgggcacaagaatgaaatggcaacagtctgtggagttttccctgttccctgccttgctgggaattctgc

SEQ ID NO: 128302 - DNA, 80 bp, synthetic construct; identical to SEQ ID NO: 41059
  misc_feature 1..80: note = Artificially Synthesized Probe
  source 1..80: mol_type = other DNA

SEQ ID NO: 128303 - DNA, 80 bp, synthetic construct
  misc_feature 1..80: note = Artificially Synthesized Probe
  source 1..80: mol_type = other DNA
gcctcctatagtgaaatctccaacccctcctgtgcaggagcagacccaccagctagggccatctaggcatggtcttattt

SEQ ID NO: 128304 - DNA, 80 bp, synthetic construct
  misc_feature 1..80: note = Artificially Synthesized Probe
  source 1..80: mol_type = other DNA
gataacaataagtcatgcacacataccacttactatgggcgggacactgttctaagcacttttacaaattgtaattcatt

SEQ ID NO: 128305 - DNA, 80 bp, synthetic construct
  misc_feature 1..80: note = Artificially Synthesized Probe
  source 1..80: mol_type = other DNA
aaaatatattttcatattttgctccttggaaagttgattgagcaagttattttctctttatagagagacagaaagctcac

SEQ ID NO: 128306 - DNA, 80 bp, synthetic construct; identical to SEQ ID NO: 41060
  misc_feature 1..80: note = Artificially Synthesized Probe
  source 1..80: mol_type = other DNA

SEQ ID NO: 128307 - DNA, 80 bp, synthetic construct
  misc_feature 1..80: note = Artificially Synthesized Probe
  source 1..80: mol_type = other DNA
accccgtctattaataatacaaaaaattagctgggcgtggtggcacacgtctgtagtcccagctacttgggaggctgagg

SEQ ID NO: 128308 - DNA, 80 bp, synthetic construct
  misc_feature 1..80: note = Artificially Synthesized Probe
  source 1..80: mol_type = other DNA
ataagagagaagaagattcctggtggagggaacagtgtgagcaaaggcaggtaaaaggtgataccagtgctttcaggata

SEQ ID NO: 128309 - DNA, 80 bp, synthetic construct; identical to SEQ ID NO: 41061
  misc_feature 1..80: note = Artificially Synthesized Probe
  source 1..80: mol_type = other DNA

SEQ ID NO: 128310 - DNA, 80 bp, synthetic construct
  misc_feature 1..80: note = Artificially Synthesized Probe
  source 1..80: mol_type = other DNA
cacgatagcatgccttttatggcgaaatgtgtttgaacttcaaacaacaaatatataaaacttattatgcaatacaccct

SEQ ID NO: 128311 - DNA, 80 bp, synthetic construct
  misc_feature 1..80: note = Artificially Synthesized Probe
  source 1..80: mol_type = other DNA
cccatggcatctttgggggtggtccccagctgctctatgggagtgagacttcatttctggagccataggactatgaggga

SEQ ID NO: 128312 - DNA, 80 bp, synthetic construct
  misc_feature 1..80: note = Artificially Synthesized Probe
  source 1..80: mol_type = other DNA
tagaaacctgccagccagccagcactcatccatatttatacctgatgagtgataacaaggggtttttatttgaccaccta

SEQ ID NO: 128313 - DNA, 80 bp, synthetic construct
  misc_feature 1..80: note = Artificially Synthesized Probe
  source 1..80: mol_type = other DNA
gttttctaggagaaatccggcttaagcagccttatggaagtgacctagttcatttaaccgagatgaggttgatatagggt

SEQ ID NO: 128314 - DNA, 80 bp, synthetic construct; identical to SEQ ID NO: 41062
  misc_feature 1..80: note = Artificially Synthesized Probe
  source 1..80: mol_type = other DNA

SEQ ID NO: 128315 - DNA, 80 bp, synthetic construct
  misc_feature 1..80: note = Artificially Synthesized Probe
  source 1..80: mol_type = other DNA
ttagcattatgacttcaccacaggatcaagagaagatgaattgtgggggagaaggggctttctttgtcatcagtagccag

SEQ ID NO: 128316 - DNA, 80 bp, synthetic construct
  misc_feature 1..80: note = Artificially Synthesized Probe
  source 1..80: mol_type = other DNA
gccgataaaccacaacctggacttgccgcctccttctccaggaggccgccccagcacggcctccccaggaagcagcatgg

SEQ ID NO: 128317 - DNA, 80 bp, synthetic construct
  misc_feature 1..80: note = Artificially Synthesized Probe
  source 1..80: mol_type = other DNA
tgtcgctgctgcctcagagctgtgtggggtcgcgtgtatgtcggggggccatcttgccgatttaacgctgctttttgtgt

SEQ ID NO: 128318 - DNA, 80 bp, synthetic construct; identical to SEQ ID NO: 41063
  misc_feature 1..80: note = Artificially Synthesized Probe
  source 1..80: mol_type = other DNA

SEQ ID NO: 128319 - DNA, 80 bp, synthetic construct
  misc_feature 1..80: note = Artificially Synthesized Probe
  source 1..80: mol_type = other DNA
ggatgctgctacaagcctcggggcaggtccaggtctccagctagctgccctcgtgctgtggaagggtgctttactgtgtg

SEQ ID NO: 128320 - DNA, 80 bp, synthetic construct
  misc_feature 1..80: note = Artificially Synthesized Probe
  source 1..80: mol_type = other DNA
tccaatccatactcaaataatagtctttgatgtctgtcttccttgacccgtgttcgtgcaaagattcagagtctgtgtgt

SEQ ID NO: 128321 - DNA, 80 bp, synthetic construct
  misc_feature 1..80: note = Artificially Synthesized Probe
  source 1..80: mol_type = other DNA
cccttttcttctgccctttcacaccaggagaaataattttccattttgttcctattgctttggccttttgtattattcta

SEQ ID NO: 128322 - DNA, 80 bp, synthetic construct
  misc_feature 1..80: note = Artificially Synthesized Probe
  source 1..80: mol_type = other DNA
tgacctagaatcattcttatttcacagcaacctgtgtcttgactaatgttaaactgactaatttgttttgaagctgagaa

SEQ ID NO: 128323 - DNA, 80 bp, synthetic construct
  misc_feature 1..80: note = Artificially Synthesized Probe
  source 1..80: mol_type = other DNA
ccaagaggcattcaggttattggagaactaatctcatctcaaggggccagacaccaagtcccaaagcctacagacctctt

SEQ ID NO: 128324 - DNA, 80 bp, synthetic construct; identical to SEQ ID NO: 41064
  misc_feature 1..80: note = Artificially Synthesized Probe
  source 1..80: mol_type = other DNA

SEQ ID NO: 128325 - DNA, 80 bp, synthetic construct
  misc_feature 1..80: note = Artificially Synthesized Probe
  source 1..80: mol_type = other DNA
cagcacactgccctgctgggagggcaagccaatatcaagtaactgtgggctaatcacatttttttccttatttacaattc

SEQ ID NO: 128326 - DNA, 80 bp, synthetic construct
  misc_feature 1..80: note = Artificially Synthesized Probe
  source 1..80: mol_type = other DNA
ataactgaaatggtaaacagaagaagaaaaaaaaagagtatctgtagacagttaaggtggttcccttgaactccttgttt

SEQ ID NO: 128327 - DNA, 80 bp, synthetic construct
  misc_feature 1..80: note = Artificially Synthesized Probe
  source 1..80: mol_type = other DNA
gagtttcccgagtgcccaggttctctttcgcccctgggcgctcacgcctgctgtctcctcacctggtcacctcctcatct

SEQ ID NO: 128328 - DNA, 80 bp, synthetic construct; identical to SEQ ID NO: 41065
  misc_feature 1..80: note = Artificially Synthesized Probe
  source 1..80: mol_type = other DNA

SEQ ID NO: 128329 - DNA, 80 bp, synthetic construct
  misc_feature 1..80: note = Artificially Synthesized Probe
  source 1..80: mol_type = other DNA
gggtgtggcacttccatttaattctacacatttattaagtatctactgttgtgccaagcactgctggtgtttattcagag

SEQ ID NO: 128330 - DNA, 80 bp, synthetic construct
  misc_feature 1..80: note = Artificially Synthesized Probe
  source 1..80: mol_type = other DNA
cagttggagttagtggtgccagggaaatccttgcagagagggggttcatttcagcagggccttagaagactctgagaaca

SEQ ID NO: 128331 - DNA, 80 bp, synthetic construct
  misc_feature 1..80: note = Artificially Synthesized Probe
  source 1..80: mol_type = other DNA
gacctcagcagtgaacaggactaggactggcttagagcactgtccccacctcacagaccagctccttatcttcagagtct

SEQ ID NO: 128332 - DNA, 80 bp, synthetic construct; identical to SEQ ID NO: 41066
  misc_feature 1..80: note = Artificially Synthesized Probe
  source 1..80: mol_type = other DNA

SEQ ID NO: 128333 - DNA, 80 bp, synthetic construct
  misc_feature 1..80: note = Artificially Synthesized Probe
  source 1..80: mol_type = other DNA
ctccatgcctacagaataagcaacaacagcctcttgccagagcccaaaacagttacagtctttttggaaaaagagtcatg

SEQ ID NO: 128334 - DNA, 80 bp, synthetic construct; identical to SEQ ID NO: 40820
  misc_feature 1..80: note = Artificially Synthesized Probe
  source 1..80: mol_type = other DNA

SEQ ID NO: 128335 - DNA, 80 bp, synthetic construct
  misc_feature 1..80: note = Artificially Synthesized Probe
  source 1..80: mol_type = other DNA
tcagacattttttctgacagcaacttacatcttgacaacacaaagcccgtgaccaccaagtaagtatccatttctccttc

SEQ ID NO: 128336 - DNA, 80 bp, synthetic construct; identical to SEQ ID NO: 41067
  misc_feature 1..80: note = Artificially Synthesized Probe
  source 1..80: mol_type = other DNA

SEQ ID NO: 128337 - DNA, 80 bp, synthetic construct
  misc_feature 1..80: note = Artificially Synthesized Probe
  source 1..80: mol_type = other DNA
gtgttccatcagtgggcacgggagcctcaactccatcagccgccactcatccctgaagaatcggctggatagtccacaga

SEQ ID NO: 128338 - DNA, 80 bp, synthetic construct
  misc_feature 1..80: note = Artificially Synthesized Probe
  source 1..80: mol_type = other DNA
cactaccacttagtgccacccacctaattatgacaggacttgaaacagaatgattattttgtatgtgatatactgagtat

SEQ ID NO: 128339 - DNA, 80 bp, synthetic construct
  misc_feature 1..80: note = Artificially Synthesized Probe
  source 1..80: mol_type = other DNA
ggctattaggaaggctgttgtaatttttaaagccggtattaagagtattttgaaagcccaagttttgagtctaaagacct

SEQ ID NO: 128340 - DNA, 80 bp, synthetic construct; identical to SEQ ID NO: 41068
  misc_feature 1..80: note = Artificially Synthesized Probe
  source 1..80: mol_type = other DNA

SEQ ID NO: 128341 - DNA, 80 bp, synthetic construct
  misc_feature 1..80: note = Artificially Synthesized Probe
  source 1..80: mol_type = other DNA
gcagttcactcagacgtctctcccaactatataattttcattagaccaggtaggaactaagggcttattgttgccttctt

SEQ ID NO: 128342 - DNA, 80 bp, synthetic construct
  misc_feature 1..80: note = Artificially Synthesized Probe
  source 1..80: mol_type = other DNA
attgagctacaggcctgagatgtcttgctttgctagccttctattctgtgcctctatttaagctcttggctgcaatctgc

SEQ ID NO: 128343 - DNA, 80 bp, synthetic construct
  misc_feature 1..80: note = Artificially Synthesized Probe
  source 1..80: mol_type = other DNA
ttcctgagcattttaaaggtttgagaatgtcatagggatgagtgaaactgaatcactgtgaacagaaagcatgcatcggt

SEQ ID NO: 128344 - DNA, 80 bp, synthetic construct
  misc_feature 1..80: note = Artificially Synthesized Probe
  source 1..80: mol_type = other DNA
gctggcttgcatacaaaggttctttggttctgccttgagtccctgggctaggactgctgttggctaaagatctagagtgt

SEQ ID NO: 128345 - DNA, 80 bp, synthetic construct; identical to SEQ ID NO: 41069
  misc_feature 1..80: note = Artificially Synthesized Probe
  source 1..80: mol_type = other DNA

SEQ ID NO: 128346 - DNA, 80 bp, synthetic construct
  misc_feature 1..80: note = Artificially Synthesized Probe
  source 1..80: mol_type = other DNA
agggttgacgttagaagccaagtttttgtggagcaataaggtaaaataatgaaggaagcctatagaattccaggagagtt

SEQ ID NO: 128347 - DNA, 80 bp, synthetic construct
  misc_feature 1..80: note = Artificially Synthesized Probe
  source 1..80: mol_type = other DNA
tactttgtccgtgtttctcttccccactagattatatgtcacttcgtcgataagtatttcaatatctatctctaaaacct

SEQ ID NO: 128348 - DNA, 80 bp, synthetic construct
  misc_feature 1..80: note = Artificially Synthesized Probe
  source 1..80: mol_type = other DNA
gccaagtacaataatctggacatcttacggtcattttcttcatgccttggcctgtgttgttgaaaccggctccttgggga

SEQ ID NO: 128349 - DNA, 80 bp, synthetic construct
  misc_feature 1..80: note = Artificially Synthesized Probe
  source 1..80: mol_type = other DNA
tccccagtggtggcccccacgtcagagccctccagccctctgcacacccagctcctcaaggaccccgagcccgccttcca

SEQ ID NO: 128350 - DNA, 80 bp, synthetic construct; identical to SEQ ID NO: 41070
  misc_feature 1..80: note = Artificially Synthesized Probe
  source 1..80: mol_type = other DNA

SEQ ID NO: 128351 - DNA, 80 bp, synthetic construct
  misc_feature 1..80: note = Artificially Synthesized Probe
  source 1..80: mol_type = other DNA
gtaattcagccagctgcagtccgtaccgttcttaggttagccagagacaggttttcattatcaggtcactgtgaaatctg

SEQ ID NO: 128352 - DNA, 80 bp, synthetic construct
  misc_feature 1..80: note = Artificially Synthesized Probe
  source 1..80: mol_type = other DNA
gccatccagctttcagtggcatcttgttttgggaactgattatagagaatcatatatagtccagtcttcattttacatac

SEQ ID NO: 128353 - DNA, 80 bp, synthetic construct; identical to SEQ ID NO: 41071
  misc_feature 1..80: note = Artificially Synthesized Probe
  source 1..80: mol_type = other DNA

SEQ ID NO: 128354 - DNA, 80 bp, synthetic construct
  misc_feature 1..80: note = Artificially Synthesized Probe
  source 1..80: mol_type = other DNA
acatttctcgggttcctacctttgtctctgatggaccattttccatttaagacattttcctgtataagacagttttatag

SEQ ID NO: 128355 - DNA, 80 bp, synthetic construct
  misc_feature 1..80: note = Artificially Synthesized Probe
  source 1..80: mol_type = other DNA
agaaattgttcccaaatgaaaacttgttttaagtccaccccttagtttccttattttacaaggtctctcttcagggacca

SEQ ID NO: 128356 - DNA, 80 bp, synthetic construct
  misc_feature 1..80: note = Artificially Synthesized Probe
  source 1..80: mol_type = other DNA
gcagaggttgtgtaattgtattcatcactgttgaatgtattattggtttgatttggtttcactgctcctaagttcctttt

SEQ ID NO: 128357 - DNA, 80 bp, synthetic construct
  misc_feature 1..80: note = Artificially Synthesized Probe
  source 1..80: mol_type = other DNA
caaggccagaatcgaaagaaaattaaaatttgaatgctgaatattctggctctactctggccttttttctggttcccttc

SEQ ID NO: 128358 - DNA, 80 bp, synthetic construct; identical to SEQ ID NO: 41072
  misc_feature 1..80: note = Artificially Synthesized Probe
  source 1..80: mol_type = other DNA

SEQ ID NO: 128359 - DNA, 80 bp, synthetic construct
  misc_feature 1..80: note = Artificially Synthesized Probe
  source 1..80: mol_type = other DNA
tttttttttttaatcctgtgcaaaggaaaagaggtgctttgtgggaaatcactaatgagaaggctaacctgcagcaccag

SEQ ID NO: 128360 - DNA, 80 bp, synthetic construct
  misc_feature 1..80: note = Artificially Synthesized Probe
  source 1..80: mol_type = other DNA
catacccaaggatctgtttccttgctgaaaatgaaaccctatctttcactttacattcctttcaatccaactgatcaaaa

SEQ ID NO: 128361 - DNA, 80 bp, synthetic construct
  misc_feature 1..80: note = Artificially Synthesized Probe
  source 1..80: mol_type = other DNA
tttcaaccctgtacatgactcgtgttcaccatccccttgatcagtgtccatccgcgctaatttgcatcatgaactgaaca

SEQ ID NO: 128362 - DNA, 80 bp, synthetic construct
  misc_feature 1..80: note = Artificially Synthesized Probe
  source 1..80: mol_type = other DNA
gtccttctcggcagagctcactgcaaacaactggaattgaggttgcacactgtgatttttacaccgaaaagccaaaagga

SEQ ID NO: 128363 - DNA, 80 bp, synthetic construct; identical to SEQ ID NO: 41073
  misc_feature 1..80: note = Artificially Synthesized Probe
  source 1..80: mol_type = other DNA

SEQ ID NO: 128364 - DNA, 80 bp, synthetic construct
  misc_feature 1..80: note = Artificially Synthesized Probe
  source 1..80: mol_type = other DNA
ttccagggaatcgcaatgttgtggcgtctgacttgtatgtcacatttgtgtaaaatggtatattctttaaaatagtgttg

SEQ ID NO: 128365 - DNA, 80 bp, synthetic construct
  misc_feature 1..80: note = Artificially Synthesized Probe
  source 1..80: mol_type = other DNA
tgaacctaagactgtcactcaacagatgttggattggggaaaatccaaagcacaacttcaaaataaaatacatttttagg

SEQ ID NO: 128366 - DNA, 80 bp, synthetic construct
  misc_feature 1..80: note = Artificially Synthesized Probe
  source 1..80: mol_type = other DNA
gctgtcaaaaggccactgaataaacaaattgataggaatggcggacataatctctgcagttccttgaaaagaaggaaggg

SEQ ID NO: 128367 - DNA, 80 bp, synthetic construct
  misc_feature 1..80: note = Artificially Synthesized Probe
  source 1..80: mol_type = other DNA
ttagagactcaaagtgcttccagttttgttacctcatttattctctaggggcaggaattaaggtcttgatggagatgaag

SEQ ID NO: 128368 - DNA, 80 bp, synthetic construct
  misc_feature 1..80: note = Artificially Synthesized Probe
  source 1..80: mol_type = other DNA
caaaaaggataaggagatcatagcagagtacgatactcaggtcaaaggtaagggctttgaaaaatagcacactgcaaatg

SEQ ID NO: 128369 - DNA, 80 bp, synthetic construct; identical to SEQ ID NO: 40821
  misc_feature 1..80: note = Artificially Synthesized Probe
  source 1..80: mol_type = other DNA

SEQ ID NO: 128370 - DNA, 80 bp, synthetic construct
  misc_feature 1..80: note = Artificially Synthesized Probe
  source 1..80: mol_type = other DNA
taatggaaatgaaaatgacagcatgtttttgtcagtttaaatgaataggtttcctttagatcgatgctgaagttggtatt

SEQ ID NO: 128371 - DNA, 80 bp, synthetic construct
  misc_feature 1..80: note = Artificially Synthesized Probe
  source 1..80: mol_type = other DNA
ctgtggtaccagagggccctacactgtcttcagagacattcagttcagtgcattttaaaaaattcattcattcaatcact

SEQ ID NO: 128372 - DNA, 80 bp, synthetic construct
  misc_feature 1..80: note = Artificially Synthesized Probe
  source 1..80: mol_type = other DNA
ggctggagtgcagtggtgcgatctcggctcactgcaacctccacctcccgggttcaagcaattctcctgcctcagcctcc

SEQ ID NO: 128373 - DNA, 80 bp, synthetic construct; identical to SEQ ID NO: 40822
  misc_feature 1..80: note = Artificially Synthesized Probe
  source 1..80: mol_type = other DNA

SEQ ID NO: 128374 - DNA, 80 bp, synthetic construct
  misc_feature 1..80: note = Artificially Synthesized Probe
  source 1..80: mol_type = other DNA
acttctttgtaagcccacttgaactaatctggaagagtttcaagctttggtaccctatttgccaacagctgggtacaaaa

SEQ ID NO: 128375 - DNA, 80 bp, synthetic construct
  misc_feature 1..80: note = Artificially Synthesized Probe
  source 1..80: mol_type = other DNA
tttgtttctttacaaggttttgataagggtctaagactactagatgccagtttagtgagggagggcactctgggggaagt

SEQ ID NO: 128376 - DNA, 80 bp, synthetic construct
  misc_feature 1..80: note = Artificially Synthesized Probe
  source 1..80: mol_type = other DNA
gcaatggcgtgatctcagctcactgcaacctctgcctcccaggttcaaatgatttttgtgcctcagccaccccggtagct

SEQ ID NO: 128377 - DNA, 80 bp, synthetic construct; identical to SEQ ID NO: 40823
  misc_feature 1..80: note = Artificially Synthesized Probe
  source 1..80: mol_type = other DNA

SEQ ID NO: 128378 - DNA, 80 bp, synthetic construct
  misc_feature 1..80: note = Artificially Synthesized Probe
  source 1..80: mol_type = other DNA
gaagagtccacagcttcagaatggtatctgccctggtgtctgcattctggtcaggcggctgcgttcagcgtctgtgctcc

SEQ ID NO: 128379 - DNA, 80 bp, synthetic construct; identical to SEQ ID NO: 40796
  misc_feature 1..80: note = Artificially Synthesized Probe
  source 1..80: mol_type = other DNA

SEQ ID NO: 128380 - DNA, 80 bp, synthetic construct
  misc_feature 1..80: note = Artificially Synthesized Probe
  source 1..80: mol_type = other DNA
aataaaacagaatcttctcaagatcaccagaaaatacatagccagggagatcccaagtattgtggaaccaagctaattat

SEQ ID NO: 128381 - DNA, 80 bp, synthetic construct
  misc_feature 1..80: note = Artificially Synthesized Probe
  source 1..80: mol_type = other DNA
tggcatgatcttggcttactgcaacctccacctcctgggttcaagtgattctccttcctcagcctcccaagtagctggga

SEQ ID NO: 128382 - DNA, 80 bp, synthetic construct
  misc_feature 1..80: note = Artificially Synthesized Probe
  source 1..80: mol_type = other DNA
agcaggtcagaaattagtaatcccatttaaaatatgagaaaactgaagcattaggtaggctaagtgacatggccaaggtc

SEQ ID NO: 128383 - DNA, 80 bp, synthetic construct; identical to SEQ ID NO: 40824
  misc_feature 1..80: note = Artificially Synthesized Probe
  source 1..80: mol_type = other DNA

SEQ ID NO: 128384 - DNA, 80 bp, synthetic construct
  misc_feature 1..80: note = Artificially Synthesized Probe
  source 1..80: mol_type = other DNA
tactccattgttagttccttccttcccttcttttaccagctccaggctatagaaaaattatgtgggttctccttcccagg

SEQ ID NO: 128385 - DNA, 80 bp, synthetic construct
  misc_feature 1..80: note = Artificially Synthesized Probe
  source 1..80: mol_type = other DNA
ttagaaaccagctagctctctgctgcctagttgcagttccccaaggctttaagcagtctgaattccatatctgatgaatg

SEQ ID NO: 128386 - DNA, 80 bp, synthetic construct
  misc_feature 1..80: note = Artificially Synthesized Probe
  source 1..80: mol_type = other DNA
tttgaggggagatatcccccattatactgttcctaaatcctagattttgactgtagtgttcgggacattccggagagtca

SEQ ID NO: 128387 - DNA, 80 bp, synthetic construct; identical to SEQ ID NO: 40825
  misc_feature 1..80: note = Artificially Synthesized Probe
  source 1..80: mol_type = other DNA

SEQ ID NO: 128388 - DNA, 80 bp, synthetic construct
  misc_feature 1..80: note = Artificially Synthesized Probe
  source 1..80: mol_type = other DNA
tctctgcaaaggctcctgttaaatcttgggccctatggtattgattttcttctagttatctctacaaatttttctggctt

SEQ ID NO: 128389 - DNA, 80 bp, synthetic construct
  misc_feature 1..80: note = Artificially Synthesized Probe
  source 1..80: mol_type = other DNA
atccctggcctccatctttactttgctgcatacctcagcttgatgagtccttgatgttgactccttgaccttactgccat

SEQ ID NO: 128390 - DNA, 80 bp, synthetic construct
  misc_feature 1..80: note = Artificially Synthesized Probe
  source 1..80: mol_type = other DNA
accatttggagagccttgggagaggcggggtttttcggatgcactatattaaaacatgagatttgcaatggcattggcac

SEQ ID NO: 128391 - DNA, 80 bp, synthetic construct; identical to SEQ ID NO: 40826
  misc_feature 1..80: note = Artificially Synthesized Probe
  source 1..80: mol_type = other DNA

SEQ ID NO: 128392 - DNA, 80 bp, synthetic construct
  misc_feature 1..80: note = Artificially Synthesized Probe
  source 1..80: mol_type = other DNA
agctttccatagtaatgaaagaaatgttaagaactgcaggaaatgggtaagattatagatggccaaagaaagtggcaagg

SEQ ID NO: 128393 - DNA, 80 bp, synthetic construct
  misc_feature 1..80: note = Artificially Synthesized Probe
  source 1..80: mol_type = other DNA
tccccaaagagctgtggctgagctcccagtccccaggaccaaattgagctgttgcagctgggaagcagattggtgcagcc

SEQ ID NO: 128394 - DNA, 80 bp, synthetic construct
  misc_feature 1..80: note = Artificially Synthesized Probe
  source 1..80: mol_type = other DNA
cctttattcttcatagcccttaatcacttctcattagtggactccctgggagggagggaagaagggttttgttctgatgc

SEQ ID NO: 128395 - DNA, 80 bp, synthetic construct; identical to SEQ ID NO: 40827
  misc_feature 1..80: note = Artificially Synthesized Probe
  source 1..80: mol_type = other DNA

SEQ ID NO: 128396 - DNA, 80 bp, synthetic construct
  misc_feature 1..80: note = Artificially Synthesized Probe
  source 1..80: mol_type = other DNA
aagtgttctggagctggaagtttagagcgcaagtaagtcgttaatacgacttactctattttgtttgtagtgagaaagtt

SEQ ID NO: 128397 - DNA, 80 bp, synthetic construct
  misc_feature 1..80: note = Artificially Synthesized Probe
  source 1..80: mol_type = other DNA
attctctgtattttaaatatcttttttaagactaatgtcaggtgactcaaattccactgaagtctctctttttagttgtc

SEQ ID NO: 128398 - DNA, 80 bp, synthetic construct
  misc_feature 1..80: note = Artificially Synthesized Probe
  source 1..80: mol_type = other DNA
ataaaccgaaatgtattagactgactataaaggggtcttgggaagggatcttactcctctttgatagttggtacttgtac

SEQ ID NO: 128399 - DNA, 80 bp, synthetic construct
  misc_feature 1..80: note = Artificially Synthesized Probe
  source 1..80: mol_type = other DNA
gcatttgggatatcattcaccttttggtctgtgcttcaggccatgagtagttagtgtatagcgcatgttcacaggcatta

SEQ ID NO: 128400 - DNA, 80 bp, synthetic construct
  misc_feature 1..80: note = Artificially Synthesized Probe
  source 1..80: mol_type = other DNA
gaatagagttgggaggatgttagggtagccggttggtgctgattctggaaaatgggaagacataattgtttaacccttct

SEQ ID NO: 128401 - DNA, 80 bp, synthetic construct; identical to SEQ ID NO: 40828
  misc_feature 1..80: note = Artificially Synthesized Probe
  source 1..80: mol_type = other DNA

SEQ ID NO: 128402 - DNA, 80 bp, synthetic construct
  misc_feature 1..80: note = Artificially Synthesized Probe
  source 1..80: mol_type = other DNA
tgggattacaggcacatgtcatcatctagctagcattttattttaacttaaaaatatgtaaatgccagcctggccaacat

SEQ ID NO: 128403 - DNA, 80 bp, synthetic construct
  misc_feature 1..80: note = Artificially Synthesized Probe
  source 1..80: mol_type = other DNA
cagtctgggcgacagagccactgcactccagtctgggcgacagagtgagaccctgtctcagaggggggaaaaaaaagtga

SEQ ID NO: 128404 - DNA, 80 bp, synthetic construct
  misc_feature 1..80: note = Artificially Synthesized Probe
  source 1..80: mol_type = other DNA
atttgagaaatgaagggcagaattcttccagatttttaagctccaccactacaaccttttactgttgtcttgcccatatc

SEQ ID NO: 128405 - DNA, 80 bp, synthetic construct; identical to SEQ ID NO: 40829
  misc_feature 1..80: note = Artificially Synthesized Probe
  source 1..80: mol_type = other DNA

SEQ ID NO: 128406 - DNA, 80 bp, synthetic construct
  misc_feature 1..80: note = Artificially Synthesized Probe
  source 1..80: mol_type = other DNA
ttatcttagcacctgttatcataattcctctattaaactataagcttttggatggcagggcccttttcttacttatgtgt

SEQ ID NO: 128407 - DNA, 80 bp, synthetic construct
  misc_feature 1..80: note = Artificially Synthesized Probe
  source 1..80: mol_type = other DNA
actcaaaatccaaatgagaacctatagagtatctattttttaggatttttgccatactggttccttgtgtttgcatgaaa

SEQ ID NO: 128408 - DNA, 80 bp, synthetic construct
  misc_feature 1..80: note = Artificially Synthesized Probe
  source 1..80: mol_type = other DNA
tgctaagtgtgtatgttatcttagttcatatctacagccctgaaagaagacacaacaaggcatgttgtgttattatttcc

SEQ ID NO: 128409 - DNA, 80 bp, synthetic construct; identical to SEQ ID NO: 40830
  misc_feature 1..80: note = Artificially Synthesized Probe
  source 1..80: mol_type = other DNA

SEQ ID NO: 128410 - DNA, 80 bp, synthetic construct
  misc_feature 1..80: note = Artificially Synthesized Probe
  source 1..80: mol_type = other DNA
tcctcttgctctgtagtctggatgcttgtgaacaagctgcttgcaggtgccgaaacaaacagcagtgtgggtctcagggc

SEQ ID NO: 128411 - DNA, 80 bp, synthetic construct
  misc_feature 1..80: note = Artificially Synthesized Probe
  source 1..80: mol_type = other DNA
atagcgttttttaaaccagcagttcccataggaagggttcctgcctgttaaagagctgcagcatgtgtttgtgcaaggca

SEQ ID NO: 128412 - DNA, 80 bp, synthetic construct
  misc_feature 1..80: note = Artificially Synthesized Probe
  source 1..80: mol_type = other DNA
caaatgcaatctttacaaacccactcactgccagaaatgaatctaaaaaagtgctagtctgtgggcctcttggtcaggaa

SEQ ID NO: 128413 - DNA, 80 bp, synthetic construct; identical to SEQ ID NO: 40831
  misc_feature 1..80: note = Artificially Synthesized Probe
  source 1..80: mol_type = other DNA

SEQ ID NO: 128414 - DNA, 80 bp, synthetic construct
  misc_feature 1..80: note = Artificially Synthesized Probe
  source 1..80: mol_type = other DNA
gggactacaggcatgcgccaccatgcccggctgatttttatatttttagtagagatggagtttcaccatgttggccaggc

SEQ ID NO: 128415 - DNA, 80 bp, synthetic construct
  misc_feature 1..80: note = Artificially Synthesized Probe
  source 1..80: mol_type = other DNA
agagggagtttatgctgctgtgtggccagtttttccacatgtctgcaacagttacaatttttgacagatatcttgagaag

SEQ ID NO: 128416 - DNA, 80 bp, synthetic construct
  misc_feature 1..80: note = Artificially Synthesized Probe
  source 1..80: mol_type = other DNA
caaggcgggcggatcacgagatcaggagttcgagaccagcctgactaacatggtgaaaccttgtctctactaaaaataca

SEQ ID NO: 128417 - DNA, 80 bp, synthetic construct; identical to SEQ ID NO: 40832
  misc_feature 1..80: note = Artificially Synthesized Probe
  source 1..80: mol_type = other DNA

SEQ ID NO: 128418 - DNA, 80 bp, synthetic construct
  misc_feature 1..80: note = Artificially Synthesized Probe
  source 1..80: mol_type = other DNA
gaatttgttcacgcctaggccatatgtggatgtcactcttctttagtttcatatccagtttctgcttgcctgagctagaa

SEQ ID NO: 128419 - DNA, 80 bp, synthetic construct
  misc_feature 1..80: note = Artificially Synthesized Probe
  source 1..80: mol_type = other DNA
aagtgaggaaactaaggctcagaaattaagatacgtgctcatggtaacacaggtcctaggaactgggatccaggatccca

SEQ ID NO: 128420 - DNA, 80 bp, synthetic construct
  misc_feature 1..80: note = Artificially Synthesized Probe
  source 1..80: mol_type = other DNA
aggtgggtggattgcttgaacccaggagttcgagagcagcctgggcaacataaggagaccccatctctacagataattta

SEQ ID NO: 128421 - DNA, 80 bp, synthetic construct
  misc_feature 1..80: note = Artificially Synthesized Probe
  source 1..80: mol_type = other DNA
agctaacaaaaaaccccctaaaaaacaaaagaaatgggtttgagagagaagaagagagagaaacttaactgtgggtgttc

SEQ ID NO: 128422 - DNA, 80 bp, synthetic construct; identical to SEQ ID NO: 40797
  misc_feature 1..80: note = Artificially Synthesized Probe
  source 1..80: mol_type = other DNA

SEQ ID NO: 128423 - DNA, 80 bp, synthetic construct; identical to SEQ ID NO: 40833
  misc_feature 1..80: note = Artificially Synthesized Probe
  source 1..80: mol_type = other DNA

SEQ ID NO: 128424 - DNA, 80 bp, synthetic construct
  misc_feature 1..80: note = Artificially Synthesized Probe
  source 1..80: mol_type = other DNA
gataaaatatttcatattagggagagctctgtgctgccctttcccaaagctttggttatttgatgggagggaaagtcttc

SEQ ID NO: 128425 - DNA, 80 bp, synthetic construct
  misc_feature 1..80: note = Artificially Synthesized Probe
  source 1..80: mol_type = other DNA
cgtgtgtgtgtgtgtgtgtgtgtgtgtgtgtgtgtgtgtgtgttttatctccttcaactctgaccacctggaagtcagcc

SEQ ID NO: 128426 - DNA, 80 bp, synthetic construct
  misc_feature 1..80: note = Artificially Synthesized Probe
  source 1..80: mol_type = other DNA
cttttccaaaagacacatggcaagtacccctcacacctgagctgtggtggtttgggtttgtcccctttgcttttgtttgc

SEQ ID NO: 128427 - DNA, 80 bp, synthetic construct; identical to SEQ ID NO: 40834
  misc_feature 1..80: note = Artificially Synthesized Probe
  source 1..80: mol_type = other DNA

SEQ ID NO: 128428 - DNA, 80 bp, synthetic construct
  misc_feature 1..80: note = Artificially Synthesized Probe
  source 1..80: mol_type = other DNA
atcatttagcattgactatgtgcaagaactgtgctgtatgctggggatttaaagacaaagaaatacagtttctgcctctg

SEQ ID NO: 128429 - DNA, 80 bp, synthetic construct
  misc_feature 1..80: note = Artificially Synthesized Probe
  source 1..80: mol_type = other DNA
ctgttcctttgtgagctctcgagggccaggaacaaatatggatataaacatggaaccatgagcgaatagatgtttcttat

SEQ ID NO: 128430 - DNA, 80 bp, synthetic construct; identical to SEQ ID NO: 40835
  misc_feature 1..80: note = Artificially Synthesized Probe
  source 1..80: mol_type = other DNA

SEQ ID NO: 128431 - DNA, 80 bp, synthetic construct
  misc_feature 1..80: note = Artificially Synthesized Probe
  source 1..80: mol_type = other DNA
ccactactctgtacccgtttataaatatttgcatttaccttggagaatgtacaagacccgggcttcatgcgtgtgtgaga

SEQ ID NO: 128432 - DNA, 80 bp, synthetic construct
  misc_feature 1..80: note = Artificially Synthesized Probe
  source 1..80: mol_type = other DNA
tgacagttgctagtgtccttcagaccttcctcttttgtagaaagtttcattctttgtgtgtctcagactgagatggagga

SEQ ID NO: 128433 - DNA, 80 bp, synthetic construct
  misc_feature 1..80: note = Artificially Synthesized Probe
  source 1..80: mol_type = other DNA
gcaaatattggtaggtttattacagagatgggggagttgactgattgatagcttcagttgaactgggattgagagaggtg

SEQ ID NO: 128434 - DNA, 80 bp, synthetic construct
  misc_feature 1..80: note = Artificially Synthesized Probe
  source 1..80: mol_type = other DNA
agaggggcaccttggctgactggactaaaccttctttggcaatttataataaatgctctctgatttattgtttattcttt

SEQ ID NO: 128435 - DNA, 80 bp, synthetic construct; identical to SEQ ID NO: 40836
  misc_feature 1..80: note = Artificially Synthesized Probe
  source 1..80: mol_type = other DNA

SEQ ID NO: 128436 - DNA, 80 bp, synthetic construct
  misc_feature 1..80: note = Artificially Synthesized Probe
  source 1..80: mol_type = other DNA
atcttttttttttttttttaaggcagagtcatgctccgtcacccaggctggagtgtgatctcagctcactgcaacctctg

SEQ ID NO: 128437 - DNA, 80 bp, synthetic construct
  misc_feature 1..80: note = Artificially Synthesized Probe
  source 1..80: mol_type = other DNA
gcctcggcctcccaaagtgctgggattacaggtgtgagccaccacgcccggcaaaacagcatatctttaattagaaccca

SEQ ID NO: 128438 - DNA, 80 bp, synthetic construct
  misc_feature 1..80: note = Artificially Synthesized Probe
  source 1..80: mol_type = other DNA
agccccttcagccacctcaaaagaggttatagccagggcgcccctcttagaagaaaagacatttttttttttccttaaga

SEQ ID NO: 128439 - DNA, 80 bp, synthetic construct; identical to SEQ ID NO: 40837
  misc_feature 1..80: note = Artificially Synthesized Probe
  source 1..80: mol_type = other DNA

SEQ ID NO: 128440 - DNA, 80 bp, synthetic construct
  misc_feature 1..80: note = Artificially Synthesized Probe
  source 1..80: mol_type = other DNA
aatgaagttttcctactaggaacttctgtagagccctagacctttccatcttagtgccgagttaaatgagtcacgtagcc

SEQ ID NO: 128441 - DNA, 80 bp, synthetic construct
  misc_feature 1..80: note = Artificially Synthesized Probe
  source 1..80: mol_type = other DNA
atgatggtaactttctataagagatgtagaagcaagaggcccagagaattgatcttgcccttcatctgacacattgtgac

SEQ ID NO: 128442 - DNA, 80 bp, synthetic construct
  misc_feature 1..80: note = Artificially Synthesized Probe
  source 1..80: mol_type = other DNA
ttcatactgatgcaatcccagagaacttgcctttgggtttgtgattgcaaagtgttgaatcagtctttggtgtggataca

SEQ ID NO: 128443 - DNA, 80 bp, synthetic construct; identical to SEQ ID NO: 40838
  misc_feature 1..80: note = Artificially Synthesized Probe
  source 1..80: mol_type = other DNA

SEQ ID NO: 128444 - DNA, 80 bp, synthetic construct
  misc_feature 1..80: note = Artificially Synthesized Probe
  source 1..80: mol_type = other DNA
ttttatcatgagagtaaattgcgtaatctcccagaacctcagtgttcttgttgctaaatgtgcacaaaataactggctat

SEQ ID NO: 128445 - DNA, 80 bp, synthetic construct
  misc_feature 1..80: note = Artificially Synthesized Probe
  source 1..80: mol_type = other DNA
tttttttttttaacacatcctattcttaaactgttgccatcgggagtgttaataactttgatcttcccagatttctctcc

SEQ ID NO: 128446 - DNA, 80 bp, synthetic construct
  misc_feature 1..80: note = Artificially Synthesized Probe
  source 1..80: mol_type = other DNA
aaatggacttgacattccttactcagtggttgacagggagccaagtgagatatctgagctgttgaggatggatgtgtatc

SEQ ID NO: 128447 - DNA, 80 bp, synthetic construct
  misc_feature 1..80: note = Artificially Synthesized Probe
  source 1..80: mol_type = other DNA
aatgtggatagtagatgaacacaattcttgtgaatccatttgccttgtgcttgggagttctattcttagaccacaatcac

SEQ ID NO: 128448 - DNA, 80 bp, synthetic construct
  misc_feature 1..80: note = Artificially Synthesized Probe
  source 1..80: mol_type = other DNA
ggagtttatgagcctggcttacctgggatcattttcatgttatgatcctaattaaagttcagcctgtttactctgctcca

SEQ ID NO: 128449 - DNA, 80 bp, synthetic construct; identical to SEQ ID NO: 40839
  misc_feature 1..80: note = Artificially Synthesized Probe
  source 1..80: mol_type = other DNA

SEQ ID NO: 128450 - DNA, 80 bp, synthetic construct
  misc_feature 1..80: note = Artificially Synthesized Probe
  source 1..80: mol_type = other DNA
tatagtaattatatatgtgagaatggattcacatctagggctcctgacagtatctgtcaagatgctggccccaaaccctg

SEQ ID NO: 128451 - DNA, 80 bp, synthetic construct
  misc_feature 1..80: note = Artificially Synthesized Probe
  source 1..80: mol_type = other DNA
actaaagacagtgtcctctgtgatctcagcctcataacatccctgttaagataggagggggctgaaatcatttgttctcc

SEQ ID NO: 128452 - DNA, 80 bp, synthetic construct
  misc_feature 1..80: note = Artificially Synthesized Probe
  source 1..80: mol_type = other DNA
aaacactttacgtgtcttatttttcttcctcctttttctattttggtaaataagatgttttttacacctactgccagatt

SEQ ID NO: 128453 - DNA, 80 bp, synthetic construct; identical to SEQ ID NO: 40840
  misc_feature 1..80: note = Artificially Synthesized Probe
  source 1..80: mol_type = other DNA

SEQ ID NO: 128454 - DNA, 80 bp, synthetic construct
  misc_feature 1..80: note = Artificially Synthesized Probe
  source 1..80: mol_type = other DNA
ttactatctgtaagagcataagcttactgtttgtgtaatatttgtcgctgtattttagatgggagttgctgaggtggtat

SEQ ID NO: 128455 - DNA, 80 bp, synthetic construct
  misc_feature 1..80: note = Artificially Synthesized Probe
  source 1..80: mol_type = other DNA
gggtattcattgttggtgaaatatgtcgagtaccagatgctttttggtctcccaaagacctatcaaactgcagatctttt

SEQ ID NO: 128456 - DNA, 80 bp, synthetic construct
  misc_feature 1..80: note = Artificially Synthesized Probe
  source 1..80: mol_type = other DNA
cattgctcattgagatgatgtaatgcagtcggctatttgggttctctcttcaaccttgccacaaacagactattttgctt

SEQ ID NO: 128457 - DNA, 80 bp, synthetic construct
  misc_feature 1..80: note = Artificially Synthesized Probe
  source 1..80: mol_type = other DNA
aggttctgcagtagtcccaagattttccaagatcatcctgtcttccagtgttctattgattcaacttcagaatatatccc

SEQ ID NO: 128458 - DNA, 80 bp, synthetic construct; identical to SEQ ID NO: 40841
  misc_feature 1..80: note = Artificially Synthesized Probe
  source 1..80: mol_type = other DNA

SEQ ID NO: 128459 - DNA, 80 bp, synthetic construct
  misc_feature 1..80: note = Artificially Synthesized Probe
  source 1..80: mol_type = other DNA
ggctcgctctctcactgctttggattgctgctcaaaagtcaccttatcaaaggcctttcccaaaggtttaaaaatcattc

SEQ ID NO: 128460 - DNA, 80 bp, synthetic construct
  misc_feature 1..80: note = Artificially Synthesized Probe
  source 1..80: mol_type = other DNA
accatggaatactatgcagccataaaaaaagaatgagttcatgtcctttgcagggacatggatgaagctggaaaccatta

SEQ ID NO: 128461 - DNA, 80 bp, synthetic construct
  misc_feature 1..80: note = Artificially Synthesized Probe
  source 1..80: mol_type = other DNA
atacctaatgtagattatgggttgatgggggcagcaaaccaccatggcacatgtgtacctatgtaacaaacctgcacatt

SEQ ID NO: 128462 - DNA, 80 bp, synthetic construct; identical to SEQ ID NO: 40842
  misc_feature 1..80: note = Artificially Synthesized Probe
  source 1..80: mol_type = other DNA

SEQ ID NO: 128463 - DNA, 80 bp, synthetic construct
  misc_feature 1..80: note = Artificially Synthesized Probe
  source 1..80: mol_type = other DNA
aagactcctattggggttaagccacagatttagcgttattagtaccactctttaatcataaagtcagaggatgttatgat

SEQ ID NO: 128464 - DNA, 80 bp, synthetic construct
  misc_feature 1..80: note = Artificially Synthesized Probe
  source 1..80: mol_type = other DNA
gttccccctggctgagacagtttgtgggctttcagagttgacaattttctctccagtctctaaacaggagcttttatctg

SEQ ID NO: 128465 - DNA, 80 bp, synthetic construct
  misc_feature 1..80: note = Artificially Synthesized Probe
  source 1..80: mol_type = other DNA
aatcaagaccctttgttgctccagttcttttattacatgtcacagtcgaatgtgtctccatttaaattcagattttttga

SEQ ID NO: 128466 - DNA, 80 bp, synthetic construct; identical to SEQ ID NO: 40843
  misc_feature 1..80: note = Artificially Synthesized Probe
  source 1..80: mol_type = other DNA

SEQ ID NO: 128467 - DNA, 80 bp, synthetic construct; identical to SEQ ID NO: 40798
  misc_feature 1..80: note = Artificially Synthesized Probe
  source 1..80: mol_type = other DNA

SEQ ID NO: 128468 - DNA, 80 bp, synthetic construct
  misc_feature 1..80: note = Artificially Synthesized Probe
  source 1..80: mol_type = other DNA
tagaaggagctttgatcatatgtcaaggaggtgtcatatttaattctactccctgtggcctctcttacaataccagtcat

SEQ ID NO: 128469 - DNA, 80 bp, synthetic construct
  misc_feature 1..80: note = Artificially Synthesized Probe
  source 1..80: mol_type = other DNA
gagtatagtagctacaccacctggagagcttcattttggtttggtgacaaaatttattttagcttagttttcttacatta

SEQ ID NO: 128470 - DNA, 80 bp, synthetic construct
  misc_feature 1..80: note = Artificially Synthesized Probe
  source 1..80: mol_type = other DNA
cagcccataatacttctcaggactgcgagtctctccgcccatcactgtacagcctgggactccgtcctggctcacggacc

SEQ ID NO: 128471 - DNA, 80 bp, synthetic construct; identical to SEQ ID NO: 40844
  misc_feature 1..80: note = Artificially Synthesized Probe
  source 1..80: mol_type = other DNA

SEQ ID NO: 128472 - DNA, 80 bp, synthetic construct
  misc_feature 1..80: note = Artificially Synthesized Probe
  source 1..80: mol_type = other DNA
gcctcctggattcaagtgtttctcctgcctcagcctcctaagtagctgggattacaggcacccacgaccatgcctggcta

SEQ ID NO: 128473 - DNA, 80 bp, synthetic construct
  misc_feature 1..80: note = Artificially Synthesized Probe
  source 1..80: mol_type = other DNA
gtagagaagcaatctcaaggtcaggacaacttaccctgaggttctcacttgtcagggattgtgctggattctgacttagg

SEQ ID NO: 128474 - DNA, 80 bp, synthetic construct
  misc_feature 1..80: note = Artificially Synthesized Probe
  source 1..80: mol_type = other DNA
tctctcttttttttttcccccagtaacagtttaaaattggtgccttagacgcaagcaaaaagatattagcgcagctttag

SEQ ID NO: 128475 - DNA, 80 bp, synthetic construct; identical to SEQ ID NO: 40845
  misc_feature 1..80: note = Artificially Synthesized Probe
  source 1..80: mol_type = other DNA

SEQ ID NO: 128476 - DNA, 80 bp, synthetic construct
  misc_feature 1..80: note = Artificially Synthesized Probe
  source 1..80: mol_type = other DNA
gattctttaaagagtaataccctgagtggttttctggccagcttgcctgctcatttatctttgaggagatggaaggagac

SEQ ID NO: 128477 - DNA, 80 bp, synthetic construct
  misc_feature 1..80: note = Artificially Synthesized Probe
  source 1..80: mol_type = other DNA
tagatgggttgttctttgctgtttaagttgtttggcagtggtgtgtcaggatgcgggttttcttaatactttcccagctg

SEQ ID NO: 128478 - DNA, 80 bp, synthetic construct
  misc_feature 1..80: note = Artificially Synthesized Probe
  source 1..80: mol_type = other DNA
gagatgagttgggggagttaatgagatctttttttagctgcttttgataaagtagtctgtactacaggattcattgtgac

SEQ ID NO: 128479 - DNA, 80 bp, synthetic construct
  misc_feature 1..80: note = Artificially Synthesized Probe
  source 1..80: mol_type = other DNA
aatgaatggtctggtttaatccttacctcaacccaggaaatgggtattattgtcaccttccattcaccatataaggaaac

SEQ ID NO: 128480 - DNA, 80 bp, synthetic construct; identical to SEQ ID NO: 40846
  misc_feature 1..80: note = Artificially Synthesized Probe
  source 1..80: mol_type = other DNA

SEQ ID NO: 128481 - DNA, 80 bp, synthetic construct
  misc_feature 1..80: note = Artificially Synthesized Probe
  source 1..80: mol_type = other DNA
agctgggactacaggcgcccgccaccaggcccggctaattttttttgtatttttagcagagaccgggtttcaccgtgtta

SEQ ID NO: 128482 - DNA, 80 bp, synthetic construct
  misc_feature 1..80: note = Artificially Synthesized Probe
  source 1..80: mol_type = other DNA
ctcagatctaccacctagtaaatctgctactaaccagacctagaatctaggattctagatcaagtgctgggcaacatgat

SEQ ID NO: 128483 - DNA, 80 bp, synthetic construct
  misc_feature 1..80: note = Artificially Synthesized Probe
  source 1..80: mol_type = other DNA
ttttttggagggggttcaaatataaaatatatgggaaagaaatataatgaacctccatgtacccaacacccggattaaac

SEQ ID NO: 128484 - DNA, 80 bp, synthetic construct; identical to SEQ ID NO: 40847
  misc_feature 1..80: note = Artificially Synthesized Probe
  source 1..80: mol_type = other DNA

SEQ ID NO: 128485 - DNA, 80 bp, synthetic construct
  misc_feature 1..80: note = Artificially Synthesized Probe
  source 1..80: mol_type = other DNA
aaaaaaagatgttccaggatctatatcctgcaccatacatggagtcagccatttctctagggggtcttgattccttttag

SEQ ID NO: 128486 - DNA, 80 bp, synthetic construct
  misc_feature 1..80: note = Artificially Synthesized Probe
  source 1..80: mol_type = other DNA
ctcttgagaattttgtgctctacccccgttgtagtctttatggttttgaaacttttgcttcagtcaccctgaattttgcc

SEQ ID NO: 128487 - DNA, 80 bp, synthetic construct
  misc_feature 1..80: note = Artificially Synthesized Probe
  source 1..80: mol_type = other DNA
attccatttatctgaaacccttcctcacctcatcaagatcttatctggtctttaatgatttactctgctgcttcctgggt

SEQ ID NO: 128488 - DNA, 80 bp, synthetic construct; identical to SEQ ID NO: 40848
  misc_feature 1..80: note = Artificially Synthesized Probe
  source 1..80: mol_type = other DNA

SEQ ID NO: 128489 - DNA, 80 bp, synthetic construct
  misc_feature 1..80: note = Artificially Synthesized Probe
  source 1..80: mol_type = other DNA
ggcagatccttgacaggaattttgaatggtcccaaatgtggtaaatcgctggtacatcaagtcatcctcacagttgtctg

SEQ ID NO: 128490 - DNA, 80 bp, synthetic construct
  misc_feature 1..80: note = Artificially Synthesized Probe
  source 1..80: mol_type = other DNA
agcttatattctggaagctgggctctctatggaacagcacagaatttggagacaaagggcctgcgatctggtttggctct

SEQ ID NO: 128491 - DNA, 80 bp, synthetic construct
  misc_feature 1..80: note = Artificially Synthesized Probe
  source 1..80: mol_type = other DNA
ccatcctctacttgggttctggaactggactcataggtgagtagtgaggagctgggctcaagcgaattaatcccggatct

SEQ ID NO: 128492 - DNA, 80 bp, synthetic construct
  misc_feature 1..80: note = Artificially Synthesized Probe
  source 1..80: mol_type = other DNA
tgactctgtataagctttgctgaagcagattttattacattagaagagaacctacctggctgcatccaacaccagaagct

SEQ ID NO: 128493 - DNA, 80 bp, synthetic construct
  misc_feature 1..80: note = Artificially Synthesized Probe
  source 1..80: mol_type = other DNA
tgggagtctgtattccctagaaagactctgttcacatacccatcaggctaaattaggtgaaatctctttggccttaatga

SEQ ID NO: 128494 - DNA, 80 bp, synthetic construct; identical to SEQ ID NO: 40849
  misc_feature 1..80: note = Artificially Synthesized Probe
  source 1..80: mol_type = other DNA

SEQ ID NO: 128495 - DNA, 80 bp, synthetic construct
  misc_feature 1..80: note = Artificially Synthesized Probe
  source 1..80: mol_type = other DNA
caagttgcttccaaagaaaagaaaggaagagtgttgtgtaaagtcttgcttccttgcctttaaattgggtacttattgag

SEQ ID NO: 128496 - DNA, 80 bp, synthetic construct
  misc_feature 1..80: note = Artificially Synthesized Probe
  source 1..80: mol_type = other DNA
gtctactactgcgagagtgtgggaaggtgtgataagagctatagtggtcttgccacataatttgcatttgtatcttaaag

SEQ ID NO: 128497 - DNA, 80 bp, synthetic construct; identical to SEQ ID NO: 40850
  misc_feature 1..80: note = Artificially Synthesized Probe
  source 1..80: mol_type = other DNA

SEQ ID NO: 128498 - DNA, 80 bp, synthetic construct
  misc_feature 1..80: note = Artificially Synthesized Probe
  source 1..80: mol_type = other DNA
atttttgaaagatcactggtggcagtgaagataccagtgggttggagggagggagactagaggcaataacaatttagata

SEQ ID NO: 128499 - DNA, 80 bp, synthetic construct
  misc_feature 1..80: note = Artificially Synthesized Probe
  source 1..80: mol_type = other DNA
tatatactatatatatacatgcaacaaatgatattttttcagatggtgataagtaatttgaaaaaataaataaatagagc

SEQ ID NO: 128500 - DNA, 80 bp, synthetic construct
  misc_feature 1..80: note = Artificially Synthesized Probe
  source 1..80: mol_type = other DNA
aacaggcttggcacggtgcataagcaccgtaaaggtggtcagagtagctggagcatggtggaacccagaggagcaagtaa

SEQ ID NO: 128501 - DNA, 80 bp, synthetic construct
  misc_feature 1..80: note = Artificially Synthesized Probe
  source 1..80: mol_type = other DNA
tgcaatttttagagtcaaagtgattcaggtttaaatcttggttctgacagtagctagcctttcacttcaggcaagttaca

SEQ ID NO: 128502 - DNA, 80 bp, synthetic construct; identical to SEQ ID NO: 40851
  misc_feature 1..80: note = Artificially Synthesized Probe
  source 1..80: mol_type = other DNA

SEQ ID NO: 128503 - DNA, 80 bp, synthetic construct
  misc_feature 1..80: note = Artificially Synthesized Probe
  source 1..80: mol_type = other DNA
gataagaaataactagatgttgagccaccagaaagcaaagatcacaccgtttttgttctgtttaaaaacacctaggtatg

SEQ ID NO: 128504 - DNA, 80 bp, synthetic construct
  misc_feature 1..80: note = Artificially Synthesized Probe
  source 1..80: mol_type = other DNA
tattgttgacaaggtgaatagaaataggagtaggacagaaggaggactgtagatgcccttcaggcttctggttcagggat

SEQ ID NO: 128505 - DNA, 80 bp, synthetic construct
  misc_feature 1..80: note = Artificially Synthesized Probe
  source 1..80: mol_type = other DNA
ctgaaaggtagttggaaagacagagctcggtggcatgatgcctagacttatggtaaccagaattctggagtcattagcta

SEQ ID NO: 128506 - DNA, 80 bp, synthetic construct; identical to SEQ ID NO: 40852
  misc_feature 1..80: note = Artificially Synthesized Probe
  source 1..80: mol_type = other DNA

SEQ ID NO: 128507 - DNA, 80 bp, synthetic construct
  misc_feature 1..80: note = Artificially Synthesized Probe
  source 1..80: mol_type = other DNA
tgatggcatgatcatagctcactgcagcctcgaccttctgggctcgagtgatcctcccacctcagcctcccaagtaactg

SEQ ID NO: 128508 - DNA, 80 bp, synthetic construct
  misc_feature 1..80: note = Artificially Synthesized Probe
  source 1..80: mol_type = other DNA
ttgcatttatctagttgaggctatgggtaggtagaagtgtctagttgttcttggtgttttgttagagcaagaactctctg

SEQ ID NO: 128509 - DNA, 80 bp, synthetic construct
  misc_feature 1..80: note = Artificially Synthesized Probe
  source 1..80: mol_type = other DNA
gctagataaacccattagaagtcctgaacaatagcttcccctttcctttttgtctggggaaggggaaccacagaaatact

SEQ ID NO: 128510 - DNA, 80 bp, synthetic construct
  misc_feature 1..80: note = Artificially Synthesized Probe
  source 1..80: mol_type = other DNA
gaccactctctatcccgctcttccacccccctcatatttttttcagcatactgtcacacctctgttgtttgtacattttt

SEQ ID NO: 128511 - DNA, 80 bp, synthetic construct; identical to SEQ ID NO: 40853
  misc_feature 1..80: note = Artificially Synthesized Probe
  source 1..80: mol_type = other DNA

SEQ ID NO: 128512 - DNA, 80 bp, synthetic construct
  misc_feature 1..80: note = Artificially Synthesized Probe
  source 1..80: mol_type = other DNA
ctttatgtaaataaaaggagatatgaacatatgttcttacccctccacgttcttttacatgaaaggtaactcattatcta

SEQ ID NO: 128513 - DNA, 80 bp, synthetic construct; identical to SEQ ID NO: 40799
  misc_feature 1..80: note = Artificially Synthesized Probe
  source 1..80: mol_type = other DNA

SEQ ID NO: 128514 - DNA, 80 bp, synthetic construct
  misc_feature 1..80: note = Artificially Synthesized Probe
  source 1..80: mol_type = other DNA
cctcctactttattgaatcagttccttacaaatgtgcacttgagttgtttccagtatttgctattacaagcaatacttca

SEQ ID NO: 128515 - DNA, 80 bp, synthetic construct; identical to SEQ ID NO: 40854
  misc_feature 1..80: note = Artificially Synthesized Probe
  source 1..80: mol_type = other DNA

SEQ ID NO: 128516 - DNA, 80 bp, synthetic construct
  misc_feature 1..80: note = Artificially Synthesized Probe
  source 1..80: mol_type = other DNA
aagataaattacacttcagattcttaatggattgatgtgcagaagtatgcaagggaagatgggggtgggagaggagcgcc

SEQ ID NO: 128517 - DNA, 80 bp, synthetic construct
  misc_feature 1..80: note = Artificially Synthesized Probe
  source 1..80: mol_type = other DNA
ctctgtggagtgggtggaaattctaggtgacttgctaattgtcttatttggaatactcccatttctactaaagaattagt

SEQ ID NO: 128518 - DNA, 80 bp, synthetic construct
  misc_feature 1..80: note = Artificially Synthesized Probe
  source 1..80: mol_type = other DNA
tgtgttggggatgggggaggggacggattggctaagaagtaagtacagtgcttgctttgtatgtccctcgatttgtgttt

SEQ ID NO: 128519 - DNA, 80 bp, synthetic construct; identical to SEQ ID NO: 40855
  misc_feature 1..80: note = Artificially Synthesized Probe
  source 1..80: mol_type = other DNA

SEQ ID NO: 128520 - DNA, 80 bp, synthetic construct
  misc_feature 1..80: note = Artificially Synthesized Probe
  source 1..80: mol_type = other DNA
aagacagatgaagttactcctctgagctggaaaagatcttgtgtcaaaggaggaagcctcagagataatctgggccagaa

SEQ ID NO: 128521 - DNA, 80 bp, synthetic construct
  misc_feature 1..80: note = Artificially Synthesized Probe
  source 1..80: mol_type = other DNA
ccctcaataggtggtagctgatactattaatattattaacagagggtcttctaaagaatctcatgatagttttggagcaa

SEQ ID NO: 128522 - DNA, 80 bp, synthetic construct
  misc_feature 1..80: note = Artificially Synthesized Probe
  source 1..80: mol_type = other DNA
atctcactgtaagagactgactggtggagattaaaaaaaaaaaaagcttgtctggcaggaatgaaatcttgcttgctgta

SEQ ID NO: 128523 - DNA, 80 bp, synthetic construct
  misc_feature 1..80: note = Artificially Synthesized Probe
  source 1..80: mol_type = other DNA
agttgattgcttttgttcgcatgtattactttggtaaaaaaataaatgtatgaatgggatttcagtgaacagggttttat

SEQ ID NO: 128524 - DNA, 80 bp, synthetic construct
  misc_feature 1..80: note = Artificially Synthesized Probe
  source 1..80: mol_type = other DNA
agtcccaggtcctgttttttcaatcagaattgtttgagtcaaatggactctaaatgggaccctcatctcatgggactttc

SEQ ID NO: 128525 - DNA, 80 bp, synthetic construct; identical to SEQ ID NO: 40856
  misc_feature 1..80: note = Artificially Synthesized Probe
  source 1..80: mol_type = other DNA

SEQ ID NO: 128526 - DNA, 80 bp, synthetic construct
  misc_feature 1..80: note = Artificially Synthesized Probe
  source 1..80: mol_type = other DNA
gagtcgctatttaattttttacaggcttccagtgcttactcacatctatttccttccttccctttcaagttaggggtacc

SEQ ID NO: 128527 - DNA, 80 bp, synthetic construct
  misc_feature 1..80: note = Artificially Synthesized Probe
  source 1..80: mol_type = other DNA
atgatggacagattgcccctccctgacccttgttggacacacagcataaaaaataaatgagcttttgtgaggttaagcca

SEQ ID NO: 128528 - DNA, 80 bp, synthetic construct
  misc_feature 1..80: note = Artificially Synthesized Probe
  source 1..80: mol_type = other DNA
tatataacagtgaacaacacagaagtctcttctctaatggagattacatctatgagggagacataataaataaacaaaga

SEQ ID NO: 128529 - DNA, 80 bp, synthetic construct; identical to SEQ ID NO: 40857
  misc_feature 1..80: note = Artificially Synthesized Probe
  source 1..80: mol_type = other DNA

SEQ ID NO: 128530 - DNA, 80 bp, synthetic construct
  misc_feature 1..80: note = Artificially Synthesized Probe
  source 1..80: mol_type = other DNA
gcatccatcttcagcattcagactttccagagatctagttgcttagtaggtactgatccagtttaattgtattaaccaga

SEQ ID NO: 128531 - DNA, 80 bp, synthetic construct
  misc_feature 1..80: note = Artificially Synthesized Probe
  source 1..80: mol_type = other DNA
gaaaactttgagaatggttataacttttctggaagaaacatagggatagagctcaggtctgatcattgaggaacattagg

SEQ ID NO: 128532 - DNA, 80 bp, synthetic construct; identical to SEQ ID NO: 40858
  misc_feature 1..80: note = Artificially Synthesized Probe
  source 1..80: mol_type = other DNA

SEQ ID NO: 128533 - DNA, 80 bp, synthetic construct
  misc_feature 1..80: note = Artificially Synthesized Probe
  source 1..80: mol_type = other DNA
tcatccctggaggaagattgagaatctctaaactggggctcagatttttctttctgtctcgaatattttagtcatctcat

SEQ ID NO: 128534 - DNA, 80 bp, synthetic construct
  misc_feature 1..80: note = Artificially Synthesized Probe
  source 1..80: mol_type = other DNA
atgatgtgtatatagcaaagtcccttgttaaccccattcagaaactctaaaatgagttgcaaggctgaaagtattgaagc

SEQ ID NO: 128535 - DNA, 80 bp, synthetic construct
  misc_feature 1..80: note = Artificially Synthesized Probe
  source 1..80: mol_type = other DNA
gtaaggaagggtggagaaaaataaggaatcttttcatatttgttttaaccaaatatatggaatctctcaacattccacct

SEQ ID NO: 128536 - DNA, 80 bp, synthetic construct
  misc_feature 1..80: note = Artificially Synthesized Probe
  source 1..80: mol_type = other DNA
catcattgtttctggtttgtgggtgcccagattccttggaaagttcatgcctctcaatgtctgacttgaaagcaataata

SEQ ID NO: 128537 - DNA, 80 bp, synthetic construct
  misc_feature 1..80: note = Artificially Synthesized Probe
  source 1..80: mol_type = other DNA
gatattcttggtgataggaatcaccaagaatagtgtattggtctgtttcagaaaaataatagtaattagagatgaacaaa

SEQ ID NO: 128538 - DNA, 80 bp, synthetic construct; identical to SEQ ID NO: 40859
  misc_feature 1..80: note = Artificially Synthesized Probe
  source 1..80: mol_type = other DNA

SEQ ID NO: 128539 - DNA, 80 bp, synthetic construct
  misc_feature 1..80: note = Artificially Synthesized Probe
  source 1..80: mol_type = other DNA
aaactaagacctaaagaggttatgtgactcttcagagtctccagttataaaagagaaggcaaattattatgaatagggca

SEQ ID NO: 128540 - DNA, 80 bp, synthetic construct
  misc_feature 1..80: note = Artificially Synthesized Probe
  source 1..80: mol_type = other DNA
tcggctcactgcaccctccgcctcctggtttcaagcgattctcttgcctcagcctctcaagtagctaggattacaggcat

SEQ ID NO: 128541 - DNA, 80 bp, synthetic construct; identical to SEQ ID NO: 40860
  misc_feature 1..80: note = Artificially Synthesized Probe
  source 1..80: mol_type = other DNA

SEQ ID NO: 128542 - DNA, 80 bp, synthetic construct
  misc_feature 1..80: note = Artificially Synthesized Probe
  source 1..80: mol_type = other DNA
ggtaatctgtttgaagtcagtggagagctaacaaagcagtaggatattatggagccaagatcttggagaacaaggaaatt

SEQ ID NO: 128543 - DNA, 80 bp, synthetic construct
  misc_feature 1..80: note = Artificially Synthesized Probe
  source 1..80: mol_type = other DNA
caatcttggctcactgcaagctccgcctcccgggttcacaccattctcctgcctcagcctcccaagtagctgggactaca

SEQ ID NO: 128544 - DNA, 80 bp, synthetic construct
  misc_feature 1..80: note = Artificially Synthesized Probe
  source 1..80: mol_type = other DNA
ttcaaacattcatggcgctagaggctcaaaatttaggacctgccaaggagagtgggccgtggcaaatatctttggctttg

SEQ ID NO: 128545 - DNA, 80 bp, synthetic construct
  misc_feature 1..80: note = Artificially Synthesized Probe
  source 1..80: mol_type = other DNA
attggatggccagttttcttagctccatctcagaagcaaaggacgatcctcttggagaagtcttaaattatttctctaat

SEQ ID NO: 128546 - DNA, 80 bp, synthetic construct; identical to SEQ ID NO: 40861
  misc_feature 1..80: note = Artificially Synthesized Probe
  source 1..80: mol_type = other DNA

SEQ ID NO: 128547 - DNA, 80 bp, synthetic construct
  misc_feature 1..80: note = Artificially Synthesized Probe
  source 1..80: mol_type = other DNA
ttgcgtataacctatgtacacacgtccttctgtatactttaaatcatctctagattacttataatacctaatacagtgta

SEQ ID NO: 128548 - DNA, 80 bp, synthetic construct
  misc_feature 1..80: note = Artificially Synthesized Probe
  source 1..80: mol_type = other DNA
aacatacaaataaaattctctacagtgtgaaaatatcctttaaaatgaaggtgacaagttcttccatgcaaatatgattt

SEQ ID NO: 128549 - DNA, 80 bp, synthetic construct
  misc_feature 1..80: note = Artificially Synthesized Probe
  source 1..80: mol_type = other DNA
tcttcatttacaataagtatatctcctaatactatccctcccacctccccccaccccatgacaggcccctgtgtgtgatg

SEQ ID NO: 128550 - DNA, 80 bp, synthetic construct
  misc_feature 1..80: note = Artificially Synthesized Probe
  source 1..80: mol_type = other DNA
tagtattcaaacatggaatatattttaagatagatataagactaaagcataggtaaggaaagggtggaagaataatgggt

SEQ ID NO: 128551 - DNA, 80 bp, synthetic construct; identical to SEQ ID NO: 40862
  misc_feature 1..80: note = Artificially Synthesized Probe
  source 1..80: mol_type = other DNA

SEQ ID NO: 128552 - DNA, 80 bp, synthetic construct
  misc_feature 1..80: note = Artificially Synthesized Probe
  source 1..80: mol_type = other DNA
aaatattttcagattgactttcaagcaaaaccaattcattgctctgtagaagagacatacctaaaacaaaaggattcaga

SEQ ID NO: 128553 - DNA, 80 bp, synthetic construct
  misc_feature 1..80: note = Artificially Synthesized Probe
  source 1..80: mol_type = other DNA
tgaatatgaattttacaaaacaacttggatgaatctcatagtaaggagtgaaagaggcatgaaacaagagtgcatcctat

SEQ ID NO: 128554 - DNA, 80 bp, synthetic construct; identical to SEQ ID NO: 40863
  misc_feature 1..80: note = Artificially Synthesized Probe
  source 1..80: mol_type = other DNA

SEQ ID NO: 128555 - DNA, 80 bp, synthetic construct
  misc_feature 1..80: note = Artificially Synthesized Probe
  source 1..80: mol_type = other DNA
ttctatgaacactgcctctaggctctaaaggccattttcttttctttatgacacttcaaggttgctccgtagatttgttt

SEQ ID NO: 128556 - DNA, 80 bp, synthetic construct
  misc_feature 1..80: note = Artificially Synthesized Probe
  source 1..80: mol_type = other DNA
actgggtagccatttgggaaaaaattaaattggatccctgtcttcctccttatatggaagtaaattttatattgattaaa

SEQ ID NO: 128557 - DNA, 80 bp, synthetic construct
  misc_feature 1..80: note = Artificially Synthesized Probe
  source 1..80: mol_type = other DNA
ataaaaccaaaagatgaactgggaaaaatatttgcaacacatgagaaggggctaatttcctttataaagtgttcacacag

SEQ ID NO: 128558 - DNA, 80 bp, synthetic construct; identical to SEQ ID NO: 40800
  misc_feature 1..80: note = Artificially Synthesized Probe
  source 1..80: mol_type = other DNA

SEQ ID NO: 128559 - DNA, 80 bp, synthetic construct
  misc_feature 1..80: note = Artificially Synthesized Probe
  source 1..80: mol_type = other DNA
attcataatagaggaatacaaattaaattgcaagtacagtatgtagtcatttttcacatattagataaaaaacatttgct

SEQ ID NO: 128560 - DNA, 80 bp, synthetic construct; identical to SEQ ID NO: 40864
  misc_feature 1..80: note = Artificially Synthesized Probe
  source 1..80: mol_type = other DNA

SEQ ID NO: 128561 - DNA, 80 bp, synthetic construct
  misc_feature 1..80: note = Artificially Synthesized Probe
  source 1..80: mol_type = other DNA
gtatttcttgaaggatatataagaaaatggtttcctcagaggtatagacctttggggaagggtagggatgagagggaaac

SEQ ID NO: 128562 - DNA, 80 bp, synthetic construct
  misc_feature 1..80: note = Artificially Synthesized Probe
  source 1..80: mol_type = other DNA
tagcagagatgccattggcattttagatgcattttgggactgttccacacatttaggacattacattcctttccctttgc

SEQ ID NO: 128563 - DNA, 80 bp, synthetic construct
  misc_feature 1..80: note = Artificially Synthesized Probe
  source 1..80: mol_type = other DNA
gcagggagggtcttgaccgacacggatggttatggacctttacttagtgaaaaactcaaatgaacttcctttctagaact

SEQ ID NO: 128564 - DNA, 80 bp, synthetic construct; identical to SEQ ID NO: 40865
  misc_feature 1..80: note = Artificially Synthesized Probe
  source 1..80: mol_type = other DNA

SEQ ID NO: 128565 - DNA, 80 bp, synthetic construct
  misc_feature 1..80: note = Artificially Synthesized Probe
  source 1..80: mol_type = other DNA
cacgagaatcacttgagcccaggaggcaggggttgcagcaagccgagatcacaccactgcactccagcctgggcaacaga

SEQ ID NO: 128566 - DNA, 80 bp, synthetic construct
  misc_feature 1..80: note = Artificially Synthesized Probe
  source 1..80: mol_type = other DNA
aaaaaatcttaccacatgattctctgccaacagattttcctgagctggaaggaacagatgtttctgttggaaatgggcat

SEQ ID NO: 128567 - DNA, 80 bp, synthetic construct
  misc_feature 1..80: note = Artificially Synthesized Probe
  source 1..80: mol_type = other DNA
ccaggaggccagaaggagagtagaatggagggtgagcttcagagcactgaggactgcaagggggaacagagctgctgtcc

SEQ ID NO: 128568 - DNA, 80 bp, synthetic construct
  misc_feature 1..80: note = Artificially Synthesized Probe
  source 1..80: mol_type = other DNA
cttatttaaggcccctttcctttaccctctctataccttgagtttttacagtctcccagaaagcttgagattgacagttc

SEQ ID NO: 128569 - DNA, 80 bp, synthetic construct; identical to SEQ ID NO: 40866
  misc_feature 1..80: note = Artificially Synthesized Probe
  source 1..80: mol_type = other DNA

SEQ ID NO: 128570 - DNA, 80 bp, synthetic construct
  misc_feature 1..80: note = Artificially Synthesized Probe
  source 1..80: mol_type = other DNA
gcaggcatgcgccaccatgcccagctaatttttgcatttttggtagaggtggggtttcaccatgtttgccaggctggtct

SEQ ID NO: 128571 - DNA, 80 bp, synthetic construct
  misc_feature 1..80: note = Artificially Synthesized Probe
  source 1..80: mol_type = other DNA
ctctttttaaaaactggattttcattcattctttctctttccacctcccatcccctgccctccccaaggcgtgttgtagg

SEQ ID NO: 128572 - DNA, 80 bp, synthetic construct
  misc_feature 1..80: note = Artificially Synthesized Probe
  source 1..80: mol_type = other DNA
aaggaaaacgatatgcctttcttttaagccatcattttctctccatctttgcagccacaaactcctttgttccacttttt

SEQ ID NO: 128573 - DNA, 80 bp, synthetic construct
  misc_feature 1..80: note = Artificially Synthesized Probe
  source 1..80: mol_type = other DNA
attcatctcccaacaagagtggttgctgggaggaatgagcagaaggagtggtgtgtaccagactgtccaggagtctttcc

SEQ ID NO: 128574 - DNA, 80 bp, synthetic construct; identical to SEQ ID NO: 40867
  misc_feature 1..80: note = Artificially Synthesized Probe
  source 1..80: mol_type = other DNA

SEQ ID NO: 128575 - DNA, 80 bp, synthetic construct
  misc_feature 1..80: note = Artificially Synthesized Probe
  source 1..80: mol_type = other DNA
ctcttcattttcataaaaatccgtctgtgggtggtcactgtgttgagagatgagaatttatgggttgaagttgtttttat

SEQ ID NO: 128576 - DNA, 80 bp, synthetic construct
  misc_feature 1..80: note = Artificially Synthesized Probe
  source 1..80: mol_type = other DNA
tcccagatcaagagatacttttattcctaattctccctctgaaaattctatgtctttcagaacaagataggggaaaagag

SEQ ID NO: 128577 - DNA, 80 bp, synthetic construct
  misc_feature 1..80: note = Artificially Synthesized Probe
  source 1..80: mol_type = other DNA
aatgtcttaggagaacagtgtgtgtgcaccacagagctggaagcgaaattttgtaatttccatctggagcattttgatag

SEQ ID NO: 128578 - DNA, 80 bp, synthetic construct
  misc_feature 1..80: note = Artificially Synthesized Probe
  source 1..80: mol_type = other DNA
cgcttgaacctgggaggcgtaggttgcagtgagccgagattgtatcactgcactccagcctgggtgacaaagcaagactc

SEQ ID NO: 128579 - DNA, 80 bp, synthetic construct; identical to SEQ ID NO: 40868
  misc_feature 1..80: note = Artificially Synthesized Probe
  source 1..80: mol_type = other DNA

SEQ ID NO: 128580 - DNA, 80 bp, synthetic construct
  misc_feature 1..80: note = Artificially Synthesized Probe
  source 1..80: mol_type = other DNA
aaagaaaaatatgatgtaaagattctttcttttactctcccttccgggtgtctcatcaaaaagcgtatattcctgagctt

SEQ ID NO: 128581 - DNA, 80 bp, synthetic construct
  misc_feature 1..80: note = Artificially Synthesized Probe
  source 1..80: mol_type = other DNA
tttacaggttctccccaaagtctctttgtgcaggaatgggagcctgctgtgttttagactggatggggctctgaccaagt

SEQ ID NO: 128582 - DNA, 80 bp, synthetic construct
  misc_feature 1..80: note = Artificially Synthesized Probe
  source 1..80: mol_type = other DNA
gattgtcatttcctgaattttattttctttgttccttttcacccacttgcttccattgttccaaatttagtcgtgttgga

SEQ ID NO: 128583 - DNA, 80 bp, synthetic construct; identical to SEQ ID NO: 40794
  misc_feature 1..80: note = Artificially Synthesized Probe
  source 1..80: mol_type = other DNA

SEQ ID NO: 128584 - DNA, 80 bp, synthetic construct; identical to SEQ ID NO: 40869
  misc_feature 1..80: note = Artificially Synthesized Probe
  source 1..80: mol_type = other DNA

SEQ ID NO: 128585 - DNA, 80 bp, synthetic construct
  misc_feature 1..80: note = Artificially Synthesized Probe
  source 1..80: mol_type = other DNA
gtggcgcgatctctgctcactgcaacctccgcctctcccgggttcaagtgattctcctgcctcagcctcccaagtagctg

SEQ ID NO: 128586 - DNA, 80 bp, synthetic construct
  misc_feature 1..80: note = Artificially Synthesized Probe
  source 1..80: mol_type = other DNA
ggccccattgccttctaatagcccttttctcttaccctttagctcttggcgcttgacttcctatgtccatccccaatatc

SEQ ID NO: 128587 - DNA, 80 bp, synthetic construct
  misc_feature 1..80: note = Artificially Synthesized Probe
  source 1..80: mol_type = other DNA
ccattcagaaacttaatctcataatgatttgtgtgtattggtaaaaaagaaaagccatgatctctgactggtatactcag

SEQ ID NO: 128588 - DNA, 80 bp, synthetic construct; identical to SEQ ID NO: 40870
  misc_feature 1..80: note = Artificially Synthesized Probe
  source 1..80: mol_type = other DNA

SEQ ID NO: 128589 - DNA, 80 bp, synthetic construct
  misc_feature 1..80: note = Artificially Synthesized Probe
  source 1..80: mol_type = other DNA
gtttttcattcatgccaacaaaggtcttctccaaagcttctttcctcacagctcccattccccaagggagctttaaatat

SEQ ID NO: 128590 - DNA, 80 bp, synthetic construct
  misc_feature 1..80: note = Artificially Synthesized Probe
  source 1..80: mol_type = other DNA
ttatgaccagatacagattaacccgttcctctataattgttttatggcctcatccttctgaaattgcctccttgtggcct

SEQ ID NO: 128591 - DNA, 80 bp, synthetic construct
  misc_feature 1..80: note = Artificially Synthesized Probe
  source 1..80: mol_type = other DNA
aagcaagctgcggattctgaatttgtcaattgcacagcagctgagtatttgctgcctagtcctgttgaagttccaggatt

SEQ ID NO: 128592 - DNA, 80 bp, synthetic construct
  misc_feature 1..80: note = Artificially Synthesized Probe
  source 1..80: mol_type = other DNA
tctcctgcgtcagcctcccgagtagctgggattacaggcatgtgccaccacacccggctaatttttgtatttttagtaga

SEQ ID NO: 128593 - DNA, 80 bp, synthetic construct; identical to SEQ ID NO: 40871
  misc_feature 1..80: note = Artificially Synthesized Probe
  source 1..80: mol_type = other DNA

SEQ ID NO: 128594 - DNA, 80 bp, synthetic construct
  misc_feature 1..80: note = Artificially Synthesized Probe
  source 1..80: mol_type = other DNA
tctttgctcttttcccttcctttgtggtggctgccaatcctaccttgcagataacttctccctcatgaaaacagaggagg

SEQ ID NO: 128595 - DNA, 80 bp, synthetic construct
  misc_feature 1..80: note = Artificially Synthesized Probe
  source 1..80: mol_type = other DNA
cttgaggtcaggagttctagaccaacctggacaacttggtgaaaaatactaaaaatgcaaaaataaaaaaatttaaaaaa

SEQ ID NO: 128596 - DNA, 80 bp, synthetic construct
  misc_feature 1..80: note = Artificially Synthesized Probe
  source 1..80: mol_type = other DNA
agaataaaatagagtagaagacgctttttttcttttagccactaccaagtaggtgaagatatacttatatgttttacaat

SEQ ID NO: 128597 - DNA, 80 bp, synthetic construct; identical to SEQ ID NO: 40872
  misc_feature 1..80: note = Artificially Synthesized Probe
  source 1..80: mol_type = other DNA

SEQ ID NO: 128598 - DNA, 80 bp, synthetic construct
  misc_feature 1..80: note = Artificially Synthesized Probe
  source 1..80: mol_type = other DNA
cctgaagtacttgggaccacagtcacataccactatgcctggctaattttttaatttttaatttttattttttagagaca

SEQ ID NO: 128599 - DNA, 80 bp, synthetic construct
  misc_feature 1..80: note = Artificially Synthesized Probe
  source 1..80: mol_type = other DNA
ttttaaaataaggggtagggagcttttagatgaggcctcatggaataggtcacatttgtgcaaaaatttaaaggaggtaa

SEQ ID NO: 128600 - DNA, 80 bp, synthetic construct
  misc_feature 1..80: note = Artificially Synthesized Probe
  source 1..80: mol_type = other DNA
aagtactaggagatgaggtcagagaggagagggtgagaggtttttaggaggaagggaggagatgcctgattacatcatac

SEQ ID NO: 128601 - DNA, 80 bp, synthetic construct; identical to SEQ ID NO: 40801
  misc_feature 1..80: note = Artificially Synthesized Probe
  source 1..80: mol_type = other DNA

SEQ ID NO: 128602 - DNA, 80 bp, synthetic construct; identical to SEQ ID NO: 40873
  misc_feature 1..80: note = Artificially Synthesized Probe
  source 1..80: mol_type = other DNA

SEQ ID NO: 128603 - DNA, 80 bp, synthetic construct
  misc_feature 1..80: note = Artificially Synthesized Probe
  source 1..80: mol_type = other DNA
agttaatttctgaacatgttttcccactgttaaccctcttaccccagacagcattttgaaacacttttttcttttttttc

SEQ ID NO: 128604 - DNA, 80 bp, synthetic construct
  misc_feature 1..80: note = Artificially Synthesized Probe
  source 1..80: mol_type = other DNA
gaccacagacatgcaccaccacacctggctattttttttttttttttttgtagagacaaggtctccttattttgcccagg

SEQ ID NO: 128605 - DNA, 80 bp, synthetic construct; identical to SEQ ID NO: 40874
  misc_feature 1..80: note = Artificially Synthesized Probe
  source 1..80: mol_type = other DNA

SEQ ID NO: 128606 - DNA, 80 bp, synthetic construct
  misc_feature 1..80: note = Artificially Synthesized Probe
  source 1..80: mol_type = other DNA
gtccagcgttggtgtggtttttcaaggaaggatatagaatggtttattttggatgagaatttcattttgtgtacctgatt

SEQ ID NO: 128607 - DNA, 80 bp, synthetic construct
  misc_feature 1..80: note = Artificially Synthesized Probe
  source 1..80: mol_type = other DNA
cattgcgcccagcccttgttttgtttttgaaagctgtcgtgttactgcttaaagtctccaaactgttattgagaacactg

SEQ ID NO: 128608 - DNA, 80 bp, synthetic construct
  misc_feature 1..80: note = Artificially Synthesized Probe
  source 1..80: mol_type = other DNA
tgcaaaaagggtaaatattgttgtgtcagacttttttgggtgagtgtgcatgtgttcacatactggatcacattataaca

SEQ ID NO: 128609 - DNA, 80 bp, synthetic construct
  misc_feature 1..80: note = Artificially Synthesized Probe
  source 1..80: mol_type = other DNA
tttagttagaaaaataatcccaattgagtttgttactcttctatgaaggtggaagatcctgtgccagaacattatgctct

SEQ ID NO: 128610 - DNA, 80 bp, synthetic construct; identical to SEQ ID NO: 40875
  misc_feature 1..80: note = Artificially Synthesized Probe
  source 1..80: mol_type = other DNA

SEQ ID NO: 128611 - DNA, 80 bp, synthetic construct
  misc_feature 1..80: note = Artificially Synthesized Probe
  source 1..80: mol_type = other DNA
gtgtaaaatgctccagtttatgaattagaggaactatgctttcagccttttattctgagaaatgtgccatttaataataa

SEQ ID NO: 128612 - DNA, 80 bp, synthetic construct
  misc_feature 1..80: note = Artificially Synthesized Probe
  source 1..80: mol_type = other DNA
tatctggtaattgtggccacatccgttatgtatcatgcaggttgaaaacttagacaggctctgatgatttctctgctatg

SEQ ID NO: 128613 - DNA, 80 bp, synthetic construct
  misc_feature 1..80: note = Artificially Synthesized Probe
  source 1..80: mol_type = other DNA
tcaagttgacataatacacacctgcccagggaacctggagacctgtaaaataatttaaaaccatttttttttttatcata

SEQ ID NO: 128614 - DNA, 80 bp, synthetic construct; identical to SEQ ID NO: 40876
  misc_feature 1..80: note = Artificially Synthesized Probe
  source 1..80: mol_type = other DNA

SEQ ID NO: 128615 - DNA, 80 bp, synthetic construct
  misc_feature 1..80: note = Artificially Synthesized Probe
  source 1..80: mol_type = other DNA
accactgcactccagcctgggcgacagagtgagactccgtcacaaaaaaaaaaacaaaaaaaaaccttttctttgttgga

SEQ ID NO: 128616 - DNA, 80 bp, synthetic construct
  misc_feature 1..80: note = Artificially Synthesized Probe
  source 1..80: mol_type = other DNA
cacttttgtcagctgcatccaacctaagcctggaaccagattgaatcaaatgctaagttttaatgtctttcatttggttc

SEQ ID NO: 128617 - DNA, 80 bp, synthetic construct
  misc_feature 1..80: note = Artificially Synthesized Probe
  source 1..80: mol_type = other DNA
tacgttatgaagcattttcttgcttcttgttgtctttttctggtggattgagtcaatgcagttggtagaatcttttccac

SEQ ID NO: 128618 - DNA, 80 bp, synthetic construct
  misc_feature 1..80: note = Artificially Synthesized Probe
  source 1..80: mol_type = other DNA
ttctgactcacacagtgattctggggctgtctgtaatatctaaacgatgagactgatctacttgcaaggtcagggcatgt

SEQ ID NO: 128619 - DNA, 80 bp, synthetic construct; identical to SEQ ID NO: 40877
  misc_feature 1..80: note = Artificially Synthesized Probe
  source 1..80: mol_type = other DNA

SEQ ID NO: 128620 - DNA, 80 bp, synthetic construct
  misc_feature 1..80: note = Artificially Synthesized Probe
  source 1..80: mol_type = other DNA
tcatttaaattctatgcttcagttaccctgaatttcttcgattatttcggttccttgcatgcagcttcttttctgttgcc

SEQ ID NO: 128621 - DNA, 80 bp, synthetic construct
  misc_feature 1..80: note = Artificially Synthesized Probe
  source 1..80: mol_type = other DNA
tttttacattgcaattacttcttatggtagtctgtcttctctggtagactagattcctttggaaggcaggcccaagaagc

SEQ ID NO: 128622 - DNA, 80 bp, synthetic construct; identical to SEQ ID NO: 40878
  misc_feature 1..80: note = Artificially Synthesized Probe
  source 1..80: mol_type = other DNA

SEQ ID NO: 128623 - DNA, 80 bp, synthetic construct
  misc_feature 1..80: note = Artificially Synthesized Probe
  source 1..80: mol_type = other DNA
taattttgtgaaccccctcaggaatttaaaaaataatgtcattacttttatagactattataaagcaaatttatgtaaaa

SEQ ID NO: 128624 - DNA, 80 bp, synthetic construct
  misc_feature 1..80: note = Artificially Synthesized Probe
  source 1..80: mol_type = other DNA
ttgtgcttaccttatacccttgacctctgacagctacattaggaaaatatgtcatattgcagggaaaaagcagttgatat

SEQ ID NO: 128625 - DNA, 80 bp, synthetic construct
  misc_feature 1..80: note = Artificially Synthesized Probe
  source 1..80: mol_type = other DNA
aatttatttaaatgaattatgtaagcgtgtgatttgtttaaaatttataataaaatatagtgcttagtttgagaccaaat

SEQ ID NO: 128626 - DNA, 80 bp, synthetic construct
  misc_feature 1..80: note = Artificially Synthesized Probe
  source 1..80: mol_type = other DNA
gttaccacagagagtttcaactgcatatctacaagggagtaacaccttgtagctatggaatgcctttcctctaacagtta

SEQ ID NO: 128627 - DNA, 80 bp, synthetic construct; identical to SEQ ID NO: 40879
  misc_feature 1..80: note = Artificially Synthesized Probe
  source 1..80: mol_type = other DNA

SEQ ID NO: 128628 - DNA, 80 bp, synthetic construct
  misc_feature 1..80: note = Artificially Synthesized Probe
  source 1..80: mol_type = other DNA
ggtgcctacaccacacctggctaatttttgtattgttttgtagagatggggtttcgccatgttggccaggctggtctgga

SEQ ID NO: 128629 - DNA, 80 bp, synthetic construct
  misc_feature 1..80: note = Artificially Synthesized Probe
  source 1..80: mol_type = other DNA
agaatgctcataccatcttggcctaagtggtgtttgcaaaaccaccatggcctagataatgatgtttattagctcatcac

SEQ ID NO: 128630 - DNA, 80 bp, synthetic construct
  misc_feature 1..80: note = Artificially Synthesized Probe
  source 1..80: mol_type = other DNA
cttgaacttctggggtgttcacagtctattgcttggtcaggagccttagaaaacttagacatatgtgttaggagaccagg

SEQ ID NO: 128631 - DNA, 80 bp, synthetic construct
  misc_feature 1..80: note = Artificially Synthesized Probe
  source 1..80: mol_type = other DNA
agatactgagcttgtcgcctacctttgggcgcctctcatgccttgtatttcacattgagcctcagttatcagtgacacag

SEQ ID NO: 128632 - DNA, 80 bp, synthetic construct; identical to SEQ ID NO: 40880
  misc_feature 1..80: note = Artificially Synthesized Probe
  source 1..80: mol_type = other DNA

SEQ ID NO: 128633 - DNA, 80 bp, synthetic construct
  misc_feature 1..80: note = Artificially Synthesized Probe
  source 1..80: mol_type = other DNA
ctgagtagctgggcttacaggtgcaccaccatgcctggctactttttgtattgttagtagagatggggttctgccatgtt

SEQ ID NO: 128634 - DNA, 80 bp, synthetic construct
  misc_feature 1..80: note = Artificially Synthesized Probe
  source 1..80: mol_type = other DNA
gccaacagatcctggattctggcatctggattatggtagcaatattgaaaaaaatattatagtggggagtaaaatttagg

SEQ ID NO: 128635 - DNA, 80 bp, synthetic construct
  misc_feature 1..80: note = Artificially Synthesized Probe
  source 1..80: mol_type = other DNA
cttactgattttacaataatgtgtaggaactctcatatctcccttactctctgtaattgtggtagaatacacaggaggtt

SEQ ID NO: 128636 - DNA, 80 bp, synthetic construct
  misc_feature 1..80: note = Artificially Synthesized Probe
  source 1..80: mol_type = other DNA
tgaaaaattccccgtgggcattacattgtgaatccttttgtagctatcataaataatgaaggaaaaacacttgtcaaaat

SEQ ID NO: 128637 - DNA, 80 bp, synthetic construct; identical to SEQ ID NO: 40881
  misc_feature 1..80: note = Artificially Synthesized Probe
  source 1..80: mol_type = other DNA

SEQ ID NO: 128638 - DNA, 80 bp, synthetic construct
  misc_feature 1..80: note = Artificially Synthesized Probe
  source 1..80: mol_type = other DNA
aaaaattaaaatgaggtaagagcataatagagagtgtcggggcactttcagatggagtggtcacaaaggctgctgtgagc

SEQ ID NO: 128639 - DNA, 80 bp, synthetic construct
  misc_feature 1..80: note = Artificially Synthesized Probe
  source 1..80: mol_type = other DNA
gggccatgtaaggttttggaaagccgttagcttttctccactgggaagccattgaaagatgatgagcagggctgcagtgt

SEQ ID NO: 128640 - DNA, 80 bp, synthetic construct
  misc_feature 1..80: note = Artificially Synthesized Probe
  source 1..80: mol_type = other DNA
tttgctcatgaattggattgggaatttgtaagagaagagtcaataataactctgaagatttgtggcctggcaggtgaatg

SEQ ID NO: 128641 - DNA, 80 bp, synthetic construct; identical to SEQ ID NO: 40882
  misc_feature 1..80: note = Artificially Synthesized Probe
  source 1..80: mol_type = other DNA

SEQ ID NO: 128642 - DNA, 80 bp, synthetic construct
  misc_feature 1..80: note = Artificially Synthesized Probe
  source 1..80: mol_type = other DNA
tgtgcaggtcattaccacccaccacaagagtggtagaagcaagagcctggttacagtggccttaagagaaaaagggaaga

SEQ ID NO: 128643 - DNA, 80 bp, synthetic construct
  misc_feature 1..80: note = Artificially Synthesized Probe
  source 1..80: mol_type = other DNA
tttaataagatgggagaaaatacagtgtgtttgactgctgctggtaatgagccagtagaaatggaaaatgatgatacgga

SEQ ID NO: 128644 - DNA, 80 bp, synthetic construct
  misc_feature 1..80: note = Artificially Synthesized Probe
  source 1..80: mol_type = other DNA
tcttccagtgttaacatttggtacacataaacagaagggtggctggtgagggtgaaataattttataagaatggcattgt

SEQ ID NO: 128645 - DNA, 80 bp, synthetic construct; identical to SEQ ID NO: 40883
  misc_feature 1..80: note = Artificially Synthesized Probe
  source 1..80: mol_type = other DNA

SEQ ID NO: 128646 - DNA, 80 bp, synthetic construct
  misc_feature 1..80: note = Artificially Synthesized Probe
  source 1..80: mol_type = other DNA
catatgtagccacttgttctttgatcgtggctttcctgttcctgtggtttttgttttgattgatctactgggtgcaagat

SEQ ID NO: 128647 - DNA, 80 bp, synthetic construct; identical to SEQ ID NO: 40802
  misc_feature 1..80: note = Artificially Synthesized Probe
  source 1..80: mol_type = other DNA

SEQ ID NO: 128648 - DNA, 80 bp, synthetic construct
  misc_feature 1..80: note = Artificially Synthesized Probe
  source 1..80: mol_type = other DNA
tggctacattatcttcaggccttgaatattgctatggagaagtctgagaccaatctgggtttctgctgtattttgttagc

SEQ ID NO: 128649 - DNA, 80 bp, synthetic construct; identical to SEQ ID NO: 40884
  misc_feature 1..80: note = Artificially Synthesized Probe
  source 1..80: mol_type = other DNA

SEQ ID NO: 128650 - DNA, 80 bp, synthetic construct
  misc_feature 1..80: note = Artificially Synthesized Probe
  source 1..80: mol_type = other DNA
cagctcagggccaattttgttttatctgtatccctcacccattcccactctcctccattactttgaaacaatagcagata

SEQ ID NO: 128651 - DNA, 80 bp, synthetic construct
  misc_feature 1..80: note = Artificially Synthesized Probe
  source 1..80: mol_type = other DNA
gcctcctgagtagctgggactacaggcgcccgccaccacgcccagctactttttttgtatttttttttagtagagacggg

SEQ ID NO: 128652 - DNA, 80 bp, synthetic construct
  misc_feature 1..80: note = Artificially Synthesized Probe
  source 1..80: mol_type = other DNA
taagtttcatctagtctgtttataatctttttactaaatatataacaacattgccttgtggtgtttagatcagcaacttc

SEQ ID NO: 128653 - DNA, 80 bp, synthetic construct
  misc_feature 1..80: note = Artificially Synthesized Probe
  source 1..80: mol_type = other DNA
aacagtgacatgagttgcatacataggaagtgcccactggttcctgggtgttctctgaatttctagtgctcacgtgaact

SEQ ID NO: 128654 - DNA, 80 bp, synthetic construct; identical to SEQ ID NO: 40885
  misc_feature 1..80: note = Artificially Synthesized Probe
  source 1..80: mol_type = other DNA

SEQ ID NO: 128655 - DNA, 80 bp, synthetic construct
  misc_feature 1..80: note = Artificially Synthesized Probe
  source 1..80: mol_type = other DNA
caattcctatcactttctgtaccttctttatcgaaaagttaaaggatcaaagaacctatgggatagattttaggtattat

SEQ ID NO: 128656 - DNA, 80 bp, synthetic construct
  misc_feature 1..80: note = Artificially Synthesized Probe
  source 1..80: mol_type = other DNA
aggtgcctgtaatcccagctacttggaaggctgaggcaagagaattgcttgaggctgggaggcagaggttgcagtgggct

SEQ ID NO: 128657 - DNA, 80 bp, synthetic construct; identical to SEQ ID NO: 40886
  misc_feature 1..80: note = Artificially Synthesized Probe
  source 1..80: mol_type = other DNA

SEQ ID NO: 128658 - DNA, 80 bp, synthetic construct
  misc_feature 1..80: note = Artificially Synthesized Probe
  source 1..80: mol_type = other DNA
tttccaccttttgcctattttgaataatgctgctgtgaacataggtgtaacataggggtgttcttttttcttttttcttt

SEQ ID NO: 128659 - DNA, 80 bp, synthetic construct
  misc_feature 1..80: note = Artificially Synthesized Probe
  source 1..80: mol_type = other DNA
tgcccctctttcccaaccacatacacctaaacattcagagttaagacagcgagaatgaggattcttaatttggtgaaggt

SEQ ID NO: 128660 - DNA, 80 bp, synthetic construct
  misc_feature 1..80: note = Artificially Synthesized Probe
  source 1..80: mol_type = other DNA
tctaggttcaaatcctgttgtgatctgttactgtctgagtgagcttaggcagttaactgatctctctgaacctcagtggt

SEQ ID NO: 128661 - DNA, 80 bp, synthetic construct
  misc_feature 1..80: note = Artificially Synthesized Probe
  source 1..80: mol_type = other DNA
cgacttagagagattaagtgtcttgttcagggagacacaggtaccaggtggcagaactacaattaaaatccaagtttttc

SEQ ID NO: 128662 - DNA, 80 bp, synthetic construct
  misc_feature 1..80: note = Artificially Synthesized Probe
  source 1..80: mol_type = other DNA
gtaaatatataagatgtgtctgcctataacttttgtggggacagtttacctttccataaaaaaaaaactgtggtcaacta

SEQ ID NO: 128663 - DNA, 80 bp, synthetic construct; identical to SEQ ID NO: 40887
  misc_feature 1..80: note = Artificially Synthesized Probe
  source 1..80: mol_type = other DNA

SEQ ID NO: 128664 - DNA, 80 bp, synthetic construct
  misc_feature 1..80: note = Artificially Synthesized Probe
  source 1..80: mol_type = other DNA
ggggcaaggagggaaaatatttcattcgtcaatttctatctcctgtaggtcaaagtttgattcttggagcctccacttct

SEQ ID NO: 128665 - DNA, 80 bp, synthetic construct
  misc_feature 1..80: note = Artificially Synthesized Probe
  source 1..80: mol_type = other DNA
aacagccattgcaacaggaactgggcagactgtttcagccagcagcaaggtagttgtgttcatctggggtgatgcataaa

SEQ ID NO: 128666 - DNA, 80 bp, synthetic construct
  misc_feature 1..80: note = Artificially Synthesized Probe
  source 1..80: mol_type = other DNA
tttccacctaaatggggatatcctaagcctacatctttttaattctacatgctgtctgtggacagctgcattcactttgc

SEQ ID NO: 128667 - DNA, 80 bp, synthetic construct; identical to SEQ ID NO: 40888
  misc_feature 1..80: note = Artificially Synthesized Probe
  source 1..80: mol_type = other DNA

SEQ ID NO: 128668 - DNA, 80 bp, synthetic construct
  misc_feature 1..80: note = Artificially Synthesized Probe
  source 1..80: mol_type = other DNA
agagagtggacatgtttgaactgacatttggtcttttcaggaattgtttggtaggaaatttcttggatttttactctcct

SEQ ID NO: 128669 - DNA, 80 bp, synthetic construct
  misc_feature 1..80: note = Artificially Synthesized Probe
  source 1..80: mol_type = other DNA
aaaattttttgtagagatgaagtctccctacattgcccaggctggttattttttttttaaaaggtacactataccaaagt

SEQ ID NO: 128670 - DNA, 80 bp, synthetic construct
  misc_feature 1..80: note = Artificially Synthesized Probe
  source 1..80: mol_type = other DNA
tcatactcttctgtgtgaaccttcaagtcacaaggcttctcacagcctcctgagcttcatctgcccattttagcctcttt

SEQ ID NO: 128671 - DNA, 80 bp, synthetic construct; identical to SEQ ID NO: 40889
  misc_feature 1..80: note = Artificially Synthesized Probe
  source 1..80: mol_type = other DNA

SEQ ID NO: 128672 - DNA, 80 bp, synthetic construct
  misc_feature 1..80: note = Artificially Synthesized Probe
  source 1..80: mol_type = other DNA
atcaggagcatcagactaggtgacatttcccagaggagctgctggtcttcacatcctgcatctttagtttgtggtacaag

SEQ ID NO: 128673 - DNA, 80 bp, synthetic construct
  misc_feature 1..80: note = Artificially Synthesized Probe
  source 1..80: mol_type = other DNA
cctgccagagtagtcacgatgatattgaaatatccctctcattggctttatgagattgccttctgtgcattcacttgggg

SEQ ID NO: 128674 - DNA, 80 bp, synthetic construct
  misc_feature 1..80: note = Artificially Synthesized Probe
  source 1..80: mol_type = other DNA
tagctttggaataatctaccgcacagggcagacagttttgaagatggccatgtttaaagtccatcagagaaaactacagt

SEQ ID NO: 128675 - DNA, 80 bp, synthetic construct
  misc_feature 1..80: note = Artificially Synthesized Probe
  source 1..80: mol_type = other DNA
agagtcatgggctctaaagtacgtgttattgctaatgattggtgttgttatgtgcagggattttccactcatggaattct

SEQ ID NO: 128676 - DNA, 80 bp, synthetic construct; identical to SEQ ID NO: 40890
  misc_feature 1..80: note = Artificially Synthesized Probe
  source 1..80: mol_type = other DNA

SEQ ID NO: 128677 - DNA, 80 bp, synthetic construct
  misc_feature 1..80: note = Artificially Synthesized Probe
  source 1..80: mol_type = other DNA
aatactacttcagatttctgtttccttccctttctctctctctttctcctctcctgccttccctccacaaacttggaggc

SEQ ID NO: 128678 - DNA, 80 bp, synthetic construct
  misc_feature 1..80: note = Artificially Synthesized Probe
  source 1..80: mol_type = other DNA
cctcctgggttcaagcgattctcctgcctcaccctcccaagtagctaggattacaggtgtgtgccaccatgcctggctaa

SEQ ID NO: 128679 - DNA, 80 bp, synthetic construct; identical to SEQ ID NO: 40891
  misc_feature 1..80: note = Artificially Synthesized Probe
  source 1..80: mol_type = other DNA

SEQ ID NO: 128680 - DNA, 80 bp, synthetic construct
  misc_feature 1..80: note = Artificially Synthesized Probe
  source 1..80: mol_type = other DNA
ttttaatagctttattgagatttaattgacatttaataaattgcacatatttaaggtatacaatttgataggctttgaca

SEQ ID NO: 128681 - DNA, 80 bp, synthetic construct
  misc_feature 1..80: note = Artificially Synthesized Probe
  source 1..80: mol_type = other DNA
cttcatacttcagaaatcctcactttatccattacagcccctttgcaagggaccaaaaatccaaggcaaagtggtttttt

SEQ ID NO: 128682 - DNA, 80 bp, synthetic construct
  misc_feature 1..80: note = Artificially Synthesized Probe
  source 1..80: mol_type = other DNA
tggcctaggcaaagtgttttaagcgaaaattgaatgaattgacttgtgtcactgaaaggtccagggatagggctggcttc

SEQ ID NO: 128683 - DNA, 80 bp, synthetic construct
  misc_feature 1..80: note = Artificially Synthesized Probe
  source 1..80: mol_type = other DNA
caaggcctggatttgagaaagcacactatctttggagagggcaggggtgggatcagttttactgaaagcatgtggaccga

SEQ ID NO: 128684 - DNA, 80 bp, synthetic construct
  misc_feature 1..80: note = Artificially Synthesized Probe
  source 1..80: mol_type = other DNA
ccttgacctcctgggctcaagcaagcctcccacctcagcctcccaagtagctgggactaaaggcatgcaccaccaccccc

SEQ ID NO: 128685 - DNA, 80 bp, synthetic construct; identical to SEQ ID NO: 40892
  misc_feature 1..80: note = Artificially Synthesized Probe
  source 1..80: mol_type = other DNA

SEQ ID NO: 128686 - DNA, 80 bp, synthetic construct
  misc_feature 1..80: note = Artificially Synthesized Probe
  source 1..80: mol_type = other DNA
tgttaccgtttttttcttctttcttctccactaccctgctaactttgaggaagaactttttgtctgtattcccagagcac

SEQ ID NO: 128687 - DNA, 80 bp, synthetic construct
  misc_feature 1..80: note = Artificially Synthesized Probe
  source 1..80: mol_type = other DNA
gtccagcaaggatttttgagtcctccctttactaagttcatagaaaggcaaactagcagagtagagagcaagacttggca

SEQ ID NO: 128688 - DNA, 80 bp, synthetic construct
  misc_feature 1..80: note = Artificially Synthesized Probe
  source 1..80: mol_type = other DNA
gagatggctgaggtgtttgtgaaggggctaaaagcaggtgaggcagattgggtggaaaaagactggcagtcagaccaggt

SEQ ID NO: 128689 - DNA, 80 bp, synthetic construct; identical to SEQ ID NO: 40893
  misc_feature 1..80: note = Artificially Synthesized Probe
  source 1..80: mol_type = other DNA

SEQ ID NO: 128690 - DNA, 80 bp, synthetic construct
  misc_feature 1..80: note = Artificially Synthesized Probe
  source 1..80: mol_type = other DNA
gagtctacatgattgtcagcgtggcagggccctgcctgtttttgttaaatgatcagtatcctattagggctagtttttct

SEQ ID NO: 128691 - DNA, 80 bp, synthetic construct; identical to SEQ ID NO: 40803
  misc_feature 1..80: note = Artificially Synthesized Probe
  source 1..80: mol_type = other DNA

SEQ ID NO: 128692 - DNA, 80 bp, synthetic construct
  misc_feature 1..80: note = Artificially Synthesized Probe
  source 1..80: mol_type = other DNA
gctggatttgaattcacatataaaaacactccctggcaggtctttatctgacatcgtttggaaatggtgatctgccagtg

SEQ ID NO: 128693 - DNA, 80 bp, synthetic construct
  misc_feature 1..80: note = Artificially Synthesized Probe
  source 1..80: mol_type = other DNA
ttcactggcagatggtgctcaacagaatatgctatgtggtggggttaaattttttaatctgtttttttcagtgagataca

SEQ ID NO: 128694 - DNA, 80 bp, synthetic construct; identical to SEQ ID NO: 40894
  misc_feature 1..80: note = Artificially Synthesized Probe
  source 1..80: mol_type = other DNA

SEQ ID NO: 128695 - DNA, 80 bp, synthetic construct
  misc_feature 1..80: note = Artificially Synthesized Probe
  source 1..80: mol_type = other DNA
ctttttgtgttctcttgtcctttctcttctttgtcaagccatgcctctttagacagggcttagacctgtcttttcctcct

SEQ ID NO: 128696 - DNA, 80 bp, synthetic construct
  misc_feature 1..80: note = Artificially Synthesized Probe
  source 1..80: mol_type = other DNA
actcatggcgaccttagtactttggctttgtgaatagccagggaattcttttgtacccctaagatatagctgcttctaga

SEQ ID NO: 128697 - DNA, 80 bp, synthetic construct; identical to SEQ ID NO: 40895
  misc_feature 1..80: note = Artificially Synthesized Probe
  source 1..80: mol_type = other DNA

SEQ ID NO: 128698 - DNA, 80 bp, synthetic construct
  misc_feature 1..80: note = Artificially Synthesized Probe
  source 1..80: mol_type = other DNA
tccccgggctcccttccagcctcaggaccccatctcacacccgcctctcgcttcccgcttcccgctcgcctgaaccccgc

SEQ ID NO: 128699 - DNA, 80 bp, synthetic construct
  misc_feature 1..80: note = Artificially Synthesized Probe
  source 1..80: mol_type = other DNA
cctgccccttgtgtgcatgaacggggactggggccagcatagctgccttcttggggaccattgtttgtctttgtaggagc

SEQ ID NO: 128700 - DNA, 80 bp, synthetic construct
  misc_feature 1..80: note = Artificially Synthesized Probe
  source 1..80: mol_type = other DNA
ctttgaagatggtaacaagggaggcatcttcttctttctgcttcctttcttcttttgccttcttccttcttcattctctt

SEQ ID NO: 128701 - DNA, 80 bp, synthetic construct
  misc_feature 1..80: note = Artificially Synthesized Probe
  source 1..80: mol_type = other DNA
ggtggtatctattaacagagcctcttttttttcctggatcaggggtggggatattgctttctcactgtctctgtcctctg

SEQ ID NO: 128702 - DNA, 80 bp, synthetic construct
  misc_feature 1..80: note = Artificially Synthesized Probe
  source 1..80: mol_type = other DNA
gtcttaggggcctgaatcaaccctcagctggaaagtggaaaaggcgatgttccaggagttaagagtcatggtcactgtga

SEQ ID NO: 128703 - DNA, 80 bp, synthetic construct; identical to SEQ ID NO: 40896
  misc_feature 1..80: note = Artificially Synthesized Probe
  source 1..80: mol_type = other DNA

SEQ ID NO: 128704 - DNA, 80 bp, synthetic construct
  misc_feature 1..80: note = Artificially Synthesized Probe
  source 1..80: mol_type = other DNA
atcccagctatacgggaggctgaggcacgagaatcacttgaacctgggaggcagaggttgcaatgagctgagatctcgcc

SEQ ID NO: 128705 - DNA, 80 bp, synthetic construct
  misc_feature 1..80: note = Artificially Synthesized Probe
  source 1..80: mol_type = other DNA
gtttcttatattaaatcacatatctcagaggcctcctattaagtacttgttccttggacaggctaactctggagtggcct

SEQ ID NO: 128706 - DNA, 80 bp, synthetic construct
  misc_feature 1..80: note = Artificially Synthesized Probe
  source 1..80: mol_type = other DNA
ctgcccatccatatcccctgtacatctgttactgattcagtacctggaaagcctttccaccctaaaaacgccttggttct

SEQ ID NO: 128707 - DNA, 80 bp, synthetic construct
  misc_feature 1..80: note = Artificially Synthesized Probe
  source 1..80: mol_type = other DNA
cctccccagtagttgggaccacaggcacctgccaccatgcctggctaattttttttttgtatttttagtagagacagggt

SEQ ID NO: 128708 - DNA, 80 bp, synthetic construct; identical to SEQ ID NO: 40897
  misc_feature 1..80: note = Artificially Synthesized Probe
  source 1..80: mol_type = other DNA

SEQ ID NO: 128709 - DNA, 80 bp, synthetic construct
  misc_feature 1..80: note = Artificially Synthesized Probe
  source 1..80: mol_type = other DNA
tgcagatctttacccccaatacccttgtaatcagactccgtaaaacacagaacaagagagctttgatgagtgatgaggta

SEQ ID NO: 128710 - DNA, 80 bp, synthetic construct
  misc_feature 1..80: note = Artificially Synthesized Probe
  source 1..80: mol_type = other DNA
catctgcaaaggacatactgatatttgtaaaaacagcaacaaaaatgtagatggggacagattgtggagcctcgactact

SEQ ID NO: 128711 - DNA, 80 bp, synthetic construct; identical to SEQ ID NO: 40898
  misc_feature 1..80: note = Artificially Synthesized Probe
  source 1..80: mol_type = other DNA

SEQ ID NO: 128712 - DNA, 80 bp, synthetic construct
  misc_feature 1..80: note = Artificially Synthesized Probe
  source 1..80: mol_type = other DNA
aaatcagtctggctttggcatactgcttcctgtgagtgccaggtctcttgtcagtaacaaatgcagtgctgcatttgagg

SEQ ID NO: 128713 - DNA, 80 bp, synthetic construct
  misc_feature 1..80: note = Artificially Synthesized Probe
  source 1..80: mol_type = other DNA
ttaagcaacacagatatgagtgatatttgttagtgaaaaaaatctctttccaagtcttcttaaaaaatgattttcattct

SEQ ID NO: 128714 - DNA, 80 bp, synthetic construct
  misc_feature 1..80: note = Artificially Synthesized Probe
  source 1..80: mol_type = other DNA
aaacaacattttgaaatgatggggaaaaatgcaaaaagtaggagcatggtctctaaagtcagtctcttggggtttgaatc

SEQ ID NO: 128715 - DNA, 80 bp, synthetic construct; identical to SEQ ID NO: 40899
  misc_feature 1..80: note = Artificially Synthesized Probe
  source 1..80: mol_type = other DNA

SEQ ID NO: 128716 - DNA, 80 bp, synthetic construct
  misc_feature 1..80: note = Artificially Synthesized Probe
  source 1..80: mol_type = other DNA
gcaccattgcagtctagcctaggtgatagagctaataattatgttatagaagaggcattaacttcaagataactaaatga

SEQ ID NO: 128717 - DNA, 80 bp, synthetic construct
  misc_feature 1..80: note = Artificially Synthesized Probe
  source 1..80: mol_type = other DNA
ataagtaagtggaaggtgggtgaatattggcatgcatggtggcttatttagggcggtctttctgactgtcttctcttgtt

SEQ ID NO: 128718 - DNA, 80 bp, synthetic construct
  misc_feature 1..80: note = Artificially Synthesized Probe
  source 1..80: mol_type = other DNA
gaaagagggtggaggcaggaattcgggccaggctctcccggagctggccaggactggccgagcccgaccccgcactaacc

SEQ ID NO: 128719 - DNA, 80 bp, synthetic construct
  misc_feature 1..80: note = Artificially Synthesized Probe
  source 1..80: mol_type = other DNA
ctaagatcaggagttcaagaccagcctggccaacatggtgaaaccccgcctctacgaaaaatataaaaattagctgggtg

SEQ ID NO: 128720 - DNA, 80 bp, synthetic construct
  misc_feature 1..80: note = Artificially Synthesized Probe
  source 1..80: mol_type = other DNA
aaaaaaatgttgataaatgtactcacctatgagattcattgatattcataatactgtctgacaaaaaaagaagttaccaa

SEQ ID NO: 128721 - DNA, 80 bp, synthetic construct; identical to SEQ ID NO: 41085
  misc_feature 1..80: note = Artificially Synthesized Probe
  source 1..80: mol_type = other DNA

SEQ ID NO: 128722 - DNA, 80 bp, synthetic construct
  misc_feature 1..80: note = Artificially Synthesized Probe
  source 1..80: mol_type = other DNA
gggagtctgaggcaggcggatcacctgaggtcgggagttcgagaccagcctgcacaacatggagaaaccccgtctctatt

SEQ ID NO: 128723 - DNA, 80 bp, synthetic construct
  misc_feature 1..80: note = Artificially Synthesized Probe
  source 1..80: mol_type = other DNA
ccaggcatggtggcaggtgcctgtagtcccagctaccagggaggctgaggcaggagaatggcgtgaacccgggaggcgga

SEQ ID NO: 128724 - DNA, 80 bp, synthetic construct
  misc_feature 1..80: note = Artificially Synthesized Probe
  source 1..80: mol_type = other DNA
gcttgaacctgggatgtggaggttgtggtgagccaggactgcaccagtgcactccagccgggacaacaggagtgaaacac

SEQ ID NO: 128725 - DNA, 80 bp, synthetic construct; identical to SEQ ID NO: 41086
  misc_feature 1..80: note = Artificially Synthesized Probe
  source 1..80: mol_type = other DNA

SEQ ID NO: 128726 - DNA, 80 bp, synthetic construct; identical to SEQ ID NO: 41075
  misc_feature 1..80: note = Artificially Synthesized Probe
  source 1..80: mol_type = other DNA

SEQ ID NO: 128727 - DNA, 80 bp, synthetic construct
  misc_feature 1..80: note = Artificially Synthesized Probe
  source 1..80: mol_type = other DNA
gctactcgggaggctgaggcaggagaattgcttgacccgggaggcggaggttgcagtgagccgagattgtgccactgcac

SEQ ID NO: 128728 - DNA, 80 bp, synthetic construct
  misc_feature 1..80: note = Artificially Synthesized Probe
  source 1..80: mol_type = other DNA
cctcaaagcttcaccagaaaaacttcgttcagcttttaagtcaactctcttttagggaaattctgacactccaataatgg

SEQ ID NO: 128729 - DNA, 80 bp, synthetic construct
  misc_feature 1..80: note = Artificially Synthesized Probe
  source 1..80: mol_type = other DNA
gctgatgttgaaaaagctcatatcaacattcgagattctatccacctcacaccagtgctaacaagctccattttgaatca

SEQ ID NO: 128730 - DNA, 80 bp, synthetic construct
  misc_feature 1..80: note = Artificially Synthesized Probe
  source 1..80: mol_type = other DNA
agaagtaaattaatgcctttatacagctggaaaaaaggttacagaaattttcctttcaagtccttgttttacctagcatc

SEQ ID NO: 128731 - DNA, 80 bp, synthetic construct; identical to SEQ ID NO: 41087
  misc_feature 1..80: note = Artificially Synthesized Probe
  source 1..80: mol_type = other DNA

SEQ ID NO: 128732 - DNA, 80 bp, synthetic construct
  misc_feature 1..80: note = Artificially Synthesized Probe
  source 1..80: mol_type = other DNA
ctgtaacagctggatttgtataagtacactctatggtgcatgcaagatgatgaaattgccaaatcatgcatttctcgaaa

SEQ ID NO: 128733 - DNA, 80 bp, synthetic construct
  misc_feature 1..80: note = Artificially Synthesized Probe
  source 1..80: mol_type = other DNA
ggcaaattggaaagtgttatcactctgtatatgacccaagtttaagcattcactgtatcaacttgctacacatggataca

SEQ ID NO: 128734 - DNA, 80 bp, synthetic construct
  misc_feature 1..80: note = Artificially Synthesized Probe
  source 1..80: mol_type = other DNA
accagcctgaccaacatgatgaaacgcttttttgttttgttttgttttgttttgagacggagtctcactctgtcccccag

SEQ ID NO: 128735 - DNA, 80 bp, synthetic construct; identical to SEQ ID NO: 41088
  misc_feature 1..80: note = Artificially Synthesized Probe
  source 1..80: mol_type = other DNA

SEQ ID NO: 128736 - DNA, 80 bp, synthetic construct
  misc_feature 1..80: note = Artificially Synthesized Probe
  source 1..80: mol_type = other DNA
ggttgcagtgagttgagatcacgccattgcactccaccatgggtgatagaggaagactccatctcgggggaaaaaaaaaa

SEQ ID NO: 128737 - DNA, 80 bp, synthetic construct
  misc_feature 1..80: note = Artificially Synthesized Probe
  source 1..80: mol_type = other DNA
cgggcgtggtggcgggcgcctgcagacccggctactcgagaagctgaggcaggagaatggcgtgaacccgggaggcggag

SEQ ID NO: 128738 - DNA, 80 bp, synthetic construct
  misc_feature 1..80: note = Artificially Synthesized Probe
  source 1..80: mol_type = other DNA
cttgaaaaaaattactgctgtggatctcaggttgactttttaatttcccatctttaaaattgaactataccagaaggctg

SEQ ID NO: 128739 - DNA, 80 bp, synthetic construct
  misc_feature 1..80: note = Artificially Synthesized Probe
  source 1..80: mol_type = other DNA
cacttgaacccggccctgggggtagacgcagtgtggggaggcggacgttgcagtaagccgagatcgtggcactgcactcc

SEQ ID NO: 128740 - DNA, 80 bp, synthetic construct; identical to SEQ ID NO: 41089
  misc_feature 1..80: note = Artificially Synthesized Probe
  source 1..80: mol_type = other DNA

SEQ ID NO: 128741 - DNA, 80 bp, synthetic construct
  misc_feature 1..80: note = Artificially Synthesized Probe
  source 1..80: mol_type = other DNA
ttcagtgagagtgatgatagctgtgggaagtaactttccaaagaaatctctatctgattgcaagcaatatgaacataagt

SEQ ID NO: 128742 - DNA, 80 bp, synthetic construct
  misc_feature 1..80: note = Artificially Synthesized Probe
  source 1..80: mol_type = other DNA
ccacgcctggctaattttttctattttacaaatacaaaatactaatttcaccatgttgcccaggctggtctcgaactcct

SEQ ID NO: 128743 - DNA, 80 bp, synthetic construct
  misc_feature 1..80: note = Artificially Synthesized Probe
  source 1..80: mol_type = other DNA
gatctcggctcactgcaagctccacctcccgggttcacaccattgtcctgcctcagcctgggactacaggagcctgccac

SEQ ID NO: 128744 - DNA, 80 bp, synthetic construct; identical to SEQ ID NO: 41090
  misc_feature 1..80: note = Artificially Synthesized Probe
  source 1..80: mol_type = other DNA

SEQ ID NO: 128745 - DNA, 80 bp, synthetic construct
  misc_feature 1..80: note = Artificially Synthesized Probe
  source 1..80: mol_type = other DNA
tctcagcctcctttgtggtttcccctttatttctgttagcatgctcaaccttttctctatctacactcacaagatctcat

SEQ ID NO: 128746 - DNA, 80 bp, synthetic construct
  misc_feature 1..80: note = Artificially Synthesized Probe
  source 1..80: mol_type = other DNA
gatcttacttccctatattgcttcccttccagtcttcctcatcttagtaaatggcaatttttattcttctagttactcaa

SEQ ID NO: 128747 - DNA, 80 bp, synthetic construct
  misc_feature 1..80: note = Artificially Synthesized Probe
  source 1..80: mol_type = other DNA
agacagggtctcactgttgcccaggctggtctcaaactcctggattcaagcagtcctcccaccttggcctcccaaaatgc

SEQ ID NO: 128748 - DNA, 80 bp, synthetic construct; identical to SEQ ID NO: 41091
  misc_feature 1..80: note = Artificially Synthesized Probe
  source 1..80: mol_type = other DNA

SEQ ID NO: 128749 - DNA, 80 bp, synthetic construct
  misc_feature 1..80: note = Artificially Synthesized Probe
  source 1..80: mol_type = other DNA
aagggattgccacaacctctgacagaactccttcagttccttttacgtgacactttgtcaccggaaggttaagcataaga

SEQ ID NO: 128750 - DNA, 80 bp, synthetic construct
  misc_feature 1..80: note = Artificially Synthesized Probe
  source 1..80: mol_type = other DNA
cttgcctcagcctcccgagtagctgggactacaggcgcctgccaccatgcccagctaattttttctatttttagtagaga

SEQ ID NO: 128751 - DNA, 80 bp, synthetic construct
  misc_feature 1..80: note = Artificially Synthesized Probe
  source 1..80: mol_type = other DNA
cccatctcatacacggtggaaacgagagttcttgcaatcatctaatccctggataaactcaaacattcctatctttctga

SEQ ID NO: 128752 - DNA, 80 bp, synthetic construct
  misc_feature 1..80: note = Artificially Synthesized Probe
  source 1..80: mol_type = other DNA
tgggactacaggcgcgtgccaccatgcccagctaatttttgattctttagtacagacagggtttcaccatattggccagg

SEQ ID NO: 128753 - DNA, 80 bp, synthetic construct; identical to SEQ ID NO: 41092
  misc_feature 1..80: note = Artificially Synthesized Probe
  source 1..80: mol_type = other DNA

SEQ ID NO: 128754 - DNA, 80 bp, synthetic construct
  misc_feature 1..80: note = Artificially Synthesized Probe
  source 1..80: mol_type = other DNA
agccttgacctcatcttctattatttctcttgcccactctgtgccagccatactaacctttttagctgttcctcagaaag

SEQ ID NO: 128755 - DNA, 80 bp, synthetic construct
  misc_feature 1..80: note = Artificially Synthesized Probe
  source 1..80: mol_type = other DNA
tccattgcacttagacataccatatatttacttcatccatctctaccatacaatataacgtgcttgagggcagggatatt

SEQ ID NO: 128756 - DNA, 80 bp, synthetic construct; identical to SEQ ID NO: 41093
  misc_feature 1..80: note = Artificially Synthesized Probe
  source 1..80: mol_type = other DNA

SEQ ID NO: 128757 - DNA, 80 bp, synthetic construct
  misc_feature 1..80: note = Artificially Synthesized Probe
  source 1..80: mol_type = other DNA
tattttcactaaaggttcctttggtggatgcactggtggtacctgtaggtggaggaggaatgcttgctggaatagcaatt

SEQ ID NO: 128758 - DNA, 80 bp, synthetic construct
  misc_feature 1..80: note = Artificially Synthesized Probe
  source 1..80: mol_type = other DNA
ctctgcctcactactctatttactattattattattttttgagacagattctcgctgttgcccaggctggagtgcagtgg

SEQ ID NO: 128759 - DNA, 80 bp, synthetic construct
  misc_feature 1..80: note = Artificially Synthesized Probe
  source 1..80: mol_type = other DNA
ggtcaggctggtcttgaactcctgaccttgcgatccacccgccttggcctcccaaagtgttgggattacaggcgtgagcc

SEQ ID NO: 128760 - DNA, 80 bp, synthetic construct
  misc_feature 1..80: note = Artificially Synthesized Probe
  source 1..80: mol_type = other DNA
ggccattgcatgatttcttttttcagctggaaaaataatggaaaacaagaaaactttcttaggacaaatggcaccaccca

SEQ ID NO: 128761 - DNA, 80 bp, synthetic construct; identical to SEQ ID NO: 41094
  misc_feature 1..80: note = Artificially Synthesized Probe
  source 1..80: mol_type = other DNA

SEQ ID NO: 128762 - DNA, 80 bp, synthetic construct
  misc_feature 1..80: note = Artificially Synthesized Probe
  source 1..80: mol_type = other DNA
cttgaagatattttcattacatccacaaaagggaaggctcttacttgggcagaaatgtattacttattgtgcctattttc

SEQ ID NO: 128763 - DNA, 80 bp, synthetic construct
  misc_feature 1..80: note = Artificially Synthesized Probe
  source 1..80: mol_type = other DNA
gcctggctagtttttttttgttttttttttttgtatttttagtagagacggggtttcaccgtgttagccaggatggtctt

SEQ ID NO: 128764 - DNA, 80 bp, synthetic construct
  misc_feature 1..80: note = Artificially Synthesized Probe
  source 1..80: mol_type = other DNA
ttgagtagctgggattacaggggtctgccaccacgcctggctgattttcctatttttagttgacactgcatttcaccagg

SEQ ID NO: 128765 - DNA, 80 bp, synthetic construct; identical to SEQ ID NO: 41095
  misc_feature 1..80: note = Artificially Synthesized Probe
  source 1..80: mol_type = other DNA

SEQ ID NO: 128766 - DNA, 80 bp, synthetic construct
  misc_feature 1..80: note = Artificially Synthesized Probe
  source 1..80: mol_type = other DNA
aaattaaggtgaggctccagcaagaaaagaaatagcaaagcatggtgtaacttcttaggcagaagaaacttcccttagga

SEQ ID NO: 128767 - DNA, 80 bp, synthetic construct
  misc_feature 1..80: note = Artificially Synthesized Probe
  source 1..80: mol_type = other DNA
aactggacacgtattctcatctgaactttataggtaaaccaactagactcccctttcactaattcctactcccttccata

SEQ ID NO: 128768 - DNA, 80 bp, synthetic construct
  misc_feature 1..80: note = Artificially Synthesized Probe
  source 1..80: mol_type = other DNA
tgtagacttaacctcctccataacttgggtgaagcaggctgaaaggccagcttcttatcagtctgtttctgtttaattta

SEQ ID NO: 128769 - DNA, 80 bp, synthetic construct
  misc_feature 1..80: note = Artificially Synthesized Probe
  source 1..80: mol_type = other DNA
cttttatacttaactgagacattttgtcaaggctaaaaaaaagtcttgcaaaatggggcagtggactgacaggctgacat

SEQ ID NO: 128770 - DNA, 80 bp, synthetic construct; identical to SEQ ID NO: 41096
  misc_feature 1..80: note = Artificially Synthesized Probe
  source 1..80: mol_type = other DNA

SEQ ID NO: 128771 - DNA, 80 bp, synthetic construct
  misc_feature 1..80: note = Artificially Synthesized Probe
  source 1..80: mol_type = other DNA
tcccgtgtttccttacctaaaggttccttgatatgtcctctccggccccacttcgttctcagttccactggtttaaacca

SEQ ID NO: 128772 - DNA, 80 bp, synthetic construct; identical to SEQ ID NO: 41076
  misc_feature 1..80: note = Artificially Synthesized Probe
  source 1..80: mol_type = other DNA

SEQ ID NO: 128773 - DNA, 80 bp, synthetic construct
  misc_feature 1..80: note = Artificially Synthesized Probe
  source 1..80: mol_type = other DNA
acgtactactgccatcttagtaaaaattttgaaaggatgaccactcagaacaactctcttgatgaccattctgtctggat

SEQ ID NO: 128774 - DNA, 80 bp, synthetic construct; identical to SEQ ID NO: 41097
  misc_feature 1..80: note = Artificially Synthesized Probe
  source 1..80: mol_type = other DNA

SEQ ID NO: 128775 - DNA, 80 bp, synthetic construct
  misc_feature 1..80: note = Artificially Synthesized Probe
  source 1..80: mol_type = other DNA
tgaagacttactgtattttgaaaaccatcattaccttctccataccatttggctcccaaatttaaataaacaagagaaaa

SEQ ID NO: 128776 - DNA, 80 bp, synthetic construct
  misc_feature 1..80: note = Artificially Synthesized Probe
  source 1..80: mol_type = other DNA
ggcggcgcgactcacctctgctcccggcctgcggggccagagtagccaggatcccgcgcagctccgacgcggagatccgc

SEQ ID NO: 128777 - DNA, 80 bp, synthetic construct
  misc_feature 1..80: note = Artificially Synthesized Probe
  source 1..80: mol_type = other DNA
ggcacaatcttggctcactgcaacctgcctcctggtttcaagcaattctcttgcctcagcctcctgagtagctggtatta

SEQ ID NO: 128778 - DNA, 80 bp, synthetic construct
  misc_feature 1..80: note = Artificially Synthesized Probe
  source 1..80: mol_type = other DNA
cttgaattcagtttctaaaagtaaaaattgtacaagttggccgggcgcggtggctcacgcctgtaatcccagcactttgg

SEQ ID NO: 128779 - DNA, 80 bp, synthetic construct
  misc_feature 1..80: note = Artificially Synthesized Probe
  source 1..80: mol_type = other DNA
cctgggaggcagaggttgcagcgagccgagattgctccactgcactccagcctgggcgacagagtgagactccgtcaaaa

SEQ ID NO: 128780 - DNA, 80 bp, synthetic construct
  misc_feature 1..80: note = Artificially Synthesized Probe
  source 1..80: mol_type = other DNA
aggccaaggtgggcagatcacttgaggtcaggagttcgagaccagcctggccaacatggcgaaaccccgtctctactaaa

SEQ ID NO: 128781 - DNA, 80 bp, synthetic construct
  misc_feature 1..80: note = Artificially Synthesized Probe
  source 1..80: mol_type = other DNA
aaaataaaacaaaacaaacactttccacccatggacaccgccaagtctaagtcagagtctcctaaagagctcgtacagct

SEQ ID NO: 128782 - DNA, 80 bp, synthetic construct; identical to SEQ ID NO: 41077
  misc_feature 1..80: note = Artificially Synthesized Probe
  source 1..80: mol_type = other DNA

SEQ ID NO: 128783 - DNA, 80 bp, synthetic construct
  misc_feature 1..80: note = Artificially Synthesized Probe
  source 1..80: mol_type = other DNA
ggctttgcctttgtaacctttgatgatcatgactccgtggataagactgtcattcagaaataccatactgtgaatggcca

SEQ ID NO: 128784 - DNA, 80 bp, synthetic construct
  misc_feature 1..80: note = Artificially Synthesized Probe
  source 1..80: mol_type = other DNA
ggctttggtggcagctgtggtggtggtggatatcgtgcagtggggatggctataatggatttggtaatgatggaagcaat

SEQ ID NO: 128785 - DNA, 80 bp, synthetic construct; identical to SEQ ID NO: 41078
  misc_feature 1..80: note = Artificially Synthesized Probe
  source 1..80: mol_type = other DNA

SEQ ID NO: 128786 - DNA, 80 bp, synthetic construct
  misc_feature 1..80: note = Artificially Synthesized Probe
  source 1..80: mol_type = other DNA
ttttagtttctgttctgtggaaagtgtaaagcattccaacaaagggttttaatgtattttttttttttgcacccaagctg

SEQ ID NO: 128787 - DNA, 80 bp, synthetic construct
  misc_feature 1..80: note = Artificially Synthesized Probe
  source 1..80: mol_type = other DNA
ttccgaacgacggtggccgcgctgggaggaaaagcgcccgccgccggttccagaggggcgggaccggagcgagagcctgg

SEQ ID NO: 128788 - DNA, 80 bp, synthetic construct
  misc_feature 1..80: note = Artificially Synthesized Probe
  source 1..80: mol_type = other DNA
tgaaaatattgcataatggaatccatgatattaaagcacttctcagaggaaaaatcctataagtaaccttatatgctttc

SEQ ID NO: 128789 - DNA, 80 bp, synthetic construct; identical to SEQ ID NO: 41079
  misc_feature 1..80: note = Artificially Synthesized Probe
  source 1..80: mol_type = other DNA

SEQ ID NO: 128790 - DNA, 80 bp, synthetic construct
  misc_feature 1..80: note = Artificially Synthesized Probe
  source 1..80: mol_type = other DNA
gtgggtggatcacaaggtcaagagatcaagactatcctggccaattagctgggcatggtggcacgctcctgtaatctcag

SEQ ID NO: 128791 - DNA, 80 bp, synthetic construct
  misc_feature 1..80: note = Artificially Synthesized Probe
  source 1..80: mol_type = other DNA
cctgtaatcccagcactttgggaggctgaggcaggtggatcatctgaggtcaggagttcgagaccagcctgaccaacatg

SEQ ID NO: 128792 - DNA, 80 bp, synthetic construct
  misc_feature 1..80: note = Artificially Synthesized Probe
  source 1..80: mol_type = other DNA
agcctgggcaacaagagcgaaactccatctcaaaataataataataataataatttgtagaggcagggtttccctgtgtt

SEQ ID NO: 128793 - DNA, 80 bp, synthetic construct; identical to SEQ ID NO: 41080
  misc_feature 1..80: note = Artificially Synthesized Probe
  source 1..80: mol_type = other DNA

SEQ ID NO: 128794 - DNA, 80 bp, synthetic construct
  misc_feature 1..80: note = Artificially Synthesized Probe
  source 1..80: mol_type = other DNA
ttctcttcattccagttcccactaatgttcctttcctccctccttaggtattcactctaatgtgtttgatatatgtcttt

SEQ ID NO: 128795 - DNA, 80 bp, synthetic construct
  misc_feature 1..80: note = Artificially Synthesized Probe
  source 1..80: mol_type = other DNA
cctggccactggtcctgggccaagatgggccagagtccttacccagaatttttttaactgaaactgagaaagaaaattcc

SEQ ID NO: 128796 - DNA, 80 bp, synthetic construct
  misc_feature 1..80: note = Artificially Synthesized Probe
  source 1..80: mol_type = other DNA
tcaaatctctggttccagtagttcctgaagctccatattcctccccttaccatggtttgttcatttcttcatggattcca

SEQ ID NO: 128797 - DNA, 80 bp, synthetic construct
  misc_feature 1..80: note = Artificially Synthesized Probe
  source 1..80: mol_type = other DNA
tgggttttgttgttgagagacagggtctacatgtaggaatggaatcggtagatcataggatgattctatgttcaattttt

SEQ ID NO: 128798 - DNA, 80 bp, synthetic construct; identical to SEQ ID NO: 41074
  misc_feature 1..80: note = Artificially Synthesized Probe
  source 1..80: mol_type = other DNA

SEQ ID NO: 128799 - DNA, 80 bp, synthetic construct; identical to SEQ ID NO: 41081
  misc_feature 1..80: note = Artificially Synthesized Probe
  source 1..80: mol_type = other DNA

SEQ ID NO: 128800 - DNA, 80 bp, synthetic construct
  misc_feature 1..80: note = Artificially Synthesized Probe
  source 1..80: mol_type = other DNA
acaggcaaatgccactactcctggctaatttttttgtttgtttgtttgagacagagtcttgctctgtcacccaggctgga

SEQ ID NO: 128801 - DNA, 80 bp, synthetic construct
  misc_feature 1..80: note = Artificially Synthesized Probe
  source 1..80: mol_type = other DNA
atgttagccaggatggtctcgatctcctgaccttgtgatcttcccacctcagcctcccaaagtgctgggattacaggcgt

SEQ ID NO: 128802 - DNA, 80 bp, synthetic construct; identical to SEQ ID NO: 41082
  misc_feature 1..80: note = Artificially Synthesized Probe
  source 1..80: mol_type = other DNA

SEQ ID NO: 128803 - DNA, 80 bp, synthetic construct
  misc_feature 1..80: note = Artificially Synthesized Probe
  source 1..80: mol_type = other DNA
ggtggatcacttgagctcagaaggtcaagaccagcctgggcaacatggcaaaaccttgtctctacaaaaaatacagacgt

SEQ ID NO: 128804 - DNA, 80 bp, synthetic construct
  misc_feature 1..80: note = Artificially Synthesized Probe
  source 1..80: mol_type = other DNA
accccgtctcagtaaataaataatgcctccaattcatttatacatctttacaatggaatttctggcaactttgataaagt

SEQ ID NO: 128805 - DNA, 80 bp, synthetic construct
  misc_feature 1..80: note = Artificially Synthesized Probe
  source 1..80: mol_type = other DNA
ttttgataaatagagcatttcagaggaaaaggattctgtcagtaaatggtgtgttaagaaggctgggtgtggtgcctcat

SEQ ID NO: 128806 - DNA, 80 bp, synthetic construct; identical to SEQ ID NO: 41083
  misc_feature 1..80: note = Artificially Synthesized Probe
  source 1..80: mol_type = other DNA

SEQ ID NO: 128807 - DNA, 80 bp, synthetic construct
  misc_feature 1..80: note = Artificially Synthesized Probe
  source 1..80: mol_type = other DNA
cactttgggagtctgaggcaggtggatcacgaagtcaggagatcgagaccatcctggctaacacagtgaaaccctgtctc

SEQ ID NO: 128808 - DNA, 80 bp, synthetic construct
  misc_feature 1..80: note = Artificially Synthesized Probe
  source 1..80: mol_type = other DNA
ccgtctcaaagaaacaacaactactagacataactaaattgacataaaaatgatataggacggatgaaggaaaagaggca

SEQ ID NO: 128809 - DNA, 80 bp, synthetic construct
  misc_feature 1..80: note = Artificially Synthesized Probe
  source 1..80: mol_type = other DNA
ctcggctcactgcaacctctgcctcctggattcaagcgattctcctgcctcagcctccctagtagctgggattacaggtg

SEQ ID NO: 128810 - DNA, 80 bp, synthetic construct
  misc_feature 1..80: note = Artificially Synthesized Probe
  source 1..80: mol_type = other DNA
cggaggtacacaaaaatcttgcaacaaggctattcattacatcattcttacagccaacaacaacaaaaggaaatccaaat

SEQ ID NO: 128811 - DNA, 80 bp, synthetic construct; identical to SEQ ID NO: 41084
  misc_feature 1..80: note = Artificially Synthesized Probe
  source 1..80: mol_type = other DNA

SEQ ID NO: 128812 - DNA, 80 bp, synthetic construct
  misc_feature 1..80: note = Artificially Synthesized Probe
  source 1..80: mol_type = other DNA
ggtgtggtggcaggcgcctgtaatcccagctactagggaggctagggcaggagaatcgcttgaacctgggaggcagaggt

SEQ ID NO: 128813 - DNA, 80 bp, synthetic construct
  misc_feature 1..80: note = Artificially Synthesized Probe
  source 1..80: mol_type = other DNA
gcgcccgggagcccggagccagtgccgcgcggacatcggggctcccccgttcagagggcgccgccgcccaggtgagtgcc

SEQ ID NO: 128814 - DNA, 80 bp, synthetic construct
  misc_feature 1..80: note = Artificially Synthesized Probe
  source 1..80: mol_type = other DNA
gggacccctgctgctgctgctccaggctggcccacacctgcctcagtttccctctcctggggagggtatgtgcccctggc

SEQ ID NO: 128815 - DNA, 80 bp, synthetic construct
  misc_feature 1..80: note = Artificially Synthesized Probe
  source 1..80: mol_type = other DNA
gagcacaggcctggctccggggcctttggaggggctggggcctgtagtcttagctagggtgtcccccgacgtttgcccct

SEQ ID NO: 128816 - DNA, 80 bp, synthetic construct; identical to SEQ ID NO: 41099
  misc_feature 1..80: note = Artificially Synthesized Probe
  source 1..80: mol_type = other DNA

SEQ ID NO: 128817 - DNA, 80 bp, synthetic construct
  misc_feature 1..80: note = Artificially Synthesized Probe
  source 1..80: mol_type = other DNA
gggaggtgaggccgggagcggtgctgtgggcagactggggccatctgggtcccctgtggcttctgggctgaccctggcac

SEQ ID NO: 128818 - DNA, 80 bp, synthetic construct
  misc_feature 1..80: note = Artificially Synthesized Probe
  source 1..80: mol_type = other DNA
tgggctcagagaagcccgtgacttaccccagaccacgcagcccgtgtggggagtggtcaggggccggggtctctcccagt

SEQ ID NO: 128819 - DNA, 80 bp, synthetic construct
  misc_feature 1..80: note = Artificially Synthesized Probe
  source 1..80: mol_type = other DNA
gatactgcttccaaataacggctcttgcagaattatgttccaagagtcaggtacagcaataatggtctatttgtgtcctt

SEQ ID NO: 128820 - DNA, 80 bp, synthetic construct
  misc_feature 1..80: note = Artificially Synthesized Probe
  source 1..80: mol_type = other DNA
gctctcctgccgccgccgggggtccctcccctcccgttccatccactcccagcagctccatccctcccatctcctgcccc

SEQ ID NO: 128821 - DNA, 80 bp, synthetic construct; identical to SEQ ID NO: 41100
  misc_feature 1..80: note = Artificially Synthesized Probe
  source 1..80: mol_type = other DNA

SEQ ID NO: 128822 - DNA, 80 bp, synthetic construct
  misc_feature 1..80: note = Artificially Synthesized Probe
  source 1..80: mol_type = other DNA
ttgctacggaggaatgggccgaaagtgcctccccagggagggtgcagctcagaggcctctgcacctgggccgccatccca

SEQ ID NO: 128823 - DNA, 80 bp, synthetic construct
  misc_feature 1..80: note = Artificially Synthesized Probe
  source 1..80: mol_type = other DNA
ccctctccctccctccctctctccccctaccctgtctctctctctccccccccactctctctccctccctctctcccccc

SEQ ID NO: 128824 - DNA, 80 bp, synthetic construct
  misc_feature 1..80: note = Artificially Synthesized Probe
  source 1..80: mol_type = other DNA
ccctccccctccctctccctccctctctccctctctcctccccgcctccccatccctctccctctccctcctctctctct

SEQ ID NO: 128825 - DNA, 80 bp, synthetic construct
  misc_feature 1..80: note = Artificially Synthesized Probe
  source 1..80: mol_type = other DNA
cacctcccctcttctcccaccccggggtctgcgtggaggccactgctccgtccctgctgaggattctgctgcactctggc

SEQ ID NO: 128826 - DNA, 80 bp, synthetic construct; identical to SEQ ID NO: 41101
  misc_feature 1..80: note = Artificially Synthesized Probe
  source 1..80: mol_type = other DNA

SEQ ID NO: 128827 - DNA, 80 bp, synthetic construct
  misc_feature 1..80: note = Artificially Synthesized Probe
  source 1..80: mol_type = other DNA
tccttagacagaagccaaatgtatttcctaacattttatccatgctgtctctgtggatcctgcacatatttaaacatagc

SEQ ID NO: 128828 - DNA, 80 bp, synthetic construct
  misc_feature 1..80: note = Artificially Synthesized Probe
  source 1..80: mol_type = other DNA
gctttctctttgtgctgtcagccttgtgttctgggctcccccgtccccagctctcctttccttgtctaccagatttcagt

SEQ ID NO: 128829 - DNA, 80 bp, synthetic construct; identical to SEQ ID NO: 41102
  misc_feature 1..80: note = Artificially Synthesized Probe
  source 1..80: mol_type = other DNA

SEQ ID NO: 128830 - DNA, 80 bp, synthetic construct
  misc_feature 1..80: note = Artificially Synthesized Probe
  source 1..80: mol_type = other DNA
cagcctcaacctcctgggctcaaatgatcctcctgactcagcctcctcagtggctgggactacaggcgcccgccaccaca

SEQ ID NO: 128831 - DNA, 80 bp, synthetic construct
  misc_feature 1..80: note = Artificially Synthesized Probe
  source 1..80: mol_type = other DNA
gggtaaggctggggagggctcggagcctggggctgggggccggaagtggcactcaggccacagggaaccactgggccacg

SEQ ID NO: 128832 - DNA, 80 bp, synthetic construct
  misc_feature 1..80: note = Artificially Synthesized Probe
  source 1..80: mol_type = other DNA
catttttatgaatgatttcaaacatgcagaaaaatacaaaaacaatatacgaggtacacacgtgcccatggccttggacc

SEQ ID NO: 128833 - DNA, 80 bp, synthetic construct
  misc_feature 1..80: note = Artificially Synthesized Probe
  source 1..80: mol_type = other DNA
gtggctgcagcccccatacgctatgcctctgacccgcccacaccccccaccgcggcttctcctccgggctgcagggtgtg

SEQ ID NO: 128834 - DNA, 80 bp, synthetic construct; identical to SEQ ID NO: 41103
  misc_feature 1..80: note = Artificially Synthesized Probe
  source 1..80: mol_type = other DNA

SEQ ID NO: 128835 - DNA, 80 bp, synthetic construct
  misc_feature 1..80: note = Artificially Synthesized Probe
  source 1..80: mol_type = other DNA
ccgggaggggccgcccgctgggcctcggctccttacctggtagacgagggcagcagcactgcagggcaggctctgagggg

SEQ ID NO: 128836 - DNA, 80 bp, synthetic construct
  misc_feature 1..80: note = Artificially Synthesized Probe
  source 1..80: mol_type = other DNA
ttcctctcctggcttattttccaaacaatttgcttaacgtgattcccggccaagctaaacatgactaatcgtgtttaccc

SEQ ID NO: 128837 - DNA, 80 bp, synthetic construct
  misc_feature 1..80: note = Artificially Synthesized Probe
  source 1..80: mol_type = other DNA
tctcttgcagagcctgacgcaccccagggctgccgccatggagcccctgttcccagcctccacgcccagctggaacgcct

SEQ ID NO: 128838 - DNA, 80 bp, synthetic construct; identical to SEQ ID NO: 41104
  misc_feature 1..80: note = Artificially Synthesized Probe
  source 1..80: mol_type = other DNA

SEQ ID NO: 128839 - DNA, 80 bp, synthetic construct
  misc_feature 1..80: note = Artificially Synthesized Probe
  source 1..80: mol_type = other DNA
gtgcacccgctgagctcggcccgctggcgccgcccgcgtgtggccaagctggcgagcgccgcggcctgggtcctgtctct

SEQ ID NO: 128840 - DNA, 80 bp, synthetic construct
  misc_feature 1..80: note = Artificially Synthesized Probe
  source 1..80: mol_type = other DNA
cctgtgctacctgctcatcgtggtgaaggtgagggcggcgggcgtgcgcgtgggctgcgtgcggcggcgctcggagcgga

SEQ ID NO: 128841 - DNA, 80 bp, synthetic construct
  misc_feature 1..80: note = Artificially Synthesized Probe
  source 1..80: mol_type = other DNA
ccaacagctgtgccaaccccgtcctctacggcttcctctctgacaacttccgccagagcttccagaaggttctgtgcctc

SEQ ID NO: 128842 - DNA, 80 bp, synthetic construct
  misc_feature 1..80: note = Artificially Synthesized Probe
  source 1..80: mol_type = other DNA
agatgggttccctgaaacccaagactggggaggctggggtgccaccccgcccgctgcgaacagagccccctcctgtccaa

SEQ ID NO: 128843 - DNA, 80 bp, synthetic construct
  misc_feature 1..80: note = Artificially Synthesized Probe
  source 1..80: mol_type = other DNA
ggcggccccgtgtcacccccaggagcggaggttgcactgcggtgacccccacccatgacctgccagtcaggatgctcccc

SEQ ID NO: 128844 - DNA, 80 bp, synthetic construct; identical to SEQ ID NO: 41105
  misc_feature 1..80: note = Artificially Synthesized Probe
  source 1..80: mol_type = other DNA

SEQ ID NO: 128845 - DNA, 80 bp, synthetic construct
  misc_feature 1..80: note = Artificially Synthesized Probe
  source 1..80: mol_type = other DNA
aggtccccggagtccctggccagggccccagcccctcgcttgccctgcactgtgtggactctggggatgcaggtgtaagg

SEQ ID NO: 128846 - DNA, 80 bp, synthetic construct
  misc_feature 1..80: note = Artificially Synthesized Probe
  source 1..80: mol_type = other DNA
ggcgaggtggggaggcggctggtgcagaggagagctgggggctgaggttggggtgaaggctgcagccctccaggctgctg

SEQ ID NO: 128847 - DNA, 80 bp, synthetic construct
  misc_feature 1..80: note = Artificially Synthesized Probe
  source 1..80: mol_type = other DNA
ctgctttggggcaggggctctggcccgggagagggaacggggacaggagcagaggacggtcatccaggcgcagcggggag

SEQ ID NO: 128848 - DNA, 80 bp, synthetic construct; identical to SEQ ID NO: 41106
  misc_feature 1..80: note = Artificially Synthesized Probe
  source 1..80: mol_type = other DNA

SEQ ID NO: 128849 - DNA, 80 bp, synthetic construct
  misc_feature 1..80: note = Artificially Synthesized Probe
  source 1..80: mol_type = other DNA
cccaggctgaggccaggcctgggaaacatccaagcagtgaggacacgcgtgtttgacaactgctcccctgaataaatgcg

SEQ ID NO: 128850 - DNA, 80 bp, synthetic construct; identical to SEQ ID NO: 41098
  misc_feature 1..80: note = Artificially Synthesized Probe
  source 1..80: mol_type = other DNA

SEQ ID NO: 128851 - DNA, 80 bp, synthetic construct
  misc_feature 1..80: note = Artificially Synthesized Probe
  source 1..80: mol_type = other DNA
cagcaaagcatcacgctgagcgccgggaccttctgagtgcaggcggtgggcgaagccccgagtcacacacacccacgacg

SEQ ID NO: 128852 - DNA, 80 bp, synthetic construct
  misc_feature 1..80: note = Artificially Synthesized Probe
  source 1..80: mol_type = other DNA
gcatgattggcaggggtgggatagctgttggcaaagaaggcccagctgtgctaagcaggccacccatcccatggaagggc

SEQ ID NO: 128853 - DNA, 80 bp, synthetic construct
  misc_feature 1..80: note = Artificially Synthesized Probe
  source 1..80: mol_type = other DNA
cactgcaacctccgcctcccgggttcaagcaattgtccagcctcagcctcccgagtagctgggactacaggcgcccacca

SEQ ID NO: 128854 - DNA, 80 bp, synthetic construct; identical to SEQ ID NO: 41118
  misc_feature 1..80: note = Artificially Synthesized Probe
  source 1..80: mol_type = other DNA

SEQ ID NO: 128855 - DNA, 80 bp, synthetic construct
  misc_feature 1..80: note = Artificially Synthesized Probe
  source 1..80: mol_type = other DNA
ccaagtagctgggattacaggcacgtgccaccatgcccggctaatttttgtattttcagtagaggcagggtttcaccatg

SEQ ID NO: 128856 - DNA, 80 bp, synthetic construct
  misc_feature 1..80: note = Artificially Synthesized Probe
  source 1..80: mol_type = other DNA
tgtatttttagtagagacagggtttcaccgtatttgccaggctggtcttgaactcctgacctcgtgatccacccacctca

SEQ ID NO: 128857 - DNA, 80 bp, synthetic construct
  misc_feature 1..80: note = Artificially Synthesized Probe
  source 1..80: mol_type = other DNA
gcgtgagccaccacagccagcctttttgttttgttttgctttgttttgtttctcttttttaattgagacacagtcccgct

SEQ ID NO: 128858 - DNA, 80 bp, synthetic construct
  misc_feature 1..80: note = Artificially Synthesized Probe
  source 1..80: mol_type = other DNA
tctcatgttggccaggctggtctcaaactcctgacctcaagtgatctgctcacctaagcctcccaaagtgcagggattac

SEQ ID NO: 128859 - DNA, 80 bp, synthetic construct; identical to SEQ ID NO: 41119
  misc_feature 1..80: note = Artificially Synthesized Probe
  source 1..80: mol_type = other DNA

SEQ ID NO: 128860 - DNA, 80 bp, synthetic construct
  misc_feature 1..80: note = Artificially Synthesized Probe
  source 1..80: mol_type = other DNA
ggcctccaaagctgaaagtatttgctccctggcccttaacagaataggtgggctgacccctgctctatgtggttctttgt

SEQ ID NO: 128861 - DNA, 80 bp, synthetic construct
  misc_feature 1..80: note = Artificially Synthesized Probe
  source 1..80: mol_type = other DNA
ctcctccctcttcctccaggcaccagtgggagcaggcagtcacaccttcctgtgagtgagaaccatagcagaaccttcaa

SEQ ID NO: 128862 - DNA, 80 bp, synthetic construct
  misc_feature 1..80: note = Artificially Synthesized Probe
  source 1..80: mol_type = other DNA
atttttttgagatggagtttcgctcttgtcgcccaggctggagtgcagtggcacaatctgggctcactgcgacctccacc

SEQ ID NO: 128863 - DNA, 80 bp, synthetic construct
  misc_feature 1..80: note = Artificially Synthesized Probe
  source 1..80: mol_type = other DNA
tcggcctccaaaagtgctgggattacaggcgtgagccaccgcgcccgggaacttcaagtgattcttgaaggagacaatta

SEQ ID NO: 128864 - DNA, 80 bp, synthetic construct; identical to SEQ ID NO: 41120
  misc_feature 1..80: note = Artificially Synthesized Probe
  source 1..80: mol_type = other DNA

SEQ ID NO: 128865 - DNA, 80 bp, synthetic construct; identical to SEQ ID NO: 41108
  misc_feature 1..80: note = Artificially Synthesized Probe
  source 1..80: mol_type = other DNA

SEQ ID NO: 128866 - DNA, 80 bp, synthetic construct
  misc_feature 1..80: note = Artificially Synthesized Probe
  source 1..80: mol_type = other DNA
agatcgagaccatcctggctaacacagtgaaaccccgtctctactaaaaatacaaaaaattagccgggcgtggtggcagg

SEQ ID NO: 128867 - DNA, 80 bp, synthetic construct
  misc_feature 1..80: note = Artificially Synthesized Probe
  source 1..80: mol_type = other DNA
ggcacatgcctgtaatcccagctattgaggaggctgaggcaggagaattgcttgaacccgggaggtggaggttgcagtga

SEQ ID NO: 128868 - DNA, 80 bp, synthetic construct
  misc_feature 1..80: note = Artificially Synthesized Probe
  source 1..80: mol_type = other DNA
gaggtcaggagttcgagaccagcctggccaacatggagaaaccctgtctctactaaaaatacaaaaaataaaataaaata

SEQ ID NO: 128869 - DNA, 80 bp, synthetic construct; identical to SEQ ID NO: 41121
  misc_feature 1..80: note = Artificially Synthesized Probe
  source 1..80: mol_type = other DNA

SEQ ID NO: 128870 - DNA, 80 bp, synthetic construct
  misc_feature 1..80: note = Artificially Synthesized Probe
  source 1..80: mol_type = other DNA
atgcgtcttttttttttcttttttcttttttttttttttgagacagagtcttgctctgtcacccaggctggagtgcagtg

SEQ ID NO: 128871 - DNA, 80 bp, synthetic construct
  misc_feature 1..80: note = Artificially Synthesized Probe
  source 1..80: mol_type = other DNA
gatctcctgacctcatgatccgcccgccttggcctcccaaagttgtgggactacaggcgtgagccaccgctcccggacac

SEQ ID NO: 128872 - DNA, 80 bp, synthetic construct
  misc_feature 1..80: note = Artificially Synthesized Probe
  source 1..80: mol_type = other DNA
ttaaaaatagtttctgggttatggatctgaataaagcgtgcaattagtgaacagtttataaacctcttgtgtgcttttaa

SEQ ID NO: 128873 - DNA, 80 bp, synthetic construct
  misc_feature 1..80: note = Artificially Synthesized Probe
  source 1..80: mol_type = other DNA
tacctgccagtatgcccggctaatttttgtatttttagtagagatggggttttgccatgttggccaggctggtctcgaac

SEQ ID NO: 128874 - DNA, 80 bp, synthetic construct; identical to SEQ ID NO: 41122
  misc_feature 1..80: note = Artificially Synthesized Probe
  source 1..80: mol_type = other DNA

SEQ ID NO: 128875 - DNA, 80 bp, synthetic construct
  misc_feature 1..80: note = Artificially Synthesized Probe
  source 1..80: mol_type = other DNA
cagcacgctgggaggccaaggcgggcggatcacttgaggtcaggagtttgagaccagcctgactaacatagcaagacccc

SEQ ID NO: 128876 - DNA, 80 bp, synthetic construct
  misc_feature 1..80: note = Artificially Synthesized Probe
  source 1..80: mol_type = other DNA
tccagctctggcccaggcccaggtcctcggtgccatgtgaagggtggagagctctcctgggggacagagttgtacatttg

SEQ ID NO: 128877 - DNA, 80 bp, synthetic construct
  misc_feature 1..80: note = Artificially Synthesized Probe
  source 1..80: mol_type = other DNA
gatcaacttagcccaggagttcaacatagcgagaccctgtctctacaaaagaaatgttaaaaaaattaaccaggcctggt

SEQ ID NO: 128878 - DNA, 80 bp, synthetic construct
  misc_feature 1..80: note = Artificially Synthesized Probe
  source 1..80: mol_type = other DNA
acttgtagaacttacctgtaagcccaggcttcacctgaaaccccagtcccccacctggaacccaggccctcacctacact

SEQ ID NO: 128879 - DNA, 80 bp, synthetic construct; identical to SEQ ID NO: 41123
  misc_feature 1..80: note = Artificially Synthesized Probe
  source 1..80: mol_type = other DNA

SEQ ID NO: 128880 - DNA, 80 bp, synthetic construct
  misc_feature 1..80: note = Artificially Synthesized Probe
  source 1..80: mol_type = other DNA
caggtggatcacaaggtcaggagttcaagactagcctggccaatacggtgaaaacacgtctctaataaaaatataaaaat

SEQ ID NO: 128881 - DNA, 80 bp, synthetic construct
  misc_feature 1..80: note = Artificially Synthesized Probe
  source 1..80: mol_type = other DNA
ggaataaatgtcatgttacatatattttatgagaattctaaaatatattttatggcagggcacagtggctcacgcctgta

SEQ ID NO: 128882 - DNA, 80 bp, synthetic construct; identical to SEQ ID NO: 41124
  misc_feature 1..80: note = Artificially Synthesized Probe
  source 1..80: mol_type = other DNA

SEQ ID NO: 128883 - DNA, 80 bp, synthetic construct
  misc_feature 1..80: note = Artificially Synthesized Probe
  source 1..80: mol_type = other DNA
ttctcccgcctcagcctcccaactagctgggattacaggtgcccgccaccacgcccggctaatttttgtatttttagtag

SEQ ID NO: 128884 - DNA, 80 bp, synthetic construct
  misc_feature 1..80: note = Artificially Synthesized Probe
  source 1..80: mol_type = other DNA
ttcacttttttttttttagccgaatgtggcgaggacagttatcggattatttgcagcggatcctacacgtcccctcctcc

SEQ ID NO: 128885 - DNA, 80 bp, synthetic construct
  misc_feature 1..80: note = Artificially Synthesized Probe
  source 1..80: mol_type = other DNA
ggccacagcggtccgcgcagaccgccggccccttttctatccgcgaccggatacctggcaggggtctaggaaagacccct

SEQ ID NO: 128886 - DNA, 80 bp, synthetic construct
  misc_feature 1..80: note = Artificially Synthesized Probe
  source 1..80: mol_type = other DNA
agtggggttgccagatcaaacacaagacacccagttaaaattcaactgtaggtacgtgacgagtactttttgttgctgct

SEQ ID NO: 128887 - DNA, 80 bp, synthetic construct
  misc_feature 1..80: note = Artificially Synthesized Probe
  source 1..80: mol_type = other DNA
gcccaggccggactgcggactgcagtggcgccatctcggcgcactgcaacctctacctcccgggttcaagcgattctcct

SEQ ID NO: 128888 - DNA, 80 bp, synthetic construct
  misc_feature 1..80: note = Artificially Synthesized Probe
  source 1..80: mol_type = other DNA
tacaggcgtgagccaccgcgcccggccaaggccccgacttttagaccactagtggaggaggtctgggacacgggtctgcg

SEQ ID NO: 128889 - DNA, 80 bp, synthetic construct; identical to SEQ ID NO: 41127
  misc_feature 1..80: note = Artificially Synthesized Probe
  source 1..80: mol_type = other DNA

SEQ ID NO: 128890 - DNA, 80 bp, synthetic construct
  misc_feature 1..80: note = Artificially Synthesized Probe
  source 1..80: mol_type = other DNA
ctcccatctgtaacccaggccctcacctagaacctgggacctctgaacctggaacccagcccccacctggggcctggaac

SEQ ID NO: 128891 - DNA, 80 bp, synthetic construct
  misc_feature 1..80: note = Artificially Synthesized Probe
  source 1..80: mol_type = other DNA
cggtgaaaccccgtctctactaaaaatacaaaaaattagccaggcgttgtggcgggcgcctgtagtcccagctactcggg

SEQ ID NO: 128892 - DNA, 80 bp, synthetic construct
  misc_feature 1..80: note = Artificially Synthesized Probe
  source 1..80: mol_type = other DNA
aacctgggcccctccacttgtaaccagggacccccacctagtatctgagcctctcccatctgtaacccaggccttcacct

SEQ ID NO: 128893 - DNA, 80 bp, synthetic construct
  misc_feature 1..80: note = Artificially Synthesized Probe
  source 1..80: mol_type = other DNA
actgtaagcccggacttcacctgaaaccccagtcccgcacctgtaaacctacaccccgccaggaacctgggcctctccaa

SEQ ID NO: 128894 - DNA, 80 bp, synthetic construct; identical to SEQ ID NO: 41128
  misc_feature 1..80: note = Artificially Synthesized Probe
  source 1..80: mol_type = other DNA

SEQ ID NO: 128895 - DNA, 80 bp, synthetic construct
  misc_feature 1..80: note = Artificially Synthesized Probe
  source 1..80: mol_type = other DNA
cacgccattctcctgcctcagcatcccgagtagctgggactacaggcgcccgccaccgcgcccggctaattttttgtatt

SEQ ID NO: 128896 - DNA, 80 bp, synthetic construct; identical to SEQ ID NO: 41125
  misc_feature 1..80: note = Artificially Synthesized Probe
  source 1..80: mol_type = other DNA

SEQ ID NO: 128897 - DNA, 80 bp, synthetic construct
  misc_feature 1..80: note = Artificially Synthesized Probe
  source 1..80: mol_type = other DNA
gccacacccggctaattttttgtatttttagtagagacggggttccaccatcctggccaggctggtcttgaactcctgac

SEQ ID NO: 128898 - DNA, 80 bp, synthetic construct
  misc_feature 1..80: note = Artificially Synthesized Probe
  source 1..80: mol_type = other DNA
gctggagggcaggatctgtgtgtttggggggagtcatgggtgggtaggagagatgacaggtgacagcctggaggaagaga

SEQ ID NO: 128899 - DNA, 80 bp, synthetic construct
  misc_feature 1..80: note = Artificially Synthesized Probe
  source 1..80: mol_type = other DNA
cctcacctagaacctctgaacctggaacccagcccccacctgggacctgggcctctcccatctgtaacccaggccctcac

SEQ ID NO: 128900 - DNA, 80 bp, synthetic construct
  misc_feature 1..80: note = Artificially Synthesized Probe
  source 1..80: mol_type = other DNA
aagaggcgtgggctcgatctctgccacatccacctcgggaaaccacaaggtctcgatgggtgattttgcctaaagtgggg

SEQ ID NO: 128901 - DNA, 80 bp, synthetic construct
  misc_feature 1..80: note = Artificially Synthesized Probe
  source 1..80: mol_type = other DNA
aggccaaggcgggcagatcacgaggtcaggagatcgagaccatcctggctaacacggtgaaaccccgtctctactaaaaa

SEQ ID NO: 128902 - DNA, 80 bp, synthetic construct; identical to SEQ ID NO: 41126
  misc_feature 1..80: note = Artificially Synthesized Probe
  source 1..80: mol_type = other DNA

SEQ ID NO: 128903 - DNA, 80 bp, synthetic construct
  misc_feature 1..80: note = Artificially Synthesized Probe
  source 1..80: mol_type = other DNA
aacccagaccctcacctagaacctgggcccctgcaactgtaacctgtggcactcactgtaagcccggacttcacctgaaa

SEQ ID NO: 128904 - DNA, 80 bp, synthetic construct
  misc_feature 1..80: note = Artificially Synthesized Probe
  source 1..80: mol_type = other DNA
tgcagtttggtgaggatgagagaatgcaaagaaagcattttccccaggactaccataaatagtcataagcatcacttttt

SEQ ID NO: 128905 - DNA, 80 bp, synthetic construct
  misc_feature 1..80: note = Artificially Synthesized Probe
  source 1..80: mol_type = other DNA
ggctggagtgcggtggcgcgatctcggctcactgcaagctccgcctcccaggttcacgccattctcctgcctcagcatcc

SEQ ID NO: 128906 - DNA, 80 bp, synthetic construct
  misc_feature 1..80: note = Artificially Synthesized Probe
  source 1..80: mol_type = other DNA
ccaccgtgcccggctcactctgcctctttatatccagagtgtcatcaaatttatgaattcaaggccaggcttagtggctc

SEQ ID NO: 128907 - DNA, 80 bp, synthetic construct
  misc_feature 1..80: note = Artificially Synthesized Probe
  source 1..80: mol_type = other DNA
aggctgagacaggagaatcgcttgaacccaggaggcagaggttgcagtgaaccaagactgcgtcactgcactccagcctg

SEQ ID NO: 128908 - DNA, 80 bp, synthetic construct
  misc_feature 1..80: note = Artificially Synthesized Probe
  source 1..80: mol_type = other DNA
agaccagcctggccaatatggtgaaaccccgtctccactaaaaataaaaaaaaaaaacctagccaggtgtggtggcgcac

SEQ ID NO: 128909 - DNA, 80 bp, synthetic construct; identical to SEQ ID NO: 41129
  misc_feature 1..80: note = Artificially Synthesized Probe
  source 1..80: mol_type = other DNA

SEQ ID NO: 128910 - DNA, 80 bp, synthetic construct; identical to SEQ ID NO: 41109
  misc_feature 1..80: note = Artificially Synthesized Probe
  source 1..80: mol_type = other DNA

SEQ ID NO: 128911 - DNA, 80 bp, synthetic construct
  misc_feature 1..80: note = Artificially Synthesized Probe
  source 1..80: mol_type = other DNA
ttccgccatatgatccggttccgtgctggcccagcctggcctgggttggatgcctggtccgatgcccaaagccccatcac

SEQ ID NO: 128912 - DNA, 80 bp, synthetic construct
  misc_feature 1..80: note = Artificially Synthesized Probe
  source 1..80: mol_type = other DNA
atagttcttttttaaaaaaaaaaattttttttttgagacaggatctggctctgttgccaggcaggaatgcagtggcgtga

SEQ ID NO: 128913 - DNA, 80 bp, synthetic construct
  misc_feature 1..80: note = Artificially Synthesized Probe
  source 1..80: mol_type = other DNA
caggctggagggcaatggcgcgatctcggctcactgcaacctccgcctcctaggttcaggcaattctcctgcttcagcct

SEQ ID NO: 128914 - DNA, 80 bp, synthetic construct; identical to SEQ ID NO: 41130
  misc_feature 1..80: note = Artificially Synthesized Probe
  source 1..80: mol_type = other DNA

SEQ ID NO: 128915 - DNA, 80 bp, synthetic construct
  misc_feature 1..80: note = Artificially Synthesized Probe
  source 1..80: mol_type = other DNA
ctcaaactcccagcctctgttgatcctactgcctcagcctcccgagtagctgggactacaagcgtgggccactgctcctg

SEQ ID NO: 128916 - DNA, 80 bp, synthetic construct
  misc_feature 1..80: note = Artificially Synthesized Probe
  source 1..80: mol_type = other DNA
catgcaccactacgcctggctaatttttgtattttttaagtagagacaggctttcaccatgttgcccaggctggtctgga

SEQ ID NO: 128917 - DNA, 80 bp, synthetic construct; identical to SEQ ID NO: 41131
  misc_feature 1..80: note = Artificially Synthesized Probe
  source 1..80: mol_type = other DNA

SEQ ID NO: 128918 - DNA, 80 bp, synthetic construct
  misc_feature 1..80: note = Artificially Synthesized Probe
  source 1..80: mol_type = other DNA
aacctctgtctcccgggttcaagtgattctcctgcctcagcctcccgagtacctgggattagaagggtgcgccaccacgc

SEQ ID NO: 128919 - DNA, 80 bp, synthetic construct
  misc_feature 1..80: note = Artificially Synthesized Probe
  source 1..80: mol_type = other DNA
tttttgagacaagttcttgctatgttgcccaggctggcctcaaactcctaggctcaagagatcctcccaaagttctggga

SEQ ID NO: 128920 - DNA, 80 bp, synthetic construct
  misc_feature 1..80: note = Artificially Synthesized Probe
  source 1..80: mol_type = other DNA
gacggagtctcgctctgtctcccaggctggagtgcggtggcgcgatcttggttcactgcaagctccgcctcctgggttca

SEQ ID NO: 128921 - DNA, 80 bp, synthetic construct
  misc_feature 1..80: note = Artificially Synthesized Probe
  source 1..80: mol_type = other DNA
tttctttctttctttctttctttctttctctctttctttctctctctctctctatttccttctttctttctttctctctc

SEQ ID NO: 128922 - DNA, 80 bp, synthetic construct; identical to SEQ ID NO: 41132
  misc_feature 1..80: note = Artificially Synthesized Probe
  source 1..80: mol_type = other DNA

SEQ ID NO: 128923 - DNA, 80 bp, synthetic construct
  misc_feature 1..80: note = Artificially Synthesized Probe
  source 1..80: mol_type = other DNA
tagagacgggggttttaccatgttgcccaggctggtcttgaactcttgacctcaggtgatcacctgccttggccccccaa

SEQ ID NO: 128924 - DNA, 80 bp, synthetic construct
  misc_feature 1..80: note = Artificially Synthesized Probe
  source 1..80: mol_type = other DNA
agtagctgagattacgggcgcccgccaccacgcctggctaatttttgtatttttagtagagacagggttttaccacgttg

SEQ ID NO: 128925 - DNA, 80 bp, synthetic construct
  misc_feature 1..80: note = Artificially Synthesized Probe
  source 1..80: mol_type = other DNA
gtaatcccagaactttgggaggccgaggcaggtggatcacctgaggttaggagttcgggaccagcctgaacaatatggtg

SEQ ID NO: 128926 - DNA, 80 bp, synthetic construct
  misc_feature 1..80: note = Artificially Synthesized Probe
  source 1..80: mol_type = other DNA
agagcgagactccgtctcaaaaaaaaaaaaagagagtcagtgtggagggaagtgtctctgttgggtccgggtgctctgtg

SEQ ID NO: 128927 - DNA, 80 bp, synthetic construct; identical to SEQ ID NO: 41133
  misc_feature 1..80: note = Artificially Synthesized Probe
  source 1..80: mol_type = other DNA

SEQ ID NO: 128928 - DNA, 80 bp, synthetic construct
  misc_feature 1..80: note = Artificially Synthesized Probe
  source 1..80: mol_type = other DNA
cgtctgcaaaggagaagtgaagtttgaagagaaggcaaaaagtgacaaagctcgctgtgacagggagattaaaaattaca

SEQ ID NO: 128929 - DNA, 80 bp, synthetic construct
  misc_feature 1..80: note = Artificially Synthesized Probe
  source 1..80: mol_type = other DNA
gtgaaatgtggtctgggcagtcagccaaagataaacaaccatatgagcagaaagcagttaagctacaggagagatatgaa

SEQ ID NO: 128930 - DNA, 80 bp, synthetic construct
  misc_feature 1..80: note = Artificially Synthesized Probe
  source 1..80: mol_type = other DNA
gagggtgaagatgaagaataaatggctatcctttaatgatgcctgtgcagtgggcttgttttgctaagaatgtgaattct

SEQ ID NO: 128931 - DNA, 80 bp, synthetic construct; identical to SEQ ID NO: 41134
  misc_feature 1..80: note = Artificially Synthesized Probe
  source 1..80: mol_type = other DNA

SEQ ID NO: 128932 - DNA, 80 bp, synthetic construct
  misc_feature 1..80: note = Artificially Synthesized Probe
  source 1..80: mol_type = other DNA
cctgcctcagcctcctgagtagctgggattacaggcacatgccaccacgctcagctaatttttgtatttttagtagagat

SEQ ID NO: 128933 - DNA, 80 bp, synthetic construct
  misc_feature 1..80: note = Artificially Synthesized Probe
  source 1..80: mol_type = other DNA
cacagcacacttgtaggaattagtatcaacagtacatcttgcgttttttaagatgctgcattttttaacattttgtaata

SEQ ID NO: 128934 - DNA, 80 bp, synthetic construct
  misc_feature 1..80: note = Artificially Synthesized Probe
  source 1..80: mol_type = other DNA
cttaattatttcaaattgcagaaaacttcagacaaacatgaaggttgtttgtaaggaccttcttgggctgtgcctcagtt

SEQ ID NO: 128935 - DNA, 80 bp, synthetic construct
  misc_feature 1..80: note = Artificially Synthesized Probe
  source 1..80: mol_type = other DNA
aaattatgcgtatcaaaaaaacaaagaaattccgtgtgtagttcacactcacagcacatctccgtccaggcacttgagag

SEQ ID NO: 128936 - DNA, 80 bp, synthetic construct
  misc_feature 1..80: note = Artificially Synthesized Probe
  source 1..80: mol_type = other DNA
tatctccagattccaagaagttggggtgtgagccagcaatcagtacagaaaagagataccaaaataagtttgagttgggg

SEQ ID NO: 128937 - DNA, 80 bp, synthetic construct
  misc_feature 1..80: note = Artificially Synthesized Probe
  source 1..80: mol_type = other DNA
tagctgggattacagacatgcacctgtaatttctactaaaaatacaaaaattagccgggcgtggtggcgcacgcctgtaa

SEQ ID NO: 128938 - DNA, 80 bp, synthetic construct; identical to SEQ ID NO: 41135
  misc_feature 1..80: note = Artificially Synthesized Probe
  source 1..80: mol_type = other DNA

SEQ ID NO: 128939 - DNA, 80 bp, synthetic construct
  misc_feature 1..80: note = Artificially Synthesized Probe
  source 1..80: mol_type = other DNA
ctggaattggccactttgtgttactttttgacccttgacctcgccccaaagggggatgcgggggaggggctctggtaggg

SEQ ID NO: 128940 - DNA, 80 bp, synthetic construct
  misc_feature 1..80: note = Artificially Synthesized Probe
  source 1..80: mol_type = other DNA
cccgccccctgcccgtgacgggcgtctccgaggaccaatgagcgcgctgtatccacccctcgggcggggccaagcgccga

SEQ ID NO: 128941 - DNA, 80 bp, synthetic construct
  misc_feature 1..80: note = Artificially Synthesized Probe
  source 1..80: mol_type = other DNA
gcagggagggggagggaggtaaacaagatggcggcggcgtgtcgggcgcggaagggggaggcggcccggggcgcccgcga

SEQ ID NO: 128942 - DNA, 80 bp, synthetic construct
  misc_feature 1..80: note = Artificially Synthesized Probe
  source 1..80: mol_type = other DNA
cccggagcctgcggcctgcgccgcctcggccgccgggagccccgtggagcccccgccgccgcgccgccccgcggaccgga

SEQ ID NO: 128943 - DNA, 80 bp, synthetic construct
  misc_feature 1..80: note = Artificially Synthesized Probe
  source 1..80: mol_type = other DNA
gctgttggccgcggcgggaggcctcccggacgcccccagccccccgaacgctcgcccgggccggcgggagtcggcgcccc

SEQ ID NO: 128944 - DNA, 80 bp, synthetic construct
  misc_feature 1..80: note = Artificially Synthesized Probe
  source 1..80: mol_type = other DNA
ccggagaagactgcgctcggccgtgttcatacttgtccgtgggcctgaggtccccggaggatgacctagcactgaaaagc

SEQ ID NO: 128945 - DNA, 80 bp, synthetic construct
  misc_feature 1..80: note = Artificially Synthesized Probe
  source 1..80: mol_type = other DNA
gccgggactgacgtgtagaacaatcgtttctgttggaagaagggtttttcccttccttttggggtttttgttgccttttt

SEQ ID NO: 128946 - DNA, 80 bp, synthetic construct
  misc_feature 1..80: note = Artificially Synthesized Probe
  source 1..80: mol_type = other DNA
cagagcctcagacctgggcaggtgaggcaggcaggtgggtctggcccggcgcggcccgatgcgggggcagggatgggatg

SEQ ID NO: 128947 - DNA, 80 bp, synthetic construct
  misc_feature 1..80: note = Artificially Synthesized Probe
  source 1..80: mol_type = other DNA
tgatgtcggtgggtatggacacgttcatccaccgcatcgactccaccgaggtcatctaccagccgcgccgcaagcgggcc

SEQ ID NO: 128948 - DNA, 80 bp, synthetic construct; identical to SEQ ID NO: 41136
  misc_feature 1..80: note = Artificially Synthesized Probe
  source 1..80: mol_type = other DNA

SEQ ID NO: 128949 - DNA, 80 bp, synthetic construct
  misc_feature 1..80: note = Artificially Synthesized Probe
  source 1..80: mol_type = other DNA
gttgtcgcagcggggcgtgcgtttgcatgggctcttggactccagttaaaatgccctggtagcgaaaccctcctgagaag

SEQ ID NO: 128950 - DNA, 80 bp, synthetic construct
  misc_feature 1..80: note = Artificially Synthesized Probe
  source 1..80: mol_type = other DNA
ggcgaaatgtgatttgtttatcctgtcagaggggaaccctgggctgccaaaaataactgtttgcaccggcttatcagtca

SEQ ID NO: 128951 - DNA, 80 bp, synthetic construct
  misc_feature 1..80: note = Artificially Synthesized Probe
  source 1..80: mol_type = other DNA
ctgccgctgggcatcccggacgcctctgcatctgtgcgcggagaagctcctacctagggcagcactggccggcctgagcc

SEQ ID NO: 128952 - DNA, 80 bp, synthetic construct; identical to SEQ ID NO: 41137
  misc_feature 1..80: note = Artificially Synthesized Probe
  source 1..80: mol_type = other DNA

SEQ ID NO: 128953 - DNA, 80 bp, synthetic construct
  misc_feature 1..80: note = Artificially Synthesized Probe
  source 1..80: mol_type = other DNA
agtggcgcgaactgggctcactgcaagctccgcctcccgggttcatgccattctcctgcctcagcctcccgagtagctgg

SEQ ID NO: 128954 - DNA, 80 bp, synthetic construct
  misc_feature 1..80: note = Artificially Synthesized Probe
  source 1..80: mol_type = other DNA
cggcctttttttttttttttttttttttttttgagacggagtttcactcttgttgctcaggctggagtgcagtggagtgg

SEQ ID NO: 128955 - DNA, 80 bp, synthetic construct
  misc_feature 1..80: note = Artificially Synthesized Probe
  source 1..80: mol_type = other DNA
gaacttctgacctcgtgatccacctgcctcagcctcccaaagtgctgggattaaaggcgtgagccaccgcgcccggccag

SEQ ID NO: 128956 - DNA, 80 bp, synthetic construct; identical to SEQ ID NO: 41138
  misc_feature 1..80: note = Artificially Synthesized Probe
  source 1..80: mol_type = other DNA

SEQ ID NO: 128957 - DNA, 80 bp, synthetic construct
  misc_feature 1..80: note = Artificially Synthesized Probe
  source 1..80: mol_type = other DNA
cctgcctctctcctcttttctttcccaatcaggcccttcctggtgtgcagaagggaaagctgattccacagcagctgggc

SEQ ID NO: 128958 - DNA, 80 bp, synthetic construct
  misc_feature 1..80: note = Artificially Synthesized Probe
  source 1..80: mol_type = other DNA
ctgtaatcccagcactttgggaggctgaggtgggtggatcgcctgaggtcaggagttcgagaccagcctggccaacatgg

SEQ ID NO: 128959 - DNA, 80 bp, synthetic construct
  misc_feature 1..80: note = Artificially Synthesized Probe
  source 1..80: mol_type = other DNA
cacagcgagactctgtctcaaaaataaataaataaataaataaataaataaataaataaataaatctggcttgagttttg

SEQ ID NO: 128960 - DNA, 80 bp, synthetic construct
  misc_feature 1..80: note = Artificially Synthesized Probe
  source 1..80: mol_type = other DNA
acaggcaagaaggttgcaggaacctagtctggcccagtgcctgggagaacgggagggaacacggaggcagggaggcagag

SEQ ID NO: 128961 - DNA, 80 bp, synthetic construct; identical to SEQ ID NO: 41139
  misc_feature 1..80: note = Artificially Synthesized Probe
  source 1..80: mol_type = other DNA

SEQ ID NO: 128962 - DNA, 80 bp, synthetic construct
  misc_feature 1..80: note = Artificially Synthesized Probe
  source 1..80: mol_type = other DNA
cagggaaaaagcctcctttgtgtgtgggaagtttaataaactccgctcagattgtgtctcgcagcgagtgtctggaacct

SEQ ID NO: 128963 - DNA, 80 bp, synthetic construct
  misc_feature 1..80: note = Artificially Synthesized Probe
  source 1..80: mol_type = other DNA
cggcaaaaagtataatcttattagaaataggaaagttccaaaaagcatcaatgagttaaaaagagggctgggcatgttcg

SEQ ID NO: 128964 - DNA, 80 bp, synthetic construct
  misc_feature 1..80: note = Artificially Synthesized Probe
  source 1..80: mol_type = other DNA
gaggcaggagaatcacttgaacccgggaagcagaggttgcggtgagccaagaccatgccattgcactccagcctgggtaa

SEQ ID NO: 128965 - DNA, 80 bp, synthetic construct; identical to SEQ ID NO: 41140
  misc_feature 1..80: note = Artificially Synthesized Probe
  source 1..80: mol_type = other DNA

SEQ ID NO: 128966 - DNA, 80 bp, synthetic construct
  misc_feature 1..80: note = Artificially Synthesized Probe
  source 1..80: mol_type = other DNA
ccaggctgggcaagcctaggagagaagagcgaaattgtgtctcaaaaaaacaattaattaaaataaaatcagtgccatag

SEQ ID NO: 128967 - DNA, 80 bp, synthetic construct
  misc_feature 1..80: note = Artificially Synthesized Probe
  source 1..80: mol_type = other DNA
agcccacagtggggttctgggggggggggtgcaggcagaaggccgccatgcctccctccccctttccaccccagtgagag

SEQ ID NO: 128968 - DNA, 80 bp, synthetic construct; identical to SEQ ID NO: 41110
  misc_feature 1..80: note = Artificially Synthesized Probe
  source 1..80: mol_type = other DNA

SEQ ID NO: 128969 - DNA, 80 bp, synthetic construct; identical to SEQ ID NO: 41141
  misc_feature 1..80: note = Artificially Synthesized Probe
  source 1..80: mol_type = other DNA

SEQ ID NO: 128970 - DNA, 80 bp, synthetic construct
  misc_feature 1..80: note = Artificially Synthesized Probe
  source 1..80: mol_type = other DNA
actttgtaggtctttacatcccaggcggcctttatggggttccagcatctgctgaggcccctgcgccagccatgtgaggc

SEQ ID NO: 128971 - DNA, 80 bp, synthetic construct
  misc_feature 1..80: note = Artificially Synthesized Probe
  source 1..80: mol_type = other DNA
agccagctggggcaggcctggaatgttggttcctctctcaggatctggggcgctgctgtagctgtcggggaatcagtgag

SEQ ID NO: 128972 - DNA, 80 bp, synthetic construct
  misc_feature 1..80: note = Artificially Synthesized Probe
  source 1..80: mol_type = other DNA
tcaggtgaccctcctgcccccaaggtagctgggactgcagatgtgcaccaccacacccgactagttttttgtagagatgg

SEQ ID NO: 128973 - DNA, 80 bp, synthetic construct
  misc_feature 1..80: note = Artificially Synthesized Probe
  source 1..80: mol_type = other DNA
tcccccaggctggagtgctgtggcacgatcttggctcactgcaagctccgcttcagcctcccaagtaagctggaactaca

SEQ ID NO: 128974 - DNA, 80 bp, synthetic construct; identical to SEQ ID NO: 41142
  misc_feature 1..80: note = Artificially Synthesized Probe
  source 1..80: mol_type = other DNA

SEQ ID NO: 128975 - DNA, 80 bp, synthetic construct
  misc_feature 1..80: note = Artificially Synthesized Probe
  source 1..80: mol_type = other DNA
gcctcccgggttcacaccattctcctgcctcagcctcccgaatagctgggactacaggcgcctgccaccatgcccggcta

SEQ ID NO: 128976 - DNA, 80 bp, synthetic construct
  misc_feature 1..80: note = Artificially Synthesized Probe
  source 1..80: mol_type = other DNA
tcagtggcatatagtacattgacagagttgcacaactatcacctctatcagcttccagaacattcttgttaccccagaag

SEQ ID NO: 128977 - DNA, 80 bp, synthetic construct; identical to SEQ ID NO: 41143
  misc_feature 1..80: note = Artificially Synthesized Probe
  source 1..80: mol_type = other DNA

SEQ ID NO: 128978 - DNA, 80 bp, synthetic construct
  misc_feature 1..80: note = Artificially Synthesized Probe
  source 1..80: mol_type = other DNA
ccagggcacgcgggtctggagctgggtgttcctgggtctccatgtgcctcccagtcctgctctgagccgtgggaggccgg

SEQ ID NO: 128979 - DNA, 80 bp, synthetic construct
  misc_feature 1..80: note = Artificially Synthesized Probe
  source 1..80: mol_type = other DNA
cctcagcctcccaagtagctgggagtacaggtgcccgccaccacgcccggctaatttttttttttgcattttttagtagg

SEQ ID NO: 128980 - DNA, 80 bp, synthetic construct
  misc_feature 1..80: note = Artificially Synthesized Probe
  source 1..80: mol_type = other DNA
caagcccagtaggcccctaacgtggcacctcggagcggctggcgatgccccaagagccgggcttccccctcctggaggct

SEQ ID NO: 128981 - DNA, 80 bp, synthetic construct
  misc_feature 1..80: note = Artificially Synthesized Probe
  source 1..80: mol_type = other DNA
cctcccctggcataaatcgggggacgcacgtgcctgcgcagaatgccttggtcccttttaattaaacagacaacccagtg

SEQ ID NO: 128982 - DNA, 80 bp, synthetic construct
  misc_feature 1..80: note = Artificially Synthesized Probe
  source 1..80: mol_type = other DNA
tgatggctcatggaggagacatggtgtcggcaggtggtggccggcgcagggaggtttccaggagggagtcctccaccctc

SEQ ID NO: 128983 - DNA, 80 bp, synthetic construct; identical to SEQ ID NO: 41144
  misc_feature 1..80: note = Artificially Synthesized Probe
  source 1..80: mol_type = other DNA

SEQ ID NO: 128984 - DNA, 80 bp, synthetic construct
  misc_feature 1..80: note = Artificially Synthesized Probe
  source 1..80: mol_type = other DNA
gtcttgcctcccaggaatggcctgtgaccttcatcagcgggggaggttaggggcacacagagccctggggaacaagggga

SEQ ID NO: 128985 - DNA, 80 bp, synthetic construct
  misc_feature 1..80: note = Artificially Synthesized Probe
  source 1..80: mol_type = other DNA
gccagttctataaataaccttgccgggccctgctgggaattggtgccaccaccacatagcccagagagaacggaaacaca

SEQ ID NO: 128986 - DNA, 80 bp, synthetic construct
  misc_feature 1..80: note = Artificially Synthesized Probe
  source 1..80: mol_type = other DNA
ctccgcttctgggggactgtgtccctctgtgccccgtccccatcacaccttgctttcccttcatcctgctctcctagccc

SEQ ID NO: 128987 - DNA, 80 bp, synthetic construct; identical to SEQ ID NO: 41145
  misc_feature 1..80: note = Artificially Synthesized Probe
  source 1..80: mol_type = other DNA

SEQ ID NO: 128988 - DNA, 80 bp, synthetic construct
  misc_feature 1..80: note = Artificially Synthesized Probe
  source 1..80: mol_type = other DNA
gacaaggtttcaccatgttggccaggctggtttcgaactcctgacctcaggtgatccacctcggcctcccatagtgtcgg

SEQ ID NO: 128989 - DNA, 80 bp, synthetic construct
  misc_feature 1..80: note = Artificially Synthesized Probe
  source 1..80: mol_type = other DNA
tgtttctctgtctctctctttgtctctgtctctctgtctctgtctctgtgtccctctgtctctctgtttgtctctctctg

SEQ ID NO: 128990 - DNA, 80 bp, synthetic construct
  misc_feature 1..80: note = Artificially Synthesized Probe
  source 1..80: mol_type = other DNA
gtacattcacacggctgtgcaaccactacttctaattccagaacgttcggtcaccccaaaagcaagccccattcccattg

SEQ ID NO: 128991 - DNA, 80 bp, synthetic construct
  misc_feature 1..80: note = Artificially Synthesized Probe
  source 1..80: mol_type = other DNA
aaccccatctctactaaaaatacaaaaattagctgggcgtggttgcgggcacctgtagtcccagcgactcaggggctgag

SEQ ID NO: 128992 - DNA, 80 bp, synthetic construct; identical to SEQ ID NO: 41146
  misc_feature 1..80: note = Artificially Synthesized Probe
  source 1..80: mol_type = other DNA

SEQ ID NO: 128993 - DNA, 80 bp, synthetic construct
  misc_feature 1..80: note = Artificially Synthesized Probe
  source 1..80: mol_type = other DNA
aaaaaaaagtgcatcacacactgtgtgtcctttagtgtctcactgtgacatcctcaaggtgcagctaggctgtggctcga

SEQ ID NO: 128994 - DNA, 80 bp, synthetic construct
  misc_feature 1..80: note = Artificially Synthesized Probe
  source 1..80: mol_type = other DNA
tgttcctcagggtgtgtacctgggagtggagctgctggctcacagggtaacagacctttggagaagctgcagacgcttcc

SEQ ID NO: 128995 - DNA, 80 bp, synthetic construct
  misc_feature 1..80: note = Artificially Synthesized Probe
  source 1..80: mol_type = other DNA
ccgagtagctaggacttgaggcacgtacctccacacctggctaatttttgtatttttagtagagacagggtttcgccgtg

SEQ ID NO: 128996 - DNA, 80 bp, synthetic construct
  misc_feature 1..80: note = Artificially Synthesized Probe
  source 1..80: mol_type = other DNA
tggccaactgggcggcagctgcagagggggcagtgacaggcgggtgggtgtggcaggaccccacaatgtctctttctgtg

SEQ ID NO: 128997 - DNA, 80 bp, synthetic construct; identical to SEQ ID NO: 41147
  misc_feature 1..80: note = Artificially Synthesized Probe
  source 1..80: mol_type = other DNA

SEQ ID NO: 128998 - DNA, 80 bp, synthetic construct
  misc_feature 1..80: note = Artificially Synthesized Probe
  source 1..80: mol_type = other DNA
tctatctctgtctcagtcccttcttttgccaccatccccctcccgtggccgccctcacgtgtcagcaccataccctccct

SEQ ID NO: 128999 - DNA, 80 bp, synthetic construct
  misc_feature 1..80: note = Artificially Synthesized Probe
  source 1..80: mol_type = other DNA
ctgtggtgacacgtgcctgtagtcccagctactcgggaggctgaggcagggaaatcacttgaacctgggaggcagaggtt

SEQ ID NO: 129000 - DNA, 80 bp, synthetic construct
  misc_feature 1..80: note = Artificially Synthesized Probe
  source 1..80: mol_type = other DNA
ggacgcgtggcccctgcagggccctttcccacagcactgtgaactcacagcttctctctagggaagggaggaggtacgcc

SEQ ID NO: 129001 - DNA, 80 bp, synthetic construct; identical to SEQ ID NO: 41148
  misc_feature 1..80: note = Artificially Synthesized Probe
  source 1..80: mol_type = other DNA

SEQ ID NO: 129002 - DNA, 80 bp, synthetic construct
  misc_feature 1..80: note = Artificially Synthesized Probe
  source 1..80: mol_type = other DNA
ggggccctgagccctggcccctgtgtcttgggcccgtggggtgtcaagtcccttttttctcagagtctcctcccaggcta

SEQ ID NO: 129003 - DNA, 80 bp, synthetic construct
  misc_feature 1..80: note = Artificially Synthesized Probe
  source 1..80: mol_type = other DNA
gcacagcctccctacggggactttgcttcctaaggccctgtgcccagagcaagagccagaagtggtcctgaggctggggc

SEQ ID NO: 129004 - DNA, 80 bp, synthetic construct
  misc_feature 1..80: note = Artificially Synthesized Probe
  source 1..80: mol_type = other DNA
cttccccgtaggctccttcctcctgggacgctggggcccctgggccttttcagaggggtggctgagggcagggtgggccc

SEQ ID NO: 129005 - DNA, 80 bp, synthetic construct; identical to SEQ ID NO: 41149
  misc_feature 1..80: note = Artificially Synthesized Probe
  source 1..80: mol_type = other DNA

SEQ ID NO: 129006 - DNA, 80 bp, synthetic construct
  misc_feature 1..80: note = Artificially Synthesized Probe
  source 1..80: mol_type = other DNA
tggtgcgatctcggctcactgcaagctccgcctccgaggttcacgccattcttctgcctcagcttcccgagtagctggga

SEQ ID NO: 129007 - DNA, 80 bp, synthetic construct
  misc_feature 1..80: note = Artificially Synthesized Probe
  source 1..80: mol_type = other DNA
ccttgtaaaggcccaagtttttaaaaacagttttggggtcccccatgtgtggcatccacaggcagggctgctgccaacct

SEQ ID NO: 129008 - DNA, 80 bp, synthetic construct
  misc_feature 1..80: note = Artificially Synthesized Probe
  source 1..80: mol_type = other DNA
tgctgttccagcaagactttggggtgcagccggcctgtggcccacaggaaaatgagacctgtggacatccggggccctgc

SEQ ID NO: 129009 - DNA, 80 bp, synthetic construct; identical to SEQ ID NO: 41150
  misc_feature 1..80: note = Artificially Synthesized Probe
  source 1..80: mol_type = other DNA

SEQ ID NO: 129010 - DNA, 80 bp, synthetic construct; identical to SEQ ID NO: 41111
  misc_feature 1..80: note = Artificially Synthesized Probe
  source 1..80: mol_type = other DNA

SEQ ID NO: 129011 - DNA, 80 bp, synthetic construct
  misc_feature 1..80: note = Artificially Synthesized Probe
  source 1..80: mol_type = other DNA
tgcacggcaccgccacaggcactgcacccgttcgcggcggacgacacctgccggaccagccagggctccccggctttcca

SEQ ID NO: 129012 - DNA, 80 bp, synthetic construct
  misc_feature 1..80: note = Artificially Synthesized Probe
  source 1..80: mol_type = other DNA
agggcgtggccaccggcccagaccctctctggccacagccgctagggggtgcttactttatggaaatgtaactcatacgg

SEQ ID NO: 129013 - DNA, 80 bp, synthetic construct
  misc_feature 1..80: note = Artificially Synthesized Probe
  source 1..80: mol_type = other DNA
gccccttccccgggtgggtccagaggacactcccctcctaccccgtagcctccactagtggaaggtggtgaagacagagg

SEQ ID NO: 129014 - DNA, 80 bp, synthetic construct; identical to SEQ ID NO: 41151
  misc_feature 1..80: note = Artificially Synthesized Probe
  source 1..80: mol_type = other DNA

SEQ ID NO: 129015 - DNA, 80 bp, synthetic construct
  misc_feature 1..80: note = Artificially Synthesized Probe
  source 1..80: mol_type = other DNA
ccagcaggcattgagaggactgagtggagaggccgacctccccgcagggcctggtttgccaggtccctcagctccaccct

SEQ ID NO: 129016 - DNA, 80 bp, synthetic construct
  misc_feature 1..80: note = Artificially Synthesized Probe
  source 1..80: mol_type = other DNA
gcctggagtacagtgctgtgaatctgctgtgtgacccaaggagagttacttaacctctctgtgccccggttttcccacct

SEQ ID NO: 129017 - DNA, 80 bp, synthetic construct
  misc_feature 1..80: note = Artificially Synthesized Probe
  source 1..80: mol_type = other DNA
tccatctgcccagtggccttgggagaacggaaccgccctggccgtccagcccagccctgtctccctgccagccgcgcaca

SEQ ID NO: 129018 - DNA, 80 bp, synthetic construct
  misc_feature 1..80: note = Artificially Synthesized Probe
  source 1..80: mol_type = other DNA
caggctcctcgccggcttctcctcagggatgcttgagtacgaaccggccaagaggttctccatccggcagatccggcagc

SEQ ID NO: 129019 - DNA, 80 bp, synthetic construct; identical to SEQ ID NO: 41152
  misc_feature 1..80: note = Artificially Synthesized Probe
  source 1..80: mol_type = other DNA

SEQ ID NO: 129020 - DNA, 80 bp, synthetic construct
  misc_feature 1..80: note = Artificially Synthesized Probe
  source 1..80: mol_type = other DNA
gacggggtcagcaggccccacagtgccgcctccctcacttcgtgggctctgctcctctgcaccagcccctggaggccctt

SEQ ID NO: 129021 - DNA, 80 bp, synthetic construct
  misc_feature 1..80: note = Artificially Synthesized Probe
  source 1..80: mol_type = other DNA
cccgatagcctcctgggctgggatgtgctcagggccccccagacccccttctggcctttgctggctttgcagccagcatc

SEQ ID NO: 129022 - DNA, 80 bp, synthetic construct
  misc_feature 1..80: note = Artificially Synthesized Probe
  source 1..80: mol_type = other DNA
gagaaggcactgcacatgcaaagtctcagcggggacaaagactcaggggagagtgtgcggggcctggggtgtgaggatag

SEQ ID NO: 129023 - DNA, 80 bp, synthetic construct
  misc_feature 1..80: note = Artificially Synthesized Probe
  source 1..80: mol_type = other DNA
tgtggtcacagccaccccttgcacggcctggtcccagctcctgagtgtgtggcaggtaccctgggcccagaggagctggg

SEQ ID NO: 129024 - DNA, 80 bp, synthetic construct; identical to SEQ ID NO: 41153
  misc_feature 1..80: note = Artificially Synthesized Probe
  source 1..80: mol_type = other DNA

SEQ ID NO: 129025 - DNA, 80 bp, synthetic construct
  misc_feature 1..80: note = Artificially Synthesized Probe
  source 1..80: mol_type = other DNA
cctccgccctgcgggccgctgggacatggctgaaaggtgtggggtcagcgggggcaccagcccaggcctgtctggccagg

SEQ ID NO: 129026 - DNA, 80 bp, synthetic construct
  misc_feature 1..80: note = Artificially Synthesized Probe
  source 1..80: mol_type = other DNA
ggtccagtggccctccctcccgtcgtccctgaggcctgcccgctggccctgatgccggccgcccttcttccctaggtggc

SEQ ID NO: 129027 - DNA, 80 bp, synthetic construct
  misc_feature 1..80: note = Artificially Synthesized Probe
  source 1..80: mol_type = other DNA
ctccccgccatgctcccggcttggctgtgttcggcccagggctgggccgtgtcataaagagttttgcagtgtatctgcag

SEQ ID NO: 129028 - DNA, 80 bp, synthetic construct
  misc_feature 1..80: note = Artificially Synthesized Probe
  source 1..80: mol_type = other DNA
cccagaatagtgggggccctgcagagagccccccattaggtccctcagcactcctgggcccctcatcaaacccctaggct

SEQ ID NO: 129029 - DNA, 80 bp, synthetic construct; identical to SEQ ID NO: 41154
  misc_feature 1..80: note = Artificially Synthesized Probe
  source 1..80: mol_type = other DNA

SEQ ID NO: 129030 - DNA, 80 bp, synthetic construct
  misc_feature 1..80: note = Artificially Synthesized Probe
  source 1..80: mol_type = other DNA
tgagacgggcagccaggcaaatcccaggcaggagggccagttagggcagggccagcccaggcaggttgcgagagtcccta

SEQ ID NO: 129031 - DNA, 80 bp, synthetic construct
  misc_feature 1..80: note = Artificially Synthesized Probe
  source 1..80: mol_type = other DNA
acctttttcatgaccctgctaagcccactgtgggtggtgaggaggagtacccagcagggggaagggccgccagaccactc

SEQ ID NO: 129032 - DNA, 80 bp, synthetic construct
  misc_feature 1..80: note = Artificially Synthesized Probe
  source 1..80: mol_type = other DNA
ggtcaggccatcctctgcgctctgccggggctgctgcatcggcctctgcgtgcctccactttggcctcacgtgtccctac

SEQ ID NO: 129033 - DNA, 80 bp, synthetic construct
  misc_feature 1..80: note = Artificially Synthesized Probe
  source 1..80: mol_type = other DNA
atttcagatcagaaggctcatctggtagtcagactgaggccggaggaggctcaactgccccgaggatgaagaaaggagcc

SEQ ID NO: 129034 - DNA, 80 bp, synthetic construct; identical to SEQ ID NO: 41155
  misc_feature 1..80: note = Artificially Synthesized Probe
  source 1..80: mol_type = other DNA

SEQ ID NO: 129035 - DNA, 80 bp, synthetic construct
  misc_feature 1..80: note = Artificially Synthesized Probe
  source 1..80: mol_type = other DNA
tatgtttagtagagacgggggtttcaccatgttggtcaggctggtctcaaactcctaacctcatgatctgcccacctcgg

SEQ ID NO: 129036 - DNA, 80 bp, synthetic construct
  misc_feature 1..80: note = Artificially Synthesized Probe
  source 1..80: mol_type = other DNA
gggcacatgagctctggggcagcccggggcggcctcccactgacttcgcccgggaggggcctcggggatggctcggcagc

SEQ ID NO: 129037 - DNA, 80 bp, synthetic construct
  misc_feature 1..80: note = Artificially Synthesized Probe
  source 1..80: mol_type = other DNA
ggtggctagcagggactgggggcagctgggggccctggcaggctgagctctgctccccgcgtggttctgtgctggcattt

SEQ ID NO: 129038 - DNA, 80 bp, synthetic construct; identical to SEQ ID NO: 41156
  misc_feature 1..80: note = Artificially Synthesized Probe
  source 1..80: mol_type = other DNA

SEQ ID NO: 129039 - DNA, 80 bp, synthetic construct
  misc_feature 1..80: note = Artificially Synthesized Probe
  source 1..80: mol_type = other DNA
ctctggggttgcgcccctcagctcaggccacacttgccgtctccctcccaggacaggtcccagaagaggaggccagtcac

SEQ ID NO: 129040 - DNA, 80 bp, synthetic construct
  misc_feature 1..80: note = Artificially Synthesized Probe
  source 1..80: mol_type = other DNA
agtgaggctggccgcctgcaggtggggcgcggcggggcccgggtggggcatgtggggacaacgcctggatgccacagcca

SEQ ID NO: 129041 - DNA, 80 bp, synthetic construct; identical to SEQ ID NO: 41157
  misc_feature 1..80: note = Artificially Synthesized Probe
  source 1..80: mol_type = other DNA

SEQ ID NO: 129042 - DNA, 80 bp, synthetic construct
  misc_feature 1..80: note = Artificially Synthesized Probe
  source 1..80: mol_type = other DNA
ggctgaggctgagtcgtgccggacgctgccctgtctctccctgtgtgcctgcctcctctcccagccccagccccagcccc

SEQ ID NO: 129043 - DNA, 80 bp, synthetic construct
  misc_feature 1..80: note = Artificially Synthesized Probe
  source 1..80: mol_type = other DNA
tgcccacagcccatccaccagcgtcagagcccgccaggccccactgcaaaaggccacacaatgtaccccgggagtgactc

SEQ ID NO: 129044 - DNA, 80 bp, synthetic construct
  misc_feature 1..80: note = Artificially Synthesized Probe
  source 1..80: mol_type = other DNA
gcgcctataatcccagctactcggcaggctgaggcaagggaattgcttgaagcagggaggcggaggttgcagtgagccga

SEQ ID NO: 129045 - DNA, 80 bp, synthetic construct
  misc_feature 1..80: note = Artificially Synthesized Probe
  source 1..80: mol_type = other DNA
ggagccccgccaggtgcccgcgccaggccctcagtcttcctgccggttccgcccgccctcccggagaggtggccgccatg

SEQ ID NO: 129046 - DNA, 80 bp, synthetic construct
  misc_feature 1..80: note = Artificially Synthesized Probe
  source 1..80: mol_type = other DNA
aggagggaggcggcctccatgcactttatgtggagactactggccccgcccgtggcctcgtgctccgcagggcgcccagc

SEQ ID NO: 129047 - DNA, 80 bp, synthetic construct; identical to SEQ ID NO: 41158
  misc_feature 1..80: note = Artificially Synthesized Probe
  source 1..80: mol_type = other DNA

SEQ ID NO: 129048 - DNA, 80 bp, synthetic construct
  misc_feature 1..80: note = Artificially Synthesized Probe
  source 1..80: mol_type = other DNA
acacgagaaacgccatcgcgggatggtgcagacgcggcggggactcggagggtgccgtgcgggcgaggccgcccaaattt

SEQ ID NO: 129049 - DNA, 80 bp, synthetic construct; identical to SEQ ID NO: 41112
  misc_feature 1..80: note = Artificially Synthesized Probe
  source 1..80: mol_type = other DNA

SEQ ID NO: 129050 - DNA, 80 bp, synthetic construct
  misc_feature 1..80: note = Artificially Synthesized Probe
  source 1..80: mol_type = other DNA
aaaaaaacaaaaacaaaattagccaggcatggtggcacgcacccataatcccagctactcgggaggctgatgcaggagaa

SEQ ID NO: 129051 - DNA, 80 bp, synthetic construct
  misc_feature 1..80: note = Artificially Synthesized Probe
  source 1..80: mol_type = other DNA
acccaggctaatcttgaactcctggcttcaagtgagcttcccacctcggtctcccaaagtgctgagatgacaggtgtgag

SEQ ID NO: 129052 - DNA, 80 bp, synthetic construct
  misc_feature 1..80: note = Artificially Synthesized Probe
  source 1..80: mol_type = other DNA
tgccaggtcctgtggctttgtccccggggcggtggggagccacgggcagaagtagggcaccagaggagattgctctgcca

SEQ ID NO: 129053 - DNA, 80 bp, synthetic construct; identical to SEQ ID NO: 41113
  misc_feature 1..80: note = Artificially Synthesized Probe
  source 1..80: mol_type = other DNA

SEQ ID NO: 129054 - DNA, 80 bp, synthetic construct
  misc_feature 1..80: note = Artificially Synthesized Probe
  source 1..80: mol_type = other DNA
tcctggataacatggtgaaaccctgtctctactaaaaatacaaaaataagccggacatgatggtacgtacctgtggtccc

SEQ ID NO: 129055 - DNA, 80 bp, synthetic construct
  misc_feature 1..80: note = Artificially Synthesized Probe
  source 1..80: mol_type = other DNA
ccgctgcccggccccgagggaaattccagagaagccagggccgctcctggctgactcattctaggtgccagtagcacggg

SEQ ID NO: 129056 - DNA, 80 bp, synthetic construct
  misc_feature 1..80: note = Artificially Synthesized Probe
  source 1..80: mol_type = other DNA
gagtttcactcttgttgcccaggcatgggtgcagtggtgcgatttcggctcactgcaacctcagcttcccgggttcaagt

SEQ ID NO: 129057 - DNA, 80 bp, synthetic construct; identical to SEQ ID NO: 41114
  misc_feature 1..80: note = Artificially Synthesized Probe
  source 1..80: mol_type = other DNA

SEQ ID NO: 129058 - DNA, 80 bp, synthetic construct
  misc_feature 1..80: note = Artificially Synthesized Probe
  source 1..80: mol_type = other DNA
actttgggaagccgagggaggctgatcacctgaggtcaggagttcgagaccagcctggccaacatggagaaaccccgtct

SEQ ID NO: 129059 - DNA, 80 bp, synthetic construct
  misc_feature 1..80: note = Artificially Synthesized Probe
  source 1..80: mol_type = other DNA
ccatctcaaaaaaacaaaagaggagtgtgggaacaagtagtgaagatttccaccgttcaaatcccgccactcccccccgg

SEQ ID NO: 129060 - DNA, 80 bp, synthetic construct
  misc_feature 1..80: note = Artificially Synthesized Probe
  source 1..80: mol_type = other DNA
tgtgttaagtgtttggagtggggcttggggtatggtgaagagtttatattaaaaaaaagaaaaaaaaccttcaagttggg

SEQ ID NO: 129061 - DNA, 80 bp, synthetic construct
  misc_feature 1..80: note = Artificially Synthesized Probe
  source 1..80: mol_type = other DNA
caaaaattagccgggggtggtggtgcacacctatagtcccagctactgaagaggctgaggcaggagaatctattgaatct

SEQ ID NO: 129062 - DNA, 80 bp, synthetic construct; identical to SEQ ID NO: 41115
  misc_feature 1..80: note = Artificially Synthesized Probe
  source 1..80: mol_type = other DNA

SEQ ID NO: 129063 - DNA, 80 bp, synthetic construct
  misc_feature 1..80: note = Artificially Synthesized Probe
  source 1..80: mol_type = other DNA
cttggttgagccctactggtctggcgggtttcagacacagctggatccaggaccctcggtcagtgtcacaaggatgtgtc

SEQ ID NO: 129064 - DNA, 80 bp, synthetic construct
  misc_feature 1..80: note = Artificially Synthesized Probe
  source 1..80: mol_type = other DNA
ccgggttcaagtgattctcctgcctcagcctcccgagtagctgggactacgggcgtgcgacaccatgtctggctaattta

SEQ ID NO: 129065 - DNA, 80 bp, synthetic construct; identical to SEQ ID NO: 41116
  misc_feature 1..80: note = Artificially Synthesized Probe
  source 1..80: mol_type = other DNA

SEQ ID NO: 129066 - DNA, 80 bp, synthetic construct; identical to SEQ ID NO: 41107
  misc_feature 1..80: note = Artificially Synthesized Probe
  source 1..80: mol_type = other DNA

SEQ ID NO: 129067 - DNA, 80 bp, synthetic construct
  misc_feature 1..80: note = Artificially Synthesized Probe
  source 1..80: mol_type = other DNA
ggcctggtaaggggatgcccagattggccaggcagggatcacatggttgtatggagtgagccaattgggtgaaaactcgt

SEQ ID NO: 129068 - DNA, 80 bp, synthetic construct
  misc_feature 1..80: note = Artificially Synthesized Probe
  source 1..80: mol_type = other DNA
ctgtaattccagctactcgggaggctgaggcaggagaatcgcttgaacccgggaggcggagcttgcagcgagccgagatc

SEQ ID NO: 129069 - DNA, 80 bp, synthetic construct
  misc_feature 1..80: note = Artificially Synthesized Probe
  source 1..80: mol_type = other DNA
agtgagctgagattacatcactgccctccggcctgggtgacggggtaagactctgtctcaaaaaaaaaaaaaaagggccg

SEQ ID NO: 129070 - DNA, 80 bp, synthetic construct
  misc_feature 1..80: note = Artificially Synthesized Probe
  source 1..80: mol_type = other DNA
agctactcgggaggctgaggcagagaattgcttgatcccgggaggcagaggttgcagtgagctgagattgcgccactgca

SEQ ID NO: 129071 - DNA, 80 bp, synthetic construct; identical to SEQ ID NO: 41117
  misc_feature 1..80: note = Artificially Synthesized Probe
  source 1..80: mol_type = other DNA

SEQ ID NO: 129072 - DNA, 80 bp, synthetic construct; identical to SEQ ID NO: 41159
  misc_feature 1..80: note = Artificially Synthesized Probe
  source 1..80: mol_type = other DNA

SEQ ID NO: 129073 - DNA, 80 bp, synthetic construct
  misc_feature 1..80: note = Artificially Synthesized Probe
  source 1..80: mol_type = other DNA
cctggaggcccagactactgggttgccgaggaactgtgggtttagacttctgggtacccaaggagttatggaattagatt

SEQ ID NO: 129074 - DNA, 80 bp, synthetic construct
  misc_feature 1..80: note = Artificially Synthesized Probe
  source 1..80: mol_type = other DNA
tgaccccggaccccatgcctggggttcctcccctaacctgcctctcggccgccaggacgccgtggaggaccggctggaca

SEQ ID NO: 129075 - DNA, 80 bp, synthetic construct
  misc_feature 1..80: note = Artificially Synthesized Probe
  source 1..80: mol_type = other DNA
gcccctgccctgcacagtgcccgcttcggtcactggcacaagaacaaggctggcatagaagcccgggcgggcccccggct

SEQ ID NO: 129076 - DNA, 80 bp, synthetic construct; identical to SEQ ID NO: 41170
  misc_feature 1..80: note = Artificially Synthesized Probe
  source 1..80: mol_type = other DNA

SEQ ID NO: 129077 - DNA, 80 bp, synthetic construct; identical to SEQ ID NO: 41160
  misc_feature 1..80: note = Artificially Synthesized Probe
  source 1..80: mol_type = other DNA

SEQ ID NO: 129078 - DNA, 80 bp, synthetic construct
  misc_feature 1..80: note = Artificially Synthesized Probe
  source 1..80: mol_type = other DNA
ctggaggacattgccctgccctgacccctggccccgccccctacccctccctttccagagaaataaactcttcccgtcgc

SEQ ID NO: 129079 - DNA, 80 bp, synthetic construct
  misc_feature 1..80: note = Artificially Synthesized Probe
  source 1..80: mol_type = other DNA
agaggcagatagagctgtagatgatcccggttctcctcttttcattcacctaaaacatgtttatcgagtggcaccttttg

SEQ ID NO: 129080 - DNA, 80 bp, synthetic construct
  misc_feature 1..80: note = Artificially Synthesized Probe
  source 1..80: mol_type = other DNA
cacacctgtaatcccagcactttgggaggccgaggcaggaggactgcttgaggccaaaagtttgagaccagcttgggcaa

SEQ ID NO: 129081 - DNA, 80 bp, synthetic construct
  misc_feature 1..80: note = Artificially Synthesized Probe
  source 1..80: mol_type = other DNA
actttagcctaggtgacagagtgagatcctcctctcttaaaaaaaaaaaaaaagtaaatgggaattaagatgggggttca

SEQ ID NO: 129082 - DNA, 80 bp, synthetic construct
  misc_feature 1..80: note = Artificially Synthesized Probe
  source 1..80: mol_type = other DNA
gggtacccagaggcagctcatcatcaggcctatggggaagaccctgaatgtgggacccccaagaactgcctgtccacatg

SEQ ID NO: 129083 - DNA, 80 bp, synthetic construct; identical to SEQ ID NO: 41161
  misc_feature 1..80: note = Artificially Synthesized Probe
  source 1..80: mol_type = other DNA

SEQ ID NO: 129084 - DNA, 80 bp, synthetic construct
  misc_feature 1..80: note = Artificially Synthesized Probe
  source 1..80: mol_type = other DNA
ggcgagaaccgacggcggggaggggccaggtgcgcagggggcggggacagggcccgcggggcggggtccacgtgggtgac

SEQ ID NO: 129085 - DNA, 80 bp, synthetic construct
  misc_feature 1..80: note = Artificially Synthesized Probe
  source 1..80: mol_type = other DNA
atcatgtgaccaaatccattcttaaaccttgcaagctgactgcgggagcccatggattgcaggcctcccctgcagcactc

SEQ ID NO: 129086 - DNA, 80 bp, synthetic construct
  misc_feature 1..80: note = Artificially Synthesized Probe
  source 1..80: mol_type = other DNA
aggtgctgagggagcctgtcctctcagaacctcagtctccctgtctgtaaatttggggaacccagttggctgcacaaccc

SEQ ID NO: 129087 - DNA, 80 bp, synthetic construct
  misc_feature 1..80: note = Artificially Synthesized Probe
  source 1..80: mol_type = other DNA
tctgttcctactagttgttgaagacatcaacaaacggcgggaacccattcccagtctggaggccatttatttgctgagcc

SEQ ID NO: 129088 - DNA, 80 bp, synthetic construct; identical to SEQ ID NO: 41162
  misc_feature 1..80: note = Artificially Synthesized Probe
  source 1..80: mol_type = other DNA

SEQ ID NO: 129089 - DNA, 80 bp, synthetic construct
  misc_feature 1..80: note = Artificially Synthesized Probe
  source 1..80: mol_type = other DNA
tgcgtgtgtatgtatgtgtctgcgtctgtgtgtgcgtctgtgtgtatctgtgtgtgcatgtgtgtatgcgtgtatatgta

SEQ ID NO: 129090 - DNA, 80 bp, synthetic construct
  misc_feature 1..80: note = Artificially Synthesized Probe
  source 1..80: mol_type = other DNA
tgtgcatgtgtgtatgtatgtgtgtgcatctctgtgtgtgcatgtgtgtatgtgtgtgtgcatctgtgtgtgtgtgcatg

SEQ ID NO: 129091 - DNA, 80 bp, synthetic construct
  misc_feature 1..80: note = Artificially Synthesized Probe
  source 1..80: mol_type = other DNA
ccaatgagcctaggtgtgcaggctcaggcccagagagtgatccaccttccccagtcggttcaggccctgatcaaagactt

SEQ ID NO: 129092 - DNA, 80 bp, synthetic construct; identical to SEQ ID NO: 41163
  misc_feature 1..80: note = Artificially Synthesized Probe
  source 1..80: mol_type = other DNA

SEQ ID NO: 129093 - DNA, 80 bp, synthetic construct
  misc_feature 1..80: note = Artificially Synthesized Probe
  source 1..80: mol_type = other DNA
ggaggatcacttggggccaggagtttgagaccagcctgggtacagagcaagaccccgtctcttaaaaaaagaaaaagaaa

SEQ ID NO: 129094 - DNA, 80 bp, synthetic construct
  misc_feature 1..80: note = Artificially Synthesized Probe
  source 1..80: mol_type = other DNA
ctcaaaaacatacataaagtaaaattttaaaaaggggaggtacccacagagtccaaggagctcttgccttgagttctatc

SEQ ID NO: 129095 - DNA, 80 bp, synthetic construct
  misc_feature 1..80: note = Artificially Synthesized Probe
  source 1..80: mol_type = other DNA
cggggacgcacgggctctgggatcctgggtttcatggcggctgggagttgggggccgggctgggcgtccgagcacctgac

SEQ ID NO: 129096 - DNA, 80 bp, synthetic construct
  misc_feature 1..80: note = Artificially Synthesized Probe
  source 1..80: mol_type = other DNA
gggacggctcccaggaggtgcaggtggcggcagcgggaagcggggcaggtgtgcacctgcagcggcaaccctggtgcttc

SEQ ID NO: 129097 - DNA, 80 bp, synthetic construct; identical to SEQ ID NO: 41164
  misc_feature 1..80: note = Artificially Synthesized Probe
  source 1..80: mol_type = other DNA

SEQ ID NO: 129098 - DNA, 80 bp, synthetic construct
  misc_feature 1..80: note = Artificially Synthesized Probe
  source 1..80: mol_type = other DNA
aagctgaacgccttcaaggcagacactcccagtctgggcgaggtgagggggcgtgcttgggaggtgaggggcagccccaa

SEQ ID NO: 129099 - DNA, 80 bp, synthetic construct
  misc_feature 1..80: note = Artificially Synthesized Probe
  source 1..80: mol_type = other DNA
gagcaggacacatacaggtctgcagacttggaacccgtccccacccttgccactgacctggttccccagtcctcagctcc

SEQ ID NO: 129100 - DNA, 80 bp, synthetic construct
  misc_feature 1..80: note = Artificially Synthesized Probe
  source 1..80: mol_type = other DNA
gatcccccccccaccgcccactgtgggcctggtagcggccttgggatccctggctgctgccaagtctttggccctcatga

SEQ ID NO: 129101 - DNA, 80 bp, synthetic construct; identical to SEQ ID NO: 41165
  misc_feature 1..80: note = Artificially Synthesized Probe
  source 1..80: mol_type = other DNA

SEQ ID NO: 129102 - DNA, 80 bp, synthetic construct
  misc_feature 1..80: note = Artificially Synthesized Probe
  source 1..80: mol_type = other DNA
gagctgaataaggtgtgctcgggtgggcagggagcggggacacctcggcccctcaaccccatgctctgtctgcgttctgc

SEQ ID NO: 129103 - DNA, 80 bp, synthetic construct
  misc_feature 1..80: note = Artificially Synthesized Probe
  source 1..80: mol_type = other DNA
tggtcctgccaaggcggggtattggggaggggctgaactgtagagatggggggttctgggggaggggcagggcttgtgga

SEQ ID NO: 129104 - DNA, 80 bp, synthetic construct; identical to SEQ ID NO: 41166
  misc_feature 1..80: note = Artificially Synthesized Probe
  source 1..80: mol_type = other DNA

SEQ ID NO: 129105 - DNA, 80 bp, synthetic construct
  misc_feature 1..80: note = Artificially Synthesized Probe
  source 1..80: mol_type = other DNA
agggtgcctgccgggggaggagggcacagctggatgcccacactctaggatctcttaagccgggcaaagttcaggggctg

SEQ ID NO: 129106 - DNA, 80 bp, synthetic construct
  misc_feature 1..80: note = Artificially Synthesized Probe
  source 1..80: mol_type = other DNA
ctgggtgaggggtggaaccttggagaggtgggacctggatgaggggtggaaccttggaggggtgggacctgggagagggg

SEQ ID NO: 129107 - DNA, 80 bp, synthetic construct
  misc_feature 1..80: note = Artificially Synthesized Probe
  source 1..80: mol_type = other DNA
tgggtgaggggtggaacctcggagaggtgggacctgggtgaggggtggagccttggagaggtgggacctgggtgaggggt

SEQ ID NO: 129108 - DNA, 80 bp, synthetic construct
  misc_feature 1..80: note = Artificially Synthesized Probe
  source 1..80: mol_type = other DNA
ggtgaggggtggaacctcggagaggtgggacctgggtgaggggtggagcctcggagagctgggacctgggtgaggggtgg

SEQ ID NO: 129109 - DNA, 80 bp, synthetic construct; identical to SEQ ID NO: 41167
  misc_feature 1..80: note = Artificially Synthesized Probe
  source 1..80: mol_type = other DNA

SEQ ID NO: 129110 - DNA, 80 bp, synthetic construct
  misc_feature 1..80: note = Artificially Synthesized Probe
  source 1..80: mol_type = other DNA
tccgggtcctgctgctctacatcctccttcggaatggtgggtgggggctgcagggagttggaacgtccccatttgccagc

SEQ ID NO: 129111 - DNA, 80 bp, synthetic construct
  misc_feature 1..80: note = Artificially Synthesized Probe
  source 1..80: mol_type = other DNA
gaaaccctcacatctgtgattcctatagatgtggggctccctcagctcatctggaggagcccctgatctaccccctccag

SEQ ID NO: 129112 - DNA, 80 bp, synthetic construct
  misc_feature 1..80: note = Artificially Synthesized Probe
  source 1..80: mol_type = other DNA
gtgtgagtgaggagaacctggccaagctgatccagcatgccaatgtacaggcgcacagcagcctcatccgtaacctggag

SEQ ID NO: 129113 - DNA, 80 bp, synthetic construct
  misc_feature 1..80: note = Artificially Synthesized Probe
  source 1..80: mol_type = other DNA
gggatgtcttcctccttgccccatttccaggagcgccttgcagctggaggacgcaggcgtccaggcctcaccggccccgg

SEQ ID NO: 129114 - DNA, 80 bp, synthetic construct; identical to SEQ ID NO: 41168
  misc_feature 1..80: note = Artificially Synthesized Probe
  source 1..80: mol_type = other DNA

SEQ ID NO: 129115 - DNA, 80 bp, synthetic construct
  misc_feature 1..80: note = Artificially Synthesized Probe
  source 1..80: mol_type = other DNA
agcacccacacacagccatgtgtgtgcttgactcttgggtcagcctctcctgtctctctctggccctgtgcgtccccctc

SEQ ID NO: 129116 - DNA, 80 bp, synthetic construct
  misc_feature 1..80: note = Artificially Synthesized Probe
  source 1..80: mol_type = other DNA
tcttcctctctctgtttcctgcttcatctcttgtctctctctttgccttcatactttgtctcactgcttcttatctcttt

SEQ ID NO: 129117 - DNA, 80 bp, synthetic construct
  misc_feature 1..80: note = Artificially Synthesized Probe
  source 1..80: mol_type = other DNA
cccccaccctaccagccacaccaggcgcagcccctctgtgaccagcctccttcccctcaatccccctgctgccctccctg

SEQ ID NO: 129118 - DNA, 80 bp, synthetic construct; identical to SEQ ID NO: 41169
  misc_feature 1..80: note = Artificially Synthesized Probe
  source 1..80: mol_type = other DNA

SEQ ID NO: 129119 - DNA, 80 bp, synthetic construct
  misc_feature 1..80: note = Artificially Synthesized Probe
  source 1..80: mol_type = other DNA
ctggccttcccaggatcccagggcagcaccatccaatggcaatgggcctggggcggcttcctggcttcctccttgtccct

SEQ ID NO: 129120 - DNA, 80 bp, synthetic construct
  misc_feature 1..80: note = Artificially Synthesized Probe
  source 1..80: mol_type = other DNA
ttttttttagtagagacggggtttcaccatgttggccagactggtcctgaatcataatttatgttaagtaaattgtattt

SEQ ID NO: 129121 - DNA, 80 bp, synthetic construct
  misc_feature 1..80: note = Artificially Synthesized Probe
  source 1..80: mol_type = other DNA
agagccaactcctcaacccccagggccccagtcccgggggtaaaaagaattgctgtctgccctgtgatcccatcatgagc

SEQ ID NO: 129122 - DNA, 80 bp, synthetic construct; identical to SEQ ID NO: 41172
  misc_feature 1..80: note = Artificially Synthesized Probe
  source 1..80: mol_type = other DNA

SEQ ID NO: 129123 - DNA, 80 bp, synthetic construct
  misc_feature 1..80: note = Artificially Synthesized Probe
  source 1..80: mol_type = other DNA
tgctggtaccaggatccgtaggacactggagaagcaggcaaggggtgccaacacagggttgctgtgcgttgtagccacca

SEQ ID NO: 129124 - DNA, 80 bp, synthetic construct
  misc_feature 1..80: note = Artificially Synthesized Probe
  source 1..80: mol_type = other DNA
agaccacctgcaggggcagaagactcaaccccagcaccatcaccacacagcctgtcccaggccagctcatctcttggatt

SEQ ID NO: 129125 - DNA, 80 bp, synthetic construct
  misc_feature 1..80: note = Artificially Synthesized Probe
  source 1..80: mol_type = other DNA
atgcgtcacaccccaatctggagcaaggcatgctccaccagccgtgatcccaccgccaccaaattttgtgggcctgtgag

SEQ ID NO: 129126 - DNA, 80 bp, synthetic construct; identical to SEQ ID NO: 41171
  misc_feature 1..80: note = Artificially Synthesized Probe
  source 1..80: mol_type = other DNA

SEQ ID NO: 129127 - DNA, 80 bp, synthetic construct; identical to SEQ ID NO: 41173
  misc_feature 1..80: note = Artificially Synthesized Probe
  source 1..80: mol_type = other DNA

SEQ ID NO: 129128 - DNA, 80 bp, synthetic construct
  misc_feature 1..80: note = Artificially Synthesized Probe
  source 1..80: mol_type = other DNA
cagactttccagtagctggaactacagcgctatgccaccatgccctgctgatattttgcatttttatagagatggagact

SEQ ID NO: 129129 - DNA, 80 bp, synthetic construct
  misc_feature 1..80: note = Artificially Synthesized Probe
  source 1..80: mol_type = other DNA
ttgttgctcaggctggaatgcaatggtgggatctctggctcaccacaacctccttctcccgggttcaagtgattctcctg

SEQ ID NO: 129130 - DNA, 80 bp, synthetic construct
  misc_feature 1..80: note = Artificially Synthesized Probe
  source 1..80: mol_type = other DNA
atggatgtgaaacactgtgccctgcctcaccttgaccttctgatccaacagagtctgggggagcagagccaggggcaggt

SEQ ID NO: 129131 - DNA, 80 bp, synthetic construct; identical to SEQ ID NO: 41174
  misc_feature 1..80: note = Artificially Synthesized Probe
  source 1..80: mol_type = other DNA

SEQ ID NO: 129132 - DNA, 80 bp, synthetic construct
  misc_feature 1..80: note = Artificially Synthesized Probe
  source 1..80: mol_type = other DNA
caggccgggcctggaagctctgcaggggccccagtgcctctgcaaagtacttgatgagcgggacccccttcacgtactcc

SEQ ID NO: 129133 - DNA, 80 bp, synthetic construct
  misc_feature 1..80: note = Artificially Synthesized Probe
  source 1..80: mol_type = other DNA
acaaagccactcagtggcggggctggggctgaaaaccaggtcgggctctaatgcggtggttccccagcctggcctcacct

SEQ ID NO: 129134 - DNA, 80 bp, synthetic construct
  misc_feature 1..80: note = Artificially Synthesized Probe
  source 1..80: mol_type = other DNA
ccctgccagccagcgccctttgtctcaccacttcctgctgggacccccagcctccacccagtggagatgctcccctcctt

SEQ ID NO: 129135 - DNA, 80 bp, synthetic construct; identical to SEQ ID NO: 41175
  misc_feature 1..80: note = Artificially Synthesized Probe
  source 1..80: mol_type = other DNA

SEQ ID NO: 129136 - DNA, 80 bp, synthetic construct
  misc_feature 1..80: note = Artificially Synthesized Probe
  source 1..80: mol_type = other DNA
tatgttgcccaggttggtctcgaactcctgggctcaaatgatcctcccacctcagcctccaaattgctgggattacagac

SEQ ID NO: 129137 - DNA, 80 bp, synthetic construct
  misc_feature 1..80: note = Artificially Synthesized Probe
  source 1..80: mol_type = other DNA
tggccaggatcccacagcactccagcctgggtgacagcaagacctggcctccccggggaaaaaaacaaacaaacaaggga

SEQ ID NO: 129138 - DNA, 80 bp, synthetic construct
  misc_feature 1..80: note = Artificially Synthesized Probe
  source 1..80: mol_type = other DNA
gggaacctggcctcgtgccctcctcgcccgcagtggctgattgtgggtgttgtgtggggaatgcagggttgttctctgag

SEQ ID NO: 129139 - DNA, 80 bp, synthetic construct; identical to SEQ ID NO: 41176
  misc_feature 1..80: note = Artificially Synthesized Probe
  source 1..80: mol_type = other DNA

SEQ ID NO: 129140 - DNA, 80 bp, synthetic construct
  misc_feature 1..80: note = Artificially Synthesized Probe
  source 1..80: mol_type = other DNA
ctggaaaggtcacctacctgctggctccaggccagtcttgaaggtgccaggggttctggcccagtgcagcccacaggccc

SEQ ID NO: 129141 - DNA, 80 bp, synthetic construct
  misc_feature 1..80: note = Artificially Synthesized Probe
  source 1..80: mol_type = other DNA
tggctcctggggacctcagagaacattgatagaagatcctagaagaaccacaacccgtggcaggtggttttatttccctg

SEQ ID NO: 129142 - DNA, 80 bp, synthetic construct
  misc_feature 1..80: note = Artificially Synthesized Probe
  source 1..80: mol_type = other DNA
gtaaaggtgaatctcccaagacttccaagaaatgcgtgagttcagaggcaagcggacaggtgggagtgtgggggaagctg

SEQ ID NO: 129143 - DNA, 80 bp, synthetic construct
  misc_feature 1..80: note = Artificially Synthesized Probe
  source 1..80: mol_type = other DNA
agactttgtattgcactctagtaacaacctgtcggacccacacggggtgacacagaaaagaggcgagaatgtgagattaa

SEQ ID NO: 129144 - DNA, 80 bp, synthetic construct; identical to SEQ ID NO: 41177
  misc_feature 1..80: note = Artificially Synthesized Probe
  source 1..80: mol_type = other DNA

SEQ ID NO: 129145 - DNA, 80 bp, synthetic construct
  misc_feature 1..80: note = Artificially Synthesized Probe
  source 1..80: mol_type = other DNA
cacgttcctcttcttcagtgagtccctttactctgcaggaaatctgcctacattcatgacttttgcacttgtccttaaat

SEQ ID NO: 129146 - DNA, 80 bp, synthetic construct
  misc_feature 1..80: note = Artificially Synthesized Probe
  source 1..80: mol_type = other DNA
gaaaattagtcaagcctggtggcacacgcctgtaatcccagctacttgggaggctgaggcaggagaatcgcttgaacccg

SEQ ID NO: 129147 - DNA, 80 bp, synthetic construct
  misc_feature 1..80: note = Artificially Synthesized Probe
  source 1..80: mol_type = other DNA
agtccgcatcgaagcgctcattctgcgccacggtgaaggtggtcttccagtccccagccatgcctgggggaggaaggcag

SEQ ID NO: 129148 - DNA, 80 bp, synthetic construct; identical to SEQ ID NO: 41178
  misc_feature 1..80: note = Artificially Synthesized Probe
  source 1..80: mol_type = other DNA

SEQ ID NO: 129149 - DNA, 80 bp, synthetic construct
  misc_feature 1..80: note = Artificially Synthesized Probe
  source 1..80: mol_type = other DNA
gagagacagagtcaggcatcacaagccccctccaggctcagccctgaataccaagatcaggacacggctgccccggcctg

SEQ ID NO: 129150 - DNA, 80 bp, synthetic construct
  misc_feature 1..80: note = Artificially Synthesized Probe
  source 1..80: mol_type = other DNA
agggttggggcaacacaagggccccgcttcatcctgtcccaggcagcaggcaggtaagagacaaggagggagaggcagct

SEQ ID NO: 129151 - DNA, 80 bp, synthetic construct
  misc_feature 1..80: note = Artificially Synthesized Probe
  source 1..80: mol_type = other DNA
tcagcagtgattgattgagtcacagcctcaccactgcagccagacctgaacttcctcacagctcagcaacacccagcagg

SEQ ID NO: 129152 - DNA, 80 bp, synthetic construct; identical to SEQ ID NO: 41179
  misc_feature 1..80: note = Artificially Synthesized Probe
  source 1..80: mol_type = other DNA

SEQ ID NO: 129153 - DNA, 80 bp, synthetic construct
  misc_feature 1..80: note = Artificially Synthesized Probe
  source 1..80: mol_type = other DNA
agctgggactacaggcatatgccaccatgcccggcttctcagagctgcaattttaaatcgggagatagagaagacctccc

SEQ ID NO: 129154 - DNA, 80 bp, synthetic construct
  misc_feature 1..80: note = Artificially Synthesized Probe
  source 1..80: mol_type = other DNA
gaaatactatcatccccatcttagagacggggacagggccgcaaaagtgtcagggcgtttcctggctcctcaacaaacag

SEQ ID NO: 129155 - DNA, 80 bp, synthetic construct
  misc_feature 1..80: note = Artificially Synthesized Probe
  source 1..80: mol_type = other DNA
gaggcccgaaggccatcgcccgtgcggcgcggcgcatagaggtcccggcggaggtcggggtgcagcgggagtaggaggcg

SEQ ID NO: 129156 - DNA, 80 bp, synthetic construct
  misc_feature 1..80: note = Artificially Synthesized Probe
  source 1..80: mol_type = other DNA
acgacgagcactttctccctggggaggagaacgggggtgtccctgtgagccctgccgcgcccaaccgcgggtcccctcca

SEQ ID NO: 129157 - DNA, 80 bp, synthetic construct; identical to SEQ ID NO: 41180
  misc_feature 1..80: note = Artificially Synthesized Probe
  source 1..80: mol_type = other DNA

SEQ ID NO: 129158 - DNA, 80 bp, synthetic construct
  misc_feature 1..80: note = Artificially Synthesized Probe
  source 1..80: mol_type = other DNA
gtagttggtcatagggttcttcttcatctccttgaacgacgtgtgctgaaccacgaagtccacggtctcctctggcaggg

SEQ ID NO: 129159 - DNA, 80 bp, synthetic construct
  misc_feature 1..80: note = Artificially Synthesized Probe
  source 1..80: mol_type = other DNA
gaggccagggtagggtgagcggcctccgaagcggagcggggctctgaggagacactttttttttcctccctccttccctc

SEQ ID NO: 129160 - DNA, 80 bp, synthetic construct; identical to SEQ ID NO: 41191
  misc_feature 1..80: note = Artificially Synthesized Probe
  source 1..80: mol_type = other DNA

SEQ ID NO: 129161 - DNA, 80 bp, synthetic construct
  misc_feature 1..80: note = Artificially Synthesized Probe
  source 1..80: mol_type = other DNA
cgttttagatggggcttgaaggctcgtgtgctgtattatacaccgtctccatagtattcattgttatggctaatcatcca

SEQ ID NO: 129162 - DNA, 80 bp, synthetic construct
  misc_feature 1..80: note = Artificially Synthesized Probe
  source 1..80: mol_type = other DNA
tccaggaaaacatttaaagttgatgatatgttatcaaaagtagagaaaatgaaaggagagcaagaatctcataggtaaga

SEQ ID NO: 129163 - DNA, 80 bp, synthetic construct
  misc_feature 1..80: note = Artificially Synthesized Probe
  source 1..80: mol_type = other DNA
caaactcacacacaagtcagaaattaatttctgtagcattcctggcagagaatacttaagctgtggcttgaatacctcca

SEQ ID NO: 129164 - DNA, 80 bp, synthetic construct; identical to SEQ ID NO: 41192
  misc_feature 1..80: note = Artificially Synthesized Probe
  source 1..80: mol_type = other DNA

SEQ ID NO: 129165 - DNA, 80 bp, synthetic construct
  misc_feature 1..80: note = Artificially Synthesized Probe
  source 1..80: mol_type = other DNA
gaatccctaaatgttctgactagtctgatatctgtctactctagatagtatgcttctatttattttttgacacgtaaact

SEQ ID NO: 129166 - DNA, 80 bp, synthetic construct
  misc_feature 1..80: note = Artificially Synthesized Probe
  source 1..80: mol_type = other DNA
tttcctcctagttttaaatcacagcttacgaatttagataggatatacacttaatgatgcatcatttatgcatctcattg

SEQ ID NO: 129167 - DNA, 80 bp, synthetic construct
  misc_feature 1..80: note = Artificially Synthesized Probe
  source 1..80: mol_type = other DNA
tctaagttctgtctggaaggtgaaactgacttatttggaaaggagagcaaggtgtctggaaacaaacaatagaatttatt

SEQ ID NO: 129168 - DNA, 80 bp, synthetic construct
  misc_feature 1..80: note = Artificially Synthesized Probe
  source 1..80: mol_type = other DNA
ttatatttccatgtctaggcaatcctgacttgtaaataaactgtgatagtccattctagaagctgagatcctgaattgtt

SEQ ID NO: 129169 - DNA, 80 bp, synthetic construct; identical to SEQ ID NO: 41193
  misc_feature 1..80: note = Artificially Synthesized Probe
  source 1..80: mol_type = other DNA

SEQ ID NO: 129170 - DNA, 80 bp, synthetic construct
  misc_feature 1..80: note = Artificially Synthesized Probe
  source 1..80: mol_type = other DNA
tgtgggagatacatactgttcaattctctctgaacaattgtttccccagtaattttgttccttttgacctggtgggttca

SEQ ID NO: 129171 - DNA, 80 bp, synthetic construct
  misc_feature 1..80: note = Artificially Synthesized Probe
  source 1..80: mol_type = other DNA
aagattcttatgaatgtctcagtattgctcccagaggcactaagatgaattaagaaagtgtgtcattttaaatttactgc

SEQ ID NO: 129172 - DNA, 80 bp, synthetic construct
  misc_feature 1..80: note = Artificially Synthesized Probe
  source 1..80: mol_type = other DNA
cacacccagcccccccccccccccctttttttttttttttttttttttttttttgagaccaagtctccctcttgctgagg

SEQ ID NO: 129173 - DNA, 80 bp, synthetic construct
  misc_feature 1..80: note = Artificially Synthesized Probe
  source 1..80: mol_type = other DNA
tttgtatttttagtagaaacagagtttcaccatgttggccaggctggtcttgaactcctgagctcaagtgatctgcctgc

SEQ ID NO: 129174 - DNA, 80 bp, synthetic construct; identical to SEQ ID NO: 41194
  misc_feature 1..80: note = Artificially Synthesized Probe
  source 1..80: mol_type = other DNA

SEQ ID NO: 129175 - DNA, 80 bp, synthetic construct
  misc_feature 1..80: note = Artificially Synthesized Probe
  source 1..80: mol_type = other DNA
ctaaacctatcacacagggttgtaggaaggaccctaaacaccagtatatgatgccagcaatataaatatttgcttctaaa

SEQ ID NO: 129176 - DNA, 80 bp, synthetic construct
  misc_feature 1..80: note = Artificially Synthesized Probe
  source 1..80: mol_type = other DNA
tggccaacaggggaaaaccctttctctacaaaaaacacaaaaatcagccaggcgaggtggtgtacacctgtaattccagc

SEQ ID NO: 129177 - DNA, 80 bp, synthetic construct; identical to SEQ ID NO: 41195
  misc_feature 1..80: note = Artificially Synthesized Probe
  source 1..80: mol_type = other DNA

SEQ ID NO: 129178 - DNA, 80 bp, synthetic construct
  misc_feature 1..80: note = Artificially Synthesized Probe
  source 1..80: mol_type = other DNA
caccttgcccagctaattttttgtatttttagtagagacggggtttcaccgtgttagccaggatggtctcgatctcctga

SEQ ID NO: 129179 - DNA, 80 bp, synthetic construct
  misc_feature 1..80: note = Artificially Synthesized Probe
  source 1..80: mol_type = other DNA
ttatttacagtttcactgtggcatatgttaagggcatggtatcagctgtgcttagaaagacgtattacgttgtttaatac

SEQ ID NO: 129180 - DNA, 80 bp, synthetic construct
  misc_feature 1..80: note = Artificially Synthesized Probe
  source 1..80: mol_type = other DNA
ctgccaaagttatagtatgtctgctcctgagcccaatatatttcattcctcaaagttcaaggggtatcaagataaaaata

SEQ ID NO: 129181 - DNA, 80 bp, synthetic construct
  misc_feature 1..80: note = Artificially Synthesized Probe
  source 1..80: mol_type = other DNA
agtcacttgcagaaacttgttggtggaaggaggtgatagaaaaacatgagctattaaatggtggttagttcttttttttt

SEQ ID NO: 129182 - DNA, 80 bp, synthetic construct
  misc_feature 1..80: note = Artificially Synthesized Probe
  source 1..80: mol_type = other DNA
atttttagtagagacggggtttcaccatgttagccaggatggtctcgatctcctgacctcgtgatccacccgccttggcc

SEQ ID NO: 129183 - DNA, 80 bp, synthetic construct; identical to SEQ ID NO: 41196
  misc_feature 1..80: note = Artificially Synthesized Probe
  source 1..80: mol_type = other DNA

SEQ ID NO: 129184 - DNA, 80 bp, synthetic construct
  misc_feature 1..80: note = Artificially Synthesized Probe
  source 1..80: mol_type = other DNA
ctcactgcagcctctaactcctggcctcaaaccatcctcccatcttagcctcctgaatagctaggactacaggtgcatgc

SEQ ID NO: 129185 - DNA, 80 bp, synthetic construct
  misc_feature 1..80: note = Artificially Synthesized Probe
  source 1..80: mol_type = other DNA
acagaaggtctgatataatgccttacatcctttccagctcttgtttctggtactccagttttgaatttttcatggatttt

SEQ ID NO: 129186 - DNA, 80 bp, synthetic construct; identical to SEQ ID NO: 41197
  misc_feature 1..80: note = Artificially Synthesized Probe
  source 1..80: mol_type = other DNA

SEQ ID NO: 129187 - DNA, 80 bp, synthetic construct
  misc_feature 1..80: note = Artificially Synthesized Probe
  source 1..80: mol_type = other DNA
tttgcatttttagtagagacagggttttaccatgttggtcaggctggtcttgaactcctgacctcaagtgatccgccttc

SEQ ID NO: 129188 - DNA, 80 bp, synthetic construct
  misc_feature 1..80: note = Artificially Synthesized Probe
  source 1..80: mol_type = other DNA
agggccaaacgaagcaaaatgtcacttctctcttgcccttattcctcttctattcctggtcttctgttagtagctggaga

SEQ ID NO: 129189 - DNA, 80 bp, synthetic construct
  misc_feature 1..80: note = Artificially Synthesized Probe
  source 1..80: mol_type = other DNA
tctcgagcctcagcttccccagtagctgagattacaggcatctgccaccacacctggctaatttttgttttttgttttcc

SEQ ID NO: 129190 - DNA, 80 bp, synthetic construct; identical to SEQ ID NO: 41182
  misc_feature 1..80: note = Artificially Synthesized Probe
  source 1..80: mol_type = other DNA

SEQ ID NO: 129191 - DNA, 80 bp, synthetic construct
  misc_feature 1..80: note = Artificially Synthesized Probe
  source 1..80: mol_type = other DNA
ggctggagtgtagtggcacaatgataggtcactgatggattgaacttgtggactaaagggatcctcctgcctcagcctcc

SEQ ID NO: 129192 - DNA, 80 bp, synthetic construct; identical to SEQ ID NO: 41198
  misc_feature 1..80: note = Artificially Synthesized Probe
  source 1..80: mol_type = other DNA

SEQ ID NO: 129193 - DNA, 80 bp, synthetic construct
  misc_feature 1..80: note = Artificially Synthesized Probe
  source 1..80: mol_type = other DNA
ttgatctcctgaccttgtgatccacctgcctcagcctcccaaagtgctgggattacaggtgtgagccaccgagcccggct

SEQ ID NO: 129194 - DNA, 80 bp, synthetic construct
  misc_feature 1..80: note = Artificially Synthesized Probe
  source 1..80: mol_type = other DNA
cctgcctcagcctcctgagtagttgggattacaggcacacaccaccacgcccggttaacttttgtatttttggtagagac

SEQ ID NO: 129195 - DNA, 80 bp, synthetic construct
  misc_feature 1..80: note = Artificially Synthesized Probe
  source 1..80: mol_type = other DNA
taaacctccccctttttaagcatttatttttacaataagaaggcctgcatctatattcttgggggcgcgtttcatttatg

SEQ ID NO: 129196 - DNA, 80 bp, synthetic construct; identical to SEQ ID NO: 41199
  misc_feature 1..80: note = Artificially Synthesized Probe
  source 1..80: mol_type = other DNA

SEQ ID NO: 129197 - DNA, 80 bp, synthetic construct
  misc_feature 1..80: note = Artificially Synthesized Probe
  source 1..80: mol_type = other DNA
agaagctggagcagatggccagggccagacagtgcattgtcttcaaggtaatttaaggatgttggtcttaagaaagtcgt

SEQ ID NO: 129198 - DNA, 80 bp, synthetic construct
  misc_feature 1..80: note = Artificially Synthesized Probe
  source 1..80: mol_type = other DNA
cttactttattttttattttactttttagagatgaggatttgccctgtcgctgaggtggcagtacagtggtgtgatcatg

SEQ ID NO: 129199 - DNA, 80 bp, synthetic construct; identical to SEQ ID NO: 41200
  misc_feature 1..80: note = Artificially Synthesized Probe
  source 1..80: mol_type = other DNA

SEQ ID NO: 129200 - DNA, 80 bp, synthetic construct
  misc_feature 1..80: note = Artificially Synthesized Probe
  source 1..80: mol_type = other DNA
acctcagggaagtcaagtgtcattaagagctagatctggtcataaaacaactcgaagttgtttactggaaagtttaaata

SEQ ID NO: 129201 - DNA, 80 bp, synthetic construct
  misc_feature 1..80: note = Artificially Synthesized Probe
  source 1..80: mol_type = other DNA
accccatctctactaaaaatataaaaattagctgggcagagtgtcgtgcacctgtaatcccagctattcaggaggctgag

SEQ ID NO: 129202 - DNA, 80 bp, synthetic construct
  misc_feature 1..80: note = Artificially Synthesized Probe
  source 1..80: mol_type = other DNA
cctctaacagtcctcctgtctcagcctctcaaagcattgagattacaagtgtgaaccattacacccagcctgttgttttt

SEQ ID NO: 129203 - DNA, 80 bp, synthetic construct
  misc_feature 1..80: note = Artificially Synthesized Probe
  source 1..80: mol_type = other DNA
ataggcgcctgccaccacgcccggctaattttttgtattttttagtagagatggggtttcaccgtgttagccaggatgtt

SEQ ID NO: 129204 - DNA, 80 bp, synthetic construct
  misc_feature 1..80: note = Artificially Synthesized Probe
  source 1..80: mol_type = other DNA
caagcaattttcttgcctcagcctctggagtagctgggactacaggcgtgtgccaccatgcctggctaatgttttgtgtt

SEQ ID NO: 129205 - DNA, 80 bp, synthetic construct; identical to SEQ ID NO: 41201
  misc_feature 1..80: note = Artificially Synthesized Probe
  source 1..80: mol_type = other DNA

SEQ ID NO: 129206 - DNA, 80 bp, synthetic construct
  misc_feature 1..80: note = Artificially Synthesized Probe
  source 1..80: mol_type = other DNA
atatatgtatatatatatattttttggttttttgagacagtctcattctatggctcagcaatgtcgccatctaggatcac

SEQ ID NO: 129207 - DNA, 80 bp, synthetic construct
  misc_feature 1..80: note = Artificially Synthesized Probe
  source 1..80: mol_type = other DNA
gtgatccacccacctcggcctcccaaagtgctggattacaggcctgtgccagcgtgcctggccttattttattactatta

SEQ ID NO: 129208 - DNA, 80 bp, synthetic construct
  misc_feature 1..80: note = Artificially Synthesized Probe
  source 1..80: mol_type = other DNA
ctcttccagatggagtcttgctttgttgcccaggctgtagtgcagtggtgtgatctctgctcactacaacctccacctcc

SEQ ID NO: 129209 - DNA, 80 bp, synthetic construct; identical to SEQ ID NO: 41202
  misc_feature 1..80: note = Artificially Synthesized Probe
  source 1..80: mol_type = other DNA

SEQ ID NO: 129210 - DNA, 80 bp, synthetic construct
  misc_feature 1..80: note = Artificially Synthesized Probe
  source 1..80: mol_type = other DNA
gatggagtttcaccatgttggccaggctggcctcgaattcttgacctcaagttatccaccagcctcagcctcccaaagtg

SEQ ID NO: 129211 - DNA, 80 bp, synthetic construct
  misc_feature 1..80: note = Artificially Synthesized Probe
  source 1..80: mol_type = other DNA
atttgaaatttaattcaactcattttaagcgttagaaagactgttttgtgaacctgtcaattgtgtaaaaaatgtattga

SEQ ID NO: 129212 - DNA, 80 bp, synthetic construct
  misc_feature 1..80: note = Artificially Synthesized Probe
  source 1..80: mol_type = other DNA
cgctcactgcaagttctgcctcccgggttcatgccattctcctgcctcagcctcccgagtagctgggactacaggcgcct

SEQ ID NO: 129213 - DNA, 80 bp, synthetic construct; identical to SEQ ID NO: 41203
  misc_feature 1..80: note = Artificially Synthesized Probe
  source 1..80: mol_type = other DNA

SEQ ID NO: 129214 - DNA, 80 bp, synthetic construct
  misc_feature 1..80: note = Artificially Synthesized Probe
  source 1..80: mol_type = other DNA
tgtatcccagcactttgggaggtcaaggcaggtggttcacttgaggtgaagagttcaagagcagcttgaccaacatggta

SEQ ID NO: 129215 - DNA, 80 bp, synthetic construct
  misc_feature 1..80: note = Artificially Synthesized Probe
  source 1..80: mol_type = other DNA
aaaaattagctgggcgtggtggcatgtgcctgtatttctagctactcgggaggctgaggcaggagaattgcttaaacctg

SEQ ID NO: 129216 - DNA, 80 bp, synthetic construct
  misc_feature 1..80: note = Artificially Synthesized Probe
  source 1..80: mol_type = other DNA
tgcttgaacccaggaggtggaggttgcagtgagcagatatcgcaccactgcactccagcctgggtgacagagggagactc

SEQ ID NO: 129217 - DNA, 80 bp, synthetic construct; identical to SEQ ID NO: 41204
  misc_feature 1..80: note = Artificially Synthesized Probe
  source 1..80: mol_type = other DNA

SEQ ID NO: 129218 - DNA, 80 bp, synthetic construct
  misc_feature 1..80: note = Artificially Synthesized Probe
  source 1..80: mol_type = other DNA
atccaccattgagctttatcttctcattagaaagtgcgtctaacccctatattttgagatcctggatttcagaatattgg

SEQ ID NO: 129219 - DNA, 80 bp, synthetic construct
  misc_feature 1..80: note = Artificially Synthesized Probe
  source 1..80: mol_type = other DNA
ctgctgctagcagattcatgtatataaattagaggcactaatcttggtctcctcttgtcataaaaattacttcctctgtg

SEQ ID NO: 129220 - DNA, 80 bp, synthetic construct
  misc_feature 1..80: note = Artificially Synthesized Probe
  source 1..80: mol_type = other DNA
tttacctgatttcttgttatcatgtgtcttacttcctgagaagatgcagggagcacatgacatagatgaactaagtttct

SEQ ID NO: 129221 - DNA, 80 bp, synthetic construct; identical to SEQ ID NO: 41205
  misc_feature 1..80: note = Artificially Synthesized Probe
  source 1..80: mol_type = other DNA

SEQ ID NO: 129222 - DNA, 80 bp, synthetic construct
  misc_feature 1..80: note = Artificially Synthesized Probe
  source 1..80: mol_type = other DNA
aggcaggaggatctgttgagcccacgagtttgagaccagcctgggcaacatatcaagaccccttttcaaaaaaagaaaaa

SEQ ID NO: 129223 - DNA, 80 bp, synthetic construct
  misc_feature 1..80: note = Artificially Synthesized Probe
  source 1..80: mol_type = other DNA
agctaatttatgtgtttttagtagagatgaggtttcaccacgttggtcaggctggtctcgaactcctgaccttgtgatct

SEQ ID NO: 129224 - DNA, 80 bp, synthetic construct
  misc_feature 1..80: note = Artificially Synthesized Probe
  source 1..80: mol_type = other DNA
ctgtcacctaggctggagtgcagtggtgtgatcttggctcactgcaacgtccgcctcccaggttcaagctgttcttctgc

SEQ ID NO: 129225 - DNA, 80 bp, synthetic construct
  misc_feature 1..80: note = Artificially Synthesized Probe
  source 1..80: mol_type = other DNA
ataggtgtgagtcaccgtgcctggccccaatgttgtcttttaaaattggttaattgaaatttagaattctttctcaaagt

SEQ ID NO: 129226 - DNA, 80 bp, synthetic construct
  misc_feature 1..80: note = Artificially Synthesized Probe
  source 1..80: mol_type = other DNA
gcctcagaagcacggcggtgggggagggggcggctcggggcccagcgcggggtccgggggaggcggcttcgggggttcgg

SEQ ID NO: 129227 - DNA, 80 bp, synthetic construct; identical to SEQ ID NO: 41206
  misc_feature 1..80: note = Artificially Synthesized Probe
  source 1..80: mol_type = other DNA

SEQ ID NO: 129228 - DNA, 80 bp, synthetic construct; identical to SEQ ID NO: 29838
  misc_feature 1..80: note = Artificially Synthesized Probe
  source 1..80: mol_type = other DNA

SEQ ID NO: 129229 - DNA, 80 bp, synthetic construct
  misc_feature 1..80: note = Artificially Synthesized Probe
  source 1..80: mol_type = other DNA
atacaggctatcctatgtaaggtataatgtaccatttaaaactgtctcaaatcacctgtggtgaaagatcattttgttta

SEQ ID NO: 129230 - DNA, 80 bp, synthetic construct
  misc_feature 1..80: note = Artificially Synthesized Probe
  source 1..80: mol_type = other DNA
agagttggagcttaccctcacacttctcagaaaagtaatgtaaataatactaatagtactgcagtgtaatgggccatcat

SEQ ID NO: 129231 - DNA, 80 bp, synthetic construct
  misc_feature 1..80: note = Artificially Synthesized Probe
  source 1..80: mol_type = other DNA
agggataaagtggtcatttagctcttgattgattgggtttagggtctttgtagaagagggagagagtattttgctggata

SEQ ID NO: 129232 - DNA, 80 bp, synthetic construct; identical to SEQ ID NO: 41207
  misc_feature 1..80: note = Artificially Synthesized Probe
  source 1..80: mol_type = other DNA

SEQ ID NO: 129233 - DNA, 80 bp, synthetic construct
  misc_feature 1..80: note = Artificially Synthesized Probe
  source 1..80: mol_type = other DNA
gaggtgggagaatcgtttgagcctggaaattggaggttgcagtgagcctagattgtgccactgtataccagtctgggtga

SEQ ID NO: 129234 - DNA, 80 bp, synthetic construct
  misc_feature 1..80: note = Artificially Synthesized Probe
  source 1..80: mol_type = other DNA
ggagtacaatgacgcgatctcggctcacggcagcctccgcctcccaggttcaagtgattctcctgcctcagcctcccaag

SEQ ID NO: 129235 - DNA, 80 bp, synthetic construct
  misc_feature 1..80: note = Artificially Synthesized Probe
  source 1..80: mol_type = other DNA
atgtaaggctttcgtagaacaggaaatgagaaccatttcagcagttagacaaaagatttggtaggtggggtctcagtaga

SEQ ID NO: 129236 - DNA, 80 bp, synthetic construct; identical to SEQ ID NO: 41208
  misc_feature 1..80: note = Artificially Synthesized Probe
  source 1..80: mol_type = other DNA

SEQ ID NO: 129237 - DNA, 80 bp, synthetic construct
  misc_feature 1..80: note = Artificially Synthesized Probe
  source 1..80: mol_type = other DNA
ttggctcactgcagcctccacctcctgggttcaagtgattctcctgcctcagcctcctgagtagctgggactacaggcgc

SEQ ID NO: 129238 - DNA, 80 bp, synthetic construct
  misc_feature 1..80: note = Artificially Synthesized Probe
  source 1..80: mol_type = other DNA
cccagctgatacttaagttgtggtggtggttcttaggtattttttttgttttgttttgttttttgagacagagtctcact

SEQ ID NO: 129239 - DNA, 80 bp, synthetic construct
  misc_feature 1..80: note = Artificially Synthesized Probe
  source 1..80: mol_type = other DNA
tttttgtatttttagtagagacggggtttcaccatcttggccaggctggtcttgaactcctgatctcatgatccacccgc

SEQ ID NO: 129240 - DNA, 80 bp, synthetic construct; identical to SEQ ID NO: 41209
  misc_feature 1..80: note = Artificially Synthesized Probe
  source 1..80: mol_type = other DNA

SEQ ID NO: 129241 - DNA, 80 bp, synthetic construct
  misc_feature 1..80: note = Artificially Synthesized Probe
  source 1..80: mol_type = other DNA
ttctcctgcctctgcctcccgagtagctgggactacaggcacacgacaccatgcctggctaatatttgtatttttagtag

SEQ ID NO: 129242 - DNA, 80 bp, synthetic construct
  misc_feature 1..80: note = Artificially Synthesized Probe
  source 1..80: mol_type = other DNA
tactttctagaacatacttttctagaacatactttctgtactactgttctagaaatgcctgtcaaaatcccaactctgta

SEQ ID NO: 129243 - DNA, 80 bp, synthetic construct
  misc_feature 1..80: note = Artificially Synthesized Probe
  source 1..80: mol_type = other DNA
gagtagctgagactacagccatgtgccaccatacccagctaatttttgtatttttagtagagactgggtttcaccatatt

SEQ ID NO: 129244 - DNA, 80 bp, synthetic construct; identical to SEQ ID NO: 41210
  misc_feature 1..80: note = Artificially Synthesized Probe
  source 1..80: mol_type = other DNA

SEQ ID NO: 129245 - DNA, 80 bp, synthetic construct
  misc_feature 1..80: note = Artificially Synthesized Probe
  source 1..80: mol_type = other DNA
aatttacagggcaacctcttcataatatgtccttatttccagtcattacttgttccttagtactctcttgccacaatgtc

SEQ ID NO: 129246 - DNA, 80 bp, synthetic construct; identical to SEQ ID NO: 41183
  misc_feature 1..80: note = Artificially Synthesized Probe
  source 1..80: mol_type = other DNA

SEQ ID NO: 129247 - DNA, 80 bp, synthetic construct
  misc_feature 1..80: note = Artificially Synthesized Probe
  source 1..80: mol_type = other DNA
ccatctgttctgtatagccctccataatctggtgtctgtacatgtcacactatggaaactatgctcaggagagttatgaa

SEQ ID NO: 129248 - DNA, 80 bp, synthetic construct
  misc_feature 1..80: note = Artificially Synthesized Probe
  source 1..80: mol_type = other DNA
tgaaaatagaaggagcactagttctagttcatgcttgcttttgcttttccatagcttctaaaactaacagtgaaaatgat

SEQ ID NO: 129249 - DNA, 80 bp, synthetic construct
  misc_feature 1..80: note = Artificially Synthesized Probe
  source 1..80: mol_type = other DNA
aaaatattcaaatttttttgcatggatttagctacgcttttcaaaatttccttttgatgaagtcattgactaaagcgtca

SEQ ID NO: 129250 - DNA, 80 bp, synthetic construct; identical to SEQ ID NO: 41211
  misc_feature 1..80: note = Artificially Synthesized Probe
  source 1..80: mol_type = other DNA

SEQ ID NO: 129251 - DNA, 80 bp, synthetic construct
  misc_feature 1..80: note = Artificially Synthesized Probe
  source 1..80: mol_type = other DNA
ttattttactacagagcattacaatgataaaatatttccttttttttttttttagcttgtcagctcatttgcagcttacg

SEQ ID NO: 129252 - DNA, 80 bp, synthetic construct
  misc_feature 1..80: note = Artificially Synthesized Probe
  source 1..80: mol_type = other DNA
ctttaaggtatgaaggctaatgatgaaatttgtttttggtggatgggggtgcagagtgaaggctggagtgcaatgttatg

SEQ ID NO: 129253 - DNA, 80 bp, synthetic construct; identical to SEQ ID NO: 41212
  misc_feature 1..80: note = Artificially Synthesized Probe
  source 1..80: mol_type = other DNA

SEQ ID NO: 129254 - DNA, 80 bp, synthetic construct
  misc_feature 1..80: note = Artificially Synthesized Probe
  source 1..80: mol_type = other DNA
attcaaaggaaattatatggtatattactccagtaaaagctcaaagcatgctggaaagaattagagttgttttaaaaatg

SEQ ID NO: 129255 - DNA, 80 bp, synthetic construct
  misc_feature 1..80: note = Artificially Synthesized Probe
  source 1..80: mol_type = other DNA
agccaggcgtggtggtgggtgcctgtagtcccagttacttgggagacttaggcagaagaatcacttgaacctgagagtcg

SEQ ID NO: 129256 - DNA, 80 bp, synthetic construct
  misc_feature 1..80: note = Artificially Synthesized Probe
  source 1..80: mol_type = other DNA
attattagaaacatgccaggttggttgtcttggtatcgtttagtaagaaacaaagattgaaaatgagtcctggtgggccg

SEQ ID NO: 129257 - DNA, 80 bp, synthetic construct
  misc_feature 1..80: note = Artificially Synthesized Probe
  source 1..80: mol_type = other DNA
tagagaaccttcagtataaaaagcatagatgaactttgtgaatgtatgccattgattgaataccttttgatcttactgtg

SEQ ID NO: 129258 - DNA, 80 bp, synthetic construct
  misc_feature 1..80: note = Artificially Synthesized Probe
  source 1..80: mol_type = other DNA
caccagtggcactccagcctggtgacagagcgagactctgtctaaaaaaaaagaaaaagaaaatgagtcctggcctggtg

SEQ ID NO: 129259 - DNA, 80 bp, synthetic construct; identical to SEQ ID NO: 41213
  misc_feature 1..80: note = Artificially Synthesized Probe
  source 1..80: mol_type = other DNA

SEQ ID NO: 129260 - DNA, 80 bp, synthetic construct
  misc_feature 1..80: note = Artificially Synthesized Probe
  source 1..80: mol_type = other DNA
tgagatggaagaatagcttgaggcttgcctgggcaacatagggagaacctgtctgtaagaagtaaaaaaagattaactgg

SEQ ID NO: 129261 - DNA, 80 bp, synthetic construct
  misc_feature 1..80: note = Artificially Synthesized Probe
  source 1..80: mol_type = other DNA
aaagacaaaaagacaaccttgccaattggccaattgtcaaaatgctctaatataaccattttttaatgactctttggggg

SEQ ID NO: 129262 - DNA, 80 bp, synthetic construct; identical to SEQ ID NO: 41214
  misc_feature 1..80: note = Artificially Synthesized Probe
  source 1..80: mol_type = other DNA

SEQ ID NO: 129263 - DNA, 80 bp, synthetic construct
  misc_feature 1..80: note = Artificially Synthesized Probe
  source 1..80: mol_type = other DNA
atctggtctattttttatatagaagtaacctgggtagcattacggtttttgttttccttaaattatttgtaatggtctgc

SEQ ID NO: 129264 - DNA, 80 bp, synthetic construct
  misc_feature 1..80: note = Artificially Synthesized Probe
  source 1..80: mol_type = other DNA
tttttggaaagtagtcatattaagcttttttcctatcttcatgacaaaatatataaagttcaacaattgctcagatttac

SEQ ID NO: 129265 - DNA, 80 bp, synthetic construct
  misc_feature 1..80: note = Artificially Synthesized Probe
  source 1..80: mol_type = other DNA
tccacctcccaagtatctgggattacaggcgggtgccaccacacaagctaattttttttcttctttttctgagatggagt

SEQ ID NO: 129266 - DNA, 80 bp, synthetic construct; identical to SEQ ID NO: 41215
  misc_feature 1..80: note = Artificially Synthesized Probe
  source 1..80: mol_type = other DNA

SEQ ID NO: 129267 - DNA, 80 bp, synthetic construct
  misc_feature 1..80: note = Artificially Synthesized Probe
  source 1..80: mol_type = other DNA
agatcatgtttggattttgtttcctattacctagagccaacacagatctatagatttcttcgaactcggaatctcatagc

SEQ ID NO: 129268 - DNA, 80 bp, synthetic construct
  misc_feature 1..80: note = Artificially Synthesized Probe
  source 1..80: mol_type = other DNA
ggcgtgagccaccacgcctatgttgaaaataactattctattttaactttgaaactagtagaagttggaagtagatatat

SEQ ID NO: 129269 - DNA, 80 bp, synthetic construct
  misc_feature 1..80: note = Artificially Synthesized Probe
  source 1..80: mol_type = other DNA
ttgcttgagcccaggagtttgaatagagtctgggcaacatagtgggaccctctctcaaaacaaggaaaaaaaaattttta

SEQ ID NO: 129270 - DNA, 80 bp, synthetic construct
  misc_feature 1..80: note = Artificially Synthesized Probe
  source 1..80: mol_type = other DNA
ggattacaggcatgagccactgcatccggcctcttgtttttaaatgaaaacttttgtttggcaattactacttgaaactg

SEQ ID NO: 129271 - DNA, 80 bp, synthetic construct; identical to SEQ ID NO: 41216
  misc_feature 1..80: note = Artificially Synthesized Probe
  source 1..80: mol_type = other DNA

SEQ ID NO: 129272 - DNA, 80 bp, synthetic construct
  misc_feature 1..80: note = Artificially Synthesized Probe
  source 1..80: mol_type = other DNA
gtgtttcatccccataatcccagctactctggagattgaatcatgagaattgcttgaacctgggaggtgcaggctgcagg

SEQ ID NO: 129273 - DNA, 80 bp, synthetic construct
  misc_feature 1..80: note = Artificially Synthesized Probe
  source 1..80: mol_type = other DNA
gcggaggttgcagtgagtcaagaacattccattgcactctagcctgggcaacagagcaagactctctctctcaaaaaaaa

SEQ ID NO: 129274 - DNA, 80 bp, synthetic construct
  misc_feature 1..80: note = Artificially Synthesized Probe
  source 1..80: mol_type = other DNA
aaaaacaagttatggaggactactctagaaccttaatttgtaaagcctgtgttaatttacatagagaatatagactatgg

SEQ ID NO: 129275 - DNA, 80 bp, synthetic construct; identical to SEQ ID NO: 41184
  misc_feature 1..80: note = Artificially Synthesized Probe
  source 1..80: mol_type = other DNA

SEQ ID NO: 129276 - DNA, 80 bp, synthetic construct; identical to SEQ ID NO: 41217
  misc_feature 1..80: note = Artificially Synthesized Probe
  source 1..80: mol_type = other DNA

SEQ ID NO: 129277 - DNA, 80 bp, synthetic construct
  misc_feature 1..80: note = Artificially Synthesized Probe
  source 1..80: mol_type = other DNA
agtttcgctcttgttgcccaggctggagtgcaatggtgtgatctcagcttactgcaacctctgctccccaacccctggtt

SEQ ID NO: 129278 - DNA, 80 bp, synthetic construct
  misc_feature 1..80: note = Artificially Synthesized Probe
  source 1..80: mol_type = other DNA
agtgctgcgattataggcgtgagccaccacacctggccctcctgcaactgttttcatttatgctttctgccaagaagctt

SEQ ID NO: 129279 - DNA, 80 bp, synthetic construct
  misc_feature 1..80: note = Artificially Synthesized Probe
  source 1..80: mol_type = other DNA
atagccagacccttgtctgaaaaacaaacaaaaatattaaatcttcaaattagaaatattcagtaaatatggccgggtgt

SEQ ID NO: 129280 - DNA, 80 bp, synthetic construct
  misc_feature 1..80: note = Artificially Synthesized Probe
  source 1..80: mol_type = other DNA
atacttgggaagctgaggtgggaggatcactttaacccgggaggcagaagttgcagtgaaccaagatcgccctactgcac

SEQ ID NO: 129281 - DNA, 80 bp, synthetic construct; identical to SEQ ID NO: 41218
  misc_feature 1..80: note = Artificially Synthesized Probe
  source 1..80: mol_type = other DNA

SEQ ID NO: 129282 - DNA, 80 bp, synthetic construct
  misc_feature 1..80: note = Artificially Synthesized Probe
  source 1..80: mol_type = other DNA
gatattcttgccttggcctcccaaagtgttgggattacaggcatgagccactatgcctggccagtgaatattttttatac

SEQ ID NO: 129283 - DNA, 80 bp, synthetic construct
  misc_feature 1..80: note = Artificially Synthesized Probe
  source 1..80: mol_type = other DNA
aatggaaaaaaaaattacagcatataggacggtaattatatttgttttgtgagtggtttatttacactatatataaaggc

SEQ ID NO: 129284 - DNA, 80 bp, synthetic construct
  misc_feature 1..80: note = Artificially Synthesized Probe
  source 1..80: mol_type = other DNA
tgaaaactgaagtgagagagtgactggttgaattggttgcacagtggttttctatagtataatctttgtaagtctcaggt

SEQ ID NO: 129285 - DNA, 80 bp, synthetic construct; identical to SEQ ID NO: 41219
  misc_feature 1..80: note = Artificially Synthesized Probe
  source 1..80: mol_type = other DNA

SEQ ID NO: 129286 - DNA, 80 bp, synthetic construct
  misc_feature 1..80: note = Artificially Synthesized Probe
  source 1..80: mol_type = other DNA
ctgataacctcttttgccaactcgcatatctgtgtagtttttctagtcttttaataagtgtctgtacaaaactttctcat

SEQ ID NO: 129287 - DNA, 80 bp, synthetic construct
  misc_feature 1..80: note = Artificially Synthesized Probe
  source 1..80: mol_type = other DNA
aggagtctggaaatggagaagctatgttttagcatctggcataaattcagttgctgttctaccatttcaatctgttagcg

SEQ ID NO: 129288 - DNA, 80 bp, synthetic construct
  misc_feature 1..80: note = Artificially Synthesized Probe
  source 1..80: mol_type = other DNA
ggtgaagttatttcaccatagaaacaagtgttaagatgtttcctggtcaaccgatcaaagccaacatatgtacctttagt

SEQ ID NO: 129289 - DNA, 80 bp, synthetic construct
  misc_feature 1..80: note = Artificially Synthesized Probe
  source 1..80: mol_type = other DNA
taaggcaccatggaggcagcagtggaactttatttttgaaagtttatgtaaaggccggttgccgtagctcacacctataa

SEQ ID NO: 129290 - DNA, 80 bp, synthetic construct; identical to SEQ ID NO: 41220
  misc_feature 1..80: note = Artificially Synthesized Probe
  source 1..80: mol_type = other DNA

SEQ ID NO: 129291 - DNA, 80 bp, synthetic construct
  misc_feature 1..80: note = Artificially Synthesized Probe
  source 1..80: mol_type = other DNA
aaaaaattagccaggcgtggtgatgggcacctgtagtgccagctactcaggaggctgaggcaggagaatggtatgaaccc

SEQ ID NO: 129292 - DNA, 80 bp, synthetic construct
  misc_feature 1..80: note = Artificially Synthesized Probe
  source 1..80: mol_type = other DNA
tatgttcaaaaaaatgtatcggggtaatcattttcctggaagaatatacacagccaactgctagtattagtcatctccgg

SEQ ID NO: 129293 - DNA, 80 bp, synthetic construct
  misc_feature 1..80: note = Artificially Synthesized Probe
  source 1..80: mol_type = other DNA
atgcattttcagtgtaactaatcatacaataacagaatattactcagaatatgatcattggtagataaaaccagttttgt

SEQ ID NO: 129294 - DNA, 80 bp, synthetic construct
  misc_feature 1..80: note = Artificially Synthesized Probe
  source 1..80: mol_type = other DNA
aagagatttgataaaagtacatgagtttaacattttagcatggtttttttgttgttgctaaaaagccttaccagagagat

SEQ ID NO: 129295 - DNA, 80 bp, synthetic construct; identical to SEQ ID NO: 41221
  misc_feature 1..80: note = Artificially Synthesized Probe
  source 1..80: mol_type = other DNA

SEQ ID NO: 129296 - DNA, 80 bp, synthetic construct
  misc_feature 1..80: note = Artificially Synthesized Probe
  source 1..80: mol_type = other DNA
aaacaaaaattagctgggcgtggtggtgtgtgcctgtaatcccagttacttgcgaggctgaggcaggagaattgcttgag

SEQ ID NO: 129297 - DNA, 80 bp, synthetic construct
  misc_feature 1..80: note = Artificially Synthesized Probe
  source 1..80: mol_type = other DNA
tttgaatcctgacctcaatcaaacaaaacccggaaatttcccgtcccttgcagtttccagtaatgaatttgaacctagta

SEQ ID NO: 129298 - DNA, 80 bp, synthetic construct
  misc_feature 1..80: note = Artificially Synthesized Probe
  source 1..80: mol_type = other DNA
ttgtaccagtgttccttcatgatagtcatggtgctgagtcttaaagcaaacagtgaattcacctccacctcaacattttg

SEQ ID NO: 129299 - DNA, 80 bp, synthetic construct
  misc_feature 1..80: note = Artificially Synthesized Probe
  source 1..80: mol_type = other DNA
gaggtattcattcaacaaacacataggtgctggggatgatttaatttaatcgaagatgattaaaacattcagtcctatcc

SEQ ID NO: 129300 - DNA, 80 bp, synthetic construct; identical to SEQ ID NO: 41222
  misc_feature 1..80: note = Artificially Synthesized Probe
  source 1..80: mol_type = other DNA

SEQ ID NO: 129301 - DNA, 80 bp, synthetic construct
  misc_feature 1..80: note = Artificially Synthesized Probe
  source 1..80: mol_type = other DNA
gatttatgagaaatgtttgttaaatttagatgtcaatgaagagcttccagccagaagaaaacgaaatcgtgaggatgggg

SEQ ID NO: 129302 - DNA, 80 bp, synthetic construct
  misc_feature 1..80: note = Artificially Synthesized Probe
  source 1..80: mol_type = other DNA
aaaagacatttgttgcacaaatgacagtatttgataaaaacaggtaatgttgatgaacaagtgaggctcccacaatgttc

SEQ ID NO: 129303 - DNA, 80 bp, synthetic construct; identical to SEQ ID NO: 41223
  misc_feature 1..80: note = Artificially Synthesized Probe
  source 1..80: mol_type = other DNA

SEQ ID NO: 129304 - DNA, 80 bp, synthetic construct
  misc_feature 1..80: note = Artificially Synthesized Probe
  source 1..80: mol_type = other DNA
atttgagaagagacttaaatggactgggccctacgtaaatcttggggttatgtgtttattaaaaattaaggaagaggagc

SEQ ID NO: 129305 - DNA, 80 bp, synthetic construct
  misc_feature 1..80: note = Artificially Synthesized Probe
  source 1..80: mol_type = other DNA
ttttagaatagtgtctcactctatcacccaggcaggagtgcagtggcgcaatctctgctcactgcaacccctctgccacc

SEQ ID NO: 129306 - DNA, 80 bp, synthetic construct
  misc_feature 1..80: note = Artificially Synthesized Probe
  source 1..80: mol_type = other DNA
cctcccaaagtgctgggattacaggcgtgagccaccatgcctaggcgagaccccatcttttttaaaaaaagaaagaaggc

SEQ ID NO: 129307 - DNA, 80 bp, synthetic construct
  misc_feature 1..80: note = Artificially Synthesized Probe
  source 1..80: mol_type = other DNA
ccagctactcaggaggccgaggcaggggaatcgcttgaacctgggaggcagaggttgcagtgagccgagatcacaccact

SEQ ID NO: 129308 - DNA, 80 bp, synthetic construct
  misc_feature 1..80: note = Artificially Synthesized Probe
  source 1..80: mol_type = other DNA
gttatttctctttttttgtttgtttgtttttttttgagacagagtgtctgtccaggttggagtgcagtggcgtgatctca

SEQ ID NO: 129309 - DNA, 80 bp, synthetic construct; identical to SEQ ID NO: 41224
  misc_feature 1..80: note = Artificially Synthesized Probe
  source 1..80: mol_type = other DNA

SEQ ID NO: 129310 - DNA, 80 bp, synthetic construct
  misc_feature 1..80: note = Artificially Synthesized Probe
  source 1..80: mol_type = other DNA
aggctggagttcagtggcatgatctcagctcactgcaacctctgcctcctgggttcaagcgattcacctgcctcagcctc

SEQ ID NO: 129311 - DNA, 80 bp, synthetic construct
  misc_feature 1..80: note = Artificially Synthesized Probe
  source 1..80: mol_type = other DNA
ccaccgtgcccggccagtgtctttttaaagtcagaaattttattgtggatcgaagatttaaatggaaaacaatagaacca

SEQ ID NO: 129312 - DNA, 80 bp, synthetic construct; identical to SEQ ID NO: 41225
  misc_feature 1..80: note = Artificially Synthesized Probe
  source 1..80: mol_type = other DNA

SEQ ID NO: 129313 - DNA, 80 bp, synthetic construct
  misc_feature 1..80: note = Artificially Synthesized Probe
  source 1..80: mol_type = other DNA
cccatctctactaaaaatacaaaaattagctgggcctggtggtgcgtgcctgtagtcccagctactcgggaggctgaggc

SEQ ID NO: 129314 - DNA, 80 bp, synthetic construct
  misc_feature 1..80: note = Artificially Synthesized Probe
  source 1..80: mol_type = other DNA
aaaacgataggaaagttgaaagaatactaaagtcatttaatatccacatacccttcatctagattgtatctgttgttaac

SEQ ID NO: 129315 - DNA, 80 bp, synthetic construct
  misc_feature 1..80: note = Artificially Synthesized Probe
  source 1..80: mol_type = other DNA
aatacaaatacaatactatctccccagttgacctcaataatgtcctttataatttgtcctgtccccaccccgattccata

SEQ ID NO: 129316 - DNA, 80 bp, synthetic construct
  misc_feature 1..80: note = Artificially Synthesized Probe
  source 1..80: mol_type = other DNA
ttaggacttctgtggtgatttcctcttgattagcttcaggttaaatatttttggcagggattctaatgagtgatgtgttc

SEQ ID NO: 129317 - DNA, 80 bp, synthetic construct; identical to SEQ ID NO: 41226
  misc_feature 1..80: note = Artificially Synthesized Probe
  source 1..80: mol_type = other DNA

SEQ ID NO: 129318 - DNA, 80 bp, synthetic construct
  misc_feature 1..80: note = Artificially Synthesized Probe
  source 1..80: mol_type = other DNA
ggtgactgatacctgtaaccctaacactttgggagtccaaggcgggaagactatttgagcccaggagtttgagaccagtt

SEQ ID NO: 129319 - DNA, 80 bp, synthetic construct; identical to SEQ ID NO: 41185
  misc_feature 1..80: note = Artificially Synthesized Probe
  source 1..80: mol_type = other DNA

SEQ ID NO: 129320 - DNA, 80 bp, synthetic construct
  misc_feature 1..80: note = Artificially Synthesized Probe
  source 1..80: mol_type = other DNA
tactgttattttaatgctcaaattgtctcatattttgtcaggaggagcccttctaagtaggcttctgtgtcctgttttgt

SEQ ID NO: 129321 - DNA, 80 bp, synthetic construct
  misc_feature 1..80: note = Artificially Synthesized Probe
  source 1..80: mol_type = other DNA
ctctgcctcccgggttcaagcgattctcctgcctcagcctcccgagtagctgggattaaggcatgcgccaccatgcctgg

SEQ ID NO: 129322 - DNA, 80 bp, synthetic construct; identical to SEQ ID NO: 41227
  misc_feature 1..80: note = Artificially Synthesized Probe
  source 1..80: mol_type = other DNA

SEQ ID NO: 129323 - DNA, 80 bp, synthetic construct
  misc_feature 1..80: note = Artificially Synthesized Probe
  source 1..80: mol_type = other DNA
acacagcgactgtcaaaaaaaaaaaccaaaaaatccagttaattccttgaaataataaccaatattcaaaagccttatag

SEQ ID NO: 129324 - DNA, 80 bp, synthetic construct
  misc_feature 1..80: note = Artificially Synthesized Probe
  source 1..80: mol_type = other DNA
aattttaaaagaccactgcccaatagaagaatgggcaaaagaaacaataagaagtttaccaaaatagatacatatggttc

SEQ ID NO: 129325 - DNA, 80 bp, synthetic construct
  misc_feature 1..80: note = Artificially Synthesized Probe
  source 1..80: mol_type = other DNA
gtaggtatcaaatgtacacccacaaaatggaatagtacgtatctatgtaaaagcataaggaagctcctttttgatttaga

SEQ ID NO: 129326 - DNA, 80 bp, synthetic construct; identical to SEQ ID NO: 41228
  misc_feature 1..80: note = Artificially Synthesized Probe
  source 1..80: mol_type = other DNA

SEQ ID NO: 129327 - DNA, 80 bp, synthetic construct
  misc_feature 1..80: note = Artificially Synthesized Probe
  source 1..80: mol_type = other DNA
tgaagagaagccagtttcttgatatatacagttaattactgagcatggttgaagaatggtgtttagagtagtagtggtta

SEQ ID NO: 129328 - DNA, 80 bp, synthetic construct
  misc_feature 1..80: note = Artificially Synthesized Probe
  source 1..80: mol_type = other DNA
tagttaccagattcgtcattataataatcagtttactggtcaagtataaaagtaaaggattctagttcaaacaattacag

SEQ ID NO: 129329 - DNA, 80 bp, synthetic construct
  misc_feature 1..80: note = Artificially Synthesized Probe
  source 1..80: mol_type = other DNA
gagtttaagaccagcctggccaagatgctgaaacccatctctactaaaaatacaaaaattagctgggcatagtggcacgc

SEQ ID NO: 129330 - DNA, 80 bp, synthetic construct
  misc_feature 1..80: note = Artificially Synthesized Probe
  source 1..80: mol_type = other DNA
cggagtctcgctctgtctcccaggctggagtgcagtggcgcaacctcggctcactgcaacctctgcctcccagattcaag

SEQ ID NO: 129331 - DNA, 80 bp, synthetic construct; identical to SEQ ID NO: 41229
  misc_feature 1..80: note = Artificially Synthesized Probe
  source 1..80: mol_type = other DNA

SEQ ID NO: 129332 - DNA, 80 bp, synthetic construct
  misc_feature 1..80: note = Artificially Synthesized Probe
  source 1..80: mol_type = other DNA
gatgtagaatttgtgtacttatagtaataacacaggttactttaaagtatatgtgtttgtctaacaggcgcttacagctt

SEQ ID NO: 129333 - DNA, 80 bp, synthetic construct
  misc_feature 1..80: note = Artificially Synthesized Probe
  source 1..80: mol_type = other DNA
gttatagttatgaactcccatttttgactgatgttttcttccccaaatgctaattcatgttggaagtagagtcctttgtt

SEQ ID NO: 129334 - DNA, 80 bp, synthetic construct
  misc_feature 1..80: note = Artificially Synthesized Probe
  source 1..80: mol_type = other DNA
ttcaagcgattctcctgtctcagcctcccaagtagctgtgattctgtgattctgcgtgccaccacgcctggctaattttt

SEQ ID NO: 129335 - DNA, 80 bp, synthetic construct; identical to SEQ ID NO: 41230
  misc_feature 1..80: note = Artificially Synthesized Probe
  source 1..80: mol_type = other DNA

SEQ ID NO: 129336 - DNA, 80 bp, synthetic construct
  misc_feature 1..80: note = Artificially Synthesized Probe
  source 1..80: mol_type = other DNA
gcagaatttagattaagcgtacttaagataactcttttaagagataaagaggaatccatgcatttcttaaataggtagat

SEQ ID NO: 129337 - DNA, 80 bp, synthetic construct
  misc_feature 1..80: note = Artificially Synthesized Probe
  source 1..80: mol_type = other DNA
ttgagaatttttacttaccagttttagtatgatatacgatatacagtagtacataccataaagttaagagaacttaaacc

SEQ ID NO: 129338 - DNA, 80 bp, synthetic construct; identical to SEQ ID NO: 41231
  misc_feature 1..80: note = Artificially Synthesized Probe
  source 1..80: mol_type = other DNA

SEQ ID NO: 129339 - DNA, 80 bp, synthetic construct
  misc_feature 1..80: note = Artificially Synthesized Probe
  source 1..80: mol_type = other DNA
agtatctgtaacacaaaatgctaatatgaatacataatattgtgaattataaaacaagaaaaagatacgcagtctaataa

SEQ ID NO: 129340 - DNA, 80 bp, synthetic construct
  misc_feature 1..80: note = Artificially Synthesized Probe
  source 1..80: mol_type = other DNA
tgttttagggacgtgaggacacatatactctcaaataatattttgatgtaacagtaagttggggccgggctcagtggctc

SEQ ID NO: 129341 - DNA, 80 bp, synthetic construct
  misc_feature 1..80: note = Artificially Synthesized Probe
  source 1..80: mol_type = other DNA
gtgctggcattacaggagtgagccaccatgcccagcctgaccttctttttctttttttgagatggagtttcgctcttgtc

SEQ ID NO: 129342 - DNA, 80 bp, synthetic construct
  misc_feature 1..80: note = Artificially Synthesized Probe
  source 1..80: mol_type = other DNA
acttgggaggtttaggagtattacttgaacctgggaggcagaggtttcagtgagctgagattttgccacttcactttatc

SEQ ID NO: 129343 - DNA, 80 bp, synthetic construct
  misc_feature 1..80: note = Artificially Synthesized Probe
  source 1..80: mol_type = other DNA
ccacgagcttttcctccaggcctttgagagtgagtgtgtgcgaggctttgagggcaggaagacccactctgccaacaccg

SEQ ID NO: 129344 - DNA, 80 bp, synthetic construct; identical to SEQ ID NO: 41232
  misc_feature 1..80: note = Artificially Synthesized Probe
  source 1..80: mol_type = other DNA

SEQ ID NO: 129345 - DNA, 80 bp, synthetic construct
  misc_feature 1..80: note = Artificially Synthesized Probe
  source 1..80: mol_type = other DNA
ctgcatggatttatctttatgatctttttcattttaaatttcttgttttaaagtatgtttttattcatgagactataagg

SEQ ID NO: 129346 - DNA, 80 bp, synthetic construct
  misc_feature 1..80: note = Artificially Synthesized Probe
  source 1..80: mol_type = other DNA
ccagcctcagcctcctgagtagctgcgatcacaggtgtgcaccaccatgcccagctgattttcatatttttagtagagat

SEQ ID NO: 129347 - DNA, 80 bp, synthetic construct
  misc_feature 1..80: note = Artificially Synthesized Probe
  source 1..80: mol_type = other DNA
gaggtggagtgcaatggcgcggtctcagttcactgcaacctctgcctcctgggttcaagcaattctcttgcctcagcctc

SEQ ID NO: 129348 - DNA, 80 bp, synthetic construct; identical to SEQ ID NO: 41233
  misc_feature 1..80: note = Artificially Synthesized Probe
  source 1..80: mol_type = other DNA

SEQ ID NO: 129349 - DNA, 80 bp, synthetic construct
  misc_feature 1..80: note = Artificially Synthesized Probe
  source 1..80: mol_type = other DNA
tgtatcaagtattttataagataaattcctgtggactgctgtgtccaaactagtctctgaacacacttttactacattct

SEQ ID NO: 129350 - DNA, 80 bp, synthetic construct
  misc_feature 1..80: note = Artificially Synthesized Probe
  source 1..80: mol_type = other DNA
caggcgccagccaccatgcccagctaattttttgtattttagtagagacggggtttcaccatgttgtccaggatggtctc

SEQ ID NO: 129351 - DNA, 80 bp, synthetic construct
  misc_feature 1..80: note = Artificially Synthesized Probe
  source 1..80: mol_type = other DNA
atatagaaggagtttaggcctctgtggcagtaaaataaattgaagctcattgaagactacttgatctctcctatatttga

SEQ ID NO: 129352 - DNA, 80 bp, synthetic construct
  misc_feature 1..80: note = Artificially Synthesized Probe
  source 1..80: mol_type = other DNA
ccagctgattttttgtatttttagtagagatggggtttcactatgttggccaagctggtctcaaactcctgacttcaaga

SEQ ID NO: 129353 - DNA, 80 bp, synthetic construct
  misc_feature 1..80: note = Artificially Synthesized Probe
  source 1..80: mol_type = other DNA
atgagaaacgaaaggataggagtcaaatataattccaaaatttttagcttagggtcactagtagaatgataatgacaaga

SEQ ID NO: 129354 - DNA, 80 bp, synthetic construct; identical to SEQ ID NO: 41234
  misc_feature 1..80: note = Artificially Synthesized Probe
  source 1..80: mol_type = other DNA

SEQ ID NO: 129355 - DNA, 80 bp, synthetic construct
  misc_feature 1..80: note = Artificially Synthesized Probe
  source 1..80: mol_type = other DNA
gtaattggtcacctaagagcaaaggttgcatgctggtgggctttgggtaccacaattttatttttaagacatttcaaggc

SEQ ID NO: 129356 - DNA, 80 bp, synthetic construct
  misc_feature 1..80: note = Artificially Synthesized Probe
  source 1..80: mol_type = other DNA
cctgtaatcccagctacttgggaggctgagacaggagaattgcttgaacctgggagggggaggttgcagtgagctgagac

SEQ ID NO: 129357 - DNA, 80 bp, synthetic construct
  misc_feature 1..80: note = Artificially Synthesized Probe
  source 1..80: mol_type = other DNA
gacgagtgttttcacatggcaacaattcacctgttgctgatcagtggtcgcctcttttagacagcctgtgctctccagtt

SEQ ID NO: 129358 - DNA, 80 bp, synthetic construct; identical to SEQ ID NO: 41235
  misc_feature 1..80: note = Artificially Synthesized Probe
  source 1..80: mol_type = other DNA

SEQ ID NO: 129359 - DNA, 80 bp, synthetic construct
  misc_feature 1..80: note = Artificially Synthesized Probe
  source 1..80: mol_type = other DNA
tggtttgcagagttaggtcttgtgctttagattaattcatttgtgttttgctttatgtgattcttctttttttttttttg

SEQ ID NO: 129360 - DNA, 80 bp, synthetic construct
  misc_feature 1..80: note = Artificially Synthesized Probe
  source 1..80: mol_type = other DNA
ttagtagagacagggttggccgagcgcagtggctcaacacctgtaatctcagcatttgggagaccgaggcgggcggatca

SEQ ID NO: 129361 - DNA, 80 bp, synthetic construct
  misc_feature 1..80: note = Artificially Synthesized Probe
  source 1..80: mol_type = other DNA
cagccgagattgcaccactgcactccagcctgggagacagagcaatactccatctcaaaaaaaataaataaaagtaagtc

SEQ ID NO: 129362 - DNA, 80 bp, synthetic construct; identical to SEQ ID NO: 41236
  misc_feature 1..80: note = Artificially Synthesized Probe
  source 1..80: mol_type = other DNA

SEQ ID NO: 129363 - DNA, 80 bp, synthetic construct
  misc_feature 1..80: note = Artificially Synthesized Probe
  source 1..80: mol_type = other DNA
tgattattatgtgtaatttgaattaggtcctgtaatggtgggttcagaaagtctcattttatatctttggtttttttttt

SEQ ID NO: 129364 - DNA, 80 bp, synthetic construct
  misc_feature 1..80: note = Artificially Synthesized Probe
  source 1..80: mol_type = other DNA
gtcctcatggtaagttagagcaagtttttccactaaacaaatttgccagaaacttacaagaaaactattggttttcagat

SEQ ID NO: 129365 - DNA, 80 bp, synthetic construct
  misc_feature 1..80: note = Artificially Synthesized Probe
  source 1..80: mol_type = other DNA
tggttcatgccattctcctgcctcagcctcctgagtagctggcattacaggcgcctgccaccacgaccagctaatttttt

SEQ ID NO: 129366 - DNA, 80 bp, synthetic construct; identical to SEQ ID NO: 41237
  misc_feature 1..80: note = Artificially Synthesized Probe
  source 1..80: mol_type = other DNA

SEQ ID NO: 129367 - DNA, 80 bp, synthetic construct
  misc_feature 1..80: note = Artificially Synthesized Probe
  source 1..80: mol_type = other DNA
accgtgttagccaggatagtctcaatctcctgacctcatggtctgcctgcctcggcctcccaaagtgctgagattacagg

SEQ ID NO: 129368 - DNA, 80 bp, synthetic construct
  misc_feature 1..80: note = Artificially Synthesized Probe
  source 1..80: mol_type = other DNA
gcagtgcggtgacgtgatctcggctcagcacaacctccgcctcccggtttgaagcaattctcctgcctcagcctcccgag

SEQ ID NO: 129369 - DNA, 80 bp, synthetic construct
  misc_feature 1..80: note = Artificially Synthesized Probe
  source 1..80: mol_type = other DNA
atcgcgcccagccagtttttaagaggaaaaaacatttacaaatagagttaactttctgctgagtttaaggcccaagttgc

SEQ ID NO: 129370 - DNA, 80 bp, synthetic construct
  misc_feature 1..80: note = Artificially Synthesized Probe
  source 1..80: mol_type = other DNA
ctcgtgccaccacgccctgttaatttttgtatttttcggtagagatgggattttgccatcacccatgctggtctcaaact

SEQ ID NO: 129371 - DNA, 80 bp, synthetic construct; identical to SEQ ID NO: 41238
  misc_feature 1..80: note = Artificially Synthesized Probe
  source 1..80: mol_type = other DNA

SEQ ID NO: 129372 - DNA, 80 bp, synthetic construct
  misc_feature 1..80: note = Artificially Synthesized Probe
  source 1..80: mol_type = other DNA
aaataagaaatggcttgtgtcaggggaaaggttttgcaagtaaactgtagtatgggcacttctcagaatactcagaaacc

SEQ ID NO: 129373 - DNA, 80 bp, synthetic construct
  misc_feature 1..80: note = Artificially Synthesized Probe
  source 1..80: mol_type = other DNA
tattttttttggagacggagtcttgctccgtcacccaggctggagtgcagtggcgaaacctcagctcactgcaccctctg

SEQ ID NO: 129374 - DNA, 80 bp, synthetic construct; identical to SEQ ID NO: 41186
  misc_feature 1..80: note = Artificially Synthesized Probe
  source 1..80: mol_type = other DNA

SEQ ID NO: 129375 - DNA, 80 bp, synthetic construct
  misc_feature 1..80: note = Artificially Synthesized Probe
  source 1..80: mol_type = other DNA
ggcctcccaaagtgctgggattacagacatgagccaccgtgcccagcctgaaataattttaatataataagtataactta

SEQ ID NO: 129376 - DNA, 80 bp, synthetic construct; identical to SEQ ID NO: 41239
  misc_feature 1..80: note = Artificially Synthesized Probe
  source 1..80: mol_type = other DNA

SEQ ID NO: 129377 - DNA, 80 bp, synthetic construct
  misc_feature 1..80: note = Artificially Synthesized Probe
  source 1..80: mol_type = other DNA
caacaacaaaaaaacacattctgacctcagagtgcttaaaacagcatggtaatgacatataattacttggagttactttt

SEQ ID NO: 129378 - DNA, 80 bp, synthetic construct
  misc_feature 1..80: note = Artificially Synthesized Probe
  source 1..80: mol_type = other DNA
cccgagtagctgggactacaggtgcccaccaccatgcccagctaatttttttgtatttttagtagagatggggtttcact

SEQ ID NO: 129379 - DNA, 80 bp, synthetic construct
  misc_feature 1..80: note = Artificially Synthesized Probe
  source 1..80: mol_type = other DNA
gtcttggctcactgcaacctccgcctcccgggttcaagcaattctgcttccgcctcctgagtagctgggattgcaggtgc

SEQ ID NO: 129380 - DNA, 80 bp, synthetic construct; identical to SEQ ID NO: 41240
  misc_feature 1..80: note = Artificially Synthesized Probe
  source 1..80: mol_type = other DNA

SEQ ID NO: 129381 - DNA, 80 bp, synthetic construct
  misc_feature 1..80: note = Artificially Synthesized Probe
  source 1..80: mol_type = other DNA
atcattgactacagatctacaaacaagaaaagaaaaggatactccaaatgaaaaccgacaaaaattaagaatattttatc

SEQ ID NO: 129382 - DNA, 80 bp, synthetic construct
  misc_feature 1..80: note = Artificially Synthesized Probe
  source 1..80: mol_type = other DNA
gctcactgcaacctctgcctcctgggttcaacctgattctcacgcctcagcctcacgagtaactaattacaagcacatgc

SEQ ID NO: 129383 - DNA, 80 bp, synthetic construct; identical to SEQ ID NO: 41241
  misc_feature 1..80: note = Artificially Synthesized Probe
  source 1..80: mol_type = other DNA

SEQ ID NO: 129384 - DNA, 80 bp, synthetic construct
  misc_feature 1..80: note = Artificially Synthesized Probe
  source 1..80: mol_type = other DNA
ctctgaactgccgcaaactttatagtttactcaagcatcttaaactctgccatagcagatttatcttcaactatgttgtg

SEQ ID NO: 129385 - DNA, 80 bp, synthetic construct
  misc_feature 1..80: note = Artificially Synthesized Probe
  source 1..80: mol_type = other DNA
aacaaatttctgtatttgatagattgccgtatatatggattacagtgaatgattcagagttgacatatatttggaattat

SEQ ID NO: 129386 - DNA, 80 bp, synthetic construct
  misc_feature 1..80: note = Artificially Synthesized Probe
  source 1..80: mol_type = other DNA
tggggtctggaggtggaagacagcttatttttgctgtgtaacatttagtacttaaccatacataattatcaatgcaagtt

SEQ ID NO: 129387 - DNA, 80 bp, synthetic construct
  misc_feature 1..80: note = Artificially Synthesized Probe
  source 1..80: mol_type = other DNA
aataaatgacatagttaagattttaacacattttgttgaccccaggtcttctgactgcctgtttaccatgctggtgtgcc

SEQ ID NO: 129388 - DNA, 80 bp, synthetic construct; identical to SEQ ID NO: 41242
  misc_feature 1..80: note = Artificially Synthesized Probe
  source 1..80: mol_type = other DNA

SEQ ID NO: 129389 - DNA, 80 bp, synthetic construct
  misc_feature 1..80: note = Artificially Synthesized Probe
  source 1..80: mol_type = other DNA
agggcatataagaaaagtttaagctctgatttttactgatgttggaggaacaaaggagccagatgaagctactagttcgt

SEQ ID NO: 129390 - DNA, 80 bp, synthetic construct
  misc_feature 1..80: note = Artificially Synthesized Probe
  source 1..80: mol_type = other DNA
taagttttaatgatgttaatgtcactactgctgcagtggtttgggattaaagaattctgtcagaagtttctggataattg

SEQ ID NO: 129391 - DNA, 80 bp, synthetic construct
  misc_feature 1..80: note = Artificially Synthesized Probe
  source 1..80: mol_type = other DNA
gcaggtgtatgcatatgtaaccagtgttaacggcttttctgctttgtgaatatacatgagttagaatacacagttttgac

SEQ ID NO: 129392 - DNA, 80 bp, synthetic construct
  misc_feature 1..80: note = Artificially Synthesized Probe
  source 1..80: mol_type = other DNA
aactagtgggggtgtgcctctaatactattgttttatggttagttttataaaagggtgatgttgcagattatcacagatc

SEQ ID NO: 129393 - DNA, 80 bp, synthetic construct; identical to SEQ ID NO: 41243
  misc_feature 1..80: note = Artificially Synthesized Probe
  source 1..80: mol_type = other DNA

SEQ ID NO: 129394 - DNA, 80 bp, synthetic construct
  misc_feature 1..80: note = Artificially Synthesized Probe
  source 1..80: mol_type = other DNA
gaactttttttaaaaaaaaaaaaaggaatccggaaatgtacaggttttaaaattatgtcactttaaaagttaaccaagtt

SEQ ID NO: 129395 - DNA, 80 bp, synthetic construct
  misc_feature 1..80: note = Artificially Synthesized Probe
  source 1..80: mol_type = other DNA
cccagctattcagttggctgaggcaggagagtcgcttaaccccaggagatggaggttgcagtgagccaagattgcaccac

SEQ ID NO: 129396 - DNA, 80 bp, synthetic construct
  misc_feature 1..80: note = Artificially Synthesized Probe
  source 1..80: mol_type = other DNA
acggcaggtgtgctggctcacacctgtaatcccaacactttggtagggcgagttgggctgatcacctgaggtcaggagtt

SEQ ID NO: 129397 - DNA, 80 bp, synthetic construct; identical to SEQ ID NO: 41244
  misc_feature 1..80: note = Artificially Synthesized Probe
  source 1..80: mol_type = other DNA

SEQ ID NO: 129398 - DNA, 80 bp, synthetic construct
  misc_feature 1..80: note = Artificially Synthesized Probe
  source 1..80: mol_type = other DNA
tgctactgtttattaagtaggtatcacatttctatagcaagacatagttgagttgtgtaaatcttgtattttgaaggatt

SEQ ID NO: 129399 - DNA, 80 bp, synthetic construct
  misc_feature 1..80: note = Artificially Synthesized Probe
  source 1..80: mol_type = other DNA
ttctgatgttaatgaaggagagaaagaagtgatgaaactctggaatctccatgtcatgaagcatgggtagggtatttcta

SEQ ID NO: 129400 - DNA, 80 bp, synthetic construct
  misc_feature 1..80: note = Artificially Synthesized Probe
  source 1..80: mol_type = other DNA
ctattccaatgttttttggtttggcaggttttttttaggtacaaagacgttccttttggtattatttataacaatgaatt

SEQ ID NO: 129401 - DNA, 80 bp, synthetic construct; identical to SEQ ID NO: 41245
  misc_feature 1..80: note = Artificially Synthesized Probe
  source 1..80: mol_type = other DNA

SEQ ID NO: 129402 - DNA, 80 bp, synthetic construct
  misc_feature 1..80: note = Artificially Synthesized Probe
  source 1..80: mol_type = other DNA
gtctccactaaacgtacaaaacttagccgggtgcagtgtcacacacctgtaatcccagttactcgggaggctgaggcact

SEQ ID NO: 129403 - DNA, 80 bp, synthetic construct
  misc_feature 1..80: note = Artificially Synthesized Probe
  source 1..80: mol_type = other DNA
gacagagctgtaggttcatttaatgacccaattttcatgccttttagtgccacgtgtttcatgtctggaaatcctgaaaa

SEQ ID NO: 129404 - DNA, 80 bp, synthetic construct
  misc_feature 1..80: note = Artificially Synthesized Probe
  source 1..80: mol_type = other DNA
ttcatagaggtgaaaggagaacaatttttgtttcttattcctttgtggctaaaagtatgttcccggcttggtgtggtggc

SEQ ID NO: 129405 - DNA, 80 bp, synthetic construct
  misc_feature 1..80: note = Artificially Synthesized Probe
  source 1..80: mol_type = other DNA
tgcagtggtgtgatctcgactcactgcaagctccacctcccaggttcacaccattctcctgcctcagcctccggagccgc

SEQ ID NO: 129406 - DNA, 80 bp, synthetic construct; identical to SEQ ID NO: 41246
  misc_feature 1..80: note = Artificially Synthesized Probe
  source 1..80: mol_type = other DNA

SEQ ID NO: 129407 - DNA, 80 bp, synthetic construct
  misc_feature 1..80: note = Artificially Synthesized Probe
  source 1..80: mol_type = other DNA
caaaaatgctttgtattgctattcatattctgtttttattaaataggtttattgctgacaatcaaatgaatcatgcctgt

SEQ ID NO: 129408 - DNA, 80 bp, synthetic construct
  misc_feature 1..80: note = Artificially Synthesized Probe
  source 1..80: mol_type = other DNA
agggggaatctgcttcccctgcaaacgaagaaataactgaagaacaaaatgggacagcaaatggatttagtgaaattaac

SEQ ID NO: 129409 - DNA, 80 bp, synthetic construct; identical to SEQ ID NO: 41187
  misc_feature 1..80: note = Artificially Synthesized Probe
  source 1..80: mol_type = other DNA

SEQ ID NO: 129410 - DNA, 80 bp, synthetic construct
  misc_feature 1..80: note = Artificially Synthesized Probe
  source 1..80: mol_type = other DNA
atgttccaaacaggcactgttagatgaagtaaatgatttcaacaaggatatttgtatcagggttctacttcacttcatta

SEQ ID NO: 129411 - DNA, 80 bp, synthetic construct; identical to SEQ ID NO: 41247
  misc_feature 1..80: note = Artificially Synthesized Probe
  source 1..80: mol_type = other DNA

SEQ ID NO: 129412 - DNA, 80 bp, synthetic construct
  misc_feature 1..80: note = Artificially Synthesized Probe
  source 1..80: mol_type = other DNA
ttacattacataagttccttttacaattaaaaaatagcacttcttcatcttatgcctgtttgagaagatattaaattttc

SEQ ID NO: 129413 - DNA, 80 bp, synthetic construct
  misc_feature 1..80: note = Artificially Synthesized Probe
  source 1..80: mol_type = other DNA
aaattaagctgttcatatctttaaattaggattgcaaaccaaggaaagaacgcatttgagattttaagatgtcacttata

SEQ ID NO: 129414 - DNA, 80 bp, synthetic construct; identical to SEQ ID NO: 41248
  misc_feature 1..80: note = Artificially Synthesized Probe
  source 1..80: mol_type = other DNA

SEQ ID NO: 129415 - DNA, 80 bp, synthetic construct
  misc_feature 1..80: note = Artificially Synthesized Probe
  source 1..80: mol_type = other DNA
taattttaaaatttcattccaccaccatcagatgcagttccctattttgtttaatgaagggatatataagctttctaatg

SEQ ID NO: 129416 - DNA, 80 bp, synthetic construct
  misc_feature 1..80: note = Artificially Synthesized Probe
  source 1..80: mol_type = other DNA
aaactgcagctttcattacagattccttgattggtaagctctccaaatgatgagttctagtaaactctgatttttgcctc

SEQ ID NO: 129417 - DNA, 80 bp, synthetic construct
  misc_feature 1..80: note = Artificially Synthesized Probe
  source 1..80: mol_type = other DNA
tcatttcttaagcagttatgctcttaatgcttaaaagaaggctagcattgtttgcacaaaaagttggtgattcccacccc

SEQ ID NO: 129418 - DNA, 80 bp, synthetic construct
  misc_feature 1..80: note = Artificially Synthesized Probe
  source 1..80: mol_type = other DNA
acagtagatgtaaaaaaaattcagtttaaaagaacatttgtttttacattaaatgtttatttgaaatcaaatgattttgt

SEQ ID NO: 129419 - DNA, 80 bp, synthetic construct
  misc_feature 1..80: note = Artificially Synthesized Probe
  source 1..80: mol_type = other DNA
ggcctacaaatgagaaatgagaattttatttttgtgagggtaggggagataacatttagctgaattggggttcagagtta

SEQ ID NO: 129420 - DNA, 80 bp, synthetic construct
  misc_feature 1..80: note = Artificially Synthesized Probe
  source 1..80: mol_type = other DNA
ttgtttcatcaaagcttttttttttttgagacagagtcttgctctgtcgtctaggctggagtgccgtggcgcaatttcgg

SEQ ID NO: 129421 - DNA, 80 bp, synthetic construct
  misc_feature 1..80: note = Artificially Synthesized Probe
  source 1..80: mol_type = other DNA
atgatccgcctgccttggcctcccaaagtgctgggattacagtcgtgagccaccgtgcctggccatcaaagcatttttaa

SEQ ID NO: 129422 - DNA, 80 bp, synthetic construct
  misc_feature 1..80: note = Artificially Synthesized Probe
  source 1..80: mol_type = other DNA
aggctggagtgcaatggtgcaatcttggctcactgccacttccacctcctgggttcaagtgattctcctgcctcagcctc

SEQ ID NO: 129423 - DNA, 80 bp, synthetic construct
  misc_feature 1..80: note = Artificially Synthesized Probe
  source 1..80: mol_type = other DNA
cttgactcccccaagattgacgcaagaggctcgggactggggccccacgttcagagcaggcggcttttagatgaggaggt

SEQ ID NO: 129424 - DNA, 80 bp, synthetic construct; identical to SEQ ID NO: 41188
  misc_feature 1..80: note = Artificially Synthesized Probe
  source 1..80: mol_type = other DNA

SEQ ID NO: 129425 - DNA, 80 bp, synthetic construct
  misc_feature 1..80: note = Artificially Synthesized Probe
  source 1..80: mol_type = other DNA
ttagttcctacagaaatgggtaggaataggctaggcatggtgtttcagacctgtaatttcagcatttcgggagactgagt

SEQ ID NO: 129426 - DNA, 80 bp, synthetic construct
  misc_feature 1..80: note = Artificially Synthesized Probe
  source 1..80: mol_type = other DNA
ccctatatctacaaaaattttaaaaaattagctgggcgtggtggctcatgactatagtcccaaatactcaggaggctgag

SEQ ID NO: 129427 - DNA, 80 bp, synthetic construct
  misc_feature 1..80: note = Artificially Synthesized Probe
  source 1..80: mol_type = other DNA
tattaggactaattattaagaaattaaagcacaactcatttgctgttgtcttcagcgtagttggtgactttggaaggtgg

SEQ ID NO: 129428 - DNA, 80 bp, synthetic construct; identical to SEQ ID NO: 41189
  misc_feature 1..80: note = Artificially Synthesized Probe
  source 1..80: mol_type = other DNA

SEQ ID NO: 129429 - DNA, 80 bp, synthetic construct
  misc_feature 1..80: note = Artificially Synthesized Probe
  source 1..80: mol_type = other DNA
cctttctaaagaacagaaatccttggtgttgggggaggagcagcttttatatagttgcttatgaggttggttttgttttt

SEQ ID NO: 129430 - DNA, 80 bp, synthetic construct
  misc_feature 1..80: note = Artificially Synthesized Probe
  source 1..80: mol_type = other DNA
cattattcggaaaagttttcagtagtttcatggccctcctcaatagtaactttcagtatttatactgaatagctctttgc

SEQ ID NO: 129431 - DNA, 80 bp, synthetic construct; identical to SEQ ID NO: 41190
  misc_feature 1..80: note = Artificially Synthesized Probe
  source 1..80: mol_type = other DNA

SEQ ID NO: 129432 - DNA, 80 bp, synthetic construct
  misc_feature 1..80: note = Artificially Synthesized Probe
  source 1..80: mol_type = other DNA
gggagacaggggtggatagatcacctgaggtgaggagttcaagaccagcctgaccaacatggtgaaaccctgtctctaca

SEQ ID NO: 129433 - DNA, 80 bp, synthetic construct
  misc_feature 1..80: note = Artificially Synthesized Probe
  source 1..80: mol_type = other DNA
attgtactccagcctgggcaacaagagtgacactcccatctcaaaaacaaaacaaacaaaaacaaacaaacacaaaactc

SEQ ID NO: 129434 - DNA, 80 bp, synthetic construct; identical to SEQ ID NO: 41181
  misc_feature 1..80: note = Artificially Synthesized Probe
  source 1..80: mol_type = other DNA

SEQ ID NO: 129435 - DNA, 80 bp, synthetic construct
  misc_feature 1..80: note = Artificially Synthesized Probe
  source 1..80: mol_type = other DNA
atagatttttagactcttatctctagaacatgtcatagaccaccttaagaactaagatgaggcttgtttttacaatccat

SEQ ID NO: 129436 - DNA, 80 bp, synthetic construct
  misc_feature 1..80: note = Artificially Synthesized Probe
  source 1..80: mol_type = other DNA
cctaacttcaaaattttttcatgatgtcaacaactgtctctttaatatgacatatcattgagctttaggctttgctgata

SEQ ID NO: 129437 - DNA, 80 bp, synthetic construct
  misc_feature 1..80: note = Artificially Synthesized Probe
  source 1..80: mol_type = other DNA
aagcactggaatacagctttattcctacacgattagacccgttaccccgtgggtctggccgaccgtcctgactcggagat

SEQ ID NO: 129438 - DNA, 80 bp, synthetic construct; identical to SEQ ID NO: 41259
  misc_feature 1..80: note = Artificially Synthesized Probe
  source 1..80: mol_type = other DNA

SEQ ID NO: 129439 - DNA, 80 bp, synthetic construct
  misc_feature 1..80: note = Artificially Synthesized Probe
  source 1..80: mol_type = other DNA
ccactgcgcccagcatttttttaatttttagtagagacaaggtctggttatgttgcccaggctggtcttgaactcctgag

SEQ ID NO: 129440 - DNA, 80 bp, synthetic construct
  misc_feature 1..80: note = Artificially Synthesized Probe
  source 1..80: mol_type = other DNA
taatcccagcaatttgggaggctgaggtgggtggatcacctgaggtcaggagttcaagaccagcctggctaacatgacca

SEQ ID NO: 129441 - DNA, 80 bp, synthetic construct
  misc_feature 1..80: note = Artificially Synthesized Probe
  source 1..80: mol_type = other DNA
ctgggcaacagggtgagactctgtctcaaaaaaaaaaaaaaaaaaaaaaaagtatatttggggccaggcagctcacacgt

SEQ ID NO: 129442 - DNA, 80 bp, synthetic construct
  misc_feature 1..80: note = Artificially Synthesized Probe
  source 1..80: mol_type = other DNA
cacggtgaaaccccgtctctactaaaaaatacaaaatattagccaggcatggtggaggacgcctgtagtccgagctactt

SEQ ID NO: 129443 - DNA, 80 bp, synthetic construct
  misc_feature 1..80: note = Artificially Synthesized Probe
  source 1..80: mol_type = other DNA
tgaggcacgaggatcacttgagccacggaggtggaggttgcagtgagctgagatcatgccactgctctccagcctgcact

SEQ ID NO: 129444 - DNA, 80 bp, synthetic construct; identical to SEQ ID NO: 41260
  misc_feature 1..80: note = Artificially Synthesized Probe
  source 1..80: mol_type = other DNA

SEQ ID NO: 129445 - DNA, 80 bp, synthetic construct
  misc_feature 1..80: note = Artificially Synthesized Probe
  source 1..80: mol_type = other DNA
gcctgtaatcccagctactggggaggctaaggcacaagaattgcttgaacatgggagacggaggttgcagtgagccaaga

SEQ ID NO: 129446 - DNA, 80 bp, synthetic construct
  misc_feature 1..80: note = Artificially Synthesized Probe
  source 1..80: mol_type = other DNA
gggagttcgagaccagccttaccaacatggagaaacctcatctctactaaaaatacaaaattagctgggtgtggtggcag

SEQ ID NO: 129447 - DNA, 80 bp, synthetic construct
  misc_feature 1..80: note = Artificially Synthesized Probe
  source 1..80: mol_type = other DNA
aaataaaaataaataaatagcacagcaccttgctttgaccccagttgtttgtgaaatacagacaatcttaccacccgggc

SEQ ID NO: 129448 - DNA, 80 bp, synthetic construct; identical to SEQ ID NO: 41261
  misc_feature 1..80: note = Artificially Synthesized Probe
  source 1..80: mol_type = other DNA

SEQ ID NO: 129449 - DNA, 80 bp, synthetic construct
  misc_feature 1..80: note = Artificially Synthesized Probe
  source 1..80: mol_type = other DNA
attctcatcatcacctcggtggagccagtagccctaggaaatattccaccccaccagagagagctactgtctacacaaga

SEQ ID NO: 129450 - DNA, 80 bp, synthetic construct
  misc_feature 1..80: note = Artificially Synthesized Probe
  source 1..80: mol_type = other DNA
ttggttggggttgccctgtccatcgggctgtgtcgctgacataaaatccagatagaaaagctaagaactctaccggtatt

SEQ ID NO: 129451 - DNA, 80 bp, synthetic construct
  misc_feature 1..80: note = Artificially Synthesized Probe
  source 1..80: mol_type = other DNA
ctttcagtgcaataggagctatccaatctccagccgcgtccatccgcccactcgagcccacctgtttgcggaccacagag

SEQ ID NO: 129452 - DNA, 80 bp, synthetic construct; identical to SEQ ID NO: 41250
  misc_feature 1..80: note = Artificially Synthesized Probe
  source 1..80: mol_type = other DNA

SEQ ID NO: 129453 - DNA, 80 bp, synthetic construct; identical to SEQ ID NO: 41262
  misc_feature 1..80: note = Artificially Synthesized Probe
  source 1..80: mol_type = other DNA

SEQ ID NO: 129454 - DNA, 80 bp, synthetic construct
  misc_feature 1..80: note = Artificially Synthesized Probe
  source 1..80: mol_type = other DNA
aggagcggtagagattgattcattctagccaaaccacctctcttaacaaaaaaaggaaactgaaccccgattggcgaaat

SEQ ID NO: 129455 - DNA, 80 bp, synthetic construct
  misc_feature 1..80: note = Artificially Synthesized Probe
  source 1..80: mol_type = other DNA
gagaggctgaggactgggctggatatgctgaccatcagccaagccccatccagggcccgcgggcagttctgcgcgggggt

SEQ ID NO: 129456 - DNA, 80 bp, synthetic construct; identical to SEQ ID NO: 41263
  misc_feature 1..80: note = Artificially Synthesized Probe
  source 1..80: mol_type = other DNA

SEQ ID NO: 129457 - DNA, 80 bp, synthetic construct
  misc_feature 1..80: note = Artificially Synthesized Probe
  source 1..80: mol_type = other DNA
gcggttcccccggtccctggcgcaacagcagtgcaccgggtctcttggccaggccctttccgctcgcatcctccacgaac

SEQ ID NO: 129458 - DNA, 80 bp, synthetic construct
  misc_feature 1..80: note = Artificially Synthesized Probe
  source 1..80: mol_type = other DNA
ctagttcttgggcgatgagtcgcggggttcgctcacccaaagccacagcgaggagcagagacagggacttcatggcgctg

SEQ ID NO: 129459 - DNA, 80 bp, synthetic construct
  misc_feature 1..80: note = Artificially Synthesized Probe
  source 1..80: mol_type = other DNA
tagatcctctccagttctcaccaggacaccccagccttaccgcgccctcctggactacccagcagccccgagttcgagcc

SEQ ID NO: 129460 - DNA, 80 bp, synthetic construct
  misc_feature 1..80: note = Artificially Synthesized Probe
  source 1..80: mol_type = other DNA
tttttaagaggtcctgagagaaaaaaattttgagaaccactgtcctagagctccaagaaggtgaatgccataagatgtgt

SEQ ID NO: 129461 - DNA, 80 bp, synthetic construct
  misc_feature 1..80: note = Artificially Synthesized Probe
  source 1..80: mol_type = other DNA
caaaaattcactgggtgtggtggcatgtgcctgtaatcccagctactccggaggctgaagccacagaattgcttgaaccc

SEQ ID NO: 129462 - DNA, 80 bp, synthetic construct
  misc_feature 1..80: note = Artificially Synthesized Probe
  source 1..80: mol_type = other DNA
gagagagattggagggattaggagcagatgatagggtattattttagggagctactacagaagcttgggccagagatgat

SEQ ID NO: 129463 - DNA, 80 bp, synthetic construct; identical to SEQ ID NO: 41251
  misc_feature 1..80: note = Artificially Synthesized Probe
  source 1..80: mol_type = other DNA

SEQ ID NO: 129464 - DNA, 80 bp, synthetic construct
  misc_feature 1..80: note = Artificially Synthesized Probe
  source 1..80: mol_type = other DNA
gatccgcggggagacaggcatttaacgacgactcacacgatcacttaaatacaactgtggtgaaccgcacaagagggacg

SEQ ID NO: 129465 - DNA, 80 bp, synthetic construct
  misc_feature 1..80: note = Artificially Synthesized Probe
  source 1..80: mol_type = other DNA
tattttcttttctttctttttttttttttttttttgagacagggtctcactttgtcacccaggctggagtacagtgggac

SEQ ID NO: 129466 - DNA, 80 bp, synthetic construct
  misc_feature 1..80: note = Artificially Synthesized Probe
  source 1..80: mol_type = other DNA
ctgttgcccaggctggagtgcagtggtgcgatctcggctcactgcaacctccacctcccaggttcaagcaattctcctgc

SEQ ID NO: 129467 - DNA, 80 bp, synthetic construct
  misc_feature 1..80: note = Artificially Synthesized Probe
  source 1..80: mol_type = other DNA
ttacaggcgtgaaccaacgcacctggccaagactgtaatttctttttcttttttttttgttgttgagacgaagttttcct

SEQ ID NO: 129468 - DNA, 80 bp, synthetic construct
  misc_feature 1..80: note = Artificially Synthesized Probe
  source 1..80: mol_type = other DNA
catcatgttggctaagctggtcttgaactcctgacctcaggtgatcctcccgcctcggcctcccaaagtgcagggattac

SEQ ID NO: 129469 - DNA, 80 bp, synthetic construct; identical to SEQ ID NO: 41252
  misc_feature 1..80: note = Artificially Synthesized Probe
  source 1..80: mol_type = other DNA

SEQ ID NO: 129470 - DNA, 80 bp, synthetic construct
  misc_feature 1..80: note = Artificially Synthesized Probe
  source 1..80: mol_type = other DNA
ctcgggaggctaaggcaggagaatcgcttgaacctgggaggtggaggttgcagtgagccgagatcgcaccattgcacccc

SEQ ID NO: 129471 - DNA, 80 bp, synthetic construct
  misc_feature 1..80: note = Artificially Synthesized Probe
  source 1..80: mol_type = other DNA
agtctgaaaaaatccaacatccaaaaacacttctgacccaagcatttcagataagggaccagaattattagattaaataa

SEQ ID NO: 129472 - DNA, 80 bp, synthetic construct; identical to SEQ ID NO: 41253
  misc_feature 1..80: note = Artificially Synthesized Probe
  source 1..80: mol_type = other DNA

SEQ ID NO: 129473 - DNA, 80 bp, synthetic construct
  misc_feature 1..80: note = Artificially Synthesized Probe
  source 1..80: mol_type = other DNA
attggaggaaaggaatagccctgtgtgtgatgagcattgagaggaggtctggcgagcaccatctagggctgaagaactag

SEQ ID NO: 129474 - DNA, 80 bp, synthetic construct
  misc_feature 1..80: note = Artificially Synthesized Probe
  source 1..80: mol_type = other DNA
aagattgagaagggatgggatgctggagtggtagaggtggagggcagagggatgggtgtcaggctcttgggagtaggtgg

SEQ ID NO: 129475 - DNA, 80 bp, synthetic construct
  misc_feature 1..80: note = Artificially Synthesized Probe
  source 1..80: mol_type = other DNA
agtgagctcctgtcttcctgggtgctggctcagattccgcagagctcccagctcttacctgctacctccagggtgacctc

SEQ ID NO: 129476 - DNA, 80 bp, synthetic construct
  misc_feature 1..80: note = Artificially Synthesized Probe
  source 1..80: mol_type = other DNA
gccttctgagagcggccccctgggccaccccggagttcccactccacctccaggcccccagaagggtagaagtgggacac

SEQ ID NO: 129477 - DNA, 80 bp, synthetic construct; identical to SEQ ID NO: 41254
  misc_feature 1..80: note = Artificially Synthesized Probe
  source 1..80: mol_type = other DNA

SEQ ID NO: 129478 - DNA, 80 bp, synthetic construct
  misc_feature 1..80: note = Artificially Synthesized Probe
  source 1..80: mol_type = other DNA
acccctggagacctctgtcccccaactcactgtacacagcaagctccagggtgacctgtccttgcaggtatggcaggtgt

SEQ ID NO: 129479 - DNA, 80 bp, synthetic construct
  misc_feature 1..80: note = Artificially Synthesized Probe
  source 1..80: mol_type = other DNA
cagccaggagcagatgtcccttacccaggtgctggcgtcgccactctagcccaaagggagggggacccggagccagagat

SEQ ID NO: 129480 - DNA, 80 bp, synthetic construct
  misc_feature 1..80: note = Artificially Synthesized Probe
  source 1..80: mol_type = other DNA
aaggagaaaaaaatagagaaatgcagttattggggagggctaaactgcagtttacccacccctcagaggacaccttttct

SEQ ID NO: 129481 - DNA, 80 bp, synthetic construct; identical to SEQ ID NO: 41255
  misc_feature 1..80: note = Artificially Synthesized Probe
  source 1..80: mol_type = other DNA

SEQ ID NO: 129482 - DNA, 80 bp, synthetic construct; identical to SEQ ID NO: 41249
  misc_feature 1..80: note = Artificially Synthesized Probe
  source 1..80: mol_type = other DNA

SEQ ID NO: 129483 - DNA, 80 bp, synthetic construct
  misc_feature 1..80: note = Artificially Synthesized Probe
  source 1..80: mol_type = other DNA
tcccctctgcagcttatttatatggccttgggccacttcctttttccatggctcagcttcctaatctctaaaattaaaag

SEQ ID NO: 129484 - DNA, 80 bp, synthetic construct
  misc_feature 1..80: note = Artificially Synthesized Probe
  source 1..80: mol_type = other DNA
aagtctacacgtgtttgctatagttacacctaacttagcataccccaagtcaacagcatctctgcaacattccccaccct

SEQ ID NO: 129485 - DNA, 80 bp, synthetic construct
  misc_feature 1..80: note = Artificially Synthesized Probe
  source 1..80: mol_type = other DNA
tggtgaacaagacaagcagtccctgctctcaaattgcctatagtccaatgacagacaagcaaattgtcaaaaataatgtg

SEQ ID NO: 129486 - DNA, 80 bp, synthetic construct; identical to SEQ ID NO: 41256
  misc_feature 1..80: note = Artificially Synthesized Probe
  source 1..80: mol_type = other DNA

SEQ ID NO: 129487 - DNA, 80 bp, synthetic construct
  misc_feature 1..80: note = Artificially Synthesized Probe
  source 1..80: mol_type = other DNA
tcgggagaccgaggcagtagaattgcttgaacccgggaagcagaggttgcggtgagccgagattgtgccattgcactcca

SEQ ID NO: 129488 - DNA, 80 bp, synthetic construct
  misc_feature 1..80: note = Artificially Synthesized Probe
  source 1..80: mol_type = other DNA
ccaacatggcaaaaccctgtctctactaaaaatacaaaaattagccaggtgtgggggcaggcacctgtagtcctagctac

SEQ ID NO: 129489 - DNA, 80 bp, synthetic construct
  misc_feature 1..80: note = Artificially Synthesized Probe
  source 1..80: mol_type = other DNA
ggaagtcagctgataaaggcataggctgaagctatatggcctgggttcaatttctagccctgcttctttttttttttttt

SEQ ID NO: 129490 - DNA, 80 bp, synthetic construct
  misc_feature 1..80: note = Artificially Synthesized Probe
  source 1..80: mol_type = other DNA
tttttgtatttttggtagagatggggtttcaccatgttgcccaggctggtcttgaactcccgacctcaggtgatccacct

SEQ ID NO: 129491 - DNA, 80 bp, synthetic construct
  misc_feature 1..80: note = Artificially Synthesized Probe
  source 1..80: mol_type = other DNA
acagggcctggcatatagaaaatacttgataaatgttagctgttactattttcattaccttcatcactatcatggacttg

SEQ ID NO: 129492 - DNA, 80 bp, synthetic construct
  misc_feature 1..80: note = Artificially Synthesized Probe
  source 1..80: mol_type = other DNA
gattacctgaggtcaggagttcgagagcagcctggccaacatggtgaaaccccatctctactaaaaatacaaaaaaaaaa

SEQ ID NO: 129493 - DNA, 80 bp, synthetic construct
  misc_feature 1..80: note = Artificially Synthesized Probe
  source 1..80: mol_type = other DNA
tagtcccagctactcgggaagctgaggcaggagaatggcgtgaacccgggaggcggagcgtgccgtgagccgagatcgtg

SEQ ID NO: 129494 - DNA, 80 bp, synthetic construct
  misc_feature 1..80: note = Artificially Synthesized Probe
  source 1..80: mol_type = other DNA
tatgtacataataaaaacaggctttttagaataacacgccctccaaaagaacttctgatggttcgctctcacctacagaa

SEQ ID NO: 129495 - DNA, 80 bp, synthetic construct; identical to SEQ ID NO: 41258
  misc_feature 1..80: note = Artificially Synthesized Probe
  source 1..80: mol_type = other DNA

SEQ ID NO: 129496 - DNA, 80 bp, synthetic construct
  misc_feature 1..80: note = Artificially Synthesized Probe
  source 1..80: mol_type = other DNA
aaaagattggagacccctgatctaaatactccatgtacatgaaggtcactttcactgctgtttcttcccagaaatgtcta

SEQ ID NO: 129497 - DNA, 80 bp, synthetic construct
  misc_feature 1..80: note = Artificially Synthesized Probe
  source 1..80: mol_type = other DNA
acttagtttgtcaaaatccagaaacatacttttgaattgttaaaaaaaaaaaaaaagatccacaggctgggcacagtggc

SEQ ID NO: 129498 - DNA, 80 bp, synthetic construct
  misc_feature 1..80: note = Artificially Synthesized Probe
  source 1..80: mol_type = other DNA
gcaggagaatcacttgaacctgggaggcggaggttgtggtgagccgagatcatgccattgccctccagactgggcaacaa

SEQ ID NO: 129499 - DNA, 80 bp, synthetic construct
  misc_feature 1..80: note = Artificially Synthesized Probe
  source 1..80: mol_type = other DNA
ccccatctctatttaaaagaaaaaatttaaaaaaataataaacaagacctaaaggttttacagtttaactcttttttttt

SEQ ID NO: 129500 - DNA, 80 bp, synthetic construct
  misc_feature 1..80: note = Artificially Synthesized Probe
  source 1..80: mol_type = other DNA
aagatgaaggcttctctcctttcacccagtacctcacatgccacaaaactgaaagaaaagtctgctttagcttcttgttt

SEQ ID NO: 129501 - DNA, 80 bp, synthetic construct; identical to SEQ ID NO: 41264
  misc_feature 1..80: note = Artificially Synthesized Probe
  source 1..80: mol_type = other DNA

SEQ ID NO: 129502 - DNA, 80 bp, synthetic construct; identical to SEQ ID NO: 41265
  misc_feature 1..80: note = Artificially Synthesized Probe
  source 1..80: mol_type = other DNA

SEQ ID NO: 129503 - DNA, 80 bp, synthetic construct
  misc_feature 1..80: note = Artificially Synthesized Probe
  source 1..80: mol_type = other DNA
gaatttaccaatgctatgaagccattagcaaaatttccaatcacaaatgtaaccactattagaatggaaaaaatgatggg

SEQ ID NO: 129504 - DNA, 80 bp, synthetic construct; identical to SEQ ID NO: 29782
  misc_feature 1..80: note = Artificially Synthesized Probe
  source 1..80: mol_type = other DNA

SEQ ID NO: 129505 - DNA, 80 bp, synthetic construct
  misc_feature 1..80: note = Artificially Synthesized Probe
  source 1..80: mol_type = other DNA
gggctccaccttgccgagcctcagtttccccgctctgtgcaatgggggtgagcttctgatctccatgcctgcgggtgcta

SEQ ID NO: 129506 - DNA, 80 bp, synthetic construct
  misc_feature 1..80: note = Artificially Synthesized Probe
  source 1..80: mol_type = other DNA
cttcagggaccggccagaccctcccatgcctgctgtagatctgaacgctcatgggcgtggacccccacatggtagcggag

SEQ ID NO: 129507 - DNA, 80 bp, synthetic construct; identical to SEQ ID NO: 29793
  misc_feature 1..80: note = Artificially Synthesized Probe
  source 1..80: mol_type = other DNA

SEQ ID NO: 129508 - DNA, 80 bp, synthetic construct
  misc_feature 1..80: note = Artificially Synthesized Probe
  source 1..80: mol_type = other DNA
agaaacacagcagacacacaggcagaaatgtgacagacagaaacacagcaggcagacgcacagacgtgcacagacacaca

SEQ ID NO: 129509 - DNA, 80 bp, synthetic construct
  misc_feature 1..80: note = Artificially Synthesized Probe
  source 1..80: mol_type = other DNA
agaaacaccacagacacacccagacagaaacatgacagacacacaggcagaaatgtgacagacagaaacacagtagacag

SEQ ID NO: 129510 - DNA, 80 bp, synthetic construct; identical to SEQ ID NO: 29794
  misc_feature 1..80: note = Artificially Synthesized Probe
  source 1..80: mol_type = other DNA

SEQ ID NO: 129511 - DNA, 80 bp, synthetic construct
  misc_feature 1..80: note = Artificially Synthesized Probe
  source 1..80: mol_type = other DNA
cgcgggaggggcgctctgtccacttcctactgcagcccggagcgctgcgtgagctggggctggagggacagcgacctggg

SEQ ID NO: 129512 - DNA, 80 bp, synthetic construct
  misc_feature 1..80: note = Artificially Synthesized Probe
  source 1..80: mol_type = other DNA
acaaacacacggtcacacacacaaaaccaccacacacgcacagacacagacacacaaccagggccatgcatggttcactc

SEQ ID NO: 129513 - DNA, 80 bp, synthetic construct
  misc_feature 1..80: note = Artificially Synthesized Probe
  source 1..80: mol_type = other DNA
agaatcagcctgggccgcacccagacccagccgcctgggcgcccagggcaggcctcagggcaccatgccacccgccgggc

SEQ ID NO: 129514 - DNA, 80 bp, synthetic construct
  misc_feature 1..80: note = Artificially Synthesized Probe
  source 1..80: mol_type = other DNA
catctgcggggctcccacctggctggatcccgcgcccgggggtccgggcgccgtctggagctgagcaggcagatgtgcgg

SEQ ID NO: 129515 - DNA, 80 bp, synthetic construct
  misc_feature 1..80: note = Artificially Synthesized Probe
  source 1..80: mol_type = other DNA
ggtcgcggcctggaggggtccgcgggggctaagccgagctgggacgggtgggggccgctggcagcccgcggctcgctctc

SEQ ID NO: 129516 - DNA, 80 bp, synthetic construct
  misc_feature 1..80: note = Artificially Synthesized Probe
  source 1..80: mol_type = other DNA
catggcaggcgggtttcgcagcactgtctgggcgatgaagacctgcaaaggggagagctgtcagcctgggcccccgcctc

SEQ ID NO: 129517 - DNA, 80 bp, synthetic construct
  misc_feature 1..80: note = Artificially Synthesized Probe
  source 1..80: mol_type = other DNA
gggttcaagcaattctcctccctcagccttccaagtagctgggattacaggtggctgccaccacacctggctaatttttg

SEQ ID NO: 129518 - DNA, 80 bp, synthetic construct
  misc_feature 1..80: note = Artificially Synthesized Probe
  source 1..80: mol_type = other DNA
tgtccactctgttactgcattgctgggtgacctcaggagagttgactaaccgctctgagctccttttgatgggttcataa

SEQ ID NO: 129519 - DNA, 80 bp, synthetic construct; identical to SEQ ID NO: 29784
  misc_feature 1..80: note = Artificially Synthesized Probe
  source 1..80: mol_type = other DNA

SEQ ID NO: 129520 - DNA, 80 bp, synthetic construct
  misc_feature 1..80: note = Artificially Synthesized Probe
  source 1..80: mol_type = other DNA
aggatggtctcgatctcctgaccttgtgatctgccctcctcggcctcccaaagtgctgggattacaggtgtgagccacca

SEQ ID NO: 129521 - DNA, 80 bp, synthetic construct
  misc_feature 1..80: note = Artificially Synthesized Probe
  source 1..80: mol_type = other DNA
aactccagagattgaaaacttctggacccaaaggaaaataaaaccaaaggcagagatatattttggcaagaaaagggggt

SEQ ID NO: 129522 - DNA, 80 bp, synthetic construct
  misc_feature 1..80: note = Artificially Synthesized Probe
  source 1..80: mol_type = other DNA
ctccgcctcctgggttcaagcgattctcctgcctcagcctcccgagtagctgggattacaggcatgcaccaccacatctg

SEQ ID NO: 129523 - DNA, 80 bp, synthetic construct
  misc_feature 1..80: note = Artificially Synthesized Probe
  source 1..80: mol_type = other DNA
aaactatatttaaaaatatttaaaataagaatgttatctacaaattagtatataatatataataatcaattatatgataa

SEQ ID NO: 129524 - DNA, 80 bp, synthetic construct; identical to SEQ ID NO: 29785
  misc_feature 1..80: note = Artificially Synthesized Probe
  source 1..80: mol_type = other DNA

SEQ ID NO: 129525 - DNA, 80 bp, synthetic construct
  misc_feature 1..80: note = Artificially Synthesized Probe
  source 1..80: mol_type = other DNA
cacgaggtcaggagattgagaccatcctggctaacacgatgaaaccccgtctctactaaaaatacaaaaaaaattagccg

SEQ ID NO: 129526 - DNA, 80 bp, synthetic construct
  misc_feature 1..80: note = Artificially Synthesized Probe
  source 1..80: mol_type = other DNA
ttaaatcaatcaatcaatcaaatcatttcctgagcagtaggtcctgtaggctgaatgaagcagcaacagcagctgaggaa

SEQ ID NO: 129527 - DNA, 80 bp, synthetic construct
  misc_feature 1..80: note = Artificially Synthesized Probe
  source 1..80: mol_type = other DNA
aagtcactgaagggcaaatgggagtgggcaaggtgcgtctgcaggaagtgcctgtgagaactttcttctgagggcaacag

SEQ ID NO: 129528 - DNA, 80 bp, synthetic construct
  misc_feature 1..80: note = Artificially Synthesized Probe
  source 1..80: mol_type = other DNA
ccaggctggagtgcagtggcacaatcttggctcactgcaacctccacctcctgggctcaagcaattctcatgcctcagcc

SEQ ID NO: 129529 - DNA, 80 bp, synthetic construct; identical to SEQ ID NO: 29786
  misc_feature 1..80: note = Artificially Synthesized Probe
  source 1..80: mol_type = other DNA

SEQ ID NO: 129530 - DNA, 80 bp, synthetic construct
  misc_feature 1..80: note = Artificially Synthesized Probe
  source 1..80: mol_type = other DNA
tagagacggggtttcaccatgttggccagcatggtctccatctcttgacctcatgatctgcccgcctctgcctcacaaag

SEQ ID NO: 129531 - DNA, 80 bp, synthetic construct
  misc_feature 1..80: note = Artificially Synthesized Probe
  source 1..80: mol_type = other DNA
tccatcagtagttttattggccacagccacgcctactcatttatgtgttttctacggctgctttctattttttttctttt

SEQ ID NO: 129532 - DNA, 80 bp, synthetic construct
  misc_feature 1..80: note = Artificially Synthesized Probe
  source 1..80: mol_type = other DNA
cgggaggctgaggcacgagaatcgcttgaacccgggaggcggaggttgcagtgagccgagatcgtgccactgtactccag

SEQ ID NO: 129533 - DNA, 80 bp, synthetic construct; identical to SEQ ID NO: 29787
  misc_feature 1..80: note = Artificially Synthesized Probe
  source 1..80: mol_type = other DNA

SEQ ID NO: 129534 - DNA, 80 bp, synthetic construct
  misc_feature 1..80: note = Artificially Synthesized Probe
  source 1..80: mol_type = other DNA
gaatggtctcgatctcctgacctcatgatccgcccgcctcggcctcccaaagtgctgggattacaggcgtgagccaccac

SEQ ID NO: 129535 - DNA, 80 bp, synthetic construct
  misc_feature 1..80: note = Artificially Synthesized Probe
  source 1..80: mol_type = other DNA
atcaggatctaaatccaccctgggtgaccagaggtccagtcaggagggtagcaggaccccgcagagcccctactcaccag

SEQ ID NO: 129536 - DNA, 80 bp, synthetic construct
  misc_feature 1..80: note = Artificially Synthesized Probe
  source 1..80: mol_type = other DNA
accgagaggccgcccagcatggagaagagcagcccgaaggccacgtccccggactcggcgcccagcgtcaggaagcacca

SEQ ID NO: 129537 - DNA, 80 bp, synthetic construct; identical to SEQ ID NO: 29788
  misc_feature 1..80: note = Artificially Synthesized Probe
  source 1..80: mol_type = other DNA

SEQ ID NO: 129538 - DNA, 80 bp, synthetic construct
  misc_feature 1..80: note = Artificially Synthesized Probe
  source 1..80: mol_type = other DNA
acgctcagggccagcaggttggaggccaggcccaccacgcagaaggaggcggcgaaccagggcgaggcgatcagccgtct

SEQ ID NO: 129539 - DNA, 80 bp, synthetic construct
  misc_feature 1..80: note = Artificially Synthesized Probe
  source 1..80: mol_type = other DNA
gaggcgagagaagatttgcttgtgattaattctgcatttcagtgtaagtagctctggtgaactcctacacaaccttcaat

SEQ ID NO: 129540 - DNA, 80 bp, synthetic construct
  misc_feature 1..80: note = Artificially Synthesized Probe
  source 1..80: mol_type = other DNA
ccaaatagctgggactacaggcacataccctgtagtaagtagtcctcccgcctcggcctcccaaagtgctgggattacag

SEQ ID NO: 129541 - DNA, 80 bp, synthetic construct
  misc_feature 1..80: note = Artificially Synthesized Probe
  source 1..80: mol_type = other DNA
ggcggggacctgttactctgtgtggggctaacgctcagccacaatgcacaacaaaatcggagccaagccaggcgcagtgg

SEQ ID NO: 129542 - DNA, 80 bp, synthetic construct; identical to SEQ ID NO: 29789
  misc_feature 1..80: note = Artificially Synthesized Probe
  source 1..80: mol_type = other DNA

SEQ ID NO: 129543 - DNA, 80 bp, synthetic construct
  misc_feature 1..80: note = Artificially Synthesized Probe
  source 1..80: mol_type = other DNA
aaccccgtctctactaaaaatacaaaaattagccgggcgtggtggcgcgcgcctatagtcccagctactcaggaggctga

SEQ ID NO: 129544 - DNA, 80 bp, synthetic construct
  misc_feature 1..80: note = Artificially Synthesized Probe
  source 1..80: mol_type = other DNA
tgcagtggctaatgcctgtaatcccagcactttgggaggttgaggtgggtggatcatctgaggtcaggagttcgaaacca

SEQ ID NO: 129545 - DNA, 80 bp, synthetic construct
  misc_feature 1..80: note = Artificially Synthesized Probe
  source 1..80: mol_type = other DNA
gcactactgcactccagcctggacaacagagcgagactccatctcaagaaaacaaaacggccaggtgcggtggctcacgc

SEQ ID NO: 129546 - DNA, 80 bp, synthetic construct
  misc_feature 1..80: note = Artificially Synthesized Probe
  source 1..80: mol_type = other DNA
tcgggaggctgaggcaggagaatagcgtgaacctgggaggaggagcttgcagtgagctgagatcgtgccactgcactgca

SEQ ID NO: 129547 - DNA, 80 bp, synthetic construct; identical to SEQ ID NO: 29790
  misc_feature 1..80: note = Artificially Synthesized Probe
  source 1..80: mol_type = other DNA

SEQ ID NO: 129548 - DNA, 80 bp, synthetic construct
  misc_feature 1..80: note = Artificially Synthesized Probe
  source 1..80: mol_type = other DNA
actaataaaaatacaaaaattagccgggtgtggtggtgcatacctgtaatcccagctactcgggaggctgaggcaggaga

SEQ ID NO: 129549 - DNA, 80 bp, synthetic construct; identical to SEQ ID NO: 25132
  misc_feature 1..80: note = Artificially Synthesized Probe
  source 1..80: mol_type = other DNA

SEQ ID NO: 129550 - DNA, 80 bp, synthetic construct; identical to SEQ ID NO: 29791
  misc_feature 1..80: note = Artificially Synthesized Probe
  source 1..80: mol_type = other DNA

SEQ ID NO: 129551 - DNA, 80 bp, synthetic construct
  misc_feature 1..80: note = Artificially Synthesized Probe
  source 1..80: mol_type = other DNA
gtatccagcctcataaattatccagctcctgacagcggcactgaactcccttcctgggaagacagctaaggccactgcca

SEQ ID NO: 129552 - DNA, 80 bp, synthetic construct
  misc_feature 1..80: note = Artificially Synthesized Probe
  source 1..80: mol_type = other DNA
gggacaaggcgttcctccctcgagagctggtatgtgctgtttctggacattccttgggactcggctgtccctgcggccac

SEQ ID NO: 129553 - DNA, 80 bp, synthetic construct; identical to SEQ ID NO: 29783
  misc_feature 1..80: note = Artificially Synthesized Probe
  source 1..80: mol_type = other DNA

SEQ ID NO: 129554 - DNA, 80 bp, synthetic construct
  misc_feature 1..80: note = Artificially Synthesized Probe
  source 1..80: mol_type = other DNA
gcccaggggagcctggaaactggcactgagtccttctggccacagctggctgtttccaatccccccacctccactcccca

SEQ ID NO: 129555 - DNA, 80 bp, synthetic construct; identical to SEQ ID NO: 29792
  misc_feature 1..80: note = Artificially Synthesized Probe
  source 1..80: mol_type = other DNA

SEQ ID NO: 129556 - DNA, 80 bp, synthetic construct
  misc_feature 1..80: note = Artificially Synthesized Probe
  source 1..80: mol_type = other DNA
aactttgatgggaatctgcctgggtcccgggttccagaaatctctgtcttaattcctggcttctttctggaaggcggaca

SEQ ID NO: 129557 - DNA, 80 bp, synthetic construct
  misc_feature 1..80: note = Artificially Synthesized Probe
  source 1..80: mol_type = other DNA
agtggaatgtgatccttggttcccaaacagcaggcctctcctccgccccatgttccatcctcgtgccccctcccccactc

SEQ ID NO: 129558 - DNA, 80 bp, synthetic construct
  misc_feature 1..80: note = Artificially Synthesized Probe
  source 1..80: mol_type = other DNA
ttataaaatgtcacgtttattgctacagtgctgttatatacaggacaggtctctgaatccacctgaaagagggtcgtttt

SEQ ID NO: 129559 - DNA, 80 bp, synthetic construct
  misc_feature 1..80: note = Artificially Synthesized Probe
  source 1..80: mol_type = other DNA
acggcgtggctgcggagcacgtggatggcctcgtccaggtggtcttctatcttactctgctgcagggtggggggatgggt

SEQ ID NO: 129560 - DNA, 80 bp, synthetic construct; identical to SEQ ID NO: 41277
  misc_feature 1..80: note = Artificially Synthesized Probe
  source 1..80: mol_type = other DNA

SEQ ID NO: 129561 - DNA, 80 bp, synthetic construct
  misc_feature 1..80: note = Artificially Synthesized Probe
  source 1..80: mol_type = other DNA
atgctccccagcattgggggaggctggccaggcccctggcatcctgtctacgtcacgatggccctctggtgtaatgggga

SEQ ID NO: 129562 - DNA, 80 bp, synthetic construct
  misc_feature 1..80: note = Artificially Synthesized Probe
  source 1..80: mol_type = other DNA
tgtgagcatggcctgatgcccatggggagggattcatgaaccaccccgcctgtccagcctccggtgatgcccaagatggc

SEQ ID NO: 129563 - DNA, 80 bp, synthetic construct
  misc_feature 1..80: note = Artificially Synthesized Probe
  source 1..80: mol_type = other DNA
gtagggggctcctccccatgctgccccaccctggctgacccacgctgggctccagcagcaggcaagaaagtggcaagctc

SEQ ID NO: 129564 - DNA, 80 bp, synthetic construct
  misc_feature 1..80: note = Artificially Synthesized Probe
  source 1..80: mol_type = other DNA
agcaagcacgtcctcacagggataggagggtctgccctcccatgccggagcaccgcacagggtaaacagtcagtacctaa

SEQ ID NO: 129565 - DNA, 80 bp, synthetic construct; identical to SEQ ID NO: 41278
  misc_feature 1..80: note = Artificially Synthesized Probe
  source 1..80: mol_type = other DNA

SEQ ID NO: 129566 - DNA, 80 bp, synthetic construct
  misc_feature 1..80: note = Artificially Synthesized Probe
  source 1..80: mol_type = other DNA
agacaccagaaccagcctcccctcccccgcaaagccttcacagacctcagcctcccctccccccaaaccctcacagacct

SEQ ID NO: 129567 - DNA, 80 bp, synthetic construct
  misc_feature 1..80: note = Artificially Synthesized Probe
  source 1..80: mol_type = other DNA
tcacttgcctggccaccccccatgccccacgcctcaccgaggccagtgctttgccgagggcatccccggagctgccagct

SEQ ID NO: 129568 - DNA, 80 bp, synthetic construct; identical to SEQ ID NO: 41266
  misc_feature 1..80: note = Artificially Synthesized Probe
  source 1..80: mol_type = other DNA

SEQ ID NO: 129569 - DNA, 80 bp, synthetic construct
  misc_feature 1..80: note = Artificially Synthesized Probe
  source 1..80: mol_type = other DNA
ctgaaaccagcctctgcaggggttgaggcactggggacaggccactggcaggggaccctgggtgggtgagtccccttctg

SEQ ID NO: 129570 - DNA, 80 bp, synthetic construct; identical to SEQ ID NO: 41279
  misc_feature 1..80: note = Artificially Synthesized Probe
  source 1..80: mol_type = other DNA

SEQ ID NO: 129571 - DNA, 80 bp, synthetic construct
  misc_feature 1..80: note = Artificially Synthesized Probe
  source 1..80: mol_type = other DNA
gcatcccagggaggggccatacccaggaggctgtcggccccgctgacaggcggcgtgtggctggagacgccgccgtacgt

SEQ ID NO: 129572 - DNA, 80 bp, synthetic construct
  misc_feature 1..80: note = Artificially Synthesized Probe
  source 1..80: mol_type = other DNA
tacgctcgtgctggtgcaggccaccaaacgtgctgctgcttccactgctgcccaccgggccgctaccgggcgggaggggc

SEQ ID NO: 129573 - DNA, 80 bp, synthetic construct; identical to SEQ ID NO: 41267
  misc_feature 1..80: note = Artificially Synthesized Probe
  source 1..80: mol_type = other DNA

SEQ ID NO: 129574 - DNA, 80 bp, synthetic construct
  misc_feature 1..80: note = Artificially Synthesized Probe
  source 1..80: mol_type = other DNA
cccgccctgccatgtacctgccacgtagaagggggcgggataggtgctgctgggggtcttggcggacgggtaggcggtgg

SEQ ID NO: 129575 - DNA, 80 bp, synthetic construct
  misc_feature 1..80: note = Artificially Synthesized Probe
  source 1..80: mol_type = other DNA
gtaaagccacccccctttaggtaaatcccagcccctggccaagtttgaggttcttatgatgtcctggtctctctctccta

SEQ ID NO: 129576 - DNA, 80 bp, synthetic construct; identical to SEQ ID NO: 41280
  misc_feature 1..80: note = Artificially Synthesized Probe
  source 1..80: mol_type = other DNA

SEQ ID NO: 129577 - DNA, 80 bp, synthetic construct
  misc_feature 1..80: note = Artificially Synthesized Probe
  source 1..80: mol_type = other DNA
cctgatgttgtaataaactggggggcggtttcagggcagagaaagtgcaccctggggaaggaggggagtgagtgatactg

SEQ ID NO: 129578 - DNA, 80 bp, synthetic construct
  misc_feature 1..80: note = Artificially Synthesized Probe
  source 1..80: mol_type = other DNA
actgagccagggaatcggcaaattccctctccctccagcgagatgagaccgcaggagtgtggcacagcagcctggaccat

SEQ ID NO: 129579 - DNA, 80 bp, synthetic construct
  misc_feature 1..80: note = Artificially Synthesized Probe
  source 1..80: mol_type = other DNA
tcactgcaacctccgcctcctgggttcaaacgattcttctgcctcagcctcccaagtagctgggattacaggcacgcacc

SEQ ID NO: 129580 - DNA, 80 bp, synthetic construct; identical to SEQ ID NO: 41281
  misc_feature 1..80: note = Artificially Synthesized Probe
  source 1..80: mol_type = other DNA

SEQ ID NO: 129581 - DNA, 80 bp, synthetic construct
  misc_feature 1..80: note = Artificially Synthesized Probe
  source 1..80: mol_type = other DNA
cctcgtgcgactcaccgaggatggaagacccggcgggaccttccggaccttcttgggctgcgtgtctgttagaagcaaaa

SEQ ID NO: 129582 - DNA, 80 bp, synthetic construct
  misc_feature 1..80: note = Artificially Synthesized Probe
  source 1..80: mol_type = other DNA
tcacgaggtcaagagatcaagaccatcctggccaacacagtgaaaccccgtctctactgaaaatacaaaaagtagccggg

SEQ ID NO: 129583 - DNA, 80 bp, synthetic construct
  misc_feature 1..80: note = Artificially Synthesized Probe
  source 1..80: mol_type = other DNA
caacaacaacaaaaagccccgggtctatttatacggctccaaagatgtcgaagaaccacgatggttttctcccgcgacgc

SEQ ID NO: 129584 - DNA, 80 bp, synthetic construct
  misc_feature 1..80: note = Artificially Synthesized Probe
  source 1..80: mol_type = other DNA
ggaacgcccacgcatcactttccacatgacaaaaccaagagaacccccaacatcaaaaaaacaaaagacccgccgcctgt

SEQ ID NO: 129585 - DNA, 80 bp, synthetic construct
  misc_feature 1..80: note = Artificially Synthesized Probe
  source 1..80: mol_type = other DNA
aacccggaaaccagcactcaggcgccttcctgatcactcacggacgtgcgcacagtgggaaaagttcgagtggcccaggc

SEQ ID NO: 129586 - DNA, 80 bp, synthetic construct; identical to SEQ ID NO: 41282
  misc_feature 1..80: note = Artificially Synthesized Probe
  source 1..80: mol_type = other DNA

SEQ ID NO: 129587 - DNA, 80 bp, synthetic construct
  misc_feature 1..80: note = Artificially Synthesized Probe
  source 1..80: mol_type = other DNA
catgcctggcgactgtgctgcctggaatgggccccgggtagttcaaggcgccgtccagtgctcctgagcccgaggctgtg

SEQ ID NO: 129588 - DNA, 80 bp, synthetic construct
  misc_feature 1..80: note = Artificially Synthesized Probe
  source 1..80: mol_type = other DNA
acgtgccacgcccgccggcccctgcctcgaccccccgtcaccgtccatccctcccacggcccgagcgcccgacgtccagc

SEQ ID NO: 129589 - DNA, 80 bp, synthetic construct
  misc_feature 1..80: note = Artificially Synthesized Probe
  source 1..80: mol_type = other DNA
gtaggaggggtagtactgggaggtccccttcatgcccgaaggggacaggggcccggggctgttgagggccagctcgcctg

SEQ ID NO: 129590 - DNA, 80 bp, synthetic construct; identical to SEQ ID NO: 41283
  misc_feature 1..80: note = Artificially Synthesized Probe
  source 1..80: mol_type = other DNA

SEQ ID NO: 129591 - DNA, 80 bp, synthetic construct
  misc_feature 1..80: note = Artificially Synthesized Probe
  source 1..80: mol_type = other DNA
aagccctcggttggattctgtacatgttagtgtgaaacgggctttcttcctggggagccagggctgccctgagccgggtc

SEQ ID NO: 129592 - DNA, 80 bp, synthetic construct
  misc_feature 1..80: note = Artificially Synthesized Probe
  source 1..80: mol_type = other DNA
caaaattagccgggtatggtggcacatgcctgtaatcccagctactcaaaaggctgaggcaggagaatcgcttgaaccca

SEQ ID NO: 129593 - DNA, 80 bp, synthetic construct
  misc_feature 1..80: note = Artificially Synthesized Probe
  source 1..80: mol_type = other DNA
agtctaggaacagcagcagaaatagcgagagacacgggacttttatacaaaaaaatttgttgcttacaaaacatatgcaa

SEQ ID NO: 129594 - DNA, 80 bp, synthetic construct
  misc_feature 1..80: note = Artificially Synthesized Probe
  source 1..80: mol_type = other DNA
gcccggcctgtcctgagcccgcaccctgtgtggccaccgcggggctcgatgagtcacccgggagcgccagagagcagggc

SEQ ID NO: 129595 - DNA, 80 bp, synthetic construct; identical to SEQ ID NO: 41284
  misc_feature 1..80: note = Artificially Synthesized Probe
  source 1..80: mol_type = other DNA

SEQ ID NO: 129596 - DNA, 80 bp, synthetic construct
  misc_feature 1..80: note = Artificially Synthesized Probe
  source 1..80: mol_type = other DNA
ggctgcacaggggcctgttgtatgggctccccagggggtccacacctgcaaagccctgctgcatggcctgttttcctgcc

SEQ ID NO: 129597 - DNA, 80 bp, synthetic construct
  misc_feature 1..80: note = Artificially Synthesized Probe
  source 1..80: mol_type = other DNA
aacataacctagctaagccaggagagcttctgcagatcagagagggtgggtgacagatttgtttaaaatcaaaatacacc

SEQ ID NO: 129598 - DNA, 80 bp, synthetic construct; identical to SEQ ID NO: 41285
  misc_feature 1..80: note = Artificially Synthesized Probe
  source 1..80: mol_type = other DNA

SEQ ID NO: 129599 - DNA, 80 bp, synthetic construct; identical to SEQ ID NO: 41286
  misc_feature 1..80: note = Artificially Synthesized Probe
  source 1..80: mol_type = other DNA

SEQ ID NO: 129600 - DNA, 80 bp, synthetic construct
  misc_feature 1..80: note = Artificially Synthesized Probe
  source 1..80: mol_type = other DNA
gctcacggggtgaggcgggaaggggacagcagagctcacagggggtgaggcgggaaggggacagcagagctcacaggggg

SEQ ID NO: 129601 - DNA, 80 bp, synthetic construct
  misc_feature 1..80: note = Artificially Synthesized Probe
  source 1..80: mol_type = other DNA
tcacagggggtgaggcgggaaggggacagcagagctcacgggggtgaggcgggaaggggacagcagagctcacggggtga

SEQ ID NO: 129602 - DNA, 80 bp, synthetic construct
  misc_feature 1..80: note = Artificially Synthesized Probe
  source 1..80: mol_type = other DNA
tcacaggggatgaggcgggaaggggacagcagagctcacagggggtgaggcgggaaggggacagcagagctcacgggggt

SEQ ID NO: 129603 - DNA, 80 bp, synthetic construct
  misc_feature 1..80: note = Artificially Synthesized Probe
  source 1..80: mol_type = other DNA
ctcacaggggatgaggcgggaaggggacagcagagctcacagggggtgaggcgggaaggggacagcagagctcacagggg

SEQ ID NO: 129604 - DNA, 80 bp, synthetic construct; identical to SEQ ID NO: 41268
  misc_feature 1..80: note = Artificially Synthesized Probe
  source 1..80: mol_type = other DNA

SEQ ID NO: 129605 - DNA, 80 bp, synthetic construct
  misc_feature 1..80: note = Artificially Synthesized Probe
  source 1..80: mol_type = other DNA
acggggtgaggcgggaaggggacagcagagctcacagggggtgaggcgggaaggggacagcagagctcacgggggtgagg

SEQ ID NO: 129606 - DNA, 80 bp, synthetic construct
  misc_feature 1..80: note = Artificially Synthesized Probe
  source 1..80: mol_type = other DNA
cctgagcctcagtttcctctgtttcaggcgttgaggggctgatgccctggggtgctggggtcagaggcatttgtctgtcc

SEQ ID NO: 129607 - DNA, 80 bp, synthetic construct
  misc_feature 1..80: note = Artificially Synthesized Probe
  source 1..80: mol_type = other DNA
cctggggcgctcagtgacaaaggacaggtgaggcctcggggctacggagggggtcagctggccagggcgagcccccagca

SEQ ID NO: 129608 - DNA, 80 bp, synthetic construct; identical to SEQ ID NO: 41287
  misc_feature 1..80: note = Artificially Synthesized Probe
  source 1..80: mol_type = other DNA

SEQ ID NO: 129609 - DNA, 80 bp, synthetic construct
  misc_feature 1..80: note = Artificially Synthesized Probe
  source 1..80: mol_type = other DNA
tggggaagatgacagccacgacccaccccacaggccacacccggccacagcagtcactcgcccggctcctcgggtgagaa

SEQ ID NO: 129610 - DNA, 80 bp, synthetic construct
  misc_feature 1..80: note = Artificially Synthesized Probe
  source 1..80: mol_type = other DNA
ggaactgcccacgtcagccctgcccaccctggggccatcgggggtatgaggaagaggctgggaggaaggaacagccagtg

SEQ ID NO: 129611 - DNA, 80 bp, synthetic construct
  misc_feature 1..80: note = Artificially Synthesized Probe
  source 1..80: mol_type = other DNA
ccaactgactctactgtactccaagttcgaggccgggcaaagcgagacaggaccgtccctgccccgctgtggggcccaaa

SEQ ID NO: 129612 - DNA, 80 bp, synthetic construct; identical to SEQ ID NO: 41288
  misc_feature 1..80: note = Artificially Synthesized Probe
  source 1..80: mol_type = other DNA

SEQ ID NO: 129613 - DNA, 80 bp, synthetic construct
  misc_feature 1..80: note = Artificially Synthesized Probe
  source 1..80: mol_type = other DNA
gacactcccgcaggaggcggagcatgtgaagctcggggcatttcctgtgtcacccgcaggagggaccgcacacgggacac

SEQ ID NO: 129614 - DNA, 80 bp, synthetic construct
  misc_feature 1..80: note = Artificially Synthesized Probe
  source 1..80: mol_type = other DNA
acccccacctggcattgggcagggcctgcagagctgggtcagtcctcaccgcctccctccaagaaggttctgggagggtc

SEQ ID NO: 129615 - DNA, 80 bp, synthetic construct
  misc_feature 1..80: note = Artificially Synthesized Probe
  source 1..80: mol_type = other DNA
gagtggtaggccagggccccagggagctcctggacccagtgtcaccttggccgcccccatcactccgaaccttgtcaggt

SEQ ID NO: 129616 - DNA, 80 bp, synthetic construct
  misc_feature 1..80: note = Artificially Synthesized Probe
  source 1..80: mol_type = other DNA
tcggctcactgcagcctccacctcctgggttcaagcaattctcctgcctcagcctcctgagtagttggcactataagcat

SEQ ID NO: 129617 - DNA, 80 bp, synthetic construct; identical to SEQ ID NO: 41289
  misc_feature 1..80: note = Artificially Synthesized Probe
  source 1..80: mol_type = other DNA

SEQ ID NO: 129618 - DNA, 80 bp, synthetic construct
  misc_feature 1..80: note = Artificially Synthesized Probe
  source 1..80: mol_type = other DNA
caggcggggaagcctagttgcagagtgccgtgccagggagtccgggccacgtcccctgcacctccccgcagctgctccca

SEQ ID NO: 129619 - DNA, 80 bp, synthetic construct
  misc_feature 1..80: note = Artificially Synthesized Probe
  source 1..80: mol_type = other DNA
ggaatgtggatgaagagaggctgctgtgcgactcagtgaagtgggtgccctcgctgaaggtctaggggagatggggtggg

SEQ ID NO: 129620 - DNA, 80 bp, synthetic construct
  misc_feature 1..80: note = Artificially Synthesized Probe
  source 1..80: mol_type = other DNA
gaaactcagggtctcaggcctcacggggactcctacccggctggggtcaaaggaggagctgctctggtcgccgctgcccc

SEQ ID NO: 129621 - DNA, 80 bp, synthetic construct; identical to SEQ ID NO: 41290
  misc_feature 1..80: note = Artificially Synthesized Probe
  source 1..80: mol_type = other DNA

SEQ ID NO: 129622 - DNA, 80 bp, synthetic construct
  misc_feature 1..80: note = Artificially Synthesized Probe
  source 1..80: mol_type = other DNA
gactggggtctctgtgtcagatgcagactcttctgaccctgtgagaaaggctcatgacagcatgagggtgtggaagctaa

SEQ ID NO: 129623 - DNA, 80 bp, synthetic construct
  misc_feature 1..80: note = Artificially Synthesized Probe
  source 1..80: mol_type = other DNA
agtgtggagaccagaagcctgcgtggggcaggagttcccggcgcagcaagggacgggacgaggaccttggtcccggggcg

SEQ ID NO: 129624 - DNA, 80 bp, synthetic construct
  misc_feature 1..80: note = Artificially Synthesized Probe
  source 1..80: mol_type = other DNA
cagcttggccacggagttgctgccctgccttggtttccctctctataaatgatttacaaacaggccctacttttgcaggg

SEQ ID NO: 129625 - DNA, 80 bp, synthetic construct; identical to SEQ ID NO: 41291
  misc_feature 1..80: note = Artificially Synthesized Probe
  source 1..80: mol_type = other DNA

SEQ ID NO: 129626 - DNA, 80 bp, synthetic construct
  misc_feature 1..80: note = Artificially Synthesized Probe
  source 1..80: mol_type = other DNA
cgctcaggcctgggtggggagctgaaagcaccatctgggggtctccaaccacacctgacaccttttcctcttctcgccgt

SEQ ID NO: 129627 - DNA, 80 bp, synthetic construct
  misc_feature 1..80: note = Artificially Synthesized Probe
  source 1..80: mol_type = other DNA
gtctccaggaatccacacggcattcgctgccaggtctgggccatctgcaccccaagatcctggtcctgcacgtgggccct

SEQ ID NO: 129628 - DNA, 80 bp, synthetic construct
  misc_feature 1..80: note = Artificially Synthesized Probe
  source 1..80: mol_type = other DNA
gagcaaacgggaggctcctggcaccccagccctcatcccctggaaggcctggtgtggtgggggacctcctggggccccat

SEQ ID NO: 129629 - DNA, 80 bp, synthetic construct; identical to SEQ ID NO: 41292
  misc_feature 1..80: note = Artificially Synthesized Probe
  source 1..80: mol_type = other DNA

SEQ ID NO: 129630 - DNA, 80 bp, synthetic construct
  misc_feature 1..80: note = Artificially Synthesized Probe
  source 1..80: mol_type = other DNA
gagggccccaggagcggcccaccccttgggcttcagttccaattccagtcacggggtgtggaagccgcccacctgcctgg

SEQ ID NO: 129631 - DNA, 80 bp, synthetic construct
  misc_feature 1..80: note = Artificially Synthesized Probe
  source 1..80: mol_type = other DNA
gagggaggcttcaaaaggcgcttagtaaataccgggtaggactgagattggtctgcagcagggatctgcaaacagtacac

SEQ ID NO: 129632 - DNA, 80 bp, synthetic construct
  misc_feature 1..80: note = Artificially Synthesized Probe
  source 1..80: mol_type = other DNA
ccaatagagaccatctgtcctgcacagccaacaatattcactccttggtcctttccggagaaggctggctgaccttgata

SEQ ID NO: 129633 - DNA, 80 bp, synthetic construct
  misc_feature 1..80: note = Artificially Synthesized Probe
  source 1..80: mol_type = other DNA
gcacaccaccaggtggtctggcttcagatgggcctggggacttcatcctatagccccagctctgcaatgtgcccccactc

SEQ ID NO: 129634 - DNA, 80 bp, synthetic construct; identical to SEQ ID NO: 41293
  misc_feature 1..80: note = Artificially Synthesized Probe
  source 1..80: mol_type = other DNA

SEQ ID NO: 129635 - DNA, 80 bp, synthetic construct
  misc_feature 1..80: note = Artificially Synthesized Probe
  source 1..80: mol_type = other DNA
ataaataactgtgcttccaagaacattttcctggaggatcaaaatattctccacctctgctgtccaatacggggaccaca

SEQ ID NO: 129636 - DNA, 80 bp, synthetic construct
  misc_feature 1..80: note = Artificially Synthesized Probe
  source 1..80: mol_type = other DNA
aattaacacctcgacagctcctcacgcaggttccgtttactcgggagtaggagcgggccacccgatacagggtcactatg

SEQ ID NO: 129637 - DNA, 80 bp, synthetic construct; identical to SEQ ID NO: 41294
  misc_feature 1..80: note = Artificially Synthesized Probe
  source 1..80: mol_type = other DNA

SEQ ID NO: 129638 - DNA, 80 bp, synthetic construct
  misc_feature 1..80: note = Artificially Synthesized Probe
  source 1..80: mol_type = other DNA
atttccggctctcacctccttccttgagaaggctggggggatggggtggaggcttgtaaagaagagagtgggtatcaggg

SEQ ID NO: 129639 - DNA, 80 bp, synthetic construct
  misc_feature 1..80: note = Artificially Synthesized Probe
  source 1..80: mol_type = other DNA
actacaggagcctgccaccacgcacagctaatttttgtatttttagtagagacggggtttcatacatgttggccaggctg

SEQ ID NO: 129640 - DNA, 80 bp, synthetic construct
  misc_feature 1..80: note = Artificially Synthesized Probe
  source 1..80: mol_type = other DNA
cgctcctcccaccttgtatttcccaaagccctggggtcacaggcgtgcacagcctccattttatctaaattcaagctatg

SEQ ID NO: 129641 - DNA, 80 bp, synthetic construct
  misc_feature 1..80: note = Artificially Synthesized Probe
  source 1..80: mol_type = other DNA
gggcaccacagagcccttccttgttggggggctgacgagatcccgcaaagcctcccacttcgatctgcctctaatgtctg

SEQ ID NO: 129642 - DNA, 80 bp, synthetic construct; identical to SEQ ID NO: 41295
  misc_feature 1..80: note = Artificially Synthesized Probe
  source 1..80: mol_type = other DNA

SEQ ID NO: 129643 - DNA, 80 bp, synthetic construct
  misc_feature 1..80: note = Artificially Synthesized Probe
  source 1..80: mol_type = other DNA
cgaggacgcctggcaacctcctccaccagaaccggggatgcctggcaacctcctctaccagaaccgaggacaacctcctc

SEQ ID NO: 129644 - DNA, 80 bp, synthetic construct
  misc_feature 1..80: note = Artificially Synthesized Probe
  source 1..80: mol_type = other DNA
aatttcagtgaccacagagataaccgagaccccatcccgctcttgcttccatgtctatgggcatcaccagtgacacctga

SEQ ID NO: 129645 - DNA, 80 bp, synthetic construct
  misc_feature 1..80: note = Artificially Synthesized Probe
  source 1..80: mol_type = other DNA
ccgtctctactaaaaatacaaaaattagctgggcgtggtggtgggcacctgtagtaccagctactcgggaggctgaggca

SEQ ID NO: 129646 - DNA, 80 bp, synthetic construct; identical to SEQ ID NO: 41296
  misc_feature 1..80: note = Artificially Synthesized Probe
  source 1..80: mol_type = other DNA

SEQ ID NO: 129647 - DNA, 80 bp, synthetic construct
  misc_feature 1..80: note = Artificially Synthesized Probe
  source 1..80: mol_type = other DNA
acccctaccctacagataaggaaactgacgcaaaagatagatgccatttgctcaagccctcacagtaagtagcaaagtca

SEQ ID NO: 129648 - DNA, 80 bp, synthetic construct
  misc_feature 1..80: note = Artificially Synthesized Probe
  source 1..80: mol_type = other DNA
tgtatttttaacagatacggcatttcaccgtgttaaccaggatggtctcgatctcctgacctcatgatccgctggcctcg

SEQ ID NO: 129649 - DNA, 80 bp, synthetic construct
  misc_feature 1..80: note = Artificially Synthesized Probe
  source 1..80: mol_type = other DNA
gctgctccagccccaggatgacctgcacggcctgctgcaggatgagcagcttggtctgcgctttgtccgacttgaggtgc

SEQ ID NO: 129650 - DNA, 80 bp, synthetic construct
  misc_feature 1..80: note = Artificially Synthesized Probe
  source 1..80: mol_type = other DNA
acgcagaatactaaccgctattcaatcacggccttaaacgtgttattcaaaactagaaaagaaccactggcagagccgca

SEQ ID NO: 129651 - DNA, 80 bp, synthetic construct
  misc_feature 1..80: note = Artificially Synthesized Probe
  source 1..80: mol_type = other DNA
cagttttgaaacaagcgactcaggagatacaaccaggagcacaaagatctgccaagccacaccaacaaaaaggaagggtt

SEQ ID NO: 129652 - DNA, 80 bp, synthetic construct; identical to SEQ ID NO: 41297
  misc_feature 1..80: note = Artificially Synthesized Probe
  source 1..80: mol_type = other DNA

SEQ ID NO: 129653 - DNA, 80 bp, synthetic construct
  misc_feature 1..80: note = Artificially Synthesized Probe
  source 1..80: mol_type = other DNA
tatattttagtagagatggagtttcgccctgtgggccaggctggtcttgaactcctgacctcagaagatccacctgcctt

SEQ ID NO: 129654 - DNA, 80 bp, synthetic construct
  misc_feature 1..80: note = Artificially Synthesized Probe
  source 1..80: mol_type = other DNA
acaaacagaacagagggggatggcgctgctctcagcctgacattaaacagattaaaaatctaaatatggttcaaaggcct

SEQ ID NO: 129655 - DNA, 80 bp, synthetic construct
  misc_feature 1..80: note = Artificially Synthesized Probe
  source 1..80: mol_type = other DNA
ctgagttttggcactggagatctagaaatcaagaaaggacctccaacttggaactcagaaacctctgaagcaacctgacc

SEQ ID NO: 129656 - DNA, 80 bp, synthetic construct; identical to SEQ ID NO: 41298
  misc_feature 1..80: note = Artificially Synthesized Probe
  source 1..80: mol_type = other DNA

SEQ ID NO: 129657 - DNA, 80 bp, synthetic construct
  misc_feature 1..80: note = Artificially Synthesized Probe
  source 1..80: mol_type = other DNA
atcgatttgccaatgaagcagattctccagaagaaaaatcaacgagagagagaaaatgcacagggcagccgagtcaagaa

SEQ ID NO: 129658 - DNA, 80 bp, synthetic construct
  misc_feature 1..80: note = Artificially Synthesized Probe
  source 1..80: mol_type = other DNA
agacaggcgcctacaaacattatcaaacagccaaatgaggccgggctcggtggctcatgcctgtaatcccagcactttgg

SEQ ID NO: 129659 - DNA, 80 bp, synthetic construct
  misc_feature 1..80: note = Artificially Synthesized Probe
  source 1..80: mol_type = other DNA
tatttcgctaacctgttagaactgagaattcccagtgaataagccaagctttgtgtccaatgcacagtgctcaagaaaca

SEQ ID NO: 129660 - DNA, 80 bp, synthetic construct; identical to SEQ ID NO: 41299
  misc_feature 1..80: note = Artificially Synthesized Probe
  source 1..80: mol_type = other DNA

SEQ ID NO: 129661 - DNA, 80 bp, synthetic construct; identical to SEQ ID NO: 41269
  misc_feature 1..80: note = Artificially Synthesized Probe
  source 1..80: mol_type = other DNA

SEQ ID NO: 129662 - DNA, 80 bp, synthetic construct
  misc_feature 1..80: note = Artificially Synthesized Probe
  source 1..80: mol_type = other DNA
gtcaggagtttgagaccagcctggccaacgtggcgaaaccatgtctctactaaaactacaaaaaattagccaggcatggt

SEQ ID NO: 129663 - DNA, 80 bp, synthetic construct
  misc_feature 1..80: note = Artificially Synthesized Probe
  source 1..80: mol_type = other DNA
aagttaatgaggcagcaataaaaagaaaaaaaaaagatacagccaacagcttggctggatctccagggaattatgctaac

SEQ ID NO: 129664 - DNA, 80 bp, synthetic construct
  misc_feature 1..80: note = Artificially Synthesized Probe
  source 1..80: mol_type = other DNA
gagcaaaacaagagggagaggcaagttcccttaagagatcaaactcccagggcgtaggggaagccaccgagaagggagag

SEQ ID NO: 129665 - DNA, 80 bp, synthetic construct
  misc_feature 1..80: note = Artificially Synthesized Probe
  source 1..80: mol_type = other DNA
agatcagcctggagaacacagcaagaccccatctagacaatatttttttattcttcagacacggtctccctctgtccccg

SEQ ID NO: 129666 - DNA, 80 bp, synthetic construct
  misc_feature 1..80: note = Artificially Synthesized Probe
  source 1..80: mol_type = other DNA
ctaatttttgtatttttagcagagacggggtttcgccacgttgactaggctggtcttgaactcctggcctcatgtgatcc

SEQ ID NO: 129667 - DNA, 80 bp, synthetic construct; identical to SEQ ID NO: 41300
  misc_feature 1..80: note = Artificially Synthesized Probe
  source 1..80: mol_type = other DNA

SEQ ID NO: 129668 - DNA, 80 bp, synthetic construct
  misc_feature 1..80: note = Artificially Synthesized Probe
  source 1..80: mol_type = other DNA
aatcgtacagatgaagaacagattggtgattcctgggcttaaagaaggtgcatgtctcaaaactgcacagaactacacac

SEQ ID NO: 129669 - DNA, 80 bp, synthetic construct
  misc_feature 1..80: note = Artificially Synthesized Probe
  source 1..80: mol_type = other DNA
agacacacacccgcacgcacacacagacacacacacgtgcgtgtaaagccggtggaatctgatcaggatctgtggacggc

SEQ ID NO: 129670 - DNA, 80 bp, synthetic construct; identical to SEQ ID NO: 41301
  misc_feature 1..80: note = Artificially Synthesized Probe
  source 1..80: mol_type = other DNA

SEQ ID NO: 129671 - DNA, 80 bp, synthetic construct
  misc_feature 1..80: note = Artificially Synthesized Probe
  source 1..80: mol_type = other DNA
tgctgggattacaggcctgagccaccgcgcccggtcacaagggacgctttcaatgtgaaaaagcatccagggacccagca

SEQ ID NO: 129672 - DNA, 80 bp, synthetic construct
  misc_feature 1..80: note = Artificially Synthesized Probe
  source 1..80: mol_type = other DNA
cacttacaatcgcacggacagagaaagcgacggggaaatgaaaaataggaaagaactttcctttggtccgtcaataagca

SEQ ID NO: 129673 - DNA, 80 bp, synthetic construct
  misc_feature 1..80: note = Artificially Synthesized Probe
  source 1..80: mol_type = other DNA
accagaaaatcttggtttcctattcgttaatctctaatgccttttttgtttcgtttctgttttgagacagggtctggctc

SEQ ID NO: 129674 - DNA, 80 bp, synthetic construct
  misc_feature 1..80: note = Artificially Synthesized Probe
  source 1..80: mol_type = other DNA
agcagtgcgggtacacggctggtgtgggtgtgggcagcagtgcgggtacacggcttacgttggtggacacagcagtgtgg

SEQ ID NO: 129675 - DNA, 80 bp, synthetic construct
  misc_feature 1..80: note = Artificially Synthesized Probe
  source 1..80: mol_type = other DNA
ttgctgtgttacccaggctggtctctaactcctgcgctcaagcgatccttccgccttggtcccccaaagtgctgggatta

SEQ ID NO: 129676 - DNA, 80 bp, synthetic construct; identical to SEQ ID NO: 41302
  misc_feature 1..80: note = Artificially Synthesized Probe
  source 1..80: mol_type = other DNA

SEQ ID NO: 129677 - DNA, 80 bp, synthetic construct
  misc_feature 1..80: note = Artificially Synthesized Probe
  source 1..80: mol_type = other DNA
ggccaaggtggagaatgcggctggggtaccccatcagccatcagcgttggggactcctggcgaagggtggcgtccccgaa

SEQ ID NO: 129678 - DNA, 80 bp, synthetic construct
  misc_feature 1..80: note = Artificially Synthesized Probe
  source 1..80: mol_type = other DNA
gagctactgcagctcctgggccctgccgggatccctccgcccctcgcacccatcgactcgctgaacctgacgatggaaga

SEQ ID NO: 129679 - DNA, 80 bp, synthetic construct
  misc_feature 1..80: note = Artificially Synthesized Probe
  source 1..80: mol_type = other DNA
actgcatggactgaacggggagggggtcacccctctgtgtccaggagctggggggtcccaggctggagcagccacatcac

SEQ ID NO: 129680 - DNA, 80 bp, synthetic construct; identical to SEQ ID NO: 41303
  misc_feature 1..80: note = Artificially Synthesized Probe
  source 1..80: mol_type = other DNA

SEQ ID NO: 129681 - DNA, 80 bp, synthetic construct
  misc_feature 1..80: note = Artificially Synthesized Probe
  source 1..80: mol_type = other DNA
aatgggggtggacggccttgggagttgcgcttcctcctccaggaagcccccagggcctgaccctctgcctcacacaggga

SEQ ID NO: 129682 - DNA, 80 bp, synthetic construct
  misc_feature 1..80: note = Artificially Synthesized Probe
  source 1..80: mol_type = other DNA
tctctccatgtgggggtgcaagtgcccaagtacagaaccccctttgcccaccactcaaaaccccgacactccagccaggg

SEQ ID NO: 129683 - DNA, 80 bp, synthetic construct; identical to SEQ ID NO: 41304
  misc_feature 1..80: note = Artificially Synthesized Probe
  source 1..80: mol_type = other DNA

SEQ ID NO: 129684 - DNA, 80 bp, synthetic construct
  misc_feature 1..80: note = Artificially Synthesized Probe
  source 1..80: mol_type = other DNA
accctcagggctctgccccgacacgccctctgcggagaccttcactagaggtcccgctttggggcaacctggccctcgct

SEQ ID NO: 129685 - DNA, 80 bp, synthetic construct
  misc_feature 1..80: note = Artificially Synthesized Probe
  source 1..80: mol_type = other DNA
cgggtacacagcttacgttgctgggcacagcaatgtgggtacatggctggtgctgctgtgggcagcagtgcagttacaca

SEQ ID NO: 129686 - DNA, 80 bp, synthetic construct
  misc_feature 1..80: note = Artificially Synthesized Probe
  source 1..80: mol_type = other DNA
gccgcgggtcccaggaattgcccctcagtcctgggcaaaccacaatggccggtcaccctggtgctgggccctgcatacag

SEQ ID NO: 129687 - DNA, 80 bp, synthetic construct
  misc_feature 1..80: note = Artificially Synthesized Probe
  source 1..80: mol_type = other DNA
ggcccagctccaaccctgcgcctaaaaacaagccccacccagcccccagacccaggctccaggcgcgggagggacgaggg

SEQ ID NO: 129688 - DNA, 80 bp, synthetic construct; identical to SEQ ID NO: 41305
  misc_feature 1..80: note = Artificially Synthesized Probe
  source 1..80: mol_type = other DNA

SEQ ID NO: 129689 - DNA, 80 bp, synthetic construct
  misc_feature 1..80: note = Artificially Synthesized Probe
  source 1..80: mol_type = other DNA
agactgcgctccatctaggcccggcccgtcctgctccgccccatcacagaccagaagactctgaggactcgcgtgccctc

SEQ ID NO: 129690 - DNA, 80 bp, synthetic construct
  misc_feature 1..80: note = Artificially Synthesized Probe
  source 1..80: mol_type = other DNA
tcagctcttgacagtgatacaaagttgtctttacgtttcagctctgaaaagtgagaggtttacactcaacaggtggacat

SEQ ID NO: 129691 - DNA, 80 bp, synthetic construct
  misc_feature 1..80: note = Artificially Synthesized Probe
  source 1..80: mol_type = other DNA
ccctaccagggctgggtatgggtttgcttggcaaaaggggaagccgaggctcagacaggcagcaggtcgaggaagacacg

SEQ ID NO: 129692 - DNA, 80 bp, synthetic construct; identical to SEQ ID NO: 41306
  misc_feature 1..80: note = Artificially Synthesized Probe
  source 1..80: mol_type = other DNA

SEQ ID NO: 129693 - DNA, 80 bp, synthetic construct
  misc_feature 1..80: note = Artificially Synthesized Probe
  source 1..80: mol_type = other DNA
cgaaggcacagcgcctgtggccacgatccacaggtccaaaggggacccaggaagcggggttgtcccccactccctggtcc

SEQ ID NO: 129694 - DNA, 80 bp, synthetic construct
  misc_feature 1..80: note = Artificially Synthesized Probe
  source 1..80: mol_type = other DNA
aagggccaacctctcatttgggaaacaaaggcctgctgtgggggacagccaactgcatttctatctgctttgtcccctag

SEQ ID NO: 129695 - DNA, 80 bp, synthetic construct; identical to SEQ ID NO: 41270
  misc_feature 1..80: note = Artificially Synthesized Probe
  source 1..80: mol_type = other DNA

SEQ ID NO: 129696 - DNA, 80 bp, synthetic construct
  misc_feature 1..80: note = Artificially Synthesized Probe
  source 1..80: mol_type = other DNA
gtggtgaaacccaaaagcccatgggagtctcgcacgcggcagggcctggggagctcgcttccaacagcctcggtcctagg

SEQ ID NO: 129697 - DNA, 80 bp, synthetic construct; identical to SEQ ID NO: 41307
  misc_feature 1..80: note = Artificially Synthesized Probe
  source 1..80: mol_type = other DNA

SEQ ID NO: 129698 - DNA, 80 bp, synthetic construct
  misc_feature 1..80: note = Artificially Synthesized Probe
  source 1..80: mol_type = other DNA
ggcacctcgccgctcccagcctgtttcctcatctgggaacggctccgacccgggatggggagacgtgctgagtggcttga

SEQ ID NO: 129699 - DNA, 80 bp, synthetic construct
  misc_feature 1..80: note = Artificially Synthesized Probe
  source 1..80: mol_type = other DNA
taccagcatggcccttccggagccttggcccctccggcccttgggctgtttttttccgcagggtggccggtgttgtttca

SEQ ID NO: 129700 - DNA, 80 bp, synthetic construct
  misc_feature 1..80: note = Artificially Synthesized Probe
  source 1..80: mol_type = other DNA
acaggccagaagaaacaaaccaaggtccctgggcttctccaggaacccataacacatggccccactgtaccagcaggcaa

SEQ ID NO: 129701 - DNA, 80 bp, synthetic construct; identical to SEQ ID NO: 41308
  misc_feature 1..80: note = Artificially Synthesized Probe
  source 1..80: mol_type = other DNA

SEQ ID NO: 129702 - DNA, 80 bp, synthetic construct
  misc_feature 1..80: note = Artificially Synthesized Probe
  source 1..80: mol_type = other DNA
caccaggggagtcccgtatggggcaggttgtgtctgccctgttcacggagggtggtccgctcagcactgggcaccccctc

SEQ ID NO: 129703 - DNA, 80 bp, synthetic construct
  misc_feature 1..80: note = Artificially Synthesized Probe
  source 1..80: mol_type = other DNA
aattttttgagttttgttttgtctttttgagaaatggggcctcactatgtttcctgggctggacttggaactcctggcct

SEQ ID NO: 129704 - DNA, 80 bp, synthetic construct
  misc_feature 1..80: note = Artificially Synthesized Probe
  source 1..80: mol_type = other DNA
acaatgaggtaagcgaccctgatcaggcccattttacagatcagaagatcaaggccgcattttgcttacccagccaagct

SEQ ID NO: 129705 - DNA, 80 bp, synthetic construct; identical to SEQ ID NO: 41309
  misc_feature 1..80: note = Artificially Synthesized Probe
  source 1..80: mol_type = other DNA

SEQ ID NO: 129706 - DNA, 80 bp, synthetic construct
  misc_feature 1..80: note = Artificially Synthesized Probe
  source 1..80: mol_type = other DNA
atggggccctgcttccccgtctgggagcccacagggtaactgcttctcccttgaccctgctcactctgtgggccccaggg

SEQ ID NO: 129707 - DNA, 80 bp, synthetic construct
  misc_feature 1..80: note = Artificially Synthesized Probe
  source 1..80: mol_type = other DNA
tggatgtggggacagatggacagggagaaacagggaggggagaagagttgtgagtggtcaaagcacagagtgctaaaagc

SEQ ID NO: 129708 - DNA, 80 bp, synthetic construct
  misc_feature 1..80: note = Artificially Synthesized Probe
  source 1..80: mol_type = other DNA
gtgtgcaaatataaactccctaactcccccagggaacaccagggcatcaagttgccaagtttaaactgcacgcagggcag

SEQ ID NO: 129709 - DNA, 80 bp, synthetic construct
  misc_feature 1..80: note = Artificially Synthesized Probe
  source 1..80: mol_type = other DNA
agaccaggtcgcccccaaattcaacatgaaggaaatccacaagtcagaaaaccacgaaactcttttacaagcttcaagac

SEQ ID NO: 129710 - DNA, 80 bp, synthetic construct; identical to SEQ ID NO: 41310
  misc_feature 1..80: note = Artificially Synthesized Probe
  source 1..80: mol_type = other DNA

SEQ ID NO: 129711 - DNA, 80 bp, synthetic construct
  misc_feature 1..80: note = Artificially Synthesized Probe
  source 1..80: mol_type = other DNA
tacagagaaaaatttccattccaaagaaatgcactccaggcccctccagtctcgactttccccaggggtccccaggtggg

SEQ ID NO: 129712 - DNA, 80 bp, synthetic construct
  misc_feature 1..80: note = Artificially Synthesized Probe
  source 1..80: mol_type = other DNA
tttttttcttttttggagggcgtgtgaaactgactttttttgaggactacgaaaccgcacttttttgtggggtagctgaa

SEQ ID NO: 129713 - DNA, 80 bp, synthetic construct
  misc_feature 1..80: note = Artificially Synthesized Probe
  source 1..80: mol_type = other DNA
aaaacgggcattctacgggagctggaagacttctggggcgtcccaaggactttgagagacttggagaatgtttgaagcca

SEQ ID NO: 129714 - DNA, 80 bp, synthetic construct
  misc_feature 1..80: note = Artificially Synthesized Probe
  source 1..80: mol_type = other DNA
cgcggagcagatgttacccgcgcgcccccccccggcccgcccggccccgaccagcgcctgcagcgcgcggcaccttcccc

SEQ ID NO: 129715 - DNA, 80 bp, synthetic construct
  misc_feature 1..80: note = Artificially Synthesized Probe
  source 1..80: mol_type = other DNA
cccccgcgcccccgcccggggctgcttaaagtttcccgaagtgcccggcccgacgggggcgacgcgggcctggcgagctc

SEQ ID NO: 129716 - DNA, 80 bp, synthetic construct
  misc_feature 1..80: note = Artificially Synthesized Probe
  source 1..80: mol_type = other DNA
gcacgggggtaccgggcgcgccccccgccccccgccgggctcacctgctgggcgcggccgggcacgcggcgcgtgggggg

SEQ ID NO: 129717 - DNA, 80 bp, synthetic construct
  misc_feature 1..80: note = Artificially Synthesized Probe
  source 1..80: mol_type = other DNA
ggcgcccctggggcagcggcgtgcgcggtgcccgcggtgcccgccgccgcgtcggctccggcccgctacgcccgcagccg

SEQ ID NO: 129718 - DNA, 80 bp, synthetic construct
  misc_feature 1..80: note = Artificially Synthesized Probe
  source 1..80: mol_type = other DNA
agcaggcaaatacctgggccactccaaaaacccgggactggggagtccaggactcaaatcagggctcacatggagcaaac

SEQ ID NO: 129719 - DNA, 80 bp, synthetic construct
  misc_feature 1..80: note = Artificially Synthesized Probe
  source 1..80: mol_type = other DNA
gaaggccagctccctaggcctccaggaaccccattgtcactgccaccgtgaatggtcgcagtaggagctctgaggttcca

SEQ ID NO: 129720 - DNA, 80 bp, synthetic construct; identical to SEQ ID NO: 41271
  misc_feature 1..80: note = Artificially Synthesized Probe
  source 1..80: mol_type = other DNA

SEQ ID NO: 129721 - DNA, 80 bp, synthetic construct
  misc_feature 1..80: note = Artificially Synthesized Probe
  source 1..80: mol_type = other DNA
ggcccctggagcccaggacaagcgcacagaccaaactgacaggaccaggggctgcgtgctcccgggtctggtttcttccc

SEQ ID NO: 129722 - DNA, 80 bp, synthetic construct
  misc_feature 1..80: note = Artificially Synthesized Probe
  source 1..80: mol_type = other DNA
gaggcgggcttggggggcgcgaggcgtgccacacacggctgcagagactcggaaaccttagagctgaggggatagcgtgt

SEQ ID NO: 129723 - DNA, 80 bp, synthetic construct
  misc_feature 1..80: note = Artificially Synthesized Probe
  source 1..80: mol_type = other DNA
ctgtatccttcctccccctggccctgggaaatgggggtgataggaagtttccctatcaccttcagatagggaaactgagt

SEQ ID NO: 129724 - DNA, 80 bp, synthetic construct
  misc_feature 1..80: note = Artificially Synthesized Probe
  source 1..80: mol_type = other DNA
tgggagtctcaggagtggcacggggggagacgcccgacctgcagcggggatgaacacagccagcccaggggtccacaagg

SEQ ID NO: 129725 - DNA, 80 bp, synthetic construct; identical to SEQ ID NO: 41272
  misc_feature 1..80: note = Artificially Synthesized Probe
  source 1..80: mol_type = other DNA

SEQ ID NO: 129726 - DNA, 80 bp, synthetic construct
  misc_feature 1..80: note = Artificially Synthesized Probe
  source 1..80: mol_type = other DNA
gagaacgagggcaggaacacgagggagggtggcgctgcagggacgctggtggcccgcgcccccactgacctcgcacttgc

SEQ ID NO: 129727 - DNA, 80 bp, synthetic construct
  misc_feature 1..80: note = Artificially Synthesized Probe
  source 1..80: mol_type = other DNA
ggcgctccttctcccgctcggccttctgctctggggggagaaggtcgtcctcgtcctcgtctgggctatggggagggcgc

SEQ ID NO: 129728 - DNA, 80 bp, synthetic construct
  misc_feature 1..80: note = Artificially Synthesized Probe
  source 1..80: mol_type = other DNA
cccggggggccttcagctccttcttctcctcctccgagtggtcagccgctgacgtgttctcctcgtcctccttctcctcc

SEQ ID NO: 129729 - DNA, 80 bp, synthetic construct; identical to SEQ ID NO: 41273
  misc_feature 1..80: note = Artificially Synthesized Probe
  source 1..80: mol_type = other DNA

SEQ ID NO: 129730 - DNA, 80 bp, synthetic construct
  misc_feature 1..80: note = Artificially Synthesized Probe
  source 1..80: mol_type = other DNA
gaacaaagtgtgtagaaattctgcagcaactcaatggcaggaatctactaagatgctaaaagaacactcttcttttttgg

SEQ ID NO: 129731 - DNA, 80 bp, synthetic construct
  misc_feature 1..80: note = Artificially Synthesized Probe
  source 1..80: mol_type = other DNA
aaccccatctctactaaaaatacaaaaaattagccagctgtggtggtgggtacctgtaatcccagctacttgggaggctg

SEQ ID NO: 129732 - DNA, 80 bp, synthetic construct
  misc_feature 1..80: note = Artificially Synthesized Probe
  source 1..80: mol_type = other DNA
gatgctatgctaatctttatcattctcattttagtccaagagctgtccaagcaagtgctcaaagcgctgcttttgaaaga

SEQ ID NO: 129733 - DNA, 80 bp, synthetic construct
  misc_feature 1..80: note = Artificially Synthesized Probe
  source 1..80: mol_type = other DNA
acaagtaaaaaagaaaaaacaaaaatcagtaagctggactatatcagaattgagagttcctgatcagcaaagataccagg

SEQ ID NO: 129734 - DNA, 80 bp, synthetic construct; identical to SEQ ID NO: 41274
  misc_feature 1..80: note = Artificially Synthesized Probe
  source 1..80: mol_type = other DNA

SEQ ID NO: 129735 - DNA, 80 bp, synthetic construct
  misc_feature 1..80: note = Artificially Synthesized Probe
  source 1..80: mol_type = other DNA
gtcaaaatcttgcctgtgggagggcaacttggctgctttggaaaataattcatcagcctttcctctgaattgacaacagg

SEQ ID NO: 129736 - DNA, 80 bp, synthetic construct
  misc_feature 1..80: note = Artificially Synthesized Probe
  source 1..80: mol_type = other DNA
tgggaagagctggttaccctcatggcaaaagaccagaaaaggagacctggagagaggcctgggtgctgggacatgggaca

SEQ ID NO: 129737 - DNA, 80 bp, synthetic construct
  misc_feature 1..80: note = Artificially Synthesized Probe
  source 1..80: mol_type = other DNA
gtaaagaacacgctagtgggacgccgtgttcatgaagctcaagaacaataattgcaaaacatgtggcttaagggtacaca

SEQ ID NO: 129738 - DNA, 80 bp, synthetic construct
  misc_feature 1..80: note = Artificially Synthesized Probe
  source 1..80: mol_type = other DNA
ccgctccccacagtgaactctgctccaatcggccaacgccagccaccaggaccagcccaggcctcagcacacgaagtgaa

SEQ ID NO: 129739 - DNA, 80 bp, synthetic construct
  misc_feature 1..80: note = Artificially Synthesized Probe
  source 1..80: mol_type = other DNA
caggagctcccctcagccctgacaactgtagatgtccccagacatcacccagtgtcccctgggggcagagccgctgcggt

SEQ ID NO: 129740 - DNA, 80 bp, synthetic construct; identical to SEQ ID NO: 41275
  misc_feature 1..80: note = Artificially Synthesized Probe
  source 1..80: mol_type = other DNA

SEQ ID NO: 129741 - DNA, 80 bp, synthetic construct
  misc_feature 1..80: note = Artificially Synthesized Probe
  source 1..80: mol_type = other DNA
tccaaggcccctggaccagccctgtggcctctgccttggtctcccggtgccactcatagtctgtcctccaagcagccacc

SEQ ID NO: 129742 - DNA, 80 bp, synthetic construct
  misc_feature 1..80: note = Artificially Synthesized Probe
  source 1..80: mol_type = other DNA
ccctgccccgccctccccccttccctctctccctctcctcactctgctccaaccccacgggtctcctggctgttcctccc

SEQ ID NO: 129743 - DNA, 80 bp, synthetic construct; identical to SEQ ID NO: 41276
  misc_feature 1..80: note = Artificially Synthesized Probe
  source 1..80: mol_type = other DNA

SEQ ID NO: 129744 - DNA, 80 bp, synthetic construct
  misc_feature 1..80: note = Artificially Synthesized Probe
  source 1..80: mol_type = other DNA
gccggccccgccggtcttacccaccctcctgaagttgctgactggggcgcccatgtcaccaggtgcccccacggtgacac

SEQ ID NO: 129745 - DNA, 80 bp, synthetic construct
  misc_feature 1..80: note = Artificially Synthesized Probe
  source 1..80: mol_type = other DNA
tggttgtgcatgaggctggtgctgcctgcgaggccgtcctcggggtggctgcctccaacctgcaggcgtggggagacggg

SEQ ID NO: 129746 - DNA, 80 bp, synthetic construct; identical to SEQ ID NO: 41311
  misc_feature 1..80: note = Artificially Synthesized Probe
  source 1..80: mol_type = other DNA

SEQ ID NO: 129747 - DNA, 80 bp, synthetic construct
  misc_feature 1..80: note = Artificially Synthesized Probe
  source 1..80: mol_type = other DNA
ccccagtttaaacctctggtttaacaaccatccaccacttatttctcttcccatgaaggtgtgcctttcagaggaaggca

SEQ ID NO: 129748 - DNA, 80 bp, synthetic construct
  misc_feature 1..80: note = Artificially Synthesized Probe
  source 1..80: mol_type = other DNA
cggctcactgcaacctctgcctcctgggttcaaatgattctcctgcctcagcctcccgcatagcggggactacaggcgtg

SEQ ID NO: 129749 - DNA, 80 bp, synthetic construct; identical to SEQ ID NO: 41322
  misc_feature 1..80: note = Artificially Synthesized Probe
  source 1..80: mol_type = other DNA

SEQ ID NO: 129750 - DNA, 80 bp, synthetic construct
  misc_feature 1..80: note = Artificially Synthesized Probe
  source 1..80: mol_type = other DNA
gcggagagactcacgcccaaaagggccctgaagtctctgggttcggagagactcacgcccagcagggccccagggtctcg

SEQ ID NO: 129751 - DNA, 80 bp, synthetic construct
  misc_feature 1..80: note = Artificially Synthesized Probe
  source 1..80: mol_type = other DNA
acagaaaactgctcccgttgtgagcaccctcactcccacagaaagatgcatttctgctcagccccagatgggacgagggg

SEQ ID NO: 129752 - DNA, 80 bp, synthetic construct
  misc_feature 1..80: note = Artificially Synthesized Probe
  source 1..80: mol_type = other DNA
cacttcagcagcatctgaggctgctcgccccacacagggcgttcaaggatgacccctgggcaggtggggcccgcactggc

SEQ ID NO: 129753 - DNA, 80 bp, synthetic construct
  misc_feature 1..80: note = Artificially Synthesized Probe
  source 1..80: mol_type = other DNA
tccgggtatccagcagcaggccgcaccaggggaataggccgtgggccggcatctgaacaaaagccgtgccacccagggcc

SEQ ID NO: 129754 - DNA, 80 bp, synthetic construct; identical to SEQ ID NO: 41323
  misc_feature 1..80: note = Artificially Synthesized Probe
  source 1..80: mol_type = other DNA

SEQ ID NO: 129755 - DNA, 80 bp, synthetic construct
  misc_feature 1..80: note = Artificially Synthesized Probe
  source 1..80: mol_type = other DNA
atcccgttatagactcatctgtggtccggggcagactaaaatctggacaagaaattgccaccatcccaccttcttttaag

SEQ ID NO: 129756 - DNA, 80 bp, synthetic construct
  misc_feature 1..80: note = Artificially Synthesized Probe
  source 1..80: mol_type = other DNA
ctcgccgagtcatgagcctcgctcacccagctcagggagcccccctgtgcccggtagcctctgctctggcctgggcatcc

SEQ ID NO: 129757 - DNA, 80 bp, synthetic construct; identical to SEQ ID NO: 41324
  misc_feature 1..80: note = Artificially Synthesized Probe
  source 1..80: mol_type = other DNA

SEQ ID NO: 129758 - DNA, 80 bp, synthetic construct
  misc_feature 1..80: note = Artificially Synthesized Probe
  source 1..80: mol_type = other DNA
agcccagggcggccctggagggtggacctggagggtggacttggagggcgggtccaaatgggttttcacaaacacagccc

SEQ ID NO: 129759 - DNA, 80 bp, synthetic construct
  misc_feature 1..80: note = Artificially Synthesized Probe
  source 1..80: mol_type = other DNA
aggccaggtcccctgtgcctgattttagtttgattcacaaaaatcaactctgaaacccactcctagccatctccgtggtt

SEQ ID NO: 129760 - DNA, 80 bp, synthetic construct
  misc_feature 1..80: note = Artificially Synthesized Probe
  source 1..80: mol_type = other DNA
gcaggccctgtgcacagctcctgggggtctcactggggccccaggagccgccactcttgactttccaaagagcagcagga

SEQ ID NO: 129761 - DNA, 80 bp, synthetic construct
  misc_feature 1..80: note = Artificially Synthesized Probe
  source 1..80: mol_type = other DNA
agagaggacttggcagagacaacgctgcggtgccaggggcaggacacggggggctcaactgcaaagcccacaggctgtgg

SEQ ID NO: 129762 - DNA, 80 bp, synthetic construct
  misc_feature 1..80: note = Artificially Synthesized Probe
  source 1..80: mol_type = other DNA
gggccggcggcgcccttggcccccagcgacatccctgggggaaaacagaggctgaggagtcacaggcccagcccagctcc

SEQ ID NO: 129763 - DNA, 80 bp, synthetic construct; identical to SEQ ID NO: 41325
  misc_feature 1..80: note = Artificially Synthesized Probe
  source 1..80: mol_type = other DNA

SEQ ID NO: 129764 - DNA, 80 bp, synthetic construct
  misc_feature 1..80: note = Artificially Synthesized Probe
  source 1..80: mol_type = other DNA
aaaaataactgaagacggtaagaaagctggggctgggaacctcgccccctctgagccacgtggtgccctttaccagcatg

SEQ ID NO: 129765 - DNA, 80 bp, synthetic construct
  misc_feature 1..80: note = Artificially Synthesized Probe
  source 1..80: mol_type = other DNA
cactttcctccaaatcccagagcaagttgtgtgtacaagaaatttttgtttctgttacataaacttatttcaatctagaa

SEQ ID NO: 129766 - DNA, 80 bp, synthetic construct; identical to SEQ ID NO: 41326
  misc_feature 1..80: note = Artificially Synthesized Probe
  source 1..80: mol_type = other DNA

SEQ ID NO: 129767 - DNA, 80 bp, synthetic construct
  misc_feature 1..80: note = Artificially Synthesized Probe
  source 1..80: mol_type = other DNA
ctgctataaagacacatgcacacgtatgtttattgcggcactattcacagtagcaaagacttgcaaccaacccaaatgtc

SEQ ID NO: 129768 - DNA, 80 bp, synthetic construct
  misc_feature 1..80: note = Artificially Synthesized Probe
  source 1..80: mol_type = other DNA
catgttctcactcacaggtgggaactgaacaatgagaacacttggacacagggtggggaacatcacacaccagggcctgt

SEQ ID NO: 129769 - DNA, 80 bp, synthetic construct
  misc_feature 1..80: note = Artificially Synthesized Probe
  source 1..80: mol_type = other DNA
aagtaactgctgtcaataaaagccagctgagttgaaccacattaggttggcacgatatttaggtgtgtgcgtccttgggt

SEQ ID NO: 129770 - DNA, 80 bp, synthetic construct
  misc_feature 1..80: note = Artificially Synthesized Probe
  source 1..80: mol_type = other DNA
ccctaacggaacctgggtgacgtgacagaagctggtgtgcttcctcggtgttgaattcacatgctcatcatgcagggcag

SEQ ID NO: 129771 - DNA, 80 bp, synthetic construct
  misc_feature 1..80: note = Artificially Synthesized Probe
  source 1..80: mol_type = other DNA
aggtgaaatttccacaacacagaaagaacagaaagtagaagctgttaagctcaggaccgcaggttcgacatggcttgaat

SEQ ID NO: 129772 - DNA, 80 bp, synthetic construct; identical to SEQ ID NO: 41327
  misc_feature 1..80: note = Artificially Synthesized Probe
  source 1..80: mol_type = other DNA

SEQ ID NO: 129773 - DNA, 80 bp, synthetic construct
  misc_feature 1..80: note = Artificially Synthesized Probe
  source 1..80: mol_type = other DNA
acctggggcgggaagacacaggtgagagacgggcagggcatgtgctggacatgcgtacactcaaaccgagccacacacag

SEQ ID NO: 129774 - DNA, 80 bp, synthetic construct
  misc_feature 1..80: note = Artificially Synthesized Probe
  source 1..80: mol_type = other DNA
ttgctctgaatcatcaaggttttctttcattaaggtttcttaaatcttagagtttattcacagaaccagacacttgaccc

SEQ ID NO: 129775 - DNA, 80 bp, synthetic construct; identical to SEQ ID NO: 41328
  misc_feature 1..80: note = Artificially Synthesized Probe
  source 1..80: mol_type = other DNA

SEQ ID NO: 129776 - DNA, 80 bp, synthetic construct
  misc_feature 1..80: note = Artificially Synthesized Probe
  source 1..80: mol_type = other DNA
taaaaagaggctttccggctgggcgtgatggctcacacctgtaatcccagcactttgggaggccgaggtgggtggatcac

SEQ ID NO: 129777 - DNA, 80 bp, synthetic construct
  misc_feature 1..80: note = Artificially Synthesized Probe
  source 1..80: mol_type = other DNA
agtgagttgagatcgcgccactgcactcaagcccaggcagacaacagtgacgttccgtctcaaaaaaaaaaaaagaaaga

SEQ ID NO: 129778 - DNA, 80 bp, synthetic construct
  misc_feature 1..80: note = Artificially Synthesized Probe
  source 1..80: mol_type = other DNA
tctctgttcttagtttttggggcaacaggttttgaagacgtttttattcagaggccaaactggaccacgatggggactag

SEQ ID NO: 129779 - DNA, 80 bp, synthetic construct; identical to SEQ ID NO: 41329
  misc_feature 1..80: note = Artificially Synthesized Probe
  source 1..80: mol_type = other DNA

SEQ ID NO: 129780 - DNA, 80 bp, synthetic construct
  misc_feature 1..80: note = Artificially Synthesized Probe
  source 1..80: mol_type = other DNA
agtgattacttataatgcaataattaatagttatatttttaaataaaagcttccgaagctgtgcacagtcctttatccgc

SEQ ID NO: 129781 - DNA, 80 bp, synthetic construct
  misc_feature 1..80: note = Artificially Synthesized Probe
  source 1..80: mol_type = other DNA
aatccagaggacgtgatgtggcaccaggcactgtggctctaccaccgtgagtgtggctcacccagtggctgtgtgacggc

SEQ ID NO: 129782 - DNA, 80 bp, synthetic construct
  misc_feature 1..80: note = Artificially Synthesized Probe
  source 1..80: mol_type = other DNA
aaaatccttttgtatcgggagagagagatacaagcgtgtgagagccgggtgtccagcgtcagtagtaacttggagctgac

SEQ ID NO: 129783 - DNA, 80 bp, synthetic construct
  misc_feature 1..80: note = Artificially Synthesized Probe
  source 1..80: mol_type = other DNA
ttggcctgggtttgcacaagggccctaagtgccatggacgggagacagcccaatcccaccacagggcaaacaggagaggc

SEQ ID NO: 129784 - DNA, 80 bp, synthetic construct
  misc_feature 1..80: note = Artificially Synthesized Probe
  source 1..80: mol_type = other DNA
ctcgggagcctgcagcccaggagccggagggggcgggggccagaaaaggagactctggtggccccgggcagaagggcagt

SEQ ID NO: 129785 - DNA, 80 bp, synthetic construct; identical to SEQ ID NO: 41330
  misc_feature 1..80: note = Artificially Synthesized Probe
  source 1..80: mol_type = other DNA

SEQ ID NO: 129786 - DNA, 80 bp, synthetic construct
  misc_feature 1..80: note = Artificially Synthesized Probe
  source 1..80: mol_type = other DNA
gtccagctgggctcacacccacacagcccaccgtggcccggatggcatatgtgatccaggagttgctgcccagctgccgg

SEQ ID NO: 129787 - DNA, 80 bp, synthetic construct
  misc_feature 1..80: note = Artificially Synthesized Probe
  source 1..80: mol_type = other DNA
ggacagaccacatctgcaaagggccacagggccacgtggacagacccagcactgagaggcccgctcagcggggcgtggct

SEQ ID NO: 129788 - DNA, 80 bp, synthetic construct; identical to SEQ ID NO: 41331
  misc_feature 1..80: note = Artificially Synthesized Probe
  source 1..80: mol_type = other DNA

SEQ ID NO: 129789 - DNA, 80 bp, synthetic construct
  misc_feature 1..80: note = Artificially Synthesized Probe
  source 1..80: mol_type = other DNA
tccgtgcccaaccctgcagggcagtgcccagacctgctcgatgacgacggcatccctcagcgggctggtctcctgcaggt

SEQ ID NO: 129790 - DNA, 80 bp, synthetic construct
  misc_feature 1..80: note = Artificially Synthesized Probe
  source 1..80: mol_type = other DNA
gatgaagcccagagagcgcctgggaagcttctgtttgggaaacgggggccggggggccgaggacgcaaagtagctacaga

SEQ ID NO: 129791 - DNA, 80 bp, synthetic construct
  misc_feature 1..80: note = Artificially Synthesized Probe
  source 1..80: mol_type = other DNA
ccacagtcaccacacatcagaccccacgaccgccatccacagtcaccacacatcagaccccacgaccgccatccacagtc

SEQ ID NO: 129792 - DNA, 80 bp, synthetic construct
  misc_feature 1..80: note = Artificially Synthesized Probe
  source 1..80: mol_type = other DNA
accgccatccacagtcaccacacatcagaccccacgaccgccatccacagtcaccacacatcagacccctgtgaccgatc

SEQ ID NO: 129793 - DNA, 80 bp, synthetic construct
  misc_feature 1..80: note = Artificially Synthesized Probe
  source 1..80: mol_type = other DNA
cagtcaccacacatcagaccccacgaccgccatccacagtcaccacatcagaccccacgaccgccatccacagtcaccac

SEQ ID NO: 129794 - DNA, 80 bp, synthetic construct; identical to SEQ ID NO: 41313
  misc_feature 1..80: note = Artificially Synthesized Probe
  source 1..80: mol_type = other DNA

SEQ ID NO: 129795 - DNA, 80 bp, synthetic construct
  misc_feature 1..80: note = Artificially Synthesized Probe
  source 1..80: mol_type = other DNA
ggtggaaggcaaaggagggcagggcgaggggtgaacaatggcgaatctggggatggactattcctatgtggggagtggaa

SEQ ID NO: 129796 - DNA, 80 bp, synthetic construct; identical to SEQ ID NO: 41332
  misc_feature 1..80: note = Artificially Synthesized Probe
  source 1..80: mol_type = other DNA

SEQ ID NO: 129797 - DNA, 80 bp, synthetic construct
  misc_feature 1..80: note = Artificially Synthesized Probe
  source 1..80: mol_type = other DNA
atcagaccccacgaccgccatccacagtcaccacacatcagacccccgggaccaaccgccatccacagtcaccacacatc

SEQ ID NO: 129798 - DNA, 80 bp, synthetic construct
  misc_feature 1..80: note = Artificially Synthesized Probe
  source 1..80: mol_type = other DNA
actgccatccacagtcacgtggcacaagtggcactcgagctcccgggcctctccagcccagtgctggagggattgcaggg

SEQ ID NO: 129799 - DNA, 80 bp, synthetic construct
  misc_feature 1..80: note = Artificially Synthesized Probe
  source 1..80: mol_type = other DNA
gtgacacacactaacacggacacaggaggcctcgagcttgtgaggcatcaaaagacgcgcacggtgactctgtgcttcag

SEQ ID NO: 129800 - DNA, 80 bp, synthetic construct; identical to SEQ ID NO: 41333
  misc_feature 1..80: note = Artificially Synthesized Probe
  source 1..80: mol_type = other DNA

SEQ ID NO: 129801 - DNA, 80 bp, synthetic construct
  misc_feature 1..80: note = Artificially Synthesized Probe
  source 1..80: mol_type = other DNA
ttcccataaggagcacagaatctagacccctctcacgcacagttctcagtagggtgtgtgcgcctctgagcaccgcatgc

SEQ ID NO: 129802 - DNA, 80 bp, synthetic construct
  misc_feature 1..80: note = Artificially Synthesized Probe
  source 1..80: mol_type = other DNA
gggcctcgggatccctgctttagagggaaaacggcaacttcagatgcttgtttagaaaagaaagttcaaacatccataat

SEQ ID NO: 129803 - DNA, 80 bp, synthetic construct
  misc_feature 1..80: note = Artificially Synthesized Probe
  source 1..80: mol_type = other DNA
acgtgaaactcttctgtgaagagagtcatgaaatggaaagacccctagcgagacctggagaaggaaaacggaggttgtca

SEQ ID NO: 129804 - DNA, 80 bp, synthetic construct
  misc_feature 1..80: note = Artificially Synthesized Probe
  source 1..80: mol_type = other DNA
aatgtggggttcttccaaacttgctgatgaaatgggagctgcagcacacatgcgtgaaacctgagaggatggcggacagc

SEQ ID NO: 129805 - DNA, 80 bp, synthetic construct; identical to SEQ ID NO: 41334
  misc_feature 1..80: note = Artificially Synthesized Probe
  source 1..80: mol_type = other DNA

SEQ ID NO: 129806 - DNA, 80 bp, synthetic construct
  misc_feature 1..80: note = Artificially Synthesized Probe
  source 1..80: mol_type = other DNA
ggaattccaaggacggagcgtagccagggccacatccaggccaatgaacacaaggaggcctggaagccctgcccaccggc

SEQ ID NO: 129807 - DNA, 80 bp, synthetic construct
  misc_feature 1..80: note = Artificially Synthesized Probe
  source 1..80: mol_type = other DNA
caggaagaaagctcgccttgaactctgtgttaccccactcataaaaaccaatcccacagatccccacctatcccacacat

SEQ ID NO: 129808 - DNA, 80 bp, synthetic construct
  misc_feature 1..80: note = Artificially Synthesized Probe
  source 1..80: mol_type = other DNA
atcccacagatctccacctaccctacacatgaaaaccaactccacagatccccacctacccccacacataaaaaccaact

SEQ ID NO: 129809 - DNA, 80 bp, synthetic construct
  misc_feature 1..80: note = Artificially Synthesized Probe
  source 1..80: mol_type = other DNA
cccacctaccccacacataaaaaccaatcccacaggtccccacctaccccacacatagaaaccaatcccacagatcccca

SEQ ID NO: 129810 - DNA, 80 bp, synthetic construct; identical to SEQ ID NO: 41335
  misc_feature 1..80: note = Artificially Synthesized Probe
  source 1..80: mol_type = other DNA

SEQ ID NO: 129811 - DNA, 80 bp, synthetic construct
  misc_feature 1..80: note = Artificially Synthesized Probe
  source 1..80: mol_type = other DNA
atccccacctaccccacggatgaaaaccaattcacagatctccacctacaccacacatgaaaaccaatcccacagatccc

SEQ ID NO: 129812 - DNA, 80 bp, synthetic construct
  misc_feature 1..80: note = Artificially Synthesized Probe
  source 1..80: mol_type = other DNA
ctgataaagtggactgcgttactggactgtgttagtggactgcgatagaagtacaatcttccagtcctcaaaaggcttga

SEQ ID NO: 129813 - DNA, 80 bp, synthetic construct
  misc_feature 1..80: note = Artificially Synthesized Probe
  source 1..80: mol_type = other DNA
gagccccggggcggccagcacgggaacactgtgggcacgtgggcatcaagagagccccctgcacaatcccacgaggcggc

SEQ ID NO: 129814 - DNA, 80 bp, synthetic construct
  misc_feature 1..80: note = Artificially Synthesized Probe
  source 1..80: mol_type = other DNA
acggatgcatgcatgcatgtctgtgtgtgtgcttgtgtgtgcgagtagctgcgtgtctgtgtgtgcacaggtacactgcg

SEQ ID NO: 129815 - DNA, 80 bp, synthetic construct; identical to SEQ ID NO: 41336
  misc_feature 1..80: note = Artificially Synthesized Probe
  source 1..80: mol_type = other DNA

SEQ ID NO: 129816 - DNA, 80 bp, synthetic construct
  misc_feature 1..80: note = Artificially Synthesized Probe
  source 1..80: mol_type = other DNA
aggtcggaacgagggtcacggtgggggcggtagcttccgctgcagcggggatgtgggggggggtctcctgggctctggtg

SEQ ID NO: 129817 - DNA, 80 bp, synthetic construct
  misc_feature 1..80: note = Artificially Synthesized Probe
  source 1..80: mol_type = other DNA
aagaggtccttgtgggtttccacatgtgcctctccccagaccgaagctccagggatacttcttcacctctgcaccccggc

SEQ ID NO: 129818 - DNA, 80 bp, synthetic construct
  misc_feature 1..80: note = Artificially Synthesized Probe
  source 1..80: mol_type = other DNA
tcatggagccggcataggccagactggggtcctgggggtgccaggggtccaggaaggtaccaccagcatccctactctcc

SEQ ID NO: 129819 - DNA, 80 bp, synthetic construct; identical to SEQ ID NO: 41337
  misc_feature 1..80: note = Artificially Synthesized Probe
  source 1..80: mol_type = other DNA

SEQ ID NO: 129820 - DNA, 80 bp, synthetic construct
  misc_feature 1..80: note = Artificially Synthesized Probe
  source 1..80: mol_type = other DNA
atatcacagatgtgtaaatcatggaagtacctccaccacagaaacgcatcacagacacgactgcattctagacacattca

SEQ ID NO: 129821 - DNA, 80 bp, synthetic construct
  misc_feature 1..80: note = Artificially Synthesized Probe
  source 1..80: mol_type = other DNA
gagcctgtcctgggggatggtgtcgtacgcgcccgtcacatccacctgtgtgagtggaggcgaggagactgacagtggcc

SEQ ID NO: 129822 - DNA, 80 bp, synthetic construct; identical to SEQ ID NO: 41338
  misc_feature 1..80: note = Artificially Synthesized Probe
  source 1..80: mol_type = other DNA

SEQ ID NO: 129823 - DNA, 80 bp, synthetic construct
  misc_feature 1..80: note = Artificially Synthesized Probe
  source 1..80: mol_type = other DNA
gtttatccattgttccttgtgtaccagcaggtacttatcatgaatcctgcccttcgtcagacaaccttgatgtcatcgta

SEQ ID NO: 129824 - DNA, 80 bp, synthetic construct
  misc_feature 1..80: note = Artificially Synthesized Probe
  source 1..80: mol_type = other DNA
aatcaggcagccactcccaaggtccagcagggctgctcacgggggtccccggcacccaccttgacaaagtacagctcagg

SEQ ID NO: 129825 - DNA, 80 bp, synthetic construct
  misc_feature 1..80: note = Artificially Synthesized Probe
  source 1..80: mol_type = other DNA
tggcggggacagcatgggagacagtcaggaaagtggatccggccaagtgcccaccccaccatagggacccaggggagaag

SEQ ID NO: 129826 - DNA, 80 bp, synthetic construct
  misc_feature 1..80: note = Artificially Synthesized Probe
  source 1..80: mol_type = other DNA
acggggtcaccgcagccaccgcagccacaggggtggggtgcaggagccgtggggcaaggtccaggatcctcagagcccgg

SEQ ID NO: 129827 - DNA, 80 bp, synthetic construct
  misc_feature 1..80: note = Artificially Synthesized Probe
  source 1..80: mol_type = other DNA
ggagctccccctacacccccacgctgcttttctggaggcaccggcacctcggccacctcactgtgcgcacaaatgggttg

SEQ ID NO: 129828 - DNA, 80 bp, synthetic construct; identical to SEQ ID NO: 41339
  misc_feature 1..80: note = Artificially Synthesized Probe
  source 1..80: mol_type = other DNA

SEQ ID NO: 129829 - DNA, 80 bp, synthetic construct
  misc_feature 1..80: note = Artificially Synthesized Probe
  source 1..80: mol_type = other DNA
gggctcagggcacccacggcagcacacgctgaaggccatgcccggggccacgtccacccatgccagccagacgcctctga

SEQ ID NO: 129830 - DNA, 80 bp, synthetic construct
  misc_feature 1..80: note = Artificially Synthesized Probe
  source 1..80: mol_type = other DNA
acaggatgcctgtccctctggtacagccactggggtagcccaaggctggccccaggcaggacccccaggtagaaagagcc

SEQ ID NO: 129831 - DNA, 80 bp, synthetic construct
  misc_feature 1..80: note = Artificially Synthesized Probe
  source 1..80: mol_type = other DNA
tggacctgggcatctgtggctgacagcctggcactccgtggacactggggccgcgggtgctccggagctggtgccctgac

SEQ ID NO: 129832 - DNA, 80 bp, synthetic construct; identical to SEQ ID NO: 41340
  misc_feature 1..80: note = Artificially Synthesized Probe
  source 1..80: mol_type = other DNA

SEQ ID NO: 129833 - DNA, 80 bp, synthetic construct; identical to SEQ ID NO: 41314
  misc_feature 1..80: note = Artificially Synthesized Probe
  source 1..80: mol_type = other DNA

SEQ ID NO: 129834 - DNA, 80 bp, synthetic construct
  misc_feature 1..80: note = Artificially Synthesized Probe
  source 1..80: mol_type = other DNA
gctccctctgcagacatcctgatttggggcatggggtgtcacaaggccccccagggactcgagtgtgcaggggagctggg

SEQ ID NO: 129835 - DNA, 80 bp, synthetic construct
  misc_feature 1..80: note = Artificially Synthesized Probe
  source 1..80: mol_type = other DNA
actgatgcaaatccagcttgaatctgtcacaatctcacactctcatcagccgaacattgcagacaaaatctcacagccat

SEQ ID NO: 129836 - DNA, 80 bp, synthetic construct; identical to SEQ ID NO: 41341
  misc_feature 1..80: note = Artificially Synthesized Probe
  source 1..80: mol_type = other DNA

SEQ ID NO: 129837 - DNA, 80 bp, synthetic construct
  misc_feature 1..80: note = Artificially Synthesized Probe
  source 1..80: mol_type = other DNA
gtggcaggtgcctgtaatcccagctacttaggaggctgaggctggtgaatcgcttaaacccaggaggtggaggttgcagt

SEQ ID NO: 129838 - DNA, 80 bp, synthetic construct
  misc_feature 1..80: note = Artificially Synthesized Probe
  source 1..80: mol_type = other DNA
aaaccctagagaccacttggcacaaactcctgattttacaagtaagagaacgtgagctccaggcagtcagagccttgcac

SEQ ID NO: 129839 - DNA, 80 bp, synthetic construct
  misc_feature 1..80: note = Artificially Synthesized Probe
  source 1..80: mol_type = other DNA
attccaatgctttgcaacttgctccagacactcttccggtagaaaaagagcctgttcttttgaaacgtggtctccgtgac

SEQ ID NO: 129840 - DNA, 80 bp, synthetic construct
  misc_feature 1..80: note = Artificially Synthesized Probe
  source 1..80: mol_type = other DNA
gagaaggacatgccacatccagatcaccgagggcctggtgacctcaccccggacctgcaccatccggacaccgcacatcc

SEQ ID NO: 129841 - DNA, 80 bp, synthetic construct
  misc_feature 1..80: note = Artificially Synthesized Probe
  source 1..80: mol_type = other DNA
acctgcagcatccagacaccacacatccagctcaccgcagggcctggcgaactcaccccggacctgcaccatccagacaa

SEQ ID NO: 129842 - DNA, 80 bp, synthetic construct
  misc_feature 1..80: note = Artificially Synthesized Probe
  source 1..80: mol_type = other DNA
acagcacatccagctcaccgcagggcctggcgacctcaccccggacctgcaccatccggatacagcacatccagctcaca

SEQ ID NO: 129843 - DNA, 80 bp, synthetic construct
  misc_feature 1..80: note = Artificially Synthesized Probe
  source 1..80: mol_type = other DNA
gatacagcacatccagctcactgcagggcctggcgacctcaccccggacctgcaccatctggatacagcacatccagctc

SEQ ID NO: 129844 - DNA, 80 bp, synthetic construct
  misc_feature 1..80: note = Artificially Synthesized Probe
  source 1..80: mol_type = other DNA
tccggacaccccacatccagctcaccgaaggccttggctacctcaccccggacctgcaccatccagacaccgcacatcca

SEQ ID NO: 129845 - DNA, 80 bp, synthetic construct
  misc_feature 1..80: note = Artificially Synthesized Probe
  source 1..80: mol_type = other DNA
ttcatagagatggggttctactatgttgctcaggctggtcttaaactcctgggctcaagggatcctctcgcctcggcctc

SEQ ID NO: 129846 - DNA, 80 bp, synthetic construct; identical to SEQ ID NO: 41342
  misc_feature 1..80: note = Artificially Synthesized Probe
  source 1..80: mol_type = other DNA

SEQ ID NO: 129847 - DNA, 80 bp, synthetic construct
  misc_feature 1..80: note = Artificially Synthesized Probe
  source 1..80: mol_type = other DNA
agcacatccagctcacagcagggcctggcgacctcaccccggacctgcaccatccggatacagcacatccagctcacagc

SEQ ID NO: 129848 - DNA, 80 bp, synthetic construct
  misc_feature 1..80: note = Artificially Synthesized Probe
  source 1..80: mol_type = other DNA
ctccatacctccagctcaccgagggcctggcgaccacaccccagacctgcaccatccagacgccgcacatccagctcaca

SEQ ID NO: 129849 - DNA, 80 bp, synthetic construct
  misc_feature 1..80: note = Artificially Synthesized Probe
  source 1..80: mol_type = other DNA
gactccatacatccagctcaccgagggcctggcgacctcactccagacctgcaccatccagacaccgcacatccagctca

SEQ ID NO: 129850 - DNA, 80 bp, synthetic construct
  misc_feature 1..80: note = Artificially Synthesized Probe
  source 1..80: mol_type = other DNA
cagacaccacacatccagctcacagcagggcctggtgacctcacaccggacctgcagcatccggacaccccacatccaac

SEQ ID NO: 129851 - DNA, 80 bp, synthetic construct
  misc_feature 1..80: note = Artificially Synthesized Probe
  source 1..80: mol_type = other DNA
agacctgcaccatccagacaccacacatccagctcacagcagggcctggcgacctcaccccggacctgcatcatccggac

SEQ ID NO: 129852 - DNA, 80 bp, synthetic construct; identical to SEQ ID NO: 41344
  misc_feature 1..80: note = Artificially Synthesized Probe
  source 1..80: mol_type = other DNA

SEQ ID NO: 129853 - DNA, 80 bp, synthetic construct
  misc_feature 1..80: note = Artificially Synthesized Probe
  source 1..80: mol_type = other DNA
aaatgtcctgtgagtgatgctcccaccaataacaccctaaaatgatgaggtgtggacatgctgggcttcagtaaaatcta

SEQ ID NO: 129854 - DNA, 80 bp, synthetic construct
  misc_feature 1..80: note = Artificially Synthesized Probe
  source 1..80: mol_type = other DNA
caattctcctgcctcagcctcccgagtagctgggattacaggcacccgccaccacgcccagctaatttttgtgtttttag

SEQ ID NO: 129855 - DNA, 80 bp, synthetic construct; identical to SEQ ID NO: 41345
  misc_feature 1..80: note = Artificially Synthesized Probe
  source 1..80: mol_type = other DNA

SEQ ID NO: 129856 - DNA, 80 bp, synthetic construct
  misc_feature 1..80: note = Artificially Synthesized Probe
  source 1..80: mol_type = other DNA
ccccgtgtacctggtctgaccctctgcctgagccccccgtgtacctcatctcacccagtgcctgagccccccatgtacct

SEQ ID NO: 129857 - DNA, 80 bp, synthetic construct
  misc_feature 1..80: note = Artificially Synthesized Probe
  source 1..80: mol_type = other DNA
tccagacactcacgggccaagatgaccgccctcctcgtgagtctccacatcttcatctgtgcatcataagcagaggtccc

SEQ ID NO: 129858 - DNA, 80 bp, synthetic construct
  misc_feature 1..80: note = Artificially Synthesized Probe
  source 1..80: mol_type = other DNA
gcaaagctacagaaacactcaacacggaaaacaatattaataatgcttagcttgtgggggtgtcaagatgcctgagatag

SEQ ID NO: 129859 - DNA, 80 bp, synthetic construct
  misc_feature 1..80: note = Artificially Synthesized Probe
  source 1..80: mol_type = other DNA
ctgtgggaggccaaggcgggcagatcacttgaggtcaggagtttgagaccagcctggccaacatggtgaaagcctatctc

SEQ ID NO: 129860 - DNA, 80 bp, synthetic construct; identical to SEQ ID NO: 41346
  misc_feature 1..80: note = Artificially Synthesized Probe
  source 1..80: mol_type = other DNA

SEQ ID NO: 129861 - DNA, 80 bp, synthetic construct
  misc_feature 1..80: note = Artificially Synthesized Probe
  source 1..80: mol_type = other DNA
tcaggttatccagttaaacaacgactgtcagactggattggaaattcacctacatgctgttaacaggacatacccacact

SEQ ID NO: 129862 - DNA, 80 bp, synthetic construct
  misc_feature 1..80: note = Artificially Synthesized Probe
  source 1..80: mol_type = other DNA
gaaattcacctacatgctgttaacaggacatacccacactataagaatataaaagtgttgaaaattaggccagacatggt

SEQ ID NO: 129863 - DNA, 80 bp, synthetic construct
  misc_feature 1..80: note = Artificially Synthesized Probe
  source 1..80: mol_type = other DNA
caggaggctgaggtgagaggacggctcaggccagaaggtaaaagttacactgacctgtgatcacaccactgcactcaccc

SEQ ID NO: 129864 - DNA, 80 bp, synthetic construct; identical to SEQ ID NO: 41347
  misc_feature 1..80: note = Artificially Synthesized Probe
  source 1..80: mol_type = other DNA

SEQ ID NO: 129865 - DNA, 80 bp, synthetic construct
  misc_feature 1..80: note = Artificially Synthesized Probe
  source 1..80: mol_type = other DNA
caaatttacaatggacagttctggaaaccatgcacacactagatcacaaagcaaggctccgcaaacttcaaataattggt

SEQ ID NO: 129866 - DNA, 80 bp, synthetic construct
  misc_feature 1..80: note = Artificially Synthesized Probe
  source 1..80: mol_type = other DNA
ctcaaagaaatcacagaataagctaaagaatacttaaaagtcactgatatcaaaatgatttcacgtcaaaacacagcgtg

SEQ ID NO: 129867 - DNA, 80 bp, synthetic construct
  misc_feature 1..80: note = Artificially Synthesized Probe
  source 1..80: mol_type = other DNA
ggtaaggcagcacttagagggaaaggcatgactaaactaagaagctagaaaaggaatgaaagaataaaccaagaaaaagc

SEQ ID NO: 129868 - DNA, 80 bp, synthetic construct
  misc_feature 1..80: note = Artificially Synthesized Probe
  source 1..80: mol_type = other DNA
gaggtgggatgtcttttccccatttagcaacaacggaagccaggcccagaatgtttttaaacaaataaataagcctaagg

SEQ ID NO: 129869 - DNA, 80 bp, synthetic construct; identical to SEQ ID NO: 41348
  misc_feature 1..80: note = Artificially Synthesized Probe
  source 1..80: mol_type = other DNA

SEQ ID NO: 129870 - DNA, 80 bp, synthetic construct
  misc_feature 1..80: note = Artificially Synthesized Probe
  source 1..80: mol_type = other DNA
gcatgagacaagctgggagaggagtattggcagcatgcatgtggcgggcacgtggtgagcaagccaggcccaacagaggc

SEQ ID NO: 129871 - DNA, 80 bp, synthetic construct
  misc_feature 1..80: note = Artificially Synthesized Probe
  source 1..80: mol_type = other DNA
aggcaatgggcaaccggcgcagctgtggctatagaaagagcaaacattcaggagcaagctcaagtgagcaaacgccaagg

SEQ ID NO: 129872 - DNA, 80 bp, synthetic construct
  misc_feature 1..80: note = Artificially Synthesized Probe
  source 1..80: mol_type = other DNA
tgacagggacacccggggatggcgcctcactcaccctacacctgagagggacacccagggacggcgcctcactcacccta

SEQ ID NO: 129873 - DNA, 80 bp, synthetic construct
  misc_feature 1..80: note = Artificially Synthesized Probe
  source 1..80: mol_type = other DNA
tcaccctacacgtgacagggacacccggggacggcgcctcactcaccctacacgtgacagggacacccggggacggcgcc

SEQ ID NO: 129874 - DNA, 80 bp, synthetic construct; identical to SEQ ID NO: 41349
  misc_feature 1..80: note = Artificially Synthesized Probe
  source 1..80: mol_type = other DNA

SEQ ID NO: 129875 - DNA, 80 bp, synthetic construct
  misc_feature 1..80: note = Artificially Synthesized Probe
  source 1..80: mol_type = other DNA
acacccgggggccgtgcctcactcaccctgcacgtgacagggacacccgggggccgcgcctcactcaccctgcacgtgac

SEQ ID NO: 129876 - DNA, 80 bp, synthetic construct
  misc_feature 1..80: note = Artificially Synthesized Probe
  source 1..80: mol_type = other DNA
cacgtgacagggacacccggggacagtgcctcactcaccctacacgtgacagtgacacccggggaccgcgcctcactcac

SEQ ID NO: 129877 - DNA, 80 bp, synthetic construct
  misc_feature 1..80: note = Artificially Synthesized Probe
  source 1..80: mol_type = other DNA
tcactcaccctgcacgtgacagggacacgcggggacggcgcctcactcaccctgcacgtgacagggacacccgggggcct

SEQ ID NO: 129878 - DNA, 80 bp, synthetic construct; identical to SEQ ID NO: 41350
  misc_feature 1..80: note = Artificially Synthesized Probe
  source 1..80: mol_type = other DNA

SEQ ID NO: 129879 - DNA, 80 bp, synthetic construct
  misc_feature 1..80: note = Artificially Synthesized Probe
  source 1..80: mol_type = other DNA
gccccagcggatttgaatcagaccccgcccccagcgccacgtggaccaccacagcctcgcccactgcagcctggctgccg

SEQ ID NO: 129880 - DNA, 80 bp, synthetic construct
  misc_feature 1..80: note = Artificially Synthesized Probe
  source 1..80: mol_type = other DNA
acagggacacccgggggccgcgcctcactcaccctgcacgtgacagggacacccgggggccgtgcctcactcaccctgca

SEQ ID NO: 129881 - DNA, 80 bp, synthetic construct; identical to SEQ ID NO: 41351
  misc_feature 1..80: note = Artificially Synthesized Probe
  source 1..80: mol_type = other DNA

SEQ ID NO: 129882 - DNA, 80 bp, synthetic construct
  misc_feature 1..80: note = Artificially Synthesized Probe
  source 1..80: mol_type = other DNA
gcgcctcactcaccctgcacgtgacagggacacccggggacagcgcctcactcaccctgcacgggacagggacacccggg

SEQ ID NO: 129883 - DNA, 80 bp, synthetic construct
  misc_feature 1..80: note = Artificially Synthesized Probe
  source 1..80: mol_type = other DNA
cacccggggacagtgcctcactcaccctgcacgggacagggacacccgggggccacacctcaatcacgctgcacgggaca

SEQ ID NO: 129884 - DNA, 80 bp, synthetic construct
  misc_feature 1..80: note = Artificially Synthesized Probe
  source 1..80: mol_type = other DNA
gcaatgacaggcagagtcctgatcagagaactcaaactctcctcaacgaaggaagctggagcacaaaaagcaaaactggg

SEQ ID NO: 129885 - DNA, 80 bp, synthetic construct
  misc_feature 1..80: note = Artificially Synthesized Probe
  source 1..80: mol_type = other DNA
gtaaacaccgccgagttagcaattctgcactgtacacagaaaacggtgttaggagtgccaatctcatgttatatgacttt

SEQ ID NO: 129886 - DNA, 80 bp, synthetic construct
  misc_feature 1..80: note = Artificially Synthesized Probe
  source 1..80: mol_type = other DNA
cttctagctgccacggtagggcctgggagcactgggagccaaaagggggctggagcggaggttcctcaacatcaaatcca

SEQ ID NO: 129887 - DNA, 80 bp, synthetic construct; identical to SEQ ID NO: 41352
  misc_feature 1..80: note = Artificially Synthesized Probe
  source 1..80: mol_type = other DNA

SEQ ID NO: 129888 - DNA, 80 bp, synthetic construct
  misc_feature 1..80: note = Artificially Synthesized Probe
  source 1..80: mol_type = other DNA
ccagctaatttttgtatttttagtacagatagggtttcaccatgttggtcaggctggtctcaaactcctgacctcaggtg

SEQ ID NO: 129889 - DNA, 80 bp, synthetic construct
  misc_feature 1..80: note = Artificially Synthesized Probe
  source 1..80: mol_type = other DNA
gtccccacctctcattcccacccttgaaattgcgaagaggattataggtaacctgcaggcaccctcgccagagcgtctgt

SEQ ID NO: 129890 - DNA, 80 bp, synthetic construct
  misc_feature 1..80: note = Artificially Synthesized Probe
  source 1..80: mol_type = other DNA
acctcgtaagtttatgcaaactggacaggagggagagcagaggcagagatcaccgtgtccactcgacgtcctgagcgaaa

SEQ ID NO: 129891 - DNA, 80 bp, synthetic construct; identical to SEQ ID NO: 41315
  misc_feature 1..80: note = Artificially Synthesized Probe
  source 1..80: mol_type = other DNA

SEQ ID NO: 129892 - DNA, 80 bp, synthetic construct; identical to SEQ ID NO: 41353
  misc_feature 1..80: note = Artificially Synthesized Probe
  source 1..80: mol_type = other DNA

SEQ ID NO: 129893 - DNA, 80 bp, synthetic construct
  misc_feature 1..80: note = Artificially Synthesized Probe
  source 1..80: mol_type = other DNA
ggggcttctcccgggcacagacaccggctgctggggtgaccgcagctcgcagcgggcagtgcgtcttgaggagcaccccg

SEQ ID NO: 129894 - DNA, 80 bp, synthetic construct
  misc_feature 1..80: note = Artificially Synthesized Probe
  source 1..80: mol_type = other DNA
gcctcagagagctgagtaggaaggagggccgcagctgctccttgtcgcctgaggagtagaggaagtgcttggtctcggcg

SEQ ID NO: 129895 - DNA, 80 bp, synthetic construct
  misc_feature 1..80: note = Artificially Synthesized Probe
  source 1..80: mol_type = other DNA
aaagaggtggcttcttcggcgggtctggcaggtgacaccacacagaaaccacggtcactcggtccacgcgtcctgcccgg

SEQ ID NO: 129896 - DNA, 80 bp, synthetic construct; identical to SEQ ID NO: 41354
  misc_feature 1..80: note = Artificially Synthesized Probe
  source 1..80: mol_type = other DNA

SEQ ID NO: 129897 - DNA, 80 bp, synthetic construct
  misc_feature 1..80: note = Artificially Synthesized Probe
  source 1..80: mol_type = other DNA
cccccacgccccgctcccccgcagtgcgtcggtcaccgtgttgggcaggtagctgcgcacgctggtggtgaaggcctcgg

SEQ ID NO: 129898 - DNA, 80 bp, synthetic construct
  misc_feature 1..80: note = Artificially Synthesized Probe
  source 1..80: mol_type = other DNA
cgctggttccccccggccgccctcaaccccagccggacgccgaccccggggaggcccacctggcggaaggagggggcggc

SEQ ID NO: 129899 - DNA, 80 bp, synthetic construct
  misc_feature 1..80: note = Artificially Synthesized Probe
  source 1..80: mol_type = other DNA
agggagcgcacggctcggcagcggggagcgcgcggcatcgcgggggtggccggggccagggcttcccacgtgcgcagcag

SEQ ID NO: 129900 - DNA, 80 bp, synthetic construct
  misc_feature 1..80: note = Artificially Synthesized Probe
  source 1..80: mol_type = other DNA
tgtcagacacctccagtcctcagtggcacctgtatccagcacaccccaagggtttccggaaaggagtcaagcagcttgca

SEQ ID NO: 129901 - DNA, 80 bp, synthetic construct
  misc_feature 1..80: note = Artificially Synthesized Probe
  source 1..80: mol_type = other DNA
ccaaacactcactcaggcctcagactcccagcggtgcgggcctgggtgtgggccgcccctccctccctgggacgtagagc

SEQ ID NO: 129902 - DNA, 80 bp, synthetic construct
  misc_feature 1..80: note = Artificially Synthesized Probe
  source 1..80: mol_type = other DNA
ggctctgccctccctgccagagcatgaaggcgcaagcactcgggttaaaaaccattttcatggtacgaccttgtaatgga

SEQ ID NO: 129903 - DNA, 80 bp, synthetic construct; identical to SEQ ID NO: 41316
  misc_feature 1..80: note = Artificially Synthesized Probe
  source 1..80: mol_type = other DNA

SEQ ID NO: 129904 - DNA, 80 bp, synthetic construct
  misc_feature 1..80: note = Artificially Synthesized Probe
  source 1..80: mol_type = other DNA
aggtgctggccgggctgtgtggggagccacagctctgctgcaccttcccgggggtggggccagcgaccctcacctgcacc

SEQ ID NO: 129905 - DNA, 80 bp, synthetic construct
  misc_feature 1..80: note = Artificially Synthesized Probe
  source 1..80: mol_type = other DNA
cagtgcacaggcacagtggggacacctggggccacaccggctcctaccactacccagagatggagaacaggtgctttgca

SEQ ID NO: 129906 - DNA, 80 bp, synthetic construct
  misc_feature 1..80: note = Artificially Synthesized Probe
  source 1..80: mol_type = other DNA
gctcacctgtacgcctgcagcaggaggatcttgtagatgttggtgcacaccgtctggaggctgttcacctagagtcgcca

SEQ ID NO: 129907 - DNA, 80 bp, synthetic construct; identical to SEQ ID NO: 41317
  misc_feature 1..80: note = Artificially Synthesized Probe
  source 1..80: mol_type = other DNA

SEQ ID NO: 129908 - DNA, 80 bp, synthetic construct
  misc_feature 1..80: note = Artificially Synthesized Probe
  source 1..80: mol_type = other DNA
atgtaaatgcccacaggagagggggagtggacacggacgcccacaggagagagggagtggatgcagatgcccacaggaga

SEQ ID NO: 129909 - DNA, 80 bp, synthetic construct
  misc_feature 1..80: note = Artificially Synthesized Probe
  source 1..80: mol_type = other DNA
gatgcccacaggagagggagtggacatggacgcccacaggagagagggagcagacgcagatgcccacaggagagggagtg

SEQ ID NO: 129910 - DNA, 80 bp, synthetic construct
  misc_feature 1..80: note = Artificially Synthesized Probe
  source 1..80: mol_type = other DNA
caggagagggagtggacgcagatgcccacaggagagggagtggacatggatgcccacaggagagggggagtggacacgga

SEQ ID NO: 129911 - DNA, 80 bp, synthetic construct
  misc_feature 1..80: note = Artificially Synthesized Probe
  source 1..80: mol_type = other DNA
gagggagtggatgcagatgcccacaggagagggagtggacgcggacgcccacaggaggggggagtggacacggacaacca

SEQ ID NO: 129912 - DNA, 80 bp, synthetic construct
  misc_feature 1..80: note = Artificially Synthesized Probe
  source 1..80: mol_type = other DNA
ctgcggggccaaaatcagactccgttccagaagaggccagaggtggcatcctccaaccctcctaggacgtgtgggtggcc

SEQ ID NO: 129913 - DNA, 80 bp, synthetic construct; identical to SEQ ID NO: 41318
  misc_feature 1..80: note = Artificially Synthesized Probe
  source 1..80: mol_type = other DNA

SEQ ID NO: 129914 - DNA, 80 bp, synthetic construct
  misc_feature 1..80: note = Artificially Synthesized Probe
  source 1..80: mol_type = other DNA
ttgcacacctgtgcacacactgccatgccttcatgtacacacatgcacacatgtatgtgctcacgtgtatatgcgtacat

SEQ ID NO: 129915 - DNA, 80 bp, synthetic construct
  misc_feature 1..80: note = Artificially Synthesized Probe
  source 1..80: mol_type = other DNA
agaccccaaagagtttgcgacgcatgttcctcccagccttgaagccgcggttgaaggtgagactggctctgatggaggtc

SEQ ID NO: 129916 - DNA, 80 bp, synthetic construct
  misc_feature 1..80: note = Artificially Synthesized Probe
  source 1..80: mol_type = other DNA
ccatggactccaaatgctacatgccatccagactctgcatgaccaaactccaccaggacctggctagtgatgttgagtgt

SEQ ID NO: 129917 - DNA, 80 bp, synthetic construct; identical to SEQ ID NO: 41319
  misc_feature 1..80: note = Artificially Synthesized Probe
  source 1..80: mol_type = other DNA

SEQ ID NO: 129918 - DNA, 80 bp, synthetic construct
  misc_feature 1..80: note = Artificially Synthesized Probe
  source 1..80: mol_type = other DNA
atgacatccacggcaggctcctggggtgtgttcttttacatccagctttgaacactgctacattgaaataaacgttttgt

SEQ ID NO: 129919 - DNA, 80 bp, synthetic construct
  misc_feature 1..80: note = Artificially Synthesized Probe
  source 1..80: mol_type = other DNA
taatgtctggtcacttcagaagtggaattactgggaagacacaggacattgtgaggacttccatgcaaacaagctgcttt

SEQ ID NO: 129920 - DNA, 80 bp, synthetic construct
  misc_feature 1..80: note = Artificially Synthesized Probe
  source 1..80: mol_type = other DNA
ctgctggtaggaccttcccaagtgtgcatcagacgtccatttcttctttcacagccatccccaacacgaccttgggctcc

SEQ ID NO: 129921 - DNA, 80 bp, synthetic construct; identical to SEQ ID NO: 41320
  misc_feature 1..80: note = Artificially Synthesized Probe
  source 1..80: mol_type = other DNA

SEQ ID NO: 129922 - DNA, 80 bp, synthetic construct; identical to SEQ ID NO: 41312
  misc_feature 1..80: note = Artificially Synthesized Probe
  source 1..80: mol_type = other DNA

SEQ ID NO: 129923 - DNA, 80 bp, synthetic construct
  misc_feature 1..80: note = Artificially Synthesized Probe
  source 1..80: mol_type = other DNA
tgttgctggtgttgtttgcatgtgtctcctcttctacctagaatctgctctggtatatgctgtaaagacacaacttattt

SEQ ID NO: 129924 - DNA, 80 bp, synthetic construct
  misc_feature 1..80: note = Artificially Synthesized Probe
  source 1..80: mol_type = other DNA
tctgtccatcagttctgaccacattctaccatctgagctgtggtttgggagactaaaatctggacaagaaaattcccatc

SEQ ID NO: 129925 - DNA, 80 bp, synthetic construct
  misc_feature 1..80: note = Artificially Synthesized Probe
  source 1..80: mol_type = other DNA
gcaagcacacactctgaccaagtggcctttgggagcacagaatattctggcattggacccacatctgatgacctgatgcc

SEQ ID NO: 129926 - DNA, 80 bp, synthetic construct; identical to SEQ ID NO: 41321
  misc_feature 1..80: note = Artificially Synthesized Probe
  source 1..80: mol_type = other DNA

SEQ ID NO: 129927 - DNA, 80 bp, synthetic construct
  misc_feature 1..80: note = Artificially Synthesized Probe
  source 1..80: mol_type = other DNA
ggagctgcaacagggacatgctgggcaccatgcacaagggtgtctgcacctgccactcccccatcatgagggcgtctgca

SEQ ID NO: 129928 - DNA, 80 bp, synthetic construct
  misc_feature 1..80: note = Artificially Synthesized Probe
  source 1..80: mol_type = other DNA
gtggggtcagtttattgggcatgcgtcagtcagaggctgggctggccagggtcgggtagggcagcagtttgtctggaccc

SEQ ID NO: 129929 - DNA, 80 bp, synthetic construct
  misc_feature 1..80: note = Artificially Synthesized Probe
  source 1..80: mol_type = other DNA
gtgccctggctgccctcatcctggcaggcaggagggggaggtaggtgatgggtgggtcctgagctcccagttcctgaccc

SEQ ID NO: 129930 - DNA, 80 bp, synthetic construct
  misc_feature 1..80: note = Artificially Synthesized Probe
  source 1..80: mol_type = other DNA
agagctcagctcccactccactcaacgccaaagctgtcctggagccagacggtcctgagctctggcactggaggcctggg

SEQ ID NO: 129931 - DNA, 80 bp, synthetic construct
  misc_feature 1..80: note = Artificially Synthesized Probe
  source 1..80: mol_type = other DNA
aaacattcatatgtgagttataatttttattgataactgaagagaggggagtacagaacgctcctcctaatgacctcacc

SEQ ID NO: 129932 - DNA, 80 bp, synthetic construct
  misc_feature 1..80: note = Artificially Synthesized Probe
  source 1..80: mol_type = other DNA
cgtgaatttggctcaccacaacctccacctccctggtaccagcgattctcctgcctcagcctcccgagtagctgggacta

SEQ ID NO: 129933 - DNA, 80 bp, synthetic construct; identical to SEQ ID NO: 41357
  misc_feature 1..80: note = Artificially Synthesized Probe
  source 1..80: mol_type = other DNA

SEQ ID NO: 129934 - DNA, 80 bp, synthetic construct
  misc_feature 1..80: note = Artificially Synthesized Probe
  source 1..80: mol_type = other DNA
aagagacagggtctcactctgttgcccaggctggagtgcagtggtgccatcatagttcactgcagcctctgcctcccagg

SEQ ID NO: 129935 - DNA, 80 bp, synthetic construct
  misc_feature 1..80: note = Artificially Synthesized Probe
  source 1..80: mol_type = other DNA
cctgagccaaggactgagatgagaactgtggttgactcagcaacgtggagccattcctacaaaacttgctccagttttgc

SEQ ID NO: 129936 - DNA, 80 bp, synthetic construct
  misc_feature 1..80: note = Artificially Synthesized Probe
  source 1..80: mol_type = other DNA
taggaaacagctcagagaagggacactgcttgcttagagtcacacagcaaaaaaaaaagaaaatacttgcagtcaggtct

SEQ ID NO: 129937 - DNA, 80 bp, synthetic construct
  misc_feature 1..80: note = Artificially Synthesized Probe
  source 1..80: mol_type = other DNA
tcttcctccttgtttgcctcagcccccggccctcatctccggcttctccttgtggcttgtgagggttgggtggatgtgga

SEQ ID NO: 129938 - DNA, 80 bp, synthetic construct
  misc_feature 1..80: note = Artificially Synthesized Probe
  source 1..80: mol_type = other DNA
aacgcccatcagctggatcccacggctcccgttcatttgtttaacggatgtttaatggggcacgcactaaactctggaga

SEQ ID NO: 129939 - DNA, 80 bp, synthetic construct; identical to SEQ ID NO: 41358
  misc_feature 1..80: note = Artificially Synthesized Probe
  source 1..80: mol_type = other DNA

SEQ ID NO: 129940 - DNA, 80 bp, synthetic construct
  misc_feature 1..80: note = Artificially Synthesized Probe
  source 1..80: mol_type = other DNA
gcaggtgcctgcaggatagtcgcacgaacctgggaggtggaggggtgaagtgagttgagatcaccccactgcactccagc

SEQ ID NO: 129941 - DNA, 80 bp, synthetic construct
  misc_feature 1..80: note = Artificially Synthesized Probe
  source 1..80: mol_type = other DNA
ctttgcttattctgctgactgaccgcctctccagccagagcatgagctgaaaaacgacagcaacttgtttctacatcccg

SEQ ID NO: 129942 - DNA, 80 bp, synthetic construct; identical to SEQ ID NO: 41359
  misc_feature 1..80: note = Artificially Synthesized Probe
  source 1..80: mol_type = other DNA

SEQ ID NO: 129943 - DNA, 80 bp, synthetic construct
  misc_feature 1..80: note = Artificially Synthesized Probe
  source 1..80: mol_type = other DNA
gtaatcccagcactttgggaggccggggcgggcagatcacttgaggtcaggagttcaagaccagcctggccaacatggtg

SEQ ID NO: 129944 - DNA, 80 bp, synthetic construct
  misc_feature 1..80: note = Artificially Synthesized Probe
  source 1..80: mol_type = other DNA
aaaaaaaaaaaagaaaaatacaaaaattagctgggtatggtggcgcatgcctgtaatcccagtttctcaggaggctgagg

SEQ ID NO: 129945 - DNA, 80 bp, synthetic construct
  misc_feature 1..80: note = Artificially Synthesized Probe
  source 1..80: mol_type = other DNA
agcactttcagaggccaaggcgagcggatcacctgaggtcaggagtttgagaccagcctaacgtggtgaaaccctgtctc

SEQ ID NO: 129946 - DNA, 80 bp, synthetic construct
  misc_feature 1..80: note = Artificially Synthesized Probe
  source 1..80: mol_type = other DNA
tcccaaagtgccgggattacaggcatgagccactgcacctggccagcctcacagttcttgtctgcccaggccagtcacct

SEQ ID NO: 129947 - DNA, 80 bp, synthetic construct; identical to SEQ ID NO: 41360
  misc_feature 1..80: note = Artificially Synthesized Probe
  source 1..80: mol_type = other DNA

SEQ ID NO: 129948 - DNA, 80 bp, synthetic construct
  misc_feature 1..80: note = Artificially Synthesized Probe
  source 1..80: mol_type = other DNA
agtgagccacagtcatgccactgcactccagcctgggcaacagagaaagaccctgtctcaaaaaaaaaaaaaaaatctca

SEQ ID NO: 129949 - DNA, 80 bp, synthetic construct
  misc_feature 1..80: note = Artificially Synthesized Probe
  source 1..80: mol_type = other DNA
ctgttaaacagggtttggaatatgcccctggcctctagccttcctccttacagaactccccaatactgtcattaagaatt

SEQ ID NO: 129950 - DNA, 80 bp, synthetic construct
  misc_feature 1..80: note = Artificially Synthesized Probe
  source 1..80: mol_type = other DNA
ggtgtgtgcctgtagtcccagctattttgggggctgaggcaggaggactgcttgaacctgggagactgaggctgcaatga

SEQ ID NO: 129951 - DNA, 80 bp, synthetic construct
  misc_feature 1..80: note = Artificially Synthesized Probe
  source 1..80: mol_type = other DNA
gagtttgagaccagcctgaccaacatggtgaaaccctgtctctactaaaaatagaaaaattagctgggtgtggtggcggg

SEQ ID NO: 129952 - DNA, 80 bp, synthetic construct; identical to SEQ ID NO: 41361
  misc_feature 1..80: note = Artificially Synthesized Probe
  source 1..80: mol_type = other DNA

SEQ ID NO: 129953 - DNA, 80 bp, synthetic construct
  misc_feature 1..80: note = Artificially Synthesized Probe
  source 1..80: mol_type = other DNA
atgtttgtacgtgccaatgactgccagaaacctccagaagccaggggagaggcctggaagattctcacaaccctgtcgac

SEQ ID NO: 129954 - DNA, 80 bp, synthetic construct
  misc_feature 1..80: note = Artificially Synthesized Probe
  source 1..80: mol_type = other DNA
catttgaaacccttcagtggctccttcactctcaaggaaaaaaaaatatccagacttcttgtcctggtgttcctggcctg

SEQ ID NO: 129955 - DNA, 80 bp, synthetic construct
  misc_feature 1..80: note = Artificially Synthesized Probe
  source 1..80: mol_type = other DNA
cctagtagctgcgactacaggtgcgcaccaccacacctggctaatttttttgtattttagtagagatggggtttcaccat

SEQ ID NO: 129956 - DNA, 80 bp, synthetic construct
  misc_feature 1..80: note = Artificially Synthesized Probe
  source 1..80: mol_type = other DNA
gtttgcaatggcagccatagggatggaggagaggagaagggtccagagacactcaagaggcggaatgaatgagtcgagag

SEQ ID NO: 129957 - DNA, 80 bp, synthetic construct; identical to SEQ ID NO: 41355
  misc_feature 1..80: note = Artificially Synthesized Probe
  source 1..80: mol_type = other DNA

SEQ ID NO: 129958 - DNA, 80 bp, synthetic construct; identical to SEQ ID NO: 41362
  misc_feature 1..80: note = Artificially Synthesized Probe
  source 1..80: mol_type = other DNA

SEQ ID NO: 129959 - DNA, 80 bp, synthetic construct
  misc_feature 1..80: note = Artificially Synthesized Probe
  source 1..80: mol_type = other DNA
gcgccgccgccgaccccgggctgcctcttcctcttcatctcgctcccggagccctgagccgcccagaccacctgacacaa

SEQ ID NO: 129960 - DNA, 80 bp, synthetic construct
  misc_feature 1..80: note = Artificially Synthesized Probe
  source 1..80: mol_type = other DNA
cctggacccccagccccttctcccactgaaccaggagcccagaccccaacccctcctccctgagatcctagaatccaggc

SEQ ID NO: 129961 - DNA, 80 bp, synthetic construct
  misc_feature 1..80: note = Artificially Synthesized Probe
  source 1..80: mol_type = other DNA
agactttttctctccaaggacccagggagtccaagccccaaccctcaaccagacgcaagagtcctggcttccaacctcct

SEQ ID NO: 129962 - DNA, 80 bp, synthetic construct; identical to SEQ ID NO: 41363
  misc_feature 1..80: note = Artificially Synthesized Probe
  source 1..80: mol_type = other DNA

SEQ ID NO: 129963 - DNA, 80 bp, synthetic construct
  misc_feature 1..80: note = Artificially Synthesized Probe
  source 1..80: mol_type = other DNA
ttcgcaaaactacttgtcccatcaggctcagcagccgaggacggcgggacgtggccctaggccttgtgggagttgtagtt

SEQ ID NO: 129964 - DNA, 80 bp, synthetic construct
  misc_feature 1..80: note = Artificially Synthesized Probe
  source 1..80: mol_type = other DNA
ttctctgcttagcaggatcggtccacagcgggacgtgagtccctttcctcctcgcggcttaccgcctctctccgcctagt

SEQ ID NO: 129965 - DNA, 80 bp, synthetic construct; identical to SEQ ID NO: 41356
  misc_feature 1..80: note = Artificially Synthesized Probe
  source 1..80: mol_type = other DNA

SEQ ID NO: 129966 - DNA, 80 bp, synthetic construct
  misc_feature 1..80: note = Artificially Synthesized Probe
  source 1..80: mol_type = other DNA
tatagaaaaccttttttacaatttatttcctgttgttaatctttaaaaatgaggttctagctaagtgcagggtttcagtg

SEQ ID NO: 129967 - DNA, 80 bp, synthetic construct
  misc_feature 1..80: note = Artificially Synthesized Probe
  source 1..80: mol_type = other DNA
ggaaatgaagccaattcctatgttggcatcaggaaaatggggagagaattctgtgaagacacaacctcgctccagctgat

SEQ ID NO: 129968 - DNA, 80 bp, synthetic construct
  misc_feature 1..80: note = Artificially Synthesized Probe
  source 1..80: mol_type = other DNA
ctgatgaggacctgagacccgcctgcccatggctgccctcatctggtcagggttgtgcaccaggggcagttgtcacagtg

SEQ ID NO: 129969 - DNA, 80 bp, synthetic construct
  misc_feature 1..80: note = Artificially Synthesized Probe
  source 1..80: mol_type = other DNA
acgtagggacaattgtctcgttcattgaagacatctgtaagtgtttaaagggggaagaaaacaaaaacaaaccagaagga

SEQ ID NO: 129970 - DNA, 80 bp, synthetic construct; identical to SEQ ID NO: 41375
  misc_feature 1..80: note = Artificially Synthesized Probe
  source 1..80: mol_type = other DNA

SEQ ID NO: 129971 - DNA, 80 bp, synthetic construct
  misc_feature 1..80: note = Artificially Synthesized Probe
  source 1..80: mol_type = other DNA
tcatcaaatcaggtaaaagcaacttgtccgcagttaccaaagcctagatacgcgttagatgcgccttttccggcctgtgc

SEQ ID NO: 129972 - DNA, 80 bp, synthetic construct
  misc_feature 1..80: note = Artificially Synthesized Probe
  source 1..80: mol_type = other DNA
tcatccatgcacatgagtaggaaaaaaacaatggcagagagtggcagggtttttagatgtcatatcttatcttaagaaat

SEQ ID NO: 129973 - DNA, 80 bp, synthetic construct
  misc_feature 1..80: note = Artificially Synthesized Probe
  source 1..80: mol_type = other DNA
ctttggtcaggtgaggtctggagaagggaagtaaggaacacctaaaaaataaaaatggaagggactggagcttgagatct

SEQ ID NO: 129974 - DNA, 80 bp, synthetic construct
  misc_feature 1..80: note = Artificially Synthesized Probe
  source 1..80: mol_type = other DNA
agaacagcaggttggggtggctcagaaagggggtggctggcgccgggctgggaagaggaccccacgaggcgaagtgtgga

SEQ ID NO: 129975 - DNA, 80 bp, synthetic construct; identical to SEQ ID NO: 41376
  misc_feature 1..80: note = Artificially Synthesized Probe
  source 1..80: mol_type = other DNA

SEQ ID NO: 129976 - DNA, 80 bp, synthetic construct
  misc_feature 1..80: note = Artificially Synthesized Probe
  source 1..80: mol_type = other DNA
gtcccctgaccttcaggaaaaggcaaggcagaataagcatgggtccctatgggaataactgaatgaatcatttaatctta

SEQ ID NO: 129977 - DNA, 80 bp, synthetic construct
  misc_feature 1..80: note = Artificially Synthesized Probe
  source 1..80: mol_type = other DNA
tgaggtcaggagcttgagaccagcctggccaacatggtgaaacctcgtctctacttaaaatacaaaattagctaggcgtg

SEQ ID NO: 129978 - DNA, 80 bp, synthetic construct
  misc_feature 1..80: note = Artificially Synthesized Probe
  source 1..80: mol_type = other DNA
ggagcagaagcacccaccgtccccatcaatgtccacggagcaggcgtcaccctctccattgttgtctgtgtcgatctggg

SEQ ID NO: 129979 - DNA, 80 bp, synthetic construct; identical to SEQ ID NO: 41377
  misc_feature 1..80: note = Artificially Synthesized Probe
  source 1..80: mol_type = other DNA

SEQ ID NO: 129980 - DNA, 80 bp, synthetic construct
  misc_feature 1..80: note = Artificially Synthesized Probe
  source 1..80: mol_type = other DNA
gctgaggcgggcggatcacctgaggtcaggagttcaagaccagggccgggcgcagtggctcacacctttaatcccagtgc

SEQ ID NO: 129981 - DNA, 80 bp, synthetic construct
  misc_feature 1..80: note = Artificially Synthesized Probe
  source 1..80: mol_type = other DNA
gtggtggtgtgcgcctgtaatgccagttactcaggagactgaggcaagagaatcgcttgaacccagaagatggagattgc

SEQ ID NO: 129982 - DNA, 80 bp, synthetic construct; identical to SEQ ID NO: 41365
  misc_feature 1..80: note = Artificially Synthesized Probe
  source 1..80: mol_type = other DNA

SEQ ID NO: 129983 - DNA, 80 bp, synthetic construct
  misc_feature 1..80: note = Artificially Synthesized Probe
  source 1..80: mol_type = other DNA
gtatatcatacacttcatggtgaggagagatatgtaaatatcaaataaatgaatggattagtgagtcaatgtctcccatc

SEQ ID NO: 129984 - DNA, 80 bp, synthetic construct; identical to SEQ ID NO: 41378
  misc_feature 1..80: note = Artificially Synthesized Probe
  source 1..80: mol_type = other DNA

SEQ ID NO: 129985 - DNA, 80 bp, synthetic construct
  misc_feature 1..80: note = Artificially Synthesized Probe
  source 1..80: mol_type = other DNA
atagtgacctttgggaactgcctatgcacaaacgcttgcaggacaatggcagttacgttgacaagggctgtttggtataa

SEQ ID NO: 129986 - DNA, 80 bp, synthetic construct
  misc_feature 1..80: note = Artificially Synthesized Probe
  source 1..80: mol_type = other DNA
atgggggcagttatcctgcaattggagaaggaagaatacttggaaaaacatttaggaaagcgcctctttcaggaatgcag

SEQ ID NO: 129987 - DNA, 80 bp, synthetic construct
  misc_feature 1..80: note = Artificially Synthesized Probe
  source 1..80: mol_type = other DNA
agaaacttgtgttcggagcccagaatcccagtgaggttgccaaacaactgcagaaacaagaagagaatgacaaggtattg

SEQ ID NO: 129988 - DNA, 80 bp, synthetic construct; identical to SEQ ID NO: 41379
  misc_feature 1..80: note = Artificially Synthesized Probe
  source 1..80: mol_type = other DNA

SEQ ID NO: 129989 - DNA, 80 bp, synthetic construct
  misc_feature 1..80: note = Artificially Synthesized Probe
  source 1..80: mol_type = other DNA
gcacatcactcgttgaatcagaagacagaacctggggtcttgtgctggagcccagagtttcagcacttacagattaagaa

SEQ ID NO: 129990 - DNA, 80 bp, synthetic construct
  misc_feature 1..80: note = Artificially Synthesized Probe
  source 1..80: mol_type = other DNA
gtcgggttaatatgggaacgggcacaggggtcccttgtcaagtctcacttttaaatccttttgtgtatgtgtatatatac

SEQ ID NO: 129991 - DNA, 80 bp, synthetic construct; identical to SEQ ID NO: 41380
  misc_feature 1..80: note = Artificially Synthesized Probe
  source 1..80: mol_type = other DNA

SEQ ID NO: 129992 - DNA, 80 bp, synthetic construct
  misc_feature 1..80: note = Artificially Synthesized Probe
  source 1..80: mol_type = other DNA
tccatgtctgaccttcttaaggcataaaactgcactaaaacattttggggcaccctgtgcggtggactgagtggcagtcc

SEQ ID NO: 129993 - DNA, 80 bp, synthetic construct
  misc_feature 1..80: note = Artificially Synthesized Probe
  source 1..80: mol_type = other DNA
caggtgttcttatcaaagagaggcagaggaagtttccggagagaaaggcactggagaaagtggtgtgaagccgaccagag

SEQ ID NO: 129994 - DNA, 80 bp, synthetic construct
  misc_feature 1..80: note = Artificially Synthesized Probe
  source 1..80: mol_type = other DNA
gtgtcattgtagagcaactctaattcaagaatagtgacaactttaagcaccaaaagtagttcagcaatatttttcatgct

SEQ ID NO: 129995 - DNA, 80 bp, synthetic construct
  misc_feature 1..80: note = Artificially Synthesized Probe
  source 1..80: mol_type = other DNA
ctgtgagataacagattcctgttgttgtgagcctcccgggccgtggtgttcgttccagcggccacaggaaagcagtccag

SEQ ID NO: 129996 - DNA, 80 bp, synthetic construct; identical to SEQ ID NO: 41381
  misc_feature 1..80: note = Artificially Synthesized Probe
  source 1..80: mol_type = other DNA

SEQ ID NO: 129997 - DNA, 80 bp, synthetic construct
  misc_feature 1..80: note = Artificially Synthesized Probe
  source 1..80: mol_type = other DNA
ccgcgtagcgtccccggcgccaggaggagggctgaccgccgtggccccgtgtgccctgcgagccccgcgcctcaccttga

SEQ ID NO: 129998 - DNA, 80 bp, synthetic construct
  misc_feature 1..80: note = Artificially Synthesized Probe
  source 1..80: mol_type = other DNA
gtgcttgtggcagttgtgtgtcttgtccttgcatgggttttcgggctcacacacctacggggagaagggctgcggggtta

SEQ ID NO: 129999 - DNA, 80 bp, synthetic construct
  misc_feature 1..80: note = Artificially Synthesized Probe
  source 1..80: mol_type = other DNA
cagccatcgtttctgagcctcggctgcagctcaccaagggctgcgctaacagcggagaggtggcggcctgaccctcacag

SEQ ID NO: 130000 - DNA, 80 bp, synthetic construct; identical to SEQ ID NO: 41382
  misc_feature 1..80: note = Artificially Synthesized Probe
  source 1..80: mol_type = other DNA

SEQ ID NO: 130001 - DNA, 80 bp, synthetic construct
  misc_feature 1..80: note = Artificially Synthesized Probe
  source 1..80: mol_type = other DNA
cacagcccagggcggggtcacccacctcgtccaggtcctcacagtgggtgccattgcccaagaagcccacagggcaggag

SEQ ID NO: 130002 - DNA, 80 bp, synthetic construct
  misc_feature 1..80: note = Artificially Synthesized Probe
  source 1..80: mol_type = other DNA
gatgtctttgtcatcgaattgtgtagtcaggaacactctggtgtgattctggatgatcatcaagaggcatcatctccaag

SEQ ID NO: 130003 - DNA, 80 bp, synthetic construct
  misc_feature 1..80: note = Artificially Synthesized Probe
  source 1..80: mol_type = other DNA
gccacaccacaaacctacctacgcgccacgttccggatcacacaactacccacgtgccaccttccacactacacaactac

SEQ ID NO: 130004 - DNA, 80 bp, synthetic construct
  misc_feature 1..80: note = Artificially Synthesized Probe
  source 1..80: mol_type = other DNA
ctttccacaccacacaaatacctacgtgccatgttccagaccacacagctgcccacgcaccaccttccacaacacacaac

SEQ ID NO: 130005 - DNA, 80 bp, synthetic construct
  misc_feature 1..80: note = Artificially Synthesized Probe
  source 1..80: mol_type = other DNA
atatcaccaaactggtttcctctagtgggttagatgttcatctctgagttccattgatatttatcctctgaaggcacttg

SEQ ID NO: 130006 - DNA, 80 bp, synthetic construct; identical to SEQ ID NO: 41383
  misc_feature 1..80: note = Artificially Synthesized Probe
  source 1..80: mol_type = other DNA

SEQ ID NO: 130007 - DNA, 80 bp, synthetic construct
  misc_feature 1..80: note = Artificially Synthesized Probe
  source 1..80: mol_type = other DNA
gcaccatgttccacaccgcacaactacctacacaccatgtttcacaacacacagctactcacatgccacgtttcacacta

SEQ ID NO: 130008 - DNA, 80 bp, synthetic construct
  misc_feature 1..80: note = Artificially Synthesized Probe
  source 1..80: mol_type = other DNA
ctatctacatgctatgttcccagccacacaactacccacatgccacaggccacaccacacaactacccacacaccacatt

SEQ ID NO: 130009 - DNA, 80 bp, synthetic construct; identical to SEQ ID NO: 41384
  misc_feature 1..80: note = Artificially Synthesized Probe
  source 1..80: mol_type = other DNA

SEQ ID NO: 130010 - DNA, 80 bp, synthetic construct
  misc_feature 1..80: note = Artificially Synthesized Probe
  source 1..80: mol_type = other DNA
ctcctcttgttgcacatctgacgctcctgcacatcccccacgcaggccttccctccgtactgaggctcagggctgttgca

SEQ ID NO: 130011 - DNA, 80 bp, synthetic construct
  misc_feature 1..80: note = Artificially Synthesized Probe
  source 1..80: mol_type = other DNA
acccggggtggagaacgtgagttggctgagtgagagggaagagcaggtgggacatggtgttccctacacagccccacaaa

SEQ ID NO: 130012 - DNA, 80 bp, synthetic construct
  misc_feature 1..80: note = Artificially Synthesized Probe
  source 1..80: mol_type = other DNA
ctcttggcctccagaagacaaatcataccacctcttctttttaataaaagaatttttttaatagagagggtctcgctatg

SEQ ID NO: 130013 - DNA, 80 bp, synthetic construct; identical to SEQ ID NO: 41385
  misc_feature 1..80: note = Artificially Synthesized Probe
  source 1..80: mol_type = other DNA

SEQ ID NO: 130014 - DNA, 80 bp, synthetic construct
  misc_feature 1..80: note = Artificially Synthesized Probe
  source 1..80: mol_type = other DNA
atctgcggcatcctctgtccacactcactactcagtccaaactcactccccgtccacactcactgcccatccacactcac

SEQ ID NO: 130015 - DNA, 80 bp, synthetic construct
  misc_feature 1..80: note = Artificially Synthesized Probe
  source 1..80: mol_type = other DNA
cacactcactcccccatccacattctccctcccccatccacactctccctctgtccacactcactactcagtccaaactc

SEQ ID NO: 130016 - DNA, 80 bp, synthetic construct
  misc_feature 1..80: note = Artificially Synthesized Probe
  source 1..80: mol_type = other DNA
cccatccacactcattcccccttaaacaccatccacactcactccccatccacactcactccccatccacactcattccc

SEQ ID NO: 130017 - DNA, 80 bp, synthetic construct
  misc_feature 1..80: note = Artificially Synthesized Probe
  source 1..80: mol_type = other DNA
aatatctacaaaaagaaaaaaaaaagcaataaacaattagcataactgggccatgggtagtgatttattttgttttacct

SEQ ID NO: 130018 - DNA, 80 bp, synthetic construct
  misc_feature 1..80: note = Artificially Synthesized Probe
  source 1..80: mol_type = other DNA
cccatccacactccccatccacactcactcccatccacactccccatccacactcattcccccataaacaccatccacac

SEQ ID NO: 130019 - DNA, 80 bp, synthetic construct
  misc_feature 1..80: note = Artificially Synthesized Probe
  source 1..80: mol_type = other DNA
tccccatccacactcattcccatccacactcgccatccacactcactcccatccacactcgccatccacactcactccca

SEQ ID NO: 130020 - DNA, 80 bp, synthetic construct; identical to SEQ ID NO: 41386
  misc_feature 1..80: note = Artificially Synthesized Probe
  source 1..80: mol_type = other DNA

SEQ ID NO: 130021 - DNA, 80 bp, synthetic construct
  misc_feature 1..80: note = Artificially Synthesized Probe
  source 1..80: mol_type = other DNA
gctggaacaggccctgacaccccggatcccggctccagctgtggctgctcactgtgagctgcctgcaagcccgcccaccc

SEQ ID NO: 130022 - DNA, 80 bp, synthetic construct; identical to SEQ ID NO: 41387
  misc_feature 1..80: note = Artificially Synthesized Probe
  source 1..80: mol_type = other DNA

SEQ ID NO: 130023 - DNA, 80 bp, synthetic construct
  misc_feature 1..80: note = Artificially Synthesized Probe
  source 1..80: mol_type = other DNA
cccttgcaaaggtcccgatgactgagagaaacgcggccccacccccacaggcacgcgggtgtcacctgcccgacactcac

SEQ ID NO: 130024 - DNA, 80 bp, synthetic construct
  misc_feature 1..80: note = Artificially Synthesized Probe
  source 1..80: mol_type = other DNA
accgtccaccgctgccagaggaagcaaacacggtggcatcaggccctgcctcacagacgtgccacagaacagaacgggca

SEQ ID NO: 130025 - DNA, 80 bp, synthetic construct
  misc_feature 1..80: note = Artificially Synthesized Probe
  source 1..80: mol_type = other DNA
aaaaacgcctttctgggtctactattagggtgctgaggggagctaaatccatgtgtgtccaggaaagtctcttaatcgat

SEQ ID NO: 130026 - DNA, 80 bp, synthetic construct
  misc_feature 1..80: note = Artificially Synthesized Probe
  source 1..80: mol_type = other DNA
ccaagtaaactgaaacaagctaataaaaaggagattccctgtaaagaaattcttcataggtaatcacagccgctaaatgg

SEQ ID NO: 130027 - DNA, 80 bp, synthetic construct; identical to SEQ ID NO: 41388
  misc_feature 1..80: note = Artificially Synthesized Probe
  source 1..80: mol_type = other DNA

SEQ ID NO: 130028 - DNA, 80 bp, synthetic construct; identical to SEQ ID NO: 41366
  misc_feature 1..80: note = Artificially Synthesized Probe
  source 1..80: mol_type = other DNA

SEQ ID NO: 130029 - DNA, 80 bp, synthetic construct
  misc_feature 1..80: note = Artificially Synthesized Probe
  source 1..80: mol_type = other DNA
tattcaaaatcacagagtggcagagcgtgagctctgagtcccttcattctctgtccacatcagaggtaaggtgccctgag

SEQ ID NO: 130030 - DNA, 80 bp, synthetic construct
  misc_feature 1..80: note = Artificially Synthesized Probe
  source 1..80: mol_type = other DNA
gctcaggagctctgggtggggtcagcagagctaacttgggaagggaactcggggcaggggtgggaggcagcacagagacc

SEQ ID NO: 130031 - DNA, 80 bp, synthetic construct; identical to SEQ ID NO: 41389
  misc_feature 1..80: note = Artificially Synthesized Probe
  source 1..80: mol_type = other DNA

SEQ ID NO: 130032 - DNA, 80 bp, synthetic construct
  misc_feature 1..80: note = Artificially Synthesized Probe
  source 1..80: mol_type = other DNA
tgagtcagtcctcagtggatgaccagtggcctggggtggccctctgattctctcacctgtactcagggggctgaacctca

SEQ ID NO: 130033 - DNA, 80 bp, synthetic construct
  misc_feature 1..80: note = Artificially Synthesized Probe
  source 1..80: mol_type = other DNA
aggtgatttggtggcaaatggttttaaatttctacaagtgaagaaaggcatgcatggaacactcatttaaaaggagggga

SEQ ID NO: 130034 - DNA, 80 bp, synthetic construct
  misc_feature 1..80: note = Artificially Synthesized Probe
  source 1..80: mol_type = other DNA
ccattgtacggttgaccccacaacacagaaacagaaaacctgcacgctgttgacagtcgctacatttaatgaagtatccc

SEQ ID NO: 130035 - DNA, 80 bp, synthetic construct
  misc_feature 1..80: note = Artificially Synthesized Probe
  source 1..80: mol_type = other DNA
atgtgaaaataagggcatctttttctcccattagtgctgacagcctaacaagaacagggcccccagatggctctttgcat

SEQ ID NO: 130036 - DNA, 80 bp, synthetic construct
  misc_feature 1..80: note = Artificially Synthesized Probe
  source 1..80: mol_type = other DNA
ttgtctgtctgtaagacttcaggcagtggcttgtatttcccccaaacgtttctgctgagcctcaggctctgttggaaccg

SEQ ID NO: 130037 - DNA, 80 bp, synthetic construct; identical to SEQ ID NO: 41390
  misc_feature 1..80: note = Artificially Synthesized Probe
  source 1..80: mol_type = other DNA

SEQ ID NO: 130038 - DNA, 80 bp, synthetic construct
  misc_feature 1..80: note = Artificially Synthesized Probe
  source 1..80: mol_type = other DNA
cttaggagggccaccaatgagctcccagagaaactggttatcattcgactggaaaatcaagtgaaacatttaagtgtaga

SEQ ID NO: 130039 - DNA, 80 bp, synthetic construct
  misc_feature 1..80: note = Artificially Synthesized Probe
  source 1..80: mol_type = other DNA
actgcctgggcttctggggctccccatccacctgccttcctggagagcggaaatcgcgtggctcacatcacacctggacc

SEQ ID NO: 130040 - DNA, 80 bp, synthetic construct
  misc_feature 1..80: note = Artificially Synthesized Probe
  source 1..80: mol_type = other DNA
ggatggatggatgagtgggttggtagatgagatgaatgggtggatgagatgaattgatggatggatggatgaatgagata

SEQ ID NO: 130041 - DNA, 80 bp, synthetic construct
  misc_feature 1..80: note = Artificially Synthesized Probe
  source 1..80: mol_type = other DNA
ctgccccaggctcctgccctcgccgccctccctgccccggactcctgcccctgccgccctccctgccctgggctccatct

SEQ ID NO: 130042 - DNA, 80 bp, synthetic construct; identical to SEQ ID NO: 41391
  misc_feature 1..80: note = Artificially Synthesized Probe
  source 1..80: mol_type = other DNA

SEQ ID NO: 130043 - DNA, 80 bp, synthetic construct
  misc_feature 1..80: note = Artificially Synthesized Probe
  source 1..80: mol_type = other DNA
gaatttattttggagactgtgcccaggactgttttccttgggaatacttcccaagatctacccaacttccctctaacaat

SEQ ID NO: 130044 - DNA, 80 bp, synthetic construct
  misc_feature 1..80: note = Artificially Synthesized Probe
  source 1..80: mol_type = other DNA
cctgcgtgagtacccaccactctcttgaggttctcgctgagctggttcacgaggacgtggagccccgagagctcctggac

SEQ ID NO: 130045 - DNA, 80 bp, synthetic construct
  misc_feature 1..80: note = Artificially Synthesized Probe
  source 1..80: mol_type = other DNA
agcatcacagaggacggggccagcagcaggggctgggaacagagggaggatgacccgccctggctcccggagcggcctgg

SEQ ID NO: 130046 - DNA, 80 bp, synthetic construct
  misc_feature 1..80: note = Artificially Synthesized Probe
  source 1..80: mol_type = other DNA
aggagcagagcagaaattagctcaggagtggggagacgcatcagcataggagaggcctgcacagtccaaacgcaggagca

SEQ ID NO: 130047 - DNA, 80 bp, synthetic construct; identical to SEQ ID NO: 41392
  misc_feature 1..80: note = Artificially Synthesized Probe
  source 1..80: mol_type = other DNA

SEQ ID NO: 130048 - DNA, 80 bp, synthetic construct
  misc_feature 1..80: note = Artificially Synthesized Probe
  source 1..80: mol_type = other DNA
caccactcccaccttcccaccttcccaccttcccaccgctcccaccttcccaccttcccatcttcccatcttcccacctt

SEQ ID NO: 130049 - DNA, 80 bp, synthetic construct
  misc_feature 1..80: note = Artificially Synthesized Probe
  source 1..80: mol_type = other DNA
caccttcccaccttcccactgctcccaccttcccaccttcccacattcgcaccttcccaccttcccacattcccaccttc

SEQ ID NO: 130050 - DNA, 80 bp, synthetic construct
  misc_feature 1..80: note = Artificially Synthesized Probe
  source 1..80: mol_type = other DNA
acctctcccaccttcccaccactcccacctttccacattcccaccactccctctgaagccctagatcgtgggacctgggt

SEQ ID NO: 130051 - DNA, 80 bp, synthetic construct
  misc_feature 1..80: note = Artificially Synthesized Probe
  source 1..80: mol_type = other DNA
tagatggataggtggatggggctgggtggatggatggatgagatgggtgggtgtgtgggtgggtggatggatgaatggat

SEQ ID NO: 130052 - DNA, 80 bp, synthetic construct; identical to SEQ ID NO: 41393
  misc_feature 1..80: note = Artificially Synthesized Probe
  source 1..80: mol_type = other DNA

SEQ ID NO: 130053 - DNA, 80 bp, synthetic construct
  misc_feature 1..80: note = Artificially Synthesized Probe
  source 1..80: mol_type = other DNA
ttttacccagcacactaatctttaactaacctagggtatttgtttttcattcctctaaaagttaaacaaaagaccgcata

SEQ ID NO: 130054 - DNA, 80 bp, synthetic construct
  misc_feature 1..80: note = Artificially Synthesized Probe
  source 1..80: mol_type = other DNA
tggaaaaggggatgtcattaccaagaaccaatccatgaactagctgtttgtataagaccaattttccttaagtctgacat

SEQ ID NO: 130055 - DNA, 80 bp, synthetic construct
  misc_feature 1..80: note = Artificially Synthesized Probe
  source 1..80: mol_type = other DNA
cagatctagatttctctgtgtttttttttttttttttttggaagatctaagagtttcccataagttttaaaggtttgctt

SEQ ID NO: 130056 - DNA, 80 bp, synthetic construct; identical to SEQ ID NO: 41394
  misc_feature 1..80: note = Artificially Synthesized Probe
  source 1..80: mol_type = other DNA

SEQ ID NO: 130057 - DNA, 80 bp, synthetic construct
  misc_feature 1..80: note = Artificially Synthesized Probe
  source 1..80: mol_type = other DNA
catataaatatatcagactgaaaaaacattattgcaacaaaaagtacccaaaagccccacagccaactgcaccccaggaa

SEQ ID NO: 130058 - DNA, 80 bp, synthetic construct
  misc_feature 1..80: note = Artificially Synthesized Probe
  source 1..80: mol_type = other DNA
gggggtgacagttggagctggaatgagggttggtcttagaacacccttctccctgcattgatgatcaaatgtctccttgt

SEQ ID NO: 130059 - DNA, 80 bp, synthetic construct
  misc_feature 1..80: note = Artificially Synthesized Probe
  source 1..80: mol_type = other DNA
aacagtttacgcttgtcataatttggaattgaaatggcctggccttcgtgtgcacacggccacaccgtgtggcagacgtg

SEQ ID NO: 130060 - DNA, 80 bp, synthetic construct; identical to SEQ ID NO: 41395
  misc_feature 1..80: note = Artificially Synthesized Probe
  source 1..80: mol_type = other DNA

SEQ ID NO: 130061 - DNA, 80 bp, synthetic construct
  misc_feature 1..80: note = Artificially Synthesized Probe
  source 1..80: mol_type = other DNA
cactttgggaggccaaggtgggcagatcacgaggtcaggagatcgagaccatcttggctaacacgctgaaaccccatctc

SEQ ID NO: 130062 - DNA, 80 bp, synthetic construct
  misc_feature 1..80: note = Artificially Synthesized Probe
  source 1..80: mol_type = other DNA
ctggctcaaaaaaaaaaaaaaaaaagaaaacttctgtaagtcaagttcgacaaatatctatgactttccttaggcagaca

SEQ ID NO: 130063 - DNA, 80 bp, synthetic construct; identical to SEQ ID NO: 41367
  misc_feature 1..80: note = Artificially Synthesized Probe
  source 1..80: mol_type = other DNA

SEQ ID NO: 130064 - DNA, 80 bp, synthetic construct
  misc_feature 1..80: note = Artificially Synthesized Probe
  source 1..80: mol_type = other DNA
tctaagttgaccagctaagtcactcaaagacaatagtggtagttacccaaatatttttacttaaatttttacaagcatga

SEQ ID NO: 130065 - DNA, 80 bp, synthetic construct; identical to SEQ ID NO: 41396
  misc_feature 1..80: note = Artificially Synthesized Probe
  source 1..80: mol_type = other DNA

SEQ ID NO: 130066 - DNA, 80 bp, synthetic construct
  misc_feature 1..80: note = Artificially Synthesized Probe
  source 1..80: mol_type = other DNA
aaatctacctagaagaaggaaatgtttcataaataagagtgagatggcccttggagaggtgtggcctgctgtgtgttctg

SEQ ID NO: 130067 - DNA, 80 bp, synthetic construct
  misc_feature 1..80: note = Artificially Synthesized Probe
  source 1..80: mol_type = other DNA
gggctgggccagtcctatatggtatggaactcctggacacccatgagaaattgactcaacaacaagctatgcatctctag

SEQ ID NO: 130068 - DNA, 80 bp, synthetic construct; identical to SEQ ID NO: 41397
  misc_feature 1..80: note = Artificially Synthesized Probe
  source 1..80: mol_type = other DNA

SEQ ID NO: 130069 - DNA, 80 bp, synthetic construct
  misc_feature 1..80: note = Artificially Synthesized Probe
  source 1..80: mol_type = other DNA
tttagaaaggcgtgcgttgtgtgtgtgtgcgcttgtatgtggtgtttgcatgtgaaagggtgagtgcctgtgtgaaagta

SEQ ID NO: 130070 - DNA, 80 bp, synthetic construct
  misc_feature 1..80: note = Artificially Synthesized Probe
  source 1..80: mol_type = other DNA
gtatgtgtgtgtacatgtgtggttctgtgtatgcatctatatgatgttcatgtgtttatgtgtgggggatgtgtgagtgt

SEQ ID NO: 130071 - DNA, 80 bp, synthetic construct
  misc_feature 1..80: note = Artificially Synthesized Probe
  source 1..80: mol_type = other DNA
cttacatatggttgtgtgcacatgtgcatgcatgagtgtgttcacatgtatgtgtgtggtgtgtgtgcatgtgtggtatg

SEQ ID NO: 130072 - DNA, 80 bp, synthetic construct; identical to SEQ ID NO: 41398
  misc_feature 1..80: note = Artificially Synthesized Probe
  source 1..80: mol_type = other DNA

SEQ ID NO: 130073 - DNA, 80 bp, synthetic construct
  misc_feature 1..80: note = Artificially Synthesized Probe
  source 1..80: mol_type = other DNA
gtgtggtgtgtgtgcatgtgtgcacatgcctgtggctgcgtgtggtgggcagtgtgtgcatgtgcatgtggtgtgtgcac

SEQ ID NO: 130074 - DNA, 80 bp, synthetic construct
  misc_feature 1..80: note = Artificially Synthesized Probe
  source 1..80: mol_type = other DNA
atggatggatgagtaggtgggtggatgagatggatggatggatggatgagatggatgtattgataggtggatggatggat

SEQ ID NO: 130075 - DNA, 80 bp, synthetic construct
  misc_feature 1..80: note = Artificially Synthesized Probe
  source 1..80: mol_type = other DNA
gactctctctggcagagcctttggccacgtacatccggctcttttccgcctgcaggtgctcgtagaagggctcgtccaga

SEQ ID NO: 130076 - DNA, 80 bp, synthetic construct
  misc_feature 1..80: note = Artificially Synthesized Probe
  source 1..80: mol_type = other DNA
cggggccgttggagacgatctcgaactgcctctgggagagaccggggccctccagagccaacagcgtgcccctggacttg

SEQ ID NO: 130077 - DNA, 80 bp, synthetic construct; identical to SEQ ID NO: 41399
  misc_feature 1..80: note = Artificially Synthesized Probe
  source 1..80: mol_type = other DNA

SEQ ID NO: 130078 - DNA, 80 bp, synthetic construct
  misc_feature 1..80: note = Artificially Synthesized Probe
  source 1..80: mol_type = other DNA
gccactatcctccgtgccagtgccgctactcagagtgtgggcccaacgcagctgcgggtctgtggggtcagtttctgccc

SEQ ID NO: 130079 - DNA, 80 bp, synthetic construct
  misc_feature 1..80: note = Artificially Synthesized Probe
  source 1..80: mol_type = other DNA
ccatctcagatctgaggctgaaaagcagccatcctgtctaccagttgattgctcaggaaaaaaccaaataaatgaataaa

SEQ ID NO: 130080 - DNA, 80 bp, synthetic construct
  misc_feature 1..80: note = Artificially Synthesized Probe
  source 1..80: mol_type = other DNA
ggtaaggatctgaaagagtggtcagtatcaagtacagaaacaaatggttttaagtcaccacctaagctattggcaagaaa

SEQ ID NO: 130081 - DNA, 80 bp, synthetic construct
  misc_feature 1..80: note = Artificially Synthesized Probe
  source 1..80: mol_type = other DNA
ctaaaaatacaaaaaattagccaggcatggttgtgggcgcttgtagtcccagctactcgggaggctgaggcaggagaatg

SEQ ID NO: 130082 - DNA, 80 bp, synthetic construct; identical to SEQ ID NO: 41400
  misc_feature 1..80: note = Artificially Synthesized Probe
  source 1..80: mol_type = other DNA

SEQ ID NO: 130083 - DNA, 80 bp, synthetic construct
  misc_feature 1..80: note = Artificially Synthesized Probe
  source 1..80: mol_type = other DNA
gtgggtgggtggatggattagatggataggtggatgggtgggtggatggatggatggatgagatagttgggtggatgggt

SEQ ID NO: 130084 - DNA, 80 bp, synthetic construct
  misc_feature 1..80: note = Artificially Synthesized Probe
  source 1..80: mol_type = other DNA
ctgtgatgaaatattatgtggtcattaaaaatcatactgtagaaaagtaaacacatgggaaaatatttaaaggaggaaga

SEQ ID NO: 130085 - DNA, 80 bp, synthetic construct
  misc_feature 1..80: note = Artificially Synthesized Probe
  source 1..80: mol_type = other DNA
agtaagttactatttgatttataaaggagctagaaggtcctcacgggtaagattgtccaaccacacactttattttgtca

SEQ ID NO: 130086 - DNA, 80 bp, synthetic construct
  misc_feature 1..80: note = Artificially Synthesized Probe
  source 1..80: mol_type = other DNA
cttgttagtgatgagtccacagctgcaaccctgcctgtgagcgagactggcccagtgactcacatgaccattgaataaca

SEQ ID NO: 130087 - DNA, 80 bp, synthetic construct; identical to SEQ ID NO: 41401
  misc_feature 1..80: note = Artificially Synthesized Probe
  source 1..80: mol_type = other DNA

SEQ ID NO: 130088 - DNA, 80 bp, synthetic construct
  misc_feature 1..80: note = Artificially Synthesized Probe
  source 1..80: mol_type = other DNA
gcgcttgcctggagtaattctgttcatacgactcgtagacaggacttagatgtagaaagtttgaatttagaaaaatatcc

SEQ ID NO: 130089 - DNA, 80 bp, synthetic construct
  misc_feature 1..80: note = Artificially Synthesized Probe
  source 1..80: mol_type = other DNA
tagccatcattttgaccctgcctctttattttcctgcaggcctgtttttccattcttggggattttaagttggcacagct

SEQ ID NO: 130090 - DNA, 80 bp, synthetic construct; identical to SEQ ID NO: 41402
  misc_feature 1..80: note = Artificially Synthesized Probe
  source 1..80: mol_type = other DNA

SEQ ID NO: 130091 - DNA, 80 bp, synthetic construct
  misc_feature 1..80: note = Artificially Synthesized Probe
  source 1..80: mol_type = other DNA
ctgggaccccccccccaaaccatctgctccccccagtgccgccccaggggtccttggtgattgtttcatctgtcctggct

SEQ ID NO: 130092 - DNA, 80 bp, synthetic construct
  misc_feature 1..80: note = Artificially Synthesized Probe
  source 1..80: mol_type = other DNA
aaacgtagcgtcatgtaaaatgcccacctcatcgggttgtcatgagagatgaattcggcaaatgaaacttcaccaggggc

SEQ ID NO: 130093 - DNA, 80 bp, synthetic construct
  misc_feature 1..80: note = Artificially Synthesized Probe
  source 1..80: mol_type = other DNA
gaacacttggccatgagcttagaacagtacctgcatgcagtaagcaccacagaacggtgttagaatacacagctcaggta

SEQ ID NO: 130094 - DNA, 80 bp, synthetic construct; identical to SEQ ID NO: 41403
  misc_feature 1..80: note = Artificially Synthesized Probe
  source 1..80: mol_type = other DNA

SEQ ID NO: 130095 - DNA, 80 bp, synthetic construct
  misc_feature 1..80: note = Artificially Synthesized Probe
  source 1..80: mol_type = other DNA
ccttgaaagacatcctaacataaggagaagaaaacctccacagaagcaagcagataaatcaaccccaacagggttttgcc

SEQ ID NO: 130096 - DNA, 80 bp, synthetic construct
  misc_feature 1..80: note = Artificially Synthesized Probe
  source 1..80: mol_type = other DNA
ccagcctctgcacgccacacatccacgtttatgcttgtgtttttccaaaagaaagatttcggtgcctgtctgcagcagaa

SEQ ID NO: 130097 - DNA, 80 bp, synthetic construct
  misc_feature 1..80: note = Artificially Synthesized Probe
  source 1..80: mol_type = other DNA
tatgaacaatcaaagtaaaagatagctttgcagagagctaattgtttaccggccgtccaccaccaacagcagtctgatta

SEQ ID NO: 130098 - DNA, 80 bp, synthetic construct
  misc_feature 1..80: note = Artificially Synthesized Probe
  source 1..80: mol_type = other DNA
aagtcgctgtgtgtcccggcagtcacaggattttccatagacttaccacaaatactctctagttatgttcaaaaccactt

SEQ ID NO: 130099 - DNA, 80 bp, synthetic construct
  misc_feature 1..80: note = Artificially Synthesized Probe
  source 1..80: mol_type = other DNA
agttacttttcagatattccgggagttgtttctaattctctcctcaataacaaactctcatgtggaatcttcttcttcgg

SEQ ID NO: 130100 - DNA, 80 bp, synthetic construct
  misc_feature 1..80: note = Artificially Synthesized Probe
  source 1..80: mol_type = other DNA
cagtagaaacaccacgtgaagaaacacttgccatttagtgttaatagatacaccacccaccttaagttaagaatcgaaat

SEQ ID NO: 130101 - DNA, 80 bp, synthetic construct; identical to SEQ ID NO: 41404
  misc_feature 1..80: note = Artificially Synthesized Probe
  source 1..80: mol_type = other DNA

SEQ ID NO: 130102 - DNA, 80 bp, synthetic construct
  misc_feature 1..80: note = Artificially Synthesized Probe
  source 1..80: mol_type = other DNA
gaatgacatcatcccccttctgatctcaccatttgctccgagtacctgctgcaggggtccaagtccagcccctctgtact

SEQ ID NO: 130103 - DNA, 80 bp, synthetic construct
  misc_feature 1..80: note = Artificially Synthesized Probe
  source 1..80: mol_type = other DNA
tgtggaagggtaatgcgcatttgaaggcatggaattagagcagatggaattcaagttatcttccaggtctataatatttt

SEQ ID NO: 130104 - DNA, 80 bp, synthetic construct; identical to SEQ ID NO: 41368
  misc_feature 1..80: note = Artificially Synthesized Probe
  source 1..80: mol_type = other DNA

SEQ ID NO: 130105 - DNA, 80 bp, synthetic construct
  misc_feature 1..80: note = Artificially Synthesized Probe
  source 1..80: mol_type = other DNA
tgctcacactcacctctgcattcgtacttgaggtctgagaaatagaccatttcttgagagaagacaaatagacccagccg

SEQ ID NO: 130106 - DNA, 80 bp, synthetic construct
  misc_feature 1..80: note = Artificially Synthesized Probe
  source 1..80: mol_type = other DNA
actctgtgaagcattcaccagtgatggaaggttggctccggacacaagctgtggatactccgcccagggcttcagtgccc

SEQ ID NO: 130107 - DNA, 80 bp, synthetic construct; identical to SEQ ID NO: 41364
  misc_feature 1..80: note = Artificially Synthesized Probe
  source 1..80: mol_type = other DNA

SEQ ID NO: 130108 - DNA, 80 bp, synthetic construct
  misc_feature 1..80: note = Artificially Synthesized Probe
  source 1..80: mol_type = other DNA
ggggtgaggaggaagcttcccacttcctgggaagatgcaccggactctccctacttcaccttgtgctaaaaccatgagct

SEQ ID NO: 130109 - DNA, 80 bp, synthetic construct; identical to SEQ ID NO: 41369
  misc_feature 1..80: note = Artificially Synthesized Probe
  source 1..80: mol_type = other DNA

SEQ ID NO: 130110 - DNA, 80 bp, synthetic construct
  misc_feature 1..80: note = Artificially Synthesized Probe
  source 1..80: mol_type = other DNA
tccaataaagcacatgctaattctgcaaagatgcagttattttaattgcaggtgttctcccctgcctggggtattcatta

SEQ ID NO: 130111 - DNA, 80 bp, synthetic construct
  misc_feature 1..80: note = Artificially Synthesized Probe
  source 1..80: mol_type = other DNA
gagcttatttgtctattaatgttcaaatgtgccgtccgatgggaagccccttggaagaaatgcagctgtgctgacctgcc

SEQ ID NO: 130112 - DNA, 80 bp, synthetic construct; identical to SEQ ID NO: 41370
  misc_feature 1..80: note = Artificially Synthesized Probe
  source 1..80: mol_type = other DNA

SEQ ID NO: 130113 - DNA, 80 bp, synthetic construct
  misc_feature 1..80: note = Artificially Synthesized Probe
  source 1..80: mol_type = other DNA
tcagattcctgggttcatgtctggatcttctctttccttgatatgggatgttgggcaaaattcttgaagttttgatattc

SEQ ID NO: 130114 - DNA, 80 bp, synthetic construct
  misc_feature 1..80: note = Artificially Synthesized Probe
  source 1..80: mol_type = other DNA
agcaactgtatttaactggtaattatcaactgtgttgagttgtaaccccaggcacagtgtctataataaagtaagattat

SEQ ID NO: 130115 - DNA, 80 bp, synthetic construct
  misc_feature 1..80: note = Artificially Synthesized Probe
  source 1..80: mol_type = other DNA
agcgcgttcctcaggtgctcgcccgtccccgtggtggagttcaccaccttgagggacacgccggagtagccataggcccg

SEQ ID NO: 130116 - DNA, 80 bp, synthetic construct; identical to SEQ ID NO: 41371
  misc_feature 1..80: note = Artificially Synthesized Probe
  source 1..80: mol_type = other DNA

SEQ ID NO: 130117 - DNA, 80 bp, synthetic construct
  misc_feature 1..80: note = Artificially Synthesized Probe
  source 1..80: mol_type = other DNA
tacacatgactgattattgggtgtgcctggcaagactaaatgctgattcttttcagcgtttgaattaaaagaattccata

SEQ ID NO: 130118 - DNA, 80 bp, synthetic construct
  misc_feature 1..80: note = Artificially Synthesized Probe
  source 1..80: mol_type = other DNA
ggtacctgtaatcccagctactcaggaggctgaggcaggagaatcacttgaaccggggaaaaaaggttgcagtgaactga

SEQ ID NO: 130119 - DNA, 80 bp, synthetic construct
  misc_feature 1..80: note = Artificially Synthesized Probe
  source 1..80: mol_type = other DNA
cctcatcatcccgatgggctcttttaccatgagattagtggaattgaaggtatttcttttagatccaacttacaagagtt

SEQ ID NO: 130120 - DNA, 80 bp, synthetic construct
  misc_feature 1..80: note = Artificially Synthesized Probe
  source 1..80: mol_type = other DNA
cacatggcatcccacctgcatgatcttaaagtgcagtctgcatcttctgtgggcgcctcccccggagaaatgctggcacc

SEQ ID NO: 130121 - DNA, 80 bp, synthetic construct; identical to SEQ ID NO: 41372
  misc_feature 1..80: note = Artificially Synthesized Probe
  source 1..80: mol_type = other DNA

SEQ ID NO: 130122 - DNA, 80 bp, synthetic construct
  misc_feature 1..80: note = Artificially Synthesized Probe
  source 1..80: mol_type = other DNA
attcgtgctcaacaatctccaaaacatttgacttcacaggaacctcaactcttttcacaaaatttttgtgataaatacac

SEQ ID NO: 130123 - DNA, 80 bp, synthetic construct
  misc_feature 1..80: note = Artificially Synthesized Probe
  source 1..80: mol_type = other DNA
gtcatccttgccttttatagtctatttggcattaaagcggaactcacactaaaatggtttttcctagggagacatggact

SEQ ID NO: 130124 - DNA, 80 bp, synthetic construct
  misc_feature 1..80: note = Artificially Synthesized Probe
  source 1..80: mol_type = other DNA
aatgtactgaattagctatcacgtggcctgccgttttggaggaaaggcaagttggattgaatatctcatcatattcttca

SEQ ID NO: 130125 - DNA, 80 bp, synthetic construct
  misc_feature 1..80: note = Artificially Synthesized Probe
  source 1..80: mol_type = other DNA
ctcattattctctatgtattctgttacagcttctagcatgcttcatcgtgacaacctaatattatcaagcctcatatttt

SEQ ID NO: 130126 - DNA, 80 bp, synthetic construct
  misc_feature 1..80: note = Artificially Synthesized Probe
  source 1..80: mol_type = other DNA
catgcccgaacacggagtccagatgaggcttgctgtgctcactccatcccttcatgctgctcggggagaacacaggagct

SEQ ID NO: 130127 - DNA, 80 bp, synthetic construct; identical to SEQ ID NO: 41373
  misc_feature 1..80: note = Artificially Synthesized Probe
  source 1..80: mol_type = other DNA

SEQ ID NO: 130128 - DNA, 80 bp, synthetic construct
  misc_feature 1..80: note = Artificially Synthesized Probe
  source 1..80: mol_type = other DNA
tacgttcgtaacccgcattctttctaggagatcgtcaacaatctggaagttatatggaggcagggatttctcctcctccc

SEQ ID NO: 130129 - DNA, 80 bp, synthetic construct
  misc_feature 1..80: note = Artificially Synthesized Probe
  source 1..80: mol_type = other DNA
tccgtgcatacatatctctgccctggcgggttgctcagaagccattttcctccacgcccatgagctgagagagcacccac

SEQ ID NO: 130130 - DNA, 80 bp, synthetic construct
  misc_feature 1..80: note = Artificially Synthesized Probe
  source 1..80: mol_type = other DNA
gttctggtggccgtcgtcatctatgtcctcgttgttgtcacactggtccccaacaaggtcattgtccacgtcggtctagg

SEQ ID NO: 130131 - DNA, 80 bp, synthetic construct; identical to SEQ ID NO: 41374
  misc_feature 1..80: note = Artificially Synthesized Probe
  source 1..80: mol_type = other DNA

SEQ ID NO: 130132 - DNA, 80 bp, synthetic construct
  misc_feature 1..80: note = Artificially Synthesized Probe
  source 1..80: mol_type = other DNA
tctccgcctttcccgacaccccaaagtagcgctgcgagcagctgcgtctccctcccggggctcgcgcgcccagaaccctc

SEQ ID NO: 130133 - DNA, 80 bp, synthetic construct; identical to SEQ ID NO: 41514
  misc_feature 1..80: note = Artificially Synthesized Probe
  source 1..80: mol_type = other DNA

SEQ ID NO: 130134 - DNA, 80 bp, synthetic construct
  misc_feature 1..80: note = Artificially Synthesized Probe
  source 1..80: mol_type = other DNA
acgcccagctaattttatgtttttagtggagacaggtttcaacatgttggccaggctggacttgaactcctgacttgagg

SEQ ID NO: 130135 - DNA, 80 bp, synthetic construct
  misc_feature 1..80: note = Artificially Synthesized Probe
  source 1..80: mol_type = other DNA
ttgcccaggctggagtgcagtggcgtaatctgggctcactgcaacctccgcctcccaggttcaagcagttttcctgcctc

SEQ ID NO: 130136 - DNA, 80 bp, synthetic construct
  misc_feature 1..80: note = Artificially Synthesized Probe
  source 1..80: mol_type = other DNA
ggcatgagccactgcacctggccagctaacttttttttttttttgagacagagtctcactgtgtcaccctggctggagag

SEQ ID NO: 130137 - DNA, 80 bp, synthetic construct
  misc_feature 1..80: note = Artificially Synthesized Probe
  source 1..80: mol_type = other DNA
ctcctgacctcaggtgatctgcccaccttggcctcccaaagtgctgggattacaggtgtgagccaccgcatctggccgag

SEQ ID NO: 130138 - DNA, 80 bp, synthetic construct; identical to SEQ ID NO: 41515
  misc_feature 1..80: note = Artificially Synthesized Probe
  source 1..80: mol_type = other DNA

SEQ ID NO: 130139 - DNA, 80 bp, synthetic construct
  misc_feature 1..80: note = Artificially Synthesized Probe
  source 1..80: mol_type = other DNA
gaccagcctggccaacatgatgaaaccccatctctactaaaaatgcaaaaattaggtgggcgtggtggtgggtgcctgta

SEQ ID NO: 130140 - DNA, 80 bp, synthetic construct
  misc_feature 1..80: note = Artificially Synthesized Probe
  source 1..80: mol_type = other DNA
tgttctactcttcccactcacgtcacaaagtcgagagaaacatcccctaatttgattgtatatttcattttaaaggaatc

SEQ ID NO: 130141 - DNA, 80 bp, synthetic construct
  misc_feature 1..80: note = Artificially Synthesized Probe
  source 1..80: mol_type = other DNA
cctcagagtctctatgttaataagctctcctagtggccttgctgcatctcaagtggaaaaccacagtggaggacagtact

SEQ ID NO: 130142 - DNA, 80 bp, synthetic construct
  misc_feature 1..80: note = Artificially Synthesized Probe
  source 1..80: mol_type = other DNA
ccagggtggagtgcagtggcgcgatctcggctcactgcaggctccatctcccgggttcacaccattctcctgcctcagcc

SEQ ID NO: 130143 - DNA, 80 bp, synthetic construct; identical to SEQ ID NO: 41516
  misc_feature 1..80: note = Artificially Synthesized Probe
  source 1..80: mol_type = other DNA

SEQ ID NO: 130144 - DNA, 80 bp, synthetic construct
  misc_feature 1..80: note = Artificially Synthesized Probe
  source 1..80: mol_type = other DNA
ggtaagatctggctgacaagtttaccgtaaatcatttaaaacttattttaaaattgacttcatacctttcctgaattgtg

SEQ ID NO: 130145 - DNA, 80 bp, synthetic construct
  misc_feature 1..80: note = Artificially Synthesized Probe
  source 1..80: mol_type = other DNA
gagtcttaagtagcattgaaagtatttaaaaatatgcataacttagtaattacaatgtttttgtttttgatagcaattca

SEQ ID NO: 130146 - DNA, 80 bp, synthetic construct; identical to SEQ ID NO: 41517
  misc_feature 1..80: note = Artificially Synthesized Probe
  source 1..80: mol_type = other DNA

SEQ ID NO: 130147 - DNA, 80 bp, synthetic construct
  misc_feature 1..80: note = Artificially Synthesized Probe
  source 1..80: mol_type = other DNA
cacctgtaatcccagctacttgagaggctgaggcaggagaatcacttgaacctgggaggcagaggttgcagtgagctgag

SEQ ID NO: 130148 - DNA, 80 bp, synthetic construct
  misc_feature 1..80: note = Artificially Synthesized Probe
  source 1..80: mol_type = other DNA
tttttctttccttctactccatcacccttcctgttacctctctcagtgggttttttggtactatttaagtaagttgcagg

SEQ ID NO: 130149 - DNA, 80 bp, synthetic construct
  misc_feature 1..80: note = Artificially Synthesized Probe
  source 1..80: mol_type = other DNA
ctcattcttcccccaccctccactggatcagggacctatggtagttcatgcattgcatttggtttttatgtaacttttaa

SEQ ID NO: 130150 - DNA, 80 bp, synthetic construct
  misc_feature 1..80: note = Artificially Synthesized Probe
  source 1..80: mol_type = other DNA
taacatacgtgtatgtttatgtgtttgtctcctagagtatggtctccggcttgggagtcagatcttcgtaaaggaaatga

SEQ ID NO: 130151 - DNA, 80 bp, synthetic construct
  misc_feature 1..80: note = Artificially Synthesized Probe
  source 1..80: mol_type = other DNA
gtatggtcaggaactgagtagcagctccttagtttagactttccaatttgcctttgatcccactcagccctttgcacaga

SEQ ID NO: 130152 - DNA, 80 bp, synthetic construct; identical to SEQ ID NO: 41518
  misc_feature 1..80: note = Artificially Synthesized Probe
  source 1..80: mol_type = other DNA

SEQ ID NO: 130153 - DNA, 80 bp, synthetic construct
  misc_feature 1..80: note = Artificially Synthesized Probe
  source 1..80: mol_type = other DNA
cagtcaggaaacacgttccagtagtaaaccaaaccgttgtcttgagcttggaagttaaataaattagcagagtaacttac

SEQ ID NO: 130154 - DNA, 80 bp, synthetic construct
  misc_feature 1..80: note = Artificially Synthesized Probe
  source 1..80: mol_type = other DNA
tgcatttaacattaccattttttataaacacagatcaatgggactgtaactgagaacatgtctttaacggatgctcgaaa

SEQ ID NO: 130155 - DNA, 80 bp, synthetic construct; identical to SEQ ID NO: 41519
  misc_feature 1..80: note = Artificially Synthesized Probe
  source 1..80: mol_type = other DNA

SEQ ID NO: 130156 - DNA, 80 bp, synthetic construct
  misc_feature 1..80: note = Artificially Synthesized Probe
  source 1..80: mol_type = other DNA
acttgtcagtaaaaaaatgtgtgtttgagtggttcaaagaactaaccatatcatttatatatttgctaattgcttattgt

SEQ ID NO: 130157 - DNA, 80 bp, synthetic construct
  misc_feature 1..80: note = Artificially Synthesized Probe
  source 1..80: mol_type = other DNA
ttgtatttttagtagagacggggtttcaccatgttggccaggctggtcttgaactcctgacctcgtgatctgcccgtctt

SEQ ID NO: 130158 - DNA, 80 bp, synthetic construct
  misc_feature 1..80: note = Artificially Synthesized Probe
  source 1..80: mol_type = other DNA
gcattcattaattagcagtctgcatcacctcttcccttttaaagagctatattcattatttgaatatgaattatacatag

SEQ ID NO: 130159 - DNA, 80 bp, synthetic construct
  misc_feature 1..80: note = Artificially Synthesized Probe
  source 1..80: mol_type = other DNA
ctttgtaaaaccttaaaacttaattcactttccagtgtatcagaagttgttgatgactgttacgggtgcagtgcaggaaa

SEQ ID NO: 130160 - DNA, 80 bp, synthetic construct; identical to SEQ ID NO: 41520
  misc_feature 1..80: note = Artificially Synthesized Probe
  source 1..80: mol_type = other DNA

SEQ ID NO: 130161 - DNA, 80 bp, synthetic construct
  misc_feature 1..80: note = Artificially Synthesized Probe
  source 1..80: mol_type = other DNA
ttcccttaaaacgagcaagtttttctccaggggaggactattagactaatagcacatttcctgcctacctcgtttccatt

SEQ ID NO: 130162 - DNA, 80 bp, synthetic construct; identical to SEQ ID NO: 41416
  misc_feature 1..80: note = Artificially Synthesized Probe
  source 1..80: mol_type = other DNA

SEQ ID NO: 130163 - DNA, 80 bp, synthetic construct
  misc_feature 1..80: note = Artificially Synthesized Probe
  source 1..80: mol_type = other DNA
ttatgattatcattcctcaagtgagaagctgaaggaaaggccaaggtaagatgacatgaatattctcttgtacatgtcat

SEQ ID NO: 130164 - DNA, 80 bp, synthetic construct
  misc_feature 1..80: note = Artificially Synthesized Probe
  source 1..80: mol_type = other DNA
gtcccagagaccaacaaggaacccagataccaagaggaccccccaggtgagccattaagaccactcagtttcaacagttg

SEQ ID NO: 130165 - DNA, 80 bp, synthetic construct; identical to SEQ ID NO: 41521
  misc_feature 1..80: note = Artificially Synthesized Probe
  source 1..80: mol_type = other DNA

SEQ ID NO: 130166 - DNA, 80 bp, synthetic construct
  misc_feature 1..80: note = Artificially Synthesized Probe
  source 1..80: mol_type = other DNA
tatgtatacatatatgtatgcatgtgtgtatatatgtatacagatatgtatgtacatgtatatgtgtatgtatagataag

SEQ ID NO: 130167 - DNA, 80 bp, synthetic construct
  misc_feature 1..80: note = Artificially Synthesized Probe
  source 1..80: mol_type = other DNA
ttgaggtcattgttttctcccatccttgatcctgacctcttcccccaacccttccccaccaccctacaattatcatcata

SEQ ID NO: 130168 - DNA, 80 bp, synthetic construct
  misc_feature 1..80: note = Artificially Synthesized Probe
  source 1..80: mol_type = other DNA
acttcagagttaaacggcactttagagacttctttttgtttgtggtgacatatgtggcatagacttacattttttgtgga

SEQ ID NO: 130169 - DNA, 80 bp, synthetic construct; identical to SEQ ID NO: 41522
  misc_feature 1..80: note = Artificially Synthesized Probe
  source 1..80: mol_type = other DNA

SEQ ID NO: 130170 - DNA, 80 bp, synthetic construct
  misc_feature 1..80: note = Artificially Synthesized Probe
  source 1..80: mol_type = other DNA
tgaatatttgcgtttgtcagataaattcactcccaaataggtgaagtatttattgctaaactacggtgccctgtggtgac

SEQ ID NO: 130171 - DNA, 80 bp, synthetic construct
  misc_feature 1..80: note = Artificially Synthesized Probe
  source 1..80: mol_type = other DNA
atttgacaagaatgcagtgcaagcgggccttcctttggaagaattttagccctaactctgccctttatttgctttctcat

SEQ ID NO: 130172 - DNA, 80 bp, synthetic construct
  misc_feature 1..80: note = Artificially Synthesized Probe
  source 1..80: mol_type = other DNA
gctagaagaaattaaatctctcatttgctaatgttgttctcccttttaaaaaatatctcccatctttcctttctgaaacg

SEQ ID NO: 130173 - DNA, 80 bp, synthetic construct
  misc_feature 1..80: note = Artificially Synthesized Probe
  source 1..80: mol_type = other DNA
tttttactgggggattgttacactggtgtcctctgcctaccagctacccaaatttcagactcacacaaggaaagcagctg

SEQ ID NO: 130174 - DNA, 80 bp, synthetic construct; identical to SEQ ID NO: 41523
  misc_feature 1..80: note = Artificially Synthesized Probe
  source 1..80: mol_type = other DNA

SEQ ID NO: 130175 - DNA, 80 bp, synthetic construct
  misc_feature 1..80: note = Artificially Synthesized Probe
  source 1..80: mol_type = other DNA
atgtatctgtgagaactgatagtgtttctgcccttgccaagattttattagtctgattaatgtgaaaatattgagactct

SEQ ID NO: 130176 - DNA, 80 bp, synthetic construct
  misc_feature 1..80: note = Artificially Synthesized Probe
  source 1..80: mol_type = other DNA
ctctgattagttctgtgaccctggttcaccctgagactcaggtttctgtatctgtttaatggggatgagaatacctgcct

SEQ ID NO: 130177 - DNA, 80 bp, synthetic construct
  misc_feature 1..80: note = Artificially Synthesized Probe
  source 1..80: mol_type = other DNA
gggaattcctggttaatcaaatattgatacttttaaaattactatgtgtttgtataatctgttaaggaattaaaaaataa

SEQ ID NO: 130178 - DNA, 80 bp, synthetic construct; identical to SEQ ID NO: 41524
  misc_feature 1..80: note = Artificially Synthesized Probe
  source 1..80: mol_type = other DNA

SEQ ID NO: 130179 - DNA, 80 bp, synthetic construct
  misc_feature 1..80: note = Artificially Synthesized Probe
  source 1..80: mol_type = other DNA
cgcccggctgggaactgtcttcattggaatttcttcctgcttctgcaaacttgcagttcatatatatgaggttttttttt

SEQ ID NO: 130180 - DNA, 80 bp, synthetic construct
  misc_feature 1..80: note = Artificially Synthesized Probe
  source 1..80: mol_type = other DNA
tgcagtatttcagatttcatttctggagcagatgaagggcaaaccttgatcatgagctttgcaaaagcttttcagtgaaa

SEQ ID NO: 130181 - DNA, 80 bp, synthetic construct
  misc_feature 1..80: note = Artificially Synthesized Probe
  source 1..80: mol_type = other DNA
tcccaggcatcagctgagagccaccttgtaagtgggtctttcaaaggataacagtcaggcttgctatgttaccttttgga

SEQ ID NO: 130182 - DNA, 80 bp, synthetic construct
  misc_feature 1..80: note = Artificially Synthesized Probe
  source 1..80: mol_type = other DNA
atgaaggaaaaaggcattttttctaactattgtgaggccataggatgatagctagaaatgtggagcttttgctcattaag

SEQ ID NO: 130183 - DNA, 80 bp, synthetic construct; identical to SEQ ID NO: 41525
  misc_feature 1..80: note = Artificially Synthesized Probe
  source 1..80: mol_type = other DNA

SEQ ID NO: 130184 - DNA, 80 bp, synthetic construct
  misc_feature 1..80: note = Artificially Synthesized Probe
  source 1..80: mol_type = other DNA
ggctgatacaggatcctcttcaggctcacagcagacacggctagaccctgtagactactaaatagctaatcaaagaggat

SEQ ID NO: 130185 - DNA, 80 bp, synthetic construct
  misc_feature 1..80: note = Artificially Synthesized Probe
  source 1..80: mol_type = other DNA
ttaagtgtggctctttgttttgcaaaggtgacagcctaatgtgtggaatgaagacgtgagccagatatgtatattcctta

SEQ ID NO: 130186 - DNA, 80 bp, synthetic construct
  misc_feature 1..80: note = Artificially Synthesized Probe
  source 1..80: mol_type = other DNA
tttaaaatataactaccatgtgtgctttaattttgaccattatagtttttggctatcgaagactgtgatcgagactgatc

SEQ ID NO: 130187 - DNA, 80 bp, synthetic construct; identical to SEQ ID NO: 41526
  misc_feature 1..80: note = Artificially Synthesized Probe
  source 1..80: mol_type = other DNA

SEQ ID NO: 130188 - DNA, 80 bp, synthetic construct
  misc_feature 1..80: note = Artificially Synthesized Probe
  source 1..80: mol_type = other DNA
gccctgggggtgctcgccctgcccgcgtggtccgcaaaacggggatctcctccgcctaacgcggcagagacttagaaaac

SEQ ID NO: 130189 - DNA, 80 bp, synthetic construct
  misc_feature 1..80: note = Artificially Synthesized Probe
  source 1..80: mol_type = other DNA
agcattactcttgtgattaaaaggattctgtaattgtcaatgactgaagaaaatatttcataggaattttatatctttat

SEQ ID NO: 130190 - DNA, 80 bp, synthetic construct
  misc_feature 1..80: note = Artificially Synthesized Probe
  source 1..80: mol_type = other DNA
gatcacctgaggtcaagagttcgagaccagcctggccaacatggtgaaaccttgtctctactgaaaatacaaaaaaaatt

SEQ ID NO: 130191 - DNA, 80 bp, synthetic construct; identical to SEQ ID NO: 41417
  misc_feature 1..80: note = Artificially Synthesized Probe
  source 1..80: mol_type = other DNA

SEQ ID NO: 130192 - DNA, 80 bp, synthetic construct
  misc_feature 1..80: note = Artificially Synthesized Probe
  source 1..80: mol_type = other DNA
cacatagcactatgatttcaaaatgtcttgttctttgtgctacatttcaattttacttgctttgtaactgtaaggctgat

SEQ ID NO: 130193 - DNA, 80 bp, synthetic construct
  misc_feature 1..80: note = Artificially Synthesized Probe
  source 1..80: mol_type = other DNA
cagttgtcacagaccccaacactccccatgcttcatacttgtgtattaccttcttggccacctctgtgagagactcacag

SEQ ID NO: 130194 - DNA, 80 bp, synthetic construct; identical to SEQ ID NO: 41527
  misc_feature 1..80: note = Artificially Synthesized Probe
  source 1..80: mol_type = other DNA

SEQ ID NO: 130195 - DNA, 80 bp, synthetic construct
  misc_feature 1..80: note = Artificially Synthesized Probe
  source 1..80: mol_type = other DNA
gtgaaatggtgaccattttagctcagagccgagccgatggtgagcaaatttggtcatttagtttagttggggtgggggtg

SEQ ID NO: 130196 - DNA, 80 bp, synthetic construct
  misc_feature 1..80: note = Artificially Synthesized Probe
  source 1..80: mol_type = other DNA
ctgaaataattttactagttgtgtcaatttggaataaaactgccttcctgaacagtgatgcagccttatgttctgcctgg

SEQ ID NO: 130197 - DNA, 80 bp, synthetic construct
  misc_feature 1..80: note = Artificially Synthesized Probe
  source 1..80: mol_type = other DNA
tgattggcaactgtgttaatgttctccagagaaacagaatgataggagatattggaatcaataggaaagaaagagattta

SEQ ID NO: 130198 - DNA, 80 bp, synthetic construct; identical to SEQ ID NO: 41528
  misc_feature 1..80: note = Artificially Synthesized Probe
  source 1..80: mol_type = other DNA

SEQ ID NO: 130199 - DNA, 80 bp, synthetic construct
  misc_feature 1..80: note = Artificially Synthesized Probe
  source 1..80: mol_type = other DNA
cccaccaccacgcccggctaattttttgtatttttagtagagacggggtttcactgtgttagccaggatggtctcgatct

SEQ ID NO: 130200 - DNA, 80 bp, synthetic construct
  misc_feature 1..80: note = Artificially Synthesized Probe
  source 1..80: mol_type = other DNA
ctctcatgagacccacttctagagggaatgaatgaggaaaggggcagttaaattcattgctatggggatataccaaaggc

SEQ ID NO: 130201 - DNA, 80 bp, synthetic construct
  misc_feature 1..80: note = Artificially Synthesized Probe
  source 1..80: mol_type = other DNA
gcgatcttctttgctcagtctacccatttatacgtgactgtcattcaaaaacaccctcagagaaaggcatagaataaagt

SEQ ID NO: 130202 - DNA, 80 bp, synthetic construct; identical to SEQ ID NO: 41529
  misc_feature 1..80: note = Artificially Synthesized Probe
  source 1..80: mol_type = other DNA

SEQ ID NO: 130203 - DNA, 80 bp, synthetic construct
  misc_feature 1..80: note = Artificially Synthesized Probe
  source 1..80: mol_type = other DNA
gtgaggattgggaacgagttggagaaaggcttaatccccaacaagagcaggtaacagagatcgcattctcacatacccct

SEQ ID NO: 130204 - DNA, 80 bp, synthetic construct
  misc_feature 1..80: note = Artificially Synthesized Probe
  source 1..80: mol_type = other DNA
ctgtaaatagccaccagccagtttattgtgagtaaatttagcatcatgtggttggttgctgaatgtggctgtttgaacaa

SEQ ID NO: 130205 - DNA, 80 bp, synthetic construct
  misc_feature 1..80: note = Artificially Synthesized Probe
  source 1..80: mol_type = other DNA
gacagtgcaggaacctagaaaagaggcctgtatttgagcaggagttccaggtgtgtgtactgtgtacctgcatatcagaa

SEQ ID NO: 130206 - DNA, 80 bp, synthetic construct; identical to SEQ ID NO: 41530
  misc_feature 1..80: note = Artificially Synthesized Probe
  source 1..80: mol_type = other DNA

SEQ ID NO: 130207 - DNA, 80 bp, synthetic construct
  misc_feature 1..80: note = Artificially Synthesized Probe
  source 1..80: mol_type = other DNA
agacctcacagctgttgtgtctgtcagcaccaagttcccagcttatgagagggttttgctgcgagaaggtgaggaagtca

SEQ ID NO: 130208 - DNA, 80 bp, synthetic construct
  misc_feature 1..80: note = Artificially Synthesized Probe
  source 1..80: mol_type = other DNA
cagttcctaaattgaggcttatttctgcaacttaaaaaatgttttaataccactgttcaagagtttcggtatattggctg

SEQ ID NO: 130209 - DNA, 80 bp, synthetic construct
  misc_feature 1..80: note = Artificially Synthesized Probe
  source 1..80: mol_type = other DNA
taaaaaaagtttccatatattatcaatgggaaagtttgtgtttaaaaatggtgaggagctaggcagtgtagtcccagcta

SEQ ID NO: 130210 - DNA, 80 bp, synthetic construct
  misc_feature 1..80: note = Artificially Synthesized Probe
  source 1..80: mol_type = other DNA
cttagtcacctggtgcctagatttcttcatttcttcatctaaaaacagggagaatttattgccttttttttaagataggg

SEQ ID NO: 130211 - DNA, 80 bp, synthetic construct; identical to SEQ ID NO: 41531
  misc_feature 1..80: note = Artificially Synthesized Probe
  source 1..80: mol_type = other DNA

SEQ ID NO: 130212 - DNA, 80 bp, synthetic construct
  misc_feature 1..80: note = Artificially Synthesized Probe
  source 1..80: mol_type = other DNA
tttttttttcccccaaatttttattttgaaaaatttctaacagaggagttggaagaatcatgaacacccacgtacccttc

SEQ ID NO: 130213 - DNA, 80 bp, synthetic construct
  misc_feature 1..80: note = Artificially Synthesized Probe
  source 1..80: mol_type = other DNA
gaacaaggactttctcccacataactgcaataccattatcacagccaagaaaggtaacattgatgtggtgtgattttgta

SEQ ID NO: 130214 - DNA, 80 bp, synthetic construct
  misc_feature 1..80: note = Artificially Synthesized Probe
  source 1..80: mol_type = other DNA
gttacactgatattttgaagaatccaagctagttgtctcctagaatgcttcctgttggactggcctaaccgtttcttcat

SEQ ID NO: 130215 - DNA, 80 bp, synthetic construct; identical to SEQ ID NO: 41532
  misc_feature 1..80: note = Artificially Synthesized Probe
  source 1..80: mol_type = other DNA

SEQ ID NO: 130216 - DNA, 80 bp, synthetic construct
  misc_feature 1..80: note = Artificially Synthesized Probe
  source 1..80: mol_type = other DNA
aggctgaggcgggtggatcacctgaggtcaggagttcgagaccagcctggccaacatggtgaaaccctgtctctactaaa

SEQ ID NO: 130217 - DNA, 80 bp, synthetic construct
  misc_feature 1..80: note = Artificially Synthesized Probe
  source 1..80: mol_type = other DNA
aaaaaatatatatataatgtaaatgcaaaccgtttcactgtgtggaaaccagtcactgttggcagtgagcggagattgca

SEQ ID NO: 130218 - DNA, 80 bp, synthetic construct
  misc_feature 1..80: note = Artificially Synthesized Probe
  source 1..80: mol_type = other DNA
aaataatgtgttaattcattttatcagaagttctaacacattggtaatattgaagtgggcattaggtagaaggaaatgtg

SEQ ID NO: 130219 - DNA, 80 bp, synthetic construct
  misc_feature 1..80: note = Artificially Synthesized Probe
  source 1..80: mol_type = other DNA
gccatggtggtggcgggcacctgtaatcccagctactcaggaggctgagacaggataattgcttgaacccgggaggcgga

SEQ ID NO: 130220 - DNA, 80 bp, synthetic construct; identical to SEQ ID NO: 41533
  misc_feature 1..80: note = Artificially Synthesized Probe
  source 1..80: mol_type = other DNA

SEQ ID NO: 130221 - DNA, 80 bp, synthetic construct
  misc_feature 1..80: note = Artificially Synthesized Probe
  source 1..80: mol_type = other DNA
acagggttttaccatattgcccagcctggtctcgaacgcttgagctcaagcaaccctcctgcctcggcctcccaaagtgc

SEQ ID NO: 130222 - DNA, 80 bp, synthetic construct
  misc_feature 1..80: note = Artificially Synthesized Probe
  source 1..80: mol_type = other DNA
ccaacaagcttaaaaaaacgtgtgcacacctttttacaggtaagtgaaatgtaaatgtagtccctttgctaaaaaatgag

SEQ ID NO: 130223 - DNA, 80 bp, synthetic construct
  misc_feature 1..80: note = Artificially Synthesized Probe
  source 1..80: mol_type = other DNA
accataaagatccatgatgtggtaataattagctattttgatgaagttcatattttcctgtgagactataaggctagtga

SEQ ID NO: 130224 - DNA, 80 bp, synthetic construct
  misc_feature 1..80: note = Artificially Synthesized Probe
  source 1..80: mol_type = other DNA
tgggaggccaaggcaggaggatcacttgagcccaggggttggagaccagcctgagcaacatggtgagatcctgtctctac

SEQ ID NO: 130225 - DNA, 80 bp, synthetic construct; identical to SEQ ID NO: 41534
  misc_feature 1..80: note = Artificially Synthesized Probe
  source 1..80: mol_type = other DNA

SEQ ID NO: 130226 - DNA, 80 bp, synthetic construct
  misc_feature 1..80: note = Artificially Synthesized Probe
  source 1..80: mol_type = other DNA
acaagactggccaagacttggtagttgttagttgttgaactggttgatatgtacatcggagttcattaaactgctatctg

SEQ ID NO: 130227 - DNA, 80 bp, synthetic construct
  misc_feature 1..80: note = Artificially Synthesized Probe
  source 1..80: mol_type = other DNA
tatgagattattaagagttttaaagggttacataaattttgtggtcatgcagggcattattttgttggggcaacacgagg

SEQ ID NO: 130228 - DNA, 80 bp, synthetic construct
  misc_feature 1..80: note = Artificially Synthesized Probe
  source 1..80: mol_type = other DNA
cttgttaaagagaggtgcactacttgccactgtggccaaatggagagagtttaaccaaatgcagaggaggaagtggtcca

SEQ ID NO: 130229 - DNA, 80 bp, synthetic construct; identical to SEQ ID NO: 41535
  misc_feature 1..80: note = Artificially Synthesized Probe
  source 1..80: mol_type = other DNA

SEQ ID NO: 130230 - DNA, 80 bp, synthetic construct
  misc_feature 1..80: note = Artificially Synthesized Probe
  source 1..80: mol_type = other DNA
tttgtctgagtacactaaatagcgagcgtcttccctcagagagttaaatttgggattcacgtgaggatgtaggaaatcgg

SEQ ID NO: 130231 - DNA, 80 bp, synthetic construct
  misc_feature 1..80: note = Artificially Synthesized Probe
  source 1..80: mol_type = other DNA
gagtgtgagtaagaatctagaggggtccatgtgtgtagaaggggttagcaacacctctgttagctccatagatggatttc

SEQ ID NO: 130232 - DNA, 80 bp, synthetic construct
  misc_feature 1..80: note = Artificially Synthesized Probe
  source 1..80: mol_type = other DNA
accaagccatttcttgcctaaactcatcaggaagttgaaagttttagaataactcaagtcagagattggaatggaagcac

SEQ ID NO: 130233 - DNA, 80 bp, synthetic construct; identical to SEQ ID NO: 41418
  misc_feature 1..80: note = Artificially Synthesized Probe
  source 1..80: mol_type = other DNA

SEQ ID NO: 130234 - DNA, 80 bp, synthetic construct; identical to SEQ ID NO: 41536
  misc_feature 1..80: note = Artificially Synthesized Probe
  source 1..80: mol_type = other DNA

SEQ ID NO: 130235 - DNA, 80 bp, synthetic construct
  misc_feature 1..80: note = Artificially Synthesized Probe
  source 1..80: mol_type = other DNA
gctagagtgcagtggcacgatctcggttcactgcaacctctgcttcctgggctcaaggcaccttccctcctcagcctccc

SEQ ID NO: 130236 - DNA, 80 bp, synthetic construct
  misc_feature 1..80: note = Artificially Synthesized Probe
  source 1..80: mol_type = other DNA
ccaccgtgcctggcctattttgtaggcttttaaaatgattttaagtgtatggcatttttgtgagttagtagttgagaata

SEQ ID NO: 130237 - DNA, 80 bp, synthetic construct
  misc_feature 1..80: note = Artificially Synthesized Probe
  source 1..80: mol_type = other DNA
caagtcttacagtacttctcagttaaacaagagaagctttattctgagatttgcccaaaggcaagttgacttgtcataat

SEQ ID NO: 130238 - DNA, 80 bp, synthetic construct; identical to SEQ ID NO: 41537
  misc_feature 1..80: note = Artificially Synthesized Probe
  source 1..80: mol_type = other DNA

SEQ ID NO: 130239 - DNA, 80 bp, synthetic construct
  misc_feature 1..80: note = Artificially Synthesized Probe
  source 1..80: mol_type = other DNA
gagccacgtgaaaagctttattgagttttgacttagataccatataatccacccattgaaagtatatagttcagctgggc

SEQ ID NO: 130240 - DNA, 80 bp, synthetic construct
  misc_feature 1..80: note = Artificially Synthesized Probe
  source 1..80: mol_type = other DNA
agctacttgggaggctgaggtgggaggatcacttaagcccgggagctggaggttgcagtgagccgagattgcactacagc

SEQ ID NO: 130241 - DNA, 80 bp, synthetic construct
  misc_feature 1..80: note = Artificially Synthesized Probe
  source 1..80: mol_type = other DNA
cccattagcagtcattccccatttctccctttccctaaaccctctagtcttagatgttaccttttgctgtcgctcttggt

SEQ ID NO: 130242 - DNA, 80 bp, synthetic construct; identical to SEQ ID NO: 41538
  misc_feature 1..80: note = Artificially Synthesized Probe
  source 1..80: mol_type = other DNA

SEQ ID NO: 130243 - DNA, 80 bp, synthetic construct
  misc_feature 1..80: note = Artificially Synthesized Probe
  source 1..80: mol_type = other DNA
tgaagctctcaatttttattcataaacttgactgttaatgtgaattcagtaagagcttttgtgattttctttattttatc

SEQ ID NO: 130244 - DNA, 80 bp, synthetic construct
  misc_feature 1..80: note = Artificially Synthesized Probe
  source 1..80: mol_type = other DNA
gcagcctctgcctcccgagttcaagcgattctcctgcctcagcctcctgagtagctgggactacagcgtgcaccatcatg

SEQ ID NO: 130245 - DNA, 80 bp, synthetic construct
  misc_feature 1..80: note = Artificially Synthesized Probe
  source 1..80: mol_type = other DNA
gtctctggggtacaaaatctcacttctatttttaagtatcatattttagctatgagatgagcacagtaatctttgcagag

SEQ ID NO: 130246 - DNA, 80 bp, synthetic construct
  misc_feature 1..80: note = Artificially Synthesized Probe
  source 1..80: mol_type = other DNA
gaaagctatgttacttggaggaaaacctgaagcatcattgcttacaaaatttgcttaatggttctttttggctttagaag

SEQ ID NO: 130247 - DNA, 80 bp, synthetic construct; identical to SEQ ID NO: 41539
  misc_feature 1..80: note = Artificially Synthesized Probe
  source 1..80: mol_type = other DNA

SEQ ID NO: 130248 - DNA, 80 bp, synthetic construct
  misc_feature 1..80: note = Artificially Synthesized Probe
  source 1..80: mol_type = other DNA
tagcaacacctaccttgcaaagtttgtgtagtcgtgaaatgagctaatccaggtaaggtacttggaaagtaactggttga

SEQ ID NO: 130249 - DNA, 80 bp, synthetic construct
  misc_feature 1..80: note = Artificially Synthesized Probe
  source 1..80: mol_type = other DNA
cacattcatgaattcaactagccgtgtataggaaatatttgaggggtaaaatggatggttacatctaaacgtgcagggtt

SEQ ID NO: 130250 - DNA, 80 bp, synthetic construct; identical to SEQ ID NO: 41540
  misc_feature 1..80: note = Artificially Synthesized Probe
  source 1..80: mol_type = other DNA

SEQ ID NO: 130251 - DNA, 80 bp, synthetic construct
  misc_feature 1..80: note = Artificially Synthesized Probe
  source 1..80: mol_type = other DNA
gcctttctgaaaataaacattctaaaaatctatttttagctttatcacatccacctataatgtgaactcaaacagctaca

SEQ ID NO: 130252 - DNA, 80 bp, synthetic construct
  misc_feature 1..80: note = Artificially Synthesized Probe
  source 1..80: mol_type = other DNA
tttttgtttatatttctatagctacaatcaacctaaattcagccaatgatagctggtttggcagcttaaaggacactatt

SEQ ID NO: 130253 - DNA, 80 bp, synthetic construct
  misc_feature 1..80: note = Artificially Synthesized Probe
  source 1..80: mol_type = other DNA
aagccatgcccatttgaagtgatgctcacatgtgtgctaatcaagtttgaaatttcgtaaattctctgaccaagtaataa

SEQ ID NO: 130254 - DNA, 80 bp, synthetic construct
  misc_feature 1..80: note = Artificially Synthesized Probe
  source 1..80: mol_type = other DNA
aaacttagagtgcagatgagaggtgaggttgagcaacttggagaatacggctaaacattaataaaaagaaaagctaatgg

SEQ ID NO: 130255 - DNA, 80 bp, synthetic construct
  misc_feature 1..80: note = Artificially Synthesized Probe
  source 1..80: mol_type = other DNA
aacacacttttctctttacctggatgccccagatttcttttgtcagcctaaggaatatgtactcctattattaagaccca

SEQ ID NO: 130256 - DNA, 80 bp, synthetic construct; identical to SEQ ID NO: 41541
  misc_feature 1..80: note = Artificially Synthesized Probe
  source 1..80: mol_type = other DNA

SEQ ID NO: 130257 - DNA, 80 bp, synthetic construct
  misc_feature 1..80: note = Artificially Synthesized Probe
  source 1..80: mol_type = other DNA
acatagcttctgcctttgagggtctgagaatcttgtagaggcatggatgtgagtgtagcacaaggcagcgtgcaatgtgt

SEQ ID NO: 130258 - DNA, 80 bp, synthetic construct
  misc_feature 1..80: note = Artificially Synthesized Probe
  source 1..80: mol_type = other DNA
aacgaccataatatcaacattgtaccaaagccaagtgatctcagggagaaaaataaaagatgccttccctggcgagcaca

SEQ ID NO: 130259 - DNA, 80 bp, synthetic construct
  misc_feature 1..80: note = Artificially Synthesized Probe
  source 1..80: mol_type = other DNA
gcggactatctgagttgcgacagccgcctcatcagtgactttgaagacacggacggtgaaggaggcgcctacactgacaa

SEQ ID NO: 130260 - DNA, 80 bp, synthetic construct; identical to SEQ ID NO: 41542
  misc_feature 1..80: note = Artificially Synthesized Probe
  source 1..80: mol_type = other DNA

SEQ ID NO: 130261 - DNA, 80 bp, synthetic construct
  misc_feature 1..80: note = Artificially Synthesized Probe
  source 1..80: mol_type = other DNA
attaccagcggaaccttccttcccatgcagtattgttgtatgtacttgtaacctttgattaggtttctctctgtactctt

SEQ ID NO: 130262 - DNA, 80 bp, synthetic construct
  misc_feature 1..80: note = Artificially Synthesized Probe
  source 1..80: mol_type = other DNA
cactgtgattagatagcttatgggatccttgaaatcacattgacaggcactgtaaagtcacagccaagttagcaattatt

SEQ ID NO: 130263 - DNA, 80 bp, synthetic construct
  misc_feature 1..80: note = Artificially Synthesized Probe
  source 1..80: mol_type = other DNA
aagttcaacaacaacaaactgaagggggagaaaaatacaccattaccacagcaacaaattagtttatgctagacaacttg

SEQ ID NO: 130264 - DNA, 80 bp, synthetic construct; identical to SEQ ID NO: 41543
  misc_feature 1..80: note = Artificially Synthesized Probe
  source 1..80: mol_type = other DNA

SEQ ID NO: 130265 - DNA, 80 bp, synthetic construct
  misc_feature 1..80: note = Artificially Synthesized Probe
  source 1..80: mol_type = other DNA
gcagtcgagtgctctgttctctctgcttggatgttcttgttgtgaatgaacctttatgtcttgtagagcataaggaaacc

SEQ ID NO: 130266 - DNA, 80 bp, synthetic construct
  misc_feature 1..80: note = Artificially Synthesized Probe
  source 1..80: mol_type = other DNA
acggccagggaggagcatgcacactgagatggtgtttaattacggttctgactcactgtgttctctattagagcctatct

SEQ ID NO: 130267 - DNA, 80 bp, synthetic construct
  misc_feature 1..80: note = Artificially Synthesized Probe
  source 1..80: mol_type = other DNA
atttttgaaggcaaggatggcttggtattatttgaatctccagtgccaatcagactgtttgatagggaccagctcagggg

SEQ ID NO: 130268 - DNA, 80 bp, synthetic construct; identical to SEQ ID NO: 41544
  misc_feature 1..80: note = Artificially Synthesized Probe
  source 1..80: mol_type = other DNA

SEQ ID NO: 130269 - DNA, 80 bp, synthetic construct
  misc_feature 1..80: note = Artificially Synthesized Probe
  source 1..80: mol_type = other DNA
aaagacacaagggcttatatcaaaagattatttacctttagtcagaatcagagctgtgactctatgtttttccttatacc

SEQ ID NO: 130270 - DNA, 80 bp, synthetic construct
  misc_feature 1..80: note = Artificially Synthesized Probe
  source 1..80: mol_type = other DNA
agtagctgggacttagaggtgtgcaccactatattcagctaatttttgtatttttagtagagatggggtttcgacatgtt

SEQ ID NO: 130271 - DNA, 80 bp, synthetic construct
  misc_feature 1..80: note = Artificially Synthesized Probe
  source 1..80: mol_type = other DNA
gtgataggtactaagtaataataagtgacctcataaaatacatcagcgaaaatttgcaagccgggcaagactggaagtgt

SEQ ID NO: 130272 - DNA, 80 bp, synthetic construct; identical to SEQ ID NO: 41545
  misc_feature 1..80: note = Artificially Synthesized Probe
  source 1..80: mol_type = other DNA

SEQ ID NO: 130273 - DNA, 80 bp, synthetic construct
  misc_feature 1..80: note = Artificially Synthesized Probe
  source 1..80: mol_type = other DNA
tgtcagaatggtatttgtggaccacctttggaaactgatcaggaaatggagtgtattaaatcactaatatagatttgaaa

SEQ ID NO: 130274 - DNA, 80 bp, synthetic construct
  misc_feature 1..80: note = Artificially Synthesized Probe
  source 1..80: mol_type = other DNA
tctccaaatcctatgaatataagtcaaacccctctgccgttgctggtaatgaaactcctggggcatctaccaaaggttat

SEQ ID NO: 130275 - DNA, 80 bp, synthetic construct
  misc_feature 1..80: note = Artificially Synthesized Probe
  source 1..80: mol_type = other DNA
atcacaaggccaggttacagagaatgcaggagctccaggaagcacagaatgcaagggtaattgtttttaaactacacatc

SEQ ID NO: 130276 - DNA, 80 bp, synthetic construct; identical to SEQ ID NO: 41546
  misc_feature 1..80: note = Artificially Synthesized Probe
  source 1..80: mol_type = other DNA

SEQ ID NO: 130277 - DNA, 80 bp, synthetic construct; identical to SEQ ID NO: 41419
  misc_feature 1..80: note = Artificially Synthesized Probe
  source 1..80: mol_type = other DNA

SEQ ID NO: 130278 - DNA, 80 bp, synthetic construct
  misc_feature 1..80: note = Artificially Synthesized Probe
  source 1..80: mol_type = other DNA
gtataccatatgcacatagaacttttcaaacaaagaagaatttaactaaaggtctgtggagtatatttgcccagtagatg

SEQ ID NO: 130279 - DNA, 80 bp, synthetic construct
  misc_feature 1..80: note = Artificially Synthesized Probe
  source 1..80: mol_type = other DNA
ctgtcaccccggctggagtgtagcagtgtgatcacagctcgcagcagcctccacctctcaggctcaggagatactcccac

SEQ ID NO: 130280 - DNA, 80 bp, synthetic construct
  misc_feature 1..80: note = Artificially Synthesized Probe
  source 1..80: mol_type = other DNA
acaatcatgagtcactgcacccagcctcaaccattttaaaacgttcggttcagcggcattaagtaccttcacattgctgt

SEQ ID NO: 130281 - DNA, 80 bp, synthetic construct
  misc_feature 1..80: note = Artificially Synthesized Probe
  source 1..80: mol_type = other DNA
ataagtagaatcatacactatttgtctttttgtgattggcttatttcccttagcatgatgtcctcaaggttcatccaggt

SEQ ID NO: 130282 - DNA, 80 bp, synthetic construct; identical to SEQ ID NO: 41547
  misc_feature 1..80: note = Artificially Synthesized Probe
  source 1..80: mol_type = other DNA

SEQ ID NO: 130283 - DNA, 80 bp, synthetic construct
  misc_feature 1..80: note = Artificially Synthesized Probe
  source 1..80: mol_type = other DNA
actgggacttgaagaaagaatttcctttacccaaatttcagagtaacaggaggattttttccccacagattgactgtttg

SEQ ID NO: 130284 - DNA, 80 bp, synthetic construct
  misc_feature 1..80: note = Artificially Synthesized Probe
  source 1..80: mol_type = other DNA
cacatgagcagaattcctacggcttagacctgttttgtcttgtttgctgactctcagccaaacttcttaattcctttgca

SEQ ID NO: 130285 - DNA, 80 bp, synthetic construct; identical to SEQ ID NO: 41548
  misc_feature 1..80: note = Artificially Synthesized Probe
  source 1..80: mol_type = other DNA

SEQ ID NO: 130286 - DNA, 80 bp, synthetic construct
  misc_feature 1..80: note = Artificially Synthesized Probe
  source 1..80: mol_type = other DNA
ttttaatagagacagggtttcaccatgttggccaggctggtctcaaactcctgacctccgcccgcctcggcctcccaaag

SEQ ID NO: 130287 - DNA, 80 bp, synthetic construct
  misc_feature 1..80: note = Artificially Synthesized Probe
  source 1..80: mol_type = other DNA
ttcttggttatgatggactgaaactggcagagacctcgctgctgggtgagactagccagggagcttaggggtaaggaggg

SEQ ID NO: 130288 - DNA, 80 bp, synthetic construct
  misc_feature 1..80: note = Artificially Synthesized Probe
  source 1..80: mol_type = other DNA
acctcagctgccagagggcaggattgcagcaagatctaagtgtccacttggaaggctgaagtgctccactcaagcaagac

SEQ ID NO: 130289 - DNA, 80 bp, synthetic construct
  misc_feature 1..80: note = Artificially Synthesized Probe
  source 1..80: mol_type = other DNA
gctcgggatacccagtcactgtgctcagagccatgcctccccgggcagccggaggacatggatgtgctctggaatgtctt

SEQ ID NO: 130290 - DNA, 80 bp, synthetic construct
  misc_feature 1..80: note = Artificially Synthesized Probe
  source 1..80: mol_type = other DNA
cccgataccgggacacagaattatagatgtctgagcacggactctcccaggcctgcctgcatggcatcagactagccact

SEQ ID NO: 130291 - DNA, 80 bp, synthetic construct; identical to SEQ ID NO: 41549
  misc_feature 1..80: note = Artificially Synthesized Probe
  source 1..80: mol_type = other DNA

SEQ ID NO: 130292 - DNA, 80 bp, synthetic construct
  misc_feature 1..80: note = Artificially Synthesized Probe
  source 1..80: mol_type = other DNA
tgccttggatgagaagtgtcttaaattttcttcctttgaagctttaggcagagccataatggactaaaacattttgacta

SEQ ID NO: 130293 - DNA, 80 bp, synthetic construct
  misc_feature 1..80: note = Artificially Synthesized Probe
  source 1..80: mol_type = other DNA
ggtatcgaaatttgttgtttgtttaaacccaagtgctgcacaaaagcagatacttgaggaaaacactatttccaaaagca

SEQ ID NO: 130294 - DNA, 80 bp, synthetic construct
  misc_feature 1..80: note = Artificially Synthesized Probe
  source 1..80: mol_type = other DNA
aaaatggaaacgtgaaaaagaaaattatacccataatcccatccctcagataattttggtgtattttctccaattacgta

SEQ ID NO: 130295 - DNA, 80 bp, synthetic construct; identical to SEQ ID NO: 41550
  misc_feature 1..80: note = Artificially Synthesized Probe
  source 1..80: mol_type = other DNA

SEQ ID NO: 130296 - DNA, 80 bp, synthetic construct
  misc_feature 1..80: note = Artificially Synthesized Probe
  source 1..80: mol_type = other DNA
tttactgccaaatagcttcctagaaaagttgcatcaatttacacccccacatccactcttcctcttcctcttcttcctcc

SEQ ID NO: 130297 - DNA, 80 bp, synthetic construct
  misc_feature 1..80: note = Artificially Synthesized Probe
  source 1..80: mol_type = other DNA
agggtcttgctttgctgcccccaggctggtcctgttcttgaactcctttagcaatcctcccacctcagcttcccaaagtg

SEQ ID NO: 130298 - DNA, 80 bp, synthetic construct
  misc_feature 1..80: note = Artificially Synthesized Probe
  source 1..80: mol_type = other DNA
caatgactgggtgggttaagtaacagacatttgtttctcagcgctctggagacatgaggtttgataccaggtgccaggat

SEQ ID NO: 130299 - DNA, 80 bp, synthetic construct; identical to SEQ ID NO: 41551
  misc_feature 1..80: note = Artificially Synthesized Probe
  source 1..80: mol_type = other DNA

SEQ ID NO: 130300 - DNA, 80 bp, synthetic construct
  misc_feature 1..80: note = Artificially Synthesized Probe
  source 1..80: mol_type = other DNA
aaatgtactagttaactatatgataagactgtttgtttgtgttctttaaatccaggaatgagccctttgcaaacataggt

SEQ ID NO: 130301 - DNA, 80 bp, synthetic construct
  misc_feature 1..80: note = Artificially Synthesized Probe
  source 1..80: mol_type = other DNA
ccttcaccacccctttttattcatatcctcctttgttctgggaaagatttaaagctgcctacagtatacatggaacataa

SEQ ID NO: 130302 - DNA, 80 bp, synthetic construct
  misc_feature 1..80: note = Artificially Synthesized Probe
  source 1..80: mol_type = other DNA
gatagaattatgcctgtgcttctagcccagtgagatagatgagcgatgggtcttccagaatgacatcagatgctactgat

SEQ ID NO: 130303 - DNA, 80 bp, synthetic construct
  misc_feature 1..80: note = Artificially Synthesized Probe
  source 1..80: mol_type = other DNA
ttctccctccttttcgaacctcttttcagttggggtcattttgccagttctagctttcatatacatatgtgaagagaaag

SEQ ID NO: 130304 - DNA, 80 bp, synthetic construct; identical to SEQ ID NO: 41406
  misc_feature 1..80: note = Artificially Synthesized Probe
  source 1..80: mol_type = other DNA

SEQ ID NO: 130305 - DNA, 80 bp, synthetic construct; identical to SEQ ID NO: 41552
  misc_feature 1..80: note = Artificially Synthesized Probe
  source 1..80: mol_type = other DNA

SEQ ID NO: 130306 - DNA, 80 bp, synthetic construct
  misc_feature 1..80: note = Artificially Synthesized Probe
  source 1..80: mol_type = other DNA
gtttaccatgtaggccaccctacagccatcctttttgtttagtgttaaagcatgagtgaatgaatgaaccagaaaaaggg

SEQ ID NO: 130307 - DNA, 80 bp, synthetic construct
  misc_feature 1..80: note = Artificially Synthesized Probe
  source 1..80: mol_type = other DNA
gcttcgatctcctggattcaagcagtcctctcacctcagcctcccaagtagctgggactacaggtgtgtgccagcatgcc

SEQ ID NO: 130308 - DNA, 80 bp, synthetic construct; identical to SEQ ID NO: 41553
  misc_feature 1..80: note = Artificially Synthesized Probe
  source 1..80: mol_type = other DNA

SEQ ID NO: 130309 - DNA, 80 bp, synthetic construct
  misc_feature 1..80: note = Artificially Synthesized Probe
  source 1..80: mol_type = other DNA
agagagagagagagagaagagagaagaggagagagagagagagagagatctgtttctctcattctctctcttgttgtagg

SEQ ID NO: 130310 - DNA, 80 bp, synthetic construct
  misc_feature 1..80: note = Artificially Synthesized Probe
  source 1..80: mol_type = other DNA
gagaatcgcttgaactcgagaggcagaggttgcagtgagccgagatggctccattgtactccagcctggacaacaagagc

SEQ ID NO: 130311 - DNA, 80 bp, synthetic construct
  misc_feature 1..80: note = Artificially Synthesized Probe
  source 1..80: mol_type = other DNA
caaataatatgtatatatgtttgtgtatatatacagagacagataaaacatatttccatcctgctttttattttaaatct

SEQ ID NO: 130312 - DNA, 80 bp, synthetic construct
  misc_feature 1..80: note = Artificially Synthesized Probe
  source 1..80: mol_type = other DNA
agtccaggttgctctgtctttctgagtttgagtctgtctaggaaggataactggggaagaagatcctgactgaaagtatc

SEQ ID NO: 130313 - DNA, 80 bp, synthetic construct
  misc_feature 1..80: note = Artificially Synthesized Probe
  source 1..80: mol_type = other DNA
cctgtaatcccagctactcaggaggctgaggcaggagaatcgcttgaacgcaggaggcagaggctgcagtaagctgagat

SEQ ID NO: 130314 - DNA, 80 bp, synthetic construct; identical to SEQ ID NO: 41554
  misc_feature 1..80: note = Artificially Synthesized Probe
  source 1..80: mol_type = other DNA

SEQ ID NO: 130315 - DNA, 80 bp, synthetic construct
  misc_feature 1..80: note = Artificially Synthesized Probe
  source 1..80: mol_type = other DNA
gagctttgaaaatgcagctgtcccttggtgtctgtggaggatgtttcctatgacctcccatggataccaaaatccagcga

SEQ ID NO: 130316 - DNA, 80 bp, synthetic construct
  misc_feature 1..80: note = Artificially Synthesized Probe
  source 1..80: mol_type = other DNA
gcatggtgtcgcgtgcctgtggtcccagcttctctggagactaaggtggaaagatggcttgagttcaagagtgtgaggct

SEQ ID NO: 130317 - DNA, 80 bp, synthetic construct
  misc_feature 1..80: note = Artificially Synthesized Probe
  source 1..80: mol_type = other DNA
tacagtataaatactgggtaaatcgttgttatcttgtattgtttttctatttgtattttttattgtttttctttaccccc

SEQ ID NO: 130318 - DNA, 80 bp, synthetic construct; identical to SEQ ID NO: 41555
  misc_feature 1..80: note = Artificially Synthesized Probe
  source 1..80: mol_type = other DNA

SEQ ID NO: 130319 - DNA, 80 bp, synthetic construct
  misc_feature 1..80: note = Artificially Synthesized Probe
  source 1..80: mol_type = other DNA
taaaaagggaaccgctagatcctgaatgctgtccaaataaatgcacctttgagtcccagtgaaacatatgattttctggg

SEQ ID NO: 130320 - DNA, 80 bp, synthetic construct; identical to SEQ ID NO: 41420
  misc_feature 1..80: note = Artificially Synthesized Probe
  source 1..80: mol_type = other DNA

SEQ ID NO: 130321 - DNA, 80 bp, synthetic construct
  misc_feature 1..80: note = Artificially Synthesized Probe
  source 1..80: mol_type = other DNA
tccccaaagctggttctcttattatccccatccttctgaggcagccacaaaaattatgaactcagattctgaaatcaaag

SEQ ID NO: 130322 - DNA, 80 bp, synthetic construct
  misc_feature 1..80: note = Artificially Synthesized Probe
  source 1..80: mol_type = other DNA
gcagccacaaaaattatgaactcagattctgaaatcaaagtgactttcattcaaactccagctctgtcaggtacaagctg

SEQ ID NO: 130323 - DNA, 80 bp, synthetic construct; identical to SEQ ID NO: 41556
  misc_feature 1..80: note = Artificially Synthesized Probe
  source 1..80: mol_type = other DNA

SEQ ID NO: 130324 - DNA, 80 bp, synthetic construct
  misc_feature 1..80: note = Artificially Synthesized Probe
  source 1..80: mol_type = other DNA
acttagatctgagaatgtctccctcctgcttgaaaaacagtgatgacttccccttgcctagaaccaatttctttttctct

SEQ ID NO: 130325 - DNA, 80 bp, synthetic construct
  misc_feature 1..80: note = Artificially Synthesized Probe
  source 1..80: mol_type = other DNA
ccacacccagctaattttttttatttttagtagagacagggtttcaccatgttagccaggatggtcttgatctcctgacc

SEQ ID NO: 130326 - DNA, 80 bp, synthetic construct
  misc_feature 1..80: note = Artificially Synthesized Probe
  source 1..80: mol_type = other DNA
tagtagacttcatcactggcttcagttcttcatccctctatgtcctctatgtatctgtgtcctctgtcctgtgactttac

SEQ ID NO: 130327 - DNA, 80 bp, synthetic construct; identical to SEQ ID NO: 41557
  misc_feature 1..80: note = Artificially Synthesized Probe
  source 1..80: mol_type = other DNA

SEQ ID NO: 130328 - DNA, 80 bp, synthetic construct
  misc_feature 1..80: note = Artificially Synthesized Probe
  source 1..80: mol_type = other DNA
aggtccagttactatgtcacattttctgtcaagccttctctgatgcccccaatcaaatttgtcattgacttcttcaaaaa

SEQ ID NO: 130329 - DNA, 80 bp, synthetic construct
  misc_feature 1..80: note = Artificially Synthesized Probe
  source 1..80: mol_type = other DNA
caatggcacgatctcggctcactgcaacctctgcctcccgggttcaagcaattctctggcctcagcctcccgagtagctg

SEQ ID NO: 130330 - DNA, 80 bp, synthetic construct
  misc_feature 1..80: note = Artificially Synthesized Probe
  source 1..80: mol_type = other DNA
ctggcccccacttgcttctaagttccattaagggaggtgtatctgtattcacctatgtattcttatcagtgccctatatg

SEQ ID NO: 130331 - DNA, 80 bp, synthetic construct; identical to SEQ ID NO: 41558
  misc_feature 1..80: note = Artificially Synthesized Probe
  source 1..80: mol_type = other DNA

SEQ ID NO: 130332 - DNA, 80 bp, synthetic construct
  misc_feature 1..80: note = Artificially Synthesized Probe
  source 1..80: mol_type = other DNA
ggattttgttgttgttgttgtttgttttttgaggcagagtctcgctctgtcacccaggctggagtacagtgacacgatct

SEQ ID NO: 130333 - DNA, 80 bp, synthetic construct
  misc_feature 1..80: note = Artificially Synthesized Probe
  source 1..80: mol_type = other DNA
actttgagttgatacaaaattgattaattacctacagaacagtaaatgataacctttgtaaatatcttttccactagaca

SEQ ID NO: 130334 - DNA, 80 bp, synthetic construct
  misc_feature 1..80: note = Artificially Synthesized Probe
  source 1..80: mol_type = other DNA
atttggattatagcaggaaggcatgttaagtcaattaaatatttattgactgcctctgtgtgcagataaacacaggcatt

SEQ ID NO: 130335 - DNA, 80 bp, synthetic construct
  misc_feature 1..80: note = Artificially Synthesized Probe
  source 1..80: mol_type = other DNA
gccctgcatagtaagaatggcaggtgtgactatgtccattttattagtaatccataccttagttctgtaacttggttgga

SEQ ID NO: 130336 - DNA, 80 bp, synthetic construct; identical to SEQ ID NO: 41559
  misc_feature 1..80: note = Artificially Synthesized Probe
  source 1..80: mol_type = other DNA

SEQ ID NO: 130337 - DNA, 80 bp, synthetic construct
  misc_feature 1..80: note = Artificially Synthesized Probe
  source 1..80: mol_type = other DNA
agcgattctcctgcctcagcctcccaagtagctgggattacaggcagacgccaccaggaccagctaattttttgtatttt

SEQ ID NO: 130338 - DNA, 80 bp, synthetic construct
  misc_feature 1..80: note = Artificially Synthesized Probe
  source 1..80: mol_type = other DNA
agtggctcatgcctgtaatcccagcactttgggaggccgaggcaggctgatcacctgaggtcaggagtttgagaccagcc

SEQ ID NO: 130339 - DNA, 80 bp, synthetic construct
  misc_feature 1..80: note = Artificially Synthesized Probe
  source 1..80: mol_type = other DNA
gcagtgagctgaaatcacaccactgcactccagcctgggcaacagagatagattccatattaaaaaaagaaaaacaaaaa

SEQ ID NO: 130340 - DNA, 80 bp, synthetic construct
  misc_feature 1..80: note = Artificially Synthesized Probe
  source 1..80: mol_type = other DNA
taatgtctctgggcattgagtttgcaacccttgctcacctctttgctgcttcctctttccccttcgagtcccatgcaacg

SEQ ID NO: 130341 - DNA, 80 bp, synthetic construct; identical to SEQ ID NO: 41560
  misc_feature 1..80: note = Artificially Synthesized Probe
  source 1..80: mol_type = other DNA

SEQ ID NO: 130342 - DNA, 80 bp, synthetic construct
  misc_feature 1..80: note = Artificially Synthesized Probe
  source 1..80: mol_type = other DNA
taaattaggctagattaggttaggtttagcaaaggttaggttaggttaggtttgtggacatggtcctggaaaaagcattc

SEQ ID NO: 130343 - DNA, 80 bp, synthetic construct
  misc_feature 1..80: note = Artificially Synthesized Probe
  source 1..80: mol_type = other DNA
gatctcggctcactgcaacctccacctcccgggttcaagcaattctcctgcctcagcctcccaagtagctgggactatag

SEQ ID NO: 130344 - DNA, 80 bp, synthetic construct
  misc_feature 1..80: note = Artificially Synthesized Probe
  source 1..80: mol_type = other DNA
ttaggactaagttaattaacatctcctaaattgaacactagttattcattaatagatacgcatgtgacagaggcaaaagg

SEQ ID NO: 130345 - DNA, 80 bp, synthetic construct
  misc_feature 1..80: note = Artificially Synthesized Probe
  source 1..80: mol_type = other DNA
agagagttttgggaactcagtatttaaagggaaaaggacaagcaggagggaaataaaggaggaagggtgggcagtgaggc

SEQ ID NO: 130346 - DNA, 80 bp, synthetic construct; identical to SEQ ID NO: 41561
  misc_feature 1..80: note = Artificially Synthesized Probe
  source 1..80: mol_type = other DNA

SEQ ID NO: 130347 - DNA, 80 bp, synthetic construct
  misc_feature 1..80: note = Artificially Synthesized Probe
  source 1..80: mol_type = other DNA
gctgtgaaatgacacccatctgagaacaaaaggaaaggcagtattttgtgactcatttcccaagcttatctttccctttg

SEQ ID NO: 130348 - DNA, 80 bp, synthetic construct
  misc_feature 1..80: note = Artificially Synthesized Probe
  source 1..80: mol_type = other DNA
gagagggagcctgggaggctgcgaggctggtagacagctagtcacctcatctcgggttcagagcaagggctgacatctca

SEQ ID NO: 130349 - DNA, 80 bp, synthetic construct
  misc_feature 1..80: note = Artificially Synthesized Probe
  source 1..80: mol_type = other DNA
agcagacactacaaaaatagtagccccgccccttccgccaatatacattagcttcctttcttctcaatgctaaaagcgtg

SEQ ID NO: 130350 - DNA, 80 bp, synthetic construct; identical to SEQ ID NO: 41562
  misc_feature 1..80: note = Artificially Synthesized Probe
  source 1..80: mol_type = other DNA

SEQ ID NO: 130351 - DNA, 80 bp, synthetic construct
  misc_feature 1..80: note = Artificially Synthesized Probe
  source 1..80: mol_type = other DNA
acatggagaaaccctatctctactaaaaatacaaaattagccgggcgtggtggcgcatgcctgtaatcccagctactcgg

SEQ ID NO: 130352 - DNA, 80 bp, synthetic construct
  misc_feature 1..80: note = Artificially Synthesized Probe
  source 1..80: mol_type = other DNA
ttgaaaactgaagtaaaaattacataaataagagtaactattatccatttatttatttatttatttatttatttatttat

SEQ ID NO: 130353 - DNA, 80 bp, synthetic construct
  misc_feature 1..80: note = Artificially Synthesized Probe
  source 1..80: mol_type = other DNA
ttgtatttttaatagagacggggtttcatcacgttggccaggctggtctcaaactcctgacctcaagtgacccacctgcc

SEQ ID NO: 130354 - DNA, 80 bp, synthetic construct; identical to SEQ ID NO: 41563
  misc_feature 1..80: note = Artificially Synthesized Probe
  source 1..80: mol_type = other DNA

SEQ ID NO: 130355 - DNA, 80 bp, synthetic construct
  misc_feature 1..80: note = Artificially Synthesized Probe
  source 1..80: mol_type = other DNA
tgtagggtcttaatcattatacttgcctgactcttaattaagaagtaaactctaatattattggacgtcagtcaagtgct

SEQ ID NO: 130356 - DNA, 80 bp, synthetic construct
  misc_feature 1..80: note = Artificially Synthesized Probe
  source 1..80: mol_type = other DNA
tagcttacttttggggagtgaaggtacttttaaaaaaacaagttaatggttaaaatgctctttctggacaaatggagcct

SEQ ID NO: 130357 - DNA, 80 bp, synthetic construct
  misc_feature 1..80: note = Artificially Synthesized Probe
  source 1..80: mol_type = other DNA
tacccacagctacagtttatgaggctggagagcaaataccaacatttagggagcagaatgctgaagaccagcatgaagaa

SEQ ID NO: 130358 - DNA, 80 bp, synthetic construct; identical to SEQ ID NO: 41564
  misc_feature 1..80: note = Artificially Synthesized Probe
  source 1..80: mol_type = other DNA

SEQ ID NO: 130359 - DNA, 80 bp, synthetic construct
  misc_feature 1..80: note = Artificially Synthesized Probe
  source 1..80: mol_type = other DNA
tctgattattaattgtagtagtagcagtagcagtaagatagggaaatagatgggtagatagatacatgcacagatagaca

SEQ ID NO: 130360 - DNA, 80 bp, synthetic construct
  misc_feature 1..80: note = Artificially Synthesized Probe
  source 1..80: mol_type = other DNA
acaagcatggcaccagcatctgcttagcttctggtgaggcctcagggagcttttactcatggcaaaagatgaattgagag

SEQ ID NO: 130361 - DNA, 80 bp, synthetic construct
  misc_feature 1..80: note = Artificially Synthesized Probe
  source 1..80: mol_type = other DNA
accaacctggccaacatggtgaaaccccgtctctactaaaaatacaaaaattagccggacgctaaaattaggtggtataa

SEQ ID NO: 130362 - DNA, 80 bp, synthetic construct; identical to SEQ ID NO: 41565
  misc_feature 1..80: note = Artificially Synthesized Probe
  source 1..80: mol_type = other DNA

SEQ ID NO: 130363 - DNA, 80 bp, synthetic construct
  misc_feature 1..80: note = Artificially Synthesized Probe
  source 1..80: mol_type = other DNA
cccaccaccactactgtgatgcaaacctgagctccatagatcatggaccttcataggtcctctctaactggtgggcaaca

SEQ ID NO: 130364 - DNA, 80 bp, synthetic construct
  misc_feature 1..80: note = Artificially Synthesized Probe
  source 1..80: mol_type = other DNA
gcaagttttttcctcaaggggccctgggtctaagaactggtgcaagtgtggaaattgactaagggaccatatgtctccat

SEQ ID NO: 130365 - DNA, 80 bp, synthetic construct
  misc_feature 1..80: note = Artificially Synthesized Probe
  source 1..80: mol_type = other DNA
ttccactctacggcctatccttataaccatacccatccctgtaaccgtgctcaccatgtctttggcaatcaggtatagcc

SEQ ID NO: 130366 - DNA, 80 bp, synthetic construct; identical to SEQ ID NO: 41421
  misc_feature 1..80: note = Artificially Synthesized Probe
  source 1..80: mol_type = other DNA

SEQ ID NO: 130367 - DNA, 80 bp, synthetic construct
  misc_feature 1..80: note = Artificially Synthesized Probe
  source 1..80: mol_type = other DNA
aataccttgatctattctttaaaaaaaaaaaacttccttcaaatcgataaggaaagctgaaagcccaatagtaatatggg

SEQ ID NO: 130368 - DNA, 80 bp, synthetic construct; identical to SEQ ID NO: 41566
  misc_feature 1..80: note = Artificially Synthesized Probe
  source 1..80: mol_type = other DNA

SEQ ID NO: 130369 - DNA, 80 bp, synthetic construct
  misc_feature 1..80: note = Artificially Synthesized Probe
  source 1..80: mol_type = other DNA
caaaaccccatctctactaaaaatacaaaaattagctgggcatggtggtgcatacctctaatcccagctactggggaggc

SEQ ID NO: 130370 - DNA, 80 bp, synthetic construct
  misc_feature 1..80: note = Artificially Synthesized Probe
  source 1..80: mol_type = other DNA
ttttatgagaaaaaacttggaaacaacctaagtgttcaacaatagggatttgttttaaataaattatggtaaatccatgg

SEQ ID NO: 130371 - DNA, 80 bp, synthetic construct; identical to SEQ ID NO: 41567
  misc_feature 1..80: note = Artificially Synthesized Probe
  source 1..80: mol_type = other DNA

SEQ ID NO: 130372 - DNA, 80 bp, synthetic construct
  misc_feature 1..80: note = Artificially Synthesized Probe
  source 1..80: mol_type = other DNA
ctcctgcctcagtctcctgagtagctgggactacaggtgtgcaccatcacacctgactaatttttgtatttttagtaaag

SEQ ID NO: 130373 - DNA, 80 bp, synthetic construct
  misc_feature 1..80: note = Artificially Synthesized Probe
  source 1..80: mol_type = other DNA
agcactttggaggccaacgcaggcagatcactttaggtcaggagttggagaccagcctggccaacatggcaaaaccccat

SEQ ID NO: 130374 - DNA, 80 bp, synthetic construct
  misc_feature 1..80: note = Artificially Synthesized Probe
  source 1..80: mol_type = other DNA
tctgtttcaaaaaaaaatagaaaacctattttttttcgtgaaaccgtatatatgagggtaaggtggggtgggaggtgggg

SEQ ID NO: 130375 - DNA, 80 bp, synthetic construct
  misc_feature 1..80: note = Artificially Synthesized Probe
  source 1..80: mol_type = other DNA
tgaaaagttgaggcttccaggggctcaataatgtctcagaggggctggtttctttctgtctcttctgcatgcttgggggt

SEQ ID NO: 130376 - DNA, 80 bp, synthetic construct; identical to SEQ ID NO: 41568
  misc_feature 1..80: note = Artificially Synthesized Probe
  source 1..80: mol_type = other DNA

SEQ ID NO: 130377 - DNA, 80 bp, synthetic construct
  misc_feature 1..80: note = Artificially Synthesized Probe
  source 1..80: mol_type = other DNA
caagttaaaatgtacagttcattttagtagagtgtatactataatgacaataacttcaatgatggtaaaaggtatcctaa

SEQ ID NO: 130378 - DNA, 80 bp, synthetic construct
  misc_feature 1..80: note = Artificially Synthesized Probe
  source 1..80: mol_type = other DNA
agctttgaatcataggataactagagattttcatttccttttctatactttacaatatgtctgaattctctctctctctc

SEQ ID NO: 130379 - DNA, 80 bp, synthetic construct
  misc_feature 1..80: note = Artificially Synthesized Probe
  source 1..80: mol_type = other DNA
accatgcccagctaattttttgtatttttagtagagatgaggtttcaccatgttggccaggctggtctctaactcctgac

SEQ ID NO: 130380 - DNA, 80 bp, synthetic construct
  misc_feature 1..80: note = Artificially Synthesized Probe
  source 1..80: mol_type = other DNA
atccaataagtggatgaagatatgttttttggctttgaacttgcctcttcttccctaaagtattgtccttggagcaaaac

SEQ ID NO: 130381 - DNA, 80 bp, synthetic construct; identical to SEQ ID NO: 41569
  misc_feature 1..80: note = Artificially Synthesized Probe
  source 1..80: mol_type = other DNA

SEQ ID NO: 130382 - DNA, 80 bp, synthetic construct
  misc_feature 1..80: note = Artificially Synthesized Probe
  source 1..80: mol_type = other DNA
gcctgtggttttgctgttccatgtatctctgtgaaatcttgtcagctgtgtaatcacacaaataatatgggctggagatg

SEQ ID NO: 130383 - DNA, 80 bp, synthetic construct
  misc_feature 1..80: note = Artificially Synthesized Probe
  source 1..80: mol_type = other DNA
tctaagaaaaatcagtgaagttctctgccccctttgcgcagtaggcgctattgtaaagcagcaaattatcttgaagttag

SEQ ID NO: 130384 - DNA, 80 bp, synthetic construct
  misc_feature 1..80: note = Artificially Synthesized Probe
  source 1..80: mol_type = other DNA
cccaaagaatgtcagccaataatctcctacagaggagaatatccacgtgtttctcaagaagtcccttgggctcaagctcc

SEQ ID NO: 130385 - DNA, 80 bp, synthetic construct; identical to SEQ ID NO: 41570
  misc_feature 1..80: note = Artificially Synthesized Probe
  source 1..80: mol_type = other DNA

SEQ ID NO: 130386 - DNA, 80 bp, synthetic construct
  misc_feature 1..80: note = Artificially Synthesized Probe
  source 1..80: mol_type = other DNA
ctggaggtgataaagcacagaggtatggactgattcaaactccccataccccaaataccttctgttctttctttaaaaaa

SEQ ID NO: 130387 - DNA, 80 bp, synthetic construct
  misc_feature 1..80: note = Artificially Synthesized Probe
  source 1..80: mol_type = other DNA
ttagaacaaagtgtcttaaagactttgcggtgtttctggatcttgactactagggtcatgtgcaagctcagtgaatgcag

SEQ ID NO: 130388 - DNA, 80 bp, synthetic construct
  misc_feature 1..80: note = Artificially Synthesized Probe
  source 1..80: mol_type = other DNA
atatcctcttgtcatgaactccacatttggattcactggaaacagatttgggaaagagcaggaggagagggaagaggttg

SEQ ID NO: 130389 - DNA, 80 bp, synthetic construct; identical to SEQ ID NO: 41422
  misc_feature 1..80: note = Artificially Synthesized Probe
  source 1..80: mol_type = other DNA

SEQ ID NO: 130390 - DNA, 80 bp, synthetic construct
  misc_feature 1..80: note = Artificially Synthesized Probe
  source 1..80: mol_type = other DNA
ccaatccacttgagagatactacctatcctcttcgtttcctggtgaggaacctgttattctagttgctgatagggtgaca

SEQ ID NO: 130391 - DNA, 80 bp, synthetic construct
  misc_feature 1..80: note = Artificially Synthesized Probe
  source 1..80: mol_type = other DNA
ctccccctgcccccaccctggattttttttccccttctctcaaacctctaaacaggaaatagcccgaatcacaataatat

SEQ ID NO: 130392 - DNA, 80 bp, synthetic construct
  misc_feature 1..80: note = Artificially Synthesized Probe
  source 1..80: mol_type = other DNA
cttttcttttcttttcttttcttttttttttttgagacagggttttgctttgttgcccaggctggatggagtgtgcagtg

SEQ ID NO: 130393 - DNA, 80 bp, synthetic construct
  misc_feature 1..80: note = Artificially Synthesized Probe
  source 1..80: mol_type = other DNA
cgcaccaccaggcccggccaatttttgtatttttttgttgagatggagttttgtcatgttgcccaggctggtctcgaact

SEQ ID NO: 130394 - DNA, 80 bp, synthetic construct
  misc_feature 1..80: note = Artificially Synthesized Probe
  source 1..80: mol_type = other DNA
actttccagcttttcttcaaggtctttgaatctctttctgtgggtccccagatctcctggtcacagctcatcttgtcatt

SEQ ID NO: 130395 - DNA, 80 bp, synthetic construct; identical to SEQ ID NO: 41423
  misc_feature 1..80: note = Artificially Synthesized Probe
  source 1..80: mol_type = other DNA

SEQ ID NO: 130396 - DNA, 80 bp, synthetic construct
  misc_feature 1..80: note = Artificially Synthesized Probe
  source 1..80: mol_type = other DNA
gtctggaggtcccatgtctttgtttgctcataatagttataagtgggttttagcttcttcctcttgagtttggatggatt

SEQ ID NO: 130397 - DNA, 80 bp, synthetic construct
  misc_feature 1..80: note = Artificially Synthesized Probe
  source 1..80: mol_type = other DNA
acctttttccatcacaagacaaaactggatgagaactttacaaaaaaaaaaaaaagggccagggaccatggcttatgctt

SEQ ID NO: 130398 - DNA, 80 bp, synthetic construct
  misc_feature 1..80: note = Artificially Synthesized Probe
  source 1..80: mol_type = other DNA
gcactttgggaggccaaggcgggaggatcacctgaggtcgggagtttgagatcagcctgaccaacatggagaaaccccat

SEQ ID NO: 130399 - DNA, 80 bp, synthetic construct; identical to SEQ ID NO: 41424
  misc_feature 1..80: note = Artificially Synthesized Probe
  source 1..80: mol_type = other DNA

SEQ ID NO: 130400 - DNA, 80 bp, synthetic construct
  misc_feature 1..80: note = Artificially Synthesized Probe
  source 1..80: mol_type = other DNA
ggaggttgcagtgagctgagattgagccactgcactccagcctgggtgatagagtgagacttcatctcaaaaaaaccaac

SEQ ID NO: 130401 - DNA, 80 bp, synthetic construct
  misc_feature 1..80: note = Artificially Synthesized Probe
  source 1..80: mol_type = other DNA
taaggtggcccctaatccaatctgttcttataagaggaggaaatttggacacagacacatacagagggaaggtaatgtga

SEQ ID NO: 130402 - DNA, 80 bp, synthetic construct
  misc_feature 1..80: note = Artificially Synthesized Probe
  source 1..80: mol_type = other DNA
attttgttgtggcagccccaggaaactaattcaggcagaataagaaattctacctaaaaccaagagagctattaatgcag

SEQ ID NO: 130403 - DNA, 80 bp, synthetic construct
  misc_feature 1..80: note = Artificially Synthesized Probe
  source 1..80: mol_type = other DNA
cctaggtatgttggagtgaagttttctgtccagtgtcaaggagtgctttacatttccatccggttatgtatttgaatctt

SEQ ID NO: 130404 - DNA, 80 bp, synthetic construct
  misc_feature 1..80: note = Artificially Synthesized Probe
  source 1..80: mol_type = other DNA
ccacagagtcccctggggccttcctggccagcaggaaggtcacaacactgtggtcactgggcaggcttctgtctggagcc

SEQ ID NO: 130405 - DNA, 80 bp, synthetic construct; identical to SEQ ID NO: 41425
  misc_feature 1..80: note = Artificially Synthesized Probe
  source 1..80: mol_type = other DNA

SEQ ID NO: 130406 - DNA, 80 bp, synthetic construct
  misc_feature 1..80: note = Artificially Synthesized Probe
  source 1..80: mol_type = other DNA
gataactgaggcagagacattgactcttccaaagccacacagctagtcagtgatggagctggacttcaatctcaggcagt

SEQ ID NO: 130407 - DNA, 80 bp, synthetic construct
  misc_feature 1..80: note = Artificially Synthesized Probe
  source 1..80: mol_type = other DNA
cggtatagtcactaccaagttcccagttctgatgtgaggggtgttcctttcctaaaattccagagcagaggtgactgata

SEQ ID NO: 130408 - DNA, 80 bp, synthetic construct; identical to SEQ ID NO: 41426
  misc_feature 1..80: note = Artificially Synthesized Probe
  source 1..80: mol_type = other DNA

SEQ ID NO: 130409 - DNA, 80 bp, synthetic construct
  misc_feature 1..80: note = Artificially Synthesized Probe
  source 1..80: mol_type = other DNA
ggcgtgcaccaccatacccagctaatttttgtatttttttagtagagatggggtttcactatgtgttggccaggctggtc

SEQ ID NO: 130410 - DNA, 80 bp, synthetic construct
  misc_feature 1..80: note = Artificially Synthesized Probe
  source 1..80: mol_type = other DNA
gggcagtcaattaagtgattttaatgttggcttgaactattcagtagcaggggttaaaaatctaggacgtatcacaacca

SEQ ID NO: 130411 - DNA, 80 bp, synthetic construct
  misc_feature 1..80: note = Artificially Synthesized Probe
  source 1..80: mol_type = other DNA
cactgtttttcccacaaggaccactcttcctgaagaggcattaggaatggaaaaagaaggacagatgggagagaggaagg

SEQ ID NO: 130412 - DNA, 80 bp, synthetic construct
  misc_feature 1..80: note = Artificially Synthesized Probe
  source 1..80: mol_type = other DNA
taaagtaaaatgtagtattttagccgtttaaaaatggacccttaattcaatattgtgccaccatcaccactacccatttc

SEQ ID NO: 130413 - DNA, 80 bp, synthetic construct
  misc_feature 1..80: note = Artificially Synthesized Probe
  source 1..80: mol_type = other DNA
gcctcccgagtagctgggattacaggtgcccaccaccatgcccggcttttttgtatttttagtacagacagagtttcacc

SEQ ID NO: 130414 - DNA, 80 bp, synthetic construct; identical to SEQ ID NO: 41427
  misc_feature 1..80: note = Artificially Synthesized Probe
  source 1..80: mol_type = other DNA

SEQ ID NO: 130415 - DNA, 80 bp, synthetic construct
  misc_feature 1..80: note = Artificially Synthesized Probe
  source 1..80: mol_type = other DNA
tactgggttgtgccagaggacaggattggaacgataaatttgatgacatccagttgaaggtaatagtttaaacctagtag

SEQ ID NO: 130416 - DNA, 80 bp, synthetic construct
  misc_feature 1..80: note = Artificially Synthesized Probe
  source 1..80: mol_type = other DNA
atctgcttttcttacagtgtattggtggggcatctgagtagcaaatatgtaaagatattatttatgagcatattaaggag

SEQ ID NO: 130417 - DNA, 80 bp, synthetic construct; identical to SEQ ID NO: 41428
  misc_feature 1..80: note = Artificially Synthesized Probe
  source 1..80: mol_type = other DNA

SEQ ID NO: 130418 - DNA, 80 bp, synthetic construct
  misc_feature 1..80: note = Artificially Synthesized Probe
  source 1..80: mol_type = other DNA
agttccagttataaacaatttctagaattgtaagggaattaacccaatatatgcatatttctaaataatttctagaatta

SEQ ID NO: 130419 - DNA, 80 bp, synthetic construct
  misc_feature 1..80: note = Artificially Synthesized Probe
  source 1..80: mol_type = other DNA
aattagcaagttgaacagtctgatttatggaagaaaagcaaattctttctaatatttgctaaggcagaattattttccta

SEQ ID NO: 130420 - DNA, 80 bp, synthetic construct
  misc_feature 1..80: note = Artificially Synthesized Probe
  source 1..80: mol_type = other DNA
gcaaaatatcatgtcacttttcactgcaggagaacagcttccaatgggtaacaagtttaagttgattttttcttgttgtt

SEQ ID NO: 130421 - DNA, 80 bp, synthetic construct; identical to SEQ ID NO: 41429
  misc_feature 1..80: note = Artificially Synthesized Probe
  source 1..80: mol_type = other DNA

SEQ ID NO: 130422 - DNA, 80 bp, synthetic construct
  misc_feature 1..80: note = Artificially Synthesized Probe
  source 1..80: mol_type = other DNA
atctattcagtcctctcatcttataaacagggaaattgaggcttagggagtagttgaagggttatttaaagtcaccaaac

SEQ ID NO: 130423 - DNA, 80 bp, synthetic construct
  misc_feature 1..80: note = Artificially Synthesized Probe
  source 1..80: mol_type = other DNA
cacaaacattcaattttattttttatttttttgagacagagtctctctctgtcacccaggctggaataaaatgacacgat

SEQ ID NO: 130424 - DNA, 80 bp, synthetic construct; identical to SEQ ID NO: 41407
  misc_feature 1..80: note = Artificially Synthesized Probe
  source 1..80: mol_type = other DNA

SEQ ID NO: 130425 - DNA, 80 bp, synthetic construct
  misc_feature 1..80: note = Artificially Synthesized Probe
  source 1..80: mol_type = other DNA
ccacatcccaaagattgttggtatgtgcacctcactttggagatttaggtcatttaggtcaaaagaaacttgctattgag

SEQ ID NO: 130426 - DNA, 80 bp, synthetic construct
  misc_feature 1..80: note = Artificially Synthesized Probe
  source 1..80: mol_type = other DNA
gactcttgtatgttgccatagcacatcaaataggaaaaaaaaatagcttgaagaagttggtgaggaaggagctatttaag

SEQ ID NO: 130427 - DNA, 80 bp, synthetic construct; identical to SEQ ID NO: 41430
  misc_feature 1..80: note = Artificially Synthesized Probe
  source 1..80: mol_type = other DNA

SEQ ID NO: 130428 - DNA, 80 bp, synthetic construct
  misc_feature 1..80: note = Artificially Synthesized Probe
  source 1..80: mol_type = other DNA
acaaagggtaaggaagctcttcaaagccaagaggagacttaaagaaaatggagatgaggtagattctgaacctctccaaa

SEQ ID NO: 130429 - DNA, 80 bp, synthetic construct
  misc_feature 1..80: note = Artificially Synthesized Probe
  source 1..80: mol_type = other DNA
tgctataaaatgacaactagaattccttcctcacttgtcaaagcacaggcttttagagagagagatatttgtagaaagag

SEQ ID NO: 130430 - DNA, 80 bp, synthetic construct
  misc_feature 1..80: note = Artificially Synthesized Probe
  source 1..80: mol_type = other DNA
agatttatgtgcggattaattggagtgtacattagatcgccgtgtttaaaaccgcagtcattcctgcaaatcattttcat

SEQ ID NO: 130431 - DNA, 80 bp, synthetic construct; identical to SEQ ID NO: 41431
  misc_feature 1..80: note = Artificially Synthesized Probe
  source 1..80: mol_type = other DNA

SEQ ID NO: 130432 - DNA, 80 bp, synthetic construct
  misc_feature 1..80: note = Artificially Synthesized Probe
  source 1..80: mol_type = other DNA
gtctgttttggggacccatatagaaaaaagggtcctctgtcttgtggggataataaatgagttcttcattaagaacttgt

SEQ ID NO: 130433 - DNA, 80 bp, synthetic construct
  misc_feature 1..80: note = Artificially Synthesized Probe
  source 1..80: mol_type = other DNA
attaactaggcatagatgcttgatgatctgtaactctgtgattcttttaactggcctcattttaggtgtcctgttgatac

SEQ ID NO: 130434 - DNA, 80 bp, synthetic construct
  misc_feature 1..80: note = Artificially Synthesized Probe
  source 1..80: mol_type = other DNA
catggtttacaaatgtagcaattcttaagaatgaagaaaatatgccttattactataatgtttttcaacaatacaagtgt

SEQ ID NO: 130435 - DNA, 80 bp, synthetic construct
  misc_feature 1..80: note = Artificially Synthesized Probe
  source 1..80: mol_type = other DNA
ttcttctctgaagtcttcttttgtgcttcttacacattaaagacaaggtgaatttaaggtgcctttatggtagacgatat

SEQ ID NO: 130436 - DNA, 80 bp, synthetic construct; identical to SEQ ID NO: 41432
  misc_feature 1..80: note = Artificially Synthesized Probe
  source 1..80: mol_type = other DNA

SEQ ID NO: 130437 - DNA, 80 bp, synthetic construct
  misc_feature 1..80: note = Artificially Synthesized Probe
  source 1..80: mol_type = other DNA
ctgcaacaacgaattatccagcccacagtgtcaacggtgccactggtgagacatttgatttagataggttttcttcccat

SEQ ID NO: 130438 - DNA, 80 bp, synthetic construct
  misc_feature 1..80: note = Artificially Synthesized Probe
  source 1..80: mol_type = other DNA
gcagggggcatacagagactctatcagagtccatgtaggttaatgctgttcagccagggctgtggaaaacattgtaatga

SEQ ID NO: 130439 - DNA, 80 bp, synthetic construct
  misc_feature 1..80: note = Artificially Synthesized Probe
  source 1..80: mol_type = other DNA
agtatctagctaggaggacctggaggccaaacctgggcttagcgggaaaggaatatcgcaactgattagggatgtttgtt

SEQ ID NO: 130440 - DNA, 80 bp, synthetic construct; identical to SEQ ID NO: 41433
  misc_feature 1..80: note = Artificially Synthesized Probe
  source 1..80: mol_type = other DNA

SEQ ID NO: 130441 - DNA, 80 bp, synthetic construct
  misc_feature 1..80: note = Artificially Synthesized Probe
  source 1..80: mol_type = other DNA
cttttttttgagagagagaacgtttccttaagctggatgaaatagcattggatcagaggacgaacaagatcttccttgta

SEQ ID NO: 130442 - DNA, 80 bp, synthetic construct
  misc_feature 1..80: note = Artificially Synthesized Probe
  source 1..80: mol_type = other DNA
attctcttgcctcagcctcccgagtagcttggattacaggcatgcgccaccacgtctggctaattttgtatttttagtgg

SEQ ID NO: 130443 - DNA, 80 bp, synthetic construct
  misc_feature 1..80: note = Artificially Synthesized Probe
  source 1..80: mol_type = other DNA
cagtctcaaaaaaaaaaaagccacaattggaagtcaggttataatccagtatttaaaacctcaaggaattcattcattct

SEQ ID NO: 130444 - DNA, 80 bp, synthetic construct
  misc_feature 1..80: note = Artificially Synthesized Probe
  source 1..80: mol_type = other DNA
tcccgagtagctgggactataggcacccgccaccacgcccggctaatttttttgaattttttttcttttttttagtagag

SEQ ID NO: 130445 - DNA, 80 bp, synthetic construct; identical to SEQ ID NO: 41434
  misc_feature 1..80: note = Artificially Synthesized Probe
  source 1..80: mol_type = other DNA

SEQ ID NO: 130446 - DNA, 80 bp, synthetic construct
  misc_feature 1..80: note = Artificially Synthesized Probe
  source 1..80: mol_type = other DNA
caaaacgaatggctaccaaccgacaattgactgagtattgcaagttcattgaaacagagattggatgatttacacatgtg

SEQ ID NO: 130447 - DNA, 80 bp, synthetic construct
  misc_feature 1..80: note = Artificially Synthesized Probe
  source 1..80: mol_type = other DNA
aacctaaaatacccagccacctatgaatcttccttttgaaatctgtaaagtttttcagctttaactcatgttacctgaca

SEQ ID NO: 130448 - DNA, 80 bp, synthetic construct
  misc_feature 1..80: note = Artificially Synthesized Probe
  source 1..80: mol_type = other DNA
ttattgggggtttgtatacatgaaaaaactccttggattattatagagaaagttaaagccaggatacattagaaatgcag

SEQ ID NO: 130449 - DNA, 80 bp, synthetic construct; identical to SEQ ID NO: 41435
  misc_feature 1..80: note = Artificially Synthesized Probe
  source 1..80: mol_type = other DNA

SEQ ID NO: 130450 - DNA, 80 bp, synthetic construct
  misc_feature 1..80: note = Artificially Synthesized Probe
  source 1..80: mol_type = other DNA
tgtagggagtagagtgttttgcacagacgccacaatatcagtttgtctagcaaacagaagagtatgtccagaagtggtga

SEQ ID NO: 130451 - DNA, 80 bp, synthetic construct
  misc_feature 1..80: note = Artificially Synthesized Probe
  source 1..80: mol_type = other DNA
cttcataagaatttgcagaaggggtatttcttgggttttcttggtcttaggggtaaaacgagaaagtatttgccatcttt

SEQ ID NO: 130452 - DNA, 80 bp, synthetic construct
  misc_feature 1..80: note = Artificially Synthesized Probe
  source 1..80: mol_type = other DNA
acaccagccgggccaacgtggtgaaaccctgtttctactgaaaatacaaaaattagccggccgtggtggcacgtgcctgt

SEQ ID NO: 130453 - DNA, 80 bp, synthetic construct; identical to SEQ ID NO: 41436
  misc_feature 1..80: note = Artificially Synthesized Probe
  source 1..80: mol_type = other DNA

SEQ ID NO: 130454 - DNA, 80 bp, synthetic construct
  misc_feature 1..80: note = Artificially Synthesized Probe
  source 1..80: mol_type = other DNA
gttccagtgattctcctgcctcagcctcctgagtagctgggattacagcacctccccaccatgcccagctaatttttgta

SEQ ID NO: 130455 - DNA, 80 bp, synthetic construct
  misc_feature 1..80: note = Artificially Synthesized Probe
  source 1..80: mol_type = other DNA
tttttgagacagagtcttgctgtgtttccaggctggagtgcagtggtgtaatcttggttcactgcagcttcaacctctca

SEQ ID NO: 130456 - DNA, 80 bp, synthetic construct
  misc_feature 1..80: note = Artificially Synthesized Probe
  source 1..80: mol_type = other DNA
cgctgatatttgtttaacctgaaaggcgaattcttataagatcttgtttctcagagtgaccctcaggtggactggtgata

SEQ ID NO: 130457 - DNA, 80 bp, synthetic construct
  misc_feature 1..80: note = Artificially Synthesized Probe
  source 1..80: mol_type = other DNA
caactgaagaatagataataaaatgtggtatatccatacaatgtaatattatttggccataaaaaggaatgaagtgctga

SEQ ID NO: 130458 - DNA, 80 bp, synthetic construct; identical to SEQ ID NO: 41437
  misc_feature 1..80: note = Artificially Synthesized Probe
  source 1..80: mol_type = other DNA

SEQ ID NO: 130459 - DNA, 80 bp, synthetic construct
  misc_feature 1..80: note = Artificially Synthesized Probe
  source 1..80: mol_type = other DNA
cgcatgcctgtaatcccagctttccgggaggttgaggcaggagaattgcttgaaccagcaggcagaggttgcggtgagcc

SEQ ID NO: 130460 - DNA, 80 bp, synthetic construct
  misc_feature 1..80: note = Artificially Synthesized Probe
  source 1..80: mol_type = other DNA
ccaaaatcttaccattgcagggaatgagcatgttggatttttaacaacactgtcttttccagggtgcgaagtaccacatt

SEQ ID NO: 130461 - DNA, 80 bp, synthetic construct
  misc_feature 1..80: note = Artificially Synthesized Probe
  source 1..80: mol_type = other DNA
cgaatagttaccgttttcacattctagaggtagtcagagttaccatttttgatgttgctgatatatacattttcatagaa

SEQ ID NO: 130462 - DNA, 80 bp, synthetic construct; identical to SEQ ID NO: 41438
  misc_feature 1..80: note = Artificially Synthesized Probe
  source 1..80: mol_type = other DNA

SEQ ID NO: 130463 - DNA, 80 bp, synthetic construct
  misc_feature 1..80: note = Artificially Synthesized Probe
  source 1..80: mol_type = other DNA
tttacaaggtcttaaattttgacagatgtgggatgcatttgttttttgttacactttgacctctgtttataggccaggcc

SEQ ID NO: 130464 - DNA, 80 bp, synthetic construct; identical to SEQ ID NO: 41408
  misc_feature 1..80: note = Artificially Synthesized Probe
  source 1..80: mol_type = other DNA

SEQ ID NO: 130465 - DNA, 80 bp, synthetic construct
  misc_feature 1..80: note = Artificially Synthesized Probe
  source 1..80: mol_type = other DNA
cagatcctagtcctgctgccttctaattgtgtgatcttgggcacatgtcttaatgcttctgagcctcagatccttcatct

SEQ ID NO: 130466 - DNA, 80 bp, synthetic construct; identical to SEQ ID NO: 41439
  misc_feature 1..80: note = Artificially Synthesized Probe
  source 1..80: mol_type = other DNA

SEQ ID NO: 130467 - DNA, 80 bp, synthetic construct
  misc_feature 1..80: note = Artificially Synthesized Probe
  source 1..80: mol_type = other DNA
agaggtgggaggatcgcttgaggccaagagtttgaaaccagcctaggcaacatagtgagaccctgtctctatttaaaaaa

SEQ ID NO: 130468 - DNA, 80 bp, synthetic construct
  misc_feature 1..80: note = Artificially Synthesized Probe
  source 1..80: mol_type = other DNA
tctcagcaacaaaaaaacgtcccaaacatgagaagacagatacctgctcagactccagaaattgttttccttgtctgggc

SEQ ID NO: 130469 - DNA, 80 bp, synthetic construct
  misc_feature 1..80: note = Artificially Synthesized Probe
  source 1..80: mol_type = other DNA
agctactcgggaggctgaggcacgagaatcacttgaacccaggaggtggaggttacagtgagctgagatcgtgccactgc

SEQ ID NO: 130470 - DNA, 80 bp, synthetic construct
  misc_feature 1..80: note = Artificially Synthesized Probe
  source 1..80: mol_type = other DNA
ggaaaggctctttctgactctagccagcccctcctgataaatacctcccttgttctggttccctgtacctgcactatgaa

SEQ ID NO: 130471 - DNA, 80 bp, synthetic construct; identical to SEQ ID NO: 41440
  misc_feature 1..80: note = Artificially Synthesized Probe
  source 1..80: mol_type = other DNA

SEQ ID NO: 130472 - DNA, 80 bp, synthetic construct
  misc_feature 1..80: note = Artificially Synthesized Probe
  source 1..80: mol_type = other DNA
ttaactccttaactcagacgagtaaaaaggtttctctctaaggccagtttggatcaattgctaggtggctgcctggagtt

SEQ ID NO: 130473 - DNA, 80 bp, synthetic construct
  misc_feature 1..80: note = Artificially Synthesized Probe
  source 1..80: mol_type = other DNA
tctcctctgatgagcactgtttgcctgaggctggatttttgcaactttaaggggctttgattatcacctttctgacttgg

SEQ ID NO: 130474 - DNA, 80 bp, synthetic construct
  misc_feature 1..80: note = Artificially Synthesized Probe
  source 1..80: mol_type = other DNA
aaaaaaaaaaagaaggccaggcatggtggttcgcacctataatcatagcactttcagaggctgaggcaggaggagccctt

SEQ ID NO: 130475 - DNA, 80 bp, synthetic construct; identical to SEQ ID NO: 41441
  misc_feature 1..80: note = Artificially Synthesized Probe
  source 1..80: mol_type = other DNA

SEQ ID NO: 130476 - DNA, 80 bp, synthetic construct
  misc_feature 1..80: note = Artificially Synthesized Probe
  source 1..80: mol_type = other DNA
attcaaacggcaagatttggcagaacattctctcttaagaagactcctgcattcacagactttcagaatgttattacttc

SEQ ID NO: 130477 - DNA, 80 bp, synthetic construct
  misc_feature 1..80: note = Artificially Synthesized Probe
  source 1..80: mol_type = other DNA
ttagcctggtgtggtgctgggcacctacaataccagctactcaggaggctgaggcaggagaatcacttgaacctggtggg

SEQ ID NO: 130478 - DNA, 80 bp, synthetic construct
  misc_feature 1..80: note = Artificially Synthesized Probe
  source 1..80: mol_type = other DNA
gtgagttgaaggtgaaagctcgaaacttttacttctgtgcacctgggagcccctctatagcttctttccctcttccctag

SEQ ID NO: 130479 - DNA, 80 bp, synthetic construct
  misc_feature 1..80: note = Artificially Synthesized Probe
  source 1..80: mol_type = other DNA
gtctggggtaagtcccaggaatttgcatgtctggtttccactactttgacaaccactaacctggagagtacttgtaatgg

SEQ ID NO: 130480 - DNA, 80 bp, synthetic construct; identical to SEQ ID NO: 41442
  misc_feature 1..80: note = Artificially Synthesized Probe
  source 1..80: mol_type = other DNA

SEQ ID NO: 130481 - DNA, 80 bp, synthetic construct
  misc_feature 1..80: note = Artificially Synthesized Probe
  source 1..80: mol_type = other DNA
tacattaaaagagtctggagatgctgcactaggtgagaagaaaaggtttgtgtttgttctgagaattccattgtgactcc

SEQ ID NO: 130482 - DNA, 80 bp, synthetic construct
  misc_feature 1..80: note = Artificially Synthesized Probe
  source 1..80: mol_type = other DNA
acaccatctctactaaaaatacaaaaattagctgggtatgtggtgtgcacctgtaatcccagcttcttgggaagctgagg

SEQ ID NO: 130483 - DNA, 80 bp, synthetic construct; identical to SEQ ID NO: 41443
  misc_feature 1..80: note = Artificially Synthesized Probe
  source 1..80: mol_type = other DNA

SEQ ID NO: 130484 - DNA, 80 bp, synthetic construct
  misc_feature 1..80: note = Artificially Synthesized Probe
  source 1..80: mol_type = other DNA
tcacgccattctcctgcctcagcctcccgagtagctgggactacaggcgcccgccactgcgcccggctaattttttgtgt

SEQ ID NO: 130485 - DNA, 80 bp, synthetic construct
  misc_feature 1..80: note = Artificially Synthesized Probe
  source 1..80: mol_type = other DNA
agatttactacattggttccatctggcagagcaggacaactcaaaaggggtagaggggctgccaggtcataggtactcta

SEQ ID NO: 130486 - DNA, 80 bp, synthetic construct
  misc_feature 1..80: note = Artificially Synthesized Probe
  source 1..80: mol_type = other DNA
taatattggaggggtatgatggggcatgtccaacccccacttcccttcatggcctgaaccagtctttcaggttaaatttt

SEQ ID NO: 130487 - DNA, 80 bp, synthetic construct; identical to SEQ ID NO: 41444
  misc_feature 1..80: note = Artificially Synthesized Probe
  source 1..80: mol_type = other DNA

SEQ ID NO: 130488 - DNA, 80 bp, synthetic construct
  misc_feature 1..80: note = Artificially Synthesized Probe
  source 1..80: mol_type = other DNA
gatttcagtgatgtttggggaatcacctggtagcttaataaaaatggaaactctccaaatattccagatttattaagtca

SEQ ID NO: 130489 - DNA, 80 bp, synthetic construct
  misc_feature 1..80: note = Artificially Synthesized Probe
  source 1..80: mol_type = other DNA
aggctggattacagtagcatgatcttggctcattgcaacctccacctcccgggttcaagcaattctcctgcctcagcctc

SEQ ID NO: 130490 - DNA, 80 bp, synthetic construct
  misc_feature 1..80: note = Artificially Synthesized Probe
  source 1..80: mol_type = other DNA
acgcctggtccttattctttcttgctttctaatgacttaaagctaaacatattttccaaacagaaatcagagtgtgtgct

SEQ ID NO: 130491 - DNA, 80 bp, synthetic construct
  misc_feature 1..80: note = Artificially Synthesized Probe
  source 1..80: mol_type = other DNA
gcataatttaattatactcctgcatgtttaaaagaattcagaacctaagaattaaaagctgacccagaggcaggcacagt

SEQ ID NO: 130492 - DNA, 80 bp, synthetic construct
  misc_feature 1..80: note = Artificially Synthesized Probe
  source 1..80: mol_type = other DNA
ctaaaaaacaaaaacaaaaaattagccgggcatggtggtgcacgcctgtaatcccagctatcccagctactcgggaggtt

SEQ ID NO: 130493 - DNA, 80 bp, synthetic construct; identical to SEQ ID NO: 41445
  misc_feature 1..80: note = Artificially Synthesized Probe
  source 1..80: mol_type = other DNA

SEQ ID NO: 130494 - DNA, 80 bp, synthetic construct
  misc_feature 1..80: note = Artificially Synthesized Probe
  source 1..80: mol_type = other DNA
ttcttcttcttattttcaagacagggtcttgctctgttccccaggctggagtgcagtggcatggtcatagctcactgcag

SEQ ID NO: 130495 - DNA, 80 bp, synthetic construct
  misc_feature 1..80: note = Artificially Synthesized Probe
  source 1..80: mol_type = other DNA
ggggggttcttcactcacatcggttttgattcttcactcatatcagttgaatggttggtgacaaaacttttcagttcagt

SEQ ID NO: 130496 - DNA, 80 bp, synthetic construct; identical to SEQ ID NO: 41446
  misc_feature 1..80: note = Artificially Synthesized Probe
  source 1..80: mol_type = other DNA

SEQ ID NO: 130497 - DNA, 80 bp, synthetic construct
  misc_feature 1..80: note = Artificially Synthesized Probe
  source 1..80: mol_type = other DNA
caagattacgccactgtactccagtctgggtgacaaagtgagaccctgtctccaaaaaaataaaatagtgatgtttgaaa

SEQ ID NO: 130498 - DNA, 80 bp, synthetic construct
  misc_feature 1..80: note = Artificially Synthesized Probe
  source 1..80: mol_type = other DNA
acgctttgaaagaggctttgtaaattgttaaagttacatttgtctcttctgatagctttagctcagcagaataaatatgg

SEQ ID NO: 130499 - DNA, 80 bp, synthetic construct; identical to SEQ ID NO: 41409
  misc_feature 1..80: note = Artificially Synthesized Probe
  source 1..80: mol_type = other DNA

SEQ ID NO: 130500 - DNA, 80 bp, synthetic construct
  misc_feature 1..80: note = Artificially Synthesized Probe
  source 1..80: mol_type = other DNA
gcctgtagtcccagctactcgggaggctgaggcaggagaatcacttgaacccgggtggcagaggttgcagtgagccactg

SEQ ID NO: 130501 - DNA, 80 bp, synthetic construct; identical to SEQ ID NO: 41447
  misc_feature 1..80: note = Artificially Synthesized Probe
  source 1..80: mol_type = other DNA

SEQ ID NO: 130502 - DNA, 80 bp, synthetic construct
  misc_feature 1..80: note = Artificially Synthesized Probe
  source 1..80: mol_type = other DNA
ttggaaataaacctggattgacttgtttaaaaacttagatcatgtctcagtgacagagctcagcaaaaaacaaaaacaaa

SEQ ID NO: 130503 - DNA, 80 bp, synthetic construct
  misc_feature 1..80: note = Artificially Synthesized Probe
  source 1..80: mol_type = other DNA
acctgattttgttcattatgactccacaccttgcttgctttccttcactactctaggaatgtggaaaagtttagctggat

SEQ ID NO: 130504 - DNA, 80 bp, synthetic construct
  misc_feature 1..80: note = Artificially Synthesized Probe
  source 1..80: mol_type = other DNA
aagacatacccaaggctgggcaatttacaaaagaaagaggtttaattggactcacagttccacatggctggggaggcctc

SEQ ID NO: 130505 - DNA, 80 bp, synthetic construct
  misc_feature 1..80: note = Artificially Synthesized Probe
  source 1..80: mol_type = other DNA
cctcctactgggtccctcccataccttgtgggaattcaagatgagatttgggtggggacacagccaaaccatatcagatg

SEQ ID NO: 130506 - DNA, 80 bp, synthetic construct; identical to SEQ ID NO: 41448
  misc_feature 1..80: note = Artificially Synthesized Probe
  source 1..80: mol_type = other DNA

SEQ ID NO: 130507 - DNA, 80 bp, synthetic construct
  misc_feature 1..80: note = Artificially Synthesized Probe
  source 1..80: mol_type = other DNA
cgccctcgcccagcgcccgacaccgccggccgcggcggcggccgccaccggctctaggcaagtaccctcctctctctccc

SEQ ID NO: 130508 - DNA, 80 bp, synthetic construct
  misc_feature 1..80: note = Artificially Synthesized Probe
  source 1..80: mol_type = other DNA
cagctaatttttctatttttagtagagatggggtttcaccatcttggctaggcaggtctcgaactcctgacttcgtgatc

SEQ ID NO: 130509 - DNA, 80 bp, synthetic construct
  misc_feature 1..80: note = Artificially Synthesized Probe
  source 1..80: mol_type = other DNA
gatgtcacctatgggtgatcaatttaggaatgacatagctgtcaatcttggggtaacatgagctgagcactattatatat

SEQ ID NO: 130510 - DNA, 80 bp, synthetic construct; identical to SEQ ID NO: 41449
  misc_feature 1..80: note = Artificially Synthesized Probe
  source 1..80: mol_type = other DNA

SEQ ID NO: 130511 - DNA, 80 bp, synthetic construct
  misc_feature 1..80: note = Artificially Synthesized Probe
  source 1..80: mol_type = other DNA
tataattatacaaattatatttttataaaattgtattatataataaatataatttttatatattatatatgaatatatat

SEQ ID NO: 130512 - DNA, 80 bp, synthetic construct
  misc_feature 1..80: note = Artificially Synthesized Probe
  source 1..80: mol_type = other DNA
cgggttggagtgcactggtgccatctcagctcactgcaacctctgcctcctgggttcaagcaattctcgtgcctgagcct

SEQ ID NO: 130513 - DNA, 80 bp, synthetic construct
  misc_feature 1..80: note = Artificially Synthesized Probe
  source 1..80: mol_type = other DNA
actctcatttgtttcattcttttaatctatatttaacacaggaatattctattctgtttaacatcttacaggttattatc

SEQ ID NO: 130514 - DNA, 80 bp, synthetic construct
  misc_feature 1..80: note = Artificially Synthesized Probe
  source 1..80: mol_type = other DNA
aaatgaaagtatttattcagccaattatggtatattcatacaaatggaatattatgcagttagaaaagatgatgatagag

SEQ ID NO: 130515 - DNA, 80 bp, synthetic construct; identical to SEQ ID NO: 41450
  misc_feature 1..80: note = Artificially Synthesized Probe
  source 1..80: mol_type = other DNA

SEQ ID NO: 130516 - DNA, 80 bp, synthetic construct
  misc_feature 1..80: note = Artificially Synthesized Probe
  source 1..80: mol_type = other DNA
tatttttttttttttgagacggagtctcgctctgtcgcccaggctggagtgcagtggcgggatctcggctcactgcaagc

SEQ ID NO: 130517 - DNA, 80 bp, synthetic construct
  misc_feature 1..80: note = Artificially Synthesized Probe
  source 1..80: mol_type = other DNA
cgcccgcctcggcctcccaaagtgctgggattacaggcgtgagccaccgcgcccggcctcagtatctttattttaaaaca

SEQ ID NO: 130518 - DNA, 80 bp, synthetic construct
  misc_feature 1..80: note = Artificially Synthesized Probe
  source 1..80: mol_type = other DNA
gcctatgttcccagttacttgagaggctgaggtgggaggatcacttgagcctgggaggcaatggttgcagtgacctgaga

SEQ ID NO: 130519 - DNA, 80 bp, synthetic construct
  misc_feature 1..80: note = Artificially Synthesized Probe
  source 1..80: mol_type = other DNA
caggcgtgcgtgagctgccatgcccagctgcaaataattatttttttaaacttcaaaatgttttacctgacttcaaaatt

SEQ ID NO: 130520 - DNA, 80 bp, synthetic construct; identical to SEQ ID NO: 41451
  misc_feature 1..80: note = Artificially Synthesized Probe
  source 1..80: mol_type = other DNA

SEQ ID NO: 130521 - DNA, 80 bp, synthetic construct
  misc_feature 1..80: note = Artificially Synthesized Probe
  source 1..80: mol_type = other DNA
tctttgtgaatctaagatactcttcaactttaatctgtgttgatcgaggatcctgaattcttagagctagccgattctgg

SEQ ID NO: 130522 - DNA, 80 bp, synthetic construct
  misc_feature 1..80: note = Artificially Synthesized Probe
  source 1..80: mol_type = other DNA
tcttaaagtattttgggggtgaagggagctctgaaactcagttagacaatagaacggcatttgaatcaaggattctctcg

SEQ ID NO: 130523 - DNA, 80 bp, synthetic construct
  misc_feature 1..80: note = Artificially Synthesized Probe
  source 1..80: mol_type = other DNA
gccattgcacctggctcaccttgattctgatatgtaattaggtttgggggtcactagaataaacacatgcacacacacac

SEQ ID NO: 130524 - DNA, 80 bp, synthetic construct; identical to SEQ ID NO: 41452
  misc_feature 1..80: note = Artificially Synthesized Probe
  source 1..80: mol_type = other DNA

SEQ ID NO: 130525 - DNA, 80 bp, synthetic construct
  misc_feature 1..80: note = Artificially Synthesized Probe
  source 1..80: mol_type = other DNA
cttcccgagtagctgggattacaggcgcccatcattacgcccggctaatttttatatttttagtagagacggggtgtcac

SEQ ID NO: 130526 - DNA, 80 bp, synthetic construct
  misc_feature 1..80: note = Artificially Synthesized Probe
  source 1..80: mol_type = other DNA
cacaatcacggctactgcagcctcaacctcttggactcaagtgattcttctgtctcagcctctggagtagctgggacttc

SEQ ID NO: 130527 - DNA, 80 bp, synthetic construct
  misc_feature 1..80: note = Artificially Synthesized Probe
  source 1..80: mol_type = other DNA
gcccggtgggtttggattccatctgcttgaggacaaccatgggcaaactgctttctctgaagcatagtttcttcacgtat

SEQ ID NO: 130528 - DNA, 80 bp, synthetic construct; identical to SEQ ID NO: 41453
  misc_feature 1..80: note = Artificially Synthesized Probe
  source 1..80: mol_type = other DNA

SEQ ID NO: 130529 - DNA, 80 bp, synthetic construct
  misc_feature 1..80: note = Artificially Synthesized Probe
  source 1..80: mol_type = other DNA
cccaggcggagcaccaccgtggcctctgcccaccagcctgagcacacccagatgagccctataagtcacctaggagtctg

SEQ ID NO: 130530 - DNA, 80 bp, synthetic construct
  misc_feature 1..80: note = Artificially Synthesized Probe
  source 1..80: mol_type = other DNA
ggcacccaggctggagtgcagtggtacgatctcggctaggcagcctctgctttccaggctcaagccatcctcttgcttca

SEQ ID NO: 130531 - DNA, 80 bp, synthetic construct
  misc_feature 1..80: note = Artificially Synthesized Probe
  source 1..80: mol_type = other DNA
catctgcctaaccttatttactgtttttaaacagtaaacagtaaaacagttttaaacagtaaaacaacacagggccaggc

SEQ ID NO: 130532 - DNA, 80 bp, synthetic construct
  misc_feature 1..80: note = Artificially Synthesized Probe
  source 1..80: mol_type = other DNA
tcaagtttggcaaatctaattggcaccttttgatattgatcatcactgaactttagaatccccagtgtccagaactactg

SEQ ID NO: 130533 - DNA, 80 bp, synthetic construct
  misc_feature 1..80: note = Artificially Synthesized Probe
  source 1..80: mol_type = other DNA
cattcctggctaagttttgtatttttagtagagacggggtttcaccatgttggccaggctggtcttgaattcctggcctc

SEQ ID NO: 130534 - DNA, 80 bp, synthetic construct; identical to SEQ ID NO: 41454
  misc_feature 1..80: note = Artificially Synthesized Probe
  source 1..80: mol_type = other DNA

SEQ ID NO: 130535 - DNA, 80 bp, synthetic construct
  misc_feature 1..80: note = Artificially Synthesized Probe
  source 1..80: mol_type = other DNA
cgaaaaaaaaaaccccagaaaaattagctgggcgtggtggcacatgtttgtaatcccagtttgggaggctgaggcaggat

SEQ ID NO: 130536 - DNA, 80 bp, synthetic construct
  misc_feature 1..80: note = Artificially Synthesized Probe
  source 1..80: mol_type = other DNA
tcttgataagtcatccatgtggtcttctgtctgtatatatgtctggaatgttcacctaatgtcgaagacaggtattagga

SEQ ID NO: 130537 - DNA, 80 bp, synthetic construct; identical to SEQ ID NO: 41455
  misc_feature 1..80: note = Artificially Synthesized Probe
  source 1..80: mol_type = other DNA

SEQ ID NO: 130538 - DNA, 80 bp, synthetic construct
  misc_feature 1..80: note = Artificially Synthesized Probe
  source 1..80: mol_type = other DNA
tcccagctacttgggaggctaaggcacgagaattgcttggacctgggaggcagaggttatggtgagccaagattgcacca

SEQ ID NO: 130539 - DNA, 80 bp, synthetic construct
  misc_feature 1..80: note = Artificially Synthesized Probe
  source 1..80: mol_type = other DNA
gcaccaacctaaaataattgaaaagtggcaacttagagcagctttgttctttctacataatatcaagatgtgggaacaat

SEQ ID NO: 130540 - DNA, 80 bp, synthetic construct
  misc_feature 1..80: note = Artificially Synthesized Probe
  source 1..80: mol_type = other DNA
ccaaaagatggaggaggtctgagagttcttagagtggtttagaatgtgttcctctgtgctggaagatagcttgaaaatac

SEQ ID NO: 130541 - DNA, 80 bp, synthetic construct; identical to SEQ ID NO: 41456
  misc_feature 1..80: note = Artificially Synthesized Probe
  source 1..80: mol_type = other DNA

SEQ ID NO: 130542 - DNA, 80 bp, synthetic construct
  misc_feature 1..80: note = Artificially Synthesized Probe
  source 1..80: mol_type = other DNA
gatcgagaccatcctggccaacacggtgaaaccccatctctactaaaaatacaaaaattagccaggtgtggtggtgggcg

SEQ ID NO: 130543 - DNA, 80 bp, synthetic construct
  misc_feature 1..80: note = Artificially Synthesized Probe
  source 1..80: mol_type = other DNA
taatatataataactaaaagtgaaagcataagggggaagcagaacgttagatgccgctctcctggaggtaatcacagggg

SEQ ID NO: 130544 - DNA, 80 bp, synthetic construct; identical to SEQ ID NO: 41410
  misc_feature 1..80: note = Artificially Synthesized Probe
  source 1..80: mol_type = other DNA

SEQ ID NO: 130545 - DNA, 80 bp, synthetic construct
  misc_feature 1..80: note = Artificially Synthesized Probe
  source 1..80: mol_type = other DNA
aaaaaacatcaggtccttctggcggagttttagctgctgcctcagcactttagtcatctctgtagttgagcaattctcct

SEQ ID NO: 130546 - DNA, 80 bp, synthetic construct; identical to SEQ ID NO: 41457
  misc_feature 1..80: note = Artificially Synthesized Probe
  source 1..80: mol_type = other DNA

SEQ ID NO: 130547 - DNA, 80 bp, synthetic construct
  misc_feature 1..80: note = Artificially Synthesized Probe
  source 1..80: mol_type = other DNA
ctaccatgccagctaatttttttgtatttttagtagagacggggtttcaccatgttagtcagggtggtctcgaactcctg

SEQ ID NO: 130548 - DNA, 80 bp, synthetic construct
  misc_feature 1..80: note = Artificially Synthesized Probe
  source 1..80: mol_type = other DNA
acacacacacagatatgtttcttaagatctccacattcttgagaaaatatgactaaaaggcatttagtttatctcattaa

SEQ ID NO: 130549 - DNA, 80 bp, synthetic construct
  misc_feature 1..80: note = Artificially Synthesized Probe
  source 1..80: mol_type = other DNA
tgctaccatgcccaggtaattttattttattattagtttttgtagagacagaatctcactatgttgtccaggctggactc

SEQ ID NO: 130550 - DNA, 80 bp, synthetic construct
  misc_feature 1..80: note = Artificially Synthesized Probe
  source 1..80: mol_type = other DNA
tgaaaagttgaaaaaaattgtccattgcacaaacaataactaaatttaaaaagaaaaatatatgcacaagcctgtctttt

SEQ ID NO: 130551 - DNA, 80 bp, synthetic construct; identical to SEQ ID NO: 41458
  misc_feature 1..80: note = Artificially Synthesized Probe
  source 1..80: mol_type = other DNA

SEQ ID NO: 130552 - DNA, 80 bp, synthetic construct
  misc_feature 1..80: note = Artificially Synthesized Probe
  source 1..80: mol_type = other DNA
cacttaatgaacatcatcagttcttaccttaattgacctcctcgaaattccatgttgttggcctctccctctttcctgaa

SEQ ID NO: 130553 - DNA, 80 bp, synthetic construct
  misc_feature 1..80: note = Artificially Synthesized Probe
  source 1..80: mol_type = other DNA
ctacatcacgtctctgaatgtgggattgtcccctcccaagacttcaacttttatgatacattgatgatacccaaatcact

SEQ ID NO: 130554 - DNA, 80 bp, synthetic construct; identical to SEQ ID NO: 41459
  misc_feature 1..80: note = Artificially Synthesized Probe
  source 1..80: mol_type = other DNA

SEQ ID NO: 130555 - DNA, 80 bp, synthetic construct
  misc_feature 1..80: note = Artificially Synthesized Probe
  source 1..80: mol_type = other DNA
gaatctggctcccttttgtctaacactgcctaacttcatagccacgtcatctctcacctgcattcccacaaaaatgcatt

SEQ ID NO: 130556 - DNA, 80 bp, synthetic construct
  misc_feature 1..80: note = Artificially Synthesized Probe
  source 1..80: mol_type = other DNA
aatttcaaaagagcaaaggactcaagagccaagggttcttttcatggtaccctgagacctctgatgagttagattatact

SEQ ID NO: 130557 - DNA, 80 bp, synthetic construct
  misc_feature 1..80: note = Artificially Synthesized Probe
  source 1..80: mol_type = other DNA
taagcctgctgtctcttccttccttacttctctctgtgttatttattccccttacctggaaggcttttttccttctttgt

SEQ ID NO: 130558 - DNA, 80 bp, synthetic construct
  misc_feature 1..80: note = Artificially Synthesized Probe
  source 1..80: mol_type = other DNA
tgagtttcctaaggcaggatcctgagtattttatcaaggggttgacagaggtgttcagtaagtacctgttgagtagaaga

SEQ ID NO: 130559 - DNA, 80 bp, synthetic construct
  misc_feature 1..80: note = Artificially Synthesized Probe
  source 1..80: mol_type = other DNA
ccacgcccagctaatttttgttatttttagtagagacggggtctcaccatgttggccaggatggtcttgatttcttgacc

SEQ ID NO: 130560 - DNA, 80 bp, synthetic construct; identical to SEQ ID NO: 41460
  misc_feature 1..80: note = Artificially Synthesized Probe
  source 1..80: mol_type = other DNA

SEQ ID NO: 130561 - DNA, 80 bp, synthetic construct
  misc_feature 1..80: note = Artificially Synthesized Probe
  source 1..80: mol_type = other DNA
agcccttgaaatgagacaagtgtgactgaagaactgaatttgtcatttcctctaattttagttaatttacatgtaaatgt

SEQ ID NO: 130562 - DNA, 80 bp, synthetic construct
  misc_feature 1..80: note = Artificially Synthesized Probe
  source 1..80: mol_type = other DNA
ctaagcccacatcattaaggtgtggccacctttcaagtgctatcatttttattagtcagcaccacctaatttgggaaata

SEQ ID NO: 130563 - DNA, 80 bp, synthetic construct
  misc_feature 1..80: note = Artificially Synthesized Probe
  source 1..80: mol_type = other DNA
ggccagatttgggaaacattttataaataggtgcttagatcaggagagcaatgccttacatcaggaatacaaccaaaatg

SEQ ID NO: 130564 - DNA, 80 bp, synthetic construct; identical to SEQ ID NO: 41461
  misc_feature 1..80: note = Artificially Synthesized Probe
  source 1..80: mol_type = other DNA

SEQ ID NO: 130565 - DNA, 80 bp, synthetic construct
  misc_feature 1..80: note = Artificially Synthesized Probe
  source 1..80: mol_type = other DNA
acacagtgtaaaagaaaggacccaggctttaggtgtggaagaactgacctctgctacaaccagctgaatgaaccacagta

SEQ ID NO: 130566 - DNA, 80 bp, synthetic construct
  misc_feature 1..80: note = Artificially Synthesized Probe
  source 1..80: mol_type = other DNA
gtacctgtttggattctccaaattaatttatatgctcttaaaataaagacacttaacgtcactgcacaattctttgcaca

SEQ ID NO: 130567 - DNA, 80 bp, synthetic construct
  misc_feature 1..80: note = Artificially Synthesized Probe
  source 1..80: mol_type = other DNA
aatatattgtcctgaaaagtcctgttttaatatttaatacgaacatcttataaccctcggaattcgggtaggcagttgtt

SEQ ID NO: 130568 - DNA, 80 bp, synthetic construct; identical to SEQ ID NO: 41462
  misc_feature 1..80: note = Artificially Synthesized Probe
  source 1..80: mol_type = other DNA

SEQ ID NO: 130569 - DNA, 80 bp, synthetic construct
  misc_feature 1..80: note = Artificially Synthesized Probe
  source 1..80: mol_type = other DNA
cccgcccccggccaggagtcgcgcgtgacgcggttcgccgcaggagcctcgaaggcgcggcgccggcgagcccttccccg

SEQ ID NO: 130570 - DNA, 80 bp, synthetic construct
  misc_feature 1..80: note = Artificially Synthesized Probe
  source 1..80: mol_type = other DNA
tgcgggtcagagcactgtccggtggtgcccaggaggagtaggagcaggagcagaagcagaagcggggtccggagctgcgc

SEQ ID NO: 130571 - DNA, 80 bp, synthetic construct
  misc_feature 1..80: note = Artificially Synthesized Probe
  source 1..80: mol_type = other DNA
cgtgctgctctgaagttgttccccgatgcgccgtaggaagctgggattctcccatccggacgtgggacgcaggggagggg

SEQ ID NO: 130572 - DNA, 80 bp, synthetic construct
  misc_feature 1..80: note = Artificially Synthesized Probe
  source 1..80: mol_type = other DNA
gtcgcttgcatgtctttgtgttttccttctctatttcaaaccacactcggtattgatgcaaagttacaggcttgtgtacg

SEQ ID NO: 130573 - DNA, 80 bp, synthetic construct; identical to SEQ ID NO: 41463
  misc_feature 1..80: note = Artificially Synthesized Probe
  source 1..80: mol_type = other DNA

SEQ ID NO: 130574 - DNA, 80 bp, synthetic construct
  misc_feature 1..80: note = Artificially Synthesized Probe
  source 1..80: mol_type = other DNA
agcttcagttcttaggctaggctgcttttctggcagctgtctggcctgagtaatgatggttgtggtttccctgaagttcc

SEQ ID NO: 130575 - DNA, 80 bp, synthetic construct
  misc_feature 1..80: note = Artificially Synthesized Probe
  source 1..80: mol_type = other DNA
aaaatgataacaaaggctacgcacctccatttgggagaaatttataatgcaaaggaaacagaaaaagccataaatttacc

SEQ ID NO: 130576 - DNA, 80 bp, synthetic construct
  misc_feature 1..80: note = Artificially Synthesized Probe
  source 1..80: mol_type = other DNA
cctttgccagcgtaattcagaaagagatgtaattttctgagagcacacacctgggcaggagatcgcttgaagtgagaaat

SEQ ID NO: 130577 - DNA, 80 bp, synthetic construct
  misc_feature 1..80: note = Artificially Synthesized Probe
  source 1..80: mol_type = other DNA
gcctgcaactcattaagaatccgatgagtgccatttagaaatgtggacagggtactggagcttcctcattgtggggagat

SEQ ID NO: 130578 - DNA, 80 bp, synthetic construct; identical to SEQ ID NO: 41464
  misc_feature 1..80: note = Artificially Synthesized Probe
  source 1..80: mol_type = other DNA

SEQ ID NO: 130579 - DNA, 80 bp, synthetic construct
  misc_feature 1..80: note = Artificially Synthesized Probe
  source 1..80: mol_type = other DNA
caatacagaaatttagcaaagagtgggattggtcctatatgcattcccttcaggggattcttgctgggaataaagggcat

SEQ ID NO: 130580 - DNA, 80 bp, synthetic construct
  misc_feature 1..80: note = Artificially Synthesized Probe
  source 1..80: mol_type = other DNA
tgctgaaaactcttaagtgttgggtcctgggttgataagggaggtgagatctaaagatacaagtaggaggtgccaggtag

SEQ ID NO: 130581 - DNA, 80 bp, synthetic construct; identical to SEQ ID NO: 41465
  misc_feature 1..80: note = Artificially Synthesized Probe
  source 1..80: mol_type = other DNA

SEQ ID NO: 130582 - DNA, 80 bp, synthetic construct
  misc_feature 1..80: note = Artificially Synthesized Probe
  source 1..80: mol_type = other DNA
ttatctttttacgagacacaagttattgaaactaggcggggccactttagtcctgtgtacaataatatgtgtagtaatat

SEQ ID NO: 130583 - DNA, 80 bp, synthetic construct
  misc_feature 1..80: note = Artificially Synthesized Probe
  source 1..80: mol_type = other DNA
ctctagaacgaatcccattaagcagttgtggctacagatgaatttatctaggttgagagctgattcccaataacatgcct

SEQ ID NO: 130584 - DNA, 80 bp, synthetic construct
  misc_feature 1..80: note = Artificially Synthesized Probe
  source 1..80: mol_type = other DNA
tgagtttttgtcttgatcctaaatccaagggttagggtcagaaacacagactcagaggttagatttaacacccatttagt

SEQ ID NO: 130585 - DNA, 80 bp, synthetic construct
  misc_feature 1..80: note = Artificially Synthesized Probe
  source 1..80: mol_type = other DNA
tttgaaaaggctgtgtgatagcaatggaaaaaaaaattcaggcatggaaatccaatatgcagtattgcagtagctagttt

SEQ ID NO: 130586 - DNA, 80 bp, synthetic construct; identical to SEQ ID NO: 41411
  misc_feature 1..80: note = Artificially Synthesized Probe
  source 1..80: mol_type = other DNA

SEQ ID NO: 130587 - DNA, 80 bp, synthetic construct; identical to SEQ ID NO: 41466
  misc_feature 1..80: note = Artificially Synthesized Probe
  source 1..80: mol_type = other DNA

SEQ ID NO: 130588 - DNA, 80 bp, synthetic construct
  misc_feature 1..80: note = Artificially Synthesized Probe
  source 1..80: mol_type = other DNA
tctgttttttaaagggattggtgtctctatcatccagctggccattaaacaaccaaagcttcatcatcctagataacctg

SEQ ID NO: 130589 - DNA, 80 bp, synthetic construct
  misc_feature 1..80: note = Artificially Synthesized Probe
  source 1..80: mol_type = other DNA
ttatgctatcccaaaacagtgctttccaaagtctggtatacagacagacttacaggtggtgcagagagatacatattcta

SEQ ID NO: 130590 - DNA, 80 bp, synthetic construct
  misc_feature 1..80: note = Artificially Synthesized Probe
  source 1..80: mol_type = other DNA
gcagtgagtttgctttaagaaaaattatcaactctgggaatgagtaatatgaggctaaggcaaaaatggtaaagctagcc

SEQ ID NO: 130591 - DNA, 80 bp, synthetic construct; identical to SEQ ID NO: 41467
  misc_feature 1..80: note = Artificially Synthesized Probe
  source 1..80: mol_type = other DNA

SEQ ID NO: 130592 - DNA, 80 bp, synthetic construct
  misc_feature 1..80: note = Artificially Synthesized Probe
  source 1..80: mol_type = other DNA
tgattcattgccgaagaatgtggacagccaaacagcctcacctgtaaatgcatttaatttctcaaagtctttcagaagaa

SEQ ID NO: 130593 - DNA, 80 bp, synthetic construct
  misc_feature 1..80: note = Artificially Synthesized Probe
  source 1..80: mol_type = other DNA
gcgaatgaatcaaggagaagagaaaatactgtttcagtagactctctagtgatgtgtgtgttcacaccatttatgagaaa

SEQ ID NO: 130594 - DNA, 80 bp, synthetic construct; identical to SEQ ID NO: 41468
  misc_feature 1..80: note = Artificially Synthesized Probe
  source 1..80: mol_type = other DNA

SEQ ID NO: 130595 - DNA, 80 bp, synthetic construct
  misc_feature 1..80: note = Artificially Synthesized Probe
  source 1..80: mol_type = other DNA
cccaggctggaatgcagtggtgcgatctcggctcactgcaagctccacctcccgggttcacgccattcagcctccccagt

SEQ ID NO: 130596 - DNA, 80 bp, synthetic construct
  misc_feature 1..80: note = Artificially Synthesized Probe
  source 1..80: mol_type = other DNA
gcgcccggctgaaagtgaatctcttaatggatcttccatgaatcaaatatttgtgttttagtaagttaggctgaccaaaa

SEQ ID NO: 130597 - DNA, 80 bp, synthetic construct
  misc_feature 1..80: note = Artificially Synthesized Probe
  source 1..80: mol_type = other DNA
aatatatgcattatgttcacagagaaaacatggtatcatctttggaaactttacagtatgctctatattatagataccct

SEQ ID NO: 130598 - DNA, 80 bp, synthetic construct
  misc_feature 1..80: note = Artificially Synthesized Probe
  source 1..80: mol_type = other DNA
aagctctgcctcccgggttcacgccattctcctgcctcagcctcctgagtagctgggactacaggtgcccgccaccacgc

SEQ ID NO: 130599 - DNA, 80 bp, synthetic construct; identical to SEQ ID NO: 41469
  misc_feature 1..80: note = Artificially Synthesized Probe
  source 1..80: mol_type = other DNA

SEQ ID NO: 130600 - DNA, 80 bp, synthetic construct
  misc_feature 1..80: note = Artificially Synthesized Probe
  source 1..80: mol_type = other DNA
ttccatttgttgagagtcatttgttttcagagtattaaaggaagtgttccgagttctaggttgtgtttctttgatgccta

SEQ ID NO: 130601 - DNA, 80 bp, synthetic construct
  misc_feature 1..80: note = Artificially Synthesized Probe
  source 1..80: mol_type = other DNA
gcaaaactaaacatttctgtttttgaaaggaatgaatcatttggaaggaacttcctggtgagctcagttttagcagcctg

SEQ ID NO: 130602 - DNA, 80 bp, synthetic construct
  misc_feature 1..80: note = Artificially Synthesized Probe
  source 1..80: mol_type = other DNA
gagcaccaacacatccactaaacgttggactgacttgatttggggcaggcttgttgtataagctagtaggaataagagac

SEQ ID NO: 130603 - DNA, 80 bp, synthetic construct; identical to SEQ ID NO: 41470
  misc_feature 1..80: note = Artificially Synthesized Probe
  source 1..80: mol_type = other DNA

SEQ ID NO: 130604 - DNA, 80 bp, synthetic construct
  misc_feature 1..80: note = Artificially Synthesized Probe
  source 1..80: mol_type = other DNA
agcgattctcctgcctcagcctcccaagtagctgggattacaggcacacgccaccacaccctgctaattttttgtatctt

SEQ ID NO: 130605 - DNA, 80 bp, synthetic construct
  misc_feature 1..80: note = Artificially Synthesized Probe
  source 1..80: mol_type = other DNA
gatcatctcaaagtcttttgtgcttaagattctgaaggttttgaagtttgagtataaagcctagagaacattctaaatta

SEQ ID NO: 130606 - DNA, 80 bp, synthetic construct
  misc_feature 1..80: note = Artificially Synthesized Probe
  source 1..80: mol_type = other DNA
cataaagtgatggaaagatctattattcagttgcagcttaaattatgtaccagcaccacgtgtgctggattctcttcctt

SEQ ID NO: 130607 - DNA, 80 bp, synthetic construct; identical to SEQ ID NO: 41471
  misc_feature 1..80: note = Artificially Synthesized Probe
  source 1..80: mol_type = other DNA

SEQ ID NO: 130608 - DNA, 80 bp, synthetic construct
  misc_feature 1..80: note = Artificially Synthesized Probe
  source 1..80: mol_type = other DNA
aattttccagaaatggagctggaaacatttgtgcgtttccttctggtgttattgttaaagcctaaaaacaagggcaagtg

SEQ ID NO: 130609 - DNA, 80 bp, synthetic construct
  misc_feature 1..80: note = Artificially Synthesized Probe
  source 1..80: mol_type = other DNA
tacaaaaactttaaaaattagctgggcatggtagtttatgcctatagtcccagctactcaggaggctgagttgggggatc

SEQ ID NO: 130610 - DNA, 80 bp, synthetic construct
  misc_feature 1..80: note = Artificially Synthesized Probe
  source 1..80: mol_type = other DNA
agtgaaggatctggaagaggcaggaaaggtagactcaatctgccagacttagagctaaaaaaatttgcctggtatgtttc

SEQ ID NO: 130611 - DNA, 80 bp, synthetic construct
  misc_feature 1..80: note = Artificially Synthesized Probe
  source 1..80: mol_type = other DNA
tttttttttttttttttgagatggagtttcactcttgttgcccaggctgaagtgcagtggtgccatctcggctcaccaca

SEQ ID NO: 130612 - DNA, 80 bp, synthetic construct
  misc_feature 1..80: note = Artificially Synthesized Probe
  source 1..80: mol_type = other DNA
tcgggtgatccacctgcctcagcctcccaaagtgctggaattacaggcgtgagccattgtgcctggccagggaattttat

SEQ ID NO: 130613 - DNA, 80 bp, synthetic construct; identical to SEQ ID NO: 41472
  misc_feature 1..80: note = Artificially Synthesized Probe
  source 1..80: mol_type = other DNA

SEQ ID NO: 130614 - DNA, 80 bp, synthetic construct
  misc_feature 1..80: note = Artificially Synthesized Probe
  source 1..80: mol_type = other DNA
cagtagttcttttttgccactgagtcgtattccatttatatgcatctgtcacatttggcttatctcttctgttgataggt

SEQ ID NO: 130615 - DNA, 80 bp, synthetic construct
  misc_feature 1..80: note = Artificially Synthesized Probe
  source 1..80: mol_type = other DNA
ttttttgagacagtctcactctgtcacccaggctggagtgcagtggcatgatctcagctcattgcgacctgtgcctccca

SEQ ID NO: 130616 - DNA, 80 bp, synthetic construct; identical to SEQ ID NO: 41473
  misc_feature 1..80: note = Artificially Synthesized Probe
  source 1..80: mol_type = other DNA

SEQ ID NO: 130617 - DNA, 80 bp, synthetic construct
  misc_feature 1..80: note = Artificially Synthesized Probe
  source 1..80: mol_type = other DNA
acatgtcattctagctatttcaaggagaaggggattcaatacagagtattagttgccttcaggacaaagaaaaggcgaga

SEQ ID NO: 130618 - DNA, 80 bp, synthetic construct
  misc_feature 1..80: note = Artificially Synthesized Probe
  source 1..80: mol_type = other DNA
gctgtaaagctcatgtctgaggaatccaacttttgcctgctactgctgctgtctgtaggaagaagaaaaacaaatggctt

SEQ ID NO: 130619 - DNA, 80 bp, synthetic construct
  misc_feature 1..80: note = Artificially Synthesized Probe
  source 1..80: mol_type = other DNA
gcatagatgccacctggggttgctttgaggtgctcagtaaatggcagtggttataatttattattttcatcattcctcaa

SEQ ID NO: 130620 - DNA, 80 bp, synthetic construct; identical to SEQ ID NO: 41474
  misc_feature 1..80: note = Artificially Synthesized Probe
  source 1..80: mol_type = other DNA

SEQ ID NO: 130621 - DNA, 80 bp, synthetic construct
  misc_feature 1..80: note = Artificially Synthesized Probe
  source 1..80: mol_type = other DNA
ggctcctgtcaatattccccctctacccctgaccagggtaccaggaatctactttctgtccctatagattagcctattct

SEQ ID NO: 130622 - DNA, 80 bp, synthetic construct
  misc_feature 1..80: note = Artificially Synthesized Probe
  source 1..80: mol_type = other DNA
tggaatgcagtggtgcaatctcagcttactgcgacctctgcctcccggattcaagcaattctcctgcctcagcctcccga

SEQ ID NO: 130623 - DNA, 80 bp, synthetic construct
  misc_feature 1..80: note = Artificially Synthesized Probe
  source 1..80: mol_type = other DNA
caggcggggtgaggggcagcgcgagtaaacgggttgacatcccctaggtttctctgcagagtgcgctgtgtacttcatcg

SEQ ID NO: 130624 - DNA, 80 bp, synthetic construct
  misc_feature 1..80: note = Artificially Synthesized Probe
  source 1..80: mol_type = other DNA
accgtgtccgacccagactgatttctgtaacggatgttcattcttttcactttatagtcacatggatgccactgtaagag

SEQ ID NO: 130625 - DNA, 80 bp, synthetic construct
  misc_feature 1..80: note = Artificially Synthesized Probe
  source 1..80: mol_type = other DNA
aagttaatgtagagctgaaaggtgacttaattctaagagttgctgctttaatgtataattttatggaacctaatgagtgt

SEQ ID NO: 130626 - DNA, 80 bp, synthetic construct; identical to SEQ ID NO: 41475
  misc_feature 1..80: note = Artificially Synthesized Probe
  source 1..80: mol_type = other DNA

SEQ ID NO: 130627 - DNA, 80 bp, synthetic construct
  misc_feature 1..80: note = Artificially Synthesized Probe
  source 1..80: mol_type = other DNA
aagtgctgggattacaggtgtgagccgccgcgcccggccaatgtagtggttttaagacatttaaaaatcttgaaccaatg

SEQ ID NO: 130628 - DNA, 80 bp, synthetic construct
  misc_feature 1..80: note = Artificially Synthesized Probe
  source 1..80: mol_type = other DNA
agaaatggagtggtcaagatgtattgattaacgttttaggcatacttctgtagtactacttccgaaggctccttgcagag

SEQ ID NO: 130629 - DNA, 80 bp, synthetic construct
  misc_feature 1..80: note = Artificially Synthesized Probe
  source 1..80: mol_type = other DNA
tctctttttctccagacttttagtcggccagggctaacaatggatgtccaaacagtttacagtggctgatacacaatgca

SEQ ID NO: 130630 - DNA, 80 bp, synthetic construct
  misc_feature 1..80: note = Artificially Synthesized Probe
  source 1..80: mol_type = other DNA
gctggaggaagggacccgtggtgttgcttcgtgtattttgatttgacaatattctttagaaataaattgtcaagtgaact

SEQ ID NO: 130631 - DNA, 80 bp, synthetic construct; identical to SEQ ID NO: 41476
  misc_feature 1..80: note = Artificially Synthesized Probe
  source 1..80: mol_type = other DNA

SEQ ID NO: 130632 - DNA, 80 bp, synthetic construct
  misc_feature 1..80: note = Artificially Synthesized Probe
  source 1..80: mol_type = other DNA
tctatgtgggggaaaaacatctcatttggcttagtagtaagctccaaataacaattgcattgttgttctgaattgtcttt

SEQ ID NO: 130633 - DNA, 80 bp, synthetic construct
  misc_feature 1..80: note = Artificially Synthesized Probe
  source 1..80: mol_type = other DNA
aacatggtgactaaaggcttatgtacattgtagtatgtatctgttccttttttttttttgagtcaggatcttgctctgtt

SEQ ID NO: 130634 - DNA, 80 bp, synthetic construct
  misc_feature 1..80: note = Artificially Synthesized Probe
  source 1..80: mol_type = other DNA
tctgtttctctgtctctttcgtctgttccaatttgagatatactgactatgttagtgtagtctgctacatggatagtcct

SEQ ID NO: 130635 - DNA, 80 bp, synthetic construct
  misc_feature 1..80: note = Artificially Synthesized Probe
  source 1..80: mol_type = other DNA
gtctaaacccactggcctggattccacctcttgttggatgggtggtcagttttaacattagggggtgttgattgtgagct

SEQ ID NO: 130636 - DNA, 80 bp, synthetic construct; identical to SEQ ID NO: 41477
  misc_feature 1..80: note = Artificially Synthesized Probe
  source 1..80: mol_type = other DNA

SEQ ID NO: 130637 - DNA, 80 bp, synthetic construct
  misc_feature 1..80: note = Artificially Synthesized Probe
  source 1..80: mol_type = other DNA
ctaaccatgacggagcccaggagacaaagtaaggtgtggtttgttttgctgtaagaccacgtttggttagcttttctcta

SEQ ID NO: 130638 - DNA, 80 bp, synthetic construct
  misc_feature 1..80: note = Artificially Synthesized Probe
  source 1..80: mol_type = other DNA
cttgtgtgacagggaggggatttgagccaaggtccatttgatgaatttgaaacctgtagattctgtcaattccaccagtc

SEQ ID NO: 130639 - DNA, 80 bp, synthetic construct; identical to SEQ ID NO: 41478
  misc_feature 1..80: note = Artificially Synthesized Probe
  source 1..80: mol_type = other DNA

SEQ ID NO: 130640 - DNA, 80 bp, synthetic construct
  misc_feature 1..80: note = Artificially Synthesized Probe
  source 1..80: mol_type = other DNA
gaaatggctgtgttgtcccatcaaccccttcactcaaaaactatcattaatatcaggaaaaacttatggttacaaactcc

SEQ ID NO: 130641 - DNA, 80 bp, synthetic construct
  misc_feature 1..80: note = Artificially Synthesized Probe
  source 1..80: mol_type = other DNA
ctccaagaggttttaggctatcagacagccacactttaatgtggagtagactagtcagctttcttctactatctaactga

SEQ ID NO: 130642 - DNA, 80 bp, synthetic construct
  misc_feature 1..80: note = Artificially Synthesized Probe
  source 1..80: mol_type = other DNA
tggaaagacctaggaagtctccacatacaaattttgcttctttcctgtttctccactgaaccctgggaagggtgcttatt

SEQ ID NO: 130643 - DNA, 80 bp, synthetic construct
  misc_feature 1..80: note = Artificially Synthesized Probe
  source 1..80: mol_type = other DNA
tggagactgaggcaggcaggaggatcgcttgagcccaggagttggaggctacagtgagttctgattgtcctgtgaatagg

SEQ ID NO: 130644 - DNA, 80 bp, synthetic construct; identical to SEQ ID NO: 41412
  misc_feature 1..80: note = Artificially Synthesized Probe
  source 1..80: mol_type = other DNA

SEQ ID NO: 130645 - DNA, 80 bp, synthetic construct; identical to SEQ ID NO: 41479
  misc_feature 1..80: note = Artificially Synthesized Probe
  source 1..80: mol_type = other DNA

SEQ ID NO: 130646 - DNA, 80 bp, synthetic construct
  misc_feature 1..80: note = Artificially Synthesized Probe
  source 1..80: mol_type = other DNA
catcctggctaacacggtgaaaccccgtctgtactaaaaatacaaaaagaaattagccgggtatggtggtggacgcctgt

SEQ ID NO: 130647 - DNA, 80 bp, synthetic construct
  misc_feature 1..80: note = Artificially Synthesized Probe
  source 1..80: mol_type = other DNA
tgctttgagttgtgggtgccacctccctcactgtctttttctgagggtacataaataaattgcatcctagcttgagatca

SEQ ID NO: 130648 - DNA, 80 bp, synthetic construct; identical to SEQ ID NO: 41480
  misc_feature 1..80: note = Artificially Synthesized Probe
  source 1..80: mol_type = other DNA

SEQ ID NO: 130649 - DNA, 80 bp, synthetic construct
  misc_feature 1..80: note = Artificially Synthesized Probe
  source 1..80: mol_type = other DNA
tacttgatgctaaggacagacctaaagtttgttgaggatagaaatgaaaaatgaggcaaaagaaaccaggaattgagatg

SEQ ID NO: 130650 - DNA, 80 bp, synthetic construct
  misc_feature 1..80: note = Artificially Synthesized Probe
  source 1..80: mol_type = other DNA
tatagccagctgcgtgtttgttgttttttctgcctgctagctaagaactgttcttgcattttaaatggttatgtaagtat

SEQ ID NO: 130651 - DNA, 80 bp, synthetic construct
  misc_feature 1..80: note = Artificially Synthesized Probe
  source 1..80: mol_type = other DNA
tgatttgtctcctgttctgcaatctgggaatagtagatcaggatgctgacttgtgggaagatgctggctgcatgagatgc

SEQ ID NO: 130652 - DNA, 80 bp, synthetic construct
  misc_feature 1..80: note = Artificially Synthesized Probe
  source 1..80: mol_type = other DNA
cttgagaagttgcaaatgcagatttcctccgtgttaggtggtgaccaataaaagcatattttgtttttaggatgtagaaa

SEQ ID NO: 130653 - DNA, 80 bp, synthetic construct; identical to SEQ ID NO: 41481
  misc_feature 1..80: note = Artificially Synthesized Probe
  source 1..80: mol_type = other DNA

SEQ ID NO: 130654 - DNA, 80 bp, synthetic construct
  misc_feature 1..80: note = Artificially Synthesized Probe
  source 1..80: mol_type = other DNA
aacatcattttgagggtggggactgtgtcctatgttgacaggtctttgttttcaaagtctgatgtacaatagagactaaa

SEQ ID NO: 130655 - DNA, 80 bp, synthetic construct
  misc_feature 1..80: note = Artificially Synthesized Probe
  source 1..80: mol_type = other DNA
tgggattataggcacgtaccaccacgcctggctaatttttgtatatttagtagagacagggtttttgccttgttagccag

SEQ ID NO: 130656 - DNA, 80 bp, synthetic construct
  misc_feature 1..80: note = Artificially Synthesized Probe
  source 1..80: mol_type = other DNA
cactgttgattgccgttgctacagtggggcttatattaatattagaaacacccctcatttgagtggtactttacagttta

SEQ ID NO: 130657 - DNA, 80 bp, synthetic construct
  misc_feature 1..80: note = Artificially Synthesized Probe
  source 1..80: mol_type = other DNA
acagtcccatcagccaggtatttggagttccaatttcatgtctgcatccacatacattattactgttgtctgtcttttta

SEQ ID NO: 130658 - DNA, 80 bp, synthetic construct; identical to SEQ ID NO: 41482
  misc_feature 1..80: note = Artificially Synthesized Probe
  source 1..80: mol_type = other DNA

SEQ ID NO: 130659 - DNA, 80 bp, synthetic construct
  misc_feature 1..80: note = Artificially Synthesized Probe
  source 1..80: mol_type = other DNA
ttttctttcgctagacagtttttggtggtggtttgttgctctccttcagataaacatttcttgatagtgcagtttcttcc

SEQ ID NO: 130660 - DNA, 80 bp, synthetic construct
  misc_feature 1..80: note = Artificially Synthesized Probe
  source 1..80: mol_type = other DNA
tcctcacagtgacaaggggatcttgattggtgctaagtccttggatggttcccttggcctcagtgactctgagagagcca

SEQ ID NO: 130661 - DNA, 80 bp, synthetic construct
  misc_feature 1..80: note = Artificially Synthesized Probe
  source 1..80: mol_type = other DNA
cctcaatctcctgagtagctggcactacaggcgtgcgccaccacacctggctaatttttgtatttttagtagagacaggg

SEQ ID NO: 130662 - DNA, 80 bp, synthetic construct; identical to SEQ ID NO: 41483
  misc_feature 1..80: note = Artificially Synthesized Probe
  source 1..80: mol_type = other DNA

SEQ ID NO: 130663 - DNA, 80 bp, synthetic construct
  misc_feature 1..80: note = Artificially Synthesized Probe
  source 1..80: mol_type = other DNA
cagaattaaaaaaaaaaacgtcagcccatacctgaagtttcccgtgtcaccaatggactaaggatgcagactgtcagttt

SEQ ID NO: 130664 - DNA, 80 bp, synthetic construct
  misc_feature 1..80: note = Artificially Synthesized Probe
  source 1..80: mol_type = other DNA
catctgctgtgttttattaagtcaaaagaattaggaaggcttgttgatttttgcatggctttggctccacatttgataca

SEQ ID NO: 130665 - DNA, 80 bp, synthetic construct
  misc_feature 1..80: note = Artificially Synthesized Probe
  source 1..80: mol_type = other DNA
gggcattggtcattgtgctaagtataccatgcaagaacacattcagttattacgtttatggtattttaaatatgtaacat

SEQ ID NO: 130666 - DNA, 80 bp, synthetic construct; identical to SEQ ID NO: 41484
  misc_feature 1..80: note = Artificially Synthesized Probe
  source 1..80: mol_type = other DNA

SEQ ID NO: 130667 - DNA, 80 bp, synthetic construct
  misc_feature 1..80: note = Artificially Synthesized Probe
  source 1..80: mol_type = other DNA
tatggagggggagctatatgcacacagtgtctgccatagcattagttatactagcaaaaaaaaggaaatggcttaaatga

SEQ ID NO: 130668 - DNA, 80 bp, synthetic construct
  misc_feature 1..80: note = Artificially Synthesized Probe
  source 1..80: mol_type = other DNA
ctcgtttcactacaagctctgccttccgggttcacaccattctcctgcctcagcctcccgagtagctgggactacaggcg

SEQ ID NO: 130669 - DNA, 80 bp, synthetic construct
  misc_feature 1..80: note = Artificially Synthesized Probe
  source 1..80: mol_type = other DNA
catcgtcaccatggtagaaacttctgttggagagtactgctagacaggtgcttctcaaacattattttccccgtcacctc

SEQ ID NO: 130670 - DNA, 80 bp, synthetic construct; identical to SEQ ID NO: 41485
  misc_feature 1..80: note = Artificially Synthesized Probe
  source 1..80: mol_type = other DNA

SEQ ID NO: 130671 - DNA, 80 bp, synthetic construct
  misc_feature 1..80: note = Artificially Synthesized Probe
  source 1..80: mol_type = other DNA
gccaaccttgatggtgacatttagctgagcagctctaataattgttttttcaacctgcctttttgacaaagccgtttatg

SEQ ID NO: 130672 - DNA, 80 bp, synthetic construct
  misc_feature 1..80: note = Artificially Synthesized Probe
  source 1..80: mol_type = other DNA
cagggctgtgcctgtgttgccaaattagcaccttccttttggcttattaatggcttctttgtaattacaaataagaatga

SEQ ID NO: 130673 - DNA, 80 bp, synthetic construct
  misc_feature 1..80: note = Artificially Synthesized Probe
  source 1..80: mol_type = other DNA
ttgccatgggcaagttccttgagatctcaggccttctatttttgtatgtgaaaaaagcaggagtagggttagggtatagg

SEQ ID NO: 130674 - DNA, 80 bp, synthetic construct; identical to SEQ ID NO: 41486
  misc_feature 1..80: note = Artificially Synthesized Probe
  source 1..80: mol_type = other DNA

SEQ ID NO: 130675 - DNA, 80 bp, synthetic construct
  misc_feature 1..80: note = Artificially Synthesized Probe
  source 1..80: mol_type = other DNA
atcatgtttttgtttgtgtgtttgttttttaagagacagggcctcactctgtcacccaggctagagtgcagtggtgccat

SEQ ID NO: 130676 - DNA, 80 bp, synthetic construct
  misc_feature 1..80: note = Artificially Synthesized Probe
  source 1..80: mol_type = other DNA
ggtgtatagtggagaggcaaggttcttcagtggaaaggatataagctttctagtcacaccagcctgagttagaatctgtc

SEQ ID NO: 130677 - DNA, 80 bp, synthetic construct
  misc_feature 1..80: note = Artificially Synthesized Probe
  source 1..80: mol_type = other DNA
tatgtgccaggcattaccttgatttctctacatgcactgtctgattaaattctcacaacaaccttagagaggtgggtctt

SEQ ID NO: 130678 - DNA, 80 bp, synthetic construct
  misc_feature 1..80: note = Artificially Synthesized Probe
  source 1..80: mol_type = other DNA
tacgatgtgatcttttttttaaaaacagctttattgagatataattcatataccatacaataaaagtgtgcaaccagtgg

SEQ ID NO: 130679 - DNA, 80 bp, synthetic construct; identical to SEQ ID NO: 41487
  misc_feature 1..80: note = Artificially Synthesized Probe
  source 1..80: mol_type = other DNA

SEQ ID NO: 130680 - DNA, 80 bp, synthetic construct
  misc_feature 1..80: note = Artificially Synthesized Probe
  source 1..80: mol_type = other DNA
agattattattcctggacttttttcttgattcttttccaagggaaaaggacatagggaaagaggaaattctgttttgaat

SEQ ID NO: 130681 - DNA, 80 bp, synthetic construct
  misc_feature 1..80: note = Artificially Synthesized Probe
  source 1..80: mol_type = other DNA
cacaatctgggttcactgcaacctccgcctccccagttcaagtgattatcctgcttcaccctccccagcagctgggatta

SEQ ID NO: 130682 - DNA, 80 bp, synthetic construct
  misc_feature 1..80: note = Artificially Synthesized Probe
  source 1..80: mol_type = other DNA
tttttaaggatcatccatgttgtagcatgtgtagatactttggtccaccttattgttgagtaacagttcattgtatggat

SEQ ID NO: 130683 - DNA, 80 bp, synthetic construct; identical to SEQ ID NO: 41488
  misc_feature 1..80: note = Artificially Synthesized Probe
  source 1..80: mol_type = other DNA

SEQ ID NO: 130684 - DNA, 80 bp, synthetic construct
  misc_feature 1..80: note = Artificially Synthesized Probe
  source 1..80: mol_type = other DNA
tcttaccaagtgaactgttccagatcacagagcttggagagtgtgtagggggactgagcttagacccaggtgtgtgtgac

SEQ ID NO: 130685 - DNA, 80 bp, synthetic construct
  misc_feature 1..80: note = Artificially Synthesized Probe
  source 1..80: mol_type = other DNA
attgagtgagcgcccaagctcatgggtgaattgaggcgcagtcttggatggaggtctgtttttggagtttaaatttattg

SEQ ID NO: 130686 - DNA, 80 bp, synthetic construct
  misc_feature 1..80: note = Artificially Synthesized Probe
  source 1..80: mol_type = other DNA
tggagtgcagtgacactatctcagctcagtgcagcctctgcatcccaggttcaagcgattctcttgcctcagcctccaga

SEQ ID NO: 130687 - DNA, 80 bp, synthetic construct
  misc_feature 1..80: note = Artificially Synthesized Probe
  source 1..80: mol_type = other DNA
accatgcccggccacctttctcaattctttattatctatttaaatgcacgctaaaaaatttaccttaggtaaataaagga

SEQ ID NO: 130688 - DNA, 80 bp, synthetic construct; identical to SEQ ID NO: 41489
  misc_feature 1..80: note = Artificially Synthesized Probe
  source 1..80: mol_type = other DNA

SEQ ID NO: 130689 - DNA, 80 bp, synthetic construct
  misc_feature 1..80: note = Artificially Synthesized Probe
  source 1..80: mol_type = other DNA
gaaagtattgttggatgcggtggcaactagtttattgctaccaagaggggtttaagtttgaatagaccacaggtaagtgc

SEQ ID NO: 130690 - DNA, 80 bp, synthetic construct
  misc_feature 1..80: note = Artificially Synthesized Probe
  source 1..80: mol_type = other DNA
attcttcacaatagttaaaaccaatttcctgggggcaggtggggaactataaaagtcctcttttcatctggaggtaggtt

SEQ ID NO: 130691 - DNA, 80 bp, synthetic construct; identical to SEQ ID NO: 41413
  misc_feature 1..80: note = Artificially Synthesized Probe
  source 1..80: mol_type = other DNA

SEQ ID NO: 130692 - DNA, 80 bp, synthetic construct
  misc_feature 1..80: note = Artificially Synthesized Probe
  source 1..80: mol_type = other DNA
gaagagtctcaggagttcgagaccagcctgggcaacatagcgagaccttgtctctactaaaattaaaaaaaattagccag

SEQ ID NO: 130693 - DNA, 80 bp, synthetic construct; identical to SEQ ID NO: 41490
  misc_feature 1..80: note = Artificially Synthesized Probe
  source 1..80: mol_type = other DNA

SEQ ID NO: 130694 - DNA, 80 bp, synthetic construct
  misc_feature 1..80: note = Artificially Synthesized Probe
  source 1..80: mol_type = other DNA
atccagtaacatgtattaaggactcagcatgtggaaagcacgcatgacattgttcatggagacgagggtctggagtcagg

SEQ ID NO: 130695 - DNA, 80 bp, synthetic construct
  misc_feature 1..80: note = Artificially Synthesized Probe
  source 1..80: mol_type = other DNA
ttaatgacttccttcctctccagttttcacacttaccttgtctcccatttctgaggtgaatatgcattttaaggctccca

SEQ ID NO: 130696 - DNA, 80 bp, synthetic construct; identical to SEQ ID NO: 41491
  misc_feature 1..80: note = Artificially Synthesized Probe
  source 1..80: mol_type = other DNA

SEQ ID NO: 130697 - DNA, 80 bp, synthetic construct
  misc_feature 1..80: note = Artificially Synthesized Probe
  source 1..80: mol_type = other DNA
cctccaactcctgtgctcaagtgatcctcctgcctcagtgtcctgagcagctaggactataggcacatgccactgcacct

SEQ ID NO: 130698 - DNA, 80 bp, synthetic construct
  misc_feature 1..80: note = Artificially Synthesized Probe
  source 1..80: mol_type = other DNA
ttatgtagttgctataaccccaccactcaccctgctccagcccatgtcaccttttctctttcctaaatgtactaagcttg

SEQ ID NO: 130699 - DNA, 80 bp, synthetic construct
  misc_feature 1..80: note = Artificially Synthesized Probe
  source 1..80: mol_type = other DNA
gatgatatatattgactcttgtctgctttctctgctaaaatcctccctgtgaggaaacgagtttggcacatatcccctgg

SEQ ID NO: 130700 - DNA, 80 bp, synthetic construct; identical to SEQ ID NO: 41492
  misc_feature 1..80: note = Artificially Synthesized Probe
  source 1..80: mol_type = other DNA

SEQ ID NO: 130701 - DNA, 80 bp, synthetic construct
  misc_feature 1..80: note = Artificially Synthesized Probe
  source 1..80: mol_type = other DNA
catcctctactgtcccctcccccttttctttgtcaggtctttgccctgtgctgttctttggaccctgaacaaacccttct

SEQ ID NO: 130702 - DNA, 80 bp, synthetic construct
  misc_feature 1..80: note = Artificially Synthesized Probe
  source 1..80: mol_type = other DNA
cacattgcacttggtcgacatttgttgaatgaatgagtaaagaattagtgatggcatatttacatacccatgttcatggc

SEQ ID NO: 130703 - DNA, 80 bp, synthetic construct
  misc_feature 1..80: note = Artificially Synthesized Probe
  source 1..80: mol_type = other DNA
gacattatgctatgtgaagtaagccaatcacaggaagacaaatcttgtgtgagtccacttatatgatgtgtctaatgtag

SEQ ID NO: 130704 - DNA, 80 bp, synthetic construct
  misc_feature 1..80: note = Artificially Synthesized Probe
  source 1..80: mol_type = other DNA
tcctactcctgtaactgggaagtttataaaaaacagaaatttatttgcccacagttttggctgggaagttgaagatcaag

SEQ ID NO: 130705 - DNA, 80 bp, synthetic construct
  misc_feature 1..80: note = Artificially Synthesized Probe
  source 1..80: mol_type = other DNA
aaaaatatgaaaaattagccaggcatggtggcgtgtgctgtccttccagctactcaggaggctgaggtgggagaatcctt

SEQ ID NO: 130706 - DNA, 80 bp, synthetic construct; identical to SEQ ID NO: 41493
  misc_feature 1..80: note = Artificially Synthesized Probe
  source 1..80: mol_type = other DNA

SEQ ID NO: 130707 - DNA, 80 bp, synthetic construct
  misc_feature 1..80: note = Artificially Synthesized Probe
  source 1..80: mol_type = other DNA
cttaactaatagcttgctgtttaccagaaaacttaccataacataaacagtcaatgaacgcattttatatgctatatgta

SEQ ID NO: 130708 - DNA, 80 bp, synthetic construct
  misc_feature 1..80: note = Artificially Synthesized Probe
  source 1..80: mol_type = other DNA
agaggcggaagaggtggaggaggtgaaggggaggcaggggaggcaggcacactctgtataacttttattgaaaaaaaccc

SEQ ID NO: 130709 - DNA, 80 bp, synthetic construct
  misc_feature 1..80: note = Artificially Synthesized Probe
  source 1..80: mol_type = other DNA
gaatctggaattcttaaattctaggacacctctgacttctgggtagtatgcatgaacttaagggaaagaagtatttattt

SEQ ID NO: 130710 - DNA, 80 bp, synthetic construct; identical to SEQ ID NO: 41494
  misc_feature 1..80: note = Artificially Synthesized Probe
  source 1..80: mol_type = other DNA

SEQ ID NO: 130711 - DNA, 80 bp, synthetic construct
  misc_feature 1..80: note = Artificially Synthesized Probe
  source 1..80: mol_type = other DNA
tttgtgtgtgtttttagtagagacgaggtttcaacatgttggccaggctggtcttgaactcctggcctcaggtgatcctc

SEQ ID NO: 130712 - DNA, 80 bp, synthetic construct
  misc_feature 1..80: note = Artificially Synthesized Probe
  source 1..80: mol_type = other DNA
gctcaggtgatcctcctacctcagcctcccaagtatctgggactacaggtgtgcacaaccatgcccagctaatttttcta

SEQ ID NO: 130713 - DNA, 80 bp, synthetic construct
  misc_feature 1..80: note = Artificially Synthesized Probe
  source 1..80: mol_type = other DNA
ttgatctcatttaactgtcataacatgaagaactcaactcttagggaaggacacacatttcccagtgcctgtccagcacc

SEQ ID NO: 130714 - DNA, 80 bp, synthetic construct; identical to SEQ ID NO: 41495
  misc_feature 1..80: note = Artificially Synthesized Probe
  source 1..80: mol_type = other DNA

SEQ ID NO: 130715 - DNA, 80 bp, synthetic construct
  misc_feature 1..80: note = Artificially Synthesized Probe
  source 1..80: mol_type = other DNA
aaccccagctcccaagccccaggcatcccataaaatctttgctagatgttcagaaacctaaaatttgcttctccacccct

SEQ ID NO: 130716 - DNA, 80 bp, synthetic construct
  misc_feature 1..80: note = Artificially Synthesized Probe
  source 1..80: mol_type = other DNA
tctatatattttattagggtactctttattttattctcaagtactgccaaaagaagagtagactaaggctgggtgcgatg

SEQ ID NO: 130717 - DNA, 80 bp, synthetic construct
  misc_feature 1..80: note = Artificially Synthesized Probe
  source 1..80: mol_type = other DNA
gagttgtctctgagcagcaccaaatgagtcttatcttccccttgttatctccaaggacgtaaaacattttcttttcatgc

SEQ ID NO: 130718 - DNA, 80 bp, synthetic construct
  misc_feature 1..80: note = Artificially Synthesized Probe
  source 1..80: mol_type = other DNA
aattctgtcaacttagatgctgaatcattttatgtgcttaaaagaaatatctactcggatgctctagttccctggcaagg

SEQ ID NO: 130719 - DNA, 80 bp, synthetic construct; identical to SEQ ID NO: 41496
  misc_feature 1..80: note = Artificially Synthesized Probe
  source 1..80: mol_type = other DNA

SEQ ID NO: 130720 - DNA, 80 bp, synthetic construct
  misc_feature 1..80: note = Artificially Synthesized Probe
  source 1..80: mol_type = other DNA
caacctttcttcatgggaaggggagggaagcaaaaccattctcacagtgagtcctttatcctcagattgatttgtgcttc

SEQ ID NO: 130721 - DNA, 80 bp, synthetic construct
  misc_feature 1..80: note = Artificially Synthesized Probe
  source 1..80: mol_type = other DNA
gatcaaaggctgctgttttccatgtgctaggaatctgtaatggttttgcttcctgggtagagcttaacatactggctttt

SEQ ID NO: 130722 - DNA, 80 bp, synthetic construct; identical to SEQ ID NO: 41497
  misc_feature 1..80: note = Artificially Synthesized Probe
  source 1..80: mol_type = other DNA

SEQ ID NO: 130723 - DNA, 80 bp, synthetic construct
  misc_feature 1..80: note = Artificially Synthesized Probe
  source 1..80: mol_type = other DNA
ggccaagatttttcaaaggaaaaaagctttataaaaagattaaaaaaaaacacaataagtaactatttgccttagttcct

SEQ ID NO: 130724 - DNA, 80 bp, synthetic construct
  misc_feature 1..80: note = Artificially Synthesized Probe
  source 1..80: mol_type = other DNA
agggggttgtcatgaacactacttacgtgaaaagtaaaagtgataaggaaagatgatgaaagcacattgaagatcctcct

SEQ ID NO: 130725 - DNA, 80 bp, synthetic construct
  misc_feature 1..80: note = Artificially Synthesized Probe
  source 1..80: mol_type = other DNA
tcaactcgccctccttccagttgaaattattatcccctcttcactttgcaaaattctaactgcattgaaaaatttgctgt

SEQ ID NO: 130726 - DNA, 80 bp, synthetic construct
  misc_feature 1..80: note = Artificially Synthesized Probe
  source 1..80: mol_type = other DNA
gtgcagtggcgcgatttcggctcactgcaagctccacctcccgggttcgagccattctcctgcctcagcctcccgagtag

SEQ ID NO: 130727 - DNA, 80 bp, synthetic construct; identical to SEQ ID NO: 41498
  misc_feature 1..80: note = Artificially Synthesized Probe
  source 1..80: mol_type = other DNA

SEQ ID NO: 130728 - DNA, 80 bp, synthetic construct; identical to SEQ ID NO: 41414
  misc_feature 1..80: note = Artificially Synthesized Probe
  source 1..80: mol_type = other DNA

SEQ ID NO: 130729 - DNA, 80 bp, synthetic construct
  misc_feature 1..80: note = Artificially Synthesized Probe
  source 1..80: mol_type = other DNA
atttccactgcatgcgtgcgtacacacacacacgcccctaaacaatagattaattttgttggcaattttttactatagtg

SEQ ID NO: 130730 - DNA, 80 bp, synthetic construct
  misc_feature 1..80: note = Artificially Synthesized Probe
  source 1..80: mol_type = other DNA
gtttgagatgcatcccttttgtggtggtctatgtgactggtttgttcgtcttcattgcagtaaaacattgtattttaata

SEQ ID NO: 130731 - DNA, 80 bp, synthetic construct
  misc_feature 1..80: note = Artificially Synthesized Probe
  source 1..80: mol_type = other DNA
tcgtggaatgtgcatacctttaattctgatatatgcgtgctctttctatgggcctgcctgtaaagctccccctggtgcta

SEQ ID NO: 130732 - DNA, 80 bp, synthetic construct; identical to SEQ ID NO: 41499
  misc_feature 1..80: note = Artificially Synthesized Probe
  source 1..80: mol_type = other DNA

SEQ ID NO: 130733 - DNA, 80 bp, synthetic construct
  misc_feature 1..80: note = Artificially Synthesized Probe
  source 1..80: mol_type = other DNA
cataaatgaacaaatgagtgcacagtgaagagttttctgtgagaccttcccaaaaagtcacagttctgtaggctaaatat

SEQ ID NO: 130734 - DNA, 80 bp, synthetic construct
  misc_feature 1..80: note = Artificially Synthesized Probe
  source 1..80: mol_type = other DNA
cccgttaaccataggtaagaagaagcctcgcaatctgattggtttcaggcaccaggcaagttaatagcaaggtctgattg

SEQ ID NO: 130735 - DNA, 80 bp, synthetic construct; identical to SEQ ID NO: 41500
  misc_feature 1..80: note = Artificially Synthesized Probe
  source 1..80: mol_type = other DNA

SEQ ID NO: 130736 - DNA, 80 bp, synthetic construct
  misc_feature 1..80: note = Artificially Synthesized Probe
  source 1..80: mol_type = other DNA
aaaatattctctataatagcacagctccttgggatattcaacatttttttggtatgtagcattgcccaatcctggggatg

SEQ ID NO: 130737 - DNA, 80 bp, synthetic construct
  misc_feature 1..80: note = Artificially Synthesized Probe
  source 1..80: mol_type = other DNA
ttcactttgttgaaatttgacagctttaaggtacaagaaggcattgagaagatgagcttggagaagtgggcatgctcata

SEQ ID NO: 130738 - DNA, 80 bp, synthetic construct
  misc_feature 1..80: note = Artificially Synthesized Probe
  source 1..80: mol_type = other DNA
tctttattttttttgagacagagtctcactctggagtgcagtggcgcaatctcagctcattgcaacctccacctcccagg

SEQ ID NO: 130739 - DNA, 80 bp, synthetic construct
  misc_feature 1..80: note = Artificially Synthesized Probe
  source 1..80: mol_type = other DNA
gtagattaataagacatttttcacgagtcagtgcatttttgttccttgtttcccaagctgcacggcagtgtttttccttt

SEQ ID NO: 130740 - DNA, 80 bp, synthetic construct; identical to SEQ ID NO: 41405
  misc_feature 1..80: note = Artificially Synthesized Probe
  source 1..80: mol_type = other DNA

SEQ ID NO: 130741 - DNA, 80 bp, synthetic construct; identical to SEQ ID NO: 41501
  misc_feature 1..80: note = Artificially Synthesized Probe
  source 1..80: mol_type = other DNA

SEQ ID NO: 130742 - DNA, 80 bp, synthetic construct
  misc_feature 1..80: note = Artificially Synthesized Probe
  source 1..80: mol_type = other DNA
ctgtaatcccaactactcgggaggctgaggcaggagaatcgctagaacccaggaggcggaggttgcagtgagcccagatc

SEQ ID NO: 130743 - DNA, 80 bp, synthetic construct
  misc_feature 1..80: note = Artificially Synthesized Probe
  source 1..80: mol_type = other DNA
gagaggtatggctatagagcacatctagaaagtcagaccatgagcacctgagtttttagttcacccacctcacgtatgct

SEQ ID NO: 130744 - DNA, 80 bp, synthetic construct
  misc_feature 1..80: note = Artificially Synthesized Probe
  source 1..80: mol_type = other DNA
aaaccgtgtctctaccaaaaatacaaaaaaatgagctgggtgtggtggcgcacaactgtaatcccagctactcgggaggc

SEQ ID NO: 130745 - DNA, 80 bp, synthetic construct; identical to SEQ ID NO: 41502
  misc_feature 1..80: note = Artificially Synthesized Probe
  source 1..80: mol_type = other DNA

SEQ ID NO: 130746 - DNA, 80 bp, synthetic construct
  misc_feature 1..80: note = Artificially Synthesized Probe
  source 1..80: mol_type = other DNA
tatttccttgtgttgatgggccttcatttaatctaaatcttgcacttttgggctgcttgcgtccctggcaccccaggccc

SEQ ID NO: 130747 - DNA, 80 bp, synthetic construct
  misc_feature 1..80: note = Artificially Synthesized Probe
  source 1..80: mol_type = other DNA
ctgatcaccccgcctcagcctcctgagtagctgggactatggcatgtgccaccatgcctggctaactttaaaaatttttt

SEQ ID NO: 130748 - DNA, 80 bp, synthetic construct
  misc_feature 1..80: note = Artificially Synthesized Probe
  source 1..80: mol_type = other DNA
ctaatttcttaaaacataaacacatagtccgggtggcttggtggctcatgcctgtaatcccagcactttgggaggccgag

SEQ ID NO: 130749 - DNA, 80 bp, synthetic construct
  misc_feature 1..80: note = Artificially Synthesized Probe
  source 1..80: mol_type = other DNA
ggaggttgcagtgagtgaagatcacgccactgtactccagcctgggcgacagaacgagactccgtctcaaacaaaacaaa

SEQ ID NO: 130750 - DNA, 80 bp, synthetic construct; identical to SEQ ID NO: 41503
  misc_feature 1..80: note = Artificially Synthesized Probe
  source 1..80: mol_type = other DNA

SEQ ID NO: 130751 - DNA, 80 bp, synthetic construct
  misc_feature 1..80: note = Artificially Synthesized Probe
  source 1..80: mol_type = other DNA
cctgtgtgaatacaggtctgttgatagaaattctccagggttttatttttagttatttccactctacccatagccaagga

SEQ ID NO: 130752 - DNA, 80 bp, synthetic construct
  misc_feature 1..80: note = Artificially Synthesized Probe
  source 1..80: mol_type = other DNA
agtcagctggatttagaaaaagaaaacttccatttgagggttctttgagacagtagtgggataggtgagtggaagtgtgt

SEQ ID NO: 130753 - DNA, 80 bp, synthetic construct
  misc_feature 1..80: note = Artificially Synthesized Probe
  source 1..80: mol_type = other DNA
tggcttatctctgtggttctgagtgttcttggcatttctagctttctcacaggcagcctgcatttaatggattattattt

SEQ ID NO: 130754 - DNA, 80 bp, synthetic construct; identical to SEQ ID NO: 41504
  misc_feature 1..80: note = Artificially Synthesized Probe
  source 1..80: mol_type = other DNA

SEQ ID NO: 130755 - DNA, 80 bp, synthetic construct
  misc_feature 1..80: note = Artificially Synthesized Probe
  source 1..80: mol_type = other DNA
ctttttagggtctgtctctcactatgtatttcacttacctttcaagtattgtttctagtttcatttcattgaaggagagt

SEQ ID NO: 130756 - DNA, 80 bp, synthetic construct
  misc_feature 1..80: note = Artificially Synthesized Probe
  source 1..80: mol_type = other DNA
ccccaggcatggaagagctgatatgggaacagtacactgtgaccctacaaaaggtgagttctgcacatttcatatattct

SEQ ID NO: 130757 - DNA, 80 bp, synthetic construct
  misc_feature 1..80: note = Artificially Synthesized Probe
  source 1..80: mol_type = other DNA
taaggactgtttagtatggaacattttagaggttatttagtgtatactcttatctccagctagaacaggttatgaaagag

SEQ ID NO: 130758 - DNA, 80 bp, synthetic construct; identical to SEQ ID NO: 41505
  misc_feature 1..80: note = Artificially Synthesized Probe
  source 1..80: mol_type = other DNA

SEQ ID NO: 130759 - DNA, 80 bp, synthetic construct
  misc_feature 1..80: note = Artificially Synthesized Probe
  source 1..80: mol_type = other DNA
aattttgtatttttaatagagacggggtttctccatgttggtcaggctggtctcgaactcctgacctcaggtgatccacc

SEQ ID NO: 130760 - DNA, 80 bp, synthetic construct
  misc_feature 1..80: note = Artificially Synthesized Probe
  source 1..80: mol_type = other DNA
acatctcctagagggaccataagttcctcataggaagagttttcctttgaccctcagaactgtgagcttcaagctttgtc

SEQ ID NO: 130761 - DNA, 80 bp, synthetic construct
  misc_feature 1..80: note = Artificially Synthesized Probe
  source 1..80: mol_type = other DNA
tcatttgaggggttttgtctgcttaggtcttatttttcaactttcctcgtctttctgactctcctctgccctttccctga

SEQ ID NO: 130762 - DNA, 80 bp, synthetic construct; identical to SEQ ID NO: 41506
  misc_feature 1..80: note = Artificially Synthesized Probe
  source 1..80: mol_type = other DNA

SEQ ID NO: 130763 - DNA, 80 bp, synthetic construct
  misc_feature 1..80: note = Artificially Synthesized Probe
  source 1..80: mol_type = other DNA
tgctgctgctctgggaatcccgctttgagaaccagtgctttggaggcctttggaagtgcaggtctggaacttgcatgacg

SEQ ID NO: 130764 - DNA, 80 bp, synthetic construct
  misc_feature 1..80: note = Artificially Synthesized Probe
  source 1..80: mol_type = other DNA
gatctcagctcactgcaaccttcacctcctaggttcaagtgattttcctgctccagcctcctaagtagctgggattacag

SEQ ID NO: 130765 - DNA, 80 bp, synthetic construct
  misc_feature 1..80: note = Artificially Synthesized Probe
  source 1..80: mol_type = other DNA
acttagctttttaaaacacaaatgaattaggattatgtattatctatgctcaccattgtgcattgctagactgatcatgg

SEQ ID NO: 130766 - DNA, 80 bp, synthetic construct
  misc_feature 1..80: note = Artificially Synthesized Probe
  source 1..80: mol_type = other DNA
aagggtttagtgctttgcttttcatgagatctcaacacatattttacgttcaaattttatctttaaaatccagttacggg

SEQ ID NO: 130767 - DNA, 80 bp, synthetic construct
  misc_feature 1..80: note = Artificially Synthesized Probe
  source 1..80: mol_type = other DNA
tgtagtcccagctactcaggaggctgaggcaggagaatcacttgaacctaggaggcaggggttgcagtgagccagcacca

SEQ ID NO: 130768 - DNA, 80 bp, synthetic construct; identical to SEQ ID NO: 41507
  misc_feature 1..80: note = Artificially Synthesized Probe
  source 1..80: mol_type = other DNA

SEQ ID NO: 130769 - DNA, 80 bp, synthetic construct
  misc_feature 1..80: note = Artificially Synthesized Probe
  source 1..80: mol_type = other DNA
ttgagtgacaggatcattagaagcccaaacctcagcatcagacaatacacatatataacaaacctgcacatgtactcctg

SEQ ID NO: 130770 - DNA, 80 bp, synthetic construct
  misc_feature 1..80: note = Artificially Synthesized Probe
  source 1..80: mol_type = other DNA
tgacctcacaggctcaggtgattctcccacctcagcctcccaagtatctgggactatggatgtgcaccaccatgaccagc

SEQ ID NO: 130771 - DNA, 80 bp, synthetic construct
  misc_feature 1..80: note = Artificially Synthesized Probe
  source 1..80: mol_type = other DNA
gtcaaaacatcacaatatacagaagaattaaaaatatttacagtacaggccaggcacaatggctgtctgttgtaatccca

SEQ ID NO: 130772 - DNA, 80 bp, synthetic construct; identical to SEQ ID NO: 41508
  misc_feature 1..80: note = Artificially Synthesized Probe
  source 1..80: mol_type = other DNA

SEQ ID NO: 130773 - DNA, 80 bp, synthetic construct
  misc_feature 1..80: note = Artificially Synthesized Probe
  source 1..80: mol_type = other DNA
atttccctttataaacctgtcagctgacaatgactatgctttgttttgtttctcatttgtttctgtaagcccatctgttc

SEQ ID NO: 130774 - DNA, 80 bp, synthetic construct
  misc_feature 1..80: note = Artificially Synthesized Probe
  source 1..80: mol_type = other DNA
gaggatttggaattgcagtgtccggaggcagagacaacccccactttgaaaatggagaaacgtcaattgtcatttctgat

SEQ ID NO: 130775 - DNA, 80 bp, synthetic construct
  misc_feature 1..80: note = Artificially Synthesized Probe
  source 1..80: mol_type = other DNA
agagataaggaagaaatggacagagggttatgaggagacctgggtgagtgaagacccacaaactcctatgtaaaggttca

SEQ ID NO: 130776 - DNA, 80 bp, synthetic construct; identical to SEQ ID NO: 41509
  misc_feature 1..80: note = Artificially Synthesized Probe
  source 1..80: mol_type = other DNA

SEQ ID NO: 130777 - DNA, 80 bp, synthetic construct
  misc_feature 1..80: note = Artificially Synthesized Probe
  source 1..80: mol_type = other DNA
ttaatgaggagactttggtttattgattatcttatttgtaagagtgatgtggaagttgggacaatttactataggaaaac

SEQ ID NO: 130778 - DNA, 80 bp, synthetic construct
  misc_feature 1..80: note = Artificially Synthesized Probe
  source 1..80: mol_type = other DNA
accatcaccttccgagttcaagcaattctcttctgcctcagccacctgagtagctgggattacaggtgcctgccaccact

SEQ ID NO: 130779 - DNA, 80 bp, synthetic construct
  misc_feature 1..80: note = Artificially Synthesized Probe
  source 1..80: mol_type = other DNA
gatacatgcctgattcccacaggataacttctcaggacgaagtctaaagttaactgtatggctgcattggataaatagct

SEQ ID NO: 130780 - DNA, 80 bp, synthetic construct
  misc_feature 1..80: note = Artificially Synthesized Probe
  source 1..80: mol_type = other DNA
tgtacctactcgggtcccagctacttgggaggctaaggtgagagaatcctttgagctcgggaagttgaggttgcggtgag

SEQ ID NO: 130781 - DNA, 80 bp, synthetic construct; identical to SEQ ID NO: 41510
  misc_feature 1..80: note = Artificially Synthesized Probe
  source 1..80: mol_type = other DNA

SEQ ID NO: 130782 - DNA, 80 bp, synthetic construct
  misc_feature 1..80: note = Artificially Synthesized Probe
  source 1..80: mol_type = other DNA
tcttcccagatgatttccatttagacactcagaattgagctgtatggcccccagttcctttctttggaagatctcaggcc

SEQ ID NO: 130783 - DNA, 80 bp, synthetic construct
  misc_feature 1..80: note = Artificially Synthesized Probe
  source 1..80: mol_type = other DNA
atgacccatttttatttcttgtttacagagaaaatgacagagtggtcatggtcaatggcacccccatggaggatgtgctt

SEQ ID NO: 130784 - DNA, 80 bp, synthetic construct; identical to SEQ ID NO: 41511
  misc_feature 1..80: note = Artificially Synthesized Probe
  source 1..80: mol_type = other DNA

SEQ ID NO: 130785 - DNA, 80 bp, synthetic construct
  misc_feature 1..80: note = Artificially Synthesized Probe
  source 1..80: mol_type = other DNA
aaaactttcagctcaaaaactcacttgtaaaggcccaagcaaggtatattatatcttcatagactaagagtttcattaga

SEQ ID NO: 130786 - DNA, 80 bp, synthetic construct; identical to SEQ ID NO: 41415
  misc_feature 1..80: note = Artificially Synthesized Probe
  source 1..80: mol_type = other DNA

SEQ ID NO: 130787 - DNA, 80 bp, synthetic construct
  misc_feature 1..80: note = Artificially Synthesized Probe
  source 1..80: mol_type = other DNA
gtgcttaggggcaatgctagtaggcatatacccacatatatggttgtgtgtgtgtgtgtgtattttttttttttttttga

SEQ ID NO: 130788 - DNA, 80 bp, synthetic construct
  misc_feature 1..80: note = Artificially Synthesized Probe
  source 1..80: mol_type = other DNA
agtagagacggggtttcaccatgttggtcaggctggtcccgaactcccaacttcaggtgatccgccagccttggcctccc

SEQ ID NO: 130789 - DNA, 80 bp, synthetic construct
  misc_feature 1..80: note = Artificially Synthesized Probe
  source 1..80: mol_type = other DNA
tacttggtctctgtatgtatataaacactcatgtctttctgggcaaccatgcgaaggaaagttacagacatgacagttca

SEQ ID NO: 130790 - DNA, 80 bp, synthetic construct; identical to SEQ ID NO: 41512
  misc_feature 1..80: note = Artificially Synthesized Probe
  source 1..80: mol_type = other DNA

SEQ ID NO: 130791 - DNA, 80 bp, synthetic construct
  misc_feature 1..80: note = Artificially Synthesized Probe
  source 1..80: mol_type = other DNA
atcattatctctttagttccttttaatctagaagggttcctctttccccttgcccctctaccccaccccccactttaaaa

SEQ ID NO: 130792 - DNA, 80 bp, synthetic construct
  misc_feature 1..80: note = Artificially Synthesized Probe
  source 1..80: mol_type = other DNA
taatcccagctatcgggagggtgaggcacgagaatcgcttgaacctgggaggcggaggttgcagtgagctgagtacagtc

SEQ ID NO: 130793 - DNA, 80 bp, synthetic construct
  misc_feature 1..80: note = Artificially Synthesized Probe
  source 1..80: mol_type = other DNA
tcagatgagattgggcacgttcaggatggtatggctgtagacatgatttgtaaaattcaaatcagtgtatttggaatatc

SEQ ID NO: 130794 - DNA, 80 bp, synthetic construct; identical to SEQ ID NO: 41513
  misc_feature 1..80: note = Artificially Synthesized Probe
  source 1..80: mol_type = other DNA

SEQ ID NO: 130795 - DNA, 80 bp, synthetic construct
  misc_feature 1..80: note = Artificially Synthesized Probe
  source 1..80: mol_type = other DNA
ccggatgaggaacctgaaccttagtgagtcggcagggatacggttttcctgaaaccagaaccagggctcttaaccactgc

SEQ ID NO: 130796 - DNA, 80 bp, synthetic construct
  misc_feature 1..80: note = Artificially Synthesized Probe
  source 1..80: mol_type = other DNA
tgtatttgcctgctcagcttaatagctttaggcatgcagtcatcttagcataacttgatataagccgattctgagagtgg

SEQ ID NO: 130797 - DNA, 80 bp, synthetic construct
  misc_feature 1..80: note = Artificially Synthesized Probe
  source 1..80: mol_type = other DNA
agaagtttccggagtggctacagcgagaggagccggctgaacagccatggggggcgcagccgcagctgggaggacagccc

SEQ ID NO: 130798 - DNA, 80 bp, synthetic construct
  misc_feature 1..80: note = Artificially Synthesized Probe
  source 1..80: mol_type = other DNA
tttgggccatcccgggaccgggaccgtgaccgcagccgcggccggagcattgaccaggactacgagcgagcctatcaccg

SEQ ID NO: 130799 - DNA, 80 bp, synthetic construct
  misc_feature 1..80: note = Artificially Synthesized Probe
  source 1..80: mol_type = other DNA
acttcagcctcgacctcttggactcaagcagtcctcccacctcagcctctggagtacctggaactacaggcgaatgccac

SEQ ID NO: 130800 - DNA, 80 bp, synthetic construct
  misc_feature 1..80: note = Artificially Synthesized Probe
  source 1..80: mol_type = other DNA
aatttaaatgtcagctgggtgcttgcctataatcccagctactcggaggttgaggcaggaaaatcgcttgaacccaggag

SEQ ID NO: 130801 - DNA, 80 bp, synthetic construct; identical to SEQ ID NO: 41582
  misc_feature 1..80: note = Artificially Synthesized Probe
  source 1..80: mol_type = other DNA

SEQ ID NO: 130802 - DNA, 80 bp, synthetic construct
  misc_feature 1..80: note = Artificially Synthesized Probe
  source 1..80: mol_type = other DNA
aagtagctgggactacaggcatgtgccaccacgcctggctaatttttgtatttttagtagagacagggtttcactatgtt

SEQ ID NO: 130803 - DNA, 80 bp, synthetic construct
  misc_feature 1..80: note = Artificially Synthesized Probe
  source 1..80: mol_type = other DNA
agagtagctatgaccagatctgggccactgcccacggtttaagggttacagactttctgtttggggtgaagaaaagtttt

SEQ ID NO: 130804 - DNA, 80 bp, synthetic construct
  misc_feature 1..80: note = Artificially Synthesized Probe
  source 1..80: mol_type = other DNA
tcagtaatcaataggtgaatcaagacaaattgtgttatccatacaaatgagttctattaggtaataaaatgcgtaaattt

SEQ ID NO: 130805 - DNA, 80 bp, synthetic construct; identical to SEQ ID NO: 41572
  misc_feature 1..80: note = Artificially Synthesized Probe
  source 1..80: mol_type = other DNA

SEQ ID NO: 130806 - DNA, 80 bp, synthetic construct; identical to SEQ ID NO: 41583
  misc_feature 1..80: note = Artificially Synthesized Probe
  source 1..80: mol_type = other DNA

SEQ ID NO: 130807 - DNA, 80 bp, synthetic construct
  misc_feature 1..80: note = Artificially Synthesized Probe
  source 1..80: mol_type = other DNA
tgttcctctcttttatattttcattgatatgtgaacttcttgttttttagaaaaatatgaattaaggccgggcacggtga

SEQ ID NO: 130808 - DNA, 80 bp, synthetic construct
  misc_feature 1..80: note = Artificially Synthesized Probe
  source 1..80: mol_type = other DNA
tcccagctactcgggtggctgaggcagcagaatcgcttgagcccaggaggcagaagttgcagtgagcagagatcgtgcca

SEQ ID NO: 130809 - DNA, 80 bp, synthetic construct
  misc_feature 1..80: note = Artificially Synthesized Probe
  source 1..80: mol_type = other DNA
caggaagtggcctgttcccactgtgcagttcagttacacgtctgtctccccttaaggctcgctatttatttatttattta

SEQ ID NO: 130810 - DNA, 80 bp, synthetic construct
  misc_feature 1..80: note = Artificially Synthesized Probe
  source 1..80: mol_type = other DNA
atctctactaaaaatacaaaactagccgggcgtggtggcgcatgcctgtaatcccagctactcggaaggctgaggcagga

SEQ ID NO: 130811 - DNA, 80 bp, synthetic construct; identical to SEQ ID NO: 41584
  misc_feature 1..80: note = Artificially Synthesized Probe
  source 1..80: mol_type = other DNA

SEQ ID NO: 130812 - DNA, 80 bp, synthetic construct
  misc_feature 1..80: note = Artificially Synthesized Probe
  source 1..80: mol_type = other DNA
tggccaacatggtgaaaccccgtctctactaaaaatacaaaaaaattagctgggcatggtggcgggtgcctgtggtccca

SEQ ID NO: 130813 - DNA, 80 bp, synthetic construct
  misc_feature 1..80: note = Artificially Synthesized Probe
  source 1..80: mol_type = other DNA
aggagcttgaggcaggagaatcgcttgagcccgagaggcagaggtggcagtgagcccagatcacgccactgcactccagc

SEQ ID NO: 130814 - DNA, 80 bp, synthetic construct
  misc_feature 1..80: note = Artificially Synthesized Probe
  source 1..80: mol_type = other DNA
aggctctatatatatgcacacacacatatatatcatatacatataatgtataatgtgcgtatatatgtgtgtacgtacac

SEQ ID NO: 130815 - DNA, 80 bp, synthetic construct; identical to SEQ ID NO: 41585
  misc_feature 1..80: note = Artificially Synthesized Probe
  source 1..80: mol_type = other DNA

SEQ ID NO: 130816 - DNA, 80 bp, synthetic construct
  misc_feature 1..80: note = Artificially Synthesized Probe
  source 1..80: mol_type = other DNA
ccgcaggcatgcgccaccatacctggctaatgttttagttctatagagacagggtctcactatgttgcccaagctgatct

SEQ ID NO: 130817 - DNA, 80 bp, synthetic construct
  misc_feature 1..80: note = Artificially Synthesized Probe
  source 1..80: mol_type = other DNA
acccccagcctggagtgcagtggcatgatctcggctcactgcaacctccgcctctcgggttcaagcaattctcctgcctc

SEQ ID NO: 130818 - DNA, 80 bp, synthetic construct
  misc_feature 1..80: note = Artificially Synthesized Probe
  source 1..80: mol_type = other DNA
aaagggtaaggagttcactgatgatggagttaggtccctagaaacctgtcgtaaagttggaaacttagaagtcaaaccac

SEQ ID NO: 130819 - DNA, 80 bp, synthetic construct
  misc_feature 1..80: note = Artificially Synthesized Probe
  source 1..80: mol_type = other DNA
aatgtggtctttctcattgaaaatattttatgtaagttttttgaactgcagttgaccacagatagctaaaactttggaaa

SEQ ID NO: 130820 - DNA, 80 bp, synthetic construct; identical to SEQ ID NO: 41586
  misc_feature 1..80: note = Artificially Synthesized Probe
  source 1..80: mol_type = other DNA

SEQ ID NO: 130821 - DNA, 80 bp, synthetic construct
  misc_feature 1..80: note = Artificially Synthesized Probe
  source 1..80: mol_type = other DNA
ctaaaaatacaaaacttagctgggaatggtggtgtgcgcctgtaatcccagctactcaggaggctgaggcagaagaatca

SEQ ID NO: 130822 - DNA, 80 bp, synthetic construct
  misc_feature 1..80: note = Artificially Synthesized Probe
  source 1..80: mol_type = other DNA
agataattaacacccatgtaaacacaaccaatatcaaacatacgtcattacccatcacatcactgacactcaggtgtgcc

SEQ ID NO: 130823 - DNA, 80 bp, synthetic construct; identical to SEQ ID NO: 41587
  misc_feature 1..80: note = Artificially Synthesized Probe
  source 1..80: mol_type = other DNA

SEQ ID NO: 130824 - DNA, 80 bp, synthetic construct
  misc_feature 1..80: note = Artificially Synthesized Probe
  source 1..80: mol_type = other DNA
ccatgcccggctaatttttgtatttttagtaaagacagggtttcaccatgttggccaggctggtcttgaactcctggtct

SEQ ID NO: 130825 - DNA, 80 bp, synthetic construct
  misc_feature 1..80: note = Artificially Synthesized Probe
  source 1..80: mol_type = other DNA
aggagaagggaggggtgcactgggagggtgggtgtaggagagggaagggtgccctgagaaggtgggggttaggagaaggg

SEQ ID NO: 130826 - DNA, 80 bp, synthetic construct
  misc_feature 1..80: note = Artificially Synthesized Probe
  source 1..80: mol_type = other DNA
gggggtaggagagggaagggatgccctgagaaggtgggggttggagaggggaggggtgctctgggagggtgggggtagga

SEQ ID NO: 130827 - DNA, 80 bp, synthetic construct
  misc_feature 1..80: note = Artificially Synthesized Probe
  source 1..80: mol_type = other DNA
aggggttgtaggaaagaggaggggtgcactgggagggtgggggtaggagaggggaggggtgcactgggagggtgtgggta

SEQ ID NO: 130828 - DNA, 80 bp, synthetic construct
  misc_feature 1..80: note = Artificially Synthesized Probe
  source 1..80: mol_type = other DNA
tgtgagccactgcacccggcctctttttttttttttttttttttttttgtgagacagagtctctgtcccccaggctggag

SEQ ID NO: 130829 - DNA, 80 bp, synthetic construct; identical to SEQ ID NO: 41588
  misc_feature 1..80: note = Artificially Synthesized Probe
  source 1..80: mol_type = other DNA

SEQ ID NO: 130830 - DNA, 80 bp, synthetic construct
  misc_feature 1..80: note = Artificially Synthesized Probe
  source 1..80: mol_type = other DNA
tgcagtgcggggcttgcagtgtgtaattctgtgttgaggcaaattaaccacccagggtgttaacaactcacaactttaat

SEQ ID NO: 130831 - DNA, 80 bp, synthetic construct
  misc_feature 1..80: note = Artificially Synthesized Probe
  source 1..80: mol_type = other DNA
cacttcagcaacatcaacccccctgacgatctcttctacagaaaacgttcccatcagaaaagtctgttttttttgttttt

SEQ ID NO: 130832 - DNA, 80 bp, synthetic construct
  misc_feature 1..80: note = Artificially Synthesized Probe
  source 1..80: mol_type = other DNA
tacaggtgcacaccactacgcccggctaattttgtatttttagtagagatggggtttctccaggttagccacgctggtct

SEQ ID NO: 130833 - DNA, 80 bp, synthetic construct; identical to SEQ ID NO: 41589
  misc_feature 1..80: note = Artificially Synthesized Probe
  source 1..80: mol_type = other DNA

SEQ ID NO: 130834 - DNA, 80 bp, synthetic construct
  misc_feature 1..80: note = Artificially Synthesized Probe
  source 1..80: mol_type = other DNA
gagttccttgttctgtcctgaggtcctagctaggtgagcacgtcatcggctagatgtccaggcaacaacagaagtgatcg

SEQ ID NO: 130835 - DNA, 80 bp, synthetic construct
  misc_feature 1..80: note = Artificially Synthesized Probe
  source 1..80: mol_type = other DNA
gatgaaaaagatgtaatccctttccttgaggagcttaaagtctagtggggacactgctgacgcaaaaagcaattcttttt

SEQ ID NO: 130836 - DNA, 80 bp, synthetic construct; identical to SEQ ID NO: 41590
  misc_feature 1..80: note = Artificially Synthesized Probe
  source 1..80: mol_type = other DNA

SEQ ID NO: 130837 - DNA, 80 bp, synthetic construct
  misc_feature 1..80: note = Artificially Synthesized Probe
  source 1..80: mol_type = other DNA
aaatacctgaacttggtgatcagcagcttcctggtaagagctcaggaattgggcgagtgggctcaagcatctacactaag

SEQ ID NO: 130838 - DNA, 80 bp, synthetic construct
  misc_feature 1..80: note = Artificially Synthesized Probe
  source 1..80: mol_type = other DNA
agggtctaacagcacatttgggtgtctcaagtcacgcacttggcccttttccaagtgtactttacttcctttcattgctg

SEQ ID NO: 130839 - DNA, 80 bp, synthetic construct
  misc_feature 1..80: note = Artificially Synthesized Probe
  source 1..80: mol_type = other DNA
tggtctcaaactcctgacttctggtgatccacccaccgtggcctcccaaagtgctgggattgcaggtgtgagccaccgtg

SEQ ID NO: 130840 - DNA, 80 bp, synthetic construct
  misc_feature 1..80: note = Artificially Synthesized Probe
  source 1..80: mol_type = other DNA
gtaccaggcaggggcatccaacttaaggtgtcatggaagcacatggaggaacctaatcctatctggcagaagcaaaacga

SEQ ID NO: 130841 - DNA, 80 bp, synthetic construct; identical to SEQ ID NO: 41591
  misc_feature 1..80: note = Artificially Synthesized Probe
  source 1..80: mol_type = other DNA

SEQ ID NO: 130842 - DNA, 80 bp, synthetic construct
  misc_feature 1..80: note = Artificially Synthesized Probe
  source 1..80: mol_type = other DNA
acgtagaggtcacccaggcgtgtgtgtgtgcgcgcccccacgcccctgcccacaggcctgcattgaaggcgcttccgctc

SEQ ID NO: 130843 - DNA, 80 bp, synthetic construct; identical to SEQ ID NO: 41573
  misc_feature 1..80: note = Artificially Synthesized Probe
  source 1..80: mol_type = other DNA

SEQ ID NO: 130844 - DNA, 80 bp, synthetic construct; identical to SEQ ID NO: 41571
  misc_feature 1..80: note = Artificially Synthesized Probe
  source 1..80: mol_type = other DNA

SEQ ID NO: 130845 - DNA, 80 bp, synthetic construct
  misc_feature 1..80: note = Artificially Synthesized Probe
  source 1..80: mol_type = other DNA
ggtgtggtggcgggtgcctgtaatcccagccactcaggaggctgaagcaggagaatcgcttgaacttgggaggcagaggg

SEQ ID NO: 130846 - DNA, 80 bp, synthetic construct
  misc_feature 1..80: note = Artificially Synthesized Probe
  source 1..80: mol_type = other DNA
actcatggcagcaggtgaagagggagcaggcgagtcacatagtgagagcaggagcaggcgagagagaggccagaggtgcc

SEQ ID NO: 130847 - DNA, 80 bp, synthetic construct
  misc_feature 1..80: note = Artificially Synthesized Probe
  source 1..80: mol_type = other DNA
aaactgtgtggacagaggtgatgctcctctacttgttgaactcttgaacactagtgaagagaatgctggtgtattagtct

SEQ ID NO: 130848 - DNA, 80 bp, synthetic construct
  misc_feature 1..80: note = Artificially Synthesized Probe
  source 1..80: mol_type = other DNA
cttctcactgggtccttacagggcctttttctttgagccagtgtagagagctctgttctttcttcctctttttataagca

SEQ ID NO: 130849 - DNA, 80 bp, synthetic construct; identical to SEQ ID NO: 41574
  misc_feature 1..80: note = Artificially Synthesized Probe
  source 1..80: mol_type = other DNA

SEQ ID NO: 130850 - DNA, 80 bp, synthetic construct
  misc_feature 1..80: note = Artificially Synthesized Probe
  source 1..80: mol_type = other DNA
aaacccccgtctctactaaaaatacaaaaattagctgggtgtggtggcacatgcctgtaatcccagctactcaggaggct

SEQ ID NO: 130851 - DNA, 80 bp, synthetic construct
  misc_feature 1..80: note = Artificially Synthesized Probe
  source 1..80: mol_type = other DNA
gcttcaacctacagatttggaggaaacactatttagtccacaataactggagaagttgaatttagaagatgggggttggg

SEQ ID NO: 130852 - DNA, 80 bp, synthetic construct
  misc_feature 1..80: note = Artificially Synthesized Probe
  source 1..80: mol_type = other DNA
tgtgcctgtagtcccagctactcggaggctaaggcaggaggatcgcttgagtgcatgggttgtaggttacagtaagctat

SEQ ID NO: 130853 - DNA, 80 bp, synthetic construct; identical to SEQ ID NO: 41575
  misc_feature 1..80: note = Artificially Synthesized Probe
  source 1..80: mol_type = other DNA

SEQ ID NO: 130854 - DNA, 80 bp, synthetic construct
  misc_feature 1..80: note = Artificially Synthesized Probe
  source 1..80: mol_type = other DNA
cttgtgtgtgcatgcctaacatccaaaactagatataaattctttaaacttttcattagttggccaggcacggtgactcg

SEQ ID NO: 130855 - DNA, 80 bp, synthetic construct
  misc_feature 1..80: note = Artificially Synthesized Probe
  source 1..80: mol_type = other DNA
gggatacctaaaggggaagtttgtttataattcgtacccactccttgtagaaaggattcaagacagccgatgatgaaaac

SEQ ID NO: 130856 - DNA, 80 bp, synthetic construct
  misc_feature 1..80: note = Artificially Synthesized Probe
  source 1..80: mol_type = other DNA
aacagctgcagagggctccaggcagacggagttccagagcgaacggtcatacagataattcctatcccaaaaaataagga

SEQ ID NO: 130857 - DNA, 80 bp, synthetic construct; identical to SEQ ID NO: 41576
  misc_feature 1..80: note = Artificially Synthesized Probe
  source 1..80: mol_type = other DNA

SEQ ID NO: 130858 - DNA, 80 bp, synthetic construct
  misc_feature 1..80: note = Artificially Synthesized Probe
  source 1..80: mol_type = other DNA
aagtgacaaagcaaatcagggctccaagtaaagccaggccacctgacaacagagcagtaagcacctgcggagggaggaga

SEQ ID NO: 130859 - DNA, 80 bp, synthetic construct
  misc_feature 1..80: note = Artificially Synthesized Probe
  source 1..80: mol_type = other DNA
gagaattctgtccatggcaccccctttgaagcataacccatggtggggaggccgtgaggggtttctaggagagaaaggac

SEQ ID NO: 130860 - DNA, 80 bp, synthetic construct
  misc_feature 1..80: note = Artificially Synthesized Probe
  source 1..80: mol_type = other DNA
tgcattttcaaaagttccaggttcccaactctgattcttctctatttcaaatcaaggataaaaaaaaggaagggagggaa

SEQ ID NO: 130861 - DNA, 80 bp, synthetic construct; identical to SEQ ID NO: 41577
  misc_feature 1..80: note = Artificially Synthesized Probe
  source 1..80: mol_type = other DNA

SEQ ID NO: 130862 - DNA, 80 bp, synthetic construct
  misc_feature 1..80: note = Artificially Synthesized Probe
  source 1..80: mol_type = other DNA
aagtagctgggactacaagcatgcgccaccacacccagctaatttttgtatttttagtagaaatggggtttcactgtgtt

SEQ ID NO: 130863 - DNA, 80 bp, synthetic construct
  misc_feature 1..80: note = Artificially Synthesized Probe
  source 1..80: mol_type = other DNA
attttaaaaatgtgaataacacctacatagcgtttttctgcagagtcatggagtcattctcccactgaggtcaagctggt

SEQ ID NO: 130864 - DNA, 80 bp, synthetic construct
  misc_feature 1..80: note = Artificially Synthesized Probe
  source 1..80: mol_type = other DNA
cccgccatcctgaatcagaaactctggggagggagcccagcaatccgtgttccggcaaaagccctccaggtgattctcat

SEQ ID NO: 130865 - DNA, 80 bp, synthetic construct
  misc_feature 1..80: note = Artificially Synthesized Probe
  source 1..80: mol_type = other DNA
acttgggaggctgaggcaggagaattgcttgaaccagggagtcggagcttgcagtgagccgagatcacaccactgcactc

SEQ ID NO: 130866 - DNA, 80 bp, synthetic construct
  misc_feature 1..80: note = Artificially Synthesized Probe
  source 1..80: mol_type = other DNA
ccatctcggctcactgcaagctccgcctcccgggttcaagagattttcctgcctcagcctcctgagttgctgggattaca

SEQ ID NO: 130867 - DNA, 80 bp, synthetic construct; identical to SEQ ID NO: 41578
  misc_feature 1..80: note = Artificially Synthesized Probe
  source 1..80: mol_type = other DNA

SEQ ID NO: 130868 - DNA, 80 bp, synthetic construct
  misc_feature 1..80: note = Artificially Synthesized Probe
  source 1..80: mol_type = other DNA
ctgtaaaatggaggggttagattagaatctagtgattagatgatctctggaaaactttcctgttctaagaaaatattagt

SEQ ID NO: 130869 - DNA, 80 bp, synthetic construct
  misc_feature 1..80: note = Artificially Synthesized Probe
  source 1..80: mol_type = other DNA
cccttgacttgatcagctcccattttacagatgaaagcctgaaactggaaagatgaagcaacttgcccaagaacttagcg

SEQ ID NO: 130870 - DNA, 80 bp, synthetic construct
  misc_feature 1..80: note = Artificially Synthesized Probe
  source 1..80: mol_type = other DNA
cgtatctccagcccatcaaggagatgaggatagctgcagtgagtacctgcaggagagagaagaatgttgagatggggaaa

SEQ ID NO: 130871 - DNA, 80 bp, synthetic construct; identical to SEQ ID NO: 41579
  misc_feature 1..80: note = Artificially Synthesized Probe
  source 1..80: mol_type = other DNA

SEQ ID NO: 130872 - DNA, 80 bp, synthetic construct
  misc_feature 1..80: note = Artificially Synthesized Probe
  source 1..80: mol_type = other DNA
cccagttaggaaggaggagtgccacgttggccccagcagcaaacagggctgcagtcccaaggctcagtcccaggatacgg

SEQ ID NO: 130873 - DNA, 80 bp, synthetic construct
  misc_feature 1..80: note = Artificially Synthesized Probe
  source 1..80: mol_type = other DNA
gtcagaccaatgagagccaagcaacctgcttaaaaactctgctccttaggaatcttccccagtgactaggatttaattgt

SEQ ID NO: 130874 - DNA, 80 bp, synthetic construct; identical to SEQ ID NO: 41580
  misc_feature 1..80: note = Artificially Synthesized Probe
  source 1..80: mol_type = other DNA

SEQ ID NO: 130875 - DNA, 80 bp, synthetic construct
  misc_feature 1..80: note = Artificially Synthesized Probe
  source 1..80: mol_type = other DNA
aaaattagctgggcacggtggtgggtgcctgtaatcccagctactggggagactgaggcaggagaattgcttgaacccgg

SEQ ID NO: 130876 - DNA, 80 bp, synthetic construct
  misc_feature 1..80: note = Artificially Synthesized Probe
  source 1..80: mol_type = other DNA
atgtgagacaagcccaggcaagcttcctggatgttgtatgcaggaataggatgtgctctctggacttggagacttcctgc

SEQ ID NO: 130877 - DNA, 80 bp, synthetic construct
  misc_feature 1..80: note = Artificially Synthesized Probe
  source 1..80: mol_type = other DNA
gaattaacaggtgagtttagcaacgtcatagaataaaagattaatatacaaaaattatattgtatttctatatacaagca

SEQ ID NO: 130878 - DNA, 80 bp, synthetic construct
  misc_feature 1..80: note = Artificially Synthesized Probe
  source 1..80: mol_type = other DNA
ggagacatataccatgttcctgaaccagaagactcaaaatagttaacatgttctccctaaattgatgcaaagatttaaag

SEQ ID NO: 130879 - DNA, 80 bp, synthetic construct; identical to SEQ ID NO: 41581
  misc_feature 1..80: note = Artificially Synthesized Probe
  source 1..80: mol_type = other DNA

SEQ ID NO: 130880 - DNA, 80 bp, synthetic construct
  misc_feature 1..80: note = Artificially Synthesized Probe
  source 1..80: mol_type = other DNA
cctcagcctcccaagtagctgggattacaggtgcccgccaccatgcccggtaattttttgtatttttagtagagacgggg

SEQ ID NO: 130881 - DNA, 80 bp, synthetic construct
  misc_feature 1..80: note = Artificially Synthesized Probe
  source 1..80: mol_type = other DNA
tcttccacaaatggtgccggaacaatgcacatgcaaaacaaaactgccttcactattacttcacaacatattcaaaaatt

SEQ ID NO: 130882 - DNA, 80 bp, synthetic construct
  misc_feature 1..80: note = Artificially Synthesized Probe
  source 1..80: mol_type = other DNA
ttcgaaagtacaacgctttattgaatcttaataaattgcaatttttttcttggctgttcaaagtaatgtgtttttcattt

SEQ ID NO: 130883 - DNA, 80 bp, synthetic construct; identical to SEQ ID NO: 41603
  misc_feature 1..80: note = Artificially Synthesized Probe
  source 1..80: mol_type = other DNA

SEQ ID NO: 130884 - DNA, 80 bp, synthetic construct
  misc_feature 1..80: note = Artificially Synthesized Probe
  source 1..80: mol_type = other DNA
aggcggggaagcagagcagcgtgaggaagacggtgctcatgtgtgaggccagccagggccggcgcggcgcctggcagttg

SEQ ID NO: 130885 - DNA, 80 bp, synthetic construct
  misc_feature 1..80: note = Artificially Synthesized Probe
  source 1..80: mol_type = other DNA
aggaagacagaagcctgccggtcacttgcacgcaaacgggtgatgccaacagcacctccatctgctgaaggtcgctgcca

SEQ ID NO: 130886 - DNA, 80 bp, synthetic construct
  misc_feature 1..80: note = Artificially Synthesized Probe
  source 1..80: mol_type = other DNA
tgaggtgggcgatcacaaggtcaggagatcaagaccatcctggctaacacagtgaaaccccatctctactaaaaatacaa

SEQ ID NO: 130887 - DNA, 80 bp, synthetic construct; identical to SEQ ID NO: 41604
  misc_feature 1..80: note = Artificially Synthesized Probe
  source 1..80: mol_type = other DNA

SEQ ID NO: 130888 - DNA, 80 bp, synthetic construct
  misc_feature 1..80: note = Artificially Synthesized Probe
  source 1..80: mol_type = other DNA
ggtcagccgtcccttgggcggagggacaggccagggcagccccgagccgccagccccactccactcaggtggggagggtt

SEQ ID NO: 130889 - DNA, 80 bp, synthetic construct; identical to SEQ ID NO: 41593
  misc_feature 1..80: note = Artificially Synthesized Probe
  source 1..80: mol_type = other DNA

SEQ ID NO: 130890 - DNA, 80 bp, synthetic construct
  misc_feature 1..80: note = Artificially Synthesized Probe
  source 1..80: mol_type = other DNA
ccagcctggggagggggtggcagttcaggggctgctccagtgccctcccctccccgagatcaggctggttccagaccacg

SEQ ID NO: 130891 - DNA, 80 bp, synthetic construct
  misc_feature 1..80: note = Artificially Synthesized Probe
  source 1..80: mol_type = other DNA
gcagaggaccctcaccaggtcagagtctgcccataaatcagctccaggacattccgggcaatgtcaaactccggcttccg

SEQ ID NO: 130892 - DNA, 80 bp, synthetic construct; identical to SEQ ID NO: 41605
  misc_feature 1..80: note = Artificially Synthesized Probe
  source 1..80: mol_type = other DNA

SEQ ID NO: 130893 - DNA, 80 bp, synthetic construct
  misc_feature 1..80: note = Artificially Synthesized Probe
  source 1..80: mol_type = other DNA
gtagctgggactacaggcacacaccaccaggcccagctaatttttatttatttttatttttatttctttagagacaaggt

SEQ ID NO: 130894 - DNA, 80 bp, synthetic construct
  misc_feature 1..80: note = Artificially Synthesized Probe
  source 1..80: mol_type = other DNA
gaagaaaacaccaagaggaaaaaaacagctgaagtgccagaacccacagcggaatacctggaacattttttaaatgttcc

SEQ ID NO: 130895 - DNA, 80 bp, synthetic construct
  misc_feature 1..80: note = Artificially Synthesized Probe
  source 1..80: mol_type = other DNA
cgggctggagtgcagaggcgcaatctcagctcactacaacctccgcttcccaggttcaagcgattctcatgcctctgcct

SEQ ID NO: 130896 - DNA, 80 bp, synthetic construct; identical to SEQ ID NO: 41606
  misc_feature 1..80: note = Artificially Synthesized Probe
  source 1..80: mol_type = other DNA

SEQ ID NO: 130897 - DNA, 80 bp, synthetic construct
  misc_feature 1..80: note = Artificially Synthesized Probe
  source 1..80: mol_type = other DNA
cagcaacatgaggacgaagtccatcaccaggaaccggtacagctcctggcccacaaaatcctcccagcactggccctgca

SEQ ID NO: 130898 - DNA, 80 bp, synthetic construct
  misc_feature 1..80: note = Artificially Synthesized Probe
  source 1..80: mol_type = other DNA
gcctcatcctaagtaggtttggatacacccggagctaaacaaccagtatcagctccagcaccaaatgatgttttcatgtg

SEQ ID NO: 130899 - DNA, 80 bp, synthetic construct
  misc_feature 1..80: note = Artificially Synthesized Probe
  source 1..80: mol_type = other DNA
gcaggaccagcagcacagcctcctggccagcagcctctggactctgcaggggtgcagggagcggtgtcatggaagccccc

SEQ ID NO: 130900 - DNA, 80 bp, synthetic construct; identical to SEQ ID NO: 41607
  misc_feature 1..80: note = Artificially Synthesized Probe
  source 1..80: mol_type = other DNA

SEQ ID NO: 130901 - DNA, 80 bp, synthetic construct
  misc_feature 1..80: note = Artificially Synthesized Probe
  source 1..80: mol_type = other DNA
taaatttttttttaaatggcagtttcagacctgccctttgtggtttgtgtttttgtttgttaatacagggtctctgtctc

SEQ ID NO: 130902 - DNA, 80 bp, synthetic construct
  misc_feature 1..80: note = Artificially Synthesized Probe
  source 1..80: mol_type = other DNA
catgaactccgagaagacgtggacggccacggcgcagcccagcgcggtccccagacacagcagccacacaagccccagca

SEQ ID NO: 130903 - DNA, 80 bp, synthetic construct
  misc_feature 1..80: note = Artificially Synthesized Probe
  source 1..80: mol_type = other DNA
cagacgtgcagacacagcacaacacacacaacacacatgagacacaccaggaggcttgaaccaggacagagggccagttc

SEQ ID NO: 130904 - DNA, 80 bp, synthetic construct
  misc_feature 1..80: note = Artificially Synthesized Probe
  source 1..80: mol_type = other DNA
caggggccttgctcagaggtcctttcctgttccctgtggatgtgggtggcccccagtgaccagaagcccccctacacgga

SEQ ID NO: 130905 - DNA, 80 bp, synthetic construct
  misc_feature 1..80: note = Artificially Synthesized Probe
  source 1..80: mol_type = other DNA
gtgacagtcctcacccactggcctcctatggccaccaaccaagctaacgccagccagggagcatgtgccagctggggcct

SEQ ID NO: 130906 - DNA, 80 bp, synthetic construct; identical to SEQ ID NO: 41608
  misc_feature 1..80: note = Artificially Synthesized Probe
  source 1..80: mol_type = other DNA

SEQ ID NO: 130907 - DNA, 80 bp, synthetic construct
  misc_feature 1..80: note = Artificially Synthesized Probe
  source 1..80: mol_type = other DNA
gtagctctccccgaaagagtgagccatgctggggagaagcagacacagacatggcaaccaacaagctgacgggcagaggc

SEQ ID NO: 130908 - DNA, 80 bp, synthetic construct
  misc_feature 1..80: note = Artificially Synthesized Probe
  source 1..80: mol_type = other DNA
gaagagggggcagggctgcattcaccgcggacttggctggctgcctcccagcgagacatggaccagaagatgctgggctc

SEQ ID NO: 130909 - DNA, 80 bp, synthetic construct
  misc_feature 1..80: note = Artificially Synthesized Probe
  source 1..80: mol_type = other DNA
caccactaagcctcatggattgtcccagcccattcagtggtccatcttctcccagagacagcaagcccccctaggacatt

SEQ ID NO: 130910 - DNA, 80 bp, synthetic construct
  misc_feature 1..80: note = Artificially Synthesized Probe
  source 1..80: mol_type = other DNA
cctcagagctcacatacgtacctctctcacgagtgaactcagattttccattgttttgctttattctatcatttgctttg

SEQ ID NO: 130911 - DNA, 80 bp, synthetic construct; identical to SEQ ID NO: 41609
  misc_feature 1..80: note = Artificially Synthesized Probe
  source 1..80: mol_type = other DNA

SEQ ID NO: 130912 - DNA, 80 bp, synthetic construct
  misc_feature 1..80: note = Artificially Synthesized Probe
  source 1..80: mol_type = other DNA
attgagtgggtggatgggggggtgaattgagtgggtagataggtaggtggatggctgaatgggtaaatgggtgggtgaat

SEQ ID NO: 130913 - DNA, 80 bp, synthetic construct
  misc_feature 1..80: note = Artificially Synthesized Probe
  source 1..80: mol_type = other DNA
gggtctcaccatgttgcccaggctgatctcgaactgctgggaatacaggcatgagccaggtgcccagcctttgttgttgt

SEQ ID NO: 130914 - DNA, 80 bp, synthetic construct
  misc_feature 1..80: note = Artificially Synthesized Probe
  source 1..80: mol_type = other DNA
atgggtcgaaagatgaatggatggatgagtggagctcggagcctgggtcatgaggtggaggcattacctgtacaccaggg

SEQ ID NO: 130915 - DNA, 80 bp, synthetic construct
  misc_feature 1..80: note = Artificially Synthesized Probe
  source 1..80: mol_type = other DNA
ggtgtgggtgaagcaaccctgccacagggagatccagccgagtcagggactttccccacgccccacccgaccctcaggcc

SEQ ID NO: 130916 - DNA, 80 bp, synthetic construct; identical to SEQ ID NO: 41610
  misc_feature 1..80: note = Artificially Synthesized Probe
  source 1..80: mol_type = other DNA

SEQ ID NO: 130917 - DNA, 80 bp, synthetic construct
  misc_feature 1..80: note = Artificially Synthesized Probe
  source 1..80: mol_type = other DNA
aaagccagcagggtcttgagaaagaggaagtaggagagcacgctggagccgaactggcccccgatgcgcttcagggcgta

SEQ ID NO: 130918 - DNA, 80 bp, synthetic construct
  misc_feature 1..80: note = Artificially Synthesized Probe
  source 1..80: mol_type = other DNA
cccataccagcacgcaggcatatctgagccggccacagcaggagcagaccccgccgctgcccggctggcccctccacttc

SEQ ID NO: 130919 - DNA, 80 bp, synthetic construct
  misc_feature 1..80: note = Artificially Synthesized Probe
  source 1..80: mol_type = other DNA
agcagcggcggcatggtcagggtcggggctgctcaccgcaggctgcgtttctcagccaggcttaagggcatcccgcgaag

SEQ ID NO: 130920 - DNA, 80 bp, synthetic construct; identical to SEQ ID NO: 41611
  misc_feature 1..80: note = Artificially Synthesized Probe
  source 1..80: mol_type = other DNA

SEQ ID NO: 130921 - DNA, 80 bp, synthetic construct
  misc_feature 1..80: note = Artificially Synthesized Probe
  source 1..80: mol_type = other DNA
ctaagggataggagaggggcctctggctctgcagcaccccagccaccgcccaggccaggctggcctcttgcaccccaccc

SEQ ID NO: 130922 - DNA, 80 bp, synthetic construct
  misc_feature 1..80: note = Artificially Synthesized Probe
  source 1..80: mol_type = other DNA
gtgcggttgtagtactgggagatgatggcacctcggctgcggcctatggaggcagctgggcagggccgggccgggcaggg

SEQ ID NO: 130923 - DNA, 80 bp, synthetic construct
  misc_feature 1..80: note = Artificially Synthesized Probe
  source 1..80: mol_type = other DNA
agcgagggccacatggggctgtgctgggcccccaggcagcagatgggatgggctaggagcccgccctgggcctggctctg

SEQ ID NO: 130924 - DNA, 80 bp, synthetic construct
  misc_feature 1..80: note = Artificially Synthesized Probe
  source 1..80: mol_type = other DNA
aagagggaaaacagagacagtggggcatcccgagaagatcctctgcaggagtgcggtgtctacggatggaccaagaaaac

SEQ ID NO: 130925 - DNA, 80 bp, synthetic construct; identical to SEQ ID NO: 41612
  misc_feature 1..80: note = Artificially Synthesized Probe
  source 1..80: mol_type = other DNA

SEQ ID NO: 130926 - DNA, 80 bp, synthetic construct
  misc_feature 1..80: note = Artificially Synthesized Probe
  source 1..80: mol_type = other DNA
tcctgggccgtgcactggctctgctcctggatgagctgctggaaggagtcgtgcacttcgctttcatcataggggctggg

SEQ ID NO: 130927 - DNA, 80 bp, synthetic construct
  misc_feature 1..80: note = Artificially Synthesized Probe
  source 1..80: mol_type = other DNA
catcgaggatgaaggccagtggctgggccatgtctctggccaatgcccgctagtctgcagacctagggtagctcagagcc

SEQ ID NO: 130928 - DNA, 80 bp, synthetic construct
  misc_feature 1..80: note = Artificially Synthesized Probe
  source 1..80: mol_type = other DNA
tacataaatggtgaggcaccgaataagcctcatgccagaatggaatggggggccccctccagtgtcaggggaggggagag

SEQ ID NO: 130929 - DNA, 80 bp, synthetic construct; identical to SEQ ID NO: 41613
  misc_feature 1..80: note = Artificially Synthesized Probe
  source 1..80: mol_type = other DNA

SEQ ID NO: 130930 - DNA, 80 bp, synthetic construct
  misc_feature 1..80: note = Artificially Synthesized Probe
  source 1..80: mol_type = other DNA
tggccaggacctcaacaggcctcctttgtcctggctctgccgtcacccggcacaactggaaccagagcagccttgtctgg

SEQ ID NO: 130931 - DNA, 80 bp, synthetic construct
  misc_feature 1..80: note = Artificially Synthesized Probe
  source 1..80: mol_type = other DNA
aggcaaagcccgggggcgccccgacagagcagctccttgcaggggtgccagtcacaggaccggacggcgccctccctcag

SEQ ID NO: 130932 - DNA, 80 bp, synthetic construct; identical to SEQ ID NO: 41614
  misc_feature 1..80: note = Artificially Synthesized Probe
  source 1..80: mol_type = other DNA

SEQ ID NO: 130933 - DNA, 80 bp, synthetic construct
  misc_feature 1..80: note = Artificially Synthesized Probe
  source 1..80: mol_type = other DNA
gcctgggccccaggtcatcatgaaaaccagaagcagacactcaggaggctgaggcgggaggatcacctgagcccaggagg

SEQ ID NO: 130934 - DNA, 80 bp, synthetic construct
  misc_feature 1..80: note = Artificially Synthesized Probe
  source 1..80: mol_type = other DNA
ggccccagagcccagagcggctgcaactctggggccaccgaacccgtccagccggcctccctgtcccccgccccttccca

SEQ ID NO: 130935 - DNA, 80 bp, synthetic construct
  misc_feature 1..80: note = Artificially Synthesized Probe
  source 1..80: mol_type = other DNA
cccggggagggaactcggctgccaaatggccccagaggccgaaaggaattcaggggggattgccgctgtccccgcatagg

SEQ ID NO: 130936 - DNA, 80 bp, synthetic construct
  misc_feature 1..80: note = Artificially Synthesized Probe
  source 1..80: mol_type = other DNA
gggccccaggggcgactgggccagtcgcaggtctgccggggccgggggagtagccgcacctcccggcccacgtgggcggg

SEQ ID NO: 130937 - DNA, 80 bp, synthetic construct; identical to SEQ ID NO: 41615
  misc_feature 1..80: note = Artificially Synthesized Probe
  source 1..80: mol_type = other DNA

SEQ ID NO: 130938 - DNA, 80 bp, synthetic construct
  misc_feature 1..80: note = Artificially Synthesized Probe
  source 1..80: mol_type = other DNA
cctgggcggggttcattgtttatctagcaagagttctggctcacttcctgtgtgctgtgtggagaggaggggatgaaaag

SEQ ID NO: 130939 - DNA, 80 bp, synthetic construct
  misc_feature 1..80: note = Artificially Synthesized Probe
  source 1..80: mol_type = other DNA
gccaaagcaggagacttagtggtccacctgggaactctatggaggaaactgcctttgagattgtaccccccaccccaagc

SEQ ID NO: 130940 - DNA, 80 bp, synthetic construct
  misc_feature 1..80: note = Artificially Synthesized Probe
  source 1..80: mol_type = other DNA
gctgccagtgtggtcctcagatggctaccccaagctggttcttggcaagtggcaccctggcatggagacccagcccctgc

SEQ ID NO: 130941 - DNA, 80 bp, synthetic construct
  misc_feature 1..80: note = Artificially Synthesized Probe
  source 1..80: mol_type = other DNA
ctgtgtgcccagcaccagcacatagcttgcgcctgacacacagaaaggactctggaaaccaggaaggaggtgggcagaga

SEQ ID NO: 130942 - DNA, 80 bp, synthetic construct; identical to SEQ ID NO: 41616
  misc_feature 1..80: note = Artificially Synthesized Probe
  source 1..80: mol_type = other DNA

SEQ ID NO: 130943 - DNA, 80 bp, synthetic construct
  misc_feature 1..80: note = Artificially Synthesized Probe
  source 1..80: mol_type = other DNA
caggcctcgaggtcaagtcctgcctatccaggctggaaggagttgaacagagagggcctcagctgcaggctggacatccc

SEQ ID NO: 130944 - DNA, 80 bp, synthetic construct; identical to SEQ ID NO: 41594
  misc_feature 1..80: note = Artificially Synthesized Probe
  source 1..80: mol_type = other DNA

SEQ ID NO: 130945 - DNA, 80 bp, synthetic construct
  misc_feature 1..80: note = Artificially Synthesized Probe
  source 1..80: mol_type = other DNA
catctcaggggcccacaggaagtgcctgcttggcctcagtttaaagcagaggaaaccatggggtgagaggggaggaggga

SEQ ID NO: 130946 - DNA, 80 bp, synthetic construct
  misc_feature 1..80: note = Artificially Synthesized Probe
  source 1..80: mol_type = other DNA
cagagggtgaggggctgtgggggccagctagagccctgcaagggtagcagtgggtccctgctcctgtccccacggctggg

SEQ ID NO: 130947 - DNA, 80 bp, synthetic construct; identical to SEQ ID NO: 41617
  misc_feature 1..80: note = Artificially Synthesized Probe
  source 1..80: mol_type = other DNA

SEQ ID NO: 130948 - DNA, 80 bp, synthetic construct
  misc_feature 1..80: note = Artificially Synthesized Probe
  source 1..80: mol_type = other DNA
tctctcatttctgagccccggaggtggcagagcggcagacccgggcaagtgaaccctagggctgcaggagcccaggcccc

SEQ ID NO: 130949 - DNA, 80 bp, synthetic construct
  misc_feature 1..80: note = Artificially Synthesized Probe
  source 1..80: mol_type = other DNA
ggtcggtgtcatcggagcgggcccctggggtgccggagccggaggagctgtgggaggcagagatggagcggctgcgcggc

SEQ ID NO: 130950 - DNA, 80 bp, synthetic construct
  misc_feature 1..80: note = Artificially Synthesized Probe
  source 1..80: mol_type = other DNA
cgggtgactcaggggcgcccctgtcaccacccccgtccaggcagctgcgggagcccgcgggggtgcagaccttgcgctgg

SEQ ID NO: 130951 - DNA, 80 bp, synthetic construct; identical to SEQ ID NO: 41618
  misc_feature 1..80: note = Artificially Synthesized Probe
  source 1..80: mol_type = other DNA

SEQ ID NO: 130952 - DNA, 80 bp, synthetic construct
  misc_feature 1..80: note = Artificially Synthesized Probe
  source 1..80: mol_type = other DNA
catggagaaaccctgtctctactaaaaatacaaaattagctgggcatggtagcacatgcctgtaatcccagctacttggg

SEQ ID NO: 130953 - DNA, 80 bp, synthetic construct
  misc_feature 1..80: note = Artificially Synthesized Probe
  source 1..80: mol_type = other DNA
cccggcctccctgacccaccctgctctcccactgcaggcctcttcggcacaggaattcggtcctacttcaccttcctccg

SEQ ID NO: 130954 - DNA, 80 bp, synthetic construct
  misc_feature 1..80: note = Artificially Synthesized Probe
  source 1..80: mol_type = other DNA
aattcacatccaaaattttaaagataattcaaatccaaatcaactcaatcagaatctctcggggtgggcctcaggcacca

SEQ ID NO: 130955 - DNA, 80 bp, synthetic construct
  misc_feature 1..80: note = Artificially Synthesized Probe
  source 1..80: mol_type = other DNA
atcatggtgaaaccccatctctactaaaaatacgaagatcagccaggcctggttgtatgcacctgtaatcccagctactt

SEQ ID NO: 130956 - DNA, 80 bp, synthetic construct; identical to SEQ ID NO: 41595
  misc_feature 1..80: note = Artificially Synthesized Probe
  source 1..80: mol_type = other DNA

SEQ ID NO: 130957 - DNA, 80 bp, synthetic construct
  misc_feature 1..80: note = Artificially Synthesized Probe
  source 1..80: mol_type = other DNA
cgcagcacacaaactgtgtcacttgatacagcggccccatgaggcgaggagctgggaggtcacagaacatgccccagggc

SEQ ID NO: 130958 - DNA, 80 bp, synthetic construct
  misc_feature 1..80: note = Artificially Synthesized Probe
  source 1..80: mol_type = other DNA
cagtgggagtgggaagccgccgtctcaaggcagaattccctctctgggacacctcgggttttgctcttaaagctttcagc

SEQ ID NO: 130959 - DNA, 80 bp, synthetic construct; identical to SEQ ID NO: 41596
  misc_feature 1..80: note = Artificially Synthesized Probe
  source 1..80: mol_type = other DNA

SEQ ID NO: 130960 - DNA, 80 bp, synthetic construct; identical to SEQ ID NO: 41592
  misc_feature 1..80: note = Artificially Synthesized Probe
  source 1..80: mol_type = other DNA

SEQ ID NO: 130961 - DNA, 80 bp, synthetic construct
  misc_feature 1..80: note = Artificially Synthesized Probe
  source 1..80: mol_type = other DNA
gactgtcacgtcactttctggactgcccacgcagcttcacccagcagcactcgcacctgaagatgctgccacagttggct

SEQ ID NO: 130962 - DNA, 80 bp, synthetic construct
  misc_feature 1..80: note = Artificially Synthesized Probe
  source 1..80: mol_type = other DNA
tctgctagcagccagtggcatctccatctgggtctgacccttttctgggcccatcgctctttgaccatttccccacctgg

SEQ ID NO: 130963 - DNA, 80 bp, synthetic construct
  misc_feature 1..80: note = Artificially Synthesized Probe
  source 1..80: mol_type = other DNA
ctggggtcatgacgggctggttcccgcaggcctggagcacaggctgacgggctggtccccacagacctggagcactgggg

SEQ ID NO: 130964 - DNA, 80 bp, synthetic construct
  misc_feature 1..80: note = Artificially Synthesized Probe
  source 1..80: mol_type = other DNA
tccccgcaggcctggagaactgaggctgacgggctggtccccgcaggcctggagccctgggctgtgatgggctggtcccc

SEQ ID NO: 130965 - DNA, 80 bp, synthetic construct
  misc_feature 1..80: note = Artificially Synthesized Probe
  source 1..80: mol_type = other DNA
tgtttcctagacattttatgcatctatttttgtaaaatcaccttcgctaactttcaccaagcactttgagcacagtggaa

SEQ ID NO: 130966 - DNA, 80 bp, synthetic construct; identical to SEQ ID NO: 41597
  misc_feature 1..80: note = Artificially Synthesized Probe
  source 1..80: mol_type = other DNA

SEQ ID NO: 130967 - DNA, 80 bp, synthetic construct
  misc_feature 1..80: note = Artificially Synthesized Probe
  source 1..80: mol_type = other DNA
tcggctcacttgtgcaggtgtaagcccctcctgggcgcgagttcaggctggtcaaaggcagcaagcgaatcaagccctgg

SEQ ID NO: 130968 - DNA, 80 bp, synthetic construct
  misc_feature 1..80: note = Artificially Synthesized Probe
  source 1..80: mol_type = other DNA
tttgcaaaacccctttaatcagaataaatagagtcccaggcagggcagagttcattggggatgcccaagccggattcacc

SEQ ID NO: 130969 - DNA, 80 bp, synthetic construct
  misc_feature 1..80: note = Artificially Synthesized Probe
  source 1..80: mol_type = other DNA
ggcccgtgaggcccatcgccgtccccctaggcatcctgttcatctgtgagcagggcagggggtgccgcagcctcctcggt

SEQ ID NO: 130970 - DNA, 80 bp, synthetic construct; identical to SEQ ID NO: 41598
  misc_feature 1..80: note = Artificially Synthesized Probe
  source 1..80: mol_type = other DNA

SEQ ID NO: 130971 - DNA, 80 bp, synthetic construct
  misc_feature 1..80: note = Artificially Synthesized Probe
  source 1..80: mol_type = other DNA
cctctccttcctctcgtagatggagtgaagcttgttgattaagaagattttgtcctcaccctcctagaaaggccagaaca

SEQ ID NO: 130972 - DNA, 80 bp, synthetic construct
  misc_feature 1..80: note = Artificially Synthesized Probe
  source 1..80: mol_type = other DNA
gtattcaacatcgcaagcagcaaaaacataaaagaaaaggtgaaagggccaccaaacaaggacaaggaaaaaccaagagc

SEQ ID NO: 130973 - DNA, 80 bp, synthetic construct; identical to SEQ ID NO: 41599
  misc_feature 1..80: note = Artificially Synthesized Probe
  source 1..80: mol_type = other DNA

SEQ ID NO: 130974 - DNA, 80 bp, synthetic construct
  misc_feature 1..80: note = Artificially Synthesized Probe
  source 1..80: mol_type = other DNA
ctggctctcagccctttcctccacttcaaagccagcagtggctgctcaagtcctgctcacgtggcaccactctgaccctg

SEQ ID NO: 130975 - DNA, 80 bp, synthetic construct
  misc_feature 1..80: note = Artificially Synthesized Probe
  source 1..80: mol_type = other DNA
tggtgttacagacaggcctctgaagacaaaccgagcaccccagcggcccctcaaactaagcaaggatcttttttctgtct

SEQ ID NO: 130976 - DNA, 80 bp, synthetic construct
  misc_feature 1..80: note = Artificially Synthesized Probe
  source 1..80: mol_type = other DNA
ccatccagtcttaggacggggacatctttggggccagtactggactgacccagggctctttcgacaatgaaatgtgacaa

SEQ ID NO: 130977 - DNA, 80 bp, synthetic construct
  misc_feature 1..80: note = Artificially Synthesized Probe
  source 1..80: mol_type = other DNA
aggaggaccacttagaataccttcaaggagagaccatgggccccttaagcaacaacctaagtagcttctatcgagttgct

SEQ ID NO: 130978 - DNA, 80 bp, synthetic construct
  misc_feature 1..80: note = Artificially Synthesized Probe
  source 1..80: mol_type = other DNA
ctggagaaaggtccttcccatcccagagcaacggtgggtagagctgggattctcccagcaccactctgcattccccgccc

SEQ ID NO: 130979 - DNA, 80 bp, synthetic construct; identical to SEQ ID NO: 41600
  misc_feature 1..80: note = Artificially Synthesized Probe
  source 1..80: mol_type = other DNA

SEQ ID NO: 130980 - DNA, 80 bp, synthetic construct
  misc_feature 1..80: note = Artificially Synthesized Probe
  source 1..80: mol_type = other DNA
cgcccccctagccctggtgtggagcatgcctaaggacactggcactcaccagccccagagtgaaaacctgcaggaggaca

SEQ ID NO: 130981 - DNA, 80 bp, synthetic construct
  misc_feature 1..80: note = Artificially Synthesized Probe
  source 1..80: mol_type = other DNA
ttgtctccaacttggtgggtgcccagtgggcaaggaggtcctcctgggcagagaggagcgaagggagtgggcacaggggc

SEQ ID NO: 130982 - DNA, 80 bp, synthetic construct
  misc_feature 1..80: note = Artificially Synthesized Probe
  source 1..80: mol_type = other DNA
aggggcgaagggagtgggcacaggggcgaagggagtgggcacaggggcgaagggagtgggcacaggggcgaagggagtgg

SEQ ID NO: 130983 - DNA, 80 bp, synthetic construct; identical to SEQ ID NO: 41601
  misc_feature 1..80: note = Artificially Synthesized Probe
  source 1..80: mol_type = other DNA

SEQ ID NO: 130984 - DNA, 80 bp, synthetic construct
  misc_feature 1..80: note = Artificially Synthesized Probe
  source 1..80: mol_type = other DNA
agacggggttttgccatgatggtcaggctggtctcgacctcctgacctcaagtgatctgctcacctcggcctcccaaagt

SEQ ID NO: 130985 - DNA, 80 bp, synthetic construct
  misc_feature 1..80: note = Artificially Synthesized Probe
  source 1..80: mol_type = other DNA
agctgggactacaggtgcacaccaccacacccagctaacttttaaaatttttatagagacgaggtttcactctgttgccc

SEQ ID NO: 130986 - DNA, 80 bp, synthetic construct
  misc_feature 1..80: note = Artificially Synthesized Probe
  source 1..80: mol_type = other DNA
aagcattgagtgggacctaatccggagaagaaattaaagaccagaaaaagaaggaagctgggaatgaaactcaaaatgca

SEQ ID NO: 130987 - DNA, 80 bp, synthetic construct
  misc_feature 1..80: note = Artificially Synthesized Probe
  source 1..80: mol_type = other DNA
ttgggaggccaaggtgggtggattgcctcaggagctcgagaccagcctgggcaacacagtgaaactgcatctgtacgaaa

SEQ ID NO: 130988 - DNA, 80 bp, synthetic construct; identical to SEQ ID NO: 41602
  misc_feature 1..80: note = Artificially Synthesized Probe
  source 1..80: mol_type = other DNA

SEQ ID NO: 130989 - DNA, 80 bp, synthetic construct
  misc_feature 1..80: note = Artificially Synthesized Probe
  source 1..80: mol_type = other DNA
cacgtattgatcagggtcacttgtttggcaaacaaaccctttcaccagccaaggcccacaggagatgtacaggggagtgg

SEQ ID NO: 130990 - DNA, 80 bp, synthetic construct
  misc_feature 1..80: note = Artificially Synthesized Probe
  source 1..80: mol_type = other DNA
ctgtcgggcagggcccagggccacagcccgggagcggccagtccccacacggtgcaggcccagcgagggccatctcccca

SEQ ID NO: 130991 - DNA, 80 bp, synthetic construct
  misc_feature 1..80: note = Artificially Synthesized Probe
  source 1..80: mol_type = other DNA
tatagctattcacatatatgtatagattctatttttcataaccatgataatatcatatgatatcatatggtgtgaagcta

SEQ ID NO: 130992 - DNA, 80 bp, synthetic construct
  misc_feature 1..80: note = Artificially Synthesized Probe
  source 1..80: mol_type = other DNA
gtcttctcaggcaggaggaggtccttgcgtggcctctgagtgaagtctcggggaagtgcggaccacagtcatggttattt

SEQ ID NO: 130993 - DNA, 80 bp, synthetic construct
  misc_feature 1..80: note = Artificially Synthesized Probe
  source 1..80: mol_type = other DNA
ttcccagtccaggtgatagaaacgtcaggaacaagactctggccaaaacatttggccggactttgttaatttcatgagga

SEQ ID NO: 130994 - DNA, 80 bp, synthetic construct; identical to SEQ ID NO: 41630
  misc_feature 1..80: note = Artificially Synthesized Probe
  source 1..80: mol_type = other DNA

SEQ ID NO: 130995 - DNA, 80 bp, synthetic construct
  misc_feature 1..80: note = Artificially Synthesized Probe
  source 1..80: mol_type = other DNA
tacctccctgatgagtcttttaaactttttttcctaatcgtcaccccacacacacccttgaaataatagaacaggtgcac

SEQ ID NO: 130996 - DNA, 80 bp, synthetic construct
  misc_feature 1..80: note = Artificially Synthesized Probe
  source 1..80: mol_type = other DNA
gaaccattgtagtatcctagacctttttcaccccctaagagcaaattatctgagcagagatgaaatcttatatgcatttt

SEQ ID NO: 130997 - DNA, 80 bp, synthetic construct; identical to SEQ ID NO: 41631
  misc_feature 1..80: note = Artificially Synthesized Probe
  source 1..80: mol_type = other DNA

SEQ ID NO: 130998 - DNA, 80 bp, synthetic construct
  misc_feature 1..80: note = Artificially Synthesized Probe
  source 1..80: mol_type = other DNA
catgcgcctgcagtcccagctgctggggaggctgaggcaggagaatggcgtgaaccctggaggtggagcttgcagtgagc

SEQ ID NO: 130999 - DNA, 80 bp, synthetic construct
  misc_feature 1..80: note = Artificially Synthesized Probe
  source 1..80: mol_type = other DNA
aggagttcgagaccagcctggccaacatgacaaaaccccgtctctactaaaaatacaaaaattagcccgaagtggtggtg

SEQ ID NO: 131000 - DNA, 80 bp, synthetic construct
  misc_feature 1..80: note = Artificially Synthesized Probe
  source 1..80: mol_type = other DNA
tcaaagtgagatctgtgtgaactgagaaaaataagaaagttcacatacattctgtttaaagttcaaccttttattccaag

SEQ ID NO: 131001 - DNA, 80 bp, synthetic construct
  misc_feature 1..80: note = Artificially Synthesized Probe
  source 1..80: mol_type = other DNA
gtgctgtgtttttatgttgtatatacttcattgcatatgtgtgtggatgtatgtatttaatttgaatacagtagataaat

SEQ ID NO: 131002 - DNA, 80 bp, synthetic construct; identical to SEQ ID NO: 41632
  misc_feature 1..80: note = Artificially Synthesized Probe
  source 1..80: mol_type = other DNA

SEQ ID NO: 131003 - DNA, 80 bp, synthetic construct
  misc_feature 1..80: note = Artificially Synthesized Probe
  source 1..80: mol_type = other DNA
gtggctcagtccgagtcccaaaacctcaaaaccagggaagccgacagtgcagccttcagtctgtagccaaaggcccaaga

SEQ ID NO: 131004 - DNA, 80 bp, synthetic construct
  misc_feature 1..80: note = Artificially Synthesized Probe
  source 1..80: mol_type = other DNA
gtgctggcagctaattggatggtgtttacccacgttgtgggtgggtcttcctctaccagtccactgactcaaatgataat

SEQ ID NO: 131005 - DNA, 80 bp, synthetic construct
  misc_feature 1..80: note = Artificially Synthesized Probe
  source 1..80: mol_type = other DNA
gtggctcacgcctgcaattccagcactttgggaggccaaggcgggcggatgatgaggtcaggagtttgagagcagcctga

SEQ ID NO: 131006 - DNA, 80 bp, synthetic construct
  misc_feature 1..80: note = Artificially Synthesized Probe
  source 1..80: mol_type = other DNA
cctgagcaacaagagcaaaacttcgtcaaaaaaaacaaaaaaaaaaaaaccaaaaaaaaaaagcaagcaaacaaacaaac

SEQ ID NO: 131007 - DNA, 80 bp, synthetic construct; identical to SEQ ID NO: 41633
  misc_feature 1..80: note = Artificially Synthesized Probe
  source 1..80: mol_type = other DNA

SEQ ID NO: 131008 - DNA, 80 bp, synthetic construct
  misc_feature 1..80: note = Artificially Synthesized Probe
  source 1..80: mol_type = other DNA
tttttctccaaagaaaggatcccctagaattctggtttttaccagaaccaagaaccaggaacaagactctggccaaaaca

SEQ ID NO: 131009 - DNA, 80 bp, synthetic construct
  misc_feature 1..80: note = Artificially Synthesized Probe
  source 1..80: mol_type = other DNA
ctgactgagcaagtggcttagcctacactgtgtagccttctctacactgttatagttaaaaataatatttaacattaaaa

SEQ ID NO: 131010 - DNA, 80 bp, synthetic construct
  misc_feature 1..80: note = Artificially Synthesized Probe
  source 1..80: mol_type = other DNA
cagtgacaacattcccagtatcctcagatttaaccatactaaagtttgacaagaaacattgactttctgtctgtgaggca

SEQ ID NO: 131011 - DNA, 80 bp, synthetic construct; identical to SEQ ID NO: 41634
  misc_feature 1..80: note = Artificially Synthesized Probe
  source 1..80: mol_type = other DNA

SEQ ID NO: 131012 - DNA, 80 bp, synthetic construct
  misc_feature 1..80: note = Artificially Synthesized Probe
  source 1..80: mol_type = other DNA
atataacattctcaaaattacagagctccaaagctagaggacagaggagtgatttccaggggtgaaacaaggactataag

SEQ ID NO: 131013 - DNA, 80 bp, synthetic construct; identical to SEQ ID NO: 41620
  misc_feature 1..80: note = Artificially Synthesized Probe
  source 1..80: mol_type = other DNA

SEQ ID NO: 131014 - DNA, 80 bp, synthetic construct
  misc_feature 1..80: note = Artificially Synthesized Probe
  source 1..80: mol_type = other DNA
tgtgtgtgcctatagtcccagctactacgggggctaaggtgggagcatcacttgaacccaggaggttgaggctgtagtga

SEQ ID NO: 131015 - DNA, 80 bp, synthetic construct; identical to SEQ ID NO: 41635
  misc_feature 1..80: note = Artificially Synthesized Probe
  source 1..80: mol_type = other DNA

SEQ ID NO: 131016 - DNA, 80 bp, synthetic construct
  misc_feature 1..80: note = Artificially Synthesized Probe
  source 1..80: mol_type = other DNA
tgtgctctaaggtcctacctgctcctgaattctctaactcagggaccctggccttccgccctgaaggtgaaaccttgctg

SEQ ID NO: 131017 - DNA, 80 bp, synthetic construct
  misc_feature 1..80: note = Artificially Synthesized Probe
  source 1..80: mol_type = other DNA
ctccatccttttatccaggtcctttgatggcttggctctgctcacttgctaatccagccgaggttcttgcttcctgccag

SEQ ID NO: 131018 - DNA, 80 bp, synthetic construct
  misc_feature 1..80: note = Artificially Synthesized Probe
  source 1..80: mol_type = other DNA
cccctgctttccagaccaagaatcaagacctgtgatttaatgggcattctttcatatcactttgaaattgaggttctgga

SEQ ID NO: 131019 - DNA, 80 bp, synthetic construct; identical to SEQ ID NO: 41636
  misc_feature 1..80: note = Artificially Synthesized Probe
  source 1..80: mol_type = other DNA

SEQ ID NO: 131020 - DNA, 80 bp, synthetic construct
  misc_feature 1..80: note = Artificially Synthesized Probe
  source 1..80: mol_type = other DNA
ccaggatggtcttgatctcctgacctcatggtccgcccacctcggcctcccaaagtgctgggattacaggcgtgagccac

SEQ ID NO: 131021 - DNA, 80 bp, synthetic construct
  misc_feature 1..80: note = Artificially Synthesized Probe
  source 1..80: mol_type = other DNA
gtacagtggtgcaatctcagctcactgcaacctctggctcccaggttcaagcgattctcatgtgtcagccgcctgaatag

SEQ ID NO: 131022 - DNA, 80 bp, synthetic construct
  misc_feature 1..80: note = Artificially Synthesized Probe
  source 1..80: mol_type = other DNA
agatgcatttgaaagggcttctgttctttaattttcccctttattcactgcctgggccctgcaaacagatgaggtcatgt

SEQ ID NO: 131023 - DNA, 80 bp, synthetic construct
  misc_feature 1..80: note = Artificially Synthesized Probe
  source 1..80: mol_type = other DNA
ataataataataaaaatgaggcaccattgctgaccagagagagagaatctccttcttgacctctcatagccccttcatag

SEQ ID NO: 131024 - DNA, 80 bp, synthetic construct
  misc_feature 1..80: note = Artificially Synthesized Probe
  source 1..80: mol_type = other DNA
ggagtccttttcctctgagaagggaatagaggggtgggaggtagagaagctagaagcagaatcccaacccaagacccact

SEQ ID NO: 131025 - DNA, 80 bp, synthetic construct; identical to SEQ ID NO: 41637
  misc_feature 1..80: note = Artificially Synthesized Probe
  source 1..80: mol_type = other DNA

SEQ ID NO: 131026 - DNA, 80 bp, synthetic construct
  misc_feature 1..80: note = Artificially Synthesized Probe
  source 1..80: mol_type = other DNA
taccacagctgggtgttcaaatgcctatagagcctgtgccttgagcccctatgctctgcagacccccagaagtaaacgtg

SEQ ID NO: 131027 - DNA, 80 bp, synthetic construct
  misc_feature 1..80: note = Artificially Synthesized Probe
  source 1..80: mol_type = other DNA
tcatgcacatttcctgagctcttctctcttcacatgtgatgctgactttctgagcacctcatacatcccaaaggtatgca

SEQ ID NO: 131028 - DNA, 80 bp, synthetic construct; identical to SEQ ID NO: 41638
  misc_feature 1..80: note = Artificially Synthesized Probe
  source 1..80: mol_type = other DNA

SEQ ID NO: 131029 - DNA, 80 bp, synthetic construct
  misc_feature 1..80: note = Artificially Synthesized Probe
  source 1..80: mol_type = other DNA
ccggggtccagttatatctgctgcctatctcactattgttttcacgtcgatgactccccatgcatctgaccaggtaattc

SEQ ID NO: 131030 - DNA, 80 bp, synthetic construct
  misc_feature 1..80: note = Artificially Synthesized Probe
  source 1..80: mol_type = other DNA
agaatatctggcctcaaatgtcactagtaccaaggttgggaaagcctggttggcctcaccctaagaagtatctccaactg

SEQ ID NO: 131031 - DNA, 80 bp, synthetic construct
  misc_feature 1..80: note = Artificially Synthesized Probe
  source 1..80: mol_type = other DNA
tctgagaacccggtctcttcttcctgcatccatcactcacccagtccatcaattctacctcgtaaatgccaagtctgaat

SEQ ID NO: 131032 - DNA, 80 bp, synthetic construct; identical to SEQ ID NO: 41639
  misc_feature 1..80: note = Artificially Synthesized Probe
  source 1..80: mol_type = other DNA

SEQ ID NO: 131033 - DNA, 80 bp, synthetic construct
  misc_feature 1..80: note = Artificially Synthesized Probe
  source 1..80: mol_type = other DNA
tggctcactgcaacctccgcctcccgagatcaagtgattctcctgccccagcctcctgaatagctgggattacaggtacc

SEQ ID NO: 131034 - DNA, 80 bp, synthetic construct
  misc_feature 1..80: note = Artificially Synthesized Probe
  source 1..80: mol_type = other DNA
actttaaaatgattgaaatgtaaattttatgtcatgtgtattttatcacaattttttaacacccttcacattgatctcaa

SEQ ID NO: 131035 - DNA, 80 bp, synthetic construct
  misc_feature 1..80: note = Artificially Synthesized Probe
  source 1..80: mol_type = other DNA
ccatcctcccacgctccaattcccttatccaaggaaaatgacccctgaagcttcactcttccagatcccatcctgggatt

SEQ ID NO: 131036 - DNA, 80 bp, synthetic construct
  misc_feature 1..80: note = Artificially Synthesized Probe
  source 1..80: mol_type = other DNA
caggatacactcagagagggtagcagattgtactttctaaacgtggctctagcagctctccaatcccccatgcccttgtt

SEQ ID NO: 131037 - DNA, 80 bp, synthetic construct
  misc_feature 1..80: note = Artificially Synthesized Probe
  source 1..80: mol_type = other DNA
cctgggcccaggaactgccatataagcctcccaaaagccctgatactaccatattgtcaggaagcccagtgtagcccatg

SEQ ID NO: 131038 - DNA, 80 bp, synthetic construct; identical to SEQ ID NO: 41640
  misc_feature 1..80: note = Artificially Synthesized Probe
  source 1..80: mol_type = other DNA

SEQ ID NO: 131039 - DNA, 80 bp, synthetic construct
  misc_feature 1..80: note = Artificially Synthesized Probe
  source 1..80: mol_type = other DNA
gaagactgaagaagataaagcgccatcatcatctggtaacgtgagctgttattaacactttgatctttaaaataatcttg

SEQ ID NO: 131040 - DNA, 80 bp, synthetic construct
  misc_feature 1..80: note = Artificially Synthesized Probe
  source 1..80: mol_type = other DNA
ttgggaggctaaggcaggcggatcacctgatgtcaggagctcgacaccagcttgaccaacatggtgaaaccccatctcta

SEQ ID NO: 131041 - DNA, 80 bp, synthetic construct; identical to SEQ ID NO: 41641
  misc_feature 1..80: note = Artificially Synthesized Probe
  source 1..80: mol_type = other DNA

SEQ ID NO: 131042 - DNA, 80 bp, synthetic construct
  misc_feature 1..80: note = Artificially Synthesized Probe
  source 1..80: mol_type = other DNA
caccctaacccaatgtaacttcatcttaactatagtaattacaccggtaaagaccgcttttcctaagtaaggtcacattt

SEQ ID NO: 131043 - DNA, 80 bp, synthetic construct
  misc_feature 1..80: note = Artificially Synthesized Probe
  source 1..80: mol_type = other DNA
agggccccattgacagaaggtggaagatcagatgccagtatgattgcacccagttctttttttttttttcgacatggagt

SEQ ID NO: 131044 - DNA, 80 bp, synthetic construct
  misc_feature 1..80: note = Artificially Synthesized Probe
  source 1..80: mol_type = other DNA
gccaccatgcccagctaatttttttttgtatttttagtagagacggggtttcaccatgttagccaggatggtctcgatct

SEQ ID NO: 131045 - DNA, 80 bp, synthetic construct
  misc_feature 1..80: note = Artificially Synthesized Probe
  source 1..80: mol_type = other DNA
cttcccaggttcaagtgattgtcctgcctcagcctcctggttagctgggactatacgcatgcgccactacgcccggataa

SEQ ID NO: 131046 - DNA, 80 bp, synthetic construct
  misc_feature 1..80: note = Artificially Synthesized Probe
  source 1..80: mol_type = other DNA
aaatggaagtaactttaaaaaattacaactcacaaatatgctatttttttaattattttatttttttacacagagtctcg

SEQ ID NO: 131047 - DNA, 80 bp, synthetic construct; identical to SEQ ID NO: 41642
  misc_feature 1..80: note = Artificially Synthesized Probe
  source 1..80: mol_type = other DNA

SEQ ID NO: 131048 - DNA, 80 bp, synthetic construct
  misc_feature 1..80: note = Artificially Synthesized Probe
  source 1..80: mol_type = other DNA
tgtttctcttgtgggctctgagtactctgttaaaagaagcatttcattgaggaaatagaaatgaatgtgggacagacgtc

SEQ ID NO: 131049 - DNA, 80 bp, synthetic construct
  misc_feature 1..80: note = Artificially Synthesized Probe
  source 1..80: mol_type = other DNA
gtttccatgacagaagctgcagcaccaggacaaggactgagatccccatggggctctttagaccccaaaggtgagaagtc

SEQ ID NO: 131050 - DNA, 80 bp, synthetic construct
  misc_feature 1..80: note = Artificially Synthesized Probe
  source 1..80: mol_type = other DNA
gcagtggtgccatcacagctcactgcagcctcgacctcctaggctcaattcccccacctcagcctcctgagtagctggga

SEQ ID NO: 131051 - DNA, 80 bp, synthetic construct; identical to SEQ ID NO: 41643
  misc_feature 1..80: note = Artificially Synthesized Probe
  source 1..80: mol_type = other DNA

SEQ ID NO: 131052 - DNA, 80 bp, synthetic construct
  misc_feature 1..80: note = Artificially Synthesized Probe
  source 1..80: mol_type = other DNA
ccaaaaggcgggttgtttattctcaaggaagaaagggagggaggtagcccgggatgtcaaagggagattctgaggctgga

SEQ ID NO: 131053 - DNA, 80 bp, synthetic construct
  misc_feature 1..80: note = Artificially Synthesized Probe
  source 1..80: mol_type = other DNA
acgttcacctccaggagaaggcaccaaagtcagcattggggactgaggctgggtgtattagtctgttctccactgttggt

SEQ ID NO: 131054 - DNA, 80 bp, synthetic construct
  misc_feature 1..80: note = Artificially Synthesized Probe
  source 1..80: mol_type = other DNA
aacctcttaaaaaccatcaggtttcttaagacttattcgctaccacgagaacagtatgggggaaactgctcccatgattc

SEQ ID NO: 131055 - DNA, 80 bp, synthetic construct; identical to SEQ ID NO: 41644
  misc_feature 1..80: note = Artificially Synthesized Probe
  source 1..80: mol_type = other DNA

SEQ ID NO: 131056 - DNA, 80 bp, synthetic construct
  misc_feature 1..80: note = Artificially Synthesized Probe
  source 1..80: mol_type = other DNA
actcatacacacacatgcacagaccccagaatgtcagcttcaaaaggcaggttttgagtcacttttgttcactgctaaat

SEQ ID NO: 131057 - DNA, 80 bp, synthetic construct; identical to SEQ ID NO: 41621
  misc_feature 1..80: note = Artificially Synthesized Probe
  source 1..80: mol_type = other DNA

SEQ ID NO: 131058 - DNA, 80 bp, synthetic construct
  misc_feature 1..80: note = Artificially Synthesized Probe
  source 1..80: mol_type = other DNA
tattgtgtactgatatgaaccacctccaagatatgtataagcataaaaggcaaggttagaacactgtttactttgctcct

SEQ ID NO: 131059 - DNA, 80 bp, synthetic construct
  misc_feature 1..80: note = Artificially Synthesized Probe
  source 1..80: mol_type = other DNA
cgagtgaataaatgaatcagtgaatgaatgagtgagggaggaaggcaatgagtgggggaatgaatgaatgaatgagtgag

SEQ ID NO: 131060 - DNA, 80 bp, synthetic construct; identical to SEQ ID NO: 41645
  misc_feature 1..80: note = Artificially Synthesized Probe
  source 1..80: mol_type = other DNA

SEQ ID NO: 131061 - DNA, 80 bp, synthetic construct
  misc_feature 1..80: note = Artificially Synthesized Probe
  source 1..80: mol_type = other DNA
gagtgaatgagtcagtgagtgagtgaatgagtcagtgaatgagtgagtaaatgagtgagtgagtgagtgaatgagtgact

SEQ ID NO: 131062 - DNA, 80 bp, synthetic construct
  misc_feature 1..80: note = Artificially Synthesized Probe
  source 1..80: mol_type = other DNA
aaatgagtgagtgaataagtgagtgagtgaatgagtgaatgagtgagtgagggagggagggaatgagtgagtgaatgagt

SEQ ID NO: 131063 - DNA, 80 bp, synthetic construct
  misc_feature 1..80: note = Artificially Synthesized Probe
  source 1..80: mol_type = other DNA
gaatgagtcaatgaattagtgagggaatgagtgagtgagggaatgagtgagtgagtaaatgagtgagtgagggagggagg

SEQ ID NO: 131064 - DNA, 80 bp, synthetic construct; identical to SEQ ID NO: 41646
  misc_feature 1..80: note = Artificially Synthesized Probe
  source 1..80: mol_type = other DNA

SEQ ID NO: 131065 - DNA, 80 bp, synthetic construct
  misc_feature 1..80: note = Artificially Synthesized Probe
  source 1..80: mol_type = other DNA
tgaatgagtaaatgagtgactgaatgagtgagtgagtgagtaaatgagtgagtgaatgagtgaatgaatgagtgaatgag

SEQ ID NO: 131066 - DNA, 80 bp, synthetic construct
  misc_feature 1..80: note = Artificially Synthesized Probe
  source 1..80: mol_type = other DNA
ggaatgagtgaatgagtgagtgaatgagtaaacgagtgagttaattagtgagtgaatgagtgaggcaatgagtaagtgaa

SEQ ID NO: 131067 - DNA, 80 bp, synthetic construct
  misc_feature 1..80: note = Artificially Synthesized Probe
  source 1..80: mol_type = other DNA
tgagtgactgaatgagtgagtgaatgagtaaatgagtgagtgaatgagtgagcgaataagtaagtgaatgagtaagtgaa

SEQ ID NO: 131068 - DNA, 80 bp, synthetic construct
  misc_feature 1..80: note = Artificially Synthesized Probe
  source 1..80: mol_type = other DNA
ggagggagggaatgagtgaatgagtgagtgagtgaattagtgagtgaatgaatgagtgagtgagggaatgagtaaatgag

SEQ ID NO: 131069 - DNA, 80 bp, synthetic construct
  misc_feature 1..80: note = Artificially Synthesized Probe
  source 1..80: mol_type = other DNA
aactacttttccataaaatagtttataggaggaatagaacagtctcagatagaggtaggagctctggagtccagccacct

SEQ ID NO: 131070 - DNA, 80 bp, synthetic construct; identical to SEQ ID NO: 41647
  misc_feature 1..80: note = Artificially Synthesized Probe
  source 1..80: mol_type = other DNA

SEQ ID NO: 131071 - DNA, 80 bp, synthetic construct
  misc_feature 1..80: note = Artificially Synthesized Probe
  source 1..80: mol_type = other DNA
agaatgagtcagtgagagaatgagtcagtgagtgaatgagtcagtgaatgagtgagggaatgagtgagtgagtgaatgag

SEQ ID NO: 131072 - DNA, 80 bp, synthetic construct
  misc_feature 1..80: note = Artificially Synthesized Probe
  source 1..80: mol_type = other DNA
tgagtgagtgagtaaatgagtgagtgacggagggagggaatgagtgagtgaatgagtgagtgagtgaatgagtgagtaaa

SEQ ID NO: 131073 - DNA, 80 bp, synthetic construct
  misc_feature 1..80: note = Artificially Synthesized Probe
  source 1..80: mol_type = other DNA
tgaatgagtgagtgagtgatggagggaatgagtgagtgaatgagtgagtgaatgaatgagggagggagggagtgaatgag

SEQ ID NO: 131074 - DNA, 80 bp, synthetic construct; identical to SEQ ID NO: 41648
  misc_feature 1..80: note = Artificially Synthesized Probe
  source 1..80: mol_type = other DNA

SEQ ID NO: 131075 - DNA, 80 bp, synthetic construct
  misc_feature 1..80: note = Artificially Synthesized Probe
  source 1..80: mol_type = other DNA
gcatgaatatataaataagtgaagcaatgagtgagtaaatgaatggatgggtgggtggcaagtgaataaatgaatgagtg

SEQ ID NO: 131076 - DNA, 80 bp, synthetic construct
  misc_feature 1..80: note = Artificially Synthesized Probe
  source 1..80: mol_type = other DNA
ctcctgtttaccttctcatgagtataaatcccctcctctaacccccggttagtccagcacacctggatctgaccacacct

SEQ ID NO: 131077 - DNA, 80 bp, synthetic construct
  misc_feature 1..80: note = Artificially Synthesized Probe
  source 1..80: mol_type = other DNA
gggaactttgtgaacataacaatgcccaggtccgccctcgagggtctgattgcatttggctccattggggccccagtgct

SEQ ID NO: 131078 - DNA, 80 bp, synthetic construct; identical to SEQ ID NO: 41649
  misc_feature 1..80: note = Artificially Synthesized Probe
  source 1..80: mol_type = other DNA

SEQ ID NO: 131079 - DNA, 80 bp, synthetic construct
  misc_feature 1..80: note = Artificially Synthesized Probe
  source 1..80: mol_type = other DNA
gcctgtagtcccagctactggggaggctgaggcaggagaatcacttgcacctgggaggcagaggttggagtgagccgaga

SEQ ID NO: 131080 - DNA, 80 bp, synthetic construct
  misc_feature 1..80: note = Artificially Synthesized Probe
  source 1..80: mol_type = other DNA
cactccaaaaatctcagctattattactgttataatagcacccattttatccaaggttggatagtcaatgaaagatacag

SEQ ID NO: 131081 - DNA, 80 bp, synthetic construct
  misc_feature 1..80: note = Artificially Synthesized Probe
  source 1..80: mol_type = other DNA
agatcagaatggatcagaacacaacagaatggatcagaatagaacagatcagaatggatcaggatagaacagaacagaac

SEQ ID NO: 131082 - DNA, 80 bp, synthetic construct
  misc_feature 1..80: note = Artificially Synthesized Probe
  source 1..80: mol_type = other DNA
ccacctcagggcctttgcgtctgctgtcacctgcctggtctgcagtttccctacctacaggttcttcatgcgggtctcag

SEQ ID NO: 131083 - DNA, 80 bp, synthetic construct
  misc_feature 1..80: note = Artificially Synthesized Probe
  source 1..80: mol_type = other DNA
ggctcactgtaacctccacctcctgggttcaagtgattctcctgccttagcctcccaagtagctgggattacaggcgcgt

SEQ ID NO: 131084 - DNA, 80 bp, synthetic construct; identical to SEQ ID NO: 41650
  misc_feature 1..80: note = Artificially Synthesized Probe
  source 1..80: mol_type = other DNA

SEQ ID NO: 131085 - DNA, 80 bp, synthetic construct
  misc_feature 1..80: note = Artificially Synthesized Probe
  source 1..80: mol_type = other DNA
gaatggatgggcgaatgaatgagcttattctgtgttgtcagttcctgaggtgcacacatgttttggtttgttattgtcca

SEQ ID NO: 131086 - DNA, 80 bp, synthetic construct
  misc_feature 1..80: note = Artificially Synthesized Probe
  source 1..80: mol_type = other DNA
tccaaacactgccaaatgtcaggtgggggagagaatcgccccagctgagaactctggccctgcagtatttaatccagcac

SEQ ID NO: 131087 - DNA, 80 bp, synthetic construct; identical to SEQ ID NO: 41651
  misc_feature 1..80: note = Artificially Synthesized Probe
  source 1..80: mol_type = other DNA

SEQ ID NO: 131088 - DNA, 80 bp, synthetic construct
  misc_feature 1..80: note = Artificially Synthesized Probe
  source 1..80: mol_type = other DNA
ttgcgtccctttctctccttatgcccttagtccagttatgttaacctgccagtgcctcagtttcctcatctgtaccctgc

SEQ ID NO: 131089 - DNA, 80 bp, synthetic construct
  misc_feature 1..80: note = Artificially Synthesized Probe
  source 1..80: mol_type = other DNA
tgactgaccgactggcgtggagaatagcacaggtgcatagatgtggatgtcagctataatgatgacaatgctgatgtcat

SEQ ID NO: 131090 - DNA, 80 bp, synthetic construct
  misc_feature 1..80: note = Artificially Synthesized Probe
  source 1..80: mol_type = other DNA
agtggtaagcaaagacagacatagttcctatcttcttggagcttacagactggtgggagagatggacataaaccaaagaa

SEQ ID NO: 131091 - DNA, 80 bp, synthetic construct
  misc_feature 1..80: note = Artificially Synthesized Probe
  source 1..80: mol_type = other DNA
ggtgatgatgatgtcatgatgaagacgatgatgccatattgttgataatcgtgttgtcatcttttaatccacaccagtat

SEQ ID NO: 131092 - DNA, 80 bp, synthetic construct; identical to SEQ ID NO: 41652
  misc_feature 1..80: note = Artificially Synthesized Probe
  source 1..80: mol_type = other DNA

SEQ ID NO: 131093 - DNA, 80 bp, synthetic construct
  misc_feature 1..80: note = Artificially Synthesized Probe
  source 1..80: mol_type = other DNA
atcagcccgagagtatcaacaagcccatagagtctggggcgcgctaaatgtgaacagcactgccccaggggacccggatg

SEQ ID NO: 131094 - DNA, 80 bp, synthetic construct
  misc_feature 1..80: note = Artificially Synthesized Probe
  source 1..80: mol_type = other DNA
agaaagcccatgtcatgccagagttattttagagcaaaaggaactccaggccagagctccccagagagagctgaacgcat

SEQ ID NO: 131095 - DNA, 80 bp, synthetic construct
  misc_feature 1..80: note = Artificially Synthesized Probe
  source 1..80: mol_type = other DNA
gaagcggtttggcactccctcgggctcctccaggccacacggacacacacggacataagcacacaggtactaggataaca

SEQ ID NO: 131096 - DNA, 80 bp, synthetic construct; identical to SEQ ID NO: 41653
  misc_feature 1..80: note = Artificially Synthesized Probe
  source 1..80: mol_type = other DNA

SEQ ID NO: 131097 - DNA, 80 bp, synthetic construct
  misc_feature 1..80: note = Artificially Synthesized Probe
  source 1..80: mol_type = other DNA
agggagggcaaagggagagcagatcaatcccccaccccgccccagcactcccctcctcctcctcgccctgcccagccacg

SEQ ID NO: 131098 - DNA, 80 bp, synthetic construct
  misc_feature 1..80: note = Artificially Synthesized Probe
  source 1..80: mol_type = other DNA
gcagtgattccacagcaccatacagctgcccatcactgcccaggtcacaattgcaactttgcattcttttgtgtaatttt

SEQ ID NO: 131099 - DNA, 80 bp, synthetic construct; identical to SEQ ID NO: 41622
  misc_feature 1..80: note = Artificially Synthesized Probe
  source 1..80: mol_type = other DNA

SEQ ID NO: 131100 - DNA, 80 bp, synthetic construct
  misc_feature 1..80: note = Artificially Synthesized Probe
  source 1..80: mol_type = other DNA
cccggctaatgtttgtatttttagtagagacagggtttcaccatattggccagactggtctcaaactcctgacctcaagt

SEQ ID NO: 131101 - DNA, 80 bp, synthetic construct
  misc_feature 1..80: note = Artificially Synthesized Probe
  source 1..80: mol_type = other DNA
cctggcccacggtggttctccacagatattagatttgagccacatggtccagtacgatagccactgaccagttacacatg

SEQ ID NO: 131102 - DNA, 80 bp, synthetic construct; identical to SEQ ID NO: 41654
  misc_feature 1..80: note = Artificially Synthesized Probe
  source 1..80: mol_type = other DNA

SEQ ID NO: 131103 - DNA, 80 bp, synthetic construct
  misc_feature 1..80: note = Artificially Synthesized Probe
  source 1..80: mol_type = other DNA
taaaaggaacatttcaaatacacagggatacagacagcctttaaggcagccagccacgtgccaggtcccatttttcaaaa

SEQ ID NO: 131104 - DNA, 80 bp, synthetic construct
  misc_feature 1..80: note = Artificially Synthesized Probe
  source 1..80: mol_type = other DNA
tttacggtacacagcatgaggatttgatatgtgtgtgtacactgtggagtggctcggtcaaactattcaacacaggcacg

SEQ ID NO: 131105 - DNA, 80 bp, synthetic construct
  misc_feature 1..80: note = Artificially Synthesized Probe
  source 1..80: mol_type = other DNA
aacatctccccaccctcccctgcccccacccccagcctgttccattctctctttctgtgaatttgactcttctagattct

SEQ ID NO: 131106 - DNA, 80 bp, synthetic construct; identical to SEQ ID NO: 41655
  misc_feature 1..80: note = Artificially Synthesized Probe
  source 1..80: mol_type = other DNA

SEQ ID NO: 131107 - DNA, 80 bp, synthetic construct
  misc_feature 1..80: note = Artificially Synthesized Probe
  source 1..80: mol_type = other DNA
accacaagccagagccctaggcagggtgggcacctacctccaaagaggaagagaattccagtgagcaggaggaggaggta

SEQ ID NO: 131108 - DNA, 80 bp, synthetic construct
  misc_feature 1..80: note = Artificially Synthesized Probe
  source 1..80: mol_type = other DNA
acacttcccgagcacctactagagctggggaaaatccacactgtcactgcccctacgacgattacttctactgtttctga

SEQ ID NO: 131109 - DNA, 80 bp, synthetic construct
  misc_feature 1..80: note = Artificially Synthesized Probe
  source 1..80: mol_type = other DNA
gaccacaaatagagtggcagcaatcatatattgaactcttgctatatgccaggcatattatatcatatcgtctaaactca

SEQ ID NO: 131110 - DNA, 80 bp, synthetic construct
  misc_feature 1..80: note = Artificially Synthesized Probe
  source 1..80: mol_type = other DNA
ggcttaaggaaacctttcacctaagctgcccaagtagctggtactgcaagtgtgcacaaccacacccagctaattttttt

SEQ ID NO: 131111 - DNA, 80 bp, synthetic construct; identical to SEQ ID NO: 41656
  misc_feature 1..80: note = Artificially Synthesized Probe
  source 1..80: mol_type = other DNA

SEQ ID NO: 131112 - DNA, 80 bp, synthetic construct
  misc_feature 1..80: note = Artificially Synthesized Probe
  source 1..80: mol_type = other DNA
ttctctacaagaacatatttgtcaccacaaggaggagcctcatgcaagctttctgggttttgttttgtttaaagtttttg

SEQ ID NO: 131113 - DNA, 80 bp, synthetic construct
  misc_feature 1..80: note = Artificially Synthesized Probe
  source 1..80: mol_type = other DNA
gaagggagacatgctgcccccgggttgcagagccaaacggatccacctggagaacagtccctgcattgaatgtatttctc

SEQ ID NO: 131114 - DNA, 80 bp, synthetic construct; identical to SEQ ID NO: 41657
  misc_feature 1..80: note = Artificially Synthesized Probe
  source 1..80: mol_type = other DNA

SEQ ID NO: 131115 - DNA, 80 bp, synthetic construct
  misc_feature 1..80: note = Artificially Synthesized Probe
  source 1..80: mol_type = other DNA
tcctatccttcagtgcaggctaagcatcatttgttctgggaagtctttccttacactgcattcaccactgtccacccagt

SEQ ID NO: 131116 - DNA, 80 bp, synthetic construct
  misc_feature 1..80: note = Artificially Synthesized Probe
  source 1..80: mol_type = other DNA
tctagcagaggttctgttctgggacatggtaagtgctgaagagatatgtgttgacaatgtagtgaatgaatgagtgagtg

SEQ ID NO: 131117 - DNA, 80 bp, synthetic construct
  misc_feature 1..80: note = Artificially Synthesized Probe
  source 1..80: mol_type = other DNA
tgtggggtcctgggcatgtcatttaattactcagaacctccatttccacttcttatgaaatggaggtaaaagtatacggc

SEQ ID NO: 131118 - DNA, 80 bp, synthetic construct; identical to SEQ ID NO: 41658
  misc_feature 1..80: note = Artificially Synthesized Probe
  source 1..80: mol_type = other DNA

SEQ ID NO: 131119 - DNA, 80 bp, synthetic construct
  misc_feature 1..80: note = Artificially Synthesized Probe
  source 1..80: mol_type = other DNA
tcctggactcagagcatcatacaatttgtcatacaaatgaggacagtccagggttacattattaataatactaagaccac

SEQ ID NO: 131120 - DNA, 80 bp, synthetic construct
  misc_feature 1..80: note = Artificially Synthesized Probe
  source 1..80: mol_type = other DNA
caaaaacctagtcctttaaaatccatccccccacacaccatcatctcagactgtggccaagaaaggaaatcatttctcgt

SEQ ID NO: 131121 - DNA, 80 bp, synthetic construct
  misc_feature 1..80: note = Artificially Synthesized Probe
  source 1..80: mol_type = other DNA
ccacccaggagagagctataaaatctcctgctgaaatttggtttagctttctttgtgtgtgtgccctattctttgctaca

SEQ ID NO: 131122 - DNA, 80 bp, synthetic construct
  misc_feature 1..80: note = Artificially Synthesized Probe
  source 1..80: mol_type = other DNA
gaatgtggatatgatgaaaataatcatcatcaccaattttgtgggggctgggttacttgggaagtggtggatatgtagtt

SEQ ID NO: 131123 - DNA, 80 bp, synthetic construct; identical to SEQ ID NO: 41659
  misc_feature 1..80: note = Artificially Synthesized Probe
  source 1..80: mol_type = other DNA

SEQ ID NO: 131124 - DNA, 80 bp, synthetic construct
  misc_feature 1..80: note = Artificially Synthesized Probe
  source 1..80: mol_type = other DNA
tgtattaaattatctaccatgaccataggtgtctacagggaccaggcaggataaaccaggacaactggtcaccacacttc

SEQ ID NO: 131125 - DNA, 80 bp, synthetic construct
  misc_feature 1..80: note = Artificially Synthesized Probe
  source 1..80: mol_type = other DNA
tatgcactttacaggattgtgtactgaggaagaggtaaaatggacaaacttcttaaaatggtgcttgtcacatcataaac

SEQ ID NO: 131126 - DNA, 80 bp, synthetic construct
  misc_feature 1..80: note = Artificially Synthesized Probe
  source 1..80: mol_type = other DNA
agatctctcaggccgggagacctgattcccattcatcaacaagcctctaatgaactcctgtgatggagagaaagaaagaa

SEQ ID NO: 131127 - DNA, 80 bp, synthetic construct; identical to SEQ ID NO: 41660
  misc_feature 1..80: note = Artificially Synthesized Probe
  source 1..80: mol_type = other DNA

SEQ ID NO: 131128 - DNA, 80 bp, synthetic construct
  misc_feature 1..80: note = Artificially Synthesized Probe
  source 1..80: mol_type = other DNA
cttgctgagacaccccacagctccccatggagtgtgttctcctttgctgcactgagtaataaaccccaacttgaactgca

SEQ ID NO: 131129 - DNA, 80 bp, synthetic construct
  misc_feature 1..80: note = Artificially Synthesized Probe
  source 1..80: mol_type = other DNA
ggttcaggaaggggaaagatctcagtgtaaccaggagatcattttcttgaaccaatgcctcattctgctacaacatgaag

SEQ ID NO: 131130 - DNA, 80 bp, synthetic construct
  misc_feature 1..80: note = Artificially Synthesized Probe
  source 1..80: mol_type = other DNA
gcaggacctggaaaatttcttctttcttgtgatgtattcttgcacatccctgaatgcccaataacttgcaacacagaacc

SEQ ID NO: 131131 - DNA, 80 bp, synthetic construct
  misc_feature 1..80: note = Artificially Synthesized Probe
  source 1..80: mol_type = other DNA
ggatgggtattgtagaggtacaaagttggatcagacataaatcccacctccttggaacttataattcagaaaggaagttc

SEQ ID NO: 131132 - DNA, 80 bp, synthetic construct; identical to SEQ ID NO: 41661
  misc_feature 1..80: note = Artificially Synthesized Probe
  source 1..80: mol_type = other DNA

SEQ ID NO: 131133 - DNA, 80 bp, synthetic construct
  misc_feature 1..80: note = Artificially Synthesized Probe
  source 1..80: mol_type = other DNA
tccctctactctgcagatctaattggccctttccttctcccacagcccctgcagctgtgaaaggtgtctgcctttaacag

SEQ ID NO: 131134 - DNA, 80 bp, synthetic construct
  misc_feature 1..80: note = Artificially Synthesized Probe
  source 1..80: mol_type = other DNA
cttaggtaagtcccttcacctctgtgagccctcatttcctcatttgtaaaaaatatttaagacctaagacctccctgcag

SEQ ID NO: 131135 - DNA, 80 bp, synthetic construct
  misc_feature 1..80: note = Artificially Synthesized Probe
  source 1..80: mol_type = other DNA
tctcctgtctcagcctcctgaggagctgggactataggcgcccgccatccctcctggcgaatttttgtattttttttagt

SEQ ID NO: 131136 - DNA, 80 bp, synthetic construct
  misc_feature 1..80: note = Artificially Synthesized Probe
  source 1..80: mol_type = other DNA
acaaatgcctttgggtccccagtgagggccaagccctgtcctagggcctggggacacctcatcgaacaaggccactgccc

SEQ ID NO: 131137 - DNA, 80 bp, synthetic construct; identical to SEQ ID NO: 41662
  misc_feature 1..80: note = Artificially Synthesized Probe
  source 1..80: mol_type = other DNA

SEQ ID NO: 131138 - DNA, 80 bp, synthetic construct
  misc_feature 1..80: note = Artificially Synthesized Probe
  source 1..80: mol_type = other DNA
gctccctggcttgtggctatgtcactccaatccctacctccatccacacgtggccaccttctccccttctcataaggaca

SEQ ID NO: 131139 - DNA, 80 bp, synthetic construct
  misc_feature 1..80: note = Artificially Synthesized Probe
  source 1..80: mol_type = other DNA
tacatgagcatatctttttaggagtgacaccatccacacagtaccacgtcttggatggcatacagtaggaactcaataga

SEQ ID NO: 131140 - DNA, 80 bp, synthetic construct
  misc_feature 1..80: note = Artificially Synthesized Probe
  source 1..80: mol_type = other DNA
ctctactaaaaacacaaaaattagctgggcttggtggcacaggcctctaatccctgctacttgggaggctgaggcaggag

SEQ ID NO: 131141 - DNA, 80 bp, synthetic construct; identical to SEQ ID NO: 41623
  misc_feature 1..80: note = Artificially Synthesized Probe
  source 1..80: mol_type = other DNA

SEQ ID NO: 131142 - DNA, 80 bp, synthetic construct; identical to SEQ ID NO: 41663
  misc_feature 1..80: note = Artificially Synthesized Probe
  source 1..80: mol_type = other DNA

SEQ ID NO: 131143 - DNA, 80 bp, synthetic construct
  misc_feature 1..80: note = Artificially Synthesized Probe
  source 1..80: mol_type = other DNA
tcaaaagctctggcaaaagaagaaggtcccaggatccacttactacaaggaagaaatttcaccacctttatttcctaacc

SEQ ID NO: 131144 - DNA, 80 bp, synthetic construct
  misc_feature 1..80: note = Artificially Synthesized Probe
  source 1..80: mol_type = other DNA
ttgttaggatatggaaagagcaggagtctccgagcaaagacgtgggttcaaatcctgactccgcctcttacccaagcaaa

SEQ ID NO: 131145 - DNA, 80 bp, synthetic construct; identical to SEQ ID NO: 41664
  misc_feature 1..80: note = Artificially Synthesized Probe
  source 1..80: mol_type = other DNA

SEQ ID NO: 131146 - DNA, 80 bp, synthetic construct
  misc_feature 1..80: note = Artificially Synthesized Probe
  source 1..80: mol_type = other DNA
aactgggctgagaagtaggagagggattcccaaaagtggggacagaaaatgccaacatccagaagtaggagacacccaaa

SEQ ID NO: 131147 - DNA, 80 bp, synthetic construct
  misc_feature 1..80: note = Artificially Synthesized Probe
  source 1..80: mol_type = other DNA
caaccacagaggcagccctcttggagcttgctttacatcaacacatgataacattcttcttagaaaaaattaaaacaagg

SEQ ID NO: 131148 - DNA, 80 bp, synthetic construct
  misc_feature 1..80: note = Artificially Synthesized Probe
  source 1..80: mol_type = other DNA
tacaaaaattagctggacgtggtgatgtgcacctctaatcccagctactcgggaggctgaggcaggagaatcacttgaac

SEQ ID NO: 131149 - DNA, 80 bp, synthetic construct; identical to SEQ ID NO: 41665
  misc_feature 1..80: note = Artificially Synthesized Probe
  source 1..80: mol_type = other DNA

SEQ ID NO: 131150 - DNA, 80 bp, synthetic construct
  misc_feature 1..80: note = Artificially Synthesized Probe
  source 1..80: mol_type = other DNA
cctcccaagtagctgggaccacaggcgcatgccaccacgtccggctaattttttgtattcttggtagagacagcgtttca

SEQ ID NO: 131151 - DNA, 80 bp, synthetic construct
  misc_feature 1..80: note = Artificially Synthesized Probe
  source 1..80: mol_type = other DNA
caatcataattggcagtatatttgtctatcttaatggcacataaggtaaacgtgcatcttaaaattttgttatataccca

SEQ ID NO: 131152 - DNA, 80 bp, synthetic construct
  misc_feature 1..80: note = Artificially Synthesized Probe
  source 1..80: mol_type = other DNA
ctttacctctaagggatccaccaccctgcgaggcagctttcaccaggacagcatggtgaccaagaaaaagcacgccaaca

SEQ ID NO: 131153 - DNA, 80 bp, synthetic construct
  misc_feature 1..80: note = Artificially Synthesized Probe
  source 1..80: mol_type = other DNA
tctttttacaggctatataatattccacaacatgaatatacacctataaatgtctagccatctctccatctgtgggcagt

SEQ ID NO: 131154 - DNA, 80 bp, synthetic construct
  misc_feature 1..80: note = Artificially Synthesized Probe
  source 1..80: mol_type = other DNA
tgaaacctctgcctcttgagctcaagcaattcccgtgcctcagcctcccaagtagctgggactacaggcgcatgccacca

SEQ ID NO: 131155 - DNA, 80 bp, synthetic construct; identical to SEQ ID NO: 41666
  misc_feature 1..80: note = Artificially Synthesized Probe
  source 1..80: mol_type = other DNA

SEQ ID NO: 131156 - DNA, 80 bp, synthetic construct
  misc_feature 1..80: note = Artificially Synthesized Probe
  source 1..80: mol_type = other DNA
cactcttgcaatttgcaccaggcatcgtgggtgggctggttttaattgtccatgtcactgcaacagcccagcacccagaa

SEQ ID NO: 131157 - DNA, 80 bp, synthetic construct
  misc_feature 1..80: note = Artificially Synthesized Probe
  source 1..80: mol_type = other DNA
tctcttatgggctcttaggagacacagctgaggtaagacatagaaaaaaaaaacaggaagtgctctgaagaagcattttc

SEQ ID NO: 131158 - DNA, 80 bp, synthetic construct; identical to SEQ ID NO: 41667
  misc_feature 1..80: note = Artificially Synthesized Probe
  source 1..80: mol_type = other DNA

SEQ ID NO: 131159 - DNA, 80 bp, synthetic construct
  misc_feature 1..80: note = Artificially Synthesized Probe
  source 1..80: mol_type = other DNA
aaatacaaaaatgatctgggcatggtggtgcacacctgtggtcccagctactcagaaggctgaggcaggaggctcaggag

SEQ ID NO: 131160 - DNA, 80 bp, synthetic construct
  misc_feature 1..80: note = Artificially Synthesized Probe
  source 1..80: mol_type = other DNA
gaaggaaaaggaaaggaaactgctagggttcaaatcctagaagttctagttactgtgcaaacttagatatcatacctgac

SEQ ID NO: 131161 - DNA, 80 bp, synthetic construct
  misc_feature 1..80: note = Artificially Synthesized Probe
  source 1..80: mol_type = other DNA
cagtactggggatgaaatcaatatgtactgagcaaataagtgcatctggtgggtctgcgatgattagctctatttcatag

SEQ ID NO: 131162 - DNA, 80 bp, synthetic construct; identical to SEQ ID NO: 41668
  misc_feature 1..80: note = Artificially Synthesized Probe
  source 1..80: mol_type = other DNA

SEQ ID NO: 131163 - DNA, 80 bp, synthetic construct
  misc_feature 1..80: note = Artificially Synthesized Probe
  source 1..80: mol_type = other DNA
taatggtgcacatctgtggtcccagctacttgggaggctgaggcaggagaattgcttgagcctgggagttcgaggctgca

SEQ ID NO: 131164 - DNA, 80 bp, synthetic construct
  misc_feature 1..80: note = Artificially Synthesized Probe
  source 1..80: mol_type = other DNA
ctcctgcttcagactctgttccacctgtagggctcattcccaaactttgtgtctagaacctctactgaagtgttcttttc

SEQ ID NO: 131165 - DNA, 80 bp, synthetic construct
  misc_feature 1..80: note = Artificially Synthesized Probe
  source 1..80: mol_type = other DNA
cttgagctgcctgtgatcatgtgaccaatcctccccaccttcccacccttatctgtggagctgatcccaacccactccag

SEQ ID NO: 131166 - DNA, 80 bp, synthetic construct
  misc_feature 1..80: note = Artificially Synthesized Probe
  source 1..80: mol_type = other DNA
gggttgctaaggtgggagaggatttagctgaaagcagaacccaaacagaagaaagcaaagcccaaaaagaagaggaaaga

SEQ ID NO: 131167 - DNA, 80 bp, synthetic construct; identical to SEQ ID NO: 41669
  misc_feature 1..80: note = Artificially Synthesized Probe
  source 1..80: mol_type = other DNA

SEQ ID NO: 131168 - DNA, 80 bp, synthetic construct
  misc_feature 1..80: note = Artificially Synthesized Probe
  source 1..80: mol_type = other DNA
ctcccaaggtagctaagcagaattaaggaggtgtgttagtctgttttcatgctgctaataaagacatacctggctgggcg

SEQ ID NO: 131169 - DNA, 80 bp, synthetic construct
  misc_feature 1..80: note = Artificially Synthesized Probe
  source 1..80: mol_type = other DNA
tacttgggagactgaggcagaagaattgcttaaatccaggaggcggaggttgcagtgagccgagatcgcgccattgcact

SEQ ID NO: 131170 - DNA, 80 bp, synthetic construct
  misc_feature 1..80: note = Artificially Synthesized Probe
  source 1..80: mol_type = other DNA
cctcacaatcctggctgaaggtgaatgaggagcaaagtcacgtcttacatggcggcaggcaggagggtttgtgcagggga

SEQ ID NO: 131171 - DNA, 80 bp, synthetic construct
  misc_feature 1..80: note = Artificially Synthesized Probe
  source 1..80: mol_type = other DNA
gcacagccaaatcacatcaggaggcaagttagatcatgggacttccctaacagtcctccatctgccaggtgattacagta

SEQ ID NO: 131172 - DNA, 80 bp, synthetic construct; identical to SEQ ID NO: 41670
  misc_feature 1..80: note = Artificially Synthesized Probe
  source 1..80: mol_type = other DNA

SEQ ID NO: 131173 - DNA, 80 bp, synthetic construct
  misc_feature 1..80: note = Artificially Synthesized Probe
  source 1..80: mol_type = other DNA
atcccaggtcattttaaattcccaagtctgctcctccagcaccatcttggaaaactttcatatctgatttcaggtttgca

SEQ ID NO: 131174 - DNA, 80 bp, synthetic construct; identical to SEQ ID NO: 41619
  misc_feature 1..80: note = Artificially Synthesized Probe
  source 1..80: mol_type = other DNA

SEQ ID NO: 131175 - DNA, 80 bp, synthetic construct
  misc_feature 1..80: note = Artificially Synthesized Probe
  source 1..80: mol_type = other DNA
attaggctctttaaatacactgtcctgttttagcctcacaataaccttacaaaaagagatgacaattatcctcattttgc

SEQ ID NO: 131176 - DNA, 80 bp, synthetic construct
  misc_feature 1..80: note = Artificially Synthesized Probe
  source 1..80: mol_type = other DNA
aagcatggttgttgcactgtcaagattgaagaggaagccagcccagtgcctattgtggttagccatccaattgacccatg

SEQ ID NO: 131177 - DNA, 80 bp, synthetic construct; identical to SEQ ID NO: 41671
  misc_feature 1..80: note = Artificially Synthesized Probe
  source 1..80: mol_type = other DNA

SEQ ID NO: 131178 - DNA, 80 bp, synthetic construct
  misc_feature 1..80: note = Artificially Synthesized Probe
  source 1..80: mol_type = other DNA
gaccggaattcttatcattctttttttttgttttttttttgagagagtctcactctgttgcccagactggagtgcagtgg

SEQ ID NO: 131179 - DNA, 80 bp, synthetic construct
  misc_feature 1..80: note = Artificially Synthesized Probe
  source 1..80: mol_type = other DNA
aaactcctgacctcaggtgatctgcctgcctcagcctcccaaagtgctgggattacagacatgagccaccacgcctggcc

SEQ ID NO: 131180 - DNA, 80 bp, synthetic construct
  misc_feature 1..80: note = Artificially Synthesized Probe
  source 1..80: mol_type = other DNA
ggtgtgctggagctgactcatatcaactcacaagagccagttaagcttttgagaattttgtgagccaggtaacatcatgt

SEQ ID NO: 131181 - DNA, 80 bp, synthetic construct
  misc_feature 1..80: note = Artificially Synthesized Probe
  source 1..80: mol_type = other DNA
gcatgcctctggactttagagaaacagttctggttcaccataaacccatatattcatacaataaatacatatattgagct

SEQ ID NO: 131182 - DNA, 80 bp, synthetic construct; identical to SEQ ID NO: 41672
  misc_feature 1..80: note = Artificially Synthesized Probe
  source 1..80: mol_type = other DNA

SEQ ID NO: 131183 - DNA, 80 bp, synthetic construct
  misc_feature 1..80: note = Artificially Synthesized Probe
  source 1..80: mol_type = other DNA
catgctaggcacttgtctttatttttttatccccagcctcagtaagtctatcaaaaactgctcatgcctataatctcagc

SEQ ID NO: 131184 - DNA, 80 bp, synthetic construct
  misc_feature 1..80: note = Artificially Synthesized Probe
  source 1..80: mol_type = other DNA
ctgaaatcccaagactttgggaggccaaggcaggaacatcacttgacccaggagttcaagaccagcctgggaaacatagt

SEQ ID NO: 131185 - DNA, 80 bp, synthetic construct; identical to SEQ ID NO: 41624
  misc_feature 1..80: note = Artificially Synthesized Probe
  source 1..80: mol_type = other DNA

SEQ ID NO: 131186 - DNA, 80 bp, synthetic construct; identical to SEQ ID NO: 41673
  misc_feature 1..80: note = Artificially Synthesized Probe
  source 1..80: mol_type = other DNA

SEQ ID NO: 131187 - DNA, 80 bp, synthetic construct
  misc_feature 1..80: note = Artificially Synthesized Probe
  source 1..80: mol_type = other DNA
aaaaaaaaaaaaacctgcccacattttcaaagtctatgaaactcagtcttcatttcctcatcagatcctcctacagaacc

SEQ ID NO: 131188 - DNA, 80 bp, synthetic construct
  misc_feature 1..80: note = Artificially Synthesized Probe
  source 1..80: mol_type = other DNA
ttatctcaagcctcaatgaattgaactgttaggtttatttccctccctccacaaatgctcattcatcccatttcctttct

SEQ ID NO: 131189 - DNA, 80 bp, synthetic construct
  misc_feature 1..80: note = Artificially Synthesized Probe
  source 1..80: mol_type = other DNA
accccactactgcaaagcccttgttctaggcaatgtgaatacaaacaacgctggcatggaatctgtggaatgagacctct

SEQ ID NO: 131190 - DNA, 80 bp, synthetic construct; identical to SEQ ID NO: 41674
  misc_feature 1..80: note = Artificially Synthesized Probe
  source 1..80: mol_type = other DNA

SEQ ID NO: 131191 - DNA, 80 bp, synthetic construct
  misc_feature 1..80: note = Artificially Synthesized Probe
  source 1..80: mol_type = other DNA
cactgagaagttgccggctcgattcgctgactgtcacgttctccagcctgaaggggttcatcagcggtgtgcacgggctc

SEQ ID NO: 131192 - DNA, 80 bp, synthetic construct
  misc_feature 1..80: note = Artificially Synthesized Probe
  source 1..80: mol_type = other DNA
agggttttcgcagtcccggccttctgctcaccttccccccgagtccctagacattgtattttagggacttgggggaggag

SEQ ID NO: 131193 - DNA, 80 bp, synthetic construct
  misc_feature 1..80: note = Artificially Synthesized Probe
  source 1..80: mol_type = other DNA
aggtcctgcgcccccgggccagtcctctccagccgctcggtgtcaatgatataccagaagtccgtgccgatggcggccgc

SEQ ID NO: 131194 - DNA, 80 bp, synthetic construct; identical to SEQ ID NO: 41675
  misc_feature 1..80: note = Artificially Synthesized Probe
  source 1..80: mol_type = other DNA

SEQ ID NO: 131195 - DNA, 80 bp, synthetic construct
  misc_feature 1..80: note = Artificially Synthesized Probe
  source 1..80: mol_type = other DNA
tagcaaacgtagtcttcttaggccagattgaaatgccagaatgtatggagattaatcacagaataatacaaactgccgct

SEQ ID NO: 131196 - DNA, 80 bp, synthetic construct
  misc_feature 1..80: note = Artificially Synthesized Probe
  source 1..80: mol_type = other DNA
ttccccaccagcaccttaacccacctcgtccctcagccccactccaccctcggccctccacgcccagcccaagcggactc

SEQ ID NO: 131197 - DNA, 80 bp, synthetic construct
  misc_feature 1..80: note = Artificially Synthesized Probe
  source 1..80: mol_type = other DNA
cactcccagccctgctctccagggtcttcccgcagctcctgctctggccggggcgcagctgaccctctgagccctcctcc

SEQ ID NO: 131198 - DNA, 80 bp, synthetic construct
  misc_feature 1..80: note = Artificially Synthesized Probe
  source 1..80: mol_type = other DNA
cagaacacagcccttcgaaaacttttaattaatttttccccctttcagcataattgatgtcagttcagacttcggtgttt

SEQ ID NO: 131199 - DNA, 80 bp, synthetic construct
  misc_feature 1..80: note = Artificially Synthesized Probe
  source 1..80: mol_type = other DNA
acacataatttagactatgtcacttttctatttaaattattttatcgttcccccttgccctgccctgcagaacccaaaga

SEQ ID NO: 131200 - DNA, 80 bp, synthetic construct
  misc_feature 1..80: note = Artificially Synthesized Probe
  source 1..80: mol_type = other DNA
tgcaatggtgcaccttgcatcatgcaatggtgcaccttgcaccatgcttcattcctccaaaactttgcacttgatgttct

SEQ ID NO: 131201 - DNA, 80 bp, synthetic construct; identical to SEQ ID NO: 41625
  misc_feature 1..80: note = Artificially Synthesized Probe
  source 1..80: mol_type = other DNA

SEQ ID NO: 131202 - DNA, 80 bp, synthetic construct
  misc_feature 1..80: note = Artificially Synthesized Probe
  source 1..80: mol_type = other DNA
gcatctctcttcataaaccactgtgattcattggtcaaactggcttatgtaatccaatattttcctttttgcctagactg

SEQ ID NO: 131203 - DNA, 80 bp, synthetic construct
  misc_feature 1..80: note = Artificially Synthesized Probe
  source 1..80: mol_type = other DNA
ataggcaagctgcaaagaccaagtaaagcatatatgcaagccctctcatgctggctttatgtcttgcttaacagataagc

SEQ ID NO: 131204 - DNA, 80 bp, synthetic construct; identical to SEQ ID NO: 41626
  misc_feature 1..80: note = Artificially Synthesized Probe
  source 1..80: mol_type = other DNA

SEQ ID NO: 131205 - DNA, 80 bp, synthetic construct
  misc_feature 1..80: note = Artificially Synthesized Probe
  source 1..80: mol_type = other DNA
taactgttttacataggggtaccccttttcagtgttcagagatttcatggcagtagtctcagtgcaaattgactgagaaa

SEQ ID NO: 131206 - DNA, 80 bp, synthetic construct
  misc_feature 1..80: note = Artificially Synthesized Probe
  source 1..80: mol_type = other DNA
gaagccaaagaattgatggtgctggttgtgctgggagataagccagtgggcagatagagacctgaggcaggagagaagtg

SEQ ID NO: 131207 - DNA, 80 bp, synthetic construct
  misc_feature 1..80: note = Artificially Synthesized Probe
  source 1..80: mol_type = other DNA
gctcccctcagagatataaataaaatatgaatgtgtctattccaagtggttactcttctcctcaacatctttctctctct

SEQ ID NO: 131208 - DNA, 80 bp, synthetic construct
  misc_feature 1..80: note = Artificially Synthesized Probe
  source 1..80: mol_type = other DNA
ccctttctcttttctttctagttgttctcttctttctcttatgttcttgatcactagtctatttttggccaggctcaatg

SEQ ID NO: 131209 - DNA, 80 bp, synthetic construct
  misc_feature 1..80: note = Artificially Synthesized Probe
  source 1..80: mol_type = other DNA
ggaggctgaggcaggaggattgcttgagcccaggaggttgaggttgcagtgagctgtaatcataccactgcactcaccct

SEQ ID NO: 131210 - DNA, 80 bp, synthetic construct; identical to SEQ ID NO: 41627
  misc_feature 1..80: note = Artificially Synthesized Probe
  source 1..80: mol_type = other DNA

SEQ ID NO: 131211 - DNA, 80 bp, synthetic construct
  misc_feature 1..80: note = Artificially Synthesized Probe
  source 1..80: mol_type = other DNA
ggtttcttacatattttacccttcttaaaattctcaaacctttgatttcataaataaatgctcagccaggcatggtggct

SEQ ID NO: 131212 - DNA, 80 bp, synthetic construct
  misc_feature 1..80: note = Artificially Synthesized Probe
  source 1..80: mol_type = other DNA
ctgagtgtggtggtgtgtgcctgtagtcccagctgccttggaggctgaggcgggaggatcacttgagcccagaagatgga

SEQ ID NO: 131213 - DNA, 80 bp, synthetic construct
  misc_feature 1..80: note = Artificially Synthesized Probe
  source 1..80: mol_type = other DNA
ttcataaatacatacaatcctgaagaacacttttacatgcaccacgatgtttcagactgattgtgtatactttatagaat

SEQ ID NO: 131214 - DNA, 80 bp, synthetic construct; identical to SEQ ID NO: 41628
  misc_feature 1..80: note = Artificially Synthesized Probe
  source 1..80: mol_type = other DNA

SEQ ID NO: 131215 - DNA, 80 bp, synthetic construct
  misc_feature 1..80: note = Artificially Synthesized Probe
  source 1..80: mol_type = other DNA
ccaagcaacaaccccagtaacaatcagtcccaaatgcccagggttcaaataataactaacagcttccctaaaatttttgt

SEQ ID NO: 131216 - DNA, 80 bp, synthetic construct
  misc_feature 1..80: note = Artificially Synthesized Probe
  source 1..80: mol_type = other DNA
agcacaccaagtcttctttttcttctgcaataaaggtttcgctctcctctatcttcctttgagtgtctgccaaaacgcaa

SEQ ID NO: 131217 - DNA, 80 bp, synthetic construct; identical to SEQ ID NO: 41629
  misc_feature 1..80: note = Artificially Synthesized Probe
  source 1..80: mol_type = other DNA

SEQ ID NO: 131218 - DNA, 80 bp, synthetic construct
  misc_feature 1..80: note = Artificially Synthesized Probe
  source 1..80: mol_type = other DNA
cgatctcagctcactgcaaactccacatcttgggtccacgccattctcttgcctcagcctccccagcagctgcgactaca

SEQ ID NO: 131219 - DNA, 80 bp, synthetic construct
  misc_feature 1..80: note = Artificially Synthesized Probe
  source 1..80: mol_type = other DNA
ggcagaaagcatcaaccaggatttctccaaaggggttaagcaagaactctagaccagattttgtctccgtggaggccctt

SEQ ID NO: 131220 - DNA, 80 bp, synthetic construct
  misc_feature 1..80: note = Artificially Synthesized Probe
  source 1..80: mol_type = other DNA
tcaagctattctcttgcctcagactccagagtggctgggattacaggcacccgccactacgcctggccaatttttgtatt

SEQ ID NO: 131221 - DNA, 80 bp, synthetic construct
  misc_feature 1..80: note = Artificially Synthesized Probe
  source 1..80: mol_type = other DNA
gctcagagagaagctttattcctcagggccctcctcagggcaggggcagtaggcaggaaggctcagctctcaaacttttt

SEQ ID NO: 131222 - DNA, 80 bp, synthetic construct
  misc_feature 1..80: note = Artificially Synthesized Probe
  source 1..80: mol_type = other DNA
gcaaatgtttgtatttttactacaggtggggtttcactgtgttggccaggctggtctcaaactcctgacctcatgatccg

SEQ ID NO: 131223 - DNA, 80 bp, synthetic construct; identical to SEQ ID NO: 41677
  misc_feature 1..80: note = Artificially Synthesized Probe
  source 1..80: mol_type = other DNA

SEQ ID NO: 131224 - DNA, 80 bp, synthetic construct
  misc_feature 1..80: note = Artificially Synthesized Probe
  source 1..80: mol_type = other DNA
atagctcactgcaccctcgatctcatgggctcaagcgattttcctgcctcagcctcctgagaagctgcatgccaccaccg

SEQ ID NO: 131225 - DNA, 80 bp, synthetic construct
  misc_feature 1..80: note = Artificially Synthesized Probe
  source 1..80: mol_type = other DNA
accgagatggtgtcattgcactccagcctgggcagcagagactccatcgcaaaaaaaaaaaaaaaaggaaattaaaaaaa

SEQ ID NO: 131226 - DNA, 80 bp, synthetic construct
  misc_feature 1..80: note = Artificially Synthesized Probe
  source 1..80: mol_type = other DNA
ctgcttctacctccaactccaagcaccatctgccctcaggcctagggttgttggcacccacagcccttcccctcagcatc

SEQ ID NO: 131227 - DNA, 80 bp, synthetic construct; identical to SEQ ID NO: 41678
  misc_feature 1..80: note = Artificially Synthesized Probe
  source 1..80: mol_type = other DNA

SEQ ID NO: 131228 - DNA, 80 bp, synthetic construct
  misc_feature 1..80: note = Artificially Synthesized Probe
  source 1..80: mol_type = other DNA
accctggatgcctaagtatctagttctggagcacttcctgtcttttcaagataatccctgccaattttccccatgcactt

SEQ ID NO: 131229 - DNA, 80 bp, synthetic construct
  misc_feature 1..80: note = Artificially Synthesized Probe
  source 1..80: mol_type = other DNA
cctctcaaaaccactggcataacctggtccagctacatgcaaatcacaattccctggccagtgcctgagctaatttacca

SEQ ID NO: 131230 - DNA, 80 bp, synthetic construct
  misc_feature 1..80: note = Artificially Synthesized Probe
  source 1..80: mol_type = other DNA
ggatgtgcagccaaaagcagctgcaaggggtcaggcagagaccaagtcccagccatctcaccctaccccgaaggtacccg

SEQ ID NO: 131231 - DNA, 80 bp, synthetic construct
  misc_feature 1..80: note = Artificially Synthesized Probe
  source 1..80: mol_type = other DNA
ctggactcctgggtctgagggagaaggggctcggggcctggactcctgggtctgagggaggagaaggggctgggggcctg

SEQ ID NO: 131232 - DNA, 80 bp, synthetic construct
  misc_feature 1..80: note = Artificially Synthesized Probe
  source 1..80: mol_type = other DNA
gagggaggaggggctggggactggactcctgggtctgagggaggaggggctggggcctggacttcagggtctgagggagg

SEQ ID NO: 131233 - DNA, 80 bp, synthetic construct
  misc_feature 1..80: note = Artificially Synthesized Probe
  source 1..80: mol_type = other DNA
actccagggtctgagggaggagaggctggggcctggactccagggtctcagggaggagaggctggggcctggactccagg

SEQ ID NO: 131234 - DNA, 80 bp, synthetic construct; identical to SEQ ID NO: 41679
  misc_feature 1..80: note = Artificially Synthesized Probe
  source 1..80: mol_type = other DNA

SEQ ID NO: 131235 - DNA, 80 bp, synthetic construct
  misc_feature 1..80: note = Artificially Synthesized Probe
  source 1..80: mol_type = other DNA
ctgagggaggaggggctggggcctggacttcagggtctcagggaggaggggctggggactggactcctgggtctgaggga

SEQ ID NO: 131236 - DNA, 80 bp, synthetic construct; identical to SEQ ID NO: 41680
  misc_feature 1..80: note = Artificially Synthesized Probe
  source 1..80: mol_type = other DNA

SEQ ID NO: 131237 - DNA, 80 bp, synthetic construct
  misc_feature 1..80: note = Artificially Synthesized Probe
  source 1..80: mol_type = other DNA
agcagcagagtctgcagaggggtgggagggaagcgcagcccacccggggcttcaggataaagaccaggcgtggggaaccg

SEQ ID NO: 131238 - DNA, 80 bp, synthetic construct
  misc_feature 1..80: note = Artificially Synthesized Probe
  source 1..80: mol_type = other DNA
ttcctgcacttcctatctttcccctccacttcctgtctgccttatgcccttcctgtctccttccttctcttcttattata

SEQ ID NO: 131239 - DNA, 80 bp, synthetic construct
  misc_feature 1..80: note = Artificially Synthesized Probe
  source 1..80: mol_type = other DNA
tgagcacctgcctgctctttcccagtcccgcccgtcctcaccttcagctgcaattttctcgaggcggagatcttagattt

SEQ ID NO: 131240 - DNA, 80 bp, synthetic construct; identical to SEQ ID NO: 41681
  misc_feature 1..80: note = Artificially Synthesized Probe
  source 1..80: mol_type = other DNA

SEQ ID NO: 131241 - DNA, 80 bp, synthetic construct
  misc_feature 1..80: note = Artificially Synthesized Probe
  source 1..80: mol_type = other DNA
cgtcccaccttggcgtgcggctccgtggcataagcgcggtagttggaggagcggcgtctgattggggctggtgcagggcg

SEQ ID NO: 131242 - DNA, 80 bp, synthetic construct
  misc_feature 1..80: note = Artificially Synthesized Probe
  source 1..80: mol_type = other DNA
cccgctgctctcaccgcatcgctgctcctggaaggagagaaaccaaggaggggggttagtggtgggctgtgtcctgtctc

SEQ ID NO: 131243 - DNA, 80 bp, synthetic construct
  misc_feature 1..80: note = Artificially Synthesized Probe
  source 1..80: mol_type = other DNA
cgcaaacccacttcctctcttcacccaagagtccctacgcctacctcgcaggccaagggtccagcctctcagctgcgacc

SEQ ID NO: 131244 - DNA, 80 bp, synthetic construct; identical to SEQ ID NO: 41682
  misc_feature 1..80: note = Artificially Synthesized Probe
  source 1..80: mol_type = other DNA

SEQ ID NO: 131245 - DNA, 80 bp, synthetic construct; identical to SEQ ID NO: 41676
  misc_feature 1..80: note = Artificially Synthesized Probe
  source 1..80: mol_type = other DNA

SEQ ID NO: 131246 - DNA, 80 bp, synthetic construct
  misc_feature 1..80: note = Artificially Synthesized Probe
  source 1..80: mol_type = other DNA
ctcaagccatcctctcacctcagactcctgaggagctgggaccacaggtgtgtgccaccatgcccagctaacttttgttc

SEQ ID NO: 131247 - DNA, 80 bp, synthetic construct; identical to SEQ ID NO: 41683
  misc_feature 1..80: note = Artificially Synthesized Probe
  source 1..80: mol_type = other DNA

SEQ ID NO: 131248 - DNA, 80 bp, synthetic construct
  misc_feature 1..80: note = Artificially Synthesized Probe
  source 1..80: mol_type = other DNA
ggaggccaaggtgggcgaatcacttgaggtcaggagttcaaaaccagcttgggcatcatggtgaaaccccatctctacta

SEQ ID NO: 131249 - DNA, 80 bp, synthetic construct; identical to SEQ ID NO: 41694
  misc_feature 1..80: note = Artificially Synthesized Probe
  source 1..80: mol_type = other DNA

SEQ ID NO: 131250 - DNA, 80 bp, synthetic construct
  misc_feature 1..80: note = Artificially Synthesized Probe
  source 1..80: mol_type = other DNA
tgctctgatttcctgccacttccttggaattctcttttctgggtttctgagacagtgaagagcgattccaagatgaagca

SEQ ID NO: 131251 - DNA, 80 bp, synthetic construct
  misc_feature 1..80: note = Artificially Synthesized Probe
  source 1..80: mol_type = other DNA
aaaatatggcttaccatattgtacaggaatgaataccggcttgcctcccacccctctggctgttccatccctatctcctg

SEQ ID NO: 131252 - DNA, 80 bp, synthetic construct
  misc_feature 1..80: note = Artificially Synthesized Probe
  source 1..80: mol_type = other DNA
ctaacaggtatctcctgaacttttcccaccttcccacacatgacgtcctgatggagctcaccaacttctctgagaaggag

SEQ ID NO: 131253 - DNA, 80 bp, synthetic construct
  misc_feature 1..80: note = Artificially Synthesized Probe
  source 1..80: mol_type = other DNA
tttttttttttttgagatggagtttcactcttgttgcccaggctgccgtgcaatgacacgatcttgactcactgcaacct

SEQ ID NO: 131254 - DNA, 80 bp, synthetic construct; identical to SEQ ID NO: 41684
  misc_feature 1..80: note = Artificially Synthesized Probe
  source 1..80: mol_type = other DNA

SEQ ID NO: 131255 - DNA, 80 bp, synthetic construct; identical to SEQ ID NO: 41695
  misc_feature 1..80: note = Artificially Synthesized Probe
  source 1..80: mol_type = other DNA

SEQ ID NO: 131256 - DNA, 80 bp, synthetic construct
  misc_feature 1..80: note = Artificially Synthesized Probe
  source 1..80: mol_type = other DNA
ctgtgcccggctaattttttaaaattttttgtagagatgtgggggatctcattttgttacttaggctgatcttgaactcc

SEQ ID NO: 131257 - DNA, 80 bp, synthetic construct
  misc_feature 1..80: note = Artificially Synthesized Probe
  source 1..80: mol_type = other DNA
tggagccagatggggaaggctttgaatgcaggctagttgctttgactgcgtcttaagagtagtggggagttgaggaaaga

SEQ ID NO: 131258 - DNA, 80 bp, synthetic construct
  misc_feature 1..80: note = Artificially Synthesized Probe
  source 1..80: mol_type = other DNA
ggaaagaaggaaacagactggctgggcatggtggcttgcgcctgtaatcccagcactttgggaggccaaggtgggagaac

SEQ ID NO: 131259 - DNA, 80 bp, synthetic construct; identical to SEQ ID NO: 41696
  misc_feature 1..80: note = Artificially Synthesized Probe
  source 1..80: mol_type = other DNA

SEQ ID NO: 131260 - DNA, 80 bp, synthetic construct
  misc_feature 1..80: note = Artificially Synthesized Probe
  source 1..80: mol_type = other DNA
ctgtttcaatttcctccctccatctctgcctttctcacaccttgtctctgggggtagagggaatatttaggaagatgtat

SEQ ID NO: 131261 - DNA, 80 bp, synthetic construct
  misc_feature 1..80: note = Artificially Synthesized Probe
  source 1..80: mol_type = other DNA
cccccaggaccccagggaaggactctggagtccagttctggaggaggggggatggggagaagaaaagagggaaggaaagt

SEQ ID NO: 131262 - DNA, 80 bp, synthetic construct
  misc_feature 1..80: note = Artificially Synthesized Probe
  source 1..80: mol_type = other DNA
ctgctctcctccattaggacccagcagtgcagggggtcccaacctctgtcttcattcagtgaccccagcgctctctcccc

SEQ ID NO: 131263 - DNA, 80 bp, synthetic construct; identical to SEQ ID NO: 41697
  misc_feature 1..80: note = Artificially Synthesized Probe
  source 1..80: mol_type = other DNA

SEQ ID NO: 131264 - DNA, 80 bp, synthetic construct
  misc_feature 1..80: note = Artificially Synthesized Probe
  source 1..80: mol_type = other DNA
aagggtggtcttggaggttggggcccgaggatatcgggggtccccccgggcccccgacatcggtctcgggaagcgaagca

SEQ ID NO: 131265 - DNA, 80 bp, synthetic construct
  misc_feature 1..80: note = Artificially Synthesized Probe
  source 1..80: mol_type = other DNA
tcagcttcgccatcaggtcgaacttctcagactccagctggtggatccagtccgacagctcctgggctttctccctggca

SEQ ID NO: 131266 - DNA, 80 bp, synthetic construct
  misc_feature 1..80: note = Artificially Synthesized Probe
  source 1..80: mol_type = other DNA
gaccgggagccgaggccgtcgggagccccatcccgccccctcctcccgggcccagcgtccccgcccccccaccccccagc

SEQ ID NO: 131267 - DNA, 80 bp, synthetic construct
  misc_feature 1..80: note = Artificially Synthesized Probe
  source 1..80: mol_type = other DNA
gtccctctggcctcggctgcgatgggcacgttccccctggcggtgcagggatggcgcgaggagacgctccagacccggag

SEQ ID NO: 131268 - DNA, 80 bp, synthetic construct; identical to SEQ ID NO: 41698
  misc_feature 1..80: note = Artificially Synthesized Probe
  source 1..80: mol_type = other DNA

SEQ ID NO: 131269 - DNA, 80 bp, synthetic construct
  misc_feature 1..80: note = Artificially Synthesized Probe
  source 1..80: mol_type = other DNA
gactcctgggtctggactcctgggtgtgagagaggaggagctggggtctggactcctgggtgtgagagaggaggagctgg

SEQ ID NO: 131270 - DNA, 80 bp, synthetic construct
  misc_feature 1..80: note = Artificially Synthesized Probe
  source 1..80: mol_type = other DNA
ggacttctgggtctgagggaggagggactggggtcctgaactcctggatctgagggaggaggggctgggggccggattcc

SEQ ID NO: 131271 - DNA, 80 bp, synthetic construct
  misc_feature 1..80: note = Artificially Synthesized Probe
  source 1..80: mol_type = other DNA
gacgcctgggtctgagggaggaggggccgcgggcctggacgcctgggtctgagggaggagggtctgggggcctggcctcc

SEQ ID NO: 131272 - DNA, 80 bp, synthetic construct; identical to SEQ ID NO: 41699
  misc_feature 1..80: note = Artificially Synthesized Probe
  source 1..80: mol_type = other DNA

SEQ ID NO: 131273 - DNA, 80 bp, synthetic construct
  misc_feature 1..80: note = Artificially Synthesized Probe
  source 1..80: mol_type = other DNA
ggatgtcatagatggtgaaaccgaggacatttcctaagaagggatttgaggaaggggggcttctgggagaattagtcacc

SEQ ID NO: 131274 - DNA, 80 bp, synthetic construct
  misc_feature 1..80: note = Artificially Synthesized Probe
  source 1..80: mol_type = other DNA
tcaaagtctttgagacaccctaggccacagggtgcctagccccaaatcccaatacccacagattctgagaccccgattta

SEQ ID NO: 131275 - DNA, 80 bp, synthetic construct
  misc_feature 1..80: note = Artificially Synthesized Probe
  source 1..80: mol_type = other DNA
tgatacccaaactcggaggcccagttcatgataccccagataatggcactctaagttttcatgctttctatcataatgtc

SEQ ID NO: 131276 - DNA, 80 bp, synthetic construct; identical to SEQ ID NO: 41700
  misc_feature 1..80: note = Artificially Synthesized Probe
  source 1..80: mol_type = other DNA

SEQ ID NO: 131277 - DNA, 80 bp, synthetic construct
  misc_feature 1..80: note = Artificially Synthesized Probe
  source 1..80: mol_type = other DNA
agagttttaaaatctgtgcccactttctccacatccgagctggagctctcgcatttcccaaggggagagaagggtgtcat

SEQ ID NO: 131278 - DNA, 80 bp, synthetic construct
  misc_feature 1..80: note = Artificially Synthesized Probe
  source 1..80: mol_type = other DNA
ccaaggacatggtttttgaagaccacagggctccgcagagccccttacctaggctgtgtctgagatgctgtgaatcttga

SEQ ID NO: 131279 - DNA, 80 bp, synthetic construct
  misc_feature 1..80: note = Artificially Synthesized Probe
  source 1..80: mol_type = other DNA
gctacttgggaggctgaggcagaaggaacctgggaggtcaaagctgcagtgagctgtgattgcaccactgtattcctgcc

SEQ ID NO: 131280 - DNA, 80 bp, synthetic construct
  misc_feature 1..80: note = Artificially Synthesized Probe
  source 1..80: mol_type = other DNA
ggagacgaggggaggggaggggaggggagacgaggggaagggaggggaggggagaggggaaagaaaaggaagaaagaaaa

SEQ ID NO: 131281 - DNA, 80 bp, synthetic construct
  misc_feature 1..80: note = Artificially Synthesized Probe
  source 1..80: mol_type = other DNA
aacgcggcccttccctgcccccttccggctgtagaagaatgaggtggtatcaggaaaaaggggcccctccagtctctgaa

SEQ ID NO: 131282 - DNA, 80 bp, synthetic construct; identical to SEQ ID NO: 41685
  misc_feature 1..80: note = Artificially Synthesized Probe
  source 1..80: mol_type = other DNA

SEQ ID NO: 131283 - DNA, 80 bp, synthetic construct
  misc_feature 1..80: note = Artificially Synthesized Probe
  source 1..80: mol_type = other DNA
aggatggaaatattgggctaaaagtagtgagtgaagcagaaaacataggagtctggtctctgattttgtagaattgccat

SEQ ID NO: 131284 - DNA, 80 bp, synthetic construct
  misc_feature 1..80: note = Artificially Synthesized Probe
  source 1..80: mol_type = other DNA
ctagtgatcctctcacctcagcctttttttttttttttttttaagacagagtttcgctcatgtcgcccaggctggagtgc

SEQ ID NO: 131285 - DNA, 80 bp, synthetic construct
  misc_feature 1..80: note = Artificially Synthesized Probe
  source 1..80: mol_type = other DNA
gtcaggctggtctcctgacctcaggtgatctgcccgcctcagcctcccaaagtgctgggattacaggtgtgagccgccgc

SEQ ID NO: 131286 - DNA, 80 bp, synthetic construct; identical to SEQ ID NO: 41686
  misc_feature 1..80: note = Artificially Synthesized Probe
  source 1..80: mol_type = other DNA

SEQ ID NO: 131287 - DNA, 80 bp, synthetic construct
  misc_feature 1..80: note = Artificially Synthesized Probe
  source 1..80: mol_type = other DNA
aatagtatctacctcacagggttgtaaaccctccacaggaagctgctgctgtaattattatttttttaaggatggggtct

SEQ ID NO: 131288 - DNA, 80 bp, synthetic construct
  misc_feature 1..80: note = Artificially Synthesized Probe
  source 1..80: mol_type = other DNA
tcaattttgtgattatatccttgttctgccaatgaggaatgggagccccagagaagtcagataacgtgcgcaagatcaca

SEQ ID NO: 131289 - DNA, 80 bp, synthetic construct; identical to SEQ ID NO: 41687
  misc_feature 1..80: note = Artificially Synthesized Probe
  source 1..80: mol_type = other DNA

SEQ ID NO: 131290 - DNA, 80 bp, synthetic construct
  misc_feature 1..80: note = Artificially Synthesized Probe
  source 1..80: mol_type = other DNA
tttcacaaagaaggcagcagaggcccagagaggggaagccacttgcccaaagtcacatagcactggagctgagacccgga

SEQ ID NO: 131291 - DNA, 80 bp, synthetic construct
  misc_feature 1..80: note = Artificially Synthesized Probe
  source 1..80: mol_type = other DNA
cgcaccttcatctcccgccccgtctgccgcttaccacgcttctgttctgcctgagggtgggggaggcggaacagtaaact

SEQ ID NO: 131292 - DNA, 80 bp, synthetic construct
  misc_feature 1..80: note = Artificially Synthesized Probe
  source 1..80: mol_type = other DNA
ggagctgatatttgggggcgagtgcagggtgttcatgggggagctgatgaatgtttatgagtcaggggccagggtggggg

SEQ ID NO: 131293 - DNA, 80 bp, synthetic construct
  misc_feature 1..80: note = Artificially Synthesized Probe
  source 1..80: mol_type = other DNA
gaggagtccagacccccagtcccttctcttagactgagtccaagccccagaccctctcgcattaggaaccagaagtctgg

SEQ ID NO: 131294 - DNA, 80 bp, synthetic construct
  misc_feature 1..80: note = Artificially Synthesized Probe
  source 1..80: mol_type = other DNA
tctcagactgagtccaagccccagaccctctcgcattaggaaccagaagtctggcccccagcccctcctccctcagaccc

SEQ ID NO: 131295 - DNA, 80 bp, synthetic construct; identical to SEQ ID NO: 41688
  misc_feature 1..80: note = Artificially Synthesized Probe
  source 1..80: mol_type = other DNA

SEQ ID NO: 131296 - DNA, 80 bp, synthetic construct
  misc_feature 1..80: note = Artificially Synthesized Probe
  source 1..80: mol_type = other DNA
taggactgagggaggagggccctgggatgtggaactggggcacagggatcagcagacccagtgccgcagaggctgctggg

SEQ ID NO: 131297 - DNA, 80 bp, synthetic construct
  misc_feature 1..80: note = Artificially Synthesized Probe
  source 1..80: mol_type = other DNA
ctgcaacctccgcctcccgggtttaagcaattctccagcctcagcctcctgagtagctgggattacaggcacccgccacc

SEQ ID NO: 131298 - DNA, 80 bp, synthetic construct; identical to SEQ ID NO: 41689
  misc_feature 1..80: note = Artificially Synthesized Probe
  source 1..80: mol_type = other DNA

SEQ ID NO: 131299 - DNA, 80 bp, synthetic construct
  misc_feature 1..80: note = Artificially Synthesized Probe
  source 1..80: mol_type = other DNA
gctgatggccttgagcctgaggaaggggttctggaatattgagcgaaggcattacgacattcgagaaactcttcattgaa

SEQ ID NO: 131300 - DNA, 80 bp, synthetic construct
  misc_feature 1..80: note = Artificially Synthesized Probe
  source 1..80: mol_type = other DNA
ggtgcaatctctgctctgttcactgcaacccccacctcctgggttcaagtgattctcctgcctcggcctcccaagtaact

SEQ ID NO: 131301 - DNA, 80 bp, synthetic construct
  misc_feature 1..80: note = Artificially Synthesized Probe
  source 1..80: mol_type = other DNA
agccatcgcgcctaaacttagtttcctatcactgctgtaatttgcaaatttagtggcagaaaaacaatgcagatttgtta

SEQ ID NO: 131302 - DNA, 80 bp, synthetic construct
  misc_feature 1..80: note = Artificially Synthesized Probe
  source 1..80: mol_type = other DNA
ttctttcatcttcagaggcagccatgcagcatcttcaaatctctcagtctgaccctctggccttcctcttataaggaccc

SEQ ID NO: 131303 - DNA, 80 bp, synthetic construct
  misc_feature 1..80: note = Artificially Synthesized Probe
  source 1..80: mol_type = other DNA
ctctcggctgggcgcggtggctcacgcctgtaatcccagcactttaggaggccaaggcgggtggatcacgaggtcaggag

SEQ ID NO: 131304 - DNA, 80 bp, synthetic construct; identical to SEQ ID NO: 41690
  misc_feature 1..80: note = Artificially Synthesized Probe
  source 1..80: mol_type = other DNA

SEQ ID NO: 131305 - DNA, 80 bp, synthetic construct
  misc_feature 1..80: note = Artificially Synthesized Probe
  source 1..80: mol_type = other DNA
aattagccgagcctggtggcaggtgcctgtaatcccagctactcaggaggctgaggcaggggaattgcttgaaccaggag

SEQ ID NO: 131306 - DNA, 80 bp, synthetic construct
  misc_feature 1..80: note = Artificially Synthesized Probe
  source 1..80: mol_type = other DNA
tcatcccagcactttgggaggtgaaagcaggtggattgcttgagcttaggagttgaagaccagcctggacaacatggcaa

SEQ ID NO: 131307 - DNA, 80 bp, synthetic construct; identical to SEQ ID NO: 41691
  misc_feature 1..80: note = Artificially Synthesized Probe
  source 1..80: mol_type = other DNA

SEQ ID NO: 131308 - DNA, 80 bp, synthetic construct
  misc_feature 1..80: note = Artificially Synthesized Probe
  source 1..80: mol_type = other DNA
gctactggggaggctgaggcagaagattcgcttgaacctggaaggcagaggttacagtgagctgagatcgtgccactgca

SEQ ID NO: 131309 - DNA, 80 bp, synthetic construct
  misc_feature 1..80: note = Artificially Synthesized Probe
  source 1..80: mol_type = other DNA
gcctgacgttcgcgttccttctcagttctgaagcgctgttgctcggctctctctgaccggcgccgctcctgggaaacgga

SEQ ID NO: 131310 - DNA, 80 bp, synthetic construct
  misc_feature 1..80: note = Artificially Synthesized Probe
  source 1..80: mol_type = other DNA
ccaagatgcaagggatccacatggagggaggaagaccggggggaacccggactctcggctcacaatgcgctccttcaagg

SEQ ID NO: 131311 - DNA, 80 bp, synthetic construct; identical to SEQ ID NO: 41692
  misc_feature 1..80: note = Artificially Synthesized Probe
  source 1..80: mol_type = other DNA

SEQ ID NO: 131312 - DNA, 80 bp, synthetic construct
  misc_feature 1..80: note = Artificially Synthesized Probe
  source 1..80: mol_type = other DNA
aagcgattttcctgcctcagcctcccgagtagctgggattacagacacctgccaccacgcccggctaatttttgtatttt

SEQ ID NO: 131313 - DNA, 80 bp, synthetic construct
  misc_feature 1..80: note = Artificially Synthesized Probe
  source 1..80: mol_type = other DNA
aaagactagcaactgcgcctgcggaggggtctcttgtcacttacatcgaagtcaacgcgctccccttctgggatctttgg

SEQ ID NO: 131314 - DNA, 80 bp, synthetic construct
  misc_feature 1..80: note = Artificially Synthesized Probe
  source 1..80: mol_type = other DNA
agctgagatcactccactgcactccagcctgggtgacagagcgagacgcagtctcaataaaaaaaaaaaaaaagaaagaa

SEQ ID NO: 131315 - DNA, 80 bp, synthetic construct
  misc_feature 1..80: note = Artificially Synthesized Probe
  source 1..80: mol_type = other DNA
cccagctgaggcgggctgtcagtgaaacacacaaaagaaggtaaaatacctcactactcatgtttttttggttgttgttg

SEQ ID NO: 131316 - DNA, 80 bp, synthetic construct; identical to SEQ ID NO: 41693
  misc_feature 1..80: note = Artificially Synthesized Probe
  source 1..80: mol_type = other DNA

SEQ ID NO: 131317 - DNA, 80 bp, synthetic construct
  misc_feature 1..80: note = Artificially Synthesized Probe
  source 1..80: mol_type = other DNA
attatataacagattaaaaaaactgtgctatgaaaattaatttttcctatattgttgtactttaaaaaatatgcctagta

SEQ ID NO: 131318 - DNA, 80 bp, synthetic construct
  misc_feature 1..80: note = Artificially Synthesized Probe
  source 1..80: mol_type = other DNA
gcctgccaccacgcctgggtaatttttgtatttttagtagagacggggtttcaccatgccggccaagctggtcttgaact

SEQ ID NO: 131319 - DNA, 80 bp, synthetic construct
  misc_feature 1..80: note = Artificially Synthesized Probe
  source 1..80: mol_type = other DNA
ctgcagccggtgctgtccacagggagctccagcccttctcacactcgacccgcaggtgggtataggcaggagcggccacc

SEQ ID NO: 131320 - DNA, 80 bp, synthetic construct
  misc_feature 1..80: note = Artificially Synthesized Probe
  source 1..80: mol_type = other DNA
acgctggtgctgtgtggaccagaggagaaaccgagacccaagtgagtgtggggtcctggcaggcccgctgctgagtgtgt

SEQ ID NO: 131321 - DNA, 80 bp, synthetic construct
  misc_feature 1..80: note = Artificially Synthesized Probe
  source 1..80: mol_type = other DNA
cagatgcctggagcctgcattcggagggacgctcagagcgcagggtgggagggatgagggtcacctgggagatgggcttg

SEQ ID NO: 131322 - DNA, 80 bp, synthetic construct; identical to SEQ ID NO: 41712
  misc_feature 1..80: note = Artificially Synthesized Probe
  source 1..80: mol_type = other DNA

SEQ ID NO: 131323 - DNA, 80 bp, synthetic construct
  misc_feature 1..80: note = Artificially Synthesized Probe
  source 1..80: mol_type = other DNA
gtcctcatcgcacctgcttgtgagcacttcgtgggttggtttttttaatgcagctcttctgacttttctgcttttgatcg

SEQ ID NO: 131324 - DNA, 80 bp, synthetic construct
  misc_feature 1..80: note = Artificially Synthesized Probe
  source 1..80: mol_type = other DNA
agaagagtgagaacatctgaagggtacagccggcgtattcccaccctttgcactgtatttttcagtgattttaagtacag

SEQ ID NO: 131325 - DNA, 80 bp, synthetic construct
  misc_feature 1..80: note = Artificially Synthesized Probe
  source 1..80: mol_type = other DNA
cagactgtggaaaagagcagaaagaaataaaaagccttatttcttccttttttccatgcatagcgcttggaaaaaaaaga

SEQ ID NO: 131326 - DNA, 80 bp, synthetic construct; identical to SEQ ID NO: 41713
  misc_feature 1..80: note = Artificially Synthesized Probe
  source 1..80: mol_type = other DNA

SEQ ID NO: 131327 - DNA, 80 bp, synthetic construct; identical to SEQ ID NO: 41702
  misc_feature 1..80: note = Artificially Synthesized Probe
  source 1..80: mol_type = other DNA

SEQ ID NO: 131328 - DNA, 80 bp, synthetic construct
  misc_feature 1..80: note = Artificially Synthesized Probe
  source 1..80: mol_type = other DNA
cgggtctgtgtcccacaccctcctcacccagggacaggaacgtgcttttacattgcagcctctgatggatgagaaacggc

SEQ ID NO: 131329 - DNA, 80 bp, synthetic construct
  misc_feature 1..80: note = Artificially Synthesized Probe
  source 1..80: mol_type = other DNA
atcagtttgcataaggatataagtcttctctgtatttgctgaaaattttttttagtcttttttttttgcctttccatttt

SEQ ID NO: 131330 - DNA, 80 bp, synthetic construct; identical to SEQ ID NO: 41714
  misc_feature 1..80: note = Artificially Synthesized Probe
  source 1..80: mol_type = other DNA

SEQ ID NO: 131331 - DNA, 80 bp, synthetic construct
  misc_feature 1..80: note = Artificially Synthesized Probe
  source 1..80: mol_type = other DNA
accgccacccacagtggccatcgcttctcacccgacatggctgcatttgtttatctgtttgaggaggaaacagaggtgcc

SEQ ID NO: 131332 - DNA, 80 bp, synthetic construct
  misc_feature 1..80: note = Artificially Synthesized Probe
  source 1..80: mol_type = other DNA
gtcactaggcgggcatgcttggctgggggccagagcaggagggcaccagggttggcaggggccagcggggaaagcgccag

SEQ ID NO: 131333 - DNA, 80 bp, synthetic construct
  misc_feature 1..80: note = Artificially Synthesized Probe
  source 1..80: mol_type = other DNA
caccccagcttttgggctctaggcctcagaaggtcacttcctcccaagtagccagagccggggcctcctgggtctgggca

SEQ ID NO: 131334 - DNA, 80 bp, synthetic construct
  misc_feature 1..80: note = Artificially Synthesized Probe
  source 1..80: mol_type = other DNA
acacccatccactcaaccatctatccatccattcatccacccaaccacccacctacccatccatccatccatccatccat

SEQ ID NO: 131335 - DNA, 80 bp, synthetic construct; identical to SEQ ID NO: 41715
  misc_feature 1..80: note = Artificially Synthesized Probe
  source 1..80: mol_type = other DNA

SEQ ID NO: 131336 - DNA, 80 bp, synthetic construct
  misc_feature 1..80: note = Artificially Synthesized Probe
  source 1..80: mol_type = other DNA
tccatccatccatttctccaatcatccatctatccacccagtcatctgtctccatcctctctcactcatccacccatcca

SEQ ID NO: 131337 - DNA, 80 bp, synthetic construct
  misc_feature 1..80: note = Artificially Synthesized Probe
  source 1..80: mol_type = other DNA
ggctgggcaccatccctgctgtgtggctcaggaatcaggccaccctcggcccctatgaggatagcagccatggcaatgtg

SEQ ID NO: 131338 - DNA, 80 bp, synthetic construct
  misc_feature 1..80: note = Artificially Synthesized Probe
  source 1..80: mol_type = other DNA
gcccgagggtgagggggcagctgtgggccaaggagggctgggctgtcacacccgcctcacccacgtcttgggtttctggg

SEQ ID NO: 131339 - DNA, 80 bp, synthetic construct; identical to SEQ ID NO: 41716
  misc_feature 1..80: note = Artificially Synthesized Probe
  source 1..80: mol_type = other DNA

SEQ ID NO: 131340 - DNA, 80 bp, synthetic construct
  misc_feature 1..80: note = Artificially Synthesized Probe
  source 1..80: mol_type = other DNA
gccgtgcagagagagcggagcagcagaggattcgtgcagagaaggagagggagcgccagaacagactggcggtgagggca

SEQ ID NO: 131341 - DNA, 80 bp, synthetic construct
  misc_feature 1..80: note = Artificially Synthesized Probe
  source 1..80: mol_type = other DNA
agaaaacaaatcctggccaagacctggagcttccttccagatagttctaagcccagggtgggcccttccagacagctcta

SEQ ID NO: 131342 - DNA, 80 bp, synthetic construct
  misc_feature 1..80: note = Artificially Synthesized Probe
  source 1..80: mol_type = other DNA
aaagctctgtcttccatgggagccaactacagcagctacctggccaaggtgtgtgccgctgctgggagcacggtggtagc

SEQ ID NO: 131343 - DNA, 80 bp, synthetic construct
  misc_feature 1..80: note = Artificially Synthesized Probe
  source 1..80: mol_type = other DNA
tcgatcaccttggtgaagacaaactgaggtgaggggtgggtgttgtggggctcagccccacggggtggcccctgcaggag

SEQ ID NO: 131344 - DNA, 80 bp, synthetic construct; identical to SEQ ID NO: 41717
  misc_feature 1..80: note = Artificially Synthesized Probe
  source 1..80: mol_type = other DNA

SEQ ID NO: 131345 - DNA, 80 bp, synthetic construct
  misc_feature 1..80: note = Artificially Synthesized Probe
  source 1..80: mol_type = other DNA
tgctggggactgtggccagagcccgtcctcctggctggccatgcagcgccctgagcgatgaacctggcccctttgggcgg

SEQ ID NO: 131346 - DNA, 80 bp, synthetic construct
  misc_feature 1..80: note = Artificially Synthesized Probe
  source 1..80: mol_type = other DNA
cgtcctttcgacagagcctcctccacaaacccagactctggcttccaccagggccccggacacctgcttcctcagggcag

SEQ ID NO: 131347 - DNA, 80 bp, synthetic construct; identical to SEQ ID NO: 41718
  misc_feature 1..80: note = Artificially Synthesized Probe
  source 1..80: mol_type = other DNA

SEQ ID NO: 131348 - DNA, 80 bp, synthetic construct
  misc_feature 1..80: note = Artificially Synthesized Probe
  source 1..80: mol_type = other DNA
acccaggtgcagcaggtgtggggcgaccagtccaagccagccgggcaaatccgagctccttctcgggggttctgggcagg

SEQ ID NO: 131349 - DNA, 80 bp, synthetic construct
  misc_feature 1..80: note = Artificially Synthesized Probe
  source 1..80: mol_type = other DNA
caggctccgctccctcccttcactgaccctcctcctccttacagaggatggccctagaggagtctgtggcgtttggggcc

SEQ ID NO: 131350 - DNA, 80 bp, synthetic construct
  misc_feature 1..80: note = Artificially Synthesized Probe
  source 1..80: mol_type = other DNA
gggcttcacggcacaggacccaggtccttcccatgctgtgttcccagagctgaatcagggacccactggctttggataga

SEQ ID NO: 131351 - DNA, 80 bp, synthetic construct
  misc_feature 1..80: note = Artificially Synthesized Probe
  source 1..80: mol_type = other DNA
cagatgctggccaagttgtaagtagccgggtccgccctgggccaggcccgtgggtgtgcgttgcacggtgaggtgaacct

SEQ ID NO: 131352 - DNA, 80 bp, synthetic construct
  misc_feature 1..80: note = Artificially Synthesized Probe
  source 1..80: mol_type = other DNA
caggagctccgcctcaagccagcagcggccacagagtgcccctgggcacaggcacgagggcgggagcggctggcccagga

SEQ ID NO: 131353 - DNA, 80 bp, synthetic construct; identical to SEQ ID NO: 41719
  misc_feature 1..80: note = Artificially Synthesized Probe
  source 1..80: mol_type = other DNA

SEQ ID NO: 131354 - DNA, 80 bp, synthetic construct
  misc_feature 1..80: note = Artificially Synthesized Probe
  source 1..80: mol_type = other DNA
agtgagtcactcatgttgttcacagatcaccacgctcaggagccgcattgaccaggcccagaagcagtgagtagccctgc

SEQ ID NO: 131355 - DNA, 80 bp, synthetic construct
  misc_feature 1..80: note = Artificially Synthesized Probe
  source 1..80: mol_type = other DNA
gggacccggagcctcctccctctcctgcacgcaggggagccctggggggtggcagagtcaggaggagggatcccaatggg

SEQ ID NO: 131356 - DNA, 80 bp, synthetic construct
  misc_feature 1..80: note = Artificially Synthesized Probe
  source 1..80: mol_type = other DNA
ctaggacagggaattaagcagtcagggcttcatcaccagcccctctgtgacgctgggcaaaatcatggactcctcaggat

SEQ ID NO: 131357 - DNA, 80 bp, synthetic construct; identical to SEQ ID NO: 41720
  misc_feature 1..80: note = Artificially Synthesized Probe
  source 1..80: mol_type = other DNA

SEQ ID NO: 131358 - DNA, 80 bp, synthetic construct
  misc_feature 1..80: note = Artificially Synthesized Probe
  source 1..80: mol_type = other DNA
tgtgccgagagtgcccaggaacgtgtgtgagggcacggcctttgccagccaggtgtcctgctgagcagccgcgtctgaat

SEQ ID NO: 131359 - DNA, 80 bp, synthetic construct
  misc_feature 1..80: note = Artificially Synthesized Probe
  source 1..80: mol_type = other DNA
atgagctctttcaaggccaagcgtctaggattatatcattatctgctaagacagtcttccccagctcaggggtctgtctg

SEQ ID NO: 131360 - DNA, 80 bp, synthetic construct
  misc_feature 1..80: note = Artificially Synthesized Probe
  source 1..80: mol_type = other DNA
gcagagtctcaggaagagattctgggataggaaaaagctacccccgttgcctggaagacagctatctgctgggtaatttt

SEQ ID NO: 131361 - DNA, 80 bp, synthetic construct
  misc_feature 1..80: note = Artificially Synthesized Probe
  source 1..80: mol_type = other DNA
gccgggcctgtgccctgagagcagcctggggtcgggctgagagtccgcccagggtgggggaccaggaggggcatggccag

SEQ ID NO: 131362 - DNA, 80 bp, synthetic construct; identical to SEQ ID NO: 41721
  misc_feature 1..80: note = Artificially Synthesized Probe
  source 1..80: mol_type = other DNA

SEQ ID NO: 131363 - DNA, 80 bp, synthetic construct; identical to SEQ ID NO: 41703
  misc_feature 1..80: note = Artificially Synthesized Probe
  source 1..80: mol_type = other DNA

SEQ ID NO: 131364 - DNA, 80 bp, synthetic construct
  misc_feature 1..80: note = Artificially Synthesized Probe
  source 1..80: mol_type = other DNA
tgggcatggagcttcccctagacagggacagatccagagcatccccgggaccagggaaagcggccacagggagggaaatg

SEQ ID NO: 131365 - DNA, 80 bp, synthetic construct; identical to SEQ ID NO: 41701
  misc_feature 1..80: note = Artificially Synthesized Probe
  source 1..80: mol_type = other DNA

SEQ ID NO: 131366 - DNA, 80 bp, synthetic construct
  misc_feature 1..80: note = Artificially Synthesized Probe
  source 1..80: mol_type = other DNA
agcttccctgctctgtgatcttggaggaggggtcctcagaggggtgtggtgggacacactctgggcaccccataggaaaa

SEQ ID NO: 131367 - DNA, 80 bp, synthetic construct
  misc_feature 1..80: note = Artificially Synthesized Probe
  source 1..80: mol_type = other DNA
cccagagacaggtttcagctccatcagcgggacctttccagtgtctagagcgggctggacggcacacggcctgcattctg

SEQ ID NO: 131368 - DNA, 80 bp, synthetic construct
  misc_feature 1..80: note = Artificially Synthesized Probe
  source 1..80: mol_type = other DNA
agctgggaggggccaggagccctggagaaaggggaggcccaaggaggtggactcacccaaggccagagctggcccccaaa

SEQ ID NO: 131369 - DNA, 80 bp, synthetic construct; identical to SEQ ID NO: 41704
  misc_feature 1..80: note = Artificially Synthesized Probe
  source 1..80: mol_type = other DNA

SEQ ID NO: 131370 - DNA, 80 bp, synthetic construct
  misc_feature 1..80: note = Artificially Synthesized Probe
  source 1..80: mol_type = other DNA
tgggcagggggctggactgtgcataccctgtgtccccttgacagccctacatcagctgcatcccatgggtggcttctgag

SEQ ID NO: 131371 - DNA, 80 bp, synthetic construct
  misc_feature 1..80: note = Artificially Synthesized Probe
  source 1..80: mol_type = other DNA
cgagccccccaaaagccaccatcatcaccagagcctctgccttccccagcgcctcctcagggcccgaggacccctgattc

SEQ ID NO: 131372 - DNA, 80 bp, synthetic construct
  misc_feature 1..80: note = Artificially Synthesized Probe
  source 1..80: mol_type = other DNA
tctggcaaccaccggaagcccccccagcccctccttggaacttaacccccctctcccgtgtggcgctcacagaaccccct

SEQ ID NO: 131373 - DNA, 80 bp, synthetic construct; identical to SEQ ID NO: 41705
  misc_feature 1..80: note = Artificially Synthesized Probe
  source 1..80: mol_type = other DNA

SEQ ID NO: 131374 - DNA, 80 bp, synthetic construct
  misc_feature 1..80: note = Artificially Synthesized Probe
  source 1..80: mol_type = other DNA
ctttgtctctctgtgtgcctgtgtatctctcagcttctctctgtctctgtatctttcagcctcttggtctctgtctctcc

SEQ ID NO: 131375 - DNA, 80 bp, synthetic construct
  misc_feature 1..80: note = Artificially Synthesized Probe
  source 1..80: mol_type = other DNA
ctgtgctggccaggtgtggtctgtgggcgtctccatcgtgcccgggcaggcgtgggcgggtgtgggcgcacctgggaacc

SEQ ID NO: 131376 - DNA, 80 bp, synthetic construct
  misc_feature 1..80: note = Artificially Synthesized Probe
  source 1..80: mol_type = other DNA
catgcagacatttgcccaggcccgtcctggccttgccatgcagctctcgcacctgggcctccaacaccgccattttgtag

SEQ ID NO: 131377 - DNA, 80 bp, synthetic construct; identical to SEQ ID NO: 41706
  misc_feature 1..80: note = Artificially Synthesized Probe
  source 1..80: mol_type = other DNA

SEQ ID NO: 131378 - DNA, 80 bp, synthetic construct
  misc_feature 1..80: note = Artificially Synthesized Probe
  source 1..80: mol_type = other DNA
gttctgtccccgttctcacttgtgtcacctgcagagcaggacttaacaagggcccccgtgcacaggcgcctccaggcatg

SEQ ID NO: 131379 - DNA, 80 bp, synthetic construct
  misc_feature 1..80: note = Artificially Synthesized Probe
  source 1..80: mol_type = other DNA
cctgccaagcgagccccaggccctcttctcccggccagccggcctcctgtccttgcggcctgagtacactctgatcactg

SEQ ID NO: 131380 - DNA, 80 bp, synthetic construct
  misc_feature 1..80: note = Artificially Synthesized Probe
  source 1..80: mol_type = other DNA
caccccgcctctaaggattgctgtgtgcccctgtctaaccctctcctctctcccccggctctcctcagctgcagaagtcc

SEQ ID NO: 131381 - DNA, 80 bp, synthetic construct; identical to SEQ ID NO: 41707
  misc_feature 1..80: note = Artificially Synthesized Probe
  source 1..80: mol_type = other DNA

SEQ ID NO: 131382 - DNA, 80 bp, synthetic construct
  misc_feature 1..80: note = Artificially Synthesized Probe
  source 1..80: mol_type = other DNA
tgggcctggccaggacgcccgccacatcttgggatggcacagagtgaggggagagaaggcggctgggggcagaaccctgc

SEQ ID NO: 131383 - DNA, 80 bp, synthetic construct
  misc_feature 1..80: note = Artificially Synthesized Probe
  source 1..80: mol_type = other DNA
tcactggtgcccagggctgccagcacccttggagggtggaaagaattccatcagggaaagaacgagtgggcccccagcgt

SEQ ID NO: 131384 - DNA, 80 bp, synthetic construct
  misc_feature 1..80: note = Artificially Synthesized Probe
  source 1..80: mol_type = other DNA
ggcgcggacacccttctgggggcgccccaggacagacaggggatgggggcgagcaaaggaaggcccagccccagtactga

SEQ ID NO: 131385 - DNA, 80 bp, synthetic construct; identical to SEQ ID NO: 41708
  misc_feature 1..80: note = Artificially Synthesized Probe
  source 1..80: mol_type = other DNA

SEQ ID NO: 131386 - DNA, 80 bp, synthetic construct
  misc_feature 1..80: note = Artificially Synthesized Probe
  source 1..80: mol_type = other DNA
ccctgcacagcctggcctgctcgctccgccgcctcggccctgcccgccctcctctctgcgctgccaccactcacactggt

SEQ ID NO: 131387 - DNA, 80 bp, synthetic construct
  misc_feature 1..80: note = Artificially Synthesized Probe
  source 1..80: mol_type = other DNA
gcaagagtgaggggctgggcttcatcgcgtccccctggctggaggctggagaagctggcgctcgtaagagcccccaccca

SEQ ID NO: 131388 - DNA, 80 bp, synthetic construct
  misc_feature 1..80: note = Artificially Synthesized Probe
  source 1..80: mol_type = other DNA
acgtttgccaccaacaactgaacccgttctggcctctgggctggggacagagtgaggaccctggcttgggaagggctggc

SEQ ID NO: 131389 - DNA, 80 bp, synthetic construct
  misc_feature 1..80: note = Artificially Synthesized Probe
  source 1..80: mol_type = other DNA
acggtgctggggtccactgggaccctctggatccaccagggtggggtgggaagagcgcaggagaggcctccaccctgccc

SEQ ID NO: 131390 - DNA, 80 bp, synthetic construct
  misc_feature 1..80: note = Artificially Synthesized Probe
  source 1..80: mol_type = other DNA
agtcaggtcccagcatcccacccattgcctgggcctgagccagacacacccggagtgaggaggccccctgggtgggcctg

SEQ ID NO: 131391 - DNA, 80 bp, synthetic construct; identical to SEQ ID NO: 41709
  misc_feature 1..80: note = Artificially Synthesized Probe
  source 1..80: mol_type = other DNA

SEQ ID NO: 131392 - DNA, 80 bp, synthetic construct
  misc_feature 1..80: note = Artificially Synthesized Probe
  source 1..80: mol_type = other DNA
tcgctccccgaaattgctcagcctcccacccgacctcgccctcctccctggccggccttcccacccggaggggctcctca

SEQ ID NO: 131393 - DNA, 80 bp, synthetic construct
  misc_feature 1..80: note = Artificially Synthesized Probe
  source 1..80: mol_type = other DNA
catccggaacgggtgacctcaggcccacctgcaaaaccaagagcgctggcgggctctctgtggtgtgcagggggctccca

SEQ ID NO: 131394 - DNA, 80 bp, synthetic construct; identical to SEQ ID NO: 41710
  misc_feature 1..80: note = Artificially Synthesized Probe
  source 1..80: mol_type = other DNA

SEQ ID NO: 131395 - DNA, 80 bp, synthetic construct
  misc_feature 1..80: note = Artificially Synthesized Probe
  source 1..80: mol_type = other DNA
aggtagcaggggggtcccagaggggcccagtctcaggacagcagccatgtggcagtcagagggcaagccccagggaggtc

SEQ ID NO: 131396 - DNA, 80 bp, synthetic construct
  misc_feature 1..80: note = Artificially Synthesized Probe
  source 1..80: mol_type = other DNA
ccatgaactgctgggttccacccagtaacacagcctttacaggcaggggtcaggctccgggaagcacgaagcaaaggggc

SEQ ID NO: 131397 - DNA, 80 bp, synthetic construct
  misc_feature 1..80: note = Artificially Synthesized Probe
  source 1..80: mol_type = other DNA
cctattctccactaggtcttccaggcaggagctccactgggcacccagccccttccaccccctccccaggcattgattca

SEQ ID NO: 131398 - DNA, 80 bp, synthetic construct
  misc_feature 1..80: note = Artificially Synthesized Probe
  source 1..80: mol_type = other DNA
aaggggcagcggcttttgcctccccaccctgccctggccccgtcacctcccaaggagggaaaggtgatgcatacgtgccc

SEQ ID NO: 131399 - DNA, 80 bp, synthetic construct; identical to SEQ ID NO: 41711
  misc_feature 1..80: note = Artificially Synthesized Probe
  source 1..80: mol_type = other DNA

SEQ ID NO: 131400 - DNA, 80 bp, synthetic construct
  misc_feature 1..80: note = Artificially Synthesized Probe
  source 1..80: mol_type = other DNA
ctgccagggcctcgcgggtgccaccgctccaagtttctgccacacagcggagggggagtaagcgggaccagccagcagtg

SEQ ID NO: 131401 - DNA, 80 bp, synthetic construct
  misc_feature 1..80: note = Artificially Synthesized Probe
  source 1..80: mol_type = other DNA
tcttcctcacccttcctcctggccccaggccctgagctcttcccctccaaccctgccaggggcttttgcaggcctagagc

SEQ ID NO: 131402 - DNA, 80 bp, synthetic construct
  misc_feature 1..80: note = Artificially Synthesized Probe
  source 1..80: mol_type = other DNA
gaagctgggcgccttcggggcttgagcttctgagggtcgggtccagcgcgtgggctgctggatggcggaaccccaggcgg

SEQ ID NO: 131403 - DNA, 80 bp, synthetic construct
  misc_feature 1..80: note = Artificially Synthesized Probe
  source 1..80: mol_type = other DNA
cctgaggggcccgagtccttggtggtcctgcctttggaaggctggagttttctgctaacttttcctatgggacataggag

SEQ ID NO: 131404 - DNA, 80 bp, synthetic construct
  misc_feature 1..80: note = Artificially Synthesized Probe
  source 1..80: mol_type = other DNA
tatttccagagcggggacccagaatgggggaggtgggaagtggaaagctggccatccacctgtgcctcttcaccatgttc

SEQ ID NO: 131405 - DNA, 80 bp, synthetic construct
  misc_feature 1..80: note = Artificially Synthesized Probe
  source 1..80: mol_type = other DNA
actgtgggcccgcgccggggctgccccagctctttcacctgaagcagcatttgcagggctgtgagtgggacacagtgccc

SEQ ID NO: 131406 - DNA, 80 bp, synthetic construct
  misc_feature 1..80: note = Artificially Synthesized Probe
  source 1..80: mol_type = other DNA
tggccctgcctctggctgagtggttgtgctattggcaccaggcatagcctccgtgtctgtcgtggtggttgctttgtgtg

SEQ ID NO: 131407 - DNA, 80 bp, synthetic construct
  misc_feature 1..80: note = Artificially Synthesized Probe
  source 1..80: mol_type = other DNA
tcagagcagctggtccacatacttcctcccagacctcgtgcccagtcttccactcttctctctccacgcccctgtcctcc

SEQ ID NO: 131408 - DNA, 80 bp, synthetic construct
  misc_feature 1..80: note = Artificially Synthesized Probe
  source 1..80: mol_type = other DNA
cctggtgcccacccactggtctgtggcatgtgcccatccatggagtaatgaggggccaaggaggggaccctgacgagaga

SEQ ID NO: 131409 - DNA, 80 bp, synthetic construct; identical to SEQ ID NO: 41733
  misc_feature 1..80: note = Artificially Synthesized Probe
  source 1..80: mol_type = other DNA

SEQ ID NO: 131410 - DNA, 80 bp, synthetic construct
  misc_feature 1..80: note = Artificially Synthesized Probe
  source 1..80: mol_type = other DNA
gcattgtggttggttgtccttggaggctagtcacctggatgtaccttcccgtccttatagaggcctcatggccccagctg

SEQ ID NO: 131411 - DNA, 80 bp, synthetic construct
  misc_feature 1..80: note = Artificially Synthesized Probe
  source 1..80: mol_type = other DNA
cacctccttggcctgtagaggggctgaaagaagcctttgttatcaggccctaagaccagagtttccaaccagtgggcaat

SEQ ID NO: 131412 - DNA, 80 bp, synthetic construct; identical to SEQ ID NO: 41734
  misc_feature 1..80: note = Artificially Synthesized Probe
  source 1..80: mol_type = other DNA

SEQ ID NO: 131413 - DNA, 80 bp, synthetic construct
  misc_feature 1..80: note = Artificially Synthesized Probe
  source 1..80: mol_type = other DNA
ggcagacactggcagcttgagggccgtggcctgtgaggtctgggaaggggctggactgactggctgggcctgttccgtgg

SEQ ID NO: 131414 - DNA, 80 bp, synthetic construct
  misc_feature 1..80: note = Artificially Synthesized Probe
  source 1..80: mol_type = other DNA
gagcgtggatttgagattgacaggcgccaaagtgtaaacgagatactcaagggactgaatccaggtgtgaggcagagaga

SEQ ID NO: 131415 - DNA, 80 bp, synthetic construct
  misc_feature 1..80: note = Artificially Synthesized Probe
  source 1..80: mol_type = other DNA
gaggatgggctgggataggagcaggggagtgaatggaggggagggcagggaaacgtggcatgatggaagctgtgagaaca

SEQ ID NO: 131416 - DNA, 80 bp, synthetic construct; identical to SEQ ID NO: 41735
  misc_feature 1..80: note = Artificially Synthesized Probe
  source 1..80: mol_type = other DNA

SEQ ID NO: 131417 - DNA, 80 bp, synthetic construct
  misc_feature 1..80: note = Artificially Synthesized Probe
  source 1..80: mol_type = other DNA
tctcgtgaacccctcacctgaagtcattgctgcagggagggtaccaggctattcatgagggatccaccccacgacccaaa

SEQ ID NO: 131418 - DNA, 80 bp, synthetic construct
  misc_feature 1..80: note = Artificially Synthesized Probe
  source 1..80: mol_type = other DNA
ggtctgtgtctgggaggggaaggcttggagatggggacacaaggggaggcgggttgaggggtgaggaggcggggatggta

SEQ ID NO: 131419 - DNA, 80 bp, synthetic construct
  misc_feature 1..80: note = Artificially Synthesized Probe
  source 1..80: mol_type = other DNA
ggaacacagactttgtgtctaggggtctgggcgcctttctggggctgcactggctgtgtgaccttggcaggttgcttaac

SEQ ID NO: 131420 - DNA, 80 bp, synthetic construct
  misc_feature 1..80: note = Artificially Synthesized Probe
  source 1..80: mol_type = other DNA
gggagatgggtagtggggaggcctgtgacagggaaggactgcagagcatgtggcctggaacaggtctcaaggccagctct

SEQ ID NO: 131421 - DNA, 80 bp, synthetic construct; identical to SEQ ID NO: 41736
  misc_feature 1..80: note = Artificially Synthesized Probe
  source 1..80: mol_type = other DNA

SEQ ID NO: 131422 - DNA, 80 bp, synthetic construct
  misc_feature 1..80: note = Artificially Synthesized Probe
  source 1..80: mol_type = other DNA
gctggggggcttttggggtctctttggttccagcagttccccagaagcctcccagcagccttcgagctagggccagggct

SEQ ID NO: 131423 - DNA, 80 bp, synthetic construct
  misc_feature 1..80: note = Artificially Synthesized Probe
  source 1..80: mol_type = other DNA
gagctgttcctgacgacacccctgcttggaagccctcgtggctcttgttgccactagaagcgtggggctctctccctgcg

SEQ ID NO: 131424 - DNA, 80 bp, synthetic construct
  misc_feature 1..80: note = Artificially Synthesized Probe
  source 1..80: mol_type = other DNA
gccctgggtccttggatgctgtctcagctgggcccccagggtttcatttgtcactgtcaaagaaaggaccctgccagggc

SEQ ID NO: 131425 - DNA, 80 bp, synthetic construct
  misc_feature 1..80: note = Artificially Synthesized Probe
  source 1..80: mol_type = other DNA
gccgcctggcccaggctgagtgccgtgctctcccccagcgtcgggctgctgctggccatccacctgtgcctcttcaccat

SEQ ID NO: 131426 - DNA, 80 bp, synthetic construct; identical to SEQ ID NO: 41737
  misc_feature 1..80: note = Artificially Synthesized Probe
  source 1..80: mol_type = other DNA

SEQ ID NO: 131427 - DNA, 80 bp, synthetic construct
  misc_feature 1..80: note = Artificially Synthesized Probe
  source 1..80: mol_type = other DNA
agggtgggtcctctggtttctcctccagccctgttcatccttcctgacaaccaggcttgccctgtaccctctctgactgc

SEQ ID NO: 131428 - DNA, 80 bp, synthetic construct
  misc_feature 1..80: note = Artificially Synthesized Probe
  source 1..80: mol_type = other DNA
ctatgtgtttgtcctcctgtcctggccgagggcaccatccttcttggggctggggccacgctgcatctctgctgctttgt

SEQ ID NO: 131429 - DNA, 80 bp, synthetic construct; identical to SEQ ID NO: 41738
  misc_feature 1..80: note = Artificially Synthesized Probe
  source 1..80: mol_type = other DNA

SEQ ID NO: 131430 - DNA, 80 bp, synthetic construct
  misc_feature 1..80: note = Artificially Synthesized Probe
  source 1..80: mol_type = other DNA
ttggctaatttttgtatttttagtagagatggggtttcactgtgttggccagggtggtctcaaactcctgacctcgggtg

SEQ ID NO: 131431 - DNA, 80 bp, synthetic construct
  misc_feature 1..80: note = Artificially Synthesized Probe
  source 1..80: mol_type = other DNA
tgtgtctatgtgtgcatgcatggtgtctgtatgtctctgcgtgcgtggtgtctgtatggctgtgtgcgtgtgcatgtgtg

SEQ ID NO: 131432 - DNA, 80 bp, synthetic construct
  misc_feature 1..80: note = Artificially Synthesized Probe
  source 1..80: mol_type = other DNA
gtggatggcgtcagtgtgggtgctggaagtggcaacagcctcggccttgaggccagggtgtggtcctcgaccccgggaaa

SEQ ID NO: 131433 - DNA, 80 bp, synthetic construct
  misc_feature 1..80: note = Artificially Synthesized Probe
  source 1..80: mol_type = other DNA
acttgagaggagcgtgggatggtacccggcccatcctgccttccttccctggccatcatgccctgccaccctggcctggg

SEQ ID NO: 131434 - DNA, 80 bp, synthetic construct; identical to SEQ ID NO: 41739
  misc_feature 1..80: note = Artificially Synthesized Probe
  source 1..80: mol_type = other DNA

SEQ ID NO: 131435 - DNA, 80 bp, synthetic construct
  misc_feature 1..80: note = Artificially Synthesized Probe
  source 1..80: mol_type = other DNA
gggtgggagatgggccggggcagggccacctgccttagggagttctgtcggctctatggacctcagcgtctgttaggtgg

SEQ ID NO: 131436 - DNA, 80 bp, synthetic construct
  misc_feature 1..80: note = Artificially Synthesized Probe
  source 1..80: mol_type = other DNA
ctgctggaggccagcctgccctccaggcctcggaaggccttgctctgctcctccactctggcttgggctgaggcccagga

SEQ ID NO: 131437 - DNA, 80 bp, synthetic construct
  misc_feature 1..80: note = Artificially Synthesized Probe
  source 1..80: mol_type = other DNA
ccctgactggacagacgaggggacagtgccattttataggtgaggccttggaggcctcagtgctattgatgcggctgtga

SEQ ID NO: 131438 - DNA, 80 bp, synthetic construct; identical to SEQ ID NO: 41740
  misc_feature 1..80: note = Artificially Synthesized Probe
  source 1..80: mol_type = other DNA

SEQ ID NO: 131439 - DNA, 80 bp, synthetic construct
  misc_feature 1..80: note = Artificially Synthesized Probe
  source 1..80: mol_type = other DNA
ttaccaatggctgtgattcgccacagccacgagcacagtgccactgagtcccgtgggtggctatgggcggccgtgggccc

SEQ ID NO: 131440 - DNA, 80 bp, synthetic construct
  misc_feature 1..80: note = Artificially Synthesized Probe
  source 1..80: mol_type = other DNA
agggaggtcactaggctggctgagggctttttgctgtggttctgagccggcctgcttccaggcaccgtgtccatgcgggt

SEQ ID NO: 131441 - DNA, 80 bp, synthetic construct; identical to SEQ ID NO: 41723
  misc_feature 1..80: note = Artificially Synthesized Probe
  source 1..80: mol_type = other DNA

SEQ ID NO: 131442 - DNA, 80 bp, synthetic construct
  misc_feature 1..80: note = Artificially Synthesized Probe
  source 1..80: mol_type = other DNA
gggtggggacccagtggtgccctggagctgccgcttctgctcttagcaggatgatgggcaggacagggagaggctgacct

SEQ ID NO: 131443 - DNA, 80 bp, synthetic construct; identical to SEQ ID NO: 41741
  misc_feature 1..80: note = Artificially Synthesized Probe
  source 1..80: mol_type = other DNA

SEQ ID NO: 131444 - DNA, 80 bp, synthetic construct
  misc_feature 1..80: note = Artificially Synthesized Probe
  source 1..80: mol_type = other DNA
gttcttcatagggcgatgatggcagtggtcagaggggtctcctggtgccgtcctgctggagctccacacatccacgctgc

SEQ ID NO: 131445 - DNA, 80 bp, synthetic construct
  misc_feature 1..80: note = Artificially Synthesized Probe
  source 1..80: mol_type = other DNA
tggcccagccaccctggctggtgcctttcatcttgcggaccctgagtgctgtctcttgtgtcctctgagtcctaggaagt

SEQ ID NO: 131446 - DNA, 80 bp, synthetic construct
  misc_feature 1..80: note = Artificially Synthesized Probe
  source 1..80: mol_type = other DNA
gcactgggagcaggaccgtctgagtcctaggaagtgaccgcagtgggagcaggaccgtctgagtcctaggaagtgaccgc

SEQ ID NO: 131447 - DNA, 80 bp, synthetic construct
  misc_feature 1..80: note = Artificially Synthesized Probe
  source 1..80: mol_type = other DNA
ggaacaggaccgtctgagtcctaggaagtgaccgcagtgggagcaggaccgtctgagtcctaggaagtgaccgcagtggg

SEQ ID NO: 131448 - DNA, 80 bp, synthetic construct; identical to SEQ ID NO: 41742
  misc_feature 1..80: note = Artificially Synthesized Probe
  source 1..80: mol_type = other DNA

SEQ ID NO: 131449 - DNA, 80 bp, synthetic construct
  misc_feature 1..80: note = Artificially Synthesized Probe
  source 1..80: mol_type = other DNA
gcccgggagaccagggtcgcgcgtgggggtcccgctgtcccagcaccccgctttctgccgggcgcgcccccaccaggttc

SEQ ID NO: 131450 - DNA, 80 bp, synthetic construct
  misc_feature 1..80: note = Artificially Synthesized Probe
  source 1..80: mol_type = other DNA
tctgagtcctaggaagtgaccgcagtgggagcaggactgtctgagtcctagcaagtgacacagggggagcaggaccgtct

SEQ ID NO: 131451 - DNA, 80 bp, synthetic construct
  misc_feature 1..80: note = Artificially Synthesized Probe
  source 1..80: mol_type = other DNA
cctaggaagtgaccgcagtgggagcaggaccgtctgagtcctaggaagtgaccgcagtgggagcaggaccgtctgagtcc

SEQ ID NO: 131452 - DNA, 80 bp, synthetic construct
  misc_feature 1..80: note = Artificially Synthesized Probe
  source 1..80: mol_type = other DNA
aagtgaccgcagtgggagcaggaccgtctgagtcctaggaagtgaccgcagtgggagcaggaccgtctgagtcctaggaa

SEQ ID NO: 131453 - DNA, 80 bp, synthetic construct
  misc_feature 1..80: note = Artificially Synthesized Probe
  source 1..80: mol_type = other DNA
actatggagccatggagactccgaaaggctcattcagtctctgtgctgaggcctgtgccaggctttgaaatgaaggccct

SEQ ID NO: 131454 - DNA, 80 bp, synthetic construct; identical to SEQ ID NO: 41743
  misc_feature 1..80: note = Artificially Synthesized Probe
  source 1..80: mol_type = other DNA

SEQ ID NO: 131455 - DNA, 80 bp, synthetic construct
  misc_feature 1..80: note = Artificially Synthesized Probe
  source 1..80: mol_type = other DNA
tcactgcaacctccacctcccaggttcaagtgattctcctgcctcagcctcccgagtagctgggtttacaggcatgagcc

SEQ ID NO: 131456 - DNA, 80 bp, synthetic construct
  misc_feature 1..80: note = Artificially Synthesized Probe
  source 1..80: mol_type = other DNA
ctttctattgcaaaagcaaatagtgtagcgtcaggatgggagtgggatcaggtactgaggttgtcagtttctgttatttc

SEQ ID NO: 131457 - DNA, 80 bp, synthetic construct
  misc_feature 1..80: note = Artificially Synthesized Probe
  source 1..80: mol_type = other DNA
ctgaaacttcacatccgtgtttttcactccagagatcaccccagggatcccctgccaacagcttttaaccccagagatcc

SEQ ID NO: 131458 - DNA, 80 bp, synthetic construct
  misc_feature 1..80: note = Artificially Synthesized Probe
  source 1..80: mol_type = other DNA
cagggatctcccaccagcagcttcaccccagggatccctcaccaacagcttcaccccagggatcccccaccaacagcttc

SEQ ID NO: 131459 - DNA, 80 bp, synthetic construct; identical to SEQ ID NO: 41744
  misc_feature 1..80: note = Artificially Synthesized Probe
  source 1..80: mol_type = other DNA

SEQ ID NO: 131460 - DNA, 80 bp, synthetic construct
  misc_feature 1..80: note = Artificially Synthesized Probe
  source 1..80: mol_type = other DNA
tgcgttggttttgctgctgtactggtggcgcccctgaccgtggctgtctcctcttgaaggaagcctgtttctgatgaacc

SEQ ID NO: 131461 - DNA, 80 bp, synthetic construct
  misc_feature 1..80: note = Artificially Synthesized Probe
  source 1..80: mol_type = other DNA
ggcagggttgccacctcttgtggatcagccggggatgcacatgtgttgttgctctagccactgccagagatggcaactcc

SEQ ID NO: 131462 - DNA, 80 bp, synthetic construct
  misc_feature 1..80: note = Artificially Synthesized Probe
  source 1..80: mol_type = other DNA
ggggctgcccccaggctgtggggaactgggcccccccccaaggctgcccagactccccctctgcctgttccccaggggag

SEQ ID NO: 131463 - DNA, 80 bp, synthetic construct; identical to SEQ ID NO: 41745
  misc_feature 1..80: note = Artificially Synthesized Probe
  source 1..80: mol_type = other DNA

SEQ ID NO: 131464 - DNA, 80 bp, synthetic construct
  misc_feature 1..80: note = Artificially Synthesized Probe
  source 1..80: mol_type = other DNA
ttctcttgttgctgggtcagaaaaatcacacttttactggttatcaaacaagtcagaggacaagggattgcgatgctgta

SEQ ID NO: 131465 - DNA, 80 bp, synthetic construct
  misc_feature 1..80: note = Artificially Synthesized Probe
  source 1..80: mol_type = other DNA
cgagtggcccggccttcttgtccccctttgtgctcttctacccttctgtgctgacttaggcagcagagccagaggtgcgt

SEQ ID NO: 131466 - DNA, 80 bp, synthetic construct
  misc_feature 1..80: note = Artificially Synthesized Probe
  source 1..80: mol_type = other DNA
gggggacggcagtggcaggatgctcgttacaggggctcttggtgtggctcaagctgcaaagtggcttcatggcaaagctc

SEQ ID NO: 131467 - DNA, 80 bp, synthetic construct
  misc_feature 1..80: note = Artificially Synthesized Probe
  source 1..80: mol_type = other DNA
gccatgatggaggtacccgccccctgctcccagcctcctctgggctcctcccgggaggtcacttgggccagcagcccctt

SEQ ID NO: 131468 - DNA, 80 bp, synthetic construct; identical to SEQ ID NO: 41746
  misc_feature 1..80: note = Artificially Synthesized Probe
  source 1..80: mol_type = other DNA

SEQ ID NO: 131469 - DNA, 80 bp, synthetic construct
  misc_feature 1..80: note = Artificially Synthesized Probe
  source 1..80: mol_type = other DNA
ctgggaatggagttctctttggctcttggagactggggagatttttatgaaattcaccagaccccaggaactagcctgag

SEQ ID NO: 131470 - DNA, 80 bp, synthetic construct
  misc_feature 1..80: note = Artificially Synthesized Probe
  source 1..80: mol_type = other DNA
ttcacccttgacacttacaaagttcccaggtgggcctcagcatccgactaagctctgtgtccagaaggcctgggccaggt

SEQ ID NO: 131471 - DNA, 80 bp, synthetic construct; identical to SEQ ID NO: 41747
  misc_feature 1..80: note = Artificially Synthesized Probe
  source 1..80: mol_type = other DNA

SEQ ID NO: 131472 - DNA, 80 bp, synthetic construct
  misc_feature 1..80: note = Artificially Synthesized Probe
  source 1..80: mol_type = other DNA
gcctctctccgtggcttgtagatgccagcctctccctgtgtcctcacctgaggcctctctccatggctgtagacatcgcc

SEQ ID NO: 131473 - DNA, 80 bp, synthetic construct
  misc_feature 1..80: note = Artificially Synthesized Probe
  source 1..80: mol_type = other DNA
gggggttagaggttaaagatacgaatttcgagggagacaaaattcaacccatagcaactgtcagctgcttcaggattcct

SEQ ID NO: 131474 - DNA, 80 bp, synthetic construct
  misc_feature 1..80: note = Artificially Synthesized Probe
  source 1..80: mol_type = other DNA
cactcgtccccatcctcacttcgggcatcctctttagggctgcattcctcattgtggcacccccagccccttggggcata

SEQ ID NO: 131475 - DNA, 80 bp, synthetic construct; identical to SEQ ID NO: 41748
  misc_feature 1..80: note = Artificially Synthesized Probe
  source 1..80: mol_type = other DNA

SEQ ID NO: 131476 - DNA, 80 bp, synthetic construct
  misc_feature 1..80: note = Artificially Synthesized Probe
  source 1..80: mol_type = other DNA
atggtcaggaccctacacaggttgtgcagcctggagcctggagcaacaggggagcgggagctcagacctggatgttgcgg

SEQ ID NO: 131477 - DNA, 80 bp, synthetic construct
  misc_feature 1..80: note = Artificially Synthesized Probe
  source 1..80: mol_type = other DNA
acaaggagaaggtgttcgtatgttagctgtgtaactgagagataactgatatgactaaaggggcaggcagacacaggctg

SEQ ID NO: 131478 - DNA, 80 bp, synthetic construct
  misc_feature 1..80: note = Artificially Synthesized Probe
  source 1..80: mol_type = other DNA
ttccagtgtcaggatttggtgagacctggaaaggggttcctcctcccgtgatgatgtggaggaagggcggatggattgct

SEQ ID NO: 131479 - DNA, 80 bp, synthetic construct
  misc_feature 1..80: note = Artificially Synthesized Probe
  source 1..80: mol_type = other DNA
ccacaggttttgggagccacaatagccttaatctggttttctgactccttctttcctcaataatgctgactgtagagggg

SEQ ID NO: 131480 - DNA, 80 bp, synthetic construct; identical to SEQ ID NO: 41749
  misc_feature 1..80: note = Artificially Synthesized Probe
  source 1..80: mol_type = other DNA

SEQ ID NO: 131481 - DNA, 80 bp, synthetic construct
  misc_feature 1..80: note = Artificially Synthesized Probe
  source 1..80: mol_type = other DNA
ctgacgtcatgggagctccagccttttcgagagccctcccgtgtggggtcactgcctgggcgtcagcctggccgtggcca

SEQ ID NO: 131482 - DNA, 80 bp, synthetic construct
  misc_feature 1..80: note = Artificially Synthesized Probe
  source 1..80: mol_type = other DNA
tacccagagacaagcactttagtcatatcagttatctctcagttacacagctaacatatgaacaccttctccttgtaaca

SEQ ID NO: 131483 - DNA, 80 bp, synthetic construct
  misc_feature 1..80: note = Artificially Synthesized Probe
  source 1..80: mol_type = other DNA
aaggatggacctggaaggggaccctccgaagctggggttcagacctcttgagagcaggtgtggttttgcccacaggaatg

SEQ ID NO: 131484 - DNA, 80 bp, synthetic construct; identical to SEQ ID NO: 41750
  misc_feature 1..80: note = Artificially Synthesized Probe
  source 1..80: mol_type = other DNA

SEQ ID NO: 131485 - DNA, 80 bp, synthetic construct
  misc_feature 1..80: note = Artificially Synthesized Probe
  source 1..80: mol_type = other DNA
gccctcctgcggtgtccctccacctgccctcctgccgtgtccctccacctgccctcctgccgtgtccctccacctgccct

SEQ ID NO: 131486 - DNA, 80 bp, synthetic construct
  misc_feature 1..80: note = Artificially Synthesized Probe
  source 1..80: mol_type = other DNA
tgccctcatgccatgtccctccacttgccctcctgccctcctgccatgtccctccacttgccctcctgccatgcccctcc

SEQ ID NO: 131487 - DNA, 80 bp, synthetic construct; identical to SEQ ID NO: 41724
  misc_feature 1..80: note = Artificially Synthesized Probe
  source 1..80: mol_type = other DNA

SEQ ID NO: 131488 - DNA, 80 bp, synthetic construct
  misc_feature 1..80: note = Artificially Synthesized Probe
  source 1..80: mol_type = other DNA
ccctccacttgccctcctgccctcctgccatgtccctccacctgccctcctgccgtgtccctccacctgccctcctgccg

SEQ ID NO: 131489 - DNA, 80 bp, synthetic construct
  misc_feature 1..80: note = Artificially Synthesized Probe
  source 1..80: mol_type = other DNA
tcccttcacctgccctcctgccatgtccctccacctgccctcctgccctcctgctgtgtccctccagcccctccgctaag

SEQ ID NO: 131490 - DNA, 80 bp, synthetic construct; identical to SEQ ID NO: 41751
  misc_feature 1..80: note = Artificially Synthesized Probe
  source 1..80: mol_type = other DNA

SEQ ID NO: 131491 - DNA, 80 bp, synthetic construct
  misc_feature 1..80: note = Artificially Synthesized Probe
  source 1..80: mol_type = other DNA
gctgttgccaccgaagaactgagtgttgaattttgttgcattgaaattttcatgaaatagccgccggtggtcagtggctc

SEQ ID NO: 131492 - DNA, 80 bp, synthetic construct
  misc_feature 1..80: note = Artificially Synthesized Probe
  source 1..80: mol_type = other DNA
ccctcattgcctcctgctgctgctggccacagtacaggagttggttctgtgctgagtttctgtagctatgagtatatcac

SEQ ID NO: 131493 - DNA, 80 bp, synthetic construct; identical to SEQ ID NO: 41752
  misc_feature 1..80: note = Artificially Synthesized Probe
  source 1..80: mol_type = other DNA

SEQ ID NO: 131494 - DNA, 80 bp, synthetic construct
  misc_feature 1..80: note = Artificially Synthesized Probe
  source 1..80: mol_type = other DNA
gagtaccagtctccgtttctgcagagcgcccagttcctcttcggccactactactttgactacctggggaacctcatcgc

SEQ ID NO: 131495 - DNA, 80 bp, synthetic construct
  misc_feature 1..80: note = Artificially Synthesized Probe
  source 1..80: mol_type = other DNA
ttcctggtgctggatgcagatgtgctgcctgctgagcgtgatgacttcatcctgggggtaagttctgagctgtccacctg

SEQ ID NO: 131496 - DNA, 80 bp, synthetic construct
  misc_feature 1..80: note = Artificially Synthesized Probe
  source 1..80: mol_type = other DNA
accccagcaacgtgtttgacgggctcctcaccgttgtcctgctggtaaagtaggcgcatccgaggccggcctctactggg

SEQ ID NO: 131497 - DNA, 80 bp, synthetic construct
  misc_feature 1..80: note = Artificially Synthesized Probe
  source 1..80: mol_type = other DNA
gggtttctactgcatccgagtgtcatggggggcaggctgcccctcccgacccccaggggaagccctgaaggacttgtagc

SEQ ID NO: 131498 - DNA, 80 bp, synthetic construct
  misc_feature 1..80: note = Artificially Synthesized Probe
  source 1..80: mol_type = other DNA
gatgtgcttctgagtgtttggaacgagatccttgggctgttgcagggtgaaacggaggatggccagacccagaattttac

SEQ ID NO: 131499 - DNA, 80 bp, synthetic construct; identical to SEQ ID NO: 41753
  misc_feature 1..80: note = Artificially Synthesized Probe
  source 1..80: mol_type = other DNA

SEQ ID NO: 131500 - DNA, 80 bp, synthetic construct
  misc_feature 1..80: note = Artificially Synthesized Probe
  source 1..80: mol_type = other DNA
caggaccaagctctgatttctccccaaaagccccttttggggagaatgtgttagagatgagctttataataattccttta

SEQ ID NO: 131501 - DNA, 80 bp, synthetic construct
  misc_feature 1..80: note = Artificially Synthesized Probe
  source 1..80: mol_type = other DNA
gcgcccctgggagggtctcagtggtgtccagggggctgggtctgctctgactctagggcagaccccgtgatggtggaatg

SEQ ID NO: 131502 - DNA, 80 bp, synthetic construct
  misc_feature 1..80: note = Artificially Synthesized Probe
  source 1..80: mol_type = other DNA
agatgccctcccgggcggcagtgggctccccctcccagcacacatgctgggggctggcagcagagatgcccctggctcag

SEQ ID NO: 131503 - DNA, 80 bp, synthetic construct; identical to SEQ ID NO: 41754
  misc_feature 1..80: note = Artificially Synthesized Probe
  source 1..80: mol_type = other DNA

SEQ ID NO: 131504 - DNA, 80 bp, synthetic construct
  misc_feature 1..80: note = Artificially Synthesized Probe
  source 1..80: mol_type = other DNA
ctgtggttaggccgggctccttgggtctctgtgtgctgtgtcatccaccccactgcctagggagcagctgggagtcgctt

SEQ ID NO: 131505 - DNA, 80 bp, synthetic construct
  misc_feature 1..80: note = Artificially Synthesized Probe
  source 1..80: mol_type = other DNA
tttgttctgagtcattaccttggggggctgacactgtgggtgagaatgggtttgagtttcaacagaaatgaaagcatgga

SEQ ID NO: 131506 - DNA, 80 bp, synthetic construct; identical to SEQ ID NO: 41755
  misc_feature 1..80: note = Artificially Synthesized Probe
  source 1..80: mol_type = other DNA

SEQ ID NO: 131507 - DNA, 80 bp, synthetic construct
  misc_feature 1..80: note = Artificially Synthesized Probe
  source 1..80: mol_type = other DNA
gttgccctccctgcgcctccgtccaggaacccgcgcgtttccttgtctcctccctgtggggctcctgggctcctcccaac

SEQ ID NO: 131508 - DNA, 80 bp, synthetic construct
  misc_feature 1..80: note = Artificially Synthesized Probe
  source 1..80: mol_type = other DNA
tgggtcatgctgctgcgttgctccagggtgggtgagcctggggcaggaagggcccgaggactgtgcccgtcaccctgggc

SEQ ID NO: 131509 - DNA, 80 bp, synthetic construct
  misc_feature 1..80: note = Artificially Synthesized Probe
  source 1..80: mol_type = other DNA
tgtctaagaagcttgtatcactagatctctcctggtagagattttgtcttctcccagggaatctggtaaggtggggcctc

SEQ ID NO: 131510 - DNA, 80 bp, synthetic construct
  misc_feature 1..80: note = Artificially Synthesized Probe
  source 1..80: mol_type = other DNA
ctggagccctggacaccagtgctcccccaggtctctgaggttcccagaaaggcctttgccatggctcccagggtgctatt

SEQ ID NO: 131511 - DNA, 80 bp, synthetic construct
  misc_feature 1..80: note = Artificially Synthesized Probe
  source 1..80: mol_type = other DNA
tgggccttgctgctcctggcatcatgtcctaagacccatgttctgagtgtccaggtccctcctctgtccccgttcatcct

SEQ ID NO: 131512 - DNA, 80 bp, synthetic construct; identical to SEQ ID NO: 41756
  misc_feature 1..80: note = Artificially Synthesized Probe
  source 1..80: mol_type = other DNA

SEQ ID NO: 131513 - DNA, 80 bp, synthetic construct
  misc_feature 1..80: note = Artificially Synthesized Probe
  source 1..80: mol_type = other DNA
ataatcacatgcaaatatccatgtgaactcatgtccgtgtaagacgcatgatcgtgtgtgcacacatcgcatgcagatat

SEQ ID NO: 131514 - DNA, 80 bp, synthetic construct
  misc_feature 1..80: note = Artificially Synthesized Probe
  source 1..80: mol_type = other DNA
atatccatgtgaactcgtgcccgtgtaagacgcatgatcgtgtgtgcacacatcgcgtgcagatatccatgtgaactcgt

SEQ ID NO: 131515 - DNA, 80 bp, synthetic construct
  misc_feature 1..80: note = Artificially Synthesized Probe
  source 1..80: mol_type = other DNA
gcgtgcagatatccacgtgaactcgtgcccgtgtaagatgcatgatcgtgtgtgcacacatcgcatgcagatatccttgt

SEQ ID NO: 131516 - DNA, 80 bp, synthetic construct; identical to SEQ ID NO: 41725
  misc_feature 1..80: note = Artificially Synthesized Probe
  source 1..80: mol_type = other DNA

SEQ ID NO: 131517 - DNA, 80 bp, synthetic construct; identical to SEQ ID NO: 41757
  misc_feature 1..80: note = Artificially Synthesized Probe
  source 1..80: mol_type = other DNA

SEQ ID NO: 131518 - DNA, 80 bp, synthetic construct
  misc_feature 1..80: note = Artificially Synthesized Probe
  source 1..80: mol_type = other DNA
caacgtgtgcacacgtacatgctgactggtctccactgtggcgttcagctgtgttgtctagtttggattcctcaggtggg

SEQ ID NO: 131519 - DNA, 80 bp, synthetic construct
  misc_feature 1..80: note = Artificially Synthesized Probe
  source 1..80: mol_type = other DNA
tccaggccacagagtagctgacccacctgcagtgggttgggaggcagagaagggcctcccacaggaatttgaagtccgtg

SEQ ID NO: 131520 - DNA, 80 bp, synthetic construct; identical to SEQ ID NO: 41758
  misc_feature 1..80: note = Artificially Synthesized Probe
  source 1..80: mol_type = other DNA

SEQ ID NO: 131521 - DNA, 80 bp, synthetic construct
  misc_feature 1..80: note = Artificially Synthesized Probe
  source 1..80: mol_type = other DNA
gtgagtcccaggctgctgctggtggcgggttatgcactggagtgggaggctgggaggctggcggaaggcagtgccgggcc

SEQ ID NO: 131522 - DNA, 80 bp, synthetic construct
  misc_feature 1..80: note = Artificially Synthesized Probe
  source 1..80: mol_type = other DNA
ccctcccatggcagagactgtttggtaatttttgagtctctcgtgttttctgggttgtggatctcgttgagaaagtaatg

SEQ ID NO: 131523 - DNA, 80 bp, synthetic construct
  misc_feature 1..80: note = Artificially Synthesized Probe
  source 1..80: mol_type = other DNA
gggccagccttccagctgaggagcccatctgctctgcctggtggccgggcttgggcaggagaggggcctgtgaccaggca

SEQ ID NO: 131524 - DNA, 80 bp, synthetic construct; identical to SEQ ID NO: 41759
  misc_feature 1..80: note = Artificially Synthesized Probe
  source 1..80: mol_type = other DNA

SEQ ID NO: 131525 - DNA, 80 bp, synthetic construct
  misc_feature 1..80: note = Artificially Synthesized Probe
  source 1..80: mol_type = other DNA
cttaggagctccatgaccacgcctgcctgagccccactgtgtctgtggacccgccagccctgggggaggccagctgcgtg

SEQ ID NO: 131526 - DNA, 80 bp, synthetic construct
  misc_feature 1..80: note = Artificially Synthesized Probe
  source 1..80: mol_type = other DNA
actacgtatttgccatcattgggatcaacttgtttagaggcgtcattgtggctcttcctggaaacagcaggtgaggtggg

SEQ ID NO: 131527 - DNA, 80 bp, synthetic construct
  misc_feature 1..80: note = Artificially Synthesized Probe
  source 1..80: mol_type = other DNA
cagtgcagcagggccgggcagagtgagggtggggtccggtctcctgcctctgtctggggcccctcacacctctaatccgt

SEQ ID NO: 131528 - DNA, 80 bp, synthetic construct
  misc_feature 1..80: note = Artificially Synthesized Probe
  source 1..80: mol_type = other DNA
ctccgcacctctcctaggagcccttgcctggagtctgctaaacacatttctcgtggcctgctcagagcagcactttccct

SEQ ID NO: 131529 - DNA, 80 bp, synthetic construct
  misc_feature 1..80: note = Artificially Synthesized Probe
  source 1..80: mol_type = other DNA
gttgtgttccccagcctggcccctgccaatggctcggcgccctgtgggagcttcgagcagctggagtactgggccaacaa

SEQ ID NO: 131530 - DNA, 80 bp, synthetic construct; identical to SEQ ID NO: 41760
  misc_feature 1..80: note = Artificially Synthesized Probe
  source 1..80: mol_type = other DNA

SEQ ID NO: 131531 - DNA, 80 bp, synthetic construct
  misc_feature 1..80: note = Artificially Synthesized Probe
  source 1..80: mol_type = other DNA
gccccctgcatagccacatcgtgactctcaggatggtggccagtgactctgggtttacacctcctggaggtcgttggtgt

SEQ ID NO: 131532 - DNA, 80 bp, synthetic construct
  misc_feature 1..80: note = Artificially Synthesized Probe
  source 1..80: mol_type = other DNA
agcttgttgcacgtttctaggcctcagttgggttgtttctgagatggaaatagtaacgcgctctgcatcatggtgtgtgt

SEQ ID NO: 131533 - DNA, 80 bp, synthetic construct; identical to SEQ ID NO: 41761
  misc_feature 1..80: note = Artificially Synthesized Probe
  source 1..80: mol_type = other DNA

SEQ ID NO: 131534 - DNA, 80 bp, synthetic construct
  misc_feature 1..80: note = Artificially Synthesized Probe
  source 1..80: mol_type = other DNA
ccctggctgctggggccttggggagtgctcctgacatctgggctgctggggccttggggggtgctcctgacatctgggct

SEQ ID NO: 131535 - DNA, 80 bp, synthetic construct
  misc_feature 1..80: note = Artificially Synthesized Probe
  source 1..80: mol_type = other DNA
gggtgccctgtggctgaccctggaggggccggggatggggcaaggctgctttcattcggggcccacactcactggccact

SEQ ID NO: 131536 - DNA, 80 bp, synthetic construct
  misc_feature 1..80: note = Artificially Synthesized Probe
  source 1..80: mol_type = other DNA
aagagctggggggtggaggggttgaggcggcgggcaggccctgatgactgtcctccccctccgcccggttatctggcttt

SEQ ID NO: 131537 - DNA, 80 bp, synthetic construct; identical to SEQ ID NO: 41762
  misc_feature 1..80: note = Artificially Synthesized Probe
  source 1..80: mol_type = other DNA

SEQ ID NO: 131538 - DNA, 80 bp, synthetic construct
  misc_feature 1..80: note = Artificially Synthesized Probe
  source 1..80: mol_type = other DNA
cgtgtagatatttctagtggctacatccatcctgaggctcatctgagtccccgtgtctctgtgtccctgtgacactcact

SEQ ID NO: 131539 - DNA, 80 bp, synthetic construct
  misc_feature 1..80: note = Artificially Synthesized Probe
  source 1..80: mol_type = other DNA
ccacattgtcttggtgcagctgtgggccccaaggggccaggtgtgaaagccgagtctcaactgaaaaagcagctgcttca

SEQ ID NO: 131540 - DNA, 80 bp, synthetic construct
  misc_feature 1..80: note = Artificially Synthesized Probe
  source 1..80: mol_type = other DNA
tgtggctgtgcaggtgacgtccgggctgccgtcccagcaggggcggcaggagagagaggctggcctacacaggtgcccgt

SEQ ID NO: 131541 - DNA, 80 bp, synthetic construct
  misc_feature 1..80: note = Artificially Synthesized Probe
  source 1..80: mol_type = other DNA
tcttttatagctgcttcagtgagaattccctcgtcgactccacagggacctttcagacaaaaatgcaagaagcagcggcc

SEQ ID NO: 131542 - DNA, 80 bp, synthetic construct; identical to SEQ ID NO: 41763
  misc_feature 1..80: note = Artificially Synthesized Probe
  source 1..80: mol_type = other DNA

SEQ ID NO: 131543 - DNA, 80 bp, synthetic construct
  misc_feature 1..80: note = Artificially Synthesized Probe
  source 1..80: mol_type = other DNA
tttctgttttgctcaaaggcatgtataagccaatgggtgaccttatttcctgtgtcttcaggtgtgtggcagggggcctg

SEQ ID NO: 131544 - DNA, 80 bp, synthetic construct
  misc_feature 1..80: note = Artificially Synthesized Probe
  source 1..80: mol_type = other DNA
ctgaggtttgggtgccatctagtggtgggatgggacttggttgactacatttaaggtaaggtggacccagcaactcccag

SEQ ID NO: 131545 - DNA, 80 bp, synthetic construct
  misc_feature 1..80: note = Artificially Synthesized Probe
  source 1..80: mol_type = other DNA
gcgtcctgatcccgaccagctgggcgaagaggccctcgcccagccttgggcagccccgagggaaccggccacctgcggca

SEQ ID NO: 131546 - DNA, 80 bp, synthetic construct
  misc_feature 1..80: note = Artificially Synthesized Probe
  source 1..80: mol_type = other DNA
cattctcgcctgggaggcacaagttctttcatctgcttttccttcagaggtgctgagcccacgccatagcccctgtggga

SEQ ID NO: 131547 - DNA, 80 bp, synthetic construct; identical to SEQ ID NO: 41764
  misc_feature 1..80: note = Artificially Synthesized Probe
  source 1..80: mol_type = other DNA

SEQ ID NO: 131548 - DNA, 80 bp, synthetic construct
  misc_feature 1..80: note = Artificially Synthesized Probe
  source 1..80: mol_type = other DNA
ctggagataagcccatggctcccaggttgtgttcatgtgacgtttccttgtggtaggttctgggtctgcgtttcgtctag

SEQ ID NO: 131549 - DNA, 80 bp, synthetic construct
  misc_feature 1..80: note = Artificially Synthesized Probe
  source 1..80: mol_type = other DNA
aagcgatgccaatatcccatccctgtcaaactgcctttactttttccttccttccttgctcccacctgtgtggatcctgg

SEQ ID NO: 131550 - DNA, 80 bp, synthetic construct
  misc_feature 1..80: note = Artificially Synthesized Probe
  source 1..80: mol_type = other DNA
tgttcaagccttattttatacttgcctgcccctttctctttcatttattggagtgagctgcagctctaagaagacctgtt

SEQ ID NO: 131551 - DNA, 80 bp, synthetic construct
  misc_feature 1..80: note = Artificially Synthesized Probe
  source 1..80: mol_type = other DNA
ctcagtggctgaccaggtgcgcccgctggctgctctgtggcaggtgaggggcttgtgagcaggccagggtgctgggtcct

SEQ ID NO: 131552 - DNA, 80 bp, synthetic construct
  misc_feature 1..80: note = Artificially Synthesized Probe
  source 1..80: mol_type = other DNA
tgatactaatacctccgattttagcccagcaccacagggtacgttccagtttttctctctttccatagctgtaaggccct

SEQ ID NO: 131553 - DNA, 80 bp, synthetic construct; identical to SEQ ID NO: 41765
  misc_feature 1..80: note = Artificially Synthesized Probe
  source 1..80: mol_type = other DNA

SEQ ID NO: 131554 - DNA, 80 bp, synthetic construct
  misc_feature 1..80: note = Artificially Synthesized Probe
  source 1..80: mol_type = other DNA
gctttattctcaaatatgatgtctacatagaaaagccaaaattattaagaatagtaagaattcacccagcactttgggag

SEQ ID NO: 131555 - DNA, 80 bp, synthetic construct
  misc_feature 1..80: note = Artificially Synthesized Probe
  source 1..80: mol_type = other DNA
cgggaagcggagcttgcagtgagccgagattgcgccactgcagtccgcagtccagcctgggcgacagagcgagactccgt

SEQ ID NO: 131556 - DNA, 80 bp, synthetic construct
  misc_feature 1..80: note = Artificially Synthesized Probe
  source 1..80: mol_type = other DNA
caacttgtgggctcaagcagtcctcctaccttggcctcctgagtagctgtaactacaggcacatgccaccaggtctggct

SEQ ID NO: 131557 - DNA, 80 bp, synthetic construct; identical to SEQ ID NO: 41766
  misc_feature 1..80: note = Artificially Synthesized Probe
  source 1..80: mol_type = other DNA

SEQ ID NO: 131558 - DNA, 80 bp, synthetic construct
  misc_feature 1..80: note = Artificially Synthesized Probe
  source 1..80: mol_type = other DNA
agactatgtagttttctgttgctgtgtaacaagtccccacatacttggtagcttatcacaacctcatttcttagctccaa

SEQ ID NO: 131559 - DNA, 80 bp, synthetic construct
  misc_feature 1..80: note = Artificially Synthesized Probe
  source 1..80: mol_type = other DNA
atgtccgtttcctgctggctgtcagccaggggctgctcttagggactagaggccacccacattccttgccatagggtccc

SEQ ID NO: 131560 - DNA, 80 bp, synthetic construct
  misc_feature 1..80: note = Artificially Synthesized Probe
  source 1..80: mol_type = other DNA
tatcccaattccgggagtgacttattcacgggaggagattatgtaagggtaaggatcactggggtcatcttggaattctg

SEQ ID NO: 131561 - DNA, 80 bp, synthetic construct; identical to SEQ ID NO: 41767
  misc_feature 1..80: note = Artificially Synthesized Probe
  source 1..80: mol_type = other DNA

SEQ ID NO: 131562 - DNA, 80 bp, synthetic construct
  misc_feature 1..80: note = Artificially Synthesized Probe
  source 1..80: mol_type = other DNA
gagcccgggagccctgcacaaatgcggaactgcgacggatggcagcaaacccgcagggaagggattgttatttaataaat

SEQ ID NO: 131563 - DNA, 80 bp, synthetic construct; identical to SEQ ID NO: 41726
  misc_feature 1..80: note = Artificially Synthesized Probe
  source 1..80: mol_type = other DNA

SEQ ID NO: 131564 - DNA, 80 bp, synthetic construct
  misc_feature 1..80: note = Artificially Synthesized Probe
  source 1..80: mol_type = other DNA
ttctttaaaaaaggccataaaataggcaagccacacactgggagaagattttggtaactgagaacaactaagaacttata

SEQ ID NO: 131565 - DNA, 80 bp, synthetic construct
  misc_feature 1..80: note = Artificially Synthesized Probe
  source 1..80: mol_type = other DNA
aacacccgggttccatagctatgtcaaaagttgctccgtcttactagttattaggaatatgcaaaatgaaactgaaacac

SEQ ID NO: 131566 - DNA, 80 bp, synthetic construct; identical to SEQ ID NO: 41768
  misc_feature 1..80: note = Artificially Synthesized Probe
  source 1..80: mol_type = other DNA

SEQ ID NO: 131567 - DNA, 80 bp, synthetic construct
  misc_feature 1..80: note = Artificially Synthesized Probe
  source 1..80: mol_type = other DNA
agctacctggaagaatcttagaaacataatgttgggtgaacaagttccagaagtctccacacggcacggtattattcatg

SEQ ID NO: 131568 - DNA, 80 bp, synthetic construct
  misc_feature 1..80: note = Artificially Synthesized Probe
  source 1..80: mol_type = other DNA
attacttcaacacaagacgcccagaagcctatggtccggtcagtgctgagattacttcaacacaagacggccagaagctt

SEQ ID NO: 131569 - DNA, 80 bp, synthetic construct; identical to SEQ ID NO: 41769
  misc_feature 1..80: note = Artificially Synthesized Probe
  source 1..80: mol_type = other DNA

SEQ ID NO: 131570 - DNA, 80 bp, synthetic construct
  misc_feature 1..80: note = Artificially Synthesized Probe
  source 1..80: mol_type = other DNA
gcaggaatgaggaggccaggcaggggtcagccacagggacgttgctgggcagtggcaggaggtgcagtgccaggggcagc

SEQ ID NO: 131571 - DNA, 80 bp, synthetic construct
  misc_feature 1..80: note = Artificially Synthesized Probe
  source 1..80: mol_type = other DNA
ctctcccaggttccctcccacatgctgtccccagtgcaggtggctggatggggtccaagacccatgcccagtctgtcgct

SEQ ID NO: 131572 - DNA, 80 bp, synthetic construct
  misc_feature 1..80: note = Artificially Synthesized Probe
  source 1..80: mol_type = other DNA
cttgcttaaaaaccaccaaatgggactgggcacactgcactgctcctaaaaatcaaagaggaggcgtggagcccagacaa

SEQ ID NO: 131573 - DNA, 80 bp, synthetic construct
  misc_feature 1..80: note = Artificially Synthesized Probe
  source 1..80: mol_type = other DNA
acctgtgggggttctgggtaggcctgggtgcctccacagttccgaccacagttggctaatccacacctgggcctgggccc

SEQ ID NO: 131574 - DNA, 80 bp, synthetic construct
  misc_feature 1..80: note = Artificially Synthesized Probe
  source 1..80: mol_type = other DNA
cgagcggaagaggggtgacagcagccccatgtaccgagcatgcctggggagcgtggcagggggctcttgtgctcctgcgt

SEQ ID NO: 131575 - DNA, 80 bp, synthetic construct; identical to SEQ ID NO: 41770
  misc_feature 1..80: note = Artificially Synthesized Probe
  source 1..80: mol_type = other DNA

SEQ ID NO: 131576 - DNA, 80 bp, synthetic construct
  misc_feature 1..80: note = Artificially Synthesized Probe
  source 1..80: mol_type = other DNA
ttcttttctttcggcaaattgtaaggagcacccagagctgctaggggccagtttgaaactagcagtgctttgggaggagc

SEQ ID NO: 131577 - DNA, 80 bp, synthetic construct
  misc_feature 1..80: note = Artificially Synthesized Probe
  source 1..80: mol_type = other DNA
ctgccttggctatgggatgtgtgcagggtgcacgactggatgtggagagcctggccggaccctgccacactcaggggcac

SEQ ID NO: 131578 - DNA, 80 bp, synthetic construct; identical to SEQ ID NO: 41771
  misc_feature 1..80: note = Artificially Synthesized Probe
  source 1..80: mol_type = other DNA

SEQ ID NO: 131579 - DNA, 80 bp, synthetic construct
  misc_feature 1..80: note = Artificially Synthesized Probe
  source 1..80: mol_type = other DNA
ctgagggcctttgggaaaagggaaaaggtttctacctgaagaggcacgggtcttgttggtgagccctgcccttcctggcg

SEQ ID NO: 131580 - DNA, 80 bp, synthetic construct
  misc_feature 1..80: note = Artificially Synthesized Probe
  source 1..80: mol_type = other DNA
aagggtatgaaggcaccttctagtgttgaaggcagggaacacatgcccattgtctgcatttcatttcccttaaaaggaat

SEQ ID NO: 131581 - DNA, 80 bp, synthetic construct
  misc_feature 1..80: note = Artificially Synthesized Probe
  source 1..80: mol_type = other DNA
acatgcccattgtctgcatttcatttcccttaaaaggaatctcaggagagtaataatagtgataattggttggtagacgg

SEQ ID NO: 131582 - DNA, 80 bp, synthetic construct
  misc_feature 1..80: note = Artificially Synthesized Probe
  source 1..80: mol_type = other DNA
ctgcctggctggtgaatggtgctgccgctgctcctcccggccccaaccttctctgctttccaccccctggtacctctggg

SEQ ID NO: 131583 - DNA, 80 bp, synthetic construct; identical to SEQ ID NO: 41772
  misc_feature 1..80: note = Artificially Synthesized Probe
  source 1..80: mol_type = other DNA

SEQ ID NO: 131584 - DNA, 80 bp, synthetic construct
  misc_feature 1..80: note = Artificially Synthesized Probe
  source 1..80: mol_type = other DNA
tcttgcaggtgaggagactgaggcacaaggagattcagggacccatgcagacaggtggcaaggtagagcgtgagcccagg

SEQ ID NO: 131585 - DNA, 80 bp, synthetic construct
  misc_feature 1..80: note = Artificially Synthesized Probe
  source 1..80: mol_type = other DNA
atatggcctctctcctttcccgtgtcctgtggtaatgaccttgataagtgcagagtggagtgaagagtgagggagggaga

SEQ ID NO: 131586 - DNA, 80 bp, synthetic construct
  misc_feature 1..80: note = Artificially Synthesized Probe
  source 1..80: mol_type = other DNA
aggcttgctagttgtgtgcgctgcatgcggaggtgccgtgccctgggcctggcctgtgcatttgatgccgaggcacttac

SEQ ID NO: 131587 - DNA, 80 bp, synthetic construct
  misc_feature 1..80: note = Artificially Synthesized Probe
  source 1..80: mol_type = other DNA
cgcggaactcatgggaactctgttgggacaggagttgtgggaaacggccacttcctctctcctggcacctcttccttcca

SEQ ID NO: 131588 - DNA, 80 bp, synthetic construct; identical to SEQ ID NO: 41773
  misc_feature 1..80: note = Artificially Synthesized Probe
  source 1..80: mol_type = other DNA

SEQ ID NO: 131589 - DNA, 80 bp, synthetic construct
  misc_feature 1..80: note = Artificially Synthesized Probe
  source 1..80: mol_type = other DNA
atgtggggggcaccagtccaccctccaggtggccctgagccctctcaccaggctgggtgttagctggtggagtggccaca

SEQ ID NO: 131590 - DNA, 80 bp, synthetic construct
  misc_feature 1..80: note = Artificially Synthesized Probe
  source 1..80: mol_type = other DNA
tggaaatgcccattttaaatcccgttacaggtgtgtttgcagagaaacaatactgcagacatgaacgtgtcctgtggttg

SEQ ID NO: 131591 - DNA, 80 bp, synthetic construct
  misc_feature 1..80: note = Artificially Synthesized Probe
  source 1..80: mol_type = other DNA
ctcctgagtagctggaattacaggcacccactatcatgcccgggtaattttagatttttgtagagattgggtttcaccat

SEQ ID NO: 131592 - DNA, 80 bp, synthetic construct
  misc_feature 1..80: note = Artificially Synthesized Probe
  source 1..80: mol_type = other DNA
accattcccaggctgaactttaagaactatgaggaaaaataagatgtttaaagtcacgaacgaacacacacatcttatcc

SEQ ID NO: 131593 - DNA, 80 bp, synthetic construct; identical to SEQ ID NO: 41774
  misc_feature 1..80: note = Artificially Synthesized Probe
  source 1..80: mol_type = other DNA

SEQ ID NO: 131594 - DNA, 80 bp, synthetic construct
  misc_feature 1..80: note = Artificially Synthesized Probe
  source 1..80: mol_type = other DNA
tgactaatttttttttgtatttttagtagagatggagtttcactatgttggccaggctggtcttgaactcctggcctcaa

SEQ ID NO: 131595 - DNA, 80 bp, synthetic construct
  misc_feature 1..80: note = Artificially Synthesized Probe
  source 1..80: mol_type = other DNA
cctgtgcagctgcagcgtggcgctgagcaggaaggacgcgtggagatgccggctgtggcgaccgcgtgatttgaaggcac

SEQ ID NO: 131596 - DNA, 80 bp, synthetic construct; identical to SEQ ID NO: 41775
  misc_feature 1..80: note = Artificially Synthesized Probe
  source 1..80: mol_type = other DNA

SEQ ID NO: 131597 - DNA, 80 bp, synthetic construct
  misc_feature 1..80: note = Artificially Synthesized Probe
  source 1..80: mol_type = other DNA
gaatgtcccagatgccgtcggtcccaataaatgagcccgtagcatggcacccgatccacccaaaacagactctccaatac

SEQ ID NO: 131598 - DNA, 80 bp, synthetic construct
  misc_feature 1..80: note = Artificially Synthesized Probe
  source 1..80: mol_type = other DNA
tcccctctgcctgcaggtgccgcggccaggtgggacctctgcattgatcaggctgtggtcttcatcgaagatgctattca

SEQ ID NO: 131599 - DNA, 80 bp, synthetic construct
  misc_feature 1..80: note = Artificially Synthesized Probe
  source 1..80: mol_type = other DNA
ctgaccagctccctggtgttgctgatgctgccggccgggggtcacacaatgagaaccacatcccagcattagcatcactg

SEQ ID NO: 131600 - DNA, 80 bp, synthetic construct
  misc_feature 1..80: note = Artificially Synthesized Probe
  source 1..80: mol_type = other DNA
tggtgccttataagaatagagaaggcagagaccacagaaaagaccacgtgaagacagagggcagagactggagtgatgcg

SEQ ID NO: 131601 - DNA, 80 bp, synthetic construct; identical to SEQ ID NO: 41776
  misc_feature 1..80: note = Artificially Synthesized Probe
  source 1..80: mol_type = other DNA

SEQ ID NO: 131602 - DNA, 80 bp, synthetic construct
  misc_feature 1..80: note = Artificially Synthesized Probe
  source 1..80: mol_type = other DNA
agcttgcagcttggggctgtccccagggcccctctctctcagttttgtttggagcggtggcctcgaatgctgcccgagcc

SEQ ID NO: 131603 - DNA, 80 bp, synthetic construct
  misc_feature 1..80: note = Artificially Synthesized Probe
  source 1..80: mol_type = other DNA
ccagccgcatggggcatcagtcaccttgggtattgctccaggagcaggcagtctgggagacctcagaggaggcctgctgg

SEQ ID NO: 131604 - DNA, 80 bp, synthetic construct
  misc_feature 1..80: note = Artificially Synthesized Probe
  source 1..80: mol_type = other DNA
gcagagggggctcctggcagggctgcgagcctcctacctctgggtcccacatcggtgctgggtcccaatgcccaccttgt

SEQ ID NO: 131605 - DNA, 80 bp, synthetic construct; identical to SEQ ID NO: 41777
  misc_feature 1..80: note = Artificially Synthesized Probe
  source 1..80: mol_type = other DNA

SEQ ID NO: 131606 - DNA, 80 bp, synthetic construct
  misc_feature 1..80: note = Artificially Synthesized Probe
  source 1..80: mol_type = other DNA
ggcagggggagtcccctcctggcaggagctcctcctcctcctggcagccttcctgggcctgtgctgggaaccttacaacc

SEQ ID NO: 131607 - DNA, 80 bp, synthetic construct
  misc_feature 1..80: note = Artificially Synthesized Probe
  source 1..80: mol_type = other DNA
agggtactgatggggccctctctggctgtggggttcccgctgggtggggctggagcatcccctgggtctgtccacctgcc

SEQ ID NO: 131608 - DNA, 80 bp, synthetic construct
  misc_feature 1..80: note = Artificially Synthesized Probe
  source 1..80: mol_type = other DNA
ccccttgctggtgagtgcgcttagggaaaggccattttcagccttcactggggcaaagaaaagaggctctgtgtctgggg

SEQ ID NO: 131609 - DNA, 80 bp, synthetic construct; identical to SEQ ID NO: 41727
  misc_feature 1..80: note = Artificially Synthesized Probe
  source 1..80: mol_type = other DNA

SEQ ID NO: 131610 - DNA, 80 bp, synthetic construct; identical to SEQ ID NO: 41778
  misc_feature 1..80: note = Artificially Synthesized Probe
  source 1..80: mol_type = other DNA

SEQ ID NO: 131611 - DNA, 80 bp, synthetic construct
  misc_feature 1..80: note = Artificially Synthesized Probe
  source 1..80: mol_type = other DNA
cctggacctccgtcggtggccacagcgggaacactgtgtggaagtgtgctgtgcatactcatgcatcctcacttctgact

SEQ ID NO: 131612 - DNA, 80 bp, synthetic construct
  misc_feature 1..80: note = Artificially Synthesized Probe
  source 1..80: mol_type = other DNA
tgaagacaggagaacacgggtgggggatattgcctcagtctgagtgcccaaaggtggcggtattagctcagctgtgggga

SEQ ID NO: 131613 - DNA, 80 bp, synthetic construct
  misc_feature 1..80: note = Artificially Synthesized Probe
  source 1..80: mol_type = other DNA
agggaaactgctgacccacgtcactcgagcgggacatgagactggcccaggcagaagggcctgagaccccaggaccctca

SEQ ID NO: 131614 - DNA, 80 bp, synthetic construct
  misc_feature 1..80: note = Artificially Synthesized Probe
  source 1..80: mol_type = other DNA
cctggcaagtagtcctgccgtataactgaaaggcagcgactccacatgaccatggggcaggcaggatggcgagctctgct

SEQ ID NO: 131615 - DNA, 80 bp, synthetic construct; identical to SEQ ID NO: 41779
  misc_feature 1..80: note = Artificially Synthesized Probe
  source 1..80: mol_type = other DNA

SEQ ID NO: 131616 - DNA, 80 bp, synthetic construct
  misc_feature 1..80: note = Artificially Synthesized Probe
  source 1..80: mol_type = other DNA
atgtgctgtgttgcagttctggaggccagaagtcccaggtgcaggtgccagcaggactgggcaccctctgaaggccctag

SEQ ID NO: 131617 - DNA, 80 bp, synthetic construct
  misc_feature 1..80: note = Artificially Synthesized Probe
  source 1..80: mol_type = other DNA
cacatttctctctacttataaggacaccgattgtattggattcagggccttccctgctccagtataacctcaacttatta

SEQ ID NO: 131618 - DNA, 80 bp, synthetic construct
  misc_feature 1..80: note = Artificially Synthesized Probe
  source 1..80: mol_type = other DNA
ggcagctttttgatttttacggtgaggggcggaacccagcattgctttgaatggccgcatgctaggcattgggaggggtg

SEQ ID NO: 131619 - DNA, 80 bp, synthetic construct; identical to SEQ ID NO: 41780
  misc_feature 1..80: note = Artificially Synthesized Probe
  source 1..80: mol_type = other DNA

SEQ ID NO: 131620 - DNA, 80 bp, synthetic construct
  misc_feature 1..80: note = Artificially Synthesized Probe
  source 1..80: mol_type = other DNA
cccaccccgggtgtgtggcctgtgaggtcttgtgtgttgggcaaacctcgtggtttgtgatggtgtgggcctgatgggtc

SEQ ID NO: 131621 - DNA, 80 bp, synthetic construct
  misc_feature 1..80: note = Artificially Synthesized Probe
  source 1..80: mol_type = other DNA
gagatgggcccaaagccctcccaggtgcctggcccggggccagccttcgatgcagatcagcctccgtgcaagtcagctct

SEQ ID NO: 131622 - DNA, 80 bp, synthetic construct
  misc_feature 1..80: note = Artificially Synthesized Probe
  source 1..80: mol_type = other DNA
atctccaaggtggacttggtcccagcctggcagcacaggtgaagctgggagtggtgcgtgcagggctctctgagtaagcg

SEQ ID NO: 131623 - DNA, 80 bp, synthetic construct
  misc_feature 1..80: note = Artificially Synthesized Probe
  source 1..80: mol_type = other DNA
tgtctctgcccagaagggagggtcccgtggtgggtgaatgaaggttgggttggtttcacagacccccgtcgtgcccactt

SEQ ID NO: 131624 - DNA, 80 bp, synthetic construct; identical to SEQ ID NO: 41781
  misc_feature 1..80: note = Artificially Synthesized Probe
  source 1..80: mol_type = other DNA

SEQ ID NO: 131625 - DNA, 80 bp, synthetic construct
  misc_feature 1..80: note = Artificially Synthesized Probe
  source 1..80: mol_type = other DNA
gacagccctgcctggctcgagcccaagacagcttctcaaagggcagttcctttgagagagactgttgggaaacacctttg

SEQ ID NO: 131626 - DNA, 80 bp, synthetic construct
  misc_feature 1..80: note = Artificially Synthesized Probe
  source 1..80: mol_type = other DNA
ccctgacattcctgtgtgcagctccggaggccccctccccgccccgtgcctgcagcccactccctacctctgccagcccg

SEQ ID NO: 131627 - DNA, 80 bp, synthetic construct; identical to SEQ ID NO: 41782
  misc_feature 1..80: note = Artificially Synthesized Probe
  source 1..80: mol_type = other DNA

SEQ ID NO: 131628 - DNA, 80 bp, synthetic construct
  misc_feature 1..80: note = Artificially Synthesized Probe
  source 1..80: mol_type = other DNA
gccaggggccctccattgatcactatcaggatgtgattgattaatatcatggaggaggaggcctgcgcttggctggcccg

SEQ ID NO: 131629 - DNA, 80 bp, synthetic construct
  misc_feature 1..80: note = Artificially Synthesized Probe
  source 1..80: mol_type = other DNA
tctttgaagcacttccagtttgcccagctgggtacgtccagtgcagccctttacatttccagtttgtccagatccacaaa

SEQ ID NO: 131630 - DNA, 80 bp, synthetic construct
  misc_feature 1..80: note = Artificially Synthesized Probe
  source 1..80: mol_type = other DNA
cggagggagcttgtcccagcctcctgtccttggtgaactgctccagtggggacaggcctccctccaccatcttcccactc

SEQ ID NO: 131631 - DNA, 80 bp, synthetic construct
  misc_feature 1..80: note = Artificially Synthesized Probe
  source 1..80: mol_type = other DNA
accgggtggatgccagctcgatgtggctttaccgacggtattactcgaacgtatgccaacggtgagaacgcacccatgtg

SEQ ID NO: 131632 - DNA, 80 bp, synthetic construct
  misc_feature 1..80: note = Artificially Synthesized Probe
  source 1..80: mol_type = other DNA
ggggagaggaggatccctgagcatgaatggttgcaacaggatgtggggagggaagaggaagaactggtccagacagagaa

SEQ ID NO: 131633 - DNA, 80 bp, synthetic construct; identical to SEQ ID NO: 41783
  misc_feature 1..80: note = Artificially Synthesized Probe
  source 1..80: mol_type = other DNA

SEQ ID NO: 131634 - DNA, 80 bp, synthetic construct
  misc_feature 1..80: note = Artificially Synthesized Probe
  source 1..80: mol_type = other DNA
tcacagtgcaaaccccatggcctggaatgcagtattcatgccagaaacactgagaaaggctctgccatccagggactatg

SEQ ID NO: 131635 - DNA, 80 bp, synthetic construct
  misc_feature 1..80: note = Artificially Synthesized Probe
  source 1..80: mol_type = other DNA
gcaccaggattttctaagcagtggggtttgctaagcacctgggttttgctgagcaccaggattttctcagcagtggggtt

SEQ ID NO: 131636 - DNA, 80 bp, synthetic construct
  misc_feature 1..80: note = Artificially Synthesized Probe
  source 1..80: mol_type = other DNA
tatcacacctcaggattgtccagagtatcacacctggtcacaccctcctcctcatcttgggagaagcctctgtgacccac

SEQ ID NO: 131637 - DNA, 80 bp, synthetic construct; identical to SEQ ID NO: 41784
  misc_feature 1..80: note = Artificially Synthesized Probe
  source 1..80: mol_type = other DNA

SEQ ID NO: 131638 - DNA, 80 bp, synthetic construct
  misc_feature 1..80: note = Artificially Synthesized Probe
  source 1..80: mol_type = other DNA
gtttggattgggctgaatgatgacccccttaacgtatgtccaaatcctaacctagaacctgtgggtgtgacctttttgga

SEQ ID NO: 131639 - DNA, 80 bp, synthetic construct
  misc_feature 1..80: note = Artificially Synthesized Probe
  source 1..80: mol_type = other DNA
gaggaggatgcacgaagacagaggcagagactggagtgatgtggccacagtcaaggaacacctggagcccccaggagctg

SEQ ID NO: 131640 - DNA, 80 bp, synthetic construct
  misc_feature 1..80: note = Artificially Synthesized Probe
  source 1..80: mol_type = other DNA
ccagtttgggatggtttgttacagcagctgcaggagacttgtacacatttgttctgccgacacgcttttctcattctcac

SEQ ID NO: 131641 - DNA, 80 bp, synthetic construct; identical to SEQ ID NO: 41785
  misc_feature 1..80: note = Artificially Synthesized Probe
  source 1..80: mol_type = other DNA

SEQ ID NO: 131642 - DNA, 80 bp, synthetic construct
  misc_feature 1..80: note = Artificially Synthesized Probe
  source 1..80: mol_type = other DNA
caagacagacccaagtgcctgccttggtgggctcttctagtcagagtggccaggagaagcagaccaagtgtctggtgcat

SEQ ID NO: 131643 - DNA, 80 bp, synthetic construct
  misc_feature 1..80: note = Artificially Synthesized Probe
  source 1..80: mol_type = other DNA
aacaagggttcctttctggaatgctgtggtcagccctcggcaatggagctttgagcagattcgtgatctccccagtcacg

SEQ ID NO: 131644 - DNA, 80 bp, synthetic construct
  misc_feature 1..80: note = Artificially Synthesized Probe
  source 1..80: mol_type = other DNA
gaggttccctgaaggggccttgtgtggagcagaggagctcctggcggtttgagtggaggaaggatgagatccaatgtact

SEQ ID NO: 131645 - DNA, 80 bp, synthetic construct; identical to SEQ ID NO: 41786
  misc_feature 1..80: note = Artificially Synthesized Probe
  source 1..80: mol_type = other DNA

SEQ ID NO: 131646 - DNA, 80 bp, synthetic construct
  misc_feature 1..80: note = Artificially Synthesized Probe
  source 1..80: mol_type = other DNA
aatcctcatgttactttgttaatcatctcctgtatcagtcacagcactggcatctggcacacattatcaaatttaatcct

SEQ ID NO: 131647 - DNA, 80 bp, synthetic construct
  misc_feature 1..80: note = Artificially Synthesized Probe
  source 1..80: mol_type = other DNA
agaagttggcagatgcagtgccctagcatctacttggaggaagaggttgggatccttgggagagagggcttctggaagtg

SEQ ID NO: 131648 - DNA, 80 bp, synthetic construct
  misc_feature 1..80: note = Artificially Synthesized Probe
  source 1..80: mol_type = other DNA
ggcaggaaatacaaattattctaccaagacagttgtctttctggggtatgaccagttttctccacccaccatccatccat

SEQ ID NO: 131649 - DNA, 80 bp, synthetic construct; identical to SEQ ID NO: 41787
  misc_feature 1..80: note = Artificially Synthesized Probe
  source 1..80: mol_type = other DNA

SEQ ID NO: 131650 - DNA, 80 bp, synthetic construct
  misc_feature 1..80: note = Artificially Synthesized Probe
  source 1..80: mol_type = other DNA
ccatccatccaaccattcaaacacccatccatccaaccatccaaacacccatctattcatccatccattcatccatccat

SEQ ID NO: 131651 - DNA, 80 bp, synthetic construct
  misc_feature 1..80: note = Artificially Synthesized Probe
  source 1..80: mol_type = other DNA
ccaaacattccccaaatatctatccaaactccctacttccctctttgtagtctatgacaaacattcttgttggtactggg

SEQ ID NO: 131652 - DNA, 80 bp, synthetic construct
  misc_feature 1..80: note = Artificially Synthesized Probe
  source 1..80: mol_type = other DNA
ttctctggcaagtgagctgagatgaattggatgagccagagtgacctggtcgggagcagagaagcgcagtcccagtggga

SEQ ID NO: 131653 - DNA, 80 bp, synthetic construct
  misc_feature 1..80: note = Artificially Synthesized Probe
  source 1..80: mol_type = other DNA
ctttgagcttcaccatcttcttgatcctgtttttggcttttatcgagaccccatcctcactcaccagcacggcggacgtg

SEQ ID NO: 131654 - DNA, 80 bp, synthetic construct
  misc_feature 1..80: note = Artificially Synthesized Probe
  source 1..80: mol_type = other DNA
ggtcaggtgatcactctggggtgtgaactcaatgtggcccccttccaattctgttttgcagtctctgctttctcagaagg

SEQ ID NO: 131655 - DNA, 80 bp, synthetic construct; identical to SEQ ID NO: 41788
  misc_feature 1..80: note = Artificially Synthesized Probe
  source 1..80: mol_type = other DNA

SEQ ID NO: 131656 - DNA, 80 bp, synthetic construct
  misc_feature 1..80: note = Artificially Synthesized Probe
  source 1..80: mol_type = other DNA
tacatggttcatttaaaacactccagccttcttcccaaaatgtgcaacttgggaaagaatctgtgtcccttcagctctgg

SEQ ID NO: 131657 - DNA, 80 bp, synthetic construct
  misc_feature 1..80: note = Artificially Synthesized Probe
  source 1..80: mol_type = other DNA
cactgccctaagctgtcttgtctggtctggtcgggggcagatattttacacattttatagccctattagttttaggtctt

SEQ ID NO: 131658 - DNA, 80 bp, synthetic construct
  misc_feature 1..80: note = Artificially Synthesized Probe
  source 1..80: mol_type = other DNA
gcgtgctgattccgcctggccattgggccatggctgggtgggccgccgccttccccagcgggtggggcgaattctcctga

SEQ ID NO: 131659 - DNA, 80 bp, synthetic construct; identical to SEQ ID NO: 41789
  misc_feature 1..80: note = Artificially Synthesized Probe
  source 1..80: mol_type = other DNA

SEQ ID NO: 131660 - DNA, 80 bp, synthetic construct
  misc_feature 1..80: note = Artificially Synthesized Probe
  source 1..80: mol_type = other DNA
gcgcctatagtcccagctactcaggaggctgaggcagaagaatcgcttgaactcgggaggcggaggttgcagtgagccga

SEQ ID NO: 131661 - DNA, 80 bp, synthetic construct
  misc_feature 1..80: note = Artificially Synthesized Probe
  source 1..80: mol_type = other DNA
acacacccagtaagtggccgaggtgggattcgaaccagttgggagctaggagtcctttctttgtagggtgcctttccccg

SEQ ID NO: 131662 - DNA, 80 bp, synthetic construct
  misc_feature 1..80: note = Artificially Synthesized Probe
  source 1..80: mol_type = other DNA
ctgtcctgtcctcgttgtaagacttgcatttttgacgttctctacctacaaaaggttcgtgccaaagtgcagcttttggt

SEQ ID NO: 131663 - DNA, 80 bp, synthetic construct; identical to SEQ ID NO: 41790
  misc_feature 1..80: note = Artificially Synthesized Probe
  source 1..80: mol_type = other DNA

SEQ ID NO: 131664 - DNA, 80 bp, synthetic construct
  misc_feature 1..80: note = Artificially Synthesized Probe
  source 1..80: mol_type = other DNA
tggtgggcacttccaaatggtcagtgttgtcactcaccctgggcttagaactgtctatggctcttcaggattcaatctaa

SEQ ID NO: 131665 - DNA, 80 bp, synthetic construct
  misc_feature 1..80: note = Artificially Synthesized Probe
  source 1..80: mol_type = other DNA
cgctgtctctctctgtgcgtgtccactgctgttccctctgctgtctctctctgtgcgtgtccactgctgttccctctgct

SEQ ID NO: 131666 - DNA, 80 bp, synthetic construct; identical to SEQ ID NO: 41728
  misc_feature 1..80: note = Artificially Synthesized Probe
  source 1..80: mol_type = other DNA

SEQ ID NO: 131667 - DNA, 80 bp, synthetic construct
  misc_feature 1..80: note = Artificially Synthesized Probe
  source 1..80: mol_type = other DNA
tctagtgctgcattcatcacgttattccctttccatgagtctcatttcctcctgggtctccttccacctccatgcattct

SEQ ID NO: 131668 - DNA, 80 bp, synthetic construct; identical to SEQ ID NO: 41791
  misc_feature 1..80: note = Artificially Synthesized Probe
  source 1..80: mol_type = other DNA

SEQ ID NO: 131669 - DNA, 80 bp, synthetic construct
  misc_feature 1..80: note = Artificially Synthesized Probe
  source 1..80: mol_type = other DNA
cagggaggtgcttttatgctcatgccttccagaatgggagagccccaggcctcacccaggaaagagaaggacctgtgcca

SEQ ID NO: 131670 - DNA, 80 bp, synthetic construct
  misc_feature 1..80: note = Artificially Synthesized Probe
  source 1..80: mol_type = other DNA
ggtcactgggcccctgcccctcggcccctttgtgaacccagcaaaacctgcacctttggcgcatgacctccagctccttg

SEQ ID NO: 131671 - DNA, 80 bp, synthetic construct
  misc_feature 1..80: note = Artificially Synthesized Probe
  source 1..80: mol_type = other DNA
agccttaacataggatttattatgaataaatgaaactcccttgcagggcagttgctctgcgaccagcgtggcctaggaag

SEQ ID NO: 131672 - DNA, 80 bp, synthetic construct; identical to SEQ ID NO: 41792
  misc_feature 1..80: note = Artificially Synthesized Probe
  source 1..80: mol_type = other DNA

SEQ ID NO: 131673 - DNA, 80 bp, synthetic construct
  misc_feature 1..80: note = Artificially Synthesized Probe
  source 1..80: mol_type = other DNA
acttgcccagggtcaccagctcggaggcagggttggattccaggatttataatctcagaggtgggatttaaagccacgac

SEQ ID NO: 131674 - DNA, 80 bp, synthetic construct
  misc_feature 1..80: note = Artificially Synthesized Probe
  source 1..80: mol_type = other DNA
agagctttttccccttcaaggaataaaaagcacacacacacattcctccgaatcaaaggtgtgtccagagagagggaggg

SEQ ID NO: 131675 - DNA, 80 bp, synthetic construct
  misc_feature 1..80: note = Artificially Synthesized Probe
  source 1..80: mol_type = other DNA
cccctgggggagggcggggccgctcctctcccagcaggcgggtgcagccccaggggtgctgcaggccactgcgggacctt

SEQ ID NO: 131676 - DNA, 80 bp, synthetic construct
  misc_feature 1..80: note = Artificially Synthesized Probe
  source 1..80: mol_type = other DNA
atagccagggtccttgaaggaggcgtgtcaccgtccactctccagagagcagcctgcggcctgggaggtgggcttcgcct

SEQ ID NO: 131677 - DNA, 80 bp, synthetic construct
  misc_feature 1..80: note = Artificially Synthesized Probe
  source 1..80: mol_type = other DNA
ccagtgtgccgtcagctctcctccctctccaccatgcaaactgagcccagtgtgccgtcagctctcctccctctccacca

SEQ ID NO: 131678 - DNA, 80 bp, synthetic construct; identical to SEQ ID NO: 41793
  misc_feature 1..80: note = Artificially Synthesized Probe
  source 1..80: mol_type = other DNA

SEQ ID NO: 131679 - DNA, 80 bp, synthetic construct
  misc_feature 1..80: note = Artificially Synthesized Probe
  source 1..80: mol_type = other DNA
cccatctcttctccctgtgtctctcctctgagccttcaggaggaggctggtcattggattttgggttctccaggatgatc

SEQ ID NO: 131680 - DNA, 80 bp, synthetic construct
  misc_feature 1..80: note = Artificially Synthesized Probe
  source 1..80: mol_type = other DNA
ttcatctcaatttccagaggacctggtgttgcttggccggccccctccagcagtgactggaggttgctgagtagcagaag

SEQ ID NO: 131681 - DNA, 80 bp, synthetic construct
  misc_feature 1..80: note = Artificially Synthesized Probe
  source 1..80: mol_type = other DNA
cacccggcccacggggcaaaccccaacacagccctcagtttaccaattctcgtcacatggaagccacctgggggcttccc

SEQ ID NO: 131682 - DNA, 80 bp, synthetic construct; identical to SEQ ID NO: 41794
  misc_feature 1..80: note = Artificially Synthesized Probe
  source 1..80: mol_type = other DNA

SEQ ID NO: 131683 - DNA, 80 bp, synthetic construct
  misc_feature 1..80: note = Artificially Synthesized Probe
  source 1..80: mol_type = other DNA
ttccgtggagtttccctgttctttgcatccatcctgtgctcagccctgagcgaggcgctggggaaggggagcgagaaggg

SEQ ID NO: 131684 - DNA, 80 bp, synthetic construct
  misc_feature 1..80: note = Artificially Synthesized Probe
  source 1..80: mol_type = other DNA
ggagctggggcagcagtgagtctaggatggaggatgctttgtggggagaccacagggaagaccatctgaggaagagatcc

SEQ ID NO: 131685 - DNA, 80 bp, synthetic construct
  misc_feature 1..80: note = Artificially Synthesized Probe
  source 1..80: mol_type = other DNA
cagagcaggaattgggtgtggtgggggctactgagcttgggtcctatgttcactttctccttccatttatttatttattt

SEQ ID NO: 131686 - DNA, 80 bp, synthetic construct; identical to SEQ ID NO: 41795
  misc_feature 1..80: note = Artificially Synthesized Probe
  source 1..80: mol_type = other DNA

SEQ ID NO: 131687 - DNA, 80 bp, synthetic construct
  misc_feature 1..80: note = Artificially Synthesized Probe
  source 1..80: mol_type = other DNA
ttttttggggatgggtcttgctctgtcactcaggctggagtgcagtggcagcatcatagcttaagcaatgattttgtcac

SEQ ID NO: 131688 - DNA, 80 bp, synthetic construct
  misc_feature 1..80: note = Artificially Synthesized Probe
  source 1..80: mol_type = other DNA
aggagaggaggtgggcgtggggcagaaaggggtttcttatgcacacagcagctgctgcatgtttgactctgggttctgcc

SEQ ID NO: 131689 - DNA, 80 bp, synthetic construct
  misc_feature 1..80: note = Artificially Synthesized Probe
  source 1..80: mol_type = other DNA
tgtttttgctggagacaaggtcttgctgtgtggcccaggttggtctcaaactcctggcctcaagtgatcctctgaactca

SEQ ID NO: 131690 - DNA, 80 bp, synthetic construct; identical to SEQ ID NO: 41796
  misc_feature 1..80: note = Artificially Synthesized Probe
  source 1..80: mol_type = other DNA

SEQ ID NO: 131691 - DNA, 80 bp, synthetic construct
  misc_feature 1..80: note = Artificially Synthesized Probe
  source 1..80: mol_type = other DNA
ccgacatagcagcctgcatgcacaaaagcttttccagcctctgcttgcatcctgtttgcttcgtccctttggacaaagca

SEQ ID NO: 131692 - DNA, 80 bp, synthetic construct
  misc_feature 1..80: note = Artificially Synthesized Probe
  source 1..80: mol_type = other DNA
atatgagggagtgtgaataaattaggggtcattactgtcatgctctaccactgagtgtgtgactcagttctggccaatga

SEQ ID NO: 131693 - DNA, 80 bp, synthetic construct
  misc_feature 1..80: note = Artificially Synthesized Probe
  source 1..80: mol_type = other DNA
gtgaattagttggaaggaagcttggttcctgttgacttcttggtgccttagactgcctatccctggacttcttttacatg

SEQ ID NO: 131694 - DNA, 80 bp, synthetic construct; identical to SEQ ID NO: 41797
  misc_feature 1..80: note = Artificially Synthesized Probe
  source 1..80: mol_type = other DNA

SEQ ID NO: 131695 - DNA, 80 bp, synthetic construct
  misc_feature 1..80: note = Artificially Synthesized Probe
  source 1..80: mol_type = other DNA
caatgtggaatgaagattccaacccgcaaatgacctcaggaccctgactctgagccgagactgaagcagcccattcattc

SEQ ID NO: 131696 - DNA, 80 bp, synthetic construct
  misc_feature 1..80: note = Artificially Synthesized Probe
  source 1..80: mol_type = other DNA
gcagggtggggagagagggcagccttgctggggaggtctgggggtctccttggagtagcatgtctgaatggaagccacgg

SEQ ID NO: 131697 - DNA, 80 bp, synthetic construct
  misc_feature 1..80: note = Artificially Synthesized Probe
  source 1..80: mol_type = other DNA
gctgctcctctgcgaggacttggtggctctatttgtccctcctagagacctccagtcttggtctggctctctctttagca

SEQ ID NO: 131698 - DNA, 80 bp, synthetic construct
  misc_feature 1..80: note = Artificially Synthesized Probe
  source 1..80: mol_type = other DNA
cgcaatagcggctcaggatccagcaaatgggcttgggccctttgctgcagagctcttgggtcaggtggtcacacgctcct

SEQ ID NO: 131699 - DNA, 80 bp, synthetic construct; identical to SEQ ID NO: 41798
  misc_feature 1..80: note = Artificially Synthesized Probe
  source 1..80: mol_type = other DNA

SEQ ID NO: 131700 - DNA, 80 bp, synthetic construct
  misc_feature 1..80: note = Artificially Synthesized Probe
  source 1..80: mol_type = other DNA
tccatgcccatggtgttagatcaggccctggctgcagccctcctcagcgccagccctgccgctccttggctgggccttgg

SEQ ID NO: 131701 - DNA, 80 bp, synthetic construct
  misc_feature 1..80: note = Artificially Synthesized Probe
  source 1..80: mol_type = other DNA
tgcacacccacacacacgtacctgcctgggcatgcatgcacacaggcacacagcacgtacccataagactcaagcatgca

SEQ ID NO: 131702 - DNA, 80 bp, synthetic construct
  misc_feature 1..80: note = Artificially Synthesized Probe
  source 1..80: mol_type = other DNA
tgctcagggctctctgtagattttcttccataaagagaagattttctcatccccatcatacagatgtgggcatctaggaa

SEQ ID NO: 131703 - DNA, 80 bp, synthetic construct
  misc_feature 1..80: note = Artificially Synthesized Probe
  source 1..80: mol_type = other DNA
ggttttggtcgggggggagggccgtgggagccaggcagaggtgctggagagagggagacagtgctaccctgcacgggggt

SEQ ID NO: 131704 - DNA, 80 bp, synthetic construct; identical to SEQ ID NO: 41799
  misc_feature 1..80: note = Artificially Synthesized Probe
  source 1..80: mol_type = other DNA

SEQ ID NO: 131705 - DNA, 80 bp, synthetic construct
  misc_feature 1..80: note = Artificially Synthesized Probe
  source 1..80: mol_type = other DNA
ctgcagctgcacccgcacgtgtcttcccaggctctgaggggctcacaggcgggttggggcggagggtcccatgccctctg

SEQ ID NO: 131706 - DNA, 80 bp, synthetic construct
  misc_feature 1..80: note = Artificially Synthesized Probe
  source 1..80: mol_type = other DNA
aaaagcccctacccagtgcctggcacacagcgggtgcttcggttcttatctcattggaactgtacatgtgcctggggtgg

SEQ ID NO: 131707 - DNA, 80 bp, synthetic construct; identical to SEQ ID NO: 41800
  misc_feature 1..80: note = Artificially Synthesized Probe
  source 1..80: mol_type = other DNA

SEQ ID NO: 131708 - DNA, 80 bp, synthetic construct
  misc_feature 1..80: note = Artificially Synthesized Probe
  source 1..80: mol_type = other DNA
taccctagttctgcatggagggtttgacctcacgcccggctccccacctgcccgccctgctgtgcggcctcctccctgcc

SEQ ID NO: 131709 - DNA, 80 bp, synthetic construct
  misc_feature 1..80: note = Artificially Synthesized Probe
  source 1..80: mol_type = other DNA
tgggctcctcgcctgtgatctcagaaacagggctgggtgtgtctctgcagccttcctggggaagttttcttttaatctgc

SEQ ID NO: 131710 - DNA, 80 bp, synthetic construct
  misc_feature 1..80: note = Artificially Synthesized Probe
  source 1..80: mol_type = other DNA
agtggtttgcagagacgtaggttgcagagccagtgagccggtgacatcttgcatgcagccttgatccagggagtgaagga

SEQ ID NO: 131711 - DNA, 80 bp, synthetic construct; identical to SEQ ID NO: 41729
  misc_feature 1..80: note = Artificially Synthesized Probe
  source 1..80: mol_type = other DNA

SEQ ID NO: 131712 - DNA, 80 bp, synthetic construct; identical to SEQ ID NO: 41801
  misc_feature 1..80: note = Artificially Synthesized Probe
  source 1..80: mol_type = other DNA

SEQ ID NO: 131713 - DNA, 80 bp, synthetic construct
  misc_feature 1..80: note = Artificially Synthesized Probe
  source 1..80: mol_type = other DNA
ctacttccccctgccctccctcctggcccttgcaggggctaagtacctttgtacccctgggtgcccccgccacgaccctc

SEQ ID NO: 131714 - DNA, 80 bp, synthetic construct
  misc_feature 1..80: note = Artificially Synthesized Probe
  source 1..80: mol_type = other DNA
ttcactgttggttttaggaactgagaaaggcccccaatccccgagaaaatccagggcagaatgtggctgaggagctggag

SEQ ID NO: 131715 - DNA, 80 bp, synthetic construct
  misc_feature 1..80: note = Artificially Synthesized Probe
  source 1..80: mol_type = other DNA
gatcaatggatcctatcttgtcggaatgcgggggcattgagggcagctggagaatgtaagcttagctcccagactggtgc

SEQ ID NO: 131716 - DNA, 80 bp, synthetic construct
  misc_feature 1..80: note = Artificially Synthesized Probe
  source 1..80: mol_type = other DNA
aacaatgcacgtgttagggttgcgaccccctcccccatgcagtgaaaacctgcatgtaactttcgactcctccaaaactg

SEQ ID NO: 131717 - DNA, 80 bp, synthetic construct; identical to SEQ ID NO: 41802
  misc_feature 1..80: note = Artificially Synthesized Probe
  source 1..80: mol_type = other DNA

SEQ ID NO: 131718 - DNA, 80 bp, synthetic construct
  misc_feature 1..80: note = Artificially Synthesized Probe
  source 1..80: mol_type = other DNA
atggctcccaacttaggatgcagcttaaggatctcttgacttcacaatggtgtgaaagccatatgcgttcagtagaacat

SEQ ID NO: 131719 - DNA, 80 bp, synthetic construct
  misc_feature 1..80: note = Artificially Synthesized Probe
  source 1..80: mol_type = other DNA
tgggtttgctggaacgtaaccccatcgtaagttgggcagcatttgtcatgcgaaccacagagataatttacaatttttga

SEQ ID NO: 131720 - DNA, 80 bp, synthetic construct; identical to SEQ ID NO: 41803
  misc_feature 1..80: note = Artificially Synthesized Probe
  source 1..80: mol_type = other DNA

SEQ ID NO: 131721 - DNA, 80 bp, synthetic construct
  misc_feature 1..80: note = Artificially Synthesized Probe
  source 1..80: mol_type = other DNA
aggctggagtgcagtggtgcagtcttggctcactgcaacctccgcctcctgggtttaggtgattctcctgcctcagcctc

SEQ ID NO: 131722 - DNA, 80 bp, synthetic construct
  misc_feature 1..80: note = Artificially Synthesized Probe
  source 1..80: mol_type = other DNA
gattctcctgcctcagcctcctgagtagctgggattacaggtgcacaccaccacgcccagctaatttttgtgtttttagt

SEQ ID NO: 131723 - DNA, 80 bp, synthetic construct
  misc_feature 1..80: note = Artificially Synthesized Probe
  source 1..80: mol_type = other DNA
ggcttcagtttttaaaaattaaatttaatgaatttttctgcaggtctgtagtaggtgtatgtacctgtggggtccatgag

SEQ ID NO: 131724 - DNA, 80 bp, synthetic construct
  misc_feature 1..80: note = Artificially Synthesized Probe
  source 1..80: mol_type = other DNA
agtttatgagtctcaccagccatgtacagagtgatcagcagctgtgtggccaggggctggtgtgtgggtgacgctggccc

SEQ ID NO: 131725 - DNA, 80 bp, synthetic construct; identical to SEQ ID NO: 41804
  misc_feature 1..80: note = Artificially Synthesized Probe
  source 1..80: mol_type = other DNA

SEQ ID NO: 131726 - DNA, 80 bp, synthetic construct
  misc_feature 1..80: note = Artificially Synthesized Probe
  source 1..80: mol_type = other DNA
aagtcaggagctggagtccttcccagagacctagcagcaccagacggtgcctggcggacagacggcccttcttggtggcc

SEQ ID NO: 131727 - DNA, 80 bp, synthetic construct
  misc_feature 1..80: note = Artificially Synthesized Probe
  source 1..80: mol_type = other DNA
acctctccccatatgctgatgacaccgtcgtcctgacaatagcctgagaggcaggtcctgtgtgggttgtactctgtgga

SEQ ID NO: 131728 - DNA, 80 bp, synthetic construct
  misc_feature 1..80: note = Artificially Synthesized Probe
  source 1..80: mol_type = other DNA
ctgttcagcctcctggttgcagcttcagtgtctccaactgtaccatgagtgaatgggaccctctgatggctaagttccat

SEQ ID NO: 131729 - DNA, 80 bp, synthetic construct
  misc_feature 1..80: note = Artificially Synthesized Probe
  source 1..80: mol_type = other DNA
aggccttgcacacatttcccagaggccgtgctgggaagcccgcccagccggatcccggcgcttggaaaagcccactctgt

SEQ ID NO: 131730 - DNA, 80 bp, synthetic construct; identical to SEQ ID NO: 41805
  misc_feature 1..80: note = Artificially Synthesized Probe
  source 1..80: mol_type = other DNA

SEQ ID NO: 131731 - DNA, 80 bp, synthetic construct
  misc_feature 1..80: note = Artificially Synthesized Probe
  source 1..80: mol_type = other DNA
cagcacccaggaggaggcacaggtgataactggggagggggagcagaaagcacaggcgagctgacctctctctagctgct

SEQ ID NO: 131732 - DNA, 80 bp, synthetic construct
  misc_feature 1..80: note = Artificially Synthesized Probe
  source 1..80: mol_type = other DNA
cactgtgcccggccgtcttttatttatttatttatttttgagacagagtctagctctgtcgcccaggctagggtgctgtg

SEQ ID NO: 131733 - DNA, 80 bp, synthetic construct
  misc_feature 1..80: note = Artificially Synthesized Probe
  source 1..80: mol_type = other DNA
aatcaaaagaaagaaatgaacttttaggttgaagaaatgatggttaataatgtccccacatatgacctaaagtgatctac

SEQ ID NO: 131734 - DNA, 80 bp, synthetic construct
  misc_feature 1..80: note = Artificially Synthesized Probe
  source 1..80: mol_type = other DNA
atatactacaaagctatagtaaccaaaacagcatggtactggctaaaaacagacacatagacacatggaccacaatagag

SEQ ID NO: 131735 - DNA, 80 bp, synthetic construct; identical to SEQ ID NO: 41806
  misc_feature 1..80: note = Artificially Synthesized Probe
  source 1..80: mol_type = other DNA

SEQ ID NO: 131736 - DNA, 80 bp, synthetic construct
  misc_feature 1..80: note = Artificially Synthesized Probe
  source 1..80: mol_type = other DNA
atatgaaaaaaatgctcaacatcactgatcatcagagaaatgtaaattaaaaccacaatgagggctgggcgtggtggctt

SEQ ID NO: 131737 - DNA, 80 bp, synthetic construct
  misc_feature 1..80: note = Artificially Synthesized Probe
  source 1..80: mol_type = other DNA
gggcattgtcatgcatgcctgtaattccagctgaggtggaaggattgcttgaacccaggaggtggaggttgcagtgagtg

SEQ ID NO: 131738 - DNA, 80 bp, synthetic construct
  misc_feature 1..80: note = Artificially Synthesized Probe
  source 1..80: mol_type = other DNA
atgctggtgaggatacagggaaaagtaactcttatacactcttagtgggaatttagaatagtgcagccattatggacaac

SEQ ID NO: 131739 - DNA, 80 bp, synthetic construct; identical to SEQ ID NO: 41807
  misc_feature 1..80: note = Artificially Synthesized Probe
  source 1..80: mol_type = other DNA

SEQ ID NO: 131740 - DNA, 80 bp, synthetic construct
  misc_feature 1..80: note = Artificially Synthesized Probe
  source 1..80: mol_type = other DNA
aaagaatgcaattctgtcatttgaggaaaagtggatgagcctggggaccagggaatgggaagggtgacggggagagggga

SEQ ID NO: 131741 - DNA, 80 bp, synthetic construct
  misc_feature 1..80: note = Artificially Synthesized Probe
  source 1..80: mol_type = other DNA
tacatgtttgcggcgatggacataccagtcacctgctgtgatcgttacttgttgaaatgggatcatatacatgtattgaa

SEQ ID NO: 131742 - DNA, 80 bp, synthetic construct
  misc_feature 1..80: note = Artificially Synthesized Probe
  source 1..80: mol_type = other DNA
gtgggccctgaccccatggctggtatcctcataagaagaagagatccagagacacaggccgggaagaccatgtgccgatg

SEQ ID NO: 131743 - DNA, 80 bp, synthetic construct
  misc_feature 1..80: note = Artificially Synthesized Probe
  source 1..80: mol_type = other DNA
tggtggagacagggtttcaccatgttggcaaggctggtctcaaactcccgaccttgagtgatccgcccacctcggcctcc

SEQ ID NO: 131744 - DNA, 80 bp, synthetic construct; identical to SEQ ID NO: 41808
  misc_feature 1..80: note = Artificially Synthesized Probe
  source 1..80: mol_type = other DNA

SEQ ID NO: 131745 - DNA, 80 bp, synthetic construct
  misc_feature 1..80: note = Artificially Synthesized Probe
  source 1..80: mol_type = other DNA
gcctgggcagcatagtgagaccatctctctacaaaaaatacaaaaattagccaggtgtggtggtgtatgcctgtggtcct

SEQ ID NO: 131746 - DNA, 80 bp, synthetic construct
  misc_feature 1..80: note = Artificially Synthesized Probe
  source 1..80: mol_type = other DNA
gaaggaatctaagtgttccttcaaggtgatgaaccttgccattcctgggtgggggccttgatggcgtgatgagagtgggt

SEQ ID NO: 131747 - DNA, 80 bp, synthetic construct
  misc_feature 1..80: note = Artificially Synthesized Probe
  source 1..80: mol_type = other DNA
gcctctgttaactcaggctccccactgtagaggatgctcccagggagtcggggaggaagtgctatccgatcccaggaaat

SEQ ID NO: 131748 - DNA, 80 bp, synthetic construct; identical to SEQ ID NO: 41809
  misc_feature 1..80: note = Artificially Synthesized Probe
  source 1..80: mol_type = other DNA

SEQ ID NO: 131749 - DNA, 80 bp, synthetic construct
  misc_feature 1..80: note = Artificially Synthesized Probe
  source 1..80: mol_type = other DNA
tcttagcatcgtgctggtcctaaacagaggctcagaaggctgtccccaacctctgctgtcccggagccccttccctctgg

SEQ ID NO: 131750 - DNA, 80 bp, synthetic construct
  misc_feature 1..80: note = Artificially Synthesized Probe
  source 1..80: mol_type = other DNA
tcttagcatgggccgcctggttttccacagaagatgtctggccaatcctagagccaccaaatttccaggcagtgggctgt

SEQ ID NO: 131751 - DNA, 80 bp, synthetic construct
  misc_feature 1..80: note = Artificially Synthesized Probe
  source 1..80: mol_type = other DNA
aagctggtaggtggcccagccatgatgggaagctagggtgggaagcgctgagggagcagctctcctcctcaggtattcag

SEQ ID NO: 131752 - DNA, 80 bp, synthetic construct; identical to SEQ ID NO: 41810
  misc_feature 1..80: note = Artificially Synthesized Probe
  source 1..80: mol_type = other DNA

SEQ ID NO: 131753 - DNA, 80 bp, synthetic construct
  misc_feature 1..80: note = Artificially Synthesized Probe
  source 1..80: mol_type = other DNA
ctccctccctgctgtaaccccagagcccccatggggaacccgcagcttccatcatcctcaggggcccagtgtcccaggag

SEQ ID NO: 131754 - DNA, 80 bp, synthetic construct; identical to SEQ ID NO: 41730
  misc_feature 1..80: note = Artificially Synthesized Probe
  source 1..80: mol_type = other DNA

SEQ ID NO: 131755 - DNA, 80 bp, synthetic construct
  misc_feature 1..80: note = Artificially Synthesized Probe
  source 1..80: mol_type = other DNA
cctgtcatgtcttggggtcttttctattcccaaggttgtcgtaggaaggcgtttgctgacaaatgagacctggctccctc

SEQ ID NO: 131756 - DNA, 80 bp, synthetic construct
  misc_feature 1..80: note = Artificially Synthesized Probe
  source 1..80: mol_type = other DNA
gcctgggtggaagtcccaactccattccagcctccctgggtggcactgggtgacctggcacctccagacctccgtttact

SEQ ID NO: 131757 - DNA, 80 bp, synthetic construct; identical to SEQ ID NO: 41811
  misc_feature 1..80: note = Artificially Synthesized Probe
  source 1..80: mol_type = other DNA

SEQ ID NO: 131758 - DNA, 80 bp, synthetic construct
  misc_feature 1..80: note = Artificially Synthesized Probe
  source 1..80: mol_type = other DNA
gaaatggaagtgtgcattgtgcagctctctgcctgtgactctatcacttgccatatgcatttgagattcacccatgttgt

SEQ ID NO: 131759 - DNA, 80 bp, synthetic construct
  misc_feature 1..80: note = Artificially Synthesized Probe
  source 1..80: mol_type = other DNA
aacatttgtatccgggtctttgggtgcacatatgttttcttctgggcacatgccagaagtgggattatcactggattgta

SEQ ID NO: 131760 - DNA, 80 bp, synthetic construct; identical to SEQ ID NO: 41812
  misc_feature 1..80: note = Artificially Synthesized Probe
  source 1..80: mol_type = other DNA

SEQ ID NO: 131761 - DNA, 80 bp, synthetic construct
  misc_feature 1..80: note = Artificially Synthesized Probe
  source 1..80: mol_type = other DNA
gagttgtaagagttcttctatgttctagatgagagatatttataatgtacacaatttggaaatattgtctcgtagcctgt

SEQ ID NO: 131762 - DNA, 80 bp, synthetic construct
  misc_feature 1..80: note = Artificially Synthesized Probe
  source 1..80: mol_type = other DNA
ttttatactttgtgctttttgagtcctacctaagaattcatgcctgtctcaaagttgcagaacttctgctctgttttctt

SEQ ID NO: 131763 - DNA, 80 bp, synthetic construct
  misc_feature 1..80: note = Artificially Synthesized Probe
  source 1..80: mol_type = other DNA
cctgtcacagttgcctttgtccacctgggcagctggcttggccaagtcttctttgccacctgtgaacaacagatgtgaag

SEQ ID NO: 131764 - DNA, 80 bp, synthetic construct
  misc_feature 1..80: note = Artificially Synthesized Probe
  source 1..80: mol_type = other DNA
ttgggtaatttataaagaaaagaggtttaacttgctcaccattccacaggctgtacaggaagcatggctggggaggcctc

SEQ ID NO: 131765 - DNA, 80 bp, synthetic construct; identical to SEQ ID NO: 41813
  misc_feature 1..80: note = Artificially Synthesized Probe
  source 1..80: mol_type = other DNA

SEQ ID NO: 131766 - DNA, 80 bp, synthetic construct
  misc_feature 1..80: note = Artificially Synthesized Probe
  source 1..80: mol_type = other DNA
ctgcgctgcgcaccgtcattctctggctgcagggccagcgtgtggggctacttgctgctcacccgcccgtctatcttgca

SEQ ID NO: 131767 - DNA, 80 bp, synthetic construct
  misc_feature 1..80: note = Artificially Synthesized Probe
  source 1..80: mol_type = other DNA
tacttttagtagggatggggttttgctgtgttagccaggatggcctcgatcttctgacctcctgatctgcccacctcagc

SEQ ID NO: 131768 - DNA, 80 bp, synthetic construct
  misc_feature 1..80: note = Artificially Synthesized Probe
  source 1..80: mol_type = other DNA
cccactgcttagaaaatgcagttgctggatgagccaccactgctgtcctttccagccccgggcagctgctgcttgcctgt

SEQ ID NO: 131769 - DNA, 80 bp, synthetic construct
  misc_feature 1..80: note = Artificially Synthesized Probe
  source 1..80: mol_type = other DNA
gagtgagttatttgtctaaggtggaacagtgtgagtggcagaactgggaatcgatccctcgatgccatgtaactttccca

SEQ ID NO: 131770 - DNA, 80 bp, synthetic construct
  misc_feature 1..80: note = Artificially Synthesized Probe
  source 1..80: mol_type = other DNA
tggacagtgggtctcctccgggttgcaaatttcttgtgttttgtgtctcttccctcagtgacccaggaggctctcacgtg

SEQ ID NO: 131771 - DNA, 80 bp, synthetic construct; identical to SEQ ID NO: 41814
  misc_feature 1..80: note = Artificially Synthesized Probe
  source 1..80: mol_type = other DNA

SEQ ID NO: 131772 - DNA, 80 bp, synthetic construct
  misc_feature 1..80: note = Artificially Synthesized Probe
  source 1..80: mol_type = other DNA
caggaggagcaggcctgggcacagacttctgacctgggcacagttgggaagggtgacaaggggtcagagcaggctcttgg

SEQ ID NO: 131773 - DNA, 80 bp, synthetic construct
  misc_feature 1..80: note = Artificially Synthesized Probe
  source 1..80: mol_type = other DNA
attgggctgtgtccccacccaaatcttgccttgaattgtaatgatccccacatgtcaggagtggggccaggtggagatca

SEQ ID NO: 131774 - DNA, 80 bp, synthetic construct; identical to SEQ ID NO: 41815
  misc_feature 1..80: note = Artificially Synthesized Probe
  source 1..80: mol_type = other DNA

SEQ ID NO: 131775 - DNA, 80 bp, synthetic construct
  misc_feature 1..80: note = Artificially Synthesized Probe
  source 1..80: mol_type = other DNA
gctggtgtgggtgcaaggcccacgggggtgctgggatggagccctgagcccgccagccatcctgcccacccgcccagcac

SEQ ID NO: 131776 - DNA, 80 bp, synthetic construct; identical to SEQ ID NO: 41722
  misc_feature 1..80: note = Artificially Synthesized Probe
  source 1..80: mol_type = other DNA

SEQ ID NO: 131777 - DNA, 80 bp, synthetic construct
  misc_feature 1..80: note = Artificially Synthesized Probe
  source 1..80: mol_type = other DNA
gctctccgctctctagctgaaggcctcggccgtccagccccggatgagagcgccacaccagggcctcaccatgccccgta

SEQ ID NO: 131778 - DNA, 80 bp, synthetic construct; identical to SEQ ID NO: 41731
  misc_feature 1..80: note = Artificially Synthesized Probe
  source 1..80: mol_type = other DNA

SEQ ID NO: 131779 - DNA, 80 bp, synthetic construct
  misc_feature 1..80: note = Artificially Synthesized Probe
  source 1..80: mol_type = other DNA
agggggtgctgtctggtgggcgctggtgcctcccagaagctcaatgaggttggtcccagcagtgccgatgtgggggctgg

SEQ ID NO: 131780 - DNA, 80 bp, synthetic construct
  misc_feature 1..80: note = Artificially Synthesized Probe
  source 1..80: mol_type = other DNA
gagggcagccccgctgtgctgctgcggggcctccgtggccacctccttcctgtctccctgactcggcagcttcccgcagc

SEQ ID NO: 131781 - DNA, 80 bp, synthetic construct; identical to SEQ ID NO: 41732
  misc_feature 1..80: note = Artificially Synthesized Probe
  source 1..80: mol_type = other DNA

SEQ ID NO: 131782 - DNA, 80 bp, synthetic construct
  misc_feature 1..80: note = Artificially Synthesized Probe
  source 1..80: mol_type = other DNA
agagagatggtcacggcggccaagtctgcagttcacctctgtggccacttccctctggatgaagccctcagccatggtct

SEQ ID NO: 131783 - DNA, 80 bp, synthetic construct
  misc_feature 1..80: note = Artificially Synthesized Probe
  source 1..80: mol_type = other DNA
gtctatatctctgtttggtaccagtaccatgctgttttggttactgtagccttgtagtatagtttgaagtcaggtagcgt

SEQ ID NO: 131784 - DNA, 80 bp, synthetic construct
  misc_feature 1..80: note = Artificially Synthesized Probe
  source 1..80: mol_type = other DNA
acctatgatattaatttttcttctttaatttgctgacaccctggaaaatacaactctattctccaacacggaaccattct

SEQ ID NO: 131785 - DNA, 80 bp, synthetic construct
  misc_feature 1..80: note = Artificially Synthesized Probe
  source 1..80: mol_type = other DNA
gccaatacaaaagtttcgctgactctgtagagtgcactggggcccttttcatcttttccatggctgaaatagtttaagca

SEQ ID NO: 131786 - DNA, 80 bp, synthetic construct; identical to SEQ ID NO: 41925
  misc_feature 1..80: note = Artificially Synthesized Probe
  source 1..80: mol_type = other DNA

SEQ ID NO: 131787 - DNA, 80 bp, synthetic construct
  misc_feature 1..80: note = Artificially Synthesized Probe
  source 1..80: mol_type = other DNA
gttgtgaagcagggcttcatgttttcttcccaccaggtcttttattcatagttaattattttaacttctgcatgcattaa

SEQ ID NO: 131788 - DNA, 80 bp, synthetic construct
  misc_feature 1..80: note = Artificially Synthesized Probe
  source 1..80: mol_type = other DNA
cttctgaggaaggctttgctggtgtgcttgaattttcttaacaagtgagttaacttttcattgatttctggagacacttt

SEQ ID NO: 131789 - DNA, 80 bp, synthetic construct
  misc_feature 1..80: note = Artificially Synthesized Probe
  source 1..80: mol_type = other DNA
atttgtgctcttcaatttaattcctctatttcctcccattcttggggcctctgggcctgtatattctgaagggcgtgcac

SEQ ID NO: 131790 - DNA, 80 bp, synthetic construct; identical to SEQ ID NO: 41926
  misc_feature 1..80: note = Artificially Synthesized Probe
  source 1..80: mol_type = other DNA

SEQ ID NO: 131791 - DNA, 80 bp, synthetic construct
  misc_feature 1..80: note = Artificially Synthesized Probe
  source 1..80: mol_type = other DNA
cctcggcctcccaaattgctgggcgcccacctcagcctcccaaagtgctgggattacaggcgtgagcccccgcgcccggc

SEQ ID NO: 131792 - DNA, 80 bp, synthetic construct
  misc_feature 1..80: note = Artificially Synthesized Probe
  source 1..80: mol_type = other DNA
tgctgcttcaccacaaggccgactccctctcacctacattctttctgctgcacctcctgtgcctgggtccatcaggagct

SEQ ID NO: 131793 - DNA, 80 bp, synthetic construct
  misc_feature 1..80: note = Artificially Synthesized Probe
  source 1..80: mol_type = other DNA
aggctgcactttgccccgagaggagctttccccttattttcactggtaataataatgtcctattacgagaagaccgtgat

SEQ ID NO: 131794 - DNA, 80 bp, synthetic construct; identical to SEQ ID NO: 41927
  misc_feature 1..80: note = Artificially Synthesized Probe
  source 1..80: mol_type = other DNA

SEQ ID NO: 131795 - DNA, 80 bp, synthetic construct
  misc_feature 1..80: note = Artificially Synthesized Probe
  source 1..80: mol_type = other DNA
attttcaccatattgattcttcctacccatgagcatggaatgttcttccatttgtttgtatcctcttttatttcattgag

SEQ ID NO: 131796 - DNA, 80 bp, synthetic construct
  misc_feature 1..80: note = Artificially Synthesized Probe
  source 1..80: mol_type = other DNA
ctcctaaaccaagtccatggcactggaaaggaagaagtcagctcttccgaaagtcagaaaataaaccagaccggggattc

SEQ ID NO: 131797 - DNA, 80 bp, synthetic construct
  misc_feature 1..80: note = Artificially Synthesized Probe
  source 1..80: mol_type = other DNA
gggctggctggaccgacccctgcagcctcttccaggcaagagaccaccggtgagcaggccaggggggaggtggggggctg

SEQ ID NO: 131798 - DNA, 80 bp, synthetic construct
  misc_feature 1..80: note = Artificially Synthesized Probe
  source 1..80: mol_type = other DNA
cttacaaagggtgcacgggggccctgggtgaccttgaactcccctttgcctgcagctcccggaggaggcccggccggccg

SEQ ID NO: 131799 - DNA, 80 bp, synthetic construct; identical to SEQ ID NO: 41928
  misc_feature 1..80: note = Artificially Synthesized Probe
  source 1..80: mol_type = other DNA

SEQ ID NO: 131800 - DNA, 80 bp, synthetic construct
  misc_feature 1..80: note = Artificially Synthesized Probe
  source 1..80: mol_type = other DNA
ccgcctggccgcggcgctcaaggccctcaatgcgcactggagcgcggacgccgtgtaccaggaggcgcgcaaggtcgtgg

SEQ ID NO: 131801 - DNA, 80 bp, synthetic construct
  misc_feature 1..80: note = Artificially Synthesized Probe
  source 1..80: mol_type = other DNA
ccctgtgtgggtgcgcagtcctgctgggcgccctgcatgggcgtgtggagggtcatcgtgagctcctgtgcaggggccga

SEQ ID NO: 131802 - DNA, 80 bp, synthetic construct
  misc_feature 1..80: note = Artificially Synthesized Probe
  source 1..80: mol_type = other DNA
ctttacagatttcaactcatttaataattcccagaacaacccttggaggtgggtggaccaggggtgctggtgtttttgta

SEQ ID NO: 131803 - DNA, 80 bp, synthetic construct
  misc_feature 1..80: note = Artificially Synthesized Probe
  source 1..80: mol_type = other DNA
tttaaaatttaaaaagggaaaaaaaagcatgaagaaaattgcattaaattactttgaccacgcattgcttagggctgaaa

SEQ ID NO: 131804 - DNA, 80 bp, synthetic construct; identical to SEQ ID NO: 41929
  misc_feature 1..80: note = Artificially Synthesized Probe
  source 1..80: mol_type = other DNA

SEQ ID NO: 131805 - DNA, 80 bp, synthetic construct
  misc_feature 1..80: note = Artificially Synthesized Probe
  source 1..80: mol_type = other DNA
ggaggcactggagccttgtccgaggaggcacaggggctgtgtgtggcaccggctgcccccgggcaccatgcgcccctgcc

SEQ ID NO: 131806 - DNA, 80 bp, synthetic construct
  misc_feature 1..80: note = Artificially Synthesized Probe
  source 1..80: mol_type = other DNA
ccggcaagcacggcagacgggctcactgtcctaacacgcatccacacagcaaacacagcagacgagctcactgtcctaac

SEQ ID NO: 131807 - DNA, 80 bp, synthetic construct
  misc_feature 1..80: note = Artificially Synthesized Probe
  source 1..80: mol_type = other DNA
gagctcactgtcctaacgcacatccacacagcaaacacggcagacgagttcactgtcctaacacacacatccacacagta

SEQ ID NO: 131808 - DNA, 80 bp, synthetic construct; identical to SEQ ID NO: 41827
  misc_feature 1..80: note = Artificially Synthesized Probe
  source 1..80: mol_type = other DNA

SEQ ID NO: 131809 - DNA, 80 bp, synthetic construct
  misc_feature 1..80: note = Artificially Synthesized Probe
  source 1..80: mol_type = other DNA
caaacgggaatataaacccaggagctgctgagcggtggaatccaggtcctcgtctccatgagtctggacttccggccaca

SEQ ID NO: 131810 - DNA, 80 bp, synthetic construct; identical to SEQ ID NO: 41930
  misc_feature 1..80: note = Artificially Synthesized Probe
  source 1..80: mol_type = other DNA

SEQ ID NO: 131811 - DNA, 80 bp, synthetic construct
  misc_feature 1..80: note = Artificially Synthesized Probe
  source 1..80: mol_type = other DNA
ccatggagttctgggattatttagaggcgtgaattattaccaggcccagtcattgtagattagagacagtttaattccaa

SEQ ID NO: 131812 - DNA, 80 bp, synthetic construct
  misc_feature 1..80: note = Artificially Synthesized Probe
  source 1..80: mol_type = other DNA
gagtatagtggtgagaccttggctcactgcaaccaccacctcccaggttcaagcgattctcctgcctcagcctctcaagt

SEQ ID NO: 131813 - DNA, 80 bp, synthetic construct
  misc_feature 1..80: note = Artificially Synthesized Probe
  source 1..80: mol_type = other DNA
tgcgcccagctgccttttcttattattaatgaaataataacaacagcaaccaataggaaaagtgttcttctctgtttcat

SEQ ID NO: 131814 - DNA, 80 bp, synthetic construct; identical to SEQ ID NO: 41931
  misc_feature 1..80: note = Artificially Synthesized Probe
  source 1..80: mol_type = other DNA

SEQ ID NO: 131815 - DNA, 80 bp, synthetic construct
  misc_feature 1..80: note = Artificially Synthesized Probe
  source 1..80: mol_type = other DNA
tgaaaaacattagataatgaaaagagatgccagggcaaccttatgaaagagaaatagcatccccccctctatcacccctc

SEQ ID NO: 131816 - DNA, 80 bp, synthetic construct
  misc_feature 1..80: note = Artificially Synthesized Probe
  source 1..80: mol_type = other DNA
gagtcacagctttctcctccatctgtccacaccacctccctcctccttcatccgtccaaaccatgtttctcctgctgcat

SEQ ID NO: 131817 - DNA, 80 bp, synthetic construct
  misc_feature 1..80: note = Artificially Synthesized Probe
  source 1..80: mol_type = other DNA
tctaatttcttttgtcgaaagctgagagctatcccctccctcagccctgggccacaggacttctgctgtgggcatgtttg

SEQ ID NO: 131818 - DNA, 80 bp, synthetic construct; identical to SEQ ID NO: 41932
  misc_feature 1..80: note = Artificially Synthesized Probe
  source 1..80: mol_type = other DNA

SEQ ID NO: 131819 - DNA, 80 bp, synthetic construct
  misc_feature 1..80: note = Artificially Synthesized Probe
  source 1..80: mol_type = other DNA
gttttcaaagggaatgcttccagtttttgcccattcagtatgatattggctgtgggtttgtcataaatagctgttattat

SEQ ID NO: 131820 - DNA, 80 bp, synthetic construct
  misc_feature 1..80: note = Artificially Synthesized Probe
  source 1..80: mol_type = other DNA
acatcccaaatatctggcgtggatgttttctatgccccggccatcagatagcagacctatttctggagcacagccttgat

SEQ ID NO: 131821 - DNA, 80 bp, synthetic construct
  misc_feature 1..80: note = Artificially Synthesized Probe
  source 1..80: mol_type = other DNA
gacctttgctgtagctgagtactttttcagattggttgctcttccagagcaaaggagcagatggataaagtcatgcttcc

SEQ ID NO: 131822 - DNA, 80 bp, synthetic construct
  misc_feature 1..80: note = Artificially Synthesized Probe
  source 1..80: mol_type = other DNA
cctgccctgcagggacagccaggcccctacctcaaggctggaccaagcccaggtgcgccatgctgcagggcttcctgcgg

SEQ ID NO: 131823 - DNA, 80 bp, synthetic construct; identical to SEQ ID NO: 41933
  misc_feature 1..80: note = Artificially Synthesized Probe
  source 1..80: mol_type = other DNA

SEQ ID NO: 131824 - DNA, 80 bp, synthetic construct
  misc_feature 1..80: note = Artificially Synthesized Probe
  source 1..80: mol_type = other DNA
gtcagcacctggtggctttggcagaggctgtggggaaccaggaggctggggtgagagcagacgtggaggagcagcttgaa

SEQ ID NO: 131825 - DNA, 80 bp, synthetic construct
  misc_feature 1..80: note = Artificially Synthesized Probe
  source 1..80: mol_type = other DNA
catgcgaccaggtaaagaaataccagaagcatttccagaagaattgccatgaaaattccagagagctgtttacaaggttc

SEQ ID NO: 131826 - DNA, 80 bp, synthetic construct; identical to SEQ ID NO: 41934
  misc_feature 1..80: note = Artificially Synthesized Probe
  source 1..80: mol_type = other DNA

SEQ ID NO: 131827 - DNA, 80 bp, synthetic construct
  misc_feature 1..80: note = Artificially Synthesized Probe
  source 1..80: mol_type = other DNA
ccaatcacttaccagggatgtttcagatcagatgaggaggcagtggggaagaggagagacacactgttcagagctctggc

SEQ ID NO: 131828 - DNA, 80 bp, synthetic construct
  misc_feature 1..80: note = Artificially Synthesized Probe
  source 1..80: mol_type = other DNA
aaacttcaggcaggcaagaaggggaagaggtgtcttccttaaaatagcttgcacttgaatttgaaattgtctcagtccct

SEQ ID NO: 131829 - DNA, 80 bp, synthetic construct
  misc_feature 1..80: note = Artificially Synthesized Probe
  source 1..80: mol_type = other DNA
acgttgccacataaattgcacctgaggtggagaggctgtttgcacgatgaagtcgtgcaactgctctctgggatgctgac

SEQ ID NO: 131830 - DNA, 80 bp, synthetic construct
  misc_feature 1..80: note = Artificially Synthesized Probe
  source 1..80: mol_type = other DNA
ttgaaccagccttgcatcccagggatgaagcccatttgatcatggataagctttttgatgtgctgctggattcagtttgc

SEQ ID NO: 131831 - DNA, 80 bp, synthetic construct
  misc_feature 1..80: note = Artificially Synthesized Probe
  source 1..80: mol_type = other DNA
caagactcacggctctccctggtctccctgaagggccaaattacgtgcttaggaaatgcattctggcacatggaagaaac

SEQ ID NO: 131832 - DNA, 80 bp, synthetic construct; identical to SEQ ID NO: 41935
  misc_feature 1..80: note = Artificially Synthesized Probe
  source 1..80: mol_type = other DNA

SEQ ID NO: 131833 - DNA, 80 bp, synthetic construct
  misc_feature 1..80: note = Artificially Synthesized Probe
  source 1..80: mol_type = other DNA
ctttgatttaatcctcacaaaggctctgggaattaggtattattgttgctttgtagaaaaaggaactgctccccactgtc

SEQ ID NO: 131834 - DNA, 80 bp, synthetic construct
  misc_feature 1..80: note = Artificially Synthesized Probe
  source 1..80: mol_type = other DNA
cagcaagaaggcatttctgggaagttcagctgaggcccttattacaagacgagaagggtccagttccctggggctgtcaa

SEQ ID NO: 131835 - DNA, 80 bp, synthetic construct; identical to SEQ ID NO: 41936
  misc_feature 1..80: note = Artificially Synthesized Probe
  source 1..80: mol_type = other DNA

SEQ ID NO: 131836 - DNA, 80 bp, synthetic construct
  misc_feature 1..80: note = Artificially Synthesized Probe
  source 1..80: mol_type = other DNA
tttttttaaattatattttaagttctagggtacatgtgcacaacgtgcaggtttgttacgtagggtatacatgtgccatg

SEQ ID NO: 131837 - DNA, 80 bp, synthetic construct
  misc_feature 1..80: note = Artificially Synthesized Probe
  source 1..80: mol_type = other DNA
ggtgtttggttttctgtccttgcgatagtttgctcagaatgatggtttccagctgcatccatgtccctgaaaaggacatg

SEQ ID NO: 131838 - DNA, 80 bp, synthetic construct
  misc_feature 1..80: note = Artificially Synthesized Probe
  source 1..80: mol_type = other DNA
catgatttatagtcccttgggtatatgccaagtaattggatcgctgggtcaaatggtatttctagttctagatgcttgag

SEQ ID NO: 131839 - DNA, 80 bp, synthetic construct; identical to SEQ ID NO: 41937
  misc_feature 1..80: note = Artificially Synthesized Probe
  source 1..80: mol_type = other DNA

SEQ ID NO: 131840 - DNA, 80 bp, synthetic construct
  misc_feature 1..80: note = Artificially Synthesized Probe
  source 1..80: mol_type = other DNA
tagtggtttctattgctgtgcagaaactctttaattagatctcatttgtcaattttggcttttgttgccattgcttttgg

SEQ ID NO: 131841 - DNA, 80 bp, synthetic construct
  misc_feature 1..80: note = Artificially Synthesized Probe
  source 1..80: mol_type = other DNA
ttcagaaggaatggtaccagctcctccttgtacctctggtagaatttggctgtgaatctgtccagtcctggacttttttt

SEQ ID NO: 131842 - DNA, 80 bp, synthetic construct
  misc_feature 1..80: note = Artificially Synthesized Probe
  source 1..80: mol_type = other DNA
acttctttcttatgactcatcgcagccgtgcagaccttccgtatgggcacacttgctgatcctacacaaggtttttaata

SEQ ID NO: 131843 - DNA, 80 bp, synthetic construct
  misc_feature 1..80: note = Artificially Synthesized Probe
  source 1..80: mol_type = other DNA
atctctactaaaaatacaaaataaacaaacaaaaaacattagccgtgtgtggtggcagatgcctgtagtcagctactcag

SEQ ID NO: 131844 - DNA, 80 bp, synthetic construct
  misc_feature 1..80: note = Artificially Synthesized Probe
  source 1..80: mol_type = other DNA
tcagcaccatcatctttagaatgttaatgatgggttacctttggaagttaattatttggaagaaaatgatcctattcccc

SEQ ID NO: 131845 - DNA, 80 bp, synthetic construct; identical to SEQ ID NO: 41938
  misc_feature 1..80: note = Artificially Synthesized Probe
  source 1..80: mol_type = other DNA

SEQ ID NO: 131846 - DNA, 80 bp, synthetic construct
  misc_feature 1..80: note = Artificially Synthesized Probe
  source 1..80: mol_type = other DNA
acgatgcatgtcgtgatttctaagtcttccttttgggcatcctaaggccaaaccgatcctttaaagactctggtggcatg

SEQ ID NO: 131847 - DNA, 80 bp, synthetic construct
  misc_feature 1..80: note = Artificially Synthesized Probe
  source 1..80: mol_type = other DNA
tcagctaagctgagtcttcctttcactgttctggatgttagaattcagcaaacgcttcttttttttgtaatctttctgtt

SEQ ID NO: 131848 - DNA, 80 bp, synthetic construct
  misc_feature 1..80: note = Artificially Synthesized Probe
  source 1..80: mol_type = other DNA
aacaagggcagtgtcctgaggacattcaggaaactctggaatcacacaagctgaattcatgaacttacacgaaggtttgc

SEQ ID NO: 131849 - DNA, 80 bp, synthetic construct; identical to SEQ ID NO: 41939
  misc_feature 1..80: note = Artificially Synthesized Probe
  source 1..80: mol_type = other DNA

SEQ ID NO: 131850 - DNA, 80 bp, synthetic construct
  misc_feature 1..80: note = Artificially Synthesized Probe
  source 1..80: mol_type = other DNA
cccactaatacgaggccttcttgcaagaccagccaaactgcaggtgcaggatcagctgatgaacgaggagctgacggaaa

SEQ ID NO: 131851 - DNA, 80 bp, synthetic construct
  misc_feature 1..80: note = Artificially Synthesized Probe
  source 1..80: mol_type = other DNA
tgatttagaggaaaacaatcacaaatctgaggccttctaagcaacggctcttaaagggctccagttcattcagctaaagt

SEQ ID NO: 131852 - DNA, 80 bp, synthetic construct
  misc_feature 1..80: note = Artificially Synthesized Probe
  source 1..80: mol_type = other DNA
gaagctcctgggatggctagagtgcccccctccccttctcctccccaccacaaggtcccagagcctgcaaagatcattcc

SEQ ID NO: 131853 - DNA, 80 bp, synthetic construct; identical to SEQ ID NO: 41828
  misc_feature 1..80: note = Artificially Synthesized Probe
  source 1..80: mol_type = other DNA

SEQ ID NO: 131854 - DNA, 80 bp, synthetic construct; identical to SEQ ID NO: 41940
  misc_feature 1..80: note = Artificially Synthesized Probe
  source 1..80: mol_type = other DNA

SEQ ID NO: 131855 - DNA, 80 bp, synthetic construct
  misc_feature 1..80: note = Artificially Synthesized Probe
  source 1..80: mol_type = other DNA
tctgtcccctggcccttcccccatccctgtcttcctcaccagtggcatctggaagggctgggatcagcagccacacaggc

SEQ ID NO: 131856 - DNA, 80 bp, synthetic construct
  misc_feature 1..80: note = Artificially Synthesized Probe
  source 1..80: mol_type = other DNA
cccggcacatacccagcacacacccgcacatgcccggcacatgcccagcacatacctgcacatgcctgcacacacctaca

SEQ ID NO: 131857 - DNA, 80 bp, synthetic construct
  misc_feature 1..80: note = Artificially Synthesized Probe
  source 1..80: mol_type = other DNA
catgcccagcacacacccacacatgcccagcacacacccacacatgcccagcacacaccttgcctctggctgggaccccc

SEQ ID NO: 131858 - DNA, 80 bp, synthetic construct
  misc_feature 1..80: note = Artificially Synthesized Probe
  source 1..80: mol_type = other DNA
ggcaaaaacccatgttcccactggcctgtgggtccccccatagatcgtaagcccaggaggaagggctgtgtttcagggct

SEQ ID NO: 131859 - DNA, 80 bp, synthetic construct; identical to SEQ ID NO: 41941
  misc_feature 1..80: note = Artificially Synthesized Probe
  source 1..80: mol_type = other DNA

SEQ ID NO: 131860 - DNA, 80 bp, synthetic construct
  misc_feature 1..80: note = Artificially Synthesized Probe
  source 1..80: mol_type = other DNA
cgacacagcagtgtaagagccgccacgagggtcccacacagggggagtcgcgacacagcagtgtaagagccgccacgagg

SEQ ID NO: 131861 - DNA, 80 bp, synthetic construct
  misc_feature 1..80: note = Artificially Synthesized Probe
  source 1..80: mol_type = other DNA
gggggagtcacgacacagcagtgtaagagctgccacgtgggtcccacacagggggagtcacgacacagcagtgtaagagc

SEQ ID NO: 131862 - DNA, 80 bp, synthetic construct
  misc_feature 1..80: note = Artificially Synthesized Probe
  source 1..80: mol_type = other DNA
gtcccacacagggggagtcacgacacagcagtgtaagagctgccacacatgggtccctgcggcctgcagttcgaagccca

SEQ ID NO: 131863 - DNA, 80 bp, synthetic construct; identical to SEQ ID NO: 41942
  misc_feature 1..80: note = Artificially Synthesized Probe
  source 1..80: mol_type = other DNA

SEQ ID NO: 131864 - DNA, 80 bp, synthetic construct
  misc_feature 1..80: note = Artificially Synthesized Probe
  source 1..80: mol_type = other DNA
gctagcttttgaatgtgtttgctcttgcttctctagttcttttaattgtgatgttagggtgtcaattttagatctttcct

SEQ ID NO: 131865 - DNA, 80 bp, synthetic construct
  misc_feature 1..80: note = Artificially Synthesized Probe
  source 1..80: mol_type = other DNA
cacgagttcaggagttcaagaccagcctggccagatggtgaaaccctgtctctactaaaaatataaaaaatcagctgggc

SEQ ID NO: 131866 - DNA, 80 bp, synthetic construct
  misc_feature 1..80: note = Artificially Synthesized Probe
  source 1..80: mol_type = other DNA
tttttttgcattcccgtttctgcagtgtctcccacaggcagggacatctaaagtgatgttctttcttcccagctctgcgg

SEQ ID NO: 131867 - DNA, 80 bp, synthetic construct
  misc_feature 1..80: note = Artificially Synthesized Probe
  source 1..80: mol_type = other DNA
ttaagatttccatctctcacaggtattagaaatgttttaattattttggactacttaaaacagtttgacaatggtctaaa

SEQ ID NO: 131868 - DNA, 80 bp, synthetic construct; identical to SEQ ID NO: 41943
  misc_feature 1..80: note = Artificially Synthesized Probe
  source 1..80: mol_type = other DNA

SEQ ID NO: 131869 - DNA, 80 bp, synthetic construct
  misc_feature 1..80: note = Artificially Synthesized Probe
  source 1..80: mol_type = other DNA
gcggcagagcccactgtggacagcaggagtcaggctgaggcagcgcagcttctcacgggggctcgggggaacccttgcca

SEQ ID NO: 131870 - DNA, 80 bp, synthetic construct
  misc_feature 1..80: note = Artificially Synthesized Probe
  source 1..80: mol_type = other DNA
ttttttgttttttgtttttttgagacgaagtctcactcttgtcacccaggctggagagcaatggggtgatctcggctcac

SEQ ID NO: 131871 - DNA, 80 bp, synthetic construct
  misc_feature 1..80: note = Artificially Synthesized Probe
  source 1..80: mol_type = other DNA
gcaatccgcccgcctcggcctccaaaagtgctgggattacaggcatgagccaccgcacctggcctctagaagcgcagatt

SEQ ID NO: 131872 - DNA, 80 bp, synthetic construct; identical to SEQ ID NO: 41944
  misc_feature 1..80: note = Artificially Synthesized Probe
  source 1..80: mol_type = other DNA

SEQ ID NO: 131873 - DNA, 80 bp, synthetic construct
  misc_feature 1..80: note = Artificially Synthesized Probe
  source 1..80: mol_type = other DNA
gaacccgtgggagtgagggtcgcccatccttgaggagggagcacttctggaggaggtgacagctgaaccaagaggagtgg

SEQ ID NO: 131874 - DNA, 80 bp, synthetic construct
  misc_feature 1..80: note = Artificially Synthesized Probe
  source 1..80: mol_type = other DNA
attcaccagggctcccaggaagaaaagatctccagtcttcaatatggagatgagtggccagacagataaagatatttgtg

SEQ ID NO: 131875 - DNA, 80 bp, synthetic construct
  misc_feature 1..80: note = Artificially Synthesized Probe
  source 1..80: mol_type = other DNA
caggttgttcagtttccattagttgagtggttttgagtgagtttcttaatcctgagttctagtttgatttcactatggtc

SEQ ID NO: 131876 - DNA, 80 bp, synthetic construct; identical to SEQ ID NO: 41945
  misc_feature 1..80: note = Artificially Synthesized Probe
  source 1..80: mol_type = other DNA

SEQ ID NO: 131877 - DNA, 80 bp, synthetic construct
  misc_feature 1..80: note = Artificially Synthesized Probe
  source 1..80: mol_type = other DNA
gcctggcaaactgctgggcagtgtcacagggtgggacaggactctgcccggcatccgagctggaatatcctagcctggca

SEQ ID NO: 131878 - DNA, 80 bp, synthetic construct
  misc_feature 1..80: note = Artificially Synthesized Probe
  source 1..80: mol_type = other DNA
aacaaaagttcagttctgtgagagaaaccctgcagcctctcccctgtgcaggttacaatgagtggagggagttctgcggc

SEQ ID NO: 131879 - DNA, 80 bp, synthetic construct
  misc_feature 1..80: note = Artificially Synthesized Probe
  source 1..80: mol_type = other DNA
ttgcctgtctcattgggaagcagatgaaggctctgcgggacggtgactggtacgttcctatccagagcgtcttccttcac

SEQ ID NO: 131880 - DNA, 80 bp, synthetic construct; identical to SEQ ID NO: 41946
  misc_feature 1..80: note = Artificially Synthesized Probe
  source 1..80: mol_type = other DNA

SEQ ID NO: 131881 - DNA, 80 bp, synthetic construct
  misc_feature 1..80: note = Artificially Synthesized Probe
  source 1..80: mol_type = other DNA
gcccggtgctcatggatgcctctaggctggacaggacttcccggccccccagaccccacctacagatagcagatggttgc

SEQ ID NO: 131882 - DNA, 80 bp, synthetic construct
  misc_feature 1..80: note = Artificially Synthesized Probe
  source 1..80: mol_type = other DNA
ggataccagtgttaggattttggaacaacacagacaaaagcaataggaaaatgttttcttttgcttttaaatacatccct

SEQ ID NO: 131883 - DNA, 80 bp, synthetic construct
  misc_feature 1..80: note = Artificially Synthesized Probe
  source 1..80: mol_type = other DNA
ttcaaagagctacgaacacctgggtagaaatcaccaggagaacttgtctcccttatagctgtgtcttcagcaaacgtgcg

SEQ ID NO: 131884 - DNA, 80 bp, synthetic construct
  misc_feature 1..80: note = Artificially Synthesized Probe
  source 1..80: mol_type = other DNA
gcccccaatttctcatcctatgtatttatgaccacatatctccccaatgcaaaaatgggatcaattaacttacgtatagt

SEQ ID NO: 131885 - DNA, 80 bp, synthetic construct; identical to SEQ ID NO: 41947
  misc_feature 1..80: note = Artificially Synthesized Probe
  source 1..80: mol_type = other DNA

SEQ ID NO: 131886 - DNA, 80 bp, synthetic construct
  misc_feature 1..80: note = Artificially Synthesized Probe
  source 1..80: mol_type = other DNA
atacaccccagataacagcaatgcagcaaaatagatgctcatagtcaacaagcaaagtggctctgagcccctcttctgag

SEQ ID NO: 131887 - DNA, 80 bp, synthetic construct
  misc_feature 1..80: note = Artificially Synthesized Probe
  source 1..80: mol_type = other DNA
cacttggtgcagagctcagttcaattcctgcatatccttgttaactttctgtctcattgatctgtctaatgttgacagtg

SEQ ID NO: 131888 - DNA, 80 bp, synthetic construct
  misc_feature 1..80: note = Artificially Synthesized Probe
  source 1..80: mol_type = other DNA
tgctgggggtctgggcagacgccacagggtctccttcaggtcctcagcgcctgcacctgtgtggccccgggtgctggggg

SEQ ID NO: 131889 - DNA, 80 bp, synthetic construct
  misc_feature 1..80: note = Artificially Synthesized Probe
  source 1..80: mol_type = other DNA
gcgtgagctggagaagcactccctgtctcgggtcatctgtgacaacactggcctcaccagggtgcccatggatgccttcc

SEQ ID NO: 131890 - DNA, 80 bp, synthetic construct; identical to SEQ ID NO: 41948
  misc_feature 1..80: note = Artificially Synthesized Probe
  source 1..80: mol_type = other DNA

SEQ ID NO: 131891 - DNA, 80 bp, synthetic construct
  misc_feature 1..80: note = Artificially Synthesized Probe
  source 1..80: mol_type = other DNA
caagcgcacccgtgacagggacgttggtgtgtggttttcttttctcgtagtttgactacatgtcaacctgtccacatttc

SEQ ID NO: 131892 - DNA, 80 bp, synthetic construct
  misc_feature 1..80: note = Artificially Synthesized Probe
  source 1..80: mol_type = other DNA
ctcccctctgcaaaggtcagtcctttcttcaatgacaattacaaaacatctgaatgtttccgatataagttaacaatgca

SEQ ID NO: 131893 - DNA, 80 bp, synthetic construct
  misc_feature 1..80: note = Artificially Synthesized Probe
  source 1..80: mol_type = other DNA
accaatggggtcaccggtgagggaagagagaggggagtccgtgagttccaggcaaagttgtggtgaactcgcaggggcgc

SEQ ID NO: 131894 - DNA, 80 bp, synthetic construct; identical to SEQ ID NO: 41949
  misc_feature 1..80: note = Artificially Synthesized Probe
  source 1..80: mol_type = other DNA

SEQ ID NO: 131895 - DNA, 80 bp, synthetic construct
  misc_feature 1..80: note = Artificially Synthesized Probe
  source 1..80: mol_type = other DNA
ctgaggcagagccctctgggtgcgactcctgaggctggggcttcctgtcagagcagcttgcgtcctccaactacttcaga

SEQ ID NO: 131896 - DNA, 80 bp, synthetic construct
  misc_feature 1..80: note = Artificially Synthesized Probe
  source 1..80: mol_type = other DNA
attttaggagaggaaagttggcatcagactcacagtctcctgtgagctacgtgctatgagctgcacttacctagaccgca

SEQ ID NO: 131897 - DNA, 80 bp, synthetic construct
  misc_feature 1..80: note = Artificially Synthesized Probe
  source 1..80: mol_type = other DNA
ttcaagaccagcctgagaaaaatagtgaaaccccatctaccaaaaaaaaaaaaaaaaaaaaagtggctgggagggggatg

SEQ ID NO: 131898 - DNA, 80 bp, synthetic construct; identical to SEQ ID NO: 41829
  misc_feature 1..80: note = Artificially Synthesized Probe
  source 1..80: mol_type = other DNA

SEQ ID NO: 131899 - DNA, 80 bp, synthetic construct; identical to SEQ ID NO: 41950
  misc_feature 1..80: note = Artificially Synthesized Probe
  source 1..80: mol_type = other DNA

SEQ ID NO: 131900 - DNA, 80 bp, synthetic construct
  misc_feature 1..80: note = Artificially Synthesized Probe
  source 1..80: mol_type = other DNA
tagaagaggagagaagggatgaggagaggaagaaacaaagctggcctggggaacggtgcctcggaaataactttcaaact

SEQ ID NO: 131901 - DNA, 80 bp, synthetic construct
  misc_feature 1..80: note = Artificially Synthesized Probe
  source 1..80: mol_type = other DNA
ttttgggattggtcatgaatgacagtgtacaaggagatcacccagagattacagtgccccagagaacagcagaccaggat

SEQ ID NO: 131902 - DNA, 80 bp, synthetic construct
  misc_feature 1..80: note = Artificially Synthesized Probe
  source 1..80: mol_type = other DNA
cgcaaggttttcctgttcccttggcttagagactgcacaaacttgaaacggccacttcactcacgattcctggttttccg

SEQ ID NO: 131903 - DNA, 80 bp, synthetic construct; identical to SEQ ID NO: 41951
  misc_feature 1..80: note = Artificially Synthesized Probe
  source 1..80: mol_type = other DNA

SEQ ID NO: 131904 - DNA, 80 bp, synthetic construct
  misc_feature 1..80: note = Artificially Synthesized Probe
  source 1..80: mol_type = other DNA
agcctcctgtagaccatcctatgccatcaaaatcactcttctgttcttgaaattttttcatttatcttccttgattttta

SEQ ID NO: 131905 - DNA, 80 bp, synthetic construct
  misc_feature 1..80: note = Artificially Synthesized Probe
  source 1..80: mol_type = other DNA
gtccaacaattaacagctgtctgaagttaagatccattgtaagaaggactatttctgaaccagtctgggtgctccccagg

SEQ ID NO: 131906 - DNA, 80 bp, synthetic construct
  misc_feature 1..80: note = Artificially Synthesized Probe
  source 1..80: mol_type = other DNA
tattacacctgtggtgtctggggcaccacaatccctgcgtcagaatccacactcttcacaagaccccatgagactgtgta

SEQ ID NO: 131907 - DNA, 80 bp, synthetic construct; identical to SEQ ID NO: 41952
  misc_feature 1..80: note = Artificially Synthesized Probe
  source 1..80: mol_type = other DNA

SEQ ID NO: 131908 - DNA, 80 bp, synthetic construct
  misc_feature 1..80: note = Artificially Synthesized Probe
  source 1..80: mol_type = other DNA
tacattgggaatctgttcgggttttttttaaagcagtgggccacaggcacacacatcactttgatgagtgtcctcccgaa

SEQ ID NO: 131909 - DNA, 80 bp, synthetic construct
  misc_feature 1..80: note = Artificially Synthesized Probe
  source 1..80: mol_type = other DNA
atgacaaaactccaaaatctggtacaaatgcgtgtgcacagatatttttactacagctgttccctgcactagaagtttca

SEQ ID NO: 131910 - DNA, 80 bp, synthetic construct
  misc_feature 1..80: note = Artificially Synthesized Probe
  source 1..80: mol_type = other DNA
atttaaggttaattttgttatgtgtgaatttgatcctgtcattatgatgttagctggttattttgctcattagttgatgc

SEQ ID NO: 131911 - DNA, 80 bp, synthetic construct; identical to SEQ ID NO: 41953
  misc_feature 1..80: note = Artificially Synthesized Probe
  source 1..80: mol_type = other DNA

SEQ ID NO: 131912 - DNA, 80 bp, synthetic construct
  misc_feature 1..80: note = Artificially Synthesized Probe
  source 1..80: mol_type = other DNA
cccgtctctactaaaaatacaaagaagaaaaattagccgggcatggtggtaggcgcctgtaatcccagctacccaggagg

SEQ ID NO: 131913 - DNA, 80 bp, synthetic construct
  misc_feature 1..80: note = Artificially Synthesized Probe
  source 1..80: mol_type = other DNA
gctgcaaatttcaaatagataaaaagctgtgagtcagtggctttttccatgagttattgtcaggaggttatgcagtaaac

SEQ ID NO: 131914 - DNA, 80 bp, synthetic construct
  misc_feature 1..80: note = Artificially Synthesized Probe
  source 1..80: mol_type = other DNA
gttcgcaaccagtactaatttacttagagaaatggaaacatctgtgcactcactgcatgtggagactggacaccacagcc

SEQ ID NO: 131915 - DNA, 80 bp, synthetic construct
  misc_feature 1..80: note = Artificially Synthesized Probe
  source 1..80: mol_type = other DNA
gctgctcttcagacaaggccgatttgtccccctccttcctgtccatcctgggaaggagacctacacagcgctggcccctg

SEQ ID NO: 131916 - DNA, 80 bp, synthetic construct; identical to SEQ ID NO: 41954
  misc_feature 1..80: note = Artificially Synthesized Probe
  source 1..80: mol_type = other DNA

SEQ ID NO: 131917 - DNA, 80 bp, synthetic construct
  misc_feature 1..80: note = Artificially Synthesized Probe
  source 1..80: mol_type = other DNA
tgcatttctgttgcttggagccatccactttgtgatgatttttcccagcagccacagggaactcataaggatgagtctga

SEQ ID NO: 131918 - DNA, 80 bp, synthetic construct
  misc_feature 1..80: note = Artificially Synthesized Probe
  source 1..80: mol_type = other DNA
gggatggagagaaaatgggcttgtagcgttcatgggtgatgactttgatttttcacacgatcatgatggaaacactccct

SEQ ID NO: 131919 - DNA, 80 bp, synthetic construct; identical to SEQ ID NO: 41817
  misc_feature 1..80: note = Artificially Synthesized Probe
  source 1..80: mol_type = other DNA

SEQ ID NO: 131920 - DNA, 80 bp, synthetic construct; identical to SEQ ID NO: 41955
  misc_feature 1..80: note = Artificially Synthesized Probe
  source 1..80: mol_type = other DNA

SEQ ID NO: 131921 - DNA, 80 bp, synthetic construct
  misc_feature 1..80: note = Artificially Synthesized Probe
  source 1..80: mol_type = other DNA
agctcatttttgtatttttagtggagatgggatttcaccatgttggccaggctgggctcaaactcctgacctcaggtgat

SEQ ID NO: 131922 - DNA, 80 bp, synthetic construct
  misc_feature 1..80: note = Artificially Synthesized Probe
  source 1..80: mol_type = other DNA
ataagcatcgtctttgattccacgcccatttttcacagctgacataatgatacccattctgtaactgagaaaaccagcat

SEQ ID NO: 131923 - DNA, 80 bp, synthetic construct
  misc_feature 1..80: note = Artificially Synthesized Probe
  source 1..80: mol_type = other DNA
tatttctctttcacttacaaagcttagtttggctggatctgaaattctgggttgaaaattcttttctttaagtatgttga

SEQ ID NO: 131924 - DNA, 80 bp, synthetic construct
  misc_feature 1..80: note = Artificially Synthesized Probe
  source 1..80: mol_type = other DNA
actgggtcgcctgagcactgcccaggttcgcacattctcatcgtcctggggtggccgagtcggggaccaagaccctgtgg

SEQ ID NO: 131925 - DNA, 80 bp, synthetic construct
  misc_feature 1..80: note = Artificially Synthesized Probe
  source 1..80: mol_type = other DNA
ggttgctgcctccagcctggccctcggcggaggctgcacccaggccagctctgttccctccagacagagcagctcctgga

SEQ ID NO: 131926 - DNA, 80 bp, synthetic construct; identical to SEQ ID NO: 41956
  misc_feature 1..80: note = Artificially Synthesized Probe
  source 1..80: mol_type = other DNA

SEQ ID NO: 131927 - DNA, 80 bp, synthetic construct
  misc_feature 1..80: note = Artificially Synthesized Probe
  source 1..80: mol_type = other DNA
gcacttggccaaattccacattcccaggcagaccctgatttcctccaggaagtctcctgtgactcgggcctgagtgagcc

SEQ ID NO: 131928 - DNA, 80 bp, synthetic construct
  misc_feature 1..80: note = Artificially Synthesized Probe
  source 1..80: mol_type = other DNA
cccagaacgggggtcgctcgcgggagatgggggtgcagccgcttcctctcacgtgtgtggccttgtgtgtctggcagatg

SEQ ID NO: 131929 - DNA, 80 bp, synthetic construct; identical to SEQ ID NO: 41957
  misc_feature 1..80: note = Artificially Synthesized Probe
  source 1..80: mol_type = other DNA

SEQ ID NO: 131930 - DNA, 80 bp, synthetic construct
  misc_feature 1..80: note = Artificially Synthesized Probe
  source 1..80: mol_type = other DNA
tatacccagcctagatcacaccccagacaaaaaacctatgaaacaggcaggattcattacagacccatccatcacctctc

SEQ ID NO: 131931 - DNA, 80 bp, synthetic construct
  misc_feature 1..80: note = Artificially Synthesized Probe
  source 1..80: mol_type = other DNA
ctctgcactcagctcagggacagcgtcttcctcaccgctgcctccaagccaggtgccagctacgcccaaacttttgacga

SEQ ID NO: 131932 - DNA, 80 bp, synthetic construct
  misc_feature 1..80: note = Artificially Synthesized Probe
  source 1..80: mol_type = other DNA
cttatagaaaaataattatttaccagactcaagttacagacagacttcctttgagctactgtcataggggagagaggtct

SEQ ID NO: 131933 - DNA, 80 bp, synthetic construct; identical to SEQ ID NO: 41958
  misc_feature 1..80: note = Artificially Synthesized Probe
  source 1..80: mol_type = other DNA

SEQ ID NO: 131934 - DNA, 80 bp, synthetic construct
  misc_feature 1..80: note = Artificially Synthesized Probe
  source 1..80: mol_type = other DNA
tggagttgctcttctcgaggagtatctttgtggtattctctgtatttcctaatttgaatgttggcctgccttgctaggtt

SEQ ID NO: 131935 - DNA, 80 bp, synthetic construct
  misc_feature 1..80: note = Artificially Synthesized Probe
  source 1..80: mol_type = other DNA
cactctcctgagtcaggcacaccccaccagcttgtgtcaggcacacacccccacccccgtgtcaggcacaccccaccagc

SEQ ID NO: 131936 - DNA, 80 bp, synthetic construct
  misc_feature 1..80: note = Artificially Synthesized Probe
  source 1..80: mol_type = other DNA
cagcccccaacccccatgtcaggcacacccccactccttttgttgttgttgttgtttgtttttatttcttctaaaaaaaa

SEQ ID NO: 131937 - DNA, 80 bp, synthetic construct
  misc_feature 1..80: note = Artificially Synthesized Probe
  source 1..80: mol_type = other DNA
aggaaccatttgtttacttaggggttgcggagaaattcttgtggctttctttttggcagtttttttttttttagttttat

SEQ ID NO: 131938 - DNA, 80 bp, synthetic construct; identical to SEQ ID NO: 41959
  misc_feature 1..80: note = Artificially Synthesized Probe
  source 1..80: mol_type = other DNA

SEQ ID NO: 131939 - DNA, 80 bp, synthetic construct
  misc_feature 1..80: note = Artificially Synthesized Probe
  source 1..80: mol_type = other DNA
gcatagtattctatggtatatatgtgccacattttcttaatccagtctatcattgttggacatttgggttggttccaagt

SEQ ID NO: 131940 - DNA, 80 bp, synthetic construct
  misc_feature 1..80: note = Artificially Synthesized Probe
  source 1..80: mol_type = other DNA
aatggttgaactagtttacagtcccaccaacagtgtaaaagtgttcctatttcttcacatcctctccagcacctgttgtt

SEQ ID NO: 131941 - DNA, 80 bp, synthetic construct
  misc_feature 1..80: note = Artificially Synthesized Probe
  source 1..80: mol_type = other DNA
acccgctttttgatggggttgtttgtttttttcttgtaaatttgtttgagttcattgtagattctggatattagcccttt

SEQ ID NO: 131942 - DNA, 80 bp, synthetic construct
  misc_feature 1..80: note = Artificially Synthesized Probe
  source 1..80: mol_type = other DNA
tccttgcccatgcctatgtcctgaatggtattgcctaggttttcttctagggtttttatggttttaggtctaacatgtaa

SEQ ID NO: 131943 - DNA, 80 bp, synthetic construct; identical to SEQ ID NO: 41960
  misc_feature 1..80: note = Artificially Synthesized Probe
  source 1..80: mol_type = other DNA

SEQ ID NO: 131944 - DNA, 80 bp, synthetic construct
  misc_feature 1..80: note = Artificially Synthesized Probe
  source 1..80: mol_type = other DNA
gtagcttgatggggatggcattgaatctataaattaccttgggcagtatggtcattttcaccatattgattcttcctacc

SEQ ID NO: 131945 - DNA, 80 bp, synthetic construct
  misc_feature 1..80: note = Artificially Synthesized Probe
  source 1..80: mol_type = other DNA
tttggctctctgtttgtctgttattggtgtataagaatgcttgtgatttttgtacattgattttgtatcctgagactttg

SEQ ID NO: 131946 - DNA, 80 bp, synthetic construct
  misc_feature 1..80: note = Artificially Synthesized Probe
  source 1..80: mol_type = other DNA
aacttctcttctcacttcacttcattcatttgatcttcaatcactgataccctttcttccagttgatcgaattggctact

SEQ ID NO: 131947 - DNA, 80 bp, synthetic construct
  misc_feature 1..80: note = Artificially Synthesized Probe
  source 1..80: mol_type = other DNA
ccaacactatgttgaataggagtggtgagagaaggcatccctgttttgtgccagttttcaaagggaatgcttccagtttt

SEQ ID NO: 131948 - DNA, 80 bp, synthetic construct; identical to SEQ ID NO: 41961
  misc_feature 1..80: note = Artificially Synthesized Probe
  source 1..80: mol_type = other DNA

SEQ ID NO: 131949 - DNA, 80 bp, synthetic construct
  misc_feature 1..80: note = Artificially Synthesized Probe
  source 1..80: mol_type = other DNA
tggcctcataaaatgagttagggaggattcccgctttttgtattgattggaatagtttcagaaggaatggtaccagctcc

SEQ ID NO: 131950 - DNA, 80 bp, synthetic construct
  misc_feature 1..80: note = Artificially Synthesized Probe
  source 1..80: mol_type = other DNA
ggaatttatccatttcttctagattttctagtttatttgcgtagaggtgtttatagtattctctgatggtagtttgtatt

SEQ ID NO: 131951 - DNA, 80 bp, synthetic construct; identical to SEQ ID NO: 41962
  misc_feature 1..80: note = Artificially Synthesized Probe
  source 1..80: mol_type = other DNA

SEQ ID NO: 131952 - DNA, 80 bp, synthetic construct
  misc_feature 1..80: note = Artificially Synthesized Probe
  source 1..80: mol_type = other DNA
acatctttatttctgccttcattttgttatgtatccagtagtcattcaggagcaggttgttcagtttccatgtagttgag

SEQ ID NO: 131953 - DNA, 80 bp, synthetic construct
  misc_feature 1..80: note = Artificially Synthesized Probe
  source 1..80: mol_type = other DNA
cttgtatcgggcacaggataccctcttctttcagggacagcacagcctcttgtttcagggacaccacaccctcttgtttc

SEQ ID NO: 131954 - DNA, 80 bp, synthetic construct
  misc_feature 1..80: note = Artificially Synthesized Probe
  source 1..80: mol_type = other DNA
cttgtttcaggcacaggataccctcctgtgtcaggcacaccccaccctcttctttcaggcacaccccaccctcttgttta

SEQ ID NO: 131955 - DNA, 80 bp, synthetic construct
  misc_feature 1..80: note = Artificially Synthesized Probe
  source 1..80: mol_type = other DNA
tgtttcaggcacacacaccctcttgcttcaggcacaccccactctcttgtttctgggaaaccacaccctcttgtttcagg

SEQ ID NO: 131956 - DNA, 80 bp, synthetic construct; identical to SEQ ID NO: 41963
  misc_feature 1..80: note = Artificially Synthesized Probe
  source 1..80: mol_type = other DNA

SEQ ID NO: 131957 - DNA, 80 bp, synthetic construct; identical to SEQ ID NO: 41830
  misc_feature 1..80: note = Artificially Synthesized Probe
  source 1..80: mol_type = other DNA

SEQ ID NO: 131958 - DNA, 80 bp, synthetic construct
  misc_feature 1..80: note = Artificially Synthesized Probe
  source 1..80: mol_type = other DNA
caggtgaaggcagtggggcatttacgtcaagactgcagttttgctggactacagcccagaagcacttgctgtatttttga

SEQ ID NO: 131959 - DNA, 80 bp, synthetic construct
  misc_feature 1..80: note = Artificially Synthesized Probe
  source 1..80: mol_type = other DNA
ctgggagagcacccagagatgaattcgtgcctaagagggctcacccactacgtctcttcctcctcccggagagcacccaa

SEQ ID NO: 131960 - DNA, 80 bp, synthetic construct
  misc_feature 1..80: note = Artificially Synthesized Probe
  source 1..80: mol_type = other DNA
tctcctgtctccgtggtgatttacagacttagatttagatacagatattgattatggatagagacagtttagatataggc

SEQ ID NO: 131961 - DNA, 80 bp, synthetic construct; identical to SEQ ID NO: 41964
  misc_feature 1..80: note = Artificially Synthesized Probe
  source 1..80: mol_type = other DNA

SEQ ID NO: 131962 - DNA, 80 bp, synthetic construct
  misc_feature 1..80: note = Artificially Synthesized Probe
  source 1..80: mol_type = other DNA
gggggtgccacagcgcagccctgcagactgggggtgccacagcgcagccctgcagactgggggtgccacagcgcagccct

SEQ ID NO: 131963 - DNA, 80 bp, synthetic construct
  misc_feature 1..80: note = Artificially Synthesized Probe
  source 1..80: mol_type = other DNA
cacagcgcagccctgcagactgggcacttgaacaagagatttctctctcagcaagtcctggaggctggagtccaagatca

SEQ ID NO: 131964 - DNA, 80 bp, synthetic construct
  misc_feature 1..80: note = Artificially Synthesized Probe
  source 1..80: mol_type = other DNA
aaggacatagctgccttgggccacggcccacagtgacatccccatgccactgcaattacctcctcaaatgctccatcccc

SEQ ID NO: 131965 - DNA, 80 bp, synthetic construct; identical to SEQ ID NO: 41965
  misc_feature 1..80: note = Artificially Synthesized Probe
  source 1..80: mol_type = other DNA

SEQ ID NO: 131966 - DNA, 80 bp, synthetic construct
  misc_feature 1..80: note = Artificially Synthesized Probe
  source 1..80: mol_type = other DNA
agcctcccgagtagctgggactacaggcgcccgccaccacgcccggctaatttttgtttttgtatttttagtagagacgg

SEQ ID NO: 131967 - DNA, 80 bp, synthetic construct
  misc_feature 1..80: note = Artificially Synthesized Probe
  source 1..80: mol_type = other DNA
atcctgcccccgccaagggcgtccgagagagcccctgagcccggcccggaccagcgcccgtgctcagggcagctgtgcgc

SEQ ID NO: 131968 - DNA, 80 bp, synthetic construct
  misc_feature 1..80: note = Artificially Synthesized Probe
  source 1..80: mol_type = other DNA
ttagttttccctctaacagacaggaccctcagctgcaggtctgttggagtttgctggaggtcccctccagaccctgtttg

SEQ ID NO: 131969 - DNA, 80 bp, synthetic construct
  misc_feature 1..80: note = Artificially Synthesized Probe
  source 1..80: mol_type = other DNA
ctgcctccgaggagcttcctctccgacagctgccgtgtacctccctgacctccctggctgtgactcaggccctccggagg

SEQ ID NO: 131970 - DNA, 80 bp, synthetic construct; identical to SEQ ID NO: 41966
  misc_feature 1..80: note = Artificially Synthesized Probe
  source 1..80: mol_type = other DNA

SEQ ID NO: 131971 - DNA, 80 bp, synthetic construct
  misc_feature 1..80: note = Artificially Synthesized Probe
  source 1..80: mol_type = other DNA
ctgtccctggatgcaccagctctgtcactgctggctggaacacccaaaagggtgatggacatggctgtccctcagttttc

SEQ ID NO: 131972 - DNA, 80 bp, synthetic construct
  misc_feature 1..80: note = Artificially Synthesized Probe
  source 1..80: mol_type = other DNA
gctggaggccagaggttccagggaaggtgggcaccagggcccatgtctgagagattcataaacaggtgccacggcttctc

SEQ ID NO: 131973 - DNA, 80 bp, synthetic construct; identical to SEQ ID NO: 41967
  misc_feature 1..80: note = Artificially Synthesized Probe
  source 1..80: mol_type = other DNA

SEQ ID NO: 131974 - DNA, 80 bp, synthetic construct
  misc_feature 1..80: note = Artificially Synthesized Probe
  source 1..80: mol_type = other DNA
tttagatatagatactgattgtgggtatatatagttttaggtacagatgcagatataaaaatatagatataaatttacac

SEQ ID NO: 131975 - DNA, 80 bp, synthetic construct
  misc_feature 1..80: note = Artificially Synthesized Probe
  source 1..80: mol_type = other DNA
ctattctgcagaattggtcatgaaattagagaggctgaggagtcccaggatctgctgtctgcaaactggagccccagggg

SEQ ID NO: 131976 - DNA, 80 bp, synthetic construct
  misc_feature 1..80: note = Artificially Synthesized Probe
  source 1..80: mol_type = other DNA
agccgtctgcttttctcagaccacagattccaatgctgatcccttccaggacccaactcaaaaacacagtgggaataatg

SEQ ID NO: 131977 - DNA, 80 bp, synthetic construct
  misc_feature 1..80: note = Artificially Synthesized Probe
  source 1..80: mol_type = other DNA
cacccagcctcagggactcccccttgcccagccccaccagaggggcacccacgcccacagcagagaactccagggctccc

SEQ ID NO: 131978 - DNA, 80 bp, synthetic construct; identical to SEQ ID NO: 41968
  misc_feature 1..80: note = Artificially Synthesized Probe
  source 1..80: mol_type = other DNA

SEQ ID NO: 131979 - DNA, 80 bp, synthetic construct
  misc_feature 1..80: note = Artificially Synthesized Probe
  source 1..80: mol_type = other DNA
ggggttagggaccctcttgaggaggcagtctgtccgttctcagatcacaaactccatgctgggagaaccattactctctt

SEQ ID NO: 131980 - DNA, 80 bp, synthetic construct
  misc_feature 1..80: note = Artificially Synthesized Probe
  source 1..80: mol_type = other DNA
ctttgctggtttttgaagttccacaggtggcccctccagcccaagtttctcagaaccaaatccagccggaaatgtcaaac

SEQ ID NO: 131981 - DNA, 80 bp, synthetic construct
  misc_feature 1..80: note = Artificially Synthesized Probe
  source 1..80: mol_type = other DNA
gtgagagcgagtagcagcagatggaaacaagaacccagcctctttctggatgcaggaggagcggcatcccagggccagca

SEQ ID NO: 131982 - DNA, 80 bp, synthetic construct; identical to SEQ ID NO: 41969
  misc_feature 1..80: note = Artificially Synthesized Probe
  source 1..80: mol_type = other DNA

SEQ ID NO: 131983 - DNA, 80 bp, synthetic construct
  misc_feature 1..80: note = Artificially Synthesized Probe
  source 1..80: mol_type = other DNA
aaccgcagtcacccacagacgcattcatcaccgactttaaaaaatccagtgtgagaaatagaaccaaaccaagcacccat

SEQ ID NO: 131984 - DNA, 80 bp, synthetic construct
  misc_feature 1..80: note = Artificially Synthesized Probe
  source 1..80: mol_type = other DNA
cgtttcatcttggatttctcctcggccacctcgaatgggtatccaaacagaaaagtcggtaataaaactgtggtcaaagg

SEQ ID NO: 131985 - DNA, 80 bp, synthetic construct
  misc_feature 1..80: note = Artificially Synthesized Probe
  source 1..80: mol_type = other DNA
gctctggggccggctcctgggctgcctctctcctctgtcccatcaggcctgcacttctctgtctgattcccaccaacctt

SEQ ID NO: 131986 - DNA, 80 bp, synthetic construct
  misc_feature 1..80: note = Artificially Synthesized Probe
  source 1..80: mol_type = other DNA
atgcagccaagggcaaaacctcacagcgttataccgcgtcccttacagcccaccttgcgaacctttcccgccccggtccg

SEQ ID NO: 131987 - DNA, 80 bp, synthetic construct; identical to SEQ ID NO: 41970
  misc_feature 1..80: note = Artificially Synthesized Probe
  source 1..80: mol_type = other DNA

SEQ ID NO: 131988 - DNA, 80 bp, synthetic construct
  misc_feature 1..80: note = Artificially Synthesized Probe
  source 1..80: mol_type = other DNA
gatctccatgtcgctggctgctctgctgatcggaggcttcgcaggtctcacctcgacggtgatttgcaggtggtaagtcc

SEQ ID NO: 131989 - DNA, 80 bp, synthetic construct
  misc_feature 1..80: note = Artificially Synthesized Probe
  source 1..80: mol_type = other DNA
tttcattatgctttaaataatgaaagtggagtgatcatttgtacaccttaggtggtgtcaggtatctgtggacgaacatt

SEQ ID NO: 131990 - DNA, 80 bp, synthetic construct
  misc_feature 1..80: note = Artificially Synthesized Probe
  source 1..80: mol_type = other DNA
actcaagcctcagcaatggcgggtgcccctcccccagcctcgctgccgccttgcagttggatctcagactgctgtgttag

SEQ ID NO: 131991 - DNA, 80 bp, synthetic construct; identical to SEQ ID NO: 41971
  misc_feature 1..80: note = Artificially Synthesized Probe
  source 1..80: mol_type = other DNA

SEQ ID NO: 131992 - DNA, 80 bp, synthetic construct
  misc_feature 1..80: note = Artificially Synthesized Probe
  source 1..80: mol_type = other DNA
gttccttgctgctgcctctcaccttgctgctgcctctcaccttgctgctgcctctcaccttgctgctgcctctcaccttg

SEQ ID NO: 131993 - DNA, 80 bp, synthetic construct
  misc_feature 1..80: note = Artificially Synthesized Probe
  source 1..80: mol_type = other DNA
ttgttcattttatatagacagtattaaaaataacagcaaacactataagaagtcattgcaggcccaggctgggcccccag

SEQ ID NO: 131994 - DNA, 80 bp, synthetic construct
  misc_feature 1..80: note = Artificially Synthesized Probe
  source 1..80: mol_type = other DNA
tctgccaggatgacccctgcagtcaccttcgccctccaccccggccttcagagctcctcactggcggagcccccagcacc

SEQ ID NO: 131995 - DNA, 80 bp, synthetic construct; identical to SEQ ID NO: 41972
  misc_feature 1..80: note = Artificially Synthesized Probe
  source 1..80: mol_type = other DNA

SEQ ID NO: 131996 - DNA, 80 bp, synthetic construct
  misc_feature 1..80: note = Artificially Synthesized Probe
  source 1..80: mol_type = other DNA
ttgtgatcacttgtaagggaagactctgtacctgccatctgctctgcatcctgtctctctggggctgagatatggtagta

SEQ ID NO: 131997 - DNA, 80 bp, synthetic construct
  misc_feature 1..80: note = Artificially Synthesized Probe
  source 1..80: mol_type = other DNA
caccataattcagacaactgtgagaaattccttccagtagagaggtgatagtaatggctaaagccatgtgtcagatgtaa

SEQ ID NO: 131998 - DNA, 80 bp, synthetic construct
  misc_feature 1..80: note = Artificially Synthesized Probe
  source 1..80: mol_type = other DNA
ggtgtaattagttaaaatgagactgtcctggagtagaggggcccctaattcagtatagctggtgttcctctagaaagaag

SEQ ID NO: 131999 - DNA, 80 bp, synthetic construct
  misc_feature 1..80: note = Artificially Synthesized Probe
  source 1..80: mol_type = other DNA
cctgcctccagagctctaggtcataaactgctgtttaagcagccaagtctgtggtcctctgtgactgcagccccagaaaa

SEQ ID NO: 132000 - DNA, 80 bp, synthetic construct; identical to SEQ ID NO: 41973
  misc_feature 1..80: note = Artificially Synthesized Probe
  source 1..80: mol_type = other DNA

SEQ ID NO: 132001 - DNA, 80 bp, synthetic construct
  misc_feature 1..80: note = Artificially Synthesized Probe
  source 1..80: mol_type = other DNA
tcagctaaccatgaaatagactaagcaataaaaattgaataggctgtaagcaaataacttcaaattagctggttctgtaa

SEQ ID NO: 132002 - DNA, 80 bp, synthetic construct; identical to SEQ ID NO: 41831
  misc_feature 1..80: note = Artificially Synthesized Probe
  source 1..80: mol_type = other DNA

SEQ ID NO: 132003 - DNA, 80 bp, synthetic construct
  misc_feature 1..80: note = Artificially Synthesized Probe
  source 1..80: mol_type = other DNA
tattagtgtctgtagcccacactcacaagaaaaatagcaattttctttaagattgacagccatagatgaaatgaatacct

SEQ ID NO: 132004 - DNA, 80 bp, synthetic construct
  misc_feature 1..80: note = Artificially Synthesized Probe
  source 1..80: mol_type = other DNA
aaaagtggatgttaatgtgccatcacacgcttgagaacacaggcagttacagagtcagagaccataacagggaagaccct

SEQ ID NO: 132005 - DNA, 80 bp, synthetic construct; identical to SEQ ID NO: 41974
  misc_feature 1..80: note = Artificially Synthesized Probe
  source 1..80: mol_type = other DNA

SEQ ID NO: 132006 - DNA, 80 bp, synthetic construct
  misc_feature 1..80: note = Artificially Synthesized Probe
  source 1..80: mol_type = other DNA
cctcgttttctacccaccctgctgtctggggtctcacactgtatgttttggtgtgattgttattaatgtgacaaattgtt

SEQ ID NO: 132007 - DNA, 80 bp, synthetic construct
  misc_feature 1..80: note = Artificially Synthesized Probe
  source 1..80: mol_type = other DNA
tttacactaaaaattcattcctcaaatcagttctttggtccatgtcagttttgccaattagacctttcgccatggaggtg

SEQ ID NO: 132008 - DNA, 80 bp, synthetic construct
  misc_feature 1..80: note = Artificially Synthesized Probe
  source 1..80: mol_type = other DNA
gcagttccagtcctttctccattcgctcttgtttttattatttttaccaattctacttttccaccatcacttagttctgc

SEQ ID NO: 132009 - DNA, 80 bp, synthetic construct; identical to SEQ ID NO: 41975
  misc_feature 1..80: note = Artificially Synthesized Probe
  source 1..80: mol_type = other DNA

SEQ ID NO: 132010 - DNA, 80 bp, synthetic construct
  misc_feature 1..80: note = Artificially Synthesized Probe
  source 1..80: mol_type = other DNA
tgggactaggccgaggcagccatggggcagtgggccacgggatccctgtaagccatgggtgaccgggtgccctcttcccc

SEQ ID NO: 132011 - DNA, 80 bp, synthetic construct
  misc_feature 1..80: note = Artificially Synthesized Probe
  source 1..80: mol_type = other DNA
tccgagagaactggccctttgctgggggacagacgtagagtggccagcctgggctacacagcatgggggatccgaacctg

SEQ ID NO: 132012 - DNA, 80 bp, synthetic construct; identical to SEQ ID NO: 41976
  misc_feature 1..80: note = Artificially Synthesized Probe
  source 1..80: mol_type = other DNA

SEQ ID NO: 132013 - DNA, 80 bp, synthetic construct
  misc_feature 1..80: note = Artificially Synthesized Probe
  source 1..80: mol_type = other DNA
taaataaagtatttccacctgtaccttcctagacgggtcagaattctctaaagaaaattttagggtacacttttgcccca

SEQ ID NO: 132014 - DNA, 80 bp, synthetic construct
  misc_feature 1..80: note = Artificially Synthesized Probe
  source 1..80: mol_type = other DNA
ctctacccgacaccggccctgccaccgtgcccttacagtctctaccccacactggccctgctaccatgccctggcagtct

SEQ ID NO: 132015 - DNA, 80 bp, synthetic construct
  misc_feature 1..80: note = Artificially Synthesized Probe
  source 1..80: mol_type = other DNA
tctctaccccacaccggcccgccaccgtgccctcacagtctctctaccccacacctgcctgccaccgtgccctcgcagtc

SEQ ID NO: 132016 - DNA, 80 bp, synthetic construct
  misc_feature 1..80: note = Artificially Synthesized Probe
  source 1..80: mol_type = other DNA
cacttcttggcttttattcaagcctcaatctctccatagaatactccctccttatcatctcaacctggcttcgaatgttc

SEQ ID NO: 132017 - DNA, 80 bp, synthetic construct
  misc_feature 1..80: note = Artificially Synthesized Probe
  source 1..80: mol_type = other DNA
aaaccccaaatccccccactgggtgcaacctcctcaaatcccaccactgtgtgaaacctcctcaaatccccccactgtgt

SEQ ID NO: 132018 - DNA, 80 bp, synthetic construct; identical to SEQ ID NO: 41977
  misc_feature 1..80: note = Artificially Synthesized Probe
  source 1..80: mol_type = other DNA

SEQ ID NO: 132019 - DNA, 80 bp, synthetic construct
  misc_feature 1..80: note = Artificially Synthesized Probe
  source 1..80: mol_type = other DNA
gcaacctccccaaatccccccactgtgtgcaacttccctaaatccccccactgtgttcaacctccccaaatacctcccat

SEQ ID NO: 132020 - DNA, 80 bp, synthetic construct
  misc_feature 1..80: note = Artificially Synthesized Probe
  source 1..80: mol_type = other DNA
caaatccccaccactctgtgcaacctccccaaatcccccacactgtgtgcaaactcctcaaatccccctactgtgagcaa

SEQ ID NO: 132021 - DNA, 80 bp, synthetic construct
  misc_feature 1..80: note = Artificially Synthesized Probe
  source 1..80: mol_type = other DNA
ctgtgtgcaacctccccaaatccccccactgtgagcaaactcctcaaatccccccaactgtgtgtgagctccccaaatcc

SEQ ID NO: 132022 - DNA, 80 bp, synthetic construct; identical to SEQ ID NO: 41978
  misc_feature 1..80: note = Artificially Synthesized Probe
  source 1..80: mol_type = other DNA

SEQ ID NO: 132023 - DNA, 80 bp, synthetic construct
  misc_feature 1..80: note = Artificially Synthesized Probe
  source 1..80: mol_type = other DNA
ctgggggaaaaacaactgaataaacttttgacaaagctgggctgggctggcagctcactcaggaggggcagggcctggct

SEQ ID NO: 132024 - DNA, 80 bp, synthetic construct
  misc_feature 1..80: note = Artificially Synthesized Probe
  source 1..80: mol_type = other DNA
tcctcacagtgagcaacctcctcaaatccccacactgtgtgcaaccaccccaaatccccctactgtaagcaacctcccca

SEQ ID NO: 132025 - DNA, 80 bp, synthetic construct
  misc_feature 1..80: note = Artificially Synthesized Probe
  source 1..80: mol_type = other DNA
agcctccccaaatcccacccactgtgtgcaacctcaggtcccccactgtgtgcaacccccccaatccccctactgtgtgt

SEQ ID NO: 132026 - DNA, 80 bp, synthetic construct
  misc_feature 1..80: note = Artificially Synthesized Probe
  source 1..80: mol_type = other DNA
actgtgagcaacctccccaaatcgccccactatgagcagcctcctcaaatcccccaactgtgtgccacttccccaaatcc

SEQ ID NO: 132027 - DNA, 80 bp, synthetic construct; identical to SEQ ID NO: 41979
  misc_feature 1..80: note = Artificially Synthesized Probe
  source 1..80: mol_type = other DNA

SEQ ID NO: 132028 - DNA, 80 bp, synthetic construct
  misc_feature 1..80: note = Artificially Synthesized Probe
  source 1..80: mol_type = other DNA
gtgcaacctccccaaatccctcacactgggtgcaacctcctcaaatcccctactctgtggaacctcctcaaatccccccc

SEQ ID NO: 132029 - DNA, 80 bp, synthetic construct
  misc_feature 1..80: note = Artificially Synthesized Probe
  source 1..80: mol_type = other DNA
cctccccaaaaccccccactgtttgcaacacccccaaatttcccccactgtgagcaaacccccaaaacccccactgggta

SEQ ID NO: 132030 - DNA, 80 bp, synthetic construct
  misc_feature 1..80: note = Artificially Synthesized Probe
  source 1..80: mol_type = other DNA
tgtgcaacctcccccaaatccccccgactctgtgcaaactccccaaatcacccccactctgcaaactccccaaatctcac

SEQ ID NO: 132031 - DNA, 80 bp, synthetic construct; identical to SEQ ID NO: 41980
  misc_feature 1..80: note = Artificially Synthesized Probe
  source 1..80: mol_type = other DNA

SEQ ID NO: 132032 - DNA, 80 bp, synthetic construct
  misc_feature 1..80: note = Artificially Synthesized Probe
  source 1..80: mol_type = other DNA
taaggtaagccctggaaatcacagctgcctgtttgggaataaaagggaggcagttttgtgtgacgcgggtcccaagctta

SEQ ID NO: 132033 - DNA, 80 bp, synthetic construct
  misc_feature 1..80: note = Artificially Synthesized Probe
  source 1..80: mol_type = other DNA
aacctccaaatccccccactgtgtgcaacctcctcaaatccccccactgtgtgcaacctcctcaaatccccccgatgtgt

SEQ ID NO: 132034 - DNA, 80 bp, synthetic construct
  misc_feature 1..80: note = Artificially Synthesized Probe
  source 1..80: mol_type = other DNA
tgtgagcaacccccccaaatcaacatgctgtgtgaaacctcaaatcccccaactgtgtgcaacctccccaaatcccctcc

SEQ ID NO: 132035 - DNA, 80 bp, synthetic construct
  misc_feature 1..80: note = Artificially Synthesized Probe
  source 1..80: mol_type = other DNA
attttcaggacattcattgaacaaacaaatgtatttgcaacttcatcttcctgggcaagtgtttcccagagagtaaagtc

SEQ ID NO: 132036 - DNA, 80 bp, synthetic construct
  misc_feature 1..80: note = Artificially Synthesized Probe
  source 1..80: mol_type = other DNA
tctccccagtgtgtgcaacttccctaaatcccccaaactgtgttcatcctccccaaatcccccccccactgtatgcaacc

SEQ ID NO: 132037 - DNA, 80 bp, synthetic construct; identical to SEQ ID NO: 41981
  misc_feature 1..80: note = Artificially Synthesized Probe
  source 1..80: mol_type = other DNA

SEQ ID NO: 132038 - DNA, 80 bp, synthetic construct
  misc_feature 1..80: note = Artificially Synthesized Probe
  source 1..80: mol_type = other DNA
tccgcaaatacccccactgtgtgcaacctcctcaaatccccccactctgtgcaacctcccctatccctcccactgtgtgc

SEQ ID NO: 132039 - DNA, 80 bp, synthetic construct
  misc_feature 1..80: note = Artificially Synthesized Probe
  source 1..80: mol_type = other DNA
caacctccccaaatccccgcactgtgtgcaaccaccccaaatcccccccactgtgtgcaacctcctcaaatcctccgcca

SEQ ID NO: 132040 - DNA, 80 bp, synthetic construct; identical to SEQ ID NO: 41982
  misc_feature 1..80: note = Artificially Synthesized Probe
  source 1..80: mol_type = other DNA

SEQ ID NO: 132041 - DNA, 80 bp, synthetic construct
  misc_feature 1..80: note = Artificially Synthesized Probe
  source 1..80: mol_type = other DNA
ctgtgtgcaacctcctcaaatcccccccactgtgttcaacctcctcaaatccccccactgcgtgcaacctcctcaaatcc

SEQ ID NO: 132042 - DNA, 80 bp, synthetic construct
  misc_feature 1..80: note = Artificially Synthesized Probe
  source 1..80: mol_type = other DNA
cagatctcccccactgtgagcaaaagcacaaatcccccactgtgtgcaacattcctcaaatccccgcactgtgtgcaacc

SEQ ID NO: 132043 - DNA, 80 bp, synthetic construct
  misc_feature 1..80: note = Artificially Synthesized Probe
  source 1..80: mol_type = other DNA
tgcaacctccacaaatcctcccaagtctgcaaccccccaagtccccccattgtgagcaaccaccccaaatcccgccactg

SEQ ID NO: 132044 - DNA, 80 bp, synthetic construct; identical to SEQ ID NO: 41983
  misc_feature 1..80: note = Artificially Synthesized Probe
  source 1..80: mol_type = other DNA

SEQ ID NO: 132045 - DNA, 80 bp, synthetic construct
  misc_feature 1..80: note = Artificially Synthesized Probe
  source 1..80: mol_type = other DNA
tcctccaatccccccactgtgagcaacctccccaaatcctcctactgtgtgcaacctcctcaaatcccccactgtgtgca

SEQ ID NO: 132046 - DNA, 80 bp, synthetic construct; identical to SEQ ID NO: 41832
  misc_feature 1..80: note = Artificially Synthesized Probe
  source 1..80: mol_type = other DNA

SEQ ID NO: 132047 - DNA, 80 bp, synthetic construct
  misc_feature 1..80: note = Artificially Synthesized Probe
  source 1..80: mol_type = other DNA
tgtgcaacctccccaaatctccccagtgtgtgcaacttccctaaatccccccaactgtgtttaacctctccaaatccccc

SEQ ID NO: 132048 - DNA, 80 bp, synthetic construct
  misc_feature 1..80: note = Artificially Synthesized Probe
  source 1..80: mol_type = other DNA
caaatccccccactgtgtgcaacctccccaaatccccccactgtgtgcaacgtccccaaattcccccactgtgtgcaacc

SEQ ID NO: 132049 - DNA, 80 bp, synthetic construct; identical to SEQ ID NO: 41984
  misc_feature 1..80: note = Artificially Synthesized Probe
  source 1..80: mol_type = other DNA

SEQ ID NO: 132050 - DNA, 80 bp, synthetic construct
  misc_feature 1..80: note = Artificially Synthesized Probe
  source 1..80: mol_type = other DNA
cccactgtgtgcaacctcctctaatccccccactgtgagcaacctccccaaatccctcccattgtgtgcagcctccccaa

SEQ ID NO: 132051 - DNA, 80 bp, synthetic construct
  misc_feature 1..80: note = Artificially Synthesized Probe
  source 1..80: mol_type = other DNA
acctcgcccaatcacgacactgtgtgcaacctccccaaatcacccccactctctgcaacctccccaagtctcccacactc

SEQ ID NO: 132052 - DNA, 80 bp, synthetic construct
  misc_feature 1..80: note = Artificially Synthesized Probe
  source 1..80: mol_type = other DNA
ccactgtgtgcaccccccaaaaatccccccactgtgtgcaacctcctcaaatcccccgccagtgtgagcaacctcctaaa

SEQ ID NO: 132053 - DNA, 80 bp, synthetic construct; identical to SEQ ID NO: 41985
  misc_feature 1..80: note = Artificially Synthesized Probe
  source 1..80: mol_type = other DNA

SEQ ID NO: 132054 - DNA, 80 bp, synthetic construct
  misc_feature 1..80: note = Artificially Synthesized Probe
  source 1..80: mol_type = other DNA
tcccccccactgtgtgcaacctcctcaaatcccccccactgtgtgcaacctcctcaaatccccccatggggggcaacgtc

SEQ ID NO: 132055 - DNA, 80 bp, synthetic construct
  misc_feature 1..80: note = Artificially Synthesized Probe
  source 1..80: mol_type = other DNA
tgcgacctcctcaaatccccccagtatgtgcaacctcctcaaatccctccactctgtgcaacctcaccctatctttccca

SEQ ID NO: 132056 - DNA, 80 bp, synthetic construct
  misc_feature 1..80: note = Artificially Synthesized Probe
  source 1..80: mol_type = other DNA
atccccacactgtctgcaaccaccccaaatcgcccccactgtgtgcaaccgcctcatattccccccactgtgtggaccct

SEQ ID NO: 132057 - DNA, 80 bp, synthetic construct
  misc_feature 1..80: note = Artificially Synthesized Probe
  source 1..80: mol_type = other DNA
acacagcctcctctgacctacctgactgggtcagctctcacattgtagtattttagaattgtttcatcagtgatgagcaa

SEQ ID NO: 132058 - DNA, 80 bp, synthetic construct; identical to SEQ ID NO: 41986
  misc_feature 1..80: note = Artificially Synthesized Probe
  source 1..80: mol_type = other DNA

SEQ ID NO: 132059 - DNA, 80 bp, synthetic construct
  misc_feature 1..80: note = Artificially Synthesized Probe
  source 1..80: mol_type = other DNA
atctccccaaatcccgcccactctttgcaacctcgccaaatcccccccactctctgcaacctccccaaatcacccccact

SEQ ID NO: 132060 - DNA, 80 bp, synthetic construct
  misc_feature 1..80: note = Artificially Synthesized Probe
  source 1..80: mol_type = other DNA
aatcacccccactgtgtgcaacctcctcaaatccccccactgcgagcaacctcctcaaatctccccactgtgtgcaacct

SEQ ID NO: 132061 - DNA, 80 bp, synthetic construct
  misc_feature 1..80: note = Artificially Synthesized Probe
  source 1..80: mol_type = other DNA
gtgcaacctacacaaatgccccccacagtgcgcaacctcctcaaatcccccaccactgtgagcaacctcctcaaatcccc

SEQ ID NO: 132062 - DNA, 80 bp, synthetic construct
  misc_feature 1..80: note = Artificially Synthesized Probe
  source 1..80: mol_type = other DNA
ccccaccactgtgagcaacctccccaaatccccccactgtgagtaacctcctgcaattgccccgcactgtgcaacctcct

SEQ ID NO: 132063 - DNA, 80 bp, synthetic construct; identical to SEQ ID NO: 41987
  misc_feature 1..80: note = Artificially Synthesized Probe
  source 1..80: mol_type = other DNA

SEQ ID NO: 132064 - DNA, 80 bp, synthetic construct
  misc_feature 1..80: note = Artificially Synthesized Probe
  source 1..80: mol_type = other DNA
caaatacccccagtttgcaacctcccaaaatctccctatgtgcaacctcgcaaaatctcccccactatgtgcaacctcct

SEQ ID NO: 132065 - DNA, 80 bp, synthetic construct
  misc_feature 1..80: note = Artificially Synthesized Probe
  source 1..80: mol_type = other DNA
aacctccccaaatcccccactgtgtgcaacgtccccaaatccccccactgtgagcaaccttcccaaatccccccactgtg

SEQ ID NO: 132066 - DNA, 80 bp, synthetic construct; identical to SEQ ID NO: 41988
  misc_feature 1..80: note = Artificially Synthesized Probe
  source 1..80: mol_type = other DNA

SEQ ID NO: 132067 - DNA, 80 bp, synthetic construct
  misc_feature 1..80: note = Artificially Synthesized Probe
  source 1..80: mol_type = other DNA
cactctgtgcaacctccccaaatccccgccactctgtgaaacctcccccatcccttccagtttgtgcacccccccaaatc

SEQ ID NO: 132068 - DNA, 80 bp, synthetic construct
  misc_feature 1..80: note = Artificially Synthesized Probe
  source 1..80: mol_type = other DNA
ttttaatactttaagttctagggtacacatgcacaacgtgcaggtttgatacatgggtgtacatgtgccatgttcgtttg

SEQ ID NO: 132069 - DNA, 80 bp, synthetic construct
  misc_feature 1..80: note = Artificially Synthesized Probe
  source 1..80: mol_type = other DNA
ttctcctcaaatgcccctagctttgtgaaacctccccaaatcccccccactctgtgtgcaacctccccagatctcctttc

SEQ ID NO: 132070 - DNA, 80 bp, synthetic construct
  misc_feature 1..80: note = Artificially Synthesized Probe
  source 1..80: mol_type = other DNA
atacccaccactctgtgcaacctccccaaaacgcccccactctgtgcaacctccccaaatccccccaactgtttgcaacc

SEQ ID NO: 132071 - DNA, 80 bp, synthetic construct
  misc_feature 1..80: note = Artificially Synthesized Probe
  source 1..80: mol_type = other DNA
caacctcatcaaattttcccactgtgtgcaacttccctaagtcgtccaactgtgttcaacctccccaaatccctccaact

SEQ ID NO: 132072 - DNA, 80 bp, synthetic construct; identical to SEQ ID NO: 41989
  misc_feature 1..80: note = Artificially Synthesized Probe
  source 1..80: mol_type = other DNA

SEQ ID NO: 132073 - DNA, 80 bp, synthetic construct
  misc_feature 1..80: note = Artificially Synthesized Probe
  source 1..80: mol_type = other DNA
gggtaacctccccaaatcccccccactgtgtgcaacctcaagtcccccactgtgtgtaacccccccaaatcccaccactg

SEQ ID NO: 132074 - DNA, 80 bp, synthetic construct
  misc_feature 1..80: note = Artificially Synthesized Probe
  source 1..80: mol_type = other DNA
aatcccccccactgtgtgcaacctccccaaatctcccccactctgtgcaccttccccaaatctacctaactctgtgtaac

SEQ ID NO: 132075 - DNA, 80 bp, synthetic construct
  misc_feature 1..80: note = Artificially Synthesized Probe
  source 1..80: mol_type = other DNA
cccatactgtatgcaacctcctcaaatccctgtactgtgtgcaacctcctcaaatcccccccactgtatgcaacctactc

SEQ ID NO: 132076 - DNA, 80 bp, synthetic construct; identical to SEQ ID NO: 41990
  misc_feature 1..80: note = Artificially Synthesized Probe
  source 1..80: mol_type = other DNA

SEQ ID NO: 132077 - DNA, 80 bp, synthetic construct
  misc_feature 1..80: note = Artificially Synthesized Probe
  source 1..80: mol_type = other DNA
cactctgtgcaacctcccgaaatccccccaactctgtgcaacctccgccatccctcccactgtgtgcaacctgctcaaat

SEQ ID NO: 132078 - DNA, 80 bp, synthetic construct
  misc_feature 1..80: note = Artificially Synthesized Probe
  source 1..80: mol_type = other DNA
cccccccactctgcgcaacctcctcaaatccccccactgtgtgcaacctcctcaaatccccccactgtgtgcaaccttcc

SEQ ID NO: 132079 - DNA, 80 bp, synthetic construct; identical to SEQ ID NO: 41833
  misc_feature 1..80: note = Artificially Synthesized Probe
  source 1..80: mol_type = other DNA

SEQ ID NO: 132080 - DNA, 80 bp, synthetic construct
  misc_feature 1..80: note = Artificially Synthesized Probe
  source 1..80: mol_type = other DNA
acctccccaaatccccccaactgtttggaacctcctcaaatccccccactgtgtgcaacctcccgaaatccccccaactt

SEQ ID NO: 132081 - DNA, 80 bp, synthetic construct; identical to SEQ ID NO: 41991
  misc_feature 1..80: note = Artificially Synthesized Probe
  source 1..80: mol_type = other DNA

SEQ ID NO: 132082 - DNA, 80 bp, synthetic construct
  misc_feature 1..80: note = Artificially Synthesized Probe
  source 1..80: mol_type = other DNA
gatctcctttctgtgcaacctccataaatccaaccaaatgtatgcaacctcctcaaatccccaccactctgtgcaacctc

SEQ ID NO: 132083 - DNA, 80 bp, synthetic construct
  misc_feature 1..80: note = Artificially Synthesized Probe
  source 1..80: mol_type = other DNA
ttgcaacctcccaaatcccccccaatgtgagcaacctctcaaatccccctgtgtgcaaccccccaatctcccccactgtg

SEQ ID NO: 132084 - DNA, 80 bp, synthetic construct
  misc_feature 1..80: note = Artificially Synthesized Probe
  source 1..80: mol_type = other DNA
tctgtgcaagtgccccctatttccccaactgtgtagcaacctccccaaatccccccactgtgtgccacctccccaaatcc

SEQ ID NO: 132085 - DNA, 80 bp, synthetic construct; identical to SEQ ID NO: 41992
  misc_feature 1..80: note = Artificially Synthesized Probe
  source 1..80: mol_type = other DNA

SEQ ID NO: 132086 - DNA, 80 bp, synthetic construct
  misc_feature 1..80: note = Artificially Synthesized Probe
  source 1..80: mol_type = other DNA
aacatccccagatcccccccaatgtgtgcaacctccgcaaatccccctactctgtggaacctcctcaaatcccaactgtg

SEQ ID NO: 132087 - DNA, 80 bp, synthetic construct
  misc_feature 1..80: note = Artificially Synthesized Probe
  source 1..80: mol_type = other DNA
cactgtgtgcaacctcctcaaatccccaccactctgtgcaacctgcccaatttcccccactctgcaacctcccgaaatcc

SEQ ID NO: 132088 - DNA, 80 bp, synthetic construct; identical to SEQ ID NO: 41993
  misc_feature 1..80: note = Artificially Synthesized Probe
  source 1..80: mol_type = other DNA

SEQ ID NO: 132089 - DNA, 80 bp, synthetic construct
  misc_feature 1..80: note = Artificially Synthesized Probe
  source 1..80: mol_type = other DNA
agtgttcatgaagaagatcgaattcaaatggtgaaatatccatatatgcaattgtatagaaaagtcaggattatttgaca

SEQ ID NO: 132090 - DNA, 80 bp, synthetic construct
  misc_feature 1..80: note = Artificially Synthesized Probe
  source 1..80: mol_type = other DNA
gtagcatgatttataatcctttgggaatatacccagtaatgggattgctgggtcaaatggtaattctatttctagatcct

SEQ ID NO: 132091 - DNA, 80 bp, synthetic construct
  misc_feature 1..80: note = Artificially Synthesized Probe
  source 1..80: mol_type = other DNA
gcaaattcataaaatggggaaagtcttttttcaacatttccaagacatgctctgttaagacatggttgcttcaggtggct

SEQ ID NO: 132092 - DNA, 80 bp, synthetic construct
  misc_feature 1..80: note = Artificially Synthesized Probe
  source 1..80: mol_type = other DNA
acagttctggagaccagaagagcaagtcacggtgttggcagggctttgctccccccgaaggttggaaggacgaatgcgcc

SEQ ID NO: 132093 - DNA, 80 bp, synthetic construct; identical to SEQ ID NO: 41994
  misc_feature 1..80: note = Artificially Synthesized Probe
  source 1..80: mol_type = other DNA

SEQ ID NO: 132094 - DNA, 80 bp, synthetic construct
  misc_feature 1..80: note = Artificially Synthesized Probe
  source 1..80: mol_type = other DNA
accttcactgaattttaatagaagctggcattggtgctaactccttacagactttatgtcagtgtattctcactgaagga

SEQ ID NO: 132095 - DNA, 80 bp, synthetic construct
  misc_feature 1..80: note = Artificially Synthesized Probe
  source 1..80: mol_type = other DNA
aaggaccgttgggcctgtacagaggagaggcagactcaggccctccccactgacaggagggctgtcttccatgtacacct

SEQ ID NO: 132096 - DNA, 80 bp, synthetic construct
  misc_feature 1..80: note = Artificially Synthesized Probe
  source 1..80: mol_type = other DNA
gcgttgacacagggtcacgggaagccacctccagggcctgtggtcctcttcaggcaggcggggcggggaatgctcaggac

SEQ ID NO: 132097 - DNA, 80 bp, synthetic construct; identical to SEQ ID NO: 41995
  misc_feature 1..80: note = Artificially Synthesized Probe
  source 1..80: mol_type = other DNA

SEQ ID NO: 132098 - DNA, 80 bp, synthetic construct
  misc_feature 1..80: note = Artificially Synthesized Probe
  source 1..80: mol_type = other DNA
tgttgggccctttgcctgtacagggatggcgcccgacccaggaaaagcctaacgttgtctgtcatttggatgcgtctctt

SEQ ID NO: 132099 - DNA, 80 bp, synthetic construct
  misc_feature 1..80: note = Artificially Synthesized Probe
  source 1..80: mol_type = other DNA
tcagattatgatcgacttgactgaagtgtgaaatgaaagtgggttggagtgttcctgccaaagacaagcacggctgcctt

SEQ ID NO: 132100 - DNA, 80 bp, synthetic construct
  misc_feature 1..80: note = Artificially Synthesized Probe
  source 1..80: mol_type = other DNA
gagacaggcggaggaactcccgagctgagatgcggaaagcaccaggccgtagggacctcaccgcagcgggccgcagctca

SEQ ID NO: 132101 - DNA, 80 bp, synthetic construct
  misc_feature 1..80: note = Artificially Synthesized Probe
  source 1..80: mol_type = other DNA
tatttacaagctaatgacagtgagccagaatgtgagcctgcttagtgagaggaatgaagatgccttccatttgtacaaac

SEQ ID NO: 132102 - DNA, 80 bp, synthetic construct
  misc_feature 1..80: note = Artificially Synthesized Probe
  source 1..80: mol_type = other DNA
ggttttgatttgcatttctttctctgatgaacagtgacaatgagcatcttttcatgtgtctgttggctgcatagatgtct

SEQ ID NO: 132103 - DNA, 80 bp, synthetic construct; identical to SEQ ID NO: 41996
  misc_feature 1..80: note = Artificially Synthesized Probe
  source 1..80: mol_type = other DNA

SEQ ID NO: 132104 - DNA, 80 bp, synthetic construct
  misc_feature 1..80: note = Artificially Synthesized Probe
  source 1..80: mol_type = other DNA
taaaacaataggtttttttttttttgagatagagtcttgctctgtcgcccagactggagtgcagtggcacaaacatagct

SEQ ID NO: 132105 - DNA, 80 bp, synthetic construct
  misc_feature 1..80: note = Artificially Synthesized Probe
  source 1..80: mol_type = other DNA
aagagatcctccagtctgaaactcccaaagtgctgggaccacagccacccactaaaataatagattttaaatgttctaac

SEQ ID NO: 132106 - DNA, 80 bp, synthetic construct; identical to SEQ ID NO: 41997
  misc_feature 1..80: note = Artificially Synthesized Probe
  source 1..80: mol_type = other DNA

SEQ ID NO: 132107 - DNA, 80 bp, synthetic construct
  misc_feature 1..80: note = Artificially Synthesized Probe
  source 1..80: mol_type = other DNA
agtgaggctctttgtgaatttaaatagcttttccagccacagcaagggcagtgccagcaagtcccctgggcccctaatta

SEQ ID NO: 132108 - DNA, 80 bp, synthetic construct
  misc_feature 1..80: note = Artificially Synthesized Probe
  source 1..80: mol_type = other DNA
gcaaacaagcatttgtccggaagccagaaacttccctccagcatgacaagcaagaaggatggctcatctcgccagcggtc

SEQ ID NO: 132109 - DNA, 80 bp, synthetic construct
  misc_feature 1..80: note = Artificially Synthesized Probe
  source 1..80: mol_type = other DNA
ctgagggcaaagtggcaggacactgcagaacagcttcatgttcccaaaatcaccgtacgactcttttccaaacacaggca

SEQ ID NO: 132110 - DNA, 80 bp, synthetic construct; identical to SEQ ID NO: 41998
  misc_feature 1..80: note = Artificially Synthesized Probe
  source 1..80: mol_type = other DNA

SEQ ID NO: 132111 - DNA, 80 bp, synthetic construct
  misc_feature 1..80: note = Artificially Synthesized Probe
  source 1..80: mol_type = other DNA
ggaggaaagtgattctgagggagaggctggagccttaaggaccaacaaggcaaagtgacttgtctcatcctccagagatt

SEQ ID NO: 132112 - DNA, 80 bp, synthetic construct
  misc_feature 1..80: note = Artificially Synthesized Probe
  source 1..80: mol_type = other DNA
aactcactccctccctgactcaacaaggcagtctcgggggcaccgttagccacgcgaccctgtaaagctgccgtcctcat

SEQ ID NO: 132113 - DNA, 80 bp, synthetic construct
  misc_feature 1..80: note = Artificially Synthesized Probe
  source 1..80: mol_type = other DNA
tctgatggtagtttcttttgctgtgcagaagctctttagtttaattagatcccatttgtcaattttggcttttgttgcca

SEQ ID NO: 132114 - DNA, 80 bp, synthetic construct
  misc_feature 1..80: note = Artificially Synthesized Probe
  source 1..80: mol_type = other DNA
ctggagttctacctgcactaagagaagagagtggtaactaattcatggataaaacagaccatcgaggcagcactgaatga

SEQ ID NO: 132115 - DNA, 80 bp, synthetic construct; identical to SEQ ID NO: 41999
  misc_feature 1..80: note = Artificially Synthesized Probe
  source 1..80: mol_type = other DNA

SEQ ID NO: 132116 - DNA, 80 bp, synthetic construct
  misc_feature 1..80: note = Artificially Synthesized Probe
  source 1..80: mol_type = other DNA
ttcagctttctacatatggctagccagttttcccagcaccatttattaaatagggaatcatttccccatttctttttgtc

SEQ ID NO: 132117 - DNA, 80 bp, synthetic construct; identical to SEQ ID NO: 41834
  misc_feature 1..80: note = Artificially Synthesized Probe
  source 1..80: mol_type = other DNA

SEQ ID NO: 132118 - DNA, 80 bp, synthetic construct
  misc_feature 1..80: note = Artificially Synthesized Probe
  source 1..80: mol_type = other DNA
ccacctcctcactgcgaatctctgattcctttgtttgagacaccagaggtgggaagacaggaggatttttctagtcacgc

SEQ ID NO: 132119 - DNA, 80 bp, synthetic construct
  misc_feature 1..80: note = Artificially Synthesized Probe
  source 1..80: mol_type = other DNA
tccttgaagaggtccttcacatcccttgtaagttggattcctaggtattttattctctttgaagcaattgtgaatgggag

SEQ ID NO: 132120 - DNA, 80 bp, synthetic construct
  misc_feature 1..80: note = Artificially Synthesized Probe
  source 1..80: mol_type = other DNA
tcatctgcgaacagggacaatttgacttcctcttttcctaattgaataccctttatttctttctcctgcctgattgccct

SEQ ID NO: 132121 - DNA, 80 bp, synthetic construct; identical to SEQ ID NO: 41835
  misc_feature 1..80: note = Artificially Synthesized Probe
  source 1..80: mol_type = other DNA

SEQ ID NO: 132122 - DNA, 80 bp, synthetic construct
  misc_feature 1..80: note = Artificially Synthesized Probe
  source 1..80: mol_type = other DNA
tctatattcatcagggatattggtctaaaattcactttttttgttgtgtctctgccaggctttgggatcaggatgatgtt

SEQ ID NO: 132123 - DNA, 80 bp, synthetic construct
  misc_feature 1..80: note = Artificially Synthesized Probe
  source 1..80: mol_type = other DNA
agcctgttattggtctgttcggagactcaacttcttcctggtttagtcttgggagggtgtgtttgtccaggaatttatcc

SEQ ID NO: 132124 - DNA, 80 bp, synthetic construct
  misc_feature 1..80: note = Artificially Synthesized Probe
  source 1..80: mol_type = other DNA
ttaggatgaaaatgaaatatgtgtaatgttttacattcatgagtgtgtaaagagtcatatagactctttgtcatcactgg

SEQ ID NO: 132125 - DNA, 80 bp, synthetic construct
  misc_feature 1..80: note = Artificially Synthesized Probe
  source 1..80: mol_type = other DNA
agaggaaacagcagcttctgcttctggggaggcctcaggaagcttccaattgtagcggaaggcagagggagcgaggcgtc

SEQ ID NO: 132126 - DNA, 80 bp, synthetic construct; identical to SEQ ID NO: 41836
  misc_feature 1..80: note = Artificially Synthesized Probe
  source 1..80: mol_type = other DNA

SEQ ID NO: 132127 - DNA, 80 bp, synthetic construct
  misc_feature 1..80: note = Artificially Synthesized Probe
  source 1..80: mol_type = other DNA
ccttgaagtctgttcaatgctcttccaaataaggcctgtggaaactctcatgagaaaaacaaggcaaaaactgcagaaat

SEQ ID NO: 132128 - DNA, 80 bp, synthetic construct
  misc_feature 1..80: note = Artificially Synthesized Probe
  source 1..80: mol_type = other DNA
tgacatttctaaatatttcacttcttctttacgcatttattgctataaggacactatctgaaaagtggagctactattta

SEQ ID NO: 132129 - DNA, 80 bp, synthetic construct
  misc_feature 1..80: note = Artificially Synthesized Probe
  source 1..80: mol_type = other DNA
ctcctccatgtgacaattttcaatacttccaaagtaagagttttacctagaaatcattgacaaaatatgtccagcagccc

SEQ ID NO: 132130 - DNA, 80 bp, synthetic construct
  misc_feature 1..80: note = Artificially Synthesized Probe
  source 1..80: mol_type = other DNA
ctgtaaataaagatgagcgcggcaccatctgttcctccgaggagttagcaatctcagtattttcttcgtaaatccaaatt

SEQ ID NO: 132131 - DNA, 80 bp, synthetic construct; identical to SEQ ID NO: 41837
  misc_feature 1..80: note = Artificially Synthesized Probe
  source 1..80: mol_type = other DNA

SEQ ID NO: 132132 - DNA, 80 bp, synthetic construct
  misc_feature 1..80: note = Artificially Synthesized Probe
  source 1..80: mol_type = other DNA
cgaacagacgtctccaggaatgctcctttaacacttgaagcatgcatgtctcacctgtgagatggagaaagtgtgtctcc

SEQ ID NO: 132133 - DNA, 80 bp, synthetic construct
  misc_feature 1..80: note = Artificially Synthesized Probe
  source 1..80: mol_type = other DNA
tggtttataattttttgagaaggggccatgggtttttaatttgcactgagcccttcacattctgtagctggtttgcaagc

SEQ ID NO: 132134 - DNA, 80 bp, synthetic construct
  misc_feature 1..80: note = Artificially Synthesized Probe
  source 1..80: mol_type = other DNA
ggcttccgcttccctgcacaccatatgttggattttccttcataatttatagctttagttgaacaagagttttctaggat

SEQ ID NO: 132135 - DNA, 80 bp, synthetic construct; identical to SEQ ID NO: 41838
  misc_feature 1..80: note = Artificially Synthesized Probe
  source 1..80: mol_type = other DNA

SEQ ID NO: 132136 - DNA, 80 bp, synthetic construct
  misc_feature 1..80: note = Artificially Synthesized Probe
  source 1..80: mol_type = other DNA
acactgtaatccaagcagaacagctctgacacaaagatttcccatgtgaccattcaagattttatacacactaatattct

SEQ ID NO: 132137 - DNA, 80 bp, synthetic construct
  misc_feature 1..80: note = Artificially Synthesized Probe
  source 1..80: mol_type = other DNA
aagatataaatttcctaattttatgtataataaaataaaaaacataaaaatatctctccatgtgaagtgggtttgagtgt

SEQ ID NO: 132138 - DNA, 80 bp, synthetic construct
  misc_feature 1..80: note = Artificially Synthesized Probe
  source 1..80: mol_type = other DNA
agtgtgttctagtgatagtgtgttctagtgatagtgactaagtctcatgagatctgatggttttataaagggcagttccc

SEQ ID NO: 132139 - DNA, 80 bp, synthetic construct; identical to SEQ ID NO: 41839
  misc_feature 1..80: note = Artificially Synthesized Probe
  source 1..80: mol_type = other DNA

SEQ ID NO: 132140 - DNA, 80 bp, synthetic construct; identical to SEQ ID NO: 41818
  misc_feature 1..80: note = Artificially Synthesized Probe
  source 1..80: mol_type = other DNA

SEQ ID NO: 132141 - DNA, 80 bp, synthetic construct
  misc_feature 1..80: note = Artificially Synthesized Probe
  source 1..80: mol_type = other DNA
agctaaaaagtaatctgggaaactcaaacctgccccaagaattctgggagttgaagggcacagacactagaccaagagca

SEQ ID NO: 132142 - DNA, 80 bp, synthetic construct
  misc_feature 1..80: note = Artificially Synthesized Probe
  source 1..80: mol_type = other DNA
caaatctgacagtgctcgaatattttttgattcagcagtggagtaactttacattctaagggagcccattgacttgcaga

SEQ ID NO: 132143 - DNA, 80 bp, synthetic construct
  misc_feature 1..80: note = Artificially Synthesized Probe
  source 1..80: mol_type = other DNA
aaggacaggtgtggttatgttctggcaccacataaacatggagggaaattgcagaatgagccgctgttctttccctcaga

SEQ ID NO: 132144 - DNA, 80 bp, synthetic construct; identical to SEQ ID NO: 41840
  misc_feature 1..80: note = Artificially Synthesized Probe
  source 1..80: mol_type = other DNA

SEQ ID NO: 132145 - DNA, 80 bp, synthetic construct
  misc_feature 1..80: note = Artificially Synthesized Probe
  source 1..80: mol_type = other DNA
actcacttgctgttggaacattatcaaggctcattttcgtcatctgaaaggtggaaacaatagtaggtgcctcataaaga

SEQ ID NO: 132146 - DNA, 80 bp, synthetic construct
  misc_feature 1..80: note = Artificially Synthesized Probe
  source 1..80: mol_type = other DNA
tcttgtctctgcaaattccctcaattcagagattatcactgcttcccaaccaagttatcccatttttactgcaggaaaac

SEQ ID NO: 132147 - DNA, 80 bp, synthetic construct; identical to SEQ ID NO: 41841
  misc_feature 1..80: note = Artificially Synthesized Probe
  source 1..80: mol_type = other DNA

SEQ ID NO: 132148 - DNA, 80 bp, synthetic construct
  misc_feature 1..80: note = Artificially Synthesized Probe
  source 1..80: mol_type = other DNA
cacttagccattgatccaaagtgacatttttgcttgttatgatgagccttctgaagtgaggcgtggtctcaacatcaccc

SEQ ID NO: 132149 - DNA, 80 bp, synthetic construct
  misc_feature 1..80: note = Artificially Synthesized Probe
  source 1..80: mol_type = other DNA
cgggtcctgatgcaggggaaggggctcctccatcctcctctctctgcctggcagttggctcctctgctttgcccatcaga

SEQ ID NO: 132150 - DNA, 80 bp, synthetic construct
  misc_feature 1..80: note = Artificially Synthesized Probe
  source 1..80: mol_type = other DNA
caccttgtgcagaaaaaagtacttcccatgccacaaacaaagggtacaagaaaagtagcgttccgcacattttcaggcat

SEQ ID NO: 132151 - DNA, 80 bp, synthetic construct
  misc_feature 1..80: note = Artificially Synthesized Probe
  source 1..80: mol_type = other DNA
ctctgctggcatctccccatcagtcctaggggaaccacagatgcctgctggcacccagtgatgtgtggtggcctccctgt

SEQ ID NO: 132152 - DNA, 80 bp, synthetic construct; identical to SEQ ID NO: 41842
  misc_feature 1..80: note = Artificially Synthesized Probe
  source 1..80: mol_type = other DNA

SEQ ID NO: 132153 - DNA, 80 bp, synthetic construct
  misc_feature 1..80: note = Artificially Synthesized Probe
  source 1..80: mol_type = other DNA
aggcaagccctggtttcctcctgcaccgcttgcgtgggggtctctatctctggctttgtgggggtgcccttcccccaagg

SEQ ID NO: 132154 - DNA, 80 bp, synthetic construct
  misc_feature 1..80: note = Artificially Synthesized Probe
  source 1..80: mol_type = other DNA
ccactgccaggcccctgaggaagctccaggcccaggaggctgggctctccctgcagccaggccctcacctcctctgcaag

SEQ ID NO: 132155 - DNA, 80 bp, synthetic construct
  misc_feature 1..80: note = Artificially Synthesized Probe
  source 1..80: mol_type = other DNA
gttcagccatccctcccttgtctgccccaggtgagtcctcatgaaatgtccagcccccccgagggaggcagagccacgtg

SEQ ID NO: 132156 - DNA, 80 bp, synthetic construct; identical to SEQ ID NO: 41843
  misc_feature 1..80: note = Artificially Synthesized Probe
  source 1..80: mol_type = other DNA

SEQ ID NO: 132157 - DNA, 80 bp, synthetic construct
  misc_feature 1..80: note = Artificially Synthesized Probe
  source 1..80: mol_type = other DNA
gcaaatctgaagatcagaggccctgttgcccaccctttccatctctgcagatctccagtgcctcgggagcctctcccatc

SEQ ID NO: 132158 - DNA, 80 bp, synthetic construct
  misc_feature 1..80: note = Artificially Synthesized Probe
  source 1..80: mol_type = other DNA
aaataggaacaaggcacatcaacgggtgcacaggaaaatccttacatggaaatcttacttgttatttgacattcatgttt

SEQ ID NO: 132159 - DNA, 80 bp, synthetic construct
  misc_feature 1..80: note = Artificially Synthesized Probe
  source 1..80: mol_type = other DNA
cattcttgacctttattttcagccctcatgtggcactgtccctgtctattttctgcagtagcttcttgcatttagaaaaa

SEQ ID NO: 132160 - DNA, 80 bp, synthetic construct
  misc_feature 1..80: note = Artificially Synthesized Probe
  source 1..80: mol_type = other DNA
cctcccagacccatgaccgagcacccttcacaccacccctttctcctgtgaaagaaaagtaaagacacttaacaaaaagt

SEQ ID NO: 132161 - DNA, 80 bp, synthetic construct
  misc_feature 1..80: note = Artificially Synthesized Probe
  source 1..80: mol_type = other DNA
tcacttgaggtcaggagtttgagaccagcctggccaacatggtgaaaccctgtctctactaaaaatataaaaattagctg

SEQ ID NO: 132162 - DNA, 80 bp, synthetic construct; identical to SEQ ID NO: 41844
  misc_feature 1..80: note = Artificially Synthesized Probe
  source 1..80: mol_type = other DNA

SEQ ID NO: 132163 - DNA, 80 bp, synthetic construct
  misc_feature 1..80: note = Artificially Synthesized Probe
  source 1..80: mol_type = other DNA
agcacaaatgaaaacgtaaatttccttcacgtttcagtggaactgatgcaggcttttattgtagctgttagtttatccaa

SEQ ID NO: 132164 - DNA, 80 bp, synthetic construct
  misc_feature 1..80: note = Artificially Synthesized Probe
  source 1..80: mol_type = other DNA
ggcaaaaaatccagcaatacaagtaaaaaggacattccttttccaagccttcctcgtggcctgaagtaactgttgtgcgt

SEQ ID NO: 132165 - DNA, 80 bp, synthetic construct
  misc_feature 1..80: note = Artificially Synthesized Probe
  source 1..80: mol_type = other DNA
gagctgtaggcagcgtgcacatcacaatcaccctgctgaaagaaagtcaccctgataaaagtaaaactttaggcaaaaca

SEQ ID NO: 132166 - DNA, 80 bp, synthetic construct; identical to SEQ ID NO: 41845
  misc_feature 1..80: note = Artificially Synthesized Probe
  source 1..80: mol_type = other DNA

SEQ ID NO: 132167 - DNA, 80 bp, synthetic construct
  misc_feature 1..80: note = Artificially Synthesized Probe
  source 1..80: mol_type = other DNA
cctctgcccatcctgctacctcctcctcctggcatgggtttgatccctaataagcattctgtacctcaaatcctgcctca

SEQ ID NO: 132168 - DNA, 80 bp, synthetic construct
  misc_feature 1..80: note = Artificially Synthesized Probe
  source 1..80: mol_type = other DNA
gaactgtgggtccaagggtataggttaggagtcaaagggcactgagtgccgcgagccagccatttactcagagatcctac

SEQ ID NO: 132169 - DNA, 80 bp, synthetic construct
  misc_feature 1..80: note = Artificially Synthesized Probe
  source 1..80: mol_type = other DNA
tctaaaaaaagtaaaattcccaagggcactggcaggataacaatgatattaaaaaccagtgaagacagcttttggtcagg

SEQ ID NO: 132170 - DNA, 80 bp, synthetic construct; identical to SEQ ID NO: 41846
  misc_feature 1..80: note = Artificially Synthesized Probe
  source 1..80: mol_type = other DNA

SEQ ID NO: 132171 - DNA, 80 bp, synthetic construct
  misc_feature 1..80: note = Artificially Synthesized Probe
  source 1..80: mol_type = other DNA
ctggccccgtggaatctccagaccccgaaggacctgcttaggaagagacgggagcacagagcaagcagggagccagccag

SEQ ID NO: 132172 - DNA, 80 bp, synthetic construct
  misc_feature 1..80: note = Artificially Synthesized Probe
  source 1..80: mol_type = other DNA
ctcacaatcatggcagaaggtgaaaggcatgtcttacatggtggcaggcaagagaaaataagagccaagcaaagggggaa

SEQ ID NO: 132173 - DNA, 80 bp, synthetic construct
  misc_feature 1..80: note = Artificially Synthesized Probe
  source 1..80: mol_type = other DNA
acacatccgaaccatatcaccccatattttgtacatcttgaatttggaaactgagcgccagtttgtttctccagaaaggt

SEQ ID NO: 132174 - DNA, 80 bp, synthetic construct; identical to SEQ ID NO: 41847
  misc_feature 1..80: note = Artificially Synthesized Probe
  source 1..80: mol_type = other DNA

SEQ ID NO: 132175 - DNA, 80 bp, synthetic construct
  misc_feature 1..80: note = Artificially Synthesized Probe
  source 1..80: mol_type = other DNA
cttgggtcagtccccttgtcccactggaggcccagatggacaccacttgctctccctcctcctaccatcgtgagatagaa

SEQ ID NO: 132176 - DNA, 80 bp, synthetic construct
  misc_feature 1..80: note = Artificially Synthesized Probe
  source 1..80: mol_type = other DNA
ctcagaattgttgcaggaggctgtgctcacaaaaatgccatgcaccgtgggtgggggacactggggaacaatgggctggt

SEQ ID NO: 132177 - DNA, 80 bp, synthetic construct
  misc_feature 1..80: note = Artificially Synthesized Probe
  source 1..80: mol_type = other DNA
accgtgggttcacatttcactgtggtgtgaccacctggcatgctttagtgggagtggtgtgaccagagcacgccgggccc

SEQ ID NO: 132178 - DNA, 80 bp, synthetic construct; identical to SEQ ID NO: 41848
  misc_feature 1..80: note = Artificially Synthesized Probe
  source 1..80: mol_type = other DNA

SEQ ID NO: 132179 - DNA, 80 bp, synthetic construct
  misc_feature 1..80: note = Artificially Synthesized Probe
  source 1..80: mol_type = other DNA
gtgttgcacgctgtctcaagggaggaaatgtgttctccttagccaattgtggtaatgcagtagcccattctacatctttg

SEQ ID NO: 132180 - DNA, 80 bp, synthetic construct
  misc_feature 1..80: note = Artificially Synthesized Probe
  source 1..80: mol_type = other DNA
gttgtcaaagaggtaattaagttaaagtaaggccattaggtttggccctagttacatacaactggtgtctttaataagaa

SEQ ID NO: 132181 - DNA, 80 bp, synthetic construct
  misc_feature 1..80: note = Artificially Synthesized Probe
  source 1..80: mol_type = other DNA
ttttctcccttaataaactgttcctttaaaactggaattcaaagtaaatgcaaagcagaaagaagctccacagtgtgtcc

SEQ ID NO: 132182 - DNA, 80 bp, synthetic construct
  misc_feature 1..80: note = Artificially Synthesized Probe
  source 1..80: mol_type = other DNA
tttaaaccacccagtctgtggtactttgttatggcagtcccaggaaattcatacacggtcatttctttctttctagaagg

SEQ ID NO: 132183 - DNA, 80 bp, synthetic construct
  misc_feature 1..80: note = Artificially Synthesized Probe
  source 1..80: mol_type = other DNA
atgtcattcatttattcacttcattcttttatccatcgacccattcacacatgtacccacgcagccatccattcctttat

SEQ ID NO: 132184 - DNA, 80 bp, synthetic construct; identical to SEQ ID NO: 41849
  misc_feature 1..80: note = Artificially Synthesized Probe
  source 1..80: mol_type = other DNA

SEQ ID NO: 132185 - DNA, 80 bp, synthetic construct
  misc_feature 1..80: note = Artificially Synthesized Probe
  source 1..80: mol_type = other DNA
tcatccacccatctactcatctatccatccactgatcagtttctccatccatccatccattcacccattcatccatctat

SEQ ID NO: 132186 - DNA, 80 bp, synthetic construct
  misc_feature 1..80: note = Artificially Synthesized Probe
  source 1..80: mol_type = other DNA
aatagggaatgtctcccactccacagaaattaattgcttctttatcttcctaactcaactataacttttacaaagttagg

SEQ ID NO: 132187 - DNA, 80 bp, synthetic construct; identical to SEQ ID NO: 41850
  misc_feature 1..80: note = Artificially Synthesized Probe
  source 1..80: mol_type = other DNA

SEQ ID NO: 132188 - DNA, 80 bp, synthetic construct; identical to SEQ ID NO: 41816
  misc_feature 1..80: note = Artificially Synthesized Probe
  source 1..80: mol_type = other DNA

SEQ ID NO: 132189 - DNA, 80 bp, synthetic construct
  misc_feature 1..80: note = Artificially Synthesized Probe
  source 1..80: mol_type = other DNA
gctgtttagtgatattcacatcctcctctagaaattacttaagtgtatttaccgaccttcaccactcagattagggaaat

SEQ ID NO: 132190 - DNA, 80 bp, synthetic construct
  misc_feature 1..80: note = Artificially Synthesized Probe
  source 1..80: mol_type = other DNA
tgtgactattgtaagacacaaagaacttagcttagccatcctattatccacgtgaatattgtccactaaccaggtccttc

SEQ ID NO: 132191 - DNA, 80 bp, synthetic construct
  misc_feature 1..80: note = Artificially Synthesized Probe
  source 1..80: mol_type = other DNA
tattaatctcacttagggtcacaacatgctgtgaaacaaaggaccaaatgccattcacaatattacccctagaaactcct

SEQ ID NO: 132192 - DNA, 80 bp, synthetic construct; identical to SEQ ID NO: 41851
  misc_feature 1..80: note = Artificially Synthesized Probe
  source 1..80: mol_type = other DNA

SEQ ID NO: 132193 - DNA, 80 bp, synthetic construct; identical to SEQ ID NO: 41819
  misc_feature 1..80: note = Artificially Synthesized Probe
  source 1..80: mol_type = other DNA

SEQ ID NO: 132194 - DNA, 80 bp, synthetic construct
  misc_feature 1..80: note = Artificially Synthesized Probe
  source 1..80: mol_type = other DNA
agccctcaagacaaacgtttccaccgggtttaccagtggctttgatttctgtttatgttaatattgacaaattgtatgtg

SEQ ID NO: 132195 - DNA, 80 bp, synthetic construct
  misc_feature 1..80: note = Artificially Synthesized Probe
  source 1..80: mol_type = other DNA
agaaaaggggtgtgttatggggcttgtggagacagctgaaaactggtgaaacatttttcaaagtgcatctctgaattgtt

SEQ ID NO: 132196 - DNA, 80 bp, synthetic construct
  misc_feature 1..80: note = Artificially Synthesized Probe
  source 1..80: mol_type = other DNA
ccccttttcttgtctcttagcaggttgttaggtgatgcaggcatttcaggaaagtcacaaagttacttggtcatacctca

SEQ ID NO: 132197 - DNA, 80 bp, synthetic construct
  misc_feature 1..80: note = Artificially Synthesized Probe
  source 1..80: mol_type = other DNA
ttggcttacatcaaggaagattccatttctatgaaacccacatcttcaagattacactgtaaagacaaattgaactaaaa

SEQ ID NO: 132198 - DNA, 80 bp, synthetic construct; identical to SEQ ID NO: 41852
  misc_feature 1..80: note = Artificially Synthesized Probe
  source 1..80: mol_type = other DNA

SEQ ID NO: 132199 - DNA, 80 bp, synthetic construct
  misc_feature 1..80: note = Artificially Synthesized Probe
  source 1..80: mol_type = other DNA
ctatgtggatgcatgtaactagttagagcattttactaagttaatgaccgaaatcagagctctcaggtcactactggaat

SEQ ID NO: 132200 - DNA, 80 bp, synthetic construct
  misc_feature 1..80: note = Artificially Synthesized Probe
  source 1..80: mol_type = other DNA
gttcagtgagcttagctgcctaggcagggtggtaattagagtacggagttttacaggagaatctactgcataattcatga

SEQ ID NO: 132201 - DNA, 80 bp, synthetic construct; identical to SEQ ID NO: 41853
  misc_feature 1..80: note = Artificially Synthesized Probe
  source 1..80: mol_type = other DNA

SEQ ID NO: 132202 - DNA, 80 bp, synthetic construct
  misc_feature 1..80: note = Artificially Synthesized Probe
  source 1..80: mol_type = other DNA
ctttgctgatataagtcacccccgatggcatgggtccctggtcaggaggctgttttacatccttagcttgtagaaacgca

SEQ ID NO: 132203 - DNA, 80 bp, synthetic construct
  misc_feature 1..80: note = Artificially Synthesized Probe
  source 1..80: mol_type = other DNA
gattccagactcctacctcctactcagaaaaactggagccattaaaatggttactgctgaatgtggagctttttgtggtg

SEQ ID NO: 132204 - DNA, 80 bp, synthetic construct
  misc_feature 1..80: note = Artificially Synthesized Probe
  source 1..80: mol_type = other DNA
tgagtctgccctgcctggctgctttcggatcctgtgtcctcagaacccaccaaattcatgtcggtcttgtcctcacaggt

SEQ ID NO: 132205 - DNA, 80 bp, synthetic construct
  misc_feature 1..80: note = Artificially Synthesized Probe
  source 1..80: mol_type = other DNA
gaatgacagcattttattttccaaatttgttttaaaatgaattgagctgtaataagagttggaagataacacagagctcc

SEQ ID NO: 132206 - DNA, 80 bp, synthetic construct
  misc_feature 1..80: note = Artificially Synthesized Probe
  source 1..80: mol_type = other DNA
gatccaatgctggtgattacatctcagagctcaccctggtatccccagcttttccatctgcatcctttcctcttccagga

SEQ ID NO: 132207 - DNA, 80 bp, synthetic construct; identical to SEQ ID NO: 41854
  misc_feature 1..80: note = Artificially Synthesized Probe
  source 1..80: mol_type = other DNA

SEQ ID NO: 132208 - DNA, 80 bp, synthetic construct
  misc_feature 1..80: note = Artificially Synthesized Probe
  source 1..80: mol_type = other DNA
gggtttcagttgcaggataaaaatgttctgggatctaatgtatagcttgatgactattgtttatttgaaaatcgctagga

SEQ ID NO: 132209 - DNA, 80 bp, synthetic construct
  misc_feature 1..80: note = Artificially Synthesized Probe
  source 1..80: mol_type = other DNA
atgaagctgggggcgaggaaaacaaaaactaaaaagtgaatggcaagtaaaaaaggcaacatcaggctgtagtttgaaga

SEQ ID NO: 132210 - DNA, 80 bp, synthetic construct
  misc_feature 1..80: note = Artificially Synthesized Probe
  source 1..80: mol_type = other DNA
cagggagaaaggtggcctttctatggagacatcaagcaaaatgtgtgatttgctgtttctcatgcattgatcaaggtatt

SEQ ID NO: 132211 - DNA, 80 bp, synthetic construct; identical to SEQ ID NO: 41855
  misc_feature 1..80: note = Artificially Synthesized Probe
  source 1..80: mol_type = other DNA

SEQ ID NO: 132212 - DNA, 80 bp, synthetic construct
  misc_feature 1..80: note = Artificially Synthesized Probe
  source 1..80: mol_type = other DNA
tagttgcctctctttcattctcccattatgtgatagcctcgggttttccacgtccccctgcagaaatcttccttcccaag

SEQ ID NO: 132213 - DNA, 80 bp, synthetic construct
  misc_feature 1..80: note = Artificially Synthesized Probe
  source 1..80: mol_type = other DNA
gcacatcatgtaatccagctaaaatatgtattttcaaatgatagatacatttctcatatttgtgcggggtcaaatggtaa

SEQ ID NO: 132214 - DNA, 80 bp, synthetic construct
  misc_feature 1..80: note = Artificially Synthesized Probe
  source 1..80: mol_type = other DNA
tcttcacccaggatgtgcttcctcattctcgacttcacccccagctccagactcagagtatgaagagcttgagtggttgc

SEQ ID NO: 132215 - DNA, 80 bp, synthetic construct; identical to SEQ ID NO: 41856
  misc_feature 1..80: note = Artificially Synthesized Probe
  source 1..80: mol_type = other DNA

SEQ ID NO: 132216 - DNA, 80 bp, synthetic construct
  misc_feature 1..80: note = Artificially Synthesized Probe
  source 1..80: mol_type = other DNA
tggctgtgtgaatttcctgcgaatgccttaacaaagggccacgtgcttagtggctttactccatcagctccggaggtcat

SEQ ID NO: 132217 - DNA, 80 bp, synthetic construct
  misc_feature 1..80: note = Artificially Synthesized Probe
  source 1..80: mol_type = other DNA
actttcccacctttgtcttgtaaggagctgtgtgctaacactaaggccagtggataatccaggctaatctcccctcctca

SEQ ID NO: 132218 - DNA, 80 bp, synthetic construct
  misc_feature 1..80: note = Artificially Synthesized Probe
  source 1..80: mol_type = other DNA
actgtatcccccctcaggactcccaaatgtgtctttttaagctggacttcacccaacagctgaaagtacatttccaaatg

SEQ ID NO: 132219 - DNA, 80 bp, synthetic construct; identical to SEQ ID NO: 41857
  misc_feature 1..80: note = Artificially Synthesized Probe
  source 1..80: mol_type = other DNA

SEQ ID NO: 132220 - DNA, 80 bp, synthetic construct
  misc_feature 1..80: note = Artificially Synthesized Probe
  source 1..80: mol_type = other DNA
atgaggattgaggggagaatgttaaaggcaaatcatcacattcttgggcttcagaacatcttctaacaaagattaatgtt

SEQ ID NO: 132221 - DNA, 80 bp, synthetic construct
  misc_feature 1..80: note = Artificially Synthesized Probe
  source 1..80: mol_type = other DNA
ggagcaggtcattgaagatgtgttattttatcattttcatgatgagatacagcctgaaagcagatcacccatgaaaacat

SEQ ID NO: 132222 - DNA, 80 bp, synthetic construct
  misc_feature 1..80: note = Artificially Synthesized Probe
  source 1..80: mol_type = other DNA
gaaaaaagtgtactttattcacctcttagtgataagaaaactaggggcttggggacaggaagcaaaaggctcagagttgt

SEQ ID NO: 132223 - DNA, 80 bp, synthetic construct; identical to SEQ ID NO: 41858
  misc_feature 1..80: note = Artificially Synthesized Probe
  source 1..80: mol_type = other DNA

SEQ ID NO: 132224 - DNA, 80 bp, synthetic construct; identical to SEQ ID NO: 41820
  misc_feature 1..80: note = Artificially Synthesized Probe
  source 1..80: mol_type = other DNA

SEQ ID NO: 132225 - DNA, 80 bp, synthetic construct
  misc_feature 1..80: note = Artificially Synthesized Probe
  source 1..80: mol_type = other DNA
tcagtttataaggtgggtaaccaagtccctggaaggcaattaaggcgcccatttcagaagagttacagccgtgaaaatta

SEQ ID NO: 132226 - DNA, 80 bp, synthetic construct
  misc_feature 1..80: note = Artificially Synthesized Probe
  source 1..80: mol_type = other DNA
gttgtaaagctttttatttttccattttctaagagaaattcatcattggaacttgtaaagtggcccaagagtggctgtaa

SEQ ID NO: 132227 - DNA, 80 bp, synthetic construct
  misc_feature 1..80: note = Artificially Synthesized Probe
  source 1..80: mol_type = other DNA
ctggtgctatcctgcttaacaaaattagtggctcaaaaatagccacagaaagcctaagagaagaaaacaaggatttgaaa

SEQ ID NO: 132228 - DNA, 80 bp, synthetic construct; identical to SEQ ID NO: 41859
  misc_feature 1..80: note = Artificially Synthesized Probe
  source 1..80: mol_type = other DNA

SEQ ID NO: 132229 - DNA, 80 bp, synthetic construct
  misc_feature 1..80: note = Artificially Synthesized Probe
  source 1..80: mol_type = other DNA
ctgacatggacggcgactctggtctcgcagaccccaggcctgtgagggtcgctcactgcggtagaggctgcgtggagtca

SEQ ID NO: 132230 - DNA, 80 bp, synthetic construct
  misc_feature 1..80: note = Artificially Synthesized Probe
  source 1..80: mol_type = other DNA
cttcatctcgagagggaaagaactcctttggggtaagtagcaaacacattgcggtcttctggccttataaagttattttt

SEQ ID NO: 132231 - DNA, 80 bp, synthetic construct
  misc_feature 1..80: note = Artificially Synthesized Probe
  source 1..80: mol_type = other DNA
ttggatgacacaatagacaattttcacttttacctattcatataactgaaaaaaaaattctttgggagtgtttttcttcc

SEQ ID NO: 132232 - DNA, 80 bp, synthetic construct; identical to SEQ ID NO: 41860
  misc_feature 1..80: note = Artificially Synthesized Probe
  source 1..80: mol_type = other DNA

SEQ ID NO: 132233 - DNA, 80 bp, synthetic construct
  misc_feature 1..80: note = Artificially Synthesized Probe
  source 1..80: mol_type = other DNA
agggcccctggagcaggtgacacctcgccgggcaggtccctgggcctctgcacacagtcccggggcccctggagcaggtg

SEQ ID NO: 132234 - DNA, 80 bp, synthetic construct
  misc_feature 1..80: note = Artificially Synthesized Probe
  source 1..80: mol_type = other DNA
tctcggggcccctggagcaggtgacagctcaccgggcaggtccctgggcctctgcacacagtcccggggcccctggagca

SEQ ID NO: 132235 - DNA, 80 bp, synthetic construct
  misc_feature 1..80: note = Artificially Synthesized Probe
  source 1..80: mol_type = other DNA
atagtcccggagcccctggagcaggtgacaccttgccgggcaggtccctgggtctctggacacagtcttggggccatggc

SEQ ID NO: 132236 - DNA, 80 bp, synthetic construct
  misc_feature 1..80: note = Artificially Synthesized Probe
  source 1..80: mol_type = other DNA
gcctgtttatatttttaattggcaagtgcccttacgttgctggagagcggggccagctaactacagcccatgggccaacc

SEQ ID NO: 132237 - DNA, 80 bp, synthetic construct; identical to SEQ ID NO: 41861
  misc_feature 1..80: note = Artificially Synthesized Probe
  source 1..80: mol_type = other DNA

SEQ ID NO: 132238 - DNA, 80 bp, synthetic construct
  misc_feature 1..80: note = Artificially Synthesized Probe
  source 1..80: mol_type = other DNA
aggatgggctactcacccctaattcctgtccctcccctgcaaatggagaacactggaaaattactcatcgcagtcattat

SEQ ID NO: 132239 - DNA, 80 bp, synthetic construct
  misc_feature 1..80: note = Artificially Synthesized Probe
  source 1..80: mol_type = other DNA
catcttcccagaataaatcagtcactctatcacctggaacatgctagatgttcagccaatggtttgtaaattaattactt

SEQ ID NO: 132240 - DNA, 80 bp, synthetic construct
  misc_feature 1..80: note = Artificially Synthesized Probe
  source 1..80: mol_type = other DNA
taaaaagccatcaggaatgcagtagccacagcttttgctaaaacagtttttaaaaattatttttccatatctgggagatt

SEQ ID NO: 132241 - DNA, 80 bp, synthetic construct; identical to SEQ ID NO: 41862
  misc_feature 1..80: note = Artificially Synthesized Probe
  source 1..80: mol_type = other DNA

SEQ ID NO: 132242 - DNA, 80 bp, synthetic construct
  misc_feature 1..80: note = Artificially Synthesized Probe
  source 1..80: mol_type = other DNA
gcaggacaagccaaagagcaggcagcggcagggccaagaggatccaggctccccctggaccacacacggtcaccgtaagc

SEQ ID NO: 132243 - DNA, 80 bp, synthetic construct
  misc_feature 1..80: note = Artificially Synthesized Probe
  source 1..80: mol_type = other DNA
acacacatcctcatacttgaagctcgatgataagtactcagcgaaaagtatcaggccagtgccgtgactcacatctgcaa

SEQ ID NO: 132244 - DNA, 80 bp, synthetic construct
  misc_feature 1..80: note = Artificially Synthesized Probe
  source 1..80: mol_type = other DNA
cgtgactcacatctgcaatcccaacacagtatcaggccagtgccgtgactcacatctgcaatcccaacacagtatcatca

SEQ ID NO: 132245 - DNA, 80 bp, synthetic construct
  misc_feature 1..80: note = Artificially Synthesized Probe
  source 1..80: mol_type = other DNA
cccaacacagtatcaggccagtgccgtgactcacatctgcaatcccaacacagtatcaggccagtgccgtgactcacatc

SEQ ID NO: 132246 - DNA, 80 bp, synthetic construct; identical to SEQ ID NO: 41863
  misc_feature 1..80: note = Artificially Synthesized Probe
  source 1..80: mol_type = other DNA

SEQ ID NO: 132247 - DNA, 80 bp, synthetic construct
  misc_feature 1..80: note = Artificially Synthesized Probe
  source 1..80: mol_type = other DNA
ctaggagttcaagaccagcctgaccaacatggcaaaaccccatctctactaaaaatacaaaaaaaaattagctgggcgtg

SEQ ID NO: 132248 - DNA, 80 bp, synthetic construct
  misc_feature 1..80: note = Artificially Synthesized Probe
  source 1..80: mol_type = other DNA
ccgatggctcagagcacacagcccatgcttagcggctgatggcacaggatcatttgccacctgtcctgggggctgtgagt

SEQ ID NO: 132249 - DNA, 80 bp, synthetic construct
  misc_feature 1..80: note = Artificially Synthesized Probe
  source 1..80: mol_type = other DNA
gaaaaaaagaaaagcatcagtcctggatagagtttaggttgtatcaacttgcctgcaaactgtaggaaggtgagaataag

SEQ ID NO: 132250 - DNA, 80 bp, synthetic construct; identical to SEQ ID NO: 41864
  misc_feature 1..80: note = Artificially Synthesized Probe
  source 1..80: mol_type = other DNA

SEQ ID NO: 132251 - DNA, 80 bp, synthetic construct
  misc_feature 1..80: note = Artificially Synthesized Probe
  source 1..80: mol_type = other DNA
aaaatttgggaagctagcctaatgagtgaatttgttttaaaaggaaagttggcaaaccttattccagttcattaaatttc

SEQ ID NO: 132252 - DNA, 80 bp, synthetic construct
  misc_feature 1..80: note = Artificially Synthesized Probe
  source 1..80: mol_type = other DNA
aggcaacttccttcttctttctgaaatgtggtatgttcttgcctaatgtgtccctgaattccacctcttttatgaacaat

SEQ ID NO: 132253 - DNA, 80 bp, synthetic construct
  misc_feature 1..80: note = Artificially Synthesized Probe
  source 1..80: mol_type = other DNA
cccgtgactccctagaactcagtgttcagttctgaaaaaaaacttcgggttcaaactccctaagtctatggtccttgcat

SEQ ID NO: 132254 - DNA, 80 bp, synthetic construct; identical to SEQ ID NO: 41865
  misc_feature 1..80: note = Artificially Synthesized Probe
  source 1..80: mol_type = other DNA

SEQ ID NO: 132255 - DNA, 80 bp, synthetic construct
  misc_feature 1..80: note = Artificially Synthesized Probe
  source 1..80: mol_type = other DNA
tgcagcttcttggaaaatgattgttcttttgctgaggggctgtgcagcagagttctaacgatccattcgagtttccatct

SEQ ID NO: 132256 - DNA, 80 bp, synthetic construct
  misc_feature 1..80: note = Artificially Synthesized Probe
  source 1..80: mol_type = other DNA
ggatgtcagtcatctctattcagccaagaagtagttaacctaaacaatgaaaacaccaccggttccagtagagacttgag

SEQ ID NO: 132257 - DNA, 80 bp, synthetic construct
  misc_feature 1..80: note = Artificially Synthesized Probe
  source 1..80: mol_type = other DNA
tatgatcagttaaacttgaataacaatatattaatattggtcaataacaaggaatgatctctctagtaactgccgtttcc

SEQ ID NO: 132258 - DNA, 80 bp, synthetic construct; identical to SEQ ID NO: 41866
  misc_feature 1..80: note = Artificially Synthesized Probe
  source 1..80: mol_type = other DNA

SEQ ID NO: 132259 - DNA, 80 bp, synthetic construct
  misc_feature 1..80: note = Artificially Synthesized Probe
  source 1..80: mol_type = other DNA
agagagatctgtgggaatgccgtgcacccggcagatgctgtgtgcacctggcggggggttcgtgcctgagctgctgtagg

SEQ ID NO: 132260 - DNA, 80 bp, synthetic construct
  misc_feature 1..80: note = Artificially Synthesized Probe
  source 1..80: mol_type = other DNA
ctgcacgcaattcagtgggcatcaggagccttcagatgctttcatcaaaggcacaggcacaagcaggccttggtttagaa

SEQ ID NO: 132261 - DNA, 80 bp, synthetic construct
  misc_feature 1..80: note = Artificially Synthesized Probe
  source 1..80: mol_type = other DNA
acatggtgagtgaaaggcaaggaaagccacggctgggcttcttgcttggggacttgagctggtagggtggttatttcagg

SEQ ID NO: 132262 - DNA, 80 bp, synthetic construct
  misc_feature 1..80: note = Artificially Synthesized Probe
  source 1..80: mol_type = other DNA
agaccatggagagaagagagccacagtgaccgaggctgagagagagagtggccagagactgaaagcaaaaggcacgacgg

SEQ ID NO: 132263 - DNA, 80 bp, synthetic construct
  misc_feature 1..80: note = Artificially Synthesized Probe
  source 1..80: mol_type = other DNA
ctgtgcaaacttctctctaaaaccatcctaagatgtaactctgcagctaggagagaaaaccgcgccaggtgaagtgagct

SEQ ID NO: 132264 - DNA, 80 bp, synthetic construct; identical to SEQ ID NO: 41867
  misc_feature 1..80: note = Artificially Synthesized Probe
  source 1..80: mol_type = other DNA

SEQ ID NO: 132265 - DNA, 80 bp, synthetic construct
  misc_feature 1..80: note = Artificially Synthesized Probe
  source 1..80: mol_type = other DNA
ctcactcttggtggcatcgtcccacattgcactgtccccagcacgcacacattggcgtaaagccaggtcccctcttcaga

SEQ ID NO: 132266 - DNA, 80 bp, synthetic construct
  misc_feature 1..80: note = Artificially Synthesized Probe
  source 1..80: mol_type = other DNA
ctctgccccaagtgcttaaccactggttactcatcccagaacccaagagagatccagcacggaggttttcttaactttgc

SEQ ID NO: 132267 - DNA, 80 bp, synthetic construct
  misc_feature 1..80: note = Artificially Synthesized Probe
  source 1..80: mol_type = other DNA
tggacagacctcgtgcaggcgcctctcctggaccgacctcgtgcaggcgccgcgctggaccgacctcgtgcaggcgccgc

SEQ ID NO: 132268 - DNA, 80 bp, synthetic construct; identical to SEQ ID NO: 41868
  misc_feature 1..80: note = Artificially Synthesized Probe
  source 1..80: mol_type = other DNA

SEQ ID NO: 132269 - DNA, 80 bp, synthetic construct
  misc_feature 1..80: note = Artificially Synthesized Probe
  source 1..80: mol_type = other DNA
gttcagaacaaaagttattcggaatcatttgaagtggtttgggcaagtgcgaaattaaggtgagtagctctgatcccatc

SEQ ID NO: 132270 - DNA, 80 bp, synthetic construct; identical to SEQ ID NO: 41821
  misc_feature 1..80: note = Artificially Synthesized Probe
  source 1..80: mol_type = other DNA

SEQ ID NO: 132271 - DNA, 80 bp, synthetic construct
  misc_feature 1..80: note = Artificially Synthesized Probe
  source 1..80: mol_type = other DNA
agtgaatcgctgaactgtcattgcgctttgactgtgtgacattctgttccgtaggaaagcctgaggagtctcgtgtctct

SEQ ID NO: 132272 - DNA, 80 bp, synthetic construct; identical to SEQ ID NO: 41869
  misc_feature 1..80: note = Artificially Synthesized Probe
  source 1..80: mol_type = other DNA

SEQ ID NO: 132273 - DNA, 80 bp, synthetic construct
  misc_feature 1..80: note = Artificially Synthesized Probe
  source 1..80: mol_type = other DNA
gatctttggtgttgtgatataactgtaacattacctgtggcatagaataaagaattaaatggggctctcccccatttttg

SEQ ID NO: 132274 - DNA, 80 bp, synthetic construct
  misc_feature 1..80: note = Artificially Synthesized Probe
  source 1..80: mol_type = other DNA
tatataagttcttgagatacaaaatatcaaaagacagcagttaatttattccaaatttctattattccagccagaaaaat

SEQ ID NO: 132275 - DNA, 80 bp, synthetic construct
  misc_feature 1..80: note = Artificially Synthesized Probe
  source 1..80: mol_type = other DNA
gataccaagtgcgtagtaagaagtgtgtgctgctctcttagtaacaatttgtgaacccaagtatctaagacagatctcag

SEQ ID NO: 132276 - DNA, 80 bp, synthetic construct; identical to SEQ ID NO: 41870
  misc_feature 1..80: note = Artificially Synthesized Probe
  source 1..80: mol_type = other DNA

SEQ ID NO: 132277 - DNA, 80 bp, synthetic construct
  misc_feature 1..80: note = Artificially Synthesized Probe
  source 1..80: mol_type = other DNA
acccagcttttcaggctaactttggaatgctcttggccgagaggtgggatccactcaggtggttaggcgaggacattaga

SEQ ID NO: 132278 - DNA, 80 bp, synthetic construct
  misc_feature 1..80: note = Artificially Synthesized Probe
  source 1..80: mol_type = other DNA
tactatacacctattccaactatgtttctttccttaagaaatactgtttctactgtggaacagtcattgttctagatgcc

SEQ ID NO: 132279 - DNA, 80 bp, synthetic construct
  misc_feature 1..80: note = Artificially Synthesized Probe
  source 1..80: mol_type = other DNA
tacagagatgagtttgatcatttcatatcctcagaagtccatgctccctctataaagtcattgttctagatgccgggata

SEQ ID NO: 132280 - DNA, 80 bp, synthetic construct
  misc_feature 1..80: note = Artificially Synthesized Probe
  source 1..80: mol_type = other DNA
tccttctatgcagtcattgttctagatgccgggatacagagatgagttagattatttcatattctcagaagtccatgctc

SEQ ID NO: 132281 - DNA, 80 bp, synthetic construct
  misc_feature 1..80: note = Artificially Synthesized Probe
  source 1..80: mol_type = other DNA
gctactcaggaaactgaggcaggagaatcgcttgaacccaggaggcggaggttgcagtgagccgaggtcgcgccactgca

SEQ ID NO: 132282 - DNA, 80 bp, synthetic construct
  misc_feature 1..80: note = Artificially Synthesized Probe
  source 1..80: mol_type = other DNA
gttagatcatttcatattctcagaagtccatgcccgttctgtgcagtcatttttctagatgtcgggatacagagatgcgt

SEQ ID NO: 132283 - DNA, 80 bp, synthetic construct; identical to SEQ ID NO: 41871
  misc_feature 1..80: note = Artificially Synthesized Probe
  source 1..80: mol_type = other DNA

SEQ ID NO: 132284 - DNA, 80 bp, synthetic construct
  misc_feature 1..80: note = Artificially Synthesized Probe
  source 1..80: mol_type = other DNA
catatcctcagaagtctatgctccttctgtaaagtcattgttctagatgccaggatacagagatgagttcgatcatttca

SEQ ID NO: 132285 - DNA, 80 bp, synthetic construct
  misc_feature 1..80: note = Artificially Synthesized Probe
  source 1..80: mol_type = other DNA
ctcagaagtccgtgctccttccataaagtcatttttctagatgctgggatacagagatgagtttgatcatttcatatcct

SEQ ID NO: 132286 - DNA, 80 bp, synthetic construct; identical to SEQ ID NO: 41872
  misc_feature 1..80: note = Artificially Synthesized Probe
  source 1..80: mol_type = other DNA

SEQ ID NO: 132287 - DNA, 80 bp, synthetic construct
  misc_feature 1..80: note = Artificially Synthesized Probe
  source 1..80: mol_type = other DNA
acagagatgagttcgatcatttcatatcctcaaaagtccatgctccttctgtaaagtcattgttctagatgccgggatac

SEQ ID NO: 132288 - DNA, 80 bp, synthetic construct
  misc_feature 1..80: note = Artificially Synthesized Probe
  source 1..80: mol_type = other DNA
ccttctgtaaagacagacacctgaagaaggcacttcatttagggatgaatttattagatcatcaggaaacatgatggttt

SEQ ID NO: 132289 - DNA, 80 bp, synthetic construct; identical to SEQ ID NO: 41873
  misc_feature 1..80: note = Artificially Synthesized Probe
  source 1..80: mol_type = other DNA

SEQ ID NO: 132290 - DNA, 80 bp, synthetic construct
  misc_feature 1..80: note = Artificially Synthesized Probe
  source 1..80: mol_type = other DNA
gtttacgctcattccctgagaccagctcccatagagcaatggaaaggagaccagggcaggctgcacacagaaggggccac

SEQ ID NO: 132291 - DNA, 80 bp, synthetic construct
  misc_feature 1..80: note = Artificially Synthesized Probe
  source 1..80: mol_type = other DNA
gcctgcggcccaggctgcatcagcaaccaggttcacctgcagcagccagaccctgtgagggaggcaggcattgtgtctgg

SEQ ID NO: 132292 - DNA, 80 bp, synthetic construct
  misc_feature 1..80: note = Artificially Synthesized Probe
  source 1..80: mol_type = other DNA
cgtgagagtgggagcaactgtctccctttctccgcttcataattttataatttcggcatggacagaagaagcgtctgcat

SEQ ID NO: 132293 - DNA, 80 bp, synthetic construct
  misc_feature 1..80: note = Artificially Synthesized Probe
  source 1..80: mol_type = other DNA
aacaggcggtagatcaagccaggctgatcacgagtcaccttggaattcagaagggagccgtggaatgcagaggggttcac

SEQ ID NO: 132294 - DNA, 80 bp, synthetic construct; identical to SEQ ID NO: 41874
  misc_feature 1..80: note = Artificially Synthesized Probe
  source 1..80: mol_type = other DNA

SEQ ID NO: 132295 - DNA, 80 bp, synthetic construct
  misc_feature 1..80: note = Artificially Synthesized Probe
  source 1..80: mol_type = other DNA
atacatttgatgcatggctctgtgtgggctcttcacattaagaatgcgaaaccagctagagtcaaagtttccctaatttg

SEQ ID NO: 132296 - DNA, 80 bp, synthetic construct
  misc_feature 1..80: note = Artificially Synthesized Probe
  source 1..80: mol_type = other DNA
aaatagcagcagatgaacagagcagactgtggcttgtggggtggttgaagcacctttccaggctctcctgaactgagctc

SEQ ID NO: 132297 - DNA, 80 bp, synthetic construct
  misc_feature 1..80: note = Artificially Synthesized Probe
  source 1..80: mol_type = other DNA
acgtcactgtcaagagctgagctcagtttcccagacccctgctttcctgacgtaccccttttgggcccagattgtgttgt

SEQ ID NO: 132298 - DNA, 80 bp, synthetic construct; identical to SEQ ID NO: 41875
  misc_feature 1..80: note = Artificially Synthesized Probe
  source 1..80: mol_type = other DNA

SEQ ID NO: 132299 - DNA, 80 bp, synthetic construct
  misc_feature 1..80: note = Artificially Synthesized Probe
  source 1..80: mol_type = other DNA
aaagttcatgactatatagtaccttttacaaacatgtcagccgatataaaacacgtgttttatattttaagttaaatgtc

SEQ ID NO: 132300 - DNA, 80 bp, synthetic construct
  misc_feature 1..80: note = Artificially Synthesized Probe
  source 1..80: mol_type = other DNA
cttactccgggacctgaccactccccattcaacttctgccatggttgtcggcttcatgaggccctcaccagaagccaggc

SEQ ID NO: 132301 - DNA, 80 bp, synthetic construct
  misc_feature 1..80: note = Artificially Synthesized Probe
  source 1..80: mol_type = other DNA
tgaaattgtggcagtggctttggaactgtgtaatggcaggggttggaagagtttggagggctgagaagaagagagaaaga

SEQ ID NO: 132302 - DNA, 80 bp, synthetic construct; identical to SEQ ID NO: 41876
  misc_feature 1..80: note = Artificially Synthesized Probe
  source 1..80: mol_type = other DNA

SEQ ID NO: 132303 - DNA, 80 bp, synthetic construct
  misc_feature 1..80: note = Artificially Synthesized Probe
  source 1..80: mol_type = other DNA
tagaaaacaatatcctgttttcagggaaagaattaaagggggttgttggagtaaccatttactagagagattagcatgac

SEQ ID NO: 132304 - DNA, 80 bp, synthetic construct
  misc_feature 1..80: note = Artificially Synthesized Probe
  source 1..80: mol_type = other DNA
agggcctcgaagaaagcatggtataagtcctcaggacagcccttactgtaacaaggccagagatctaggaggaaagaatg

SEQ ID NO: 132305 - DNA, 80 bp, synthetic construct
  misc_feature 1..80: note = Artificially Synthesized Probe
  source 1..80: mol_type = other DNA
gactaaacacaagggttttccaggctccctcctcctggcaggacacggctgttcacacatgtcataatattatttaatat

SEQ ID NO: 132306 - DNA, 80 bp, synthetic construct
  misc_feature 1..80: note = Artificially Synthesized Probe
  source 1..80: mol_type = other DNA
tgcaaaaatgttaatgaggatttatttgaaaagaacatcacaccagaaaacatgagccctgtaatttatagagaaatctt

SEQ ID NO: 132307 - DNA, 80 bp, synthetic construct
  misc_feature 1..80: note = Artificially Synthesized Probe
  source 1..80: mol_type = other DNA
agcttgaacagtccaagccgtaagtgtctatagctttcacacggtgttcagccttcaggctcacagaatgcaggagttaa

SEQ ID NO: 132308 - DNA, 80 bp, synthetic construct
  misc_feature 1..80: note = Artificially Synthesized Probe
  source 1..80: mol_type = other DNA
gacactgcttaatggagctgtgggaagggggccatcgccctgcagaccccagaattgtagatccaccagcagcttgcact

SEQ ID NO: 132309 - DNA, 80 bp, synthetic construct; identical to SEQ ID NO: 41877
  misc_feature 1..80: note = Artificially Synthesized Probe
  source 1..80: mol_type = other DNA

SEQ ID NO: 132310 - DNA, 80 bp, synthetic construct
  misc_feature 1..80: note = Artificially Synthesized Probe
  source 1..80: mol_type = other DNA
ggggactgttgcgaatgcgcaattgtattttggaatgtgagaaaggtgtgggatttgggggaacgggtagaataataagg

SEQ ID NO: 132311 - DNA, 80 bp, synthetic construct
  misc_feature 1..80: note = Artificially Synthesized Probe
  source 1..80: mol_type = other DNA
cctcttggtgatgagtcagttcttgcccaggaagtccatgtgagacctggttgttttacgttgtgtggcacctgcccgct

SEQ ID NO: 132312 - DNA, 80 bp, synthetic construct
  misc_feature 1..80: note = Artificially Synthesized Probe
  source 1..80: mol_type = other DNA
gaattacccattctcaggtatttctttacagcaatgcaaaaaataggttaacaagtaagctttttaaaaatttattttta

SEQ ID NO: 132313 - DNA, 80 bp, synthetic construct; identical to SEQ ID NO: 41878
  misc_feature 1..80: note = Artificially Synthesized Probe
  source 1..80: mol_type = other DNA

SEQ ID NO: 132314 - DNA, 80 bp, synthetic construct
  misc_feature 1..80: note = Artificially Synthesized Probe
  source 1..80: mol_type = other DNA
tcctgccagctctgtagttctgtctggcgtctgacactcgcacacctgccaacacctccccaactctactctcttgctcc

SEQ ID NO: 132315 - DNA, 80 bp, synthetic construct
  misc_feature 1..80: note = Artificially Synthesized Probe
  source 1..80: mol_type = other DNA
tttgaggcctggccctgccagctttgctgccaaaggtgattgactcaacattcagacaagaaggatggtgaacttgatgt

SEQ ID NO: 132316 - DNA, 80 bp, synthetic construct; identical to SEQ ID NO: 41879
  misc_feature 1..80: note = Artificially Synthesized Probe
  source 1..80: mol_type = other DNA

SEQ ID NO: 132317 - DNA, 80 bp, synthetic construct; identical to SEQ ID NO: 41822
  misc_feature 1..80: note = Artificially Synthesized Probe
  source 1..80: mol_type = other DNA

SEQ ID NO: 132318 - DNA, 80 bp, synthetic construct
  misc_feature 1..80: note = Artificially Synthesized Probe
  source 1..80: mol_type = other DNA
gaggggaggcctgcaggtgaggagaggcctgcaggtggggtgaggcctgcaggtggggtgaggcctgcaggtgaggtgag

SEQ ID NO: 132319 - DNA, 80 bp, synthetic construct
  misc_feature 1..80: note = Artificially Synthesized Probe
  source 1..80: mol_type = other DNA
gcattcagatgaggcaggcttcacatatttcttattctatgagggtgtgtttagctctcactgtgaacagctttgctgcc

SEQ ID NO: 132320 - DNA, 80 bp, synthetic construct
  misc_feature 1..80: note = Artificially Synthesized Probe
  source 1..80: mol_type = other DNA
atatcttggtttggatgtgatggcctgtccgcaattgttatgagaatccaattcattctgatttggcagttttgtaaagg

SEQ ID NO: 132321 - DNA, 80 bp, synthetic construct
  misc_feature 1..80: note = Artificially Synthesized Probe
  source 1..80: mol_type = other DNA
gcagtgcctgtcacattgtctgggacacagtagttactcaataaatgtctgcttaattaattagtaattaagtaccaaag

SEQ ID NO: 132322 - DNA, 80 bp, synthetic construct; identical to SEQ ID NO: 41880
  misc_feature 1..80: note = Artificially Synthesized Probe
  source 1..80: mol_type = other DNA

SEQ ID NO: 132323 - DNA, 80 bp, synthetic construct
  misc_feature 1..80: note = Artificially Synthesized Probe
  source 1..80: mol_type = other DNA
ttatttttgttactctggaaaatagccatttctctcctatccaaatcaaatttgagaagtagctcaataagctaaacatc

SEQ ID NO: 132324 - DNA, 80 bp, synthetic construct
  misc_feature 1..80: note = Artificially Synthesized Probe
  source 1..80: mol_type = other DNA
agcagaactacccaggacatttgagagccaatttactcatctctaaaatgaggacagtggcactgctcactccaatggct

SEQ ID NO: 132325 - DNA, 80 bp, synthetic construct
  misc_feature 1..80: note = Artificially Synthesized Probe
  source 1..80: mol_type = other DNA
atttatcaagaattttttctctgcagcgccatgagctacttggcctctgagttcttccttctaactagctatagatcaat

SEQ ID NO: 132326 - DNA, 80 bp, synthetic construct; identical to SEQ ID NO: 41881
  misc_feature 1..80: note = Artificially Synthesized Probe
  source 1..80: mol_type = other DNA

SEQ ID NO: 132327 - DNA, 80 bp, synthetic construct
  misc_feature 1..80: note = Artificially Synthesized Probe
  source 1..80: mol_type = other DNA
gacatcgatgtttaggagaataggctgaggtatttggtccaggctataatgtagaacttaagaactccataatttagaat

SEQ ID NO: 132328 - DNA, 80 bp, synthetic construct
  misc_feature 1..80: note = Artificially Synthesized Probe
  source 1..80: mol_type = other DNA
tccttctaggctgctccttcatgttggtcttgtgtgttacatgactatgacctcatagttcttttcttctttttttttgt

SEQ ID NO: 132329 - DNA, 80 bp, synthetic construct
  misc_feature 1..80: note = Artificially Synthesized Probe
  source 1..80: mol_type = other DNA
ttgggaggccgaggtgggcggatcatgaggtcaggagatcaagaccatcctggctaatacggtgaaaccccgtctctact

SEQ ID NO: 132330 - DNA, 80 bp, synthetic construct
  misc_feature 1..80: note = Artificially Synthesized Probe
  source 1..80: mol_type = other DNA
ctacaggcactcaccaccacacccggctaattttttgtatttttagtagagacggggtttcaccatgttagccaggatgg

SEQ ID NO: 132331 - DNA, 80 bp, synthetic construct; identical to SEQ ID NO: 41882
  misc_feature 1..80: note = Artificially Synthesized Probe
  source 1..80: mol_type = other DNA

SEQ ID NO: 132332 - DNA, 80 bp, synthetic construct
  misc_feature 1..80: note = Artificially Synthesized Probe
  source 1..80: mol_type = other DNA
aaagatttatataaaccatattggagaagtaatcgatgattacctctactaatggacaataaagccactctcaccttgat

SEQ ID NO: 132333 - DNA, 80 bp, synthetic construct
  misc_feature 1..80: note = Artificially Synthesized Probe
  source 1..80: mol_type = other DNA
tcatcaaggcaagattttttctacattagggttcgggataaattctactcctcactgtcttctaaagcactggggccatt

SEQ ID NO: 132334 - DNA, 80 bp, synthetic construct
  misc_feature 1..80: note = Artificially Synthesized Probe
  source 1..80: mol_type = other DNA
tttaaaacccccacatttctagcaataaggaagctcaagggaattaaatgagtgagcacttgatgtaaagggagaaggca

SEQ ID NO: 132335 - DNA, 80 bp, synthetic construct; identical to SEQ ID NO: 41883
  misc_feature 1..80: note = Artificially Synthesized Probe
  source 1..80: mol_type = other DNA

SEQ ID NO: 132336 - DNA, 80 bp, synthetic construct
  misc_feature 1..80: note = Artificially Synthesized Probe
  source 1..80: mol_type = other DNA
tttgtggattttcttaatcttctcgtgaaagttggatctgaacatgactagatgccatcatgaaggaacttctaccacca

SEQ ID NO: 132337 - DNA, 80 bp, synthetic construct
  misc_feature 1..80: note = Artificially Synthesized Probe
  source 1..80: mol_type = other DNA
acaacgtcccatccacataggtgcttacaggtgactcttaacttcctaaccccacaaattccaccgcccttcacctaaga

SEQ ID NO: 132338 - DNA, 80 bp, synthetic construct
  misc_feature 1..80: note = Artificially Synthesized Probe
  source 1..80: mol_type = other DNA
tggtggtcccctcactggttctcctaatttaactcttgctttccccattcacgctccctgttatggccaacaccatctca

SEQ ID NO: 132339 - DNA, 80 bp, synthetic construct; identical to SEQ ID NO: 41884
  misc_feature 1..80: note = Artificially Synthesized Probe
  source 1..80: mol_type = other DNA

SEQ ID NO: 132340 - DNA, 80 bp, synthetic construct
  misc_feature 1..80: note = Artificially Synthesized Probe
  source 1..80: mol_type = other DNA
ctcaaaaaaaaaaaaaaaaaaagtctattttataatttccttaagatagccatataatgttagagtaaaacaaatggtca

SEQ ID NO: 132341 - DNA, 80 bp, synthetic construct
  misc_feature 1..80: note = Artificially Synthesized Probe
  source 1..80: mol_type = other DNA
tcacaatagtgtggcgccaggatggctgcaggcttgatgttcaccgatgcaggcagcaaaggtgcttagcatggaagaac

SEQ ID NO: 132342 - DNA, 80 bp, synthetic construct
  misc_feature 1..80: note = Artificially Synthesized Probe
  source 1..80: mol_type = other DNA
ggggtcctgggtatatgatgatggttaagaacaacagctttgcaactggacagccctggatttgaaacctggaatcacca

SEQ ID NO: 132343 - DNA, 80 bp, synthetic construct; identical to SEQ ID NO: 41885
  misc_feature 1..80: note = Artificially Synthesized Probe
  source 1..80: mol_type = other DNA

SEQ ID NO: 132344 - DNA, 80 bp, synthetic construct
  misc_feature 1..80: note = Artificially Synthesized Probe
  source 1..80: mol_type = other DNA
tgcctgggagtatggggacactgagatggctggtgggatgcacggctggagggaccaggcctggatggaggaggggatgg

SEQ ID NO: 132345 - DNA, 80 bp, synthetic construct
  misc_feature 1..80: note = Artificially Synthesized Probe
  source 1..80: mol_type = other DNA
acagtggcgttggagatgtgggggcggggctgctctctgaatgggtttcatacttctgattttattaaagaaatataaga

SEQ ID NO: 132346 - DNA, 80 bp, synthetic construct
  misc_feature 1..80: note = Artificially Synthesized Probe
  source 1..80: mol_type = other DNA
ttgggttctaggttttccttgagacctcctaacttttttccatttccttttctgcctgctgccttctgtctgtcagccat

SEQ ID NO: 132347 - DNA, 80 bp, synthetic construct; identical to SEQ ID NO: 41886
  misc_feature 1..80: note = Artificially Synthesized Probe
  source 1..80: mol_type = other DNA

SEQ ID NO: 132348 - DNA, 80 bp, synthetic construct
  misc_feature 1..80: note = Artificially Synthesized Probe
  source 1..80: mol_type = other DNA
ttttttgcaaatgcctggattaaagaaaaatgaaatataagcccgaccattccgaaactgccaactaacctgtttaacta

SEQ ID NO: 132349 - DNA, 80 bp, synthetic construct
  misc_feature 1..80: note = Artificially Synthesized Probe
  source 1..80: mol_type = other DNA
actcaaaaaaaactctttaaaaaatgtattgtgcctaagtttacattttaacaacctcaagaccagggcctcagccggca

SEQ ID NO: 132350 - DNA, 80 bp, synthetic construct
  misc_feature 1..80: note = Artificially Synthesized Probe
  source 1..80: mol_type = other DNA
gagctggtttctctccttctgtggtaacagctacagttttcattaagaattcacagcatctggatctaaaatctcctacg

SEQ ID NO: 132351 - DNA, 80 bp, synthetic construct; identical to SEQ ID NO: 41887
  misc_feature 1..80: note = Artificially Synthesized Probe
  source 1..80: mol_type = other DNA

SEQ ID NO: 132352 - DNA, 80 bp, synthetic construct
  misc_feature 1..80: note = Artificially Synthesized Probe
  source 1..80: mol_type = other DNA
tgacacaatcacagcccccagctgagttagaacaggctcattcaatgggctagatgtttccataaggataggtctcatct

SEQ ID NO: 132353 - DNA, 80 bp, synthetic construct
  misc_feature 1..80: note = Artificially Synthesized Probe
  source 1..80: mol_type = other DNA
cccctcaccatgttgctgagtaatgtcaccagacatggagaccctctgatgccccactgtgagttcctcgccatcctccc

SEQ ID NO: 132354 - DNA, 80 bp, synthetic construct
  misc_feature 1..80: note = Artificially Synthesized Probe
  source 1..80: mol_type = other DNA
cttccccacacccactaaattgctaagttcccccccagcggtctcctaagccgcttcggcgtccctctcagtcaccagca

SEQ ID NO: 132355 - DNA, 80 bp, synthetic construct
  misc_feature 1..80: note = Artificially Synthesized Probe
  source 1..80: mol_type = other DNA
atttcctgcattccaaagcgacctttgggtgttggctgcaatgacatctttaagacaaatgttagttggaattaactttt

SEQ ID NO: 132356 - DNA, 80 bp, synthetic construct; identical to SEQ ID NO: 41888
  misc_feature 1..80: note = Artificially Synthesized Probe
  source 1..80: mol_type = other DNA

SEQ ID NO: 132357 - DNA, 80 bp, synthetic construct
  misc_feature 1..80: note = Artificially Synthesized Probe
  source 1..80: mol_type = other DNA
gtacttcttgtttgtatgaagtggtcagtgccacaggagctaccactttagaagggaatggagcaggctgcttcttgttt

SEQ ID NO: 132358 - DNA, 80 bp, synthetic construct
  misc_feature 1..80: note = Artificially Synthesized Probe
  source 1..80: mol_type = other DNA
tactacgttggaagcaagtagggcagggtccttcttgtttccatggtgtagtcagtgccgcaggaggcactacgttggaa

SEQ ID NO: 132359 - DNA, 80 bp, synthetic construct
  misc_feature 1..80: note = Artificially Synthesized Probe
  source 1..80: mol_type = other DNA
tgtatgatctagtcattgctgcaggagctaccagttgtaaatgaatggagcaggctccttcctgtttgcatggtgtagtg

SEQ ID NO: 132360 - DNA, 80 bp, synthetic construct
  misc_feature 1..80: note = Artificially Synthesized Probe
  source 1..80: mol_type = other DNA
agagaatggggcttgagtttgttttgctttacactttgtcataaaggaaattatcagttctctgcataagcccctatttt

SEQ ID NO: 132361 - DNA, 80 bp, synthetic construct; identical to SEQ ID NO: 41889
  misc_feature 1..80: note = Artificially Synthesized Probe
  source 1..80: mol_type = other DNA

SEQ ID NO: 132362 - DNA, 80 bp, synthetic construct
  misc_feature 1..80: note = Artificially Synthesized Probe
  source 1..80: mol_type = other DNA
attggctgagaacagaatccccagggcctgaggatgtcctgcagaaatttgggttttagtgtgtagcttggcatcagcct

SEQ ID NO: 132363 - DNA, 80 bp, synthetic construct
  misc_feature 1..80: note = Artificially Synthesized Probe
  source 1..80: mol_type = other DNA
ttctcgtgatagtgaataagtctcacgagatttgacagctttataaggggaagttcccctgcacaagctctctttctgcc

SEQ ID NO: 132364 - DNA, 80 bp, synthetic construct; identical to SEQ ID NO: 41823
  misc_feature 1..80: note = Artificially Synthesized Probe
  source 1..80: mol_type = other DNA

SEQ ID NO: 132365 - DNA, 80 bp, synthetic construct; identical to SEQ ID NO: 41890
  misc_feature 1..80: note = Artificially Synthesized Probe
  source 1..80: mol_type = other DNA

SEQ ID NO: 132366 - DNA, 80 bp, synthetic construct
  misc_feature 1..80: note = Artificially Synthesized Probe
  source 1..80: mol_type = other DNA
gtggtctaaatcaatggactatcttaccacatgcaatgttagacagtgtattacatatgattattcataagcagaaatac

SEQ ID NO: 132367 - DNA, 80 bp, synthetic construct
  misc_feature 1..80: note = Artificially Synthesized Probe
  source 1..80: mol_type = other DNA
tggaaaggacattgtattttgaaatagaagacgaaattccagccaccactttgtcagttacaagctgcttagacttcatg

SEQ ID NO: 132368 - DNA, 80 bp, synthetic construct
  misc_feature 1..80: note = Artificially Synthesized Probe
  source 1..80: mol_type = other DNA
cctttgaagcccctttcttcaaagagtctgagtcttgattcttgaagaggtgtgatttttctttgaaaaattgcattatt

SEQ ID NO: 132369 - DNA, 80 bp, synthetic construct; identical to SEQ ID NO: 41891
  misc_feature 1..80: note = Artificially Synthesized Probe
  source 1..80: mol_type = other DNA

SEQ ID NO: 132370 - DNA, 80 bp, synthetic construct
  misc_feature 1..80: note = Artificially Synthesized Probe
  source 1..80: mol_type = other DNA
tgttggaagggaatggggcaggctccttcttgtttgtatgatccagtcattgttgcaggaggcaccgtgttggaagggaa

SEQ ID NO: 132371 - DNA, 80 bp, synthetic construct; identical to SEQ ID NO: 41892
  misc_feature 1..80: note = Artificially Synthesized Probe
  source 1..80: mol_type = other DNA

SEQ ID NO: 132372 - DNA, 80 bp, synthetic construct
  misc_feature 1..80: note = Artificially Synthesized Probe
  source 1..80: mol_type = other DNA
tggggcaggctccttcttgtttatatgatccagttattgctgcaggaggcaccatgttggaagggaatggggcaggcgcc

SEQ ID NO: 132373 - DNA, 80 bp, synthetic construct
  misc_feature 1..80: note = Artificially Synthesized Probe
  source 1..80: mol_type = other DNA
ctgcgggaggcaccatgttagaagggaatggggcaggctccttcttgtttgtatgatccagtcactgctgcgggaggcac

SEQ ID NO: 132374 - DNA, 80 bp, synthetic construct
  misc_feature 1..80: note = Artificially Synthesized Probe
  source 1..80: mol_type = other DNA
cgttcttgtttgtatgatccaatcactgctgcaggaggcaccgtgttggaagggaatggagctggctccttcttgtttgt

SEQ ID NO: 132375 - DNA, 80 bp, synthetic construct
  misc_feature 1..80: note = Artificially Synthesized Probe
  source 1..80: mol_type = other DNA
agacttcgtgactaaaacaccaaaagcaatggcaattaaagccagaattgacaaatgggatctgattaaagagcttctgc

SEQ ID NO: 132376 - DNA, 80 bp, synthetic construct; identical to SEQ ID NO: 41893
  misc_feature 1..80: note = Artificially Synthesized Probe
  source 1..80: mol_type = other DNA

SEQ ID NO: 132377 - DNA, 80 bp, synthetic construct
  misc_feature 1..80: note = Artificially Synthesized Probe
  source 1..80: mol_type = other DNA
atgatccagtcattgctgcaggaggtaccctgttggaaggtaatgggcaggctccttcttgtttgtatgatccagtcatt

SEQ ID NO: 132378 - DNA, 80 bp, synthetic construct
  misc_feature 1..80: note = Artificially Synthesized Probe
  source 1..80: mol_type = other DNA
aatggagctggctccttcttgtttgtatgatgcagtcattgctgcaggaggtactgtgttggaagggaatggggcaggct

SEQ ID NO: 132379 - DNA, 80 bp, synthetic construct
  misc_feature 1..80: note = Artificially Synthesized Probe
  source 1..80: mol_type = other DNA
gctgcaggaggcaccatgttggaagggaatgggcaggctccttcctgtttgtatgatccagtcattgctgcaggaggcac

SEQ ID NO: 132380 - DNA, 80 bp, synthetic construct
  misc_feature 1..80: note = Artificially Synthesized Probe
  source 1..80: mol_type = other DNA
tcttgtttgtatgatccagtcattgctgcaggaggtaccatgttggaagggaatggggcaggctccttcttgtttgtatg

SEQ ID NO: 132381 - DNA, 80 bp, synthetic construct
  misc_feature 1..80: note = Artificially Synthesized Probe
  source 1..80: mol_type = other DNA
tggaagggaatggggtaggctccttcttgtttgtatgaaccactcattgctgcaggaggtaccatgttggaagggaatgg

SEQ ID NO: 132382 - DNA, 80 bp, synthetic construct
  misc_feature 1..80: note = Artificially Synthesized Probe
  source 1..80: mol_type = other DNA
ttggatatggtaccatgttggataagtggcacagtggatagaatccatcgccatagtgaccatgagtggattcctgctat

SEQ ID NO: 132383 - DNA, 80 bp, synthetic construct; identical to SEQ ID NO: 41894
  misc_feature 1..80: note = Artificially Synthesized Probe
  source 1..80: mol_type = other DNA

SEQ ID NO: 132384 - DNA, 80 bp, synthetic construct
  misc_feature 1..80: note = Artificially Synthesized Probe
  source 1..80: mol_type = other DNA
aagtgtaagagccccacagccctcaccaatccccgtcactgtgatccctttcattttggcccttcttgaggggagggtgg

SEQ ID NO: 132385 - DNA, 80 bp, synthetic construct
  misc_feature 1..80: note = Artificially Synthesized Probe
  source 1..80: mol_type = other DNA
ttttctaaatatgtcttcagtgagaaatatgttttacaaatgtcttctcccagctgagattggccttttcactctccatg

SEQ ID NO: 132386 - DNA, 80 bp, synthetic construct
  misc_feature 1..80: note = Artificially Synthesized Probe
  source 1..80: mol_type = other DNA
aacagacacttctcaaaagaagacattcatgcagccaaaggacatatgaaaagaaagccatagacttttaaacaatcaga

SEQ ID NO: 132387 - DNA, 80 bp, synthetic construct; identical to SEQ ID NO: 41895
  misc_feature 1..80: note = Artificially Synthesized Probe
  source 1..80: mol_type = other DNA

SEQ ID NO: 132388 - DNA, 80 bp, synthetic construct
  misc_feature 1..80: note = Artificially Synthesized Probe
  source 1..80: mol_type = other DNA
aaattctaagtcttgcgatcatctgaattgacccctcctgttggcaagggtgttccaaagctaacctgaaaaactaatct

SEQ ID NO: 132389 - DNA, 80 bp, synthetic construct
  misc_feature 1..80: note = Artificially Synthesized Probe
  source 1..80: mol_type = other DNA
gtctccacaacctgtgtcttaacccagacagtcttaagtccttagacgataactttactctttcaaaaaattgccactca

SEQ ID NO: 132390 - DNA, 80 bp, synthetic construct
  misc_feature 1..80: note = Artificially Synthesized Probe
  source 1..80: mol_type = other DNA
tctcaggatctcctgagggctgaatcattggccattggtcactcatatctggctcagaataaatctcttcaactatttta

SEQ ID NO: 132391 - DNA, 80 bp, synthetic construct
  misc_feature 1..80: note = Artificially Synthesized Probe
  source 1..80: mol_type = other DNA
aagcatgtgtatatgatatttattcagaaccatcctttacccagtgaactgcacccatgcctatatcatgaatcgagtag

SEQ ID NO: 132392 - DNA, 80 bp, synthetic construct; identical to SEQ ID NO: 41896
  misc_feature 1..80: note = Artificially Synthesized Probe
  source 1..80: mol_type = other DNA

SEQ ID NO: 132393 - DNA, 80 bp, synthetic construct
  misc_feature 1..80: note = Artificially Synthesized Probe
  source 1..80: mol_type = other DNA
caggagactgcatgttgtgccctgccggcatccacacatttgtgtagtacccactcccagacaaggacactcatagactt

SEQ ID NO: 132394 - DNA, 80 bp, synthetic construct
  misc_feature 1..80: note = Artificially Synthesized Probe
  source 1..80: mol_type = other DNA
tcggctgctcccttccccgcctgagtcacttccgtgactctcttcatcctcagagccatccccttcctcatctgtaatgt

SEQ ID NO: 132395 - DNA, 80 bp, synthetic construct; identical to SEQ ID NO: 41897
  misc_feature 1..80: note = Artificially Synthesized Probe
  source 1..80: mol_type = other DNA

SEQ ID NO: 132396 - DNA, 80 bp, synthetic construct
  misc_feature 1..80: note = Artificially Synthesized Probe
  source 1..80: mol_type = other DNA
ctcgatgatgaatggagccaggccacaggtgaaatttccatccaggcgggacagactcaagccgggactgggttcccctg

SEQ ID NO: 132397 - DNA, 80 bp, synthetic construct
  misc_feature 1..80: note = Artificially Synthesized Probe
  source 1..80: mol_type = other DNA
ccaatacagccttaaagcccatgaacaattctgggggagacgatcaggtctgaaaggaaaattccatatgggtatttaag

SEQ ID NO: 132398 - DNA, 80 bp, synthetic construct
  misc_feature 1..80: note = Artificially Synthesized Probe
  source 1..80: mol_type = other DNA
tatcggacaacttatttgataaatcctttgctttatgtagaaaatgtcagtcttagctatactaataaaattttacagtg

SEQ ID NO: 132399 - DNA, 80 bp, synthetic construct
  misc_feature 1..80: note = Artificially Synthesized Probe
  source 1..80: mol_type = other DNA
tctgatgtctgacagctattttctttttttctatgtatttgccttgaattcacattcgtagtcaccttttttccctctca

SEQ ID NO: 132400 - DNA, 80 bp, synthetic construct
  misc_feature 1..80: note = Artificially Synthesized Probe
  source 1..80: mol_type = other DNA
caaatgtgtgtctattaagagtttaagttgcacttgtaaatccaccaatggcactaagatatcatttagcaatattgaca

SEQ ID NO: 132401 - DNA, 80 bp, synthetic construct; identical to SEQ ID NO: 41898
  misc_feature 1..80: note = Artificially Synthesized Probe
  source 1..80: mol_type = other DNA

SEQ ID NO: 132402 - DNA, 80 bp, synthetic construct
  misc_feature 1..80: note = Artificially Synthesized Probe
  source 1..80: mol_type = other DNA
cgcacacctggcccagcaggatgagggcatcccgtgtcccgctgctgccccgctgagaaagaggtgccgttacaggagtg

SEQ ID NO: 132403 - DNA, 80 bp, synthetic construct
  misc_feature 1..80: note = Artificially Synthesized Probe
  source 1..80: mol_type = other DNA
agtccacagctttatgctcaagcgctcttcaagatggaagtttagaatttcttctttttggaattcagaaatcacaaagt

SEQ ID NO: 132404 - DNA, 80 bp, synthetic construct; identical to SEQ ID NO: 41899
  misc_feature 1..80: note = Artificially Synthesized Probe
  source 1..80: mol_type = other DNA

SEQ ID NO: 132405 - DNA, 80 bp, synthetic construct
  misc_feature 1..80: note = Artificially Synthesized Probe
  source 1..80: mol_type = other DNA
aaaaaatcactgcttaagcagttaaattaacattatttttaattgagtaatctaacacctccctatgagccatactttat

SEQ ID NO: 132406 - DNA, 80 bp, synthetic construct
  misc_feature 1..80: note = Artificially Synthesized Probe
  source 1..80: mol_type = other DNA
gtattaataacagaattattctccccttatggtccctgcagacatagagaagtaaccatgtccccaagcctcctgccgct

SEQ ID NO: 132407 - DNA, 80 bp, synthetic construct
  misc_feature 1..80: note = Artificially Synthesized Probe
  source 1..80: mol_type = other DNA
cggatctttccttcacaaatgttgcccaggttacaaacagttcttagtagaaccttagtcctttcattcctgtgcagaac

SEQ ID NO: 132408 - DNA, 80 bp, synthetic construct; identical to SEQ ID NO: 41900
  misc_feature 1..80: note = Artificially Synthesized Probe
  source 1..80: mol_type = other DNA

SEQ ID NO: 132409 - DNA, 80 bp, synthetic construct; identical to SEQ ID NO: 41824
  misc_feature 1..80: note = Artificially Synthesized Probe
  source 1..80: mol_type = other DNA

SEQ ID NO: 132410 - DNA, 80 bp, synthetic construct
  misc_feature 1..80: note = Artificially Synthesized Probe
  source 1..80: mol_type = other DNA
tggaacccggatatcatgacaatgttagacccaaaacaatctgtatttatttttaacaaaaggaacctacttttttccac

SEQ ID NO: 132411 - DNA, 80 bp, synthetic construct
  misc_feature 1..80: note = Artificially Synthesized Probe
  source 1..80: mol_type = other DNA
tattttatacttgagaaatcctttatttttaataagttttacatatttctttacctatcctctacagatatgtatgctca

SEQ ID NO: 132412 - DNA, 80 bp, synthetic construct
  misc_feature 1..80: note = Artificially Synthesized Probe
  source 1..80: mol_type = other DNA
aaatttcatatttagaaaatgttcagtgagcacaagggcctcagtgttcattgttttcttcaagatttagttatttttta

SEQ ID NO: 132413 - DNA, 80 bp, synthetic construct; identical to SEQ ID NO: 41901
  misc_feature 1..80: note = Artificially Synthesized Probe
  source 1..80: mol_type = other DNA

SEQ ID NO: 132414 - DNA, 80 bp, synthetic construct
  misc_feature 1..80: note = Artificially Synthesized Probe
  source 1..80: mol_type = other DNA
ttttgccataggaatgccatctggccctcaaaactccttctgagatatagaagaaaatgaacatgtaatgagctatcatt

SEQ ID NO: 132415 - DNA, 80 bp, synthetic construct
  misc_feature 1..80: note = Artificially Synthesized Probe
  source 1..80: mol_type = other DNA
tatttcctcagtttctagaagatgctctgagacatatcaagtgactgttaattgtgcctacaccccttcaacttaggggc

SEQ ID NO: 132416 - DNA, 80 bp, synthetic construct
  misc_feature 1..80: note = Artificially Synthesized Probe
  source 1..80: mol_type = other DNA
cctattggctgaagccattgtcatcgccaaatcaaacagccaaatacaactgactctctctctctctcaggagagactta

SEQ ID NO: 132417 - DNA, 80 bp, synthetic construct; identical to SEQ ID NO: 41902
  misc_feature 1..80: note = Artificially Synthesized Probe
  source 1..80: mol_type = other DNA

SEQ ID NO: 132418 - DNA, 80 bp, synthetic construct
  misc_feature 1..80: note = Artificially Synthesized Probe
  source 1..80: mol_type = other DNA
ccttgaagccagtcatgacctgggcctccaggaggcctttcgggtcttctggggagctgtgccccttgggcctccggaga

SEQ ID NO: 132419 - DNA, 80 bp, synthetic construct
  misc_feature 1..80: note = Artificially Synthesized Probe
  source 1..80: mol_type = other DNA
gcactggcagagaagagatcacctgcagtctatcttttgaccgaaagaagctccctgatgcattaaaccctttaaaatgc

SEQ ID NO: 132420 - DNA, 80 bp, synthetic construct
  misc_feature 1..80: note = Artificially Synthesized Probe
  source 1..80: mol_type = other DNA
ctatgaggacggcttcagtcagccccgaggctggaaccccggcttcttgtacaacgggttcccactgcccccggtgggta

SEQ ID NO: 132421 - DNA, 80 bp, synthetic construct
  misc_feature 1..80: note = Artificially Synthesized Probe
  source 1..80: mol_type = other DNA
ttaggagccaaggctcagggagattgaaatctcttagtgagtggaaccctgcagatttaaattaagttttctcaacccta

SEQ ID NO: 132422 - DNA, 80 bp, synthetic construct
  misc_feature 1..80: note = Artificially Synthesized Probe
  source 1..80: mol_type = other DNA
cacccgccaccacgcccagctaaattttttttgtatttttagtagagacggggtttcactgtgttagccaggatggtctc

SEQ ID NO: 132423 - DNA, 80 bp, synthetic construct; identical to SEQ ID NO: 41903
  misc_feature 1..80: note = Artificially Synthesized Probe
  source 1..80: mol_type = other DNA

SEQ ID NO: 132424 - DNA, 80 bp, synthetic construct
  misc_feature 1..80: note = Artificially Synthesized Probe
  source 1..80: mol_type = other DNA
cctcttcacgagattataaggaaagataattcagatggaaatcttttttacccagcctgctggaaatgcaatgattgttg

SEQ ID NO: 132425 - DNA, 80 bp, synthetic construct
  misc_feature 1..80: note = Artificially Synthesized Probe
  source 1..80: mol_type = other DNA
agctgtggacagatacaccagcacagagttcccctacaaaagccaacaactttacctaggcaattttcctaggcgggctt

SEQ ID NO: 132426 - DNA, 80 bp, synthetic construct
  misc_feature 1..80: note = Artificially Synthesized Probe
  source 1..80: mol_type = other DNA
ctgctcccactggcttcctgcaagtcgctttccttcttggcctcagttggacaatccctaaaatgggataagactgtctt

SEQ ID NO: 132427 - DNA, 80 bp, synthetic construct
  misc_feature 1..80: note = Artificially Synthesized Probe
  source 1..80: mol_type = other DNA
atcagagttcaagtgtctttaaatgaaattgtgttggttttctacccagctgtgacaaattgctccaaatttagtggctg

SEQ ID NO: 132428 - DNA, 80 bp, synthetic construct
  misc_feature 1..80: note = Artificially Synthesized Probe
  source 1..80: mol_type = other DNA
ggcacctccttccaagccggcaatgttgtctgtctctgtgcctttgtttggagtcacatctccacctcccgtcaggagag

SEQ ID NO: 132429 - DNA, 80 bp, synthetic construct; identical to SEQ ID NO: 41904
  misc_feature 1..80: note = Artificially Synthesized Probe
  source 1..80: mol_type = other DNA

SEQ ID NO: 132430 - DNA, 80 bp, synthetic construct
  misc_feature 1..80: note = Artificially Synthesized Probe
  source 1..80: mol_type = other DNA
ctagcctgtgagacagggaagcttgtcgtctgctctccagatgccctggcggaacggtgttaaacataacagcaacagat

SEQ ID NO: 132431 - DNA, 80 bp, synthetic construct
  misc_feature 1..80: note = Artificially Synthesized Probe
  source 1..80: mol_type = other DNA
ggcttctgcggcaaacagctcccaagtataaatgacaacacagatattcctggctgggcagctccacacagttgctcttt

SEQ ID NO: 132432 - DNA, 80 bp, synthetic construct
  misc_feature 1..80: note = Artificially Synthesized Probe
  source 1..80: mol_type = other DNA
tttgtcaatgactcttcacttaatccccacaacaacactgaaagctcaacctttccatattaacttacagatgaggaagt

SEQ ID NO: 132433 - DNA, 80 bp, synthetic construct
  misc_feature 1..80: note = Artificially Synthesized Probe
  source 1..80: mol_type = other DNA
ccaggaagtgcatgatcccaaagggtcatctttctgctaccacagggtcctcctatgtcctgaccaatggtctcttccta

SEQ ID NO: 132434 - DNA, 80 bp, synthetic construct; identical to SEQ ID NO: 41905
  misc_feature 1..80: note = Artificially Synthesized Probe
  source 1..80: mol_type = other DNA

SEQ ID NO: 132435 - DNA, 80 bp, synthetic construct
  misc_feature 1..80: note = Artificially Synthesized Probe
  source 1..80: mol_type = other DNA
gtataaaacaaaatgtgaaagtctgtttctttgtcctattcccaggggtagcagttgtgaatatctggtgcatctcactg

SEQ ID NO: 132436 - DNA, 80 bp, synthetic construct
  misc_feature 1..80: note = Artificially Synthesized Probe
  source 1..80: mol_type = other DNA
tgtacatagcatgtatgatactgtgggtacatatatatatagcatgcatgatagtgtgtgggcagatgtgtacatagcat

SEQ ID NO: 132437 - DNA, 80 bp, synthetic construct; identical to SEQ ID NO: 41906
  misc_feature 1..80: note = Artificially Synthesized Probe
  source 1..80: mol_type = other DNA

SEQ ID NO: 132438 - DNA, 80 bp, synthetic construct
  misc_feature 1..80: note = Artificially Synthesized Probe
  source 1..80: mol_type = other DNA
acatatatgtagcatgtatgatagtgtgtgggcagatgtgtacatagcatgtatgatactgtgggtacacatatatagca

SEQ ID NO: 132439 - DNA, 80 bp, synthetic construct
  misc_feature 1..80: note = Artificially Synthesized Probe
  source 1..80: mol_type = other DNA
tacatagcatgtatgatactgtgggtacacatatatagcatgtatgatagtgtgggcagatgtgtacatagcatgtatga

SEQ ID NO: 132440 - DNA, 80 bp, synthetic construct
  misc_feature 1..80: note = Artificially Synthesized Probe
  source 1..80: mol_type = other DNA
tacatagcatgtatgatactgtgggtacacatatatagcatgtatgatcgtgtgtgggcagatgtgtacatagcatgtat

SEQ ID NO: 132441 - DNA, 80 bp, synthetic construct
  misc_feature 1..80: note = Artificially Synthesized Probe
  source 1..80: mol_type = other DNA
tacatagcatgtatgatactgtgggcacatgcatatatagcatatatgatagtgtgtgggcagatgtgtacatagcatgt

SEQ ID NO: 132442 - DNA, 80 bp, synthetic construct
  misc_feature 1..80: note = Artificially Synthesized Probe
  source 1..80: mol_type = other DNA
ttactggccagcaacactcacttgcctccatgaaaacatgagacatcatgtcttcatgatgagaaatatcatcttgtcaa

SEQ ID NO: 132443 - DNA, 80 bp, synthetic construct
  misc_feature 1..80: note = Artificially Synthesized Probe
  source 1..80: mol_type = other DNA
gcatataggattatgtgtgggcatgtgtattagcatatatgatctcgggtgggcacgtgtgtatatggcatataagatag

SEQ ID NO: 132444 - DNA, 80 bp, synthetic construct; identical to SEQ ID NO: 41907
  misc_feature 1..80: note = Artificially Synthesized Probe
  source 1..80: mol_type = other DNA

SEQ ID NO: 132445 - DNA, 80 bp, synthetic construct
  misc_feature 1..80: note = Artificially Synthesized Probe
  source 1..80: mol_type = other DNA
acatgtgtatataggatataagatagtgtgtgggcacgtgtgtatatagcatataagacagtgtgtggacacatgtgtat

SEQ ID NO: 132446 - DNA, 80 bp, synthetic construct
  misc_feature 1..80: note = Artificially Synthesized Probe
  source 1..80: mol_type = other DNA
tgggcacatgtgtttatagcatataagacagtttgtgggcacatgtgtatatggcatataagacagtttgtggacatgtg

SEQ ID NO: 132447 - DNA, 80 bp, synthetic construct
  misc_feature 1..80: note = Artificially Synthesized Probe
  source 1..80: mol_type = other DNA
tcatgtgcatgctcagtgcctggtaaggaccacttagcaatagttcttatacatgtctgcttaacattaagtgaacagaa

SEQ ID NO: 132448 - DNA, 80 bp, synthetic construct; identical to SEQ ID NO: 41908
  misc_feature 1..80: note = Artificially Synthesized Probe
  source 1..80: mol_type = other DNA

SEQ ID NO: 132449 - DNA, 80 bp, synthetic construct
  misc_feature 1..80: note = Artificially Synthesized Probe
  source 1..80: mol_type = other DNA
gcccaggctggagtgcagtggtgcaatctcggctcactgcaacctccgcctcccgggttcaagcaatacttctgcctcag

SEQ ID NO: 132450 - DNA, 80 bp, synthetic construct
  misc_feature 1..80: note = Artificially Synthesized Probe
  source 1..80: mol_type = other DNA
tgagccaccgtgctcagccaacaagggacattttctacttaagagcacagatggtttcgatctcatgtcctctctaacat

SEQ ID NO: 132451 - DNA, 80 bp, synthetic construct
  misc_feature 1..80: note = Artificially Synthesized Probe
  source 1..80: mol_type = other DNA
gcaaaatcaagacatctaaacaaaatatcccaaaaggaataatattgggggaaaggtggaaaaggagcaccataaagact

SEQ ID NO: 132452 - DNA, 80 bp, synthetic construct; identical to SEQ ID NO: 41825
  misc_feature 1..80: note = Artificially Synthesized Probe
  source 1..80: mol_type = other DNA

SEQ ID NO: 132453 - DNA, 80 bp, synthetic construct; identical to SEQ ID NO: 41909
  misc_feature 1..80: note = Artificially Synthesized Probe
  source 1..80: mol_type = other DNA

SEQ ID NO: 132454 - DNA, 80 bp, synthetic construct
  misc_feature 1..80: note = Artificially Synthesized Probe
  source 1..80: mol_type = other DNA
gtctcaaactcctgaactcaagtgatctgcccaccttggcatcccaaagtgctgggattacaggtatgagccactgtgcc

SEQ ID NO: 132455 - DNA, 80 bp, synthetic construct
  misc_feature 1..80: note = Artificially Synthesized Probe
  source 1..80: mol_type = other DNA
caaaaaaatgactgagttatgcagcctggagaagcagtggagatgggcacctattatctatcaggtcttgggttccaggc

SEQ ID NO: 132456 - DNA, 80 bp, synthetic construct
  misc_feature 1..80: note = Artificially Synthesized Probe
  source 1..80: mol_type = other DNA
tgagatcgaatttgcaaaaccaggctcagagaaggaattcaatgaacgtgtattgttattgctgtgttgctggaagcgta

SEQ ID NO: 132457 - DNA, 80 bp, synthetic construct; identical to SEQ ID NO: 41910
  misc_feature 1..80: note = Artificially Synthesized Probe
  source 1..80: mol_type = other DNA

SEQ ID NO: 132458 - DNA, 80 bp, synthetic construct
  misc_feature 1..80: note = Artificially Synthesized Probe
  source 1..80: mol_type = other DNA
ggtgggaaggacacgggtagccctgaggccagacaaggaccccaggaaaagcccagcccttcagggccacacacaccgtg

SEQ ID NO: 132459 - DNA, 80 bp, synthetic construct
  misc_feature 1..80: note = Artificially Synthesized Probe
  source 1..80: mol_type = other DNA
cacaatactcagttatgtggatggctgcgttcgtataaagataaatatattaatgtgggttcaaacgttctttggcctaa

SEQ ID NO: 132460 - DNA, 80 bp, synthetic construct
  misc_feature 1..80: note = Artificially Synthesized Probe
  source 1..80: mol_type = other DNA
gacttccacctgcctcaggggaggaattggcctttcgtcctaagaaaagtctcctcagaagaacccgagtgggagtgaaa

SEQ ID NO: 132461 - DNA, 80 bp, synthetic construct
  misc_feature 1..80: note = Artificially Synthesized Probe
  source 1..80: mol_type = other DNA
cgtgcacacaggcacacgcacctatacatgctcatgacacacagacccacacacacacctgcacacacctcacatgcaca

SEQ ID NO: 132462 - DNA, 80 bp, synthetic construct; identical to SEQ ID NO: 41911
  misc_feature 1..80: note = Artificially Synthesized Probe
  source 1..80: mol_type = other DNA

SEQ ID NO: 132463 - DNA, 80 bp, synthetic construct
  misc_feature 1..80: note = Artificially Synthesized Probe
  source 1..80: mol_type = other DNA
cccccctccccccaccccacaacaggccccagtgtgtgatgttccccttcctgtgtccatgtgttctcattgttcaatcc

SEQ ID NO: 132464 - DNA, 80 bp, synthetic construct
  misc_feature 1..80: note = Artificially Synthesized Probe
  source 1..80: mol_type = other DNA
agaggctggggcaggtgctgcgggcagcaggcggggaggggctggaccatctcaggcggggagcctgcagggcttgttcc

SEQ ID NO: 132465 - DNA, 80 bp, synthetic construct
  misc_feature 1..80: note = Artificially Synthesized Probe
  source 1..80: mol_type = other DNA
atgagaaaaaaataaacacccaatggaataaacacccgatgtgaacaagaaaattacaagaaaacccaaatacgtgtgtg

SEQ ID NO: 132466 - DNA, 80 bp, synthetic construct; identical to SEQ ID NO: 41912
  misc_feature 1..80: note = Artificially Synthesized Probe
  source 1..80: mol_type = other DNA

SEQ ID NO: 132467 - DNA, 80 bp, synthetic construct
  misc_feature 1..80: note = Artificially Synthesized Probe
  source 1..80: mol_type = other DNA
tgagcatgagaaacacaagcaactttagacaatcatgttatacagtgatattatggaaatggtaaaatgttgcccagctt

SEQ ID NO: 132468 - DNA, 80 bp, synthetic construct
  misc_feature 1..80: note = Artificially Synthesized Probe
  source 1..80: mol_type = other DNA
aaaaataaaaggcaagaccacatctggcagggaggacacctgcgtgcccgtgggtgagaacgtgggagaggccccagggt

SEQ ID NO: 132469 - DNA, 80 bp, synthetic construct
  misc_feature 1..80: note = Artificially Synthesized Probe
  source 1..80: mol_type = other DNA
accgtatactctaggagtagctccataaacccaatagatgacacatcataaatcagtgcttttaaatgtttgatgtcctt

SEQ ID NO: 132470 - DNA, 80 bp, synthetic construct
  misc_feature 1..80: note = Artificially Synthesized Probe
  source 1..80: mol_type = other DNA
gagaaacatgtttccagcaactacacgagactataaattaaagtgttttgagtctctgactactgatcactcagcccagg

SEQ ID NO: 132471 - DNA, 80 bp, synthetic construct; identical to SEQ ID NO: 41913
  misc_feature 1..80: note = Artificially Synthesized Probe
  source 1..80: mol_type = other DNA

SEQ ID NO: 132472 - DNA, 80 bp, synthetic construct
  misc_feature 1..80: note = Artificially Synthesized Probe
  source 1..80: mol_type = other DNA
tttatctctcactcccttcccaccctttccccctgagtccccaaagtccactgtgtcattcttacgcctttacatcccca

SEQ ID NO: 132473 - DNA, 80 bp, synthetic construct
  misc_feature 1..80: note = Artificially Synthesized Probe
  source 1..80: mol_type = other DNA
atcacagtttctttatccactcattgattgatgggcatttgggttgcttccacagtttggcaattgtgaattgtgcggct

SEQ ID NO: 132474 - DNA, 80 bp, synthetic construct
  misc_feature 1..80: note = Artificially Synthesized Probe
  source 1..80: mol_type = other DNA
aatccagtctatcattgttggacattagggttggttccaagtctttgctattgtgagtagtgccgcaataaacacaagtg

SEQ ID NO: 132475 - DNA, 80 bp, synthetic construct; identical to SEQ ID NO: 41914
  misc_feature 1..80: note = Artificially Synthesized Probe
  source 1..80: mol_type = other DNA

SEQ ID NO: 132476 - DNA, 80 bp, synthetic construct
  misc_feature 1..80: note = Artificially Synthesized Probe
  source 1..80: mol_type = other DNA
ggtttttcttactgatttgtttgagtttgttgtagattctggatattaatcctttgtcagatgtgtggattgtgaagatt

SEQ ID NO: 132477 - DNA, 80 bp, synthetic construct
  misc_feature 1..80: note = Artificially Synthesized Probe
  source 1..80: mol_type = other DNA
gaatttttccaatgttatcttctagagtttttatggtttcaggtcttagacttaagtccttgatccatcttgagttgttt

SEQ ID NO: 132478 - DNA, 80 bp, synthetic construct
  misc_feature 1..80: note = Artificially Synthesized Probe
  source 1..80: mol_type = other DNA
gttctctattctattccattggtctatgtgcttatttttgtaccagtactatgctgttttggtgactatggccttatagt

SEQ ID NO: 132479 - DNA, 80 bp, synthetic construct
  misc_feature 1..80: note = Artificially Synthesized Probe
  source 1..80: mol_type = other DNA
tttgtagattgctttcagcagtatggttgttttcacaatattgactctacccatccatgtgcatgggttgtgtcccattt

SEQ ID NO: 132480 - DNA, 80 bp, synthetic construct; identical to SEQ ID NO: 41915
  misc_feature 1..80: note = Artificially Synthesized Probe
  source 1..80: mol_type = other DNA

SEQ ID NO: 132481 - DNA, 80 bp, synthetic construct
  misc_feature 1..80: note = Artificially Synthesized Probe
  source 1..80: mol_type = other DNA
aggcatccttgtcttgttcccattctcagagggaatgctttcaacttttccccattcagaattatgttggctgtgggttt

SEQ ID NO: 132482 - DNA, 80 bp, synthetic construct
  misc_feature 1..80: note = Artificially Synthesized Probe
  source 1..80: mol_type = other DNA
atttattgacttgtgtatgttaagccatccctgcatccctggtatgaaacccacctgatcatggtggattatctttttga

SEQ ID NO: 132483 - DNA, 80 bp, synthetic construct; identical to SEQ ID NO: 41916
  misc_feature 1..80: note = Artificially Synthesized Probe
  source 1..80: mol_type = other DNA

SEQ ID NO: 132484 - DNA, 80 bp, synthetic construct
  misc_feature 1..80: note = Artificially Synthesized Probe
  source 1..80: mol_type = other DNA
agctgttcatagtagccatgaatgatcttttgtatttcagtggtgtcagttgtaatatctcccattttgcttctaattga

SEQ ID NO: 132485 - DNA, 80 bp, synthetic construct
  misc_feature 1..80: note = Artificially Synthesized Probe
  source 1..80: mol_type = other DNA
aagtgttgctatctctctacatcctctccagcacctgttgtttcctgagcatttaatgatcgccattttaactggtgaga

SEQ ID NO: 132486 - DNA, 80 bp, synthetic construct
  misc_feature 1..80: note = Artificially Synthesized Probe
  source 1..80: mol_type = other DNA
ctttcttctgctgggtttgggtttggtttgttcttgtttctctaattccttaaggtgtaaccttagattgtcagtttgtg

SEQ ID NO: 132487 - DNA, 80 bp, synthetic construct
  misc_feature 1..80: note = Artificially Synthesized Probe
  source 1..80: mol_type = other DNA
tggagtgtagtggcacaatctcggctgattgcaacctctgcctcctgggttcaagtgattctcctccctcaggatcccga

SEQ ID NO: 132488 - DNA, 80 bp, synthetic construct; identical to SEQ ID NO: 41917
  misc_feature 1..80: note = Artificially Synthesized Probe
  source 1..80: mol_type = other DNA

SEQ ID NO: 132489 - DNA, 80 bp, synthetic construct
  misc_feature 1..80: note = Artificially Synthesized Probe
  source 1..80: mol_type = other DNA
ccatgtgctgttgaatagaatgtgtattctgcagttgttgggtagaatgttctgtaaatacctgttaagtccatttgttc

SEQ ID NO: 132490 - DNA, 80 bp, synthetic construct
  misc_feature 1..80: note = Artificially Synthesized Probe
  source 1..80: mol_type = other DNA
gtgttaggtgcacatttatttaggattgtgatattttcctgttggacaaggccttttatcattatataatgaccctcttt

SEQ ID NO: 132491 - DNA, 80 bp, synthetic construct
  misc_feature 1..80: note = Artificially Synthesized Probe
  source 1..80: mol_type = other DNA
agatggttggtgaattcttatgcattctgcaattctgtatcttttaggtggagcatttagaccatttacattcaatgtta

SEQ ID NO: 132492 - DNA, 80 bp, synthetic construct
  misc_feature 1..80: note = Artificially Synthesized Probe
  source 1..80: mol_type = other DNA
tgtttcaagatttagagctccttttagcagttcttgtagtgctgccttggtaggggtgaattttctcatcatttgtttgt

SEQ ID NO: 132493 - DNA, 80 bp, synthetic construct; identical to SEQ ID NO: 41918
  misc_feature 1..80: note = Artificially Synthesized Probe
  source 1..80: mol_type = other DNA

SEQ ID NO: 132494 - DNA, 80 bp, synthetic construct
  misc_feature 1..80: note = Artificially Synthesized Probe
  source 1..80: mol_type = other DNA
aggaatgctaattattcctaggtttggtcattagacataatcccagacatcttggaggctatcttcatattttcttattc

SEQ ID NO: 132495 - DNA, 80 bp, synthetic construct
  misc_feature 1..80: note = Artificially Synthesized Probe
  source 1..80: mol_type = other DNA
ttgtgatatctatttccttgaatatttctcccttcacttcttgtatcatttttctgatttccttacattgggctttgcct

SEQ ID NO: 132496 - DNA, 80 bp, synthetic construct; identical to SEQ ID NO: 41826
  misc_feature 1..80: note = Artificially Synthesized Probe
  source 1..80: mol_type = other DNA

SEQ ID NO: 132497 - DNA, 80 bp, synthetic construct
  misc_feature 1..80: note = Artificially Synthesized Probe
  source 1..80: mol_type = other DNA
ctggttccttctcatttgggtagtctctgtcagagggaaggtctagggctctagcctgttgttcagattctttcgcccca

SEQ ID NO: 132498 - DNA, 80 bp, synthetic construct; identical to SEQ ID NO: 41919
  misc_feature 1..80: note = Artificially Synthesized Probe
  source 1..80: mol_type = other DNA

SEQ ID NO: 132499 - DNA, 80 bp, synthetic construct
  misc_feature 1..80: note = Artificially Synthesized Probe
  source 1..80: mol_type = other DNA
tttgggcactcacagtatttggggtgtctcccgagtcctgcaggagccatccgctttcttcagagggtctgcggtttctc

SEQ ID NO: 132500 - DNA, 80 bp, synthetic construct
  misc_feature 1..80: note = Artificially Synthesized Probe
  source 1..80: mol_type = other DNA
taggtactcccaaatttctctgcagcaatgagatggcgaattgtattttctaattgattatttttcagcaacaattaatc

SEQ ID NO: 132501 - DNA, 80 bp, synthetic construct; identical to SEQ ID NO: 41920
  misc_feature 1..80: note = Artificially Synthesized Probe
  source 1..80: mol_type = other DNA

SEQ ID NO: 132502 - DNA, 80 bp, synthetic construct
  misc_feature 1..80: note = Artificially Synthesized Probe
  source 1..80: mol_type = other DNA
ttcataaatttaggtcgattttcgtcaattttttttcttctctatgacatctacattgttatcttactgagcaggtcttc

SEQ ID NO: 132503 - DNA, 80 bp, synthetic construct
  misc_feature 1..80: note = Artificially Synthesized Probe
  source 1..80: mol_type = other DNA
tgagagcagcatctgcctctgttcctagataaagggcatgattctgatgtttttcctcacatactgtgtctactaggaat

SEQ ID NO: 132504 - DNA, 80 bp, synthetic construct
  misc_feature 1..80: note = Artificially Synthesized Probe
  source 1..80: mol_type = other DNA
tggtagatttccaacgcagtgccatatttacatggcctgcatgatggtgatgcaggttttcatttattcttggattgaat

SEQ ID NO: 132505 - DNA, 80 bp, synthetic construct
  misc_feature 1..80: note = Artificially Synthesized Probe
  source 1..80: mol_type = other DNA
tctaaaatcaaatttgggctttttgttttgaataactggtagagcttatttgtgactctggtcctgataacctctggggt

SEQ ID NO: 132506 - DNA, 80 bp, synthetic construct; identical to SEQ ID NO: 41921
  misc_feature 1..80: note = Artificially Synthesized Probe
  source 1..80: mol_type = other DNA

SEQ ID NO: 132507 - DNA, 80 bp, synthetic construct
  misc_feature 1..80: note = Artificially Synthesized Probe
  source 1..80: mol_type = other DNA
taatttcacataaatgtaaaacttaaactgtgcctgactctcccgacacgagtctcttcctctccctccctcatttgcta

SEQ ID NO: 132508 - DNA, 80 bp, synthetic construct
  misc_feature 1..80: note = Artificially Synthesized Probe
  source 1..80: mol_type = other DNA
tcttctaggttttcttctaggtctaacatttaagtctttaatccatcttgaattaacttttgtataatgtgtaaggaaag

SEQ ID NO: 132509 - DNA, 80 bp, synthetic construct
  misc_feature 1..80: note = Artificially Synthesized Probe
  source 1..80: mol_type = other DNA
actagaatagtaagaagctggtgtagacagcatagtgggctcaaagggattcactgggcaccccgttttaatcagcatgc

SEQ ID NO: 132510 - DNA, 80 bp, synthetic construct; identical to SEQ ID NO: 41922
  misc_feature 1..80: note = Artificially Synthesized Probe
  source 1..80: mol_type = other DNA

SEQ ID NO: 132511 - DNA, 80 bp, synthetic construct
  misc_feature 1..80: note = Artificially Synthesized Probe
  source 1..80: mol_type = other DNA
agagtgcccttcacatgatctgagtgctcatggtgtgtcctttctgtgatccaaatactcatgctatgtccttcccttga

SEQ ID NO: 132512 - DNA, 80 bp, synthetic construct
  misc_feature 1..80: note = Artificially Synthesized Probe
  source 1..80: mol_type = other DNA
agaagtcatgcacaagcatattctcttgaatgttgttaacaaaaacaagactatgctgagtacacgttctgtatcttgga

SEQ ID NO: 132513 - DNA, 80 bp, synthetic construct
  misc_feature 1..80: note = Artificially Synthesized Probe
  source 1..80: mol_type = other DNA
aggttggaaggcagctttagcactgctatgctggtactactgtctaaaaattctgtgaccctcacagcaacgactgagtg

SEQ ID NO: 132514 - DNA, 80 bp, synthetic construct
  misc_feature 1..80: note = Artificially Synthesized Probe
  source 1..80: mol_type = other DNA
taaagttgtcctttatttatctttttttggcaatttgtatttgttcaacgaatgatctgttcatagcctttgtccatttt

SEQ ID NO: 132515 - DNA, 80 bp, synthetic construct; identical to SEQ ID NO: 41923
  misc_feature 1..80: note = Artificially Synthesized Probe
  source 1..80: mol_type = other DNA

SEQ ID NO: 132516 - DNA, 80 bp, synthetic construct
  misc_feature 1..80: note = Artificially Synthesized Probe
  source 1..80: mol_type = other DNA
cagaagaactggggtctggttctgggctctctgtcttcttttattaacagattcatctgttcttgttgacaataccgtgt

SEQ ID NO: 132517 - DNA, 80 bp, synthetic construct
  misc_feature 1..80: note = Artificially Synthesized Probe
  source 1..80: mol_type = other DNA
aactttaaaattaatttatctatttcaaaatgaaaaagtactatcattattattgtaaatgaaattgcatttaatttata

SEQ ID NO: 132518 - DNA, 80 bp, synthetic construct
  misc_feature 1..80: note = Artificially Synthesized Probe
  source 1..80: mol_type = other DNA
acttttttgtcattatgaaagggatttttttttctccattaccattcatggtactttgctaaagaacaaaacaaaaaaga

SEQ ID NO: 132519 - DNA, 80 bp, synthetic construct; identical to SEQ ID NO: 41924
  misc_feature 1..80: note = Artificially Synthesized Probe
  source 1..80: mol_type = other DNA

SEQ ID NO: 132520 - DNA, 80 bp, synthetic construct
  misc_feature 1..80: note = Artificially Synthesized Probe
  source 1..80: mol_type = other DNA
cgaggccggaagtggctgaggccggcagcagcgggcggcagctgcggcgcaaccggctccggagctgcctggcgcggccg

SEQ ID NO: 132521 - DNA, 80 bp, synthetic construct
  misc_feature 1..80: note = Artificially Synthesized Probe
  source 1..80: mol_type = other DNA
ttacaaagacggggtttgttagtagagatggggtttctccatgttggtcaggcttatctcgaactcccgacctcaggtga

SEQ ID NO: 132522 - DNA, 80 bp, synthetic construct
  misc_feature 1..80: note = Artificially Synthesized Probe
  source 1..80: mol_type = other DNA
ttagataaatcctttaagtctcttaaaatcttcatgttccctctgtctctttttttttctttataacttgatgaacctgg

SEQ ID NO: 132523 - DNA, 80 bp, synthetic construct
  misc_feature 1..80: note = Artificially Synthesized Probe
  source 1..80: mol_type = other DNA
gcaggtgcgtgatgtccgattacctctccttttggaaattggcagccatttattttcacatcactaattccctaaaggtt

SEQ ID NO: 132524 - DNA, 80 bp, synthetic construct
  misc_feature 1..80: note = Artificially Synthesized Probe
  source 1..80: mol_type = other DNA
tcccgagtagctgggactacaggtgcccgccaccacgccgggctaattttttgtatttttagtagagatggggtttcacc

SEQ ID NO: 132525 - DNA, 80 bp, synthetic construct; identical to SEQ ID NO: 42011
  misc_feature 1..80: note = Artificially Synthesized Probe
  source 1..80: mol_type = other DNA

SEQ ID NO: 132526 - DNA, 80 bp, synthetic construct
  misc_feature 1..80: note = Artificially Synthesized Probe
  source 1..80: mol_type = other DNA
tctgtattttcatgcatgtatgcagttagtttttttctagttgtctttcgtgcttggaaaggaagcactctctgttgcaa

SEQ ID NO: 132527 - DNA, 80 bp, synthetic construct
  misc_feature 1..80: note = Artificially Synthesized Probe
  source 1..80: mol_type = other DNA
ggctcattttgaacatttaatgccctgatctgcacttagcaattgccaaggagccctgattccttttagtgaaaaatagt

SEQ ID NO: 132528 - DNA, 80 bp, synthetic construct
  misc_feature 1..80: note = Artificially Synthesized Probe
  source 1..80: mol_type = other DNA
aatggcacgatctcagcccactgcaacctctgcctctcaggttcaagagattcttgtgcctcagcctcccgagtagtgag

SEQ ID NO: 132529 - DNA, 80 bp, synthetic construct
  misc_feature 1..80: note = Artificially Synthesized Probe
  source 1..80: mol_type = other DNA
ccgcaccagcctaggaattgttctttgttttttgtatttttaagataaaatacatcataagttcactctttttgatgaaa

SEQ ID NO: 132530 - DNA, 80 bp, synthetic construct
  misc_feature 1..80: note = Artificially Synthesized Probe
  source 1..80: mol_type = other DNA
gctgggtccattccccatttctgattgaacaggtctgggtggggcctgagaatgagcatttctaacaaatgcccaggtgg

SEQ ID NO: 132531 - DNA, 80 bp, synthetic construct; identical to SEQ ID NO: 42012
  misc_feature 1..80: note = Artificially Synthesized Probe
  source 1..80: mol_type = other DNA

SEQ ID NO: 132532 - DNA, 80 bp, synthetic construct
  misc_feature 1..80: note = Artificially Synthesized Probe
  source 1..80: mol_type = other DNA
ttaaagaagccttgtgtatgttctgtcctctccatgctaactcctcccttcctgagtactccatcacagtttttatggtt

SEQ ID NO: 132533 - DNA, 80 bp, synthetic construct
  misc_feature 1..80: note = Artificially Synthesized Probe
  source 1..80: mol_type = other DNA
gtttattctgccagtcccctcctggtggaatttgagttgttttgtgttttactgtttccagtagttgtgcacagatagcc

SEQ ID NO: 132534 - DNA, 80 bp, synthetic construct
  misc_feature 1..80: note = Artificially Synthesized Probe
  source 1..80: mol_type = other DNA
tgctgtgttccttcctgttagatccctgagaaactgtatattgaaggttgaattttgttgcttcagctttaggtgataga

SEQ ID NO: 132535 - DNA, 80 bp, synthetic construct
  misc_feature 1..80: note = Artificially Synthesized Probe
  source 1..80: mol_type = other DNA
ccttgaacaaagccagtggcaaaggggaagtctggggaaagaccagtttgggaacccttctgtctaaagccttaaggcat

SEQ ID NO: 132536 - DNA, 80 bp, synthetic construct; identical to SEQ ID NO: 42013
  misc_feature 1..80: note = Artificially Synthesized Probe
  source 1..80: mol_type = other DNA

SEQ ID NO: 132537 - DNA, 80 bp, synthetic construct
  misc_feature 1..80: note = Artificially Synthesized Probe
  source 1..80: mol_type = other DNA
tgaccccacctacagtgggtagtattgtcatatgactgggtgctgggagagagcagcagagggcaggggtgtgtgtgtgt

SEQ ID NO: 132538 - DNA, 80 bp, synthetic construct
  misc_feature 1..80: note = Artificially Synthesized Probe
  source 1..80: mol_type = other DNA
tggcctttaaacttggtggtgcagaactgtgggagggttcatttgctttacttctcaaatatgtgccttctaatgaaggg

SEQ ID NO: 132539 - DNA, 80 bp, synthetic construct
  misc_feature 1..80: note = Artificially Synthesized Probe
  source 1..80: mol_type = other DNA
ttttcacggacagatactctggcaggagcaccggggaggcttccatacccatgattatgcatttgatgttagttttcacc

SEQ ID NO: 132540 - DNA, 80 bp, synthetic construct; identical to SEQ ID NO: 42014
  misc_feature 1..80: note = Artificially Synthesized Probe
  source 1..80: mol_type = other DNA

SEQ ID NO: 132541 - DNA, 80 bp, synthetic construct
  misc_feature 1..80: note = Artificially Synthesized Probe
  source 1..80: mol_type = other DNA
ttcctttgacttttttgttcaaaaatagaatcatggaaccttgcttggagggccttaaaattagttcatctcttgtctag

SEQ ID NO: 132542 - DNA, 80 bp, synthetic construct
  misc_feature 1..80: note = Artificially Synthesized Probe
  source 1..80: mol_type = other DNA
gtaggccacagcatttcttgggttgagctaaatccatttctctgtctttctcacccattagtgctctggggcctactaag

SEQ ID NO: 132543 - DNA, 80 bp, synthetic construct
  misc_feature 1..80: note = Artificially Synthesized Probe
  source 1..80: mol_type = other DNA
tgctaaagaatttgaagaaaaattgtcctgtatcagagtatcagcaaatattcagactccttatgtcaaggttttttttt

SEQ ID NO: 132544 - DNA, 80 bp, synthetic construct; identical to SEQ ID NO: 42015
  misc_feature 1..80: note = Artificially Synthesized Probe
  source 1..80: mol_type = other DNA

SEQ ID NO: 132545 - DNA, 80 bp, synthetic construct; identical to SEQ ID NO: 42001
  misc_feature 1..80: note = Artificially Synthesized Probe
  source 1..80: mol_type = other DNA

SEQ ID NO: 132546 - DNA, 80 bp, synthetic construct
  misc_feature 1..80: note = Artificially Synthesized Probe
  source 1..80: mol_type = other DNA
gttcgaatcccagccttggcgctcatttgcttgatgttgggccaattaggggagttcttgatgtcttggtttccatatga

SEQ ID NO: 132547 - DNA, 80 bp, synthetic construct
  misc_feature 1..80: note = Artificially Synthesized Probe
  source 1..80: mol_type = other DNA
attaggtcatgtggctggagtccccacaaaagggattagtgcccttataaaaaagggccccagagatctcccttgcccct

SEQ ID NO: 132548 - DNA, 80 bp, synthetic construct
  misc_feature 1..80: note = Artificially Synthesized Probe
  source 1..80: mol_type = other DNA
tttattgaaatgttacctgttacactaaatcactgaagtcatctttttgaattctttcccccatcgtgtttcttatttgc

SEQ ID NO: 132549 - DNA, 80 bp, synthetic construct; identical to SEQ ID NO: 42016
  misc_feature 1..80: note = Artificially Synthesized Probe
  source 1..80: mol_type = other DNA

SEQ ID NO: 132550 - DNA, 80 bp, synthetic construct
  misc_feature 1..80: note = Artificially Synthesized Probe
  source 1..80: mol_type = other DNA
tgttcagccagggtgatgctgtgctcccacagactttagggatccatggcaccccagcttcctgacctgccgcaccctct

SEQ ID NO: 132551 - DNA, 80 bp, synthetic construct
  misc_feature 1..80: note = Artificially Synthesized Probe
  source 1..80: mol_type = other DNA
aaaaggcctgagttgtctcttaataaatagcctcctgaggcagaacagtgaactgggtgactttgtgaacagggtttctg

SEQ ID NO: 132552 - DNA, 80 bp, synthetic construct; identical to SEQ ID NO: 42017
  misc_feature 1..80: note = Artificially Synthesized Probe
  source 1..80: mol_type = other DNA

SEQ ID NO: 132553 - DNA, 80 bp, synthetic construct
  misc_feature 1..80: note = Artificially Synthesized Probe
  source 1..80: mol_type = other DNA
acaccattctcctgcctcagcctcccaagtagctgggactacaggcgcctgccaccacacccagctaattttttgtattt

SEQ ID NO: 132554 - DNA, 80 bp, synthetic construct
  misc_feature 1..80: note = Artificially Synthesized Probe
  source 1..80: mol_type = other DNA
gctcttcaccatctttcatgtgctggttctccataccccattttcaaaggcatctctaatttcataagacttgatgtgaa

SEQ ID NO: 132555 - DNA, 80 bp, synthetic construct
  misc_feature 1..80: note = Artificially Synthesized Probe
  source 1..80: mol_type = other DNA
cactgtcttggtgtgctagggctgccgccacagagtcacacagtctgggtggcttagcacaaatgcgctgtgtcacagct

SEQ ID NO: 132556 - DNA, 80 bp, synthetic construct; identical to SEQ ID NO: 42018
  misc_feature 1..80: note = Artificially Synthesized Probe
  source 1..80: mol_type = other DNA

SEQ ID NO: 132557 - DNA, 80 bp, synthetic construct
  misc_feature 1..80: note = Artificially Synthesized Probe
  source 1..80: mol_type = other DNA
ctgtacggacatccacacatctaattttatcttctacctcctagcttgcttacatttcaatagcaatatgtatttatagg

SEQ ID NO: 132558 - DNA, 80 bp, synthetic construct
  misc_feature 1..80: note = Artificially Synthesized Probe
  source 1..80: mol_type = other DNA
ggttagagagttagtccatgatggaatgcgagagacattgctacttggtagtctccatttagacgagtcttactgtacgg

SEQ ID NO: 132559 - DNA, 80 bp, synthetic construct
  misc_feature 1..80: note = Artificially Synthesized Probe
  source 1..80: mol_type = other DNA
tatatagaaaaccaagtggaagaggagaaagcgattccatttagttggcttactttccacttagcaaagagtaatgattt

SEQ ID NO: 132560 - DNA, 80 bp, synthetic construct
  misc_feature 1..80: note = Artificially Synthesized Probe
  source 1..80: mol_type = other DNA
ctggagtgcaatggtgcaatcttggctcactgcaacctccgccttccggttcaagcgattctcctgcctcagcctcccga

SEQ ID NO: 132561 - DNA, 80 bp, synthetic construct; identical to SEQ ID NO: 42019
  misc_feature 1..80: note = Artificially Synthesized Probe
  source 1..80: mol_type = other DNA

SEQ ID NO: 132562 - DNA, 80 bp, synthetic construct
  misc_feature 1..80: note = Artificially Synthesized Probe
  source 1..80: mol_type = other DNA
gagctcttctcattttcccatttcccatgtccccgaggcacaggaaggttaaatgatctccccaggtgcagtcagctggt

SEQ ID NO: 132563 - DNA, 80 bp, synthetic construct
  misc_feature 1..80: note = Artificially Synthesized Probe
  source 1..80: mol_type = other DNA
ttcaggaggttttttatttttaggcttttgatagcaaaataagcagatgtgttaatggcacacatcaattcccaatgatt

SEQ ID NO: 132564 - DNA, 80 bp, synthetic construct
  misc_feature 1..80: note = Artificially Synthesized Probe
  source 1..80: mol_type = other DNA
tttctattaaagcaaagataaaagctgaattaacactgagcgtgcagcgtaaagtcggccgcagctggattcctaactcg

SEQ ID NO: 132565 - DNA, 80 bp, synthetic construct; identical to SEQ ID NO: 42020
  misc_feature 1..80: note = Artificially Synthesized Probe
  source 1..80: mol_type = other DNA

SEQ ID NO: 132566 - DNA, 80 bp, synthetic construct
  misc_feature 1..80: note = Artificially Synthesized Probe
  source 1..80: mol_type = other DNA
ctctgatccttgttttccttgtggggaaaatcacacccaccccatggaggtgtcacgagggttcagcttcatcacatctg

SEQ ID NO: 132567 - DNA, 80 bp, synthetic construct
  misc_feature 1..80: note = Artificially Synthesized Probe
  source 1..80: mol_type = other DNA
ctttcttcccttcataggtgctggagatcagaatttatttacctctgtttatccaacgctctctcagcagcttccaagag

SEQ ID NO: 132568 - DNA, 80 bp, synthetic construct
  misc_feature 1..80: note = Artificially Synthesized Probe
  source 1..80: mol_type = other DNA
agtgaagtagcacaagttaaaagcctcagttctaaagaaacagaatgacctcacataatctgtgggtctttgtgggtctt

SEQ ID NO: 132569 - DNA, 80 bp, synthetic construct
  misc_feature 1..80: note = Artificially Synthesized Probe
  source 1..80: mol_type = other DNA
tttcctacagatttattggattgtcatcttggtggtgggttttttcctgtgttttgagcagcagagtgaatttttttttt

SEQ ID NO: 132570 - DNA, 80 bp, synthetic construct
  misc_feature 1..80: note = Artificially Synthesized Probe
  source 1..80: mol_type = other DNA
gctgccgccggtgatctacaccatggagaacaagcccatcgtcacctgtgagtgcccggaggcggggagggcgcggcggt

SEQ ID NO: 132571 - DNA, 80 bp, synthetic construct
  misc_feature 1..80: note = Artificially Synthesized Probe
  source 1..80: mol_type = other DNA
ctgggattacaggtgtgcgctaccgcacccggctaatttttgtagttttagtagagacaggttttgccatgttggccagg

SEQ ID NO: 132572 - DNA, 80 bp, synthetic construct; identical to SEQ ID NO: 42021
  misc_feature 1..80: note = Artificially Synthesized Probe
  source 1..80: mol_type = other DNA

SEQ ID NO: 132573 - DNA, 80 bp, synthetic construct
  misc_feature 1..80: note = Artificially Synthesized Probe
  source 1..80: mol_type = other DNA
gctctgttgcatgtttacagttagtcgtctggtgacatactcataggaaatcactgactgggaatcctcttcttggaaaa

SEQ ID NO: 132574 - DNA, 80 bp, synthetic construct
  misc_feature 1..80: note = Artificially Synthesized Probe
  source 1..80: mol_type = other DNA
cttatagcattattcctttctgaccaccagtttgtgccttagtaacatgagggattaaggtggctttctggagttgactt

SEQ ID NO: 132575 - DNA, 80 bp, synthetic construct; identical to SEQ ID NO: 42022
  misc_feature 1..80: note = Artificially Synthesized Probe
  source 1..80: mol_type = other DNA

SEQ ID NO: 132576 - DNA, 80 bp, synthetic construct
  misc_feature 1..80: note = Artificially Synthesized Probe
  source 1..80: mol_type = other DNA
aacatagtgaaacccctgtctctgtaaagaagaaataaaattagctggacatggtggtgcacgcctgtagtcctagccac

SEQ ID NO: 132577 - DNA, 80 bp, synthetic construct
  misc_feature 1..80: note = Artificially Synthesized Probe
  source 1..80: mol_type = other DNA
aaaagaaactgtgtagatttaatatttgtattcatctcttcccctttccgaaactccagtaaatggactacataaatact

SEQ ID NO: 132578 - DNA, 80 bp, synthetic construct
  misc_feature 1..80: note = Artificially Synthesized Probe
  source 1..80: mol_type = other DNA
tatagctgtgtttttgggagaaagagaaacaggtggaggaattgggagagaaagctgaggaagttcaatcccttgtgtct

SEQ ID NO: 132579 - DNA, 80 bp, synthetic construct
  misc_feature 1..80: note = Artificially Synthesized Probe
  source 1..80: mol_type = other DNA
tcattgcccactcccccaacccccccccccacccccgccgcccctcaggaacctggaaagtctttctgtggacagaagag

SEQ ID NO: 132580 - DNA, 80 bp, synthetic construct; identical to SEQ ID NO: 42023
  misc_feature 1..80: note = Artificially Synthesized Probe
  source 1..80: mol_type = other DNA

SEQ ID NO: 132581 - DNA, 80 bp, synthetic construct
  misc_feature 1..80: note = Artificially Synthesized Probe
  source 1..80: mol_type = other DNA
tgctgccatgcccggctaattttttgtttgtttgtttttgttttttttttttttcagtagagacagagtttcaccatgtt

SEQ ID NO: 132582 - DNA, 80 bp, synthetic construct
  misc_feature 1..80: note = Artificially Synthesized Probe
  source 1..80: mol_type = other DNA
acagggtagaagaccttgtgaagatggaggtagagatgagagtgatgtgttcatgagccgaagaatgctgaggatgccag

SEQ ID NO: 132583 - DNA, 80 bp, synthetic construct
  misc_feature 1..80: note = Artificially Synthesized Probe
  source 1..80: mol_type = other DNA
aactttctggcctcatgaaacatgcaagaataagctaatgtcctaagcctccaggtttgtggtagtttgtgacagcaggt

SEQ ID NO: 132584 - DNA, 80 bp, synthetic construct
  misc_feature 1..80: note = Artificially Synthesized Probe
  source 1..80: mol_type = other DNA
ctttcttatcaaagtgagctctctttggctctctggctcttgccctgtcaccatgtgatgccctctgcgggttttgacat

SEQ ID NO: 132585 - DNA, 80 bp, synthetic construct; identical to SEQ ID NO: 42024
  misc_feature 1..80: note = Artificially Synthesized Probe
  source 1..80: mol_type = other DNA

SEQ ID NO: 132586 - DNA, 80 bp, synthetic construct
  misc_feature 1..80: note = Artificially Synthesized Probe
  source 1..80: mol_type = other DNA
ggctgaggcaggagaattgcttgaacctgggaggaggagattgcagtgagccaagattgcaccattacactccagcctgg

SEQ ID NO: 132587 - DNA, 80 bp, synthetic construct
  misc_feature 1..80: note = Artificially Synthesized Probe
  source 1..80: mol_type = other DNA
acaaagtttgccagatgcactaaacagctgtatagctgaaaagcaaattagtgagctggaagaattgagcttagagactc

SEQ ID NO: 132588 - DNA, 80 bp, synthetic construct; identical to SEQ ID NO: 42025
  misc_feature 1..80: note = Artificially Synthesized Probe
  source 1..80: mol_type = other DNA

SEQ ID NO: 132589 - DNA, 80 bp, synthetic construct
  misc_feature 1..80: note = Artificially Synthesized Probe
  source 1..80: mol_type = other DNA
agaccctagaattctttatcattcacagtgtcatcaagagggaagactctgtcacagcttcccaccctgagggccttgcg

SEQ ID NO: 132590 - DNA, 80 bp, synthetic construct
  misc_feature 1..80: note = Artificially Synthesized Probe
  source 1..80: mol_type = other DNA
tatgttcactgcttgtcatgatacggagataggtgcactgaagtgaatacaaatattttcagacatctataagaacagaa

SEQ ID NO: 132591 - DNA, 80 bp, synthetic construct
  misc_feature 1..80: note = Artificially Synthesized Probe
  source 1..80: mol_type = other DNA
gtgtgaaggagaacagagagaaggggagatagactttaactttagtctttgtaataaaaccttaagttacgtactgagaa

SEQ ID NO: 132592 - DNA, 80 bp, synthetic construct
  misc_feature 1..80: note = Artificially Synthesized Probe
  source 1..80: mol_type = other DNA
caagtagaaaatgtacatatttaagcatcagcatagtcccattcatgatggttggttttaagttattaaacacagcaccc

SEQ ID NO: 132593 - DNA, 80 bp, synthetic construct; identical to SEQ ID NO: 42002
  misc_feature 1..80: note = Artificially Synthesized Probe
  source 1..80: mol_type = other DNA

SEQ ID NO: 132594 - DNA, 80 bp, synthetic construct; identical to SEQ ID NO: 42026
  misc_feature 1..80: note = Artificially Synthesized Probe
  source 1..80: mol_type = other DNA

SEQ ID NO: 132595 - DNA, 80 bp, synthetic construct
  misc_feature 1..80: note = Artificially Synthesized Probe
  source 1..80: mol_type = other DNA
ttgggacacacttttcttcttttatggtgacataattatagattccgttacactgaaacccaccgtcgagtctgtagtgg

SEQ ID NO: 132596 - DNA, 80 bp, synthetic construct
  misc_feature 1..80: note = Artificially Synthesized Probe
  source 1..80: mol_type = other DNA
ctagaatgtttctgagcagaatagcgtagttatgatttggggttaatatatgtgctctgaactcatgcataccattacat

SEQ ID NO: 132597 - DNA, 80 bp, synthetic construct; identical to SEQ ID NO: 42027
  misc_feature 1..80: note = Artificially Synthesized Probe
  source 1..80: mol_type = other DNA

SEQ ID NO: 132598 - DNA, 80 bp, synthetic construct
  misc_feature 1..80: note = Artificially Synthesized Probe
  source 1..80: mol_type = other DNA
tctaggctttgttgagccagctgtaatttttcaaatttactttttaacatactctgttataggttgtcccttcattcctt

SEQ ID NO: 132599 - DNA, 80 bp, synthetic construct
  misc_feature 1..80: note = Artificially Synthesized Probe
  source 1..80: mol_type = other DNA
actttcagctttgttttcatgacccctgtgttcccatcgtggctccattgtccttggtcatctgttgtttcttctgcttg

SEQ ID NO: 132600 - DNA, 80 bp, synthetic construct
  misc_feature 1..80: note = Artificially Synthesized Probe
  source 1..80: mol_type = other DNA
aaccttttcgttcttgacacacttcttctgtcgtgaactaatagaaaattctgtgcggcacttcttcctgtattttgagt

SEQ ID NO: 132601 - DNA, 80 bp, synthetic construct; identical to SEQ ID NO: 42028
  misc_feature 1..80: note = Artificially Synthesized Probe
  source 1..80: mol_type = other DNA

SEQ ID NO: 132602 - DNA, 80 bp, synthetic construct
  misc_feature 1..80: note = Artificially Synthesized Probe
  source 1..80: mol_type = other DNA
caggagttgtccggttcctccctggcgtggggctgttgtccccttgcgatcagtaatctaactctggggagccactgtga

SEQ ID NO: 132603 - DNA, 80 bp, synthetic construct
  misc_feature 1..80: note = Artificially Synthesized Probe
  source 1..80: mol_type = other DNA
tttactgatgctcaggttgtcccagatttggccatcaagagtcacttcagactggcacctgtgttcttttgagcactttc

SEQ ID NO: 132604 - DNA, 80 bp, synthetic construct
  misc_feature 1..80: note = Artificially Synthesized Probe
  source 1..80: mol_type = other DNA
gctttaaaaaaatccacccagaggctaattaacccttaactttttaatattatgtacatagttctcttagtaggcaacat

SEQ ID NO: 132605 - DNA, 80 bp, synthetic construct
  misc_feature 1..80: note = Artificially Synthesized Probe
  source 1..80: mol_type = other DNA
gatagggatgtgccttagacatcaagaactgggccggtcatggtggctcacgcttgtaatcccagcactttgggaggcca

SEQ ID NO: 132606 - DNA, 80 bp, synthetic construct
  misc_feature 1..80: note = Artificially Synthesized Probe
  source 1..80: mol_type = other DNA
gtggaggttgcagtgagccgagatcgtgctactgcactctagtctgggagacagagcaagactctgtctcaaaagaaaaa

SEQ ID NO: 132607 - DNA, 80 bp, synthetic construct; identical to SEQ ID NO: 42029
  misc_feature 1..80: note = Artificially Synthesized Probe
  source 1..80: mol_type = other DNA

SEQ ID NO: 132608 - DNA, 80 bp, synthetic construct
  misc_feature 1..80: note = Artificially Synthesized Probe
  source 1..80: mol_type = other DNA
catcttgatcacgttgagacatactcaagagcaagggctgcctttccttttgtgcaagtctgcttctgtgttttacactt

SEQ ID NO: 132609 - DNA, 80 bp, synthetic construct
  misc_feature 1..80: note = Artificially Synthesized Probe
  source 1..80: mol_type = other DNA
gttgagaccacaggcatgcgcccagctaatttttttgtattttctgtagagatagggttttgccatgttggacaggctgg

SEQ ID NO: 132610 - DNA, 80 bp, synthetic construct
  misc_feature 1..80: note = Artificially Synthesized Probe
  source 1..80: mol_type = other DNA
ctaggctgacgccatcctcccacctcagcctcccaagtagctgggaccacgcctgccttttttttttttttttggtgttt

SEQ ID NO: 132611 - DNA, 80 bp, synthetic construct; identical to SEQ ID NO: 42030
  misc_feature 1..80: note = Artificially Synthesized Probe
  source 1..80: mol_type = other DNA

SEQ ID NO: 132612 - DNA, 80 bp, synthetic construct
  misc_feature 1..80: note = Artificially Synthesized Probe
  source 1..80: mol_type = other DNA
gtctctaaggtttggtggaattttgggaaactagctgggccaggtacttttttgtaactctttgatgaaaattggtctgt

SEQ ID NO: 132613 - DNA, 80 bp, synthetic construct
  misc_feature 1..80: note = Artificially Synthesized Probe
  source 1..80: mol_type = other DNA
tggtgcgatcttggctcactgcaacctctgcctcttgggttcaagtggttctcctgcctcagcctcccgagtagctggga

SEQ ID NO: 132614 - DNA, 80 bp, synthetic construct
  misc_feature 1..80: note = Artificially Synthesized Probe
  source 1..80: mol_type = other DNA
tttgacttttaaaatgttttgtcagtaattattttcccatcattatttatttattattattattattttttgagacggac

SEQ ID NO: 132615 - DNA, 80 bp, synthetic construct; identical to SEQ ID NO: 42031
  misc_feature 1..80: note = Artificially Synthesized Probe
  source 1..80: mol_type = other DNA

SEQ ID NO: 132616 - DNA, 80 bp, synthetic construct
  misc_feature 1..80: note = Artificially Synthesized Probe
  source 1..80: mol_type = other DNA
gggaagaatatagaatgtaactggttcaggtgaatttaaaaactgtgtatatgtagggatagaagaatgaaaagttccca

SEQ ID NO: 132617 - DNA, 80 bp, synthetic construct
  misc_feature 1..80: note = Artificially Synthesized Probe
  source 1..80: mol_type = other DNA
tttctactttcatttgtattattttcttctttttgttttctcatggtttactttgttcattttttagttttcgggcgttt

SEQ ID NO: 132618 - DNA, 80 bp, synthetic construct
  misc_feature 1..80: note = Artificially Synthesized Probe
  source 1..80: mol_type = other DNA
tttaacagaaagctttttagcttacagaaaaaaaaagattaaaaaaattttgtttagaaatttctagctttattgcattg

SEQ ID NO: 132619 - DNA, 80 bp, synthetic construct
  misc_feature 1..80: note = Artificially Synthesized Probe
  source 1..80: mol_type = other DNA
agacctatcttactgcttgtgttgtttaggtcatttatattttgaattttgtccatttgacctatctttaactgacagtg

SEQ ID NO: 132620 - DNA, 80 bp, synthetic construct; identical to SEQ ID NO: 42032
  misc_feature 1..80: note = Artificially Synthesized Probe
  source 1..80: mol_type = other DNA

SEQ ID NO: 132621 - DNA, 80 bp, synthetic construct
  misc_feature 1..80: note = Artificially Synthesized Probe
  source 1..80: mol_type = other DNA
agtgtgtcttttctccacttactgggaatgtcacctgtattttaaaccaacatcctgtatgcacaatattctagacactt

SEQ ID NO: 132622 - DNA, 80 bp, synthetic construct
  misc_feature 1..80: note = Artificially Synthesized Probe
  source 1..80: mol_type = other DNA
agcgattcttctgtcccagtctcctgagtagctgggactacaggcgcccaccaccacccctggctaatttttgtattatt

SEQ ID NO: 132623 - DNA, 80 bp, synthetic construct
  misc_feature 1..80: note = Artificially Synthesized Probe
  source 1..80: mol_type = other DNA
taaaccttgtggccatctacattttcccttccacatgtcgagtgtccaaatttattttctgaagatggctgtagcagcat

SEQ ID NO: 132624 - DNA, 80 bp, synthetic construct
  misc_feature 1..80: note = Artificially Synthesized Probe
  source 1..80: mol_type = other DNA
gattctctcggggtgcttgttcttagattccagccaccatgctgtggggaagccaagcagccccgtgggaaggccactcg

SEQ ID NO: 132625 - DNA, 80 bp, synthetic construct; identical to SEQ ID NO: 42033
  misc_feature 1..80: note = Artificially Synthesized Probe
  source 1..80: mol_type = other DNA

SEQ ID NO: 132626 - DNA, 80 bp, synthetic construct
  misc_feature 1..80: note = Artificially Synthesized Probe
  source 1..80: mol_type = other DNA
ttttgaatgagacttttttccttaaaattacattctaatagccttttttttttcaaatcttgattatcgtctatttaaaa

SEQ ID NO: 132627 - DNA, 80 bp, synthetic construct
  misc_feature 1..80: note = Artificially Synthesized Probe
  source 1..80: mol_type = other DNA
gtgacccctcccttagcctgccaagtagccagcactacaggtatgacccacctcacctggcctgaattattttaataata

SEQ ID NO: 132628 - DNA, 80 bp, synthetic construct
  misc_feature 1..80: note = Artificially Synthesized Probe
  source 1..80: mol_type = other DNA
tcattgacttctgttttctccctcccagcctttgttattgttgtcatacattttctatacttgttaaaaccccatagtac

SEQ ID NO: 132629 - DNA, 80 bp, synthetic construct; identical to SEQ ID NO: 42034
  misc_feature 1..80: note = Artificially Synthesized Probe
  source 1..80: mol_type = other DNA

SEQ ID NO: 132630 - DNA, 80 bp, synthetic construct
  misc_feature 1..80: note = Artificially Synthesized Probe
  source 1..80: mol_type = other DNA
cctgttccttttctttaaaatccctccgcctcccgggttcaagcgattctcctgcctcagcctcctgagtagctgggatt

SEQ ID NO: 132631 - DNA, 80 bp, synthetic construct
  misc_feature 1..80: note = Artificially Synthesized Probe
  source 1..80: mol_type = other DNA
ttgttgctgtctcttcctttgtgcagatccaggttttcatctggtctggatttcctgctgaccgaaggatttctgtaacc

SEQ ID NO: 132632 - DNA, 80 bp, synthetic construct
  misc_feature 1..80: note = Artificially Synthesized Probe
  source 1..80: mol_type = other DNA
tcccatgagaaatctttcattattatttttgttattttgtacaaaagtggctttttttctttgcattttaagattttttc

SEQ ID NO: 132633 - DNA, 80 bp, synthetic construct
  misc_feature 1..80: note = Artificially Synthesized Probe
  source 1..80: mol_type = other DNA
gctaattttttttgtatttttagtagtagagacggggtttaaccgtgttggccaggctagtctcgagctcccgaccttct

SEQ ID NO: 132634 - DNA, 80 bp, synthetic construct; identical to SEQ ID NO: 42035
  misc_feature 1..80: note = Artificially Synthesized Probe
  source 1..80: mol_type = other DNA

SEQ ID NO: 132635 - DNA, 80 bp, synthetic construct
  misc_feature 1..80: note = Artificially Synthesized Probe
  source 1..80: mol_type = other DNA
ggttggaaagctaattaaacttctaacttgcttaaatagaattacagaaaggtaaattgtgtttttcacagagatgcagt

SEQ ID NO: 132636 - DNA, 80 bp, synthetic construct
  misc_feature 1..80: note = Artificially Synthesized Probe
  source 1..80: mol_type = other DNA
aagagactccagttcttcatctccaggaatagcaagttgcaagtgacaaggggtgacacgctttacctttaagttttttt

SEQ ID NO: 132637 - DNA, 80 bp, synthetic construct
  misc_feature 1..80: note = Artificially Synthesized Probe
  source 1..80: mol_type = other DNA
aattttgtatttttagtagagacggggtttctccatgttggtcaggctggtcttgaacttccaacctcaggcgatcctcc

SEQ ID NO: 132638 - DNA, 80 bp, synthetic construct
  misc_feature 1..80: note = Artificially Synthesized Probe
  source 1..80: mol_type = other DNA
acaggcgtacaccaccatgcccacctaatttttgtattttaatagagacacagtttcaccttgttggccaggcaggtcta

SEQ ID NO: 132639 - DNA, 80 bp, synthetic construct; identical to SEQ ID NO: 42036
  misc_feature 1..80: note = Artificially Synthesized Probe
  source 1..80: mol_type = other DNA

SEQ ID NO: 132640 - DNA, 80 bp, synthetic construct
  misc_feature 1..80: note = Artificially Synthesized Probe
  source 1..80: mol_type = other DNA
cctactccttcggcgcactgtgattcaaactgcttggggtttatagttttgatttaatttggaacatttttattttattt

SEQ ID NO: 132641 - DNA, 80 bp, synthetic construct
  misc_feature 1..80: note = Artificially Synthesized Probe
  source 1..80: mol_type = other DNA
tgaagtataggcgtgtgccaccgtacccggctaatttttgtatttttagtaaaaatggggtttcgccatgttggccaggc

SEQ ID NO: 132642 - DNA, 80 bp, synthetic construct; identical to SEQ ID NO: 42037
  misc_feature 1..80: note = Artificially Synthesized Probe
  source 1..80: mol_type = other DNA

SEQ ID NO: 132643 - DNA, 80 bp, synthetic construct
  misc_feature 1..80: note = Artificially Synthesized Probe
  source 1..80: mol_type = other DNA
gttttcatctctaaaagttccatatgggtctttttcttaattaagtatcttccatgtgtcttcttcacttcagtccacta

SEQ ID NO: 132644 - DNA, 80 bp, synthetic construct
  misc_feature 1..80: note = Artificially Synthesized Probe
  source 1..80: mol_type = other DNA
gatttgataggtctggagcagtgatcagtccaggacaaattattccttacagccgaggcaacacagtcttgagttcctct

SEQ ID NO: 132645 - DNA, 80 bp, synthetic construct
  misc_feature 1..80: note = Artificially Synthesized Probe
  source 1..80: mol_type = other DNA
ccggtctactttactcaccatgtccctctcctctcctaacacagtcctaggaagtctagctgtcttgatctccctggcct

SEQ ID NO: 132646 - DNA, 80 bp, synthetic construct; identical to SEQ ID NO: 42038
  misc_feature 1..80: note = Artificially Synthesized Probe
  source 1..80: mol_type = other DNA

SEQ ID NO: 132647 - DNA, 80 bp, synthetic construct
  misc_feature 1..80: note = Artificially Synthesized Probe
  source 1..80: mol_type = other DNA
agcaattctcctgcctcagcctgctaaatagctgggattacaggtgcacgctaccatgcccagctaatttttgcattttt

SEQ ID NO: 132648 - DNA, 80 bp, synthetic construct
  misc_feature 1..80: note = Artificially Synthesized Probe
  source 1..80: mol_type = other DNA
tggtgtaaatctagtccctgtcacttcatcttggctagaagcagttcactcattgatttctagcttttgatggagtgtaa

SEQ ID NO: 132649 - DNA, 80 bp, synthetic construct
  misc_feature 1..80: note = Artificially Synthesized Probe
  source 1..80: mol_type = other DNA
tgcagattgttctgaatttggcttctgtactgatgtactgagaatgtactgattctttgagtactctctgggctcatccc

SEQ ID NO: 132650 - DNA, 80 bp, synthetic construct; identical to SEQ ID NO: 42003
  misc_feature 1..80: note = Artificially Synthesized Probe
  source 1..80: mol_type = other DNA

SEQ ID NO: 132651 - DNA, 80 bp, synthetic construct; identical to SEQ ID NO: 42039
  misc_feature 1..80: note = Artificially Synthesized Probe
  source 1..80: mol_type = other DNA

SEQ ID NO: 132652 - DNA, 80 bp, synthetic construct
  misc_feature 1..80: note = Artificially Synthesized Probe
  source 1..80: mol_type = other DNA
tcccacacttgcctggcagtgtgcctggcacagacttcctcctcacctcacttgatctgcaattaggacaggctcgggac

SEQ ID NO: 132653 - DNA, 80 bp, synthetic construct
  misc_feature 1..80: note = Artificially Synthesized Probe
  source 1..80: mol_type = other DNA
ctggacaccctcctcactgctgagctctggtacctggggcggcctgctgtgcttgcccaccttgggccctgatgccctgc

SEQ ID NO: 132654 - DNA, 80 bp, synthetic construct
  misc_feature 1..80: note = Artificially Synthesized Probe
  source 1..80: mol_type = other DNA
ctgttgcccaggatggaatgcagtggcatgatctcggctcactgcaacctccgcctcccaggttcatacaattctcctgc

SEQ ID NO: 132655 - DNA, 80 bp, synthetic construct; identical to SEQ ID NO: 42040
  misc_feature 1..80: note = Artificially Synthesized Probe
  source 1..80: mol_type = other DNA

SEQ ID NO: 132656 - DNA, 80 bp, synthetic construct
  misc_feature 1..80: note = Artificially Synthesized Probe
  source 1..80: mol_type = other DNA
ctggggtgggggtggggaggagtccagctaaagggctcttggtggccttgtaagaggtggagaggcttccagcagctcct

SEQ ID NO: 132657 - DNA, 80 bp, synthetic construct
  misc_feature 1..80: note = Artificially Synthesized Probe
  source 1..80: mol_type = other DNA
atgcttcaagtcccaagaactgccgtgctgtggaaaatgtgcactagataattaagttactgttgggtatttatttgcag

SEQ ID NO: 132658 - DNA, 80 bp, synthetic construct
  misc_feature 1..80: note = Artificially Synthesized Probe
  source 1..80: mol_type = other DNA
gaagtactgccttttggaactttctatttagttagttaaaccaaaagagaggctgggtacagaatttaggatttaatatt

SEQ ID NO: 132659 - DNA, 80 bp, synthetic construct
  misc_feature 1..80: note = Artificially Synthesized Probe
  source 1..80: mol_type = other DNA
ttccatttttagtagagatggggtttcaccatgttgcccaagctggtcttgaactcctgagctcaggcaatccacccacc

SEQ ID NO: 132660 - DNA, 80 bp, synthetic construct; identical to SEQ ID NO: 42041
  misc_feature 1..80: note = Artificially Synthesized Probe
  source 1..80: mol_type = other DNA

SEQ ID NO: 132661 - DNA, 80 bp, synthetic construct
  misc_feature 1..80: note = Artificially Synthesized Probe
  source 1..80: mol_type = other DNA
ttgtttttcagccacagggtcagttttctgttttgaaatagacttgggtttctgttccaagggtgtattaggaaagacac

SEQ ID NO: 132662 - DNA, 80 bp, synthetic construct
  misc_feature 1..80: note = Artificially Synthesized Probe
  source 1..80: mol_type = other DNA
tgtatgtagaaagggccctttctctggcaggctcatgcttgggcctctgcgtgagaagcaggattgatttctgggatggc

SEQ ID NO: 132663 - DNA, 80 bp, synthetic construct
  misc_feature 1..80: note = Artificially Synthesized Probe
  source 1..80: mol_type = other DNA
agaagctgccgggaagcttgcctggggttcctgtgggcagtctgggctgtgccatgacagccagcttgcctcctgagatg

SEQ ID NO: 132664 - DNA, 80 bp, synthetic construct
  misc_feature 1..80: note = Artificially Synthesized Probe
  source 1..80: mol_type = other DNA
tgggacgctcacatcccttggggttgtgagaactggggatcatgcatgcctgtgtgcggcactgagacccacagagcacg

SEQ ID NO: 132665 - DNA, 80 bp, synthetic construct; identical to SEQ ID NO: 42042
  misc_feature 1..80: note = Artificially Synthesized Probe
  source 1..80: mol_type = other DNA

SEQ ID NO: 132666 - DNA, 80 bp, synthetic construct
  misc_feature 1..80: note = Artificially Synthesized Probe
  source 1..80: mol_type = other DNA
cttgacatgatacagattgctggcttcctgggtagtaataaatatttactcagcaatctcgagtgagtgtccatggggtg

SEQ ID NO: 132667 - DNA, 80 bp, synthetic construct
  misc_feature 1..80: note = Artificially Synthesized Probe
  source 1..80: mol_type = other DNA
cagctcctgcagttcttctgtagaacgggtccttaaaggtttttgttttttttttgaaatgacggcacctgtgttttttt

SEQ ID NO: 132668 - DNA, 80 bp, synthetic construct
  misc_feature 1..80: note = Artificially Synthesized Probe
  source 1..80: mol_type = other DNA
ctttctcttcagtgatgccattgccagctgagccagccagcacgttaactcctctataaccgatggtctgtatctcgtag

SEQ ID NO: 132669 - DNA, 80 bp, synthetic construct; identical to SEQ ID NO: 42043
  misc_feature 1..80: note = Artificially Synthesized Probe
  source 1..80: mol_type = other DNA

SEQ ID NO: 132670 - DNA, 80 bp, synthetic construct
  misc_feature 1..80: note = Artificially Synthesized Probe
  source 1..80: mol_type = other DNA
caaacaataaatgcatttccagactctcagtgttagtgagtggataatattccatagtattaatgtgccgtaagttattt

SEQ ID NO: 132671 - DNA, 80 bp, synthetic construct
  misc_feature 1..80: note = Artificially Synthesized Probe
  source 1..80: mol_type = other DNA
aggaaaattgcttggtaacagattttgtgcattttttgggcttttgctagttacgaggctggtagaggcaagggttgact

SEQ ID NO: 132672 - DNA, 80 bp, synthetic construct
  misc_feature 1..80: note = Artificially Synthesized Probe
  source 1..80: mol_type = other DNA
ttcgttgttttgggctctccttttctgagttaatgatttaggcttgatgtgaacttctgaagtgtagttcttttttactt

SEQ ID NO: 132673 - DNA, 80 bp, synthetic construct
  misc_feature 1..80: note = Artificially Synthesized Probe
  source 1..80: mol_type = other DNA
gtgatctgttctcattagtcacatctgttgcctgtttcatttttctgagtttctgtatttggggttccaggtctgatatt

SEQ ID NO: 132674 - DNA, 80 bp, synthetic construct; identical to SEQ ID NO: 42044
  misc_feature 1..80: note = Artificially Synthesized Probe
  source 1..80: mol_type = other DNA

SEQ ID NO: 132675 - DNA, 80 bp, synthetic construct
  misc_feature 1..80: note = Artificially Synthesized Probe
  source 1..80: mol_type = other DNA
ttcacatggtggaacatgtagagtgtatgctgcttcactgttttgtccactgatttataattccatgaatttagccatgc

SEQ ID NO: 132676 - DNA, 80 bp, synthetic construct
  misc_feature 1..80: note = Artificially Synthesized Probe
  source 1..80: mol_type = other DNA
tctagattactattaccaaggctaaagaaatttaccatttccagcctatcagataaatacgttgccttgtccaaatctgt

SEQ ID NO: 132677 - DNA, 80 bp, synthetic construct
  misc_feature 1..80: note = Artificially Synthesized Probe
  source 1..80: mol_type = other DNA
tatgttaagccatgttctaagcctttatttgttaattgtttattaaccttccccttcaagagctcacaggctagtgggag

SEQ ID NO: 132678 - DNA, 80 bp, synthetic construct; identical to SEQ ID NO: 42045
  misc_feature 1..80: note = Artificially Synthesized Probe
  source 1..80: mol_type = other DNA

SEQ ID NO: 132679 - DNA, 80 bp, synthetic construct
  misc_feature 1..80: note = Artificially Synthesized Probe
  source 1..80: mol_type = other DNA
ttgaatttctgtagaacttactgctcgtgttcatgaccagttcatgatgaagccttttcctaacctggtttcttaccgcc

SEQ ID NO: 132680 - DNA, 80 bp, synthetic construct
  misc_feature 1..80: note = Artificially Synthesized Probe
  source 1..80: mol_type = other DNA
tacaaaaattaaccaggcatggtggtgcgtgcctgtgatcccagctactggggaggatcactggagcctgggaggtggag

SEQ ID NO: 132681 - DNA, 80 bp, synthetic construct
  misc_feature 1..80: note = Artificially Synthesized Probe
  source 1..80: mol_type = other DNA
gatagtctgttcatgtctttgcaggtgtgttgtgctctccgaccccttgaaggactcttctcgaactcaggaatcctgga

SEQ ID NO: 132682 - DNA, 80 bp, synthetic construct; identical to SEQ ID NO: 42046
  misc_feature 1..80: note = Artificially Synthesized Probe
  source 1..80: mol_type = other DNA

SEQ ID NO: 132683 - DNA, 80 bp, synthetic construct
  misc_feature 1..80: note = Artificially Synthesized Probe
  source 1..80: mol_type = other DNA
gggggcaaaagctggagcagtttcagtgacagaataaataaggatagagtcgaggtttaacccatggaataaaattaata

SEQ ID NO: 132684 - DNA, 80 bp, synthetic construct
  misc_feature 1..80: note = Artificially Synthesized Probe
  source 1..80: mol_type = other DNA
tccacttaaacgcagaaggaaagaaaaacagaaaatcacttttaagccagtgctccagcaagaactgttggaggcaggat

SEQ ID NO: 132685 - DNA, 80 bp, synthetic construct
  misc_feature 1..80: note = Artificially Synthesized Probe
  source 1..80: mol_type = other DNA
agtggtgtgatcttggctaactgcaagctccgcctcccgggttcacgccattctcctgcctcagccttccgagtagctgg

SEQ ID NO: 132686 - DNA, 80 bp, synthetic construct
  misc_feature 1..80: note = Artificially Synthesized Probe
  source 1..80: mol_type = other DNA
gcgacctctgacccctggggggcgccctcgggccggctgcagttggagccggtggaacccggcggactctgcccgggact

SEQ ID NO: 132687 - DNA, 80 bp, synthetic construct; identical to SEQ ID NO: 42047
  misc_feature 1..80: note = Artificially Synthesized Probe
  source 1..80: mol_type = other DNA

SEQ ID NO: 132688 - DNA, 80 bp, synthetic construct
  misc_feature 1..80: note = Artificially Synthesized Probe
  source 1..80: mol_type = other DNA
ggtttgggggtcgagggtggggtcttagagcagaaacaactacatcagtggaaaaaccactgaaattccaatgagggcta

SEQ ID NO: 132689 - DNA, 80 bp, synthetic construct
  misc_feature 1..80: note = Artificially Synthesized Probe
  source 1..80: mol_type = other DNA
ttaaaatgagtaaggaaggaaattctgacacacactacagcatggatgggcctagaggacatgatgccgagtgaaataag

SEQ ID NO: 132690 - DNA, 80 bp, synthetic construct
  misc_feature 1..80: note = Artificially Synthesized Probe
  source 1..80: mol_type = other DNA
tgggatattggttgcacaatagtgtgagtgcatttaacactactgagctgtagtcttctctctctctctctctttttttt

SEQ ID NO: 132691 - DNA, 80 bp, synthetic construct
  misc_feature 1..80: note = Artificially Synthesized Probe
  source 1..80: mol_type = other DNA
ttttagtagagatggggttttgccatattgcccaggctggtctcaaactcctggcctcaagtgatcctcgcaaagtgctg

SEQ ID NO: 132692 - DNA, 80 bp, synthetic construct; identical to SEQ ID NO: 42048
  misc_feature 1..80: note = Artificially Synthesized Probe
  source 1..80: mol_type = other DNA

SEQ ID NO: 132693 - DNA, 80 bp, synthetic construct
  misc_feature 1..80: note = Artificially Synthesized Probe
  source 1..80: mol_type = other DNA
aatggagatcagaaggcaatcacctgttgccctctcttttcattttctcattcaacaaaggttactgagcacggacaggt

SEQ ID NO: 132694 - DNA, 80 bp, synthetic construct
  misc_feature 1..80: note = Artificially Synthesized Probe
  source 1..80: mol_type = other DNA
aaggcctgactgggctggggacttagccagagctgaaggagtttggagagcaagccatgtgggtgtatagaggaagagga

SEQ ID NO: 132695 - DNA, 80 bp, synthetic construct; identical to SEQ ID NO: 42049
  misc_feature 1..80: note = Artificially Synthesized Probe
  source 1..80: mol_type = other DNA

SEQ ID NO: 132696 - DNA, 80 bp, synthetic construct
  misc_feature 1..80: note = Artificially Synthesized Probe
  source 1..80: mol_type = other DNA
gtcatggagagggaatagtgagtgtagacagggaagtccaagggcggagccctgcggcctccagcagagagcctcgggga

SEQ ID NO: 132697 - DNA, 80 bp, synthetic construct; identical to SEQ ID NO: 42004
  misc_feature 1..80: note = Artificially Synthesized Probe
  source 1..80: mol_type = other DNA

SEQ ID NO: 132698 - DNA, 80 bp, synthetic construct
  misc_feature 1..80: note = Artificially Synthesized Probe
  source 1..80: mol_type = other DNA
ttttcctagcttcttgtgcatgcgtgaatgttgacatatgcggtcgtcacattggttgttacttagcggagcgtagacat

SEQ ID NO: 132699 - DNA, 80 bp, synthetic construct
  misc_feature 1..80: note = Artificially Synthesized Probe
  source 1..80: mol_type = other DNA
tattcatagtgctgcgtgcctttctctgtcgtttaatggctacatactgtttcttctatacattgatttatgtttttgtt

SEQ ID NO: 132700 - DNA, 80 bp, synthetic construct; identical to SEQ ID NO: 42050
  misc_feature 1..80: note = Artificially Synthesized Probe
  source 1..80: mol_type = other DNA

SEQ ID NO: 132701 - DNA, 80 bp, synthetic construct
  misc_feature 1..80: note = Artificially Synthesized Probe
  source 1..80: mol_type = other DNA
ataataataatttaaaaaaactgttttccaggtataaaatgtcctttccacaactcagtggcctgctggtgatgcttcga

SEQ ID NO: 132702 - DNA, 80 bp, synthetic construct
  misc_feature 1..80: note = Artificially Synthesized Probe
  source 1..80: mol_type = other DNA
aaagaattagcacagtgaaaccatacacagagagaaacattggttattgtcctcagtgtttttcgctgatacttattttg

SEQ ID NO: 132703 - DNA, 80 bp, synthetic construct
  misc_feature 1..80: note = Artificially Synthesized Probe
  source 1..80: mol_type = other DNA
ggttcttttatgcttcttgccaccacaagcagtgctgtagtgggcatctctgccaggtgttctttttgagaacccttgtc

SEQ ID NO: 132704 - DNA, 80 bp, synthetic construct; identical to SEQ ID NO: 42051
  misc_feature 1..80: note = Artificially Synthesized Probe
  source 1..80: mol_type = other DNA

SEQ ID NO: 132705 - DNA, 80 bp, synthetic construct
  misc_feature 1..80: note = Artificially Synthesized Probe
  source 1..80: mol_type = other DNA
cctgcctcagcagtgggactgggactacaggcgcctgccaccacgcctggctaatgttttgtatttttagtagagacggg

SEQ ID NO: 132706 - DNA, 80 bp, synthetic construct
  misc_feature 1..80: note = Artificially Synthesized Probe
  source 1..80: mol_type = other DNA
tctgtcccccaggctggagggcagtggtgtgatcttggcccactgcaacctctgcctccagggttcaagcgattttcgtg

SEQ ID NO: 132707 - DNA, 80 bp, synthetic construct
  misc_feature 1..80: note = Artificially Synthesized Probe
  source 1..80: mol_type = other DNA
agaaacattcttcttaggaaatcgcagttgttgcagagagtatgtatttggaggcggggactaaaggcaccaacaaatgt

SEQ ID NO: 132708 - DNA, 80 bp, synthetic construct
  misc_feature 1..80: note = Artificially Synthesized Probe
  source 1..80: mol_type = other DNA
tatagttgtgagccaccatgcccagcctatacatacatacatacacacacacacacacacacacacacacacactttttt

SEQ ID NO: 132709 - DNA, 80 bp, synthetic construct; identical to SEQ ID NO: 42052
  misc_feature 1..80: note = Artificially Synthesized Probe
  source 1..80: mol_type = other DNA

SEQ ID NO: 132710 - DNA, 80 bp, synthetic construct
  misc_feature 1..80: note = Artificially Synthesized Probe
  source 1..80: mol_type = other DNA
tggtctcgatctcctcgtgatctgcccacctcagcctcccaaagtgctgggattacaggcgtgagccactgcgcctggcc

SEQ ID NO: 132711 - DNA, 80 bp, synthetic construct
  misc_feature 1..80: note = Artificially Synthesized Probe
  source 1..80: mol_type = other DNA
ttaaaaaatagatttatttagcaaaaaacgtttgaatttaataaagaaatggcaataactggtgcatacattagttgaaa

SEQ ID NO: 132712 - DNA, 80 bp, synthetic construct
  misc_feature 1..80: note = Artificially Synthesized Probe
  source 1..80: mol_type = other DNA
ggttaacaaccttgaggtcatatcataggagctttaaaagctgcgtttaacctatacattctaactgagggcatttgtta

SEQ ID NO: 132713 - DNA, 80 bp, synthetic construct
  misc_feature 1..80: note = Artificially Synthesized Probe
  source 1..80: mol_type = other DNA
gcatgtgagaaggagccttcaaggctgaaatatcttacatatttcttatatttgacataatttatttggttttttctctc

SEQ ID NO: 132714 - DNA, 80 bp, synthetic construct; identical to SEQ ID NO: 42053
  misc_feature 1..80: note = Artificially Synthesized Probe
  source 1..80: mol_type = other DNA

SEQ ID NO: 132715 - DNA, 80 bp, synthetic construct
  misc_feature 1..80: note = Artificially Synthesized Probe
  source 1..80: mol_type = other DNA
agccaagggaactgctggtacagggctgggctggtacagggctgggtccactccacactgctgggtgctccaatagccct

SEQ ID NO: 132716 - DNA, 80 bp, synthetic construct
  misc_feature 1..80: note = Artificially Synthesized Probe
  source 1..80: mol_type = other DNA
gtttaaccatgccaggatgccacgtaggaatgaactggttatgacacctctctgttgaagtgagaaaaatagattcaaag

SEQ ID NO: 132717 - DNA, 80 bp, synthetic construct; identical to SEQ ID NO: 42054
  misc_feature 1..80: note = Artificially Synthesized Probe
  source 1..80: mol_type = other DNA

SEQ ID NO: 132718 - DNA, 80 bp, synthetic construct
  misc_feature 1..80: note = Artificially Synthesized Probe
  source 1..80: mol_type = other DNA
gtgtcaggattatagtcagtgtgcaaaaaaagttactaaggagaggttcctcaattttctctgttcacaatgcttttagt

SEQ ID NO: 132719 - DNA, 80 bp, synthetic construct
  misc_feature 1..80: note = Artificially Synthesized Probe
  source 1..80: mol_type = other DNA
gtgacttcccaacctgttcagctcccgcccatgactttctgggcatggtagggtggtgtgccttgttgcctgggtcacgt

SEQ ID NO: 132720 - DNA, 80 bp, synthetic construct
  misc_feature 1..80: note = Artificially Synthesized Probe
  source 1..80: mol_type = other DNA
ctttcatgatgtgtgtttgtttagatggtgccaactggctgacttttttctgccagccagtgaagagctggaacggattg

SEQ ID NO: 132721 - DNA, 80 bp, synthetic construct
  misc_feature 1..80: note = Artificially Synthesized Probe
  source 1..80: mol_type = other DNA
acaactgcgtgcaggaactgaagctcttagaagtgagtcggctgttttcccaatttacccgtttcttgattgttccagca

SEQ ID NO: 132722 - DNA, 80 bp, synthetic construct; identical to SEQ ID NO: 42055
  misc_feature 1..80: note = Artificially Synthesized Probe
  source 1..80: mol_type = other DNA

SEQ ID NO: 132723 - DNA, 80 bp, synthetic construct
  misc_feature 1..80: note = Artificially Synthesized Probe
  source 1..80: mol_type = other DNA
agataaatagttttgcacatggccatgcaggtagcaatgtgagtgacacacagcaggctgtgccccattgattagtagta

SEQ ID NO: 132724 - DNA, 80 bp, synthetic construct
  misc_feature 1..80: note = Artificially Synthesized Probe
  source 1..80: mol_type = other DNA
tgagatgaaaggactgtagagaccgtatctagtctggtgattcttgtttcagggtcctctttacccaaaacaattcacac

SEQ ID NO: 132725 - DNA, 80 bp, synthetic construct
  misc_feature 1..80: note = Artificially Synthesized Probe
  source 1..80: mol_type = other DNA
ggaagtgattaggtctgaagagtataagccattgatggggacggtgtttcataatataggaacttatttttgtgtgcttg

SEQ ID NO: 132726 - DNA, 80 bp, synthetic construct; identical to SEQ ID NO: 42056
  misc_feature 1..80: note = Artificially Synthesized Probe
  source 1..80: mol_type = other DNA

SEQ ID NO: 132727 - DNA, 80 bp, synthetic construct
  misc_feature 1..80: note = Artificially Synthesized Probe
  source 1..80: mol_type = other DNA
tgagatttttgtcttactagccgggaggggggaaaattgaagtattcaagtccaaatgattcagacatgatgtcttctga

SEQ ID NO: 132728 - DNA, 80 bp, synthetic construct
  misc_feature 1..80: note = Artificially Synthesized Probe
  source 1..80: mol_type = other DNA
aaaaaatatatataagttggaagaaaaaaatattttcatcattcttcctaattgcagcagtgtgctacgtggggggcagg

SEQ ID NO: 132729 - DNA, 80 bp, synthetic construct
  misc_feature 1..80: note = Artificially Synthesized Probe
  source 1..80: mol_type = other DNA
gtgctcgtctgcagggccgggaagtcacaggtattttcaaggctttgtatcgtgtgaggagcctcttatccgtggtgtat

SEQ ID NO: 132730 - DNA, 80 bp, synthetic construct
  misc_feature 1..80: note = Artificially Synthesized Probe
  source 1..80: mol_type = other DNA
tgaggcaaggacgtgtcacccactgatgactttctcacagtctgtcagtctctttccttctaagaacccgcttcctgttt

SEQ ID NO: 132731 - DNA, 80 bp, synthetic construct
  misc_feature 1..80: note = Artificially Synthesized Probe
  source 1..80: mol_type = other DNA
cactgtttacttagagggcttcgctggtaacttcacgtcagaagtgtttctctttctctccttttttctaaatttttaaa

SEQ ID NO: 132732 - DNA, 80 bp, synthetic construct; identical to SEQ ID NO: 42057
  misc_feature 1..80: note = Artificially Synthesized Probe
  source 1..80: mol_type = other DNA

SEQ ID NO: 132733 - DNA, 80 bp, synthetic construct
  misc_feature 1..80: note = Artificially Synthesized Probe
  source 1..80: mol_type = other DNA
ttgatttgaagtacctcatttatttaaagagaataggaggcaacgaagtggccagctgtgatggaaactagccctgctct

SEQ ID NO: 132734 - DNA, 80 bp, synthetic construct
  misc_feature 1..80: note = Artificially Synthesized Probe
  source 1..80: mol_type = other DNA
gtgggtgctgcttactagccttgcgcactcccttaatggaaaatgtgttaagaatggagattgtgcctaccttgcacagc

SEQ ID NO: 132735 - DNA, 80 bp, synthetic construct
  misc_feature 1..80: note = Artificially Synthesized Probe
  source 1..80: mol_type = other DNA
aacagacaaatatacgaagaaaatgtcgttgcttttgctagcaggaagaggttccctttttttgtccatggccttcttat

SEQ ID NO: 132736 - DNA, 80 bp, synthetic construct; identical to SEQ ID NO: 42058
  misc_feature 1..80: note = Artificially Synthesized Probe
  source 1..80: mol_type = other DNA

SEQ ID NO: 132737 - DNA, 80 bp, synthetic construct
  misc_feature 1..80: note = Artificially Synthesized Probe
  source 1..80: mol_type = other DNA
tggaatgtgtttcattcagcgtttgaccttttatcaccttagctgctggttatgtaacagaccgtgtgggcctagcaggg

SEQ ID NO: 132738 - DNA, 80 bp, synthetic construct
  misc_feature 1..80: note = Artificially Synthesized Probe
  source 1..80: mol_type = other DNA
agctggccagctgggatcggtattctgaggtgcaggcctggcagaggacaaaggcagagatgtagtgtgggaatgtagat

SEQ ID NO: 132739 - DNA, 80 bp, synthetic construct
  misc_feature 1..80: note = Artificially Synthesized Probe
  source 1..80: mol_type = other DNA
tcactggacaaaaggaaagagaggactgtcaagaatcattcaagaaacgtttccttgcctgccaggcactgtgggagaca

SEQ ID NO: 132740 - DNA, 80 bp, synthetic construct; identical to SEQ ID NO: 42005
  misc_feature 1..80: note = Artificially Synthesized Probe
  source 1..80: mol_type = other DNA

SEQ ID NO: 132741 - DNA, 80 bp, synthetic construct; identical to SEQ ID NO: 42059
  misc_feature 1..80: note = Artificially Synthesized Probe
  source 1..80: mol_type = other DNA

SEQ ID NO: 132742 - DNA, 80 bp, synthetic construct
  misc_feature 1..80: note = Artificially Synthesized Probe
  source 1..80: mol_type = other DNA
tactaaaaatacaaaaattagctgggcgtgatggcaggcgcctgtaatcccagctactcgggaggctggggcgggagaat

SEQ ID NO: 132743 - DNA, 80 bp, synthetic construct
  misc_feature 1..80: note = Artificially Synthesized Probe
  source 1..80: mol_type = other DNA
atcttcattgagcttctgttttgtgccaaccattgtggtaggcactgtattttcagcagagagtgaaatagaattcctgg

SEQ ID NO: 132744 - DNA, 80 bp, synthetic construct; identical to SEQ ID NO: 42060
  misc_feature 1..80: note = Artificially Synthesized Probe
  source 1..80: mol_type = other DNA

SEQ ID NO: 132745 - DNA, 80 bp, synthetic construct
  misc_feature 1..80: note = Artificially Synthesized Probe
  source 1..80: mol_type = other DNA
tctgttgcccaggctggagtacagtggtgtgatcttggctcattgtagcctccgcctccagggttcaggcaattctcctg

SEQ ID NO: 132746 - DNA, 80 bp, synthetic construct
  misc_feature 1..80: note = Artificially Synthesized Probe
  source 1..80: mol_type = other DNA
ttacaggcgtgagctattgcacccagccggcagattttaaataaataggttcaagaaaaatttagtgaattgatggttct

SEQ ID NO: 132747 - DNA, 80 bp, synthetic construct
  misc_feature 1..80: note = Artificially Synthesized Probe
  source 1..80: mol_type = other DNA
cttgggaaaatgtctttgggaccttaaggttggcaaatattccttaaataggacatgaaacctttatggttatgcaccag

SEQ ID NO: 132748 - DNA, 80 bp, synthetic construct; identical to SEQ ID NO: 42061
  misc_feature 1..80: note = Artificially Synthesized Probe
  source 1..80: mol_type = other DNA

SEQ ID NO: 132749 - DNA, 80 bp, synthetic construct
  misc_feature 1..80: note = Artificially Synthesized Probe
  source 1..80: mol_type = other DNA
tgcatcactgggaccactttggaaggctgtttgcgatatctaatgggtatcgccattacaacacatgccccgtgacccag

SEQ ID NO: 132750 - DNA, 80 bp, synthetic construct
  misc_feature 1..80: note = Artificially Synthesized Probe
  source 1..80: mol_type = other DNA
tgtagtgtgctagggtacagtgatgaacgtgaatgggtcgtagtggatgactctaaccaacctgaagttgagctaaagaa

SEQ ID NO: 132751 - DNA, 80 bp, synthetic construct
  misc_feature 1..80: note = Artificially Synthesized Probe
  source 1..80: mol_type = other DNA
ctacaagatgtgtttctgaagagtttctagtaagttctttatgcaaatgaaatggaaaggtctgattttctttttttttt

SEQ ID NO: 132752 - DNA, 80 bp, synthetic construct
  misc_feature 1..80: note = Artificially Synthesized Probe
  source 1..80: mol_type = other DNA
agcgataagagagggcatactttttgattccttgtgtctgaagttcacggtgaagctacaccagtctgctgtgagctctc

SEQ ID NO: 132753 - DNA, 80 bp, synthetic construct; identical to SEQ ID NO: 42062
  misc_feature 1..80: note = Artificially Synthesized Probe
  source 1..80: mol_type = other DNA

SEQ ID NO: 132754 - DNA, 80 bp, synthetic construct
  misc_feature 1..80: note = Artificially Synthesized Probe
  source 1..80: mol_type = other DNA
accacccggttccagagtgaggtgaccaagctgcacgctctgccattcagtctcaggctctcagggcagagcggaggctt

SEQ ID NO: 132755 - DNA, 80 bp, synthetic construct
  misc_feature 1..80: note = Artificially Synthesized Probe
  source 1..80: mol_type = other DNA
ggctgcagaacaattgctcttttccagagtttgtgagactcttgttttttattctcaagctgcactctaatgggtaaaat

SEQ ID NO: 132756 - DNA, 80 bp, synthetic construct
  misc_feature 1..80: note = Artificially Synthesized Probe
  source 1..80: mol_type = other DNA
tccctccgttgaggcaggggtaacattgcaaatagctttacccatagtagccaaacactggaaacaacccagacacttga

SEQ ID NO: 132757 - DNA, 80 bp, synthetic construct; identical to SEQ ID NO: 42063
  misc_feature 1..80: note = Artificially Synthesized Probe
  source 1..80: mol_type = other DNA

SEQ ID NO: 132758 - DNA, 80 bp, synthetic construct
  misc_feature 1..80: note = Artificially Synthesized Probe
  source 1..80: mol_type = other DNA
aagtatcactgcaattaggttttaaataaatttgtttcgttaacatgtctggaagtcttagatgtcttactgtggaaggt

SEQ ID NO: 132759 - DNA, 80 bp, synthetic construct
  misc_feature 1..80: note = Artificially Synthesized Probe
  source 1..80: mol_type = other DNA
tgcagaaagggttgtgtatgccacatcatatgccaaattcacatgcatgtctttttttccccataaaaactgaaatttta

SEQ ID NO: 132760 - DNA, 80 bp, synthetic construct
  misc_feature 1..80: note = Artificially Synthesized Probe
  source 1..80: mol_type = other DNA
ctcaccttcaggtttctgttattcagtgaaagcctgcccttgttccttggcgtgggtgtgtgcaggacctgcctgctctc

SEQ ID NO: 132761 - DNA, 80 bp, synthetic construct; identical to SEQ ID NO: 42064
  misc_feature 1..80: note = Artificially Synthesized Probe
  source 1..80: mol_type = other DNA

SEQ ID NO: 132762 - DNA, 80 bp, synthetic construct
  misc_feature 1..80: note = Artificially Synthesized Probe
  source 1..80: mol_type = other DNA
aggatcacttggacctgggacgtcaaggctgcagtgatctgtgattgtacctcacactgcaacctgggtgacagagcaag

SEQ ID NO: 132763 - DNA, 80 bp, synthetic construct
  misc_feature 1..80: note = Artificially Synthesized Probe
  source 1..80: mol_type = other DNA
ctccgctgctgtggctcctgggctttatctcccttctctgtggatgcatctttaccaaaagcactgtacgtcttcctgct

SEQ ID NO: 132764 - DNA, 80 bp, synthetic construct
  misc_feature 1..80: note = Artificially Synthesized Probe
  source 1..80: mol_type = other DNA
gctgggattacaggtgcatgccaccacacccggctaatttttgtatttttagtagagatggggtttcatcatattggtca

SEQ ID NO: 132765 - DNA, 80 bp, synthetic construct
  misc_feature 1..80: note = Artificially Synthesized Probe
  source 1..80: mol_type = other DNA
gtgcccaggggaggtgcctgtttacagaagcttttgcgcagtgggtactgatggtggtagcgtcttgggagatgaaaagt

SEQ ID NO: 132766 - DNA, 80 bp, synthetic construct
  misc_feature 1..80: note = Artificially Synthesized Probe
  source 1..80: mol_type = other DNA
ccttccctcagtgtggtatgtttgggtgagagagttgtgcagctttatgaaagtggcttccgattatgcagtttttgacc

SEQ ID NO: 132767 - DNA, 80 bp, synthetic construct; identical to SEQ ID NO: 42065
  misc_feature 1..80: note = Artificially Synthesized Probe
  source 1..80: mol_type = other DNA

SEQ ID NO: 132768 - DNA, 80 bp, synthetic construct
  misc_feature 1..80: note = Artificially Synthesized Probe
  source 1..80: mol_type = other DNA
ttaagagaaacattcctatttcagaagtgctaaaatgtgggggaaaactgcatcttatacagcaggcgattttgcttttc

SEQ ID NO: 132769 - DNA, 80 bp, synthetic construct
  misc_feature 1..80: note = Artificially Synthesized Probe
  source 1..80: mol_type = other DNA
ggacgtttttcaaatacagacattgggtttcacctgtaaatactgcagtgtatagggagcaatagggagctctttttccc

SEQ ID NO: 132770 - DNA, 80 bp, synthetic construct
  misc_feature 1..80: note = Artificially Synthesized Probe
  source 1..80: mol_type = other DNA
atctgtggccaatcctcactcttggagtaaatgatcatatttggtctttttctaggtttttcctttttttaaaaaaaaat

SEQ ID NO: 132771 - DNA, 80 bp, synthetic construct; identical to SEQ ID NO: 42066
  misc_feature 1..80: note = Artificially Synthesized Probe
  source 1..80: mol_type = other DNA

SEQ ID NO: 132772 - DNA, 80 bp, synthetic construct
  misc_feature 1..80: note = Artificially Synthesized Probe
  source 1..80: mol_type = other DNA
aaggctgctgtgaccgggcacagatcgactcaaacattgcccacactgtggggctatggagctatgccacagaaaaggtg

SEQ ID NO: 132773 - DNA, 80 bp, synthetic construct
  misc_feature 1..80: note = Artificially Synthesized Probe
  source 1..80: mol_type = other DNA
ttccctaccacatgtcgatgtagtcagcagacagcaagcacttgctgtgctcctgtgaaattgactctgtaccctgagtc

SEQ ID NO: 132774 - DNA, 80 bp, synthetic construct
  misc_feature 1..80: note = Artificially Synthesized Probe
  source 1..80: mol_type = other DNA
ctgggcgtggtggctcgcgtctgtagtcccagctactcgggaggttgaggcaggagaattgcttgaatctgggaggcgga

SEQ ID NO: 132775 - DNA, 80 bp, synthetic construct
  misc_feature 1..80: note = Artificially Synthesized Probe
  source 1..80: mol_type = other DNA
gagctgttgtgtaggatgtatttttgtatccagatttgagtcattgggtaggaaagctaaatttcttctagaatttagct

SEQ ID NO: 132776 - DNA, 80 bp, synthetic construct; identical to SEQ ID NO: 42067
  misc_feature 1..80: note = Artificially Synthesized Probe
  source 1..80: mol_type = other DNA

SEQ ID NO: 132777 - DNA, 80 bp, synthetic construct
  misc_feature 1..80: note = Artificially Synthesized Probe
  source 1..80: mol_type = other DNA
aagaaattggaaggagtttcagaaatgtagctgagtttctcctgggcttaagggactttatagctcatgttcaaatgcac

SEQ ID NO: 132778 - DNA, 80 bp, synthetic construct
  misc_feature 1..80: note = Artificially Synthesized Probe
  source 1..80: mol_type = other DNA
tcttgcctcaccctcccaggtagctgggactacaggtgtgtgctaccatacttggctaattttttaattttttgtagaga

SEQ ID NO: 132779 - DNA, 80 bp, synthetic construct
  misc_feature 1..80: note = Artificially Synthesized Probe
  source 1..80: mol_type = other DNA
gaggtcaggaattcgagaccagcctgaccaacatggagaaaccccatctctactaaaaatacaaaattagccgggtgtgg

SEQ ID NO: 132780 - DNA, 80 bp, synthetic construct; identical to SEQ ID NO: 42068
  misc_feature 1..80: note = Artificially Synthesized Probe
  source 1..80: mol_type = other DNA

SEQ ID NO: 132781 - DNA, 80 bp, synthetic construct
  misc_feature 1..80: note = Artificially Synthesized Probe
  source 1..80: mol_type = other DNA
aaaagtttagttctaaagatcagagaaaaagcatgacacaaagcgttttgactattttatgaatatgtgaattgaaagag

SEQ ID NO: 132782 - DNA, 80 bp, synthetic construct
  misc_feature 1..80: note = Artificially Synthesized Probe
  source 1..80: mol_type = other DNA
tgaagatgaagagggactctcgtttctttctgtttaagccaacacagctcagagtccttataagaaactgaaagaagcat

SEQ ID NO: 132783 - DNA, 80 bp, synthetic construct; identical to SEQ ID NO: 42069
  misc_feature 1..80: note = Artificially Synthesized Probe
  source 1..80: mol_type = other DNA

SEQ ID NO: 132784 - DNA, 80 bp, synthetic construct
  misc_feature 1..80: note = Artificially Synthesized Probe
  source 1..80: mol_type = other DNA
agctattgtatttgattttgaaagacttaaattagcaaaactttaaaaaacggcgtaggcagaagtgtggtgggtcagcg

SEQ ID NO: 132785 - DNA, 80 bp, synthetic construct; identical to SEQ ID NO: 42006
  misc_feature 1..80: note = Artificially Synthesized Probe
  source 1..80: mol_type = other DNA

SEQ ID NO: 132786 - DNA, 80 bp, synthetic construct
  misc_feature 1..80: note = Artificially Synthesized Probe
  source 1..80: mol_type = other DNA
ttagatgttttggatgagtttgtgggtttcttttattattatgcttcataatttatacacaggttaccaattttgcttat

SEQ ID NO: 132787 - DNA, 80 bp, synthetic construct
  misc_feature 1..80: note = Artificially Synthesized Probe
  source 1..80: mol_type = other DNA
cctagccaacatggtgaaatcctgtctctgctaaagatacaaaaaattagccgggcctggtggcgcctgtagtcccagct

SEQ ID NO: 132788 - DNA, 80 bp, synthetic construct; identical to SEQ ID NO: 42070
  misc_feature 1..80: note = Artificially Synthesized Probe
  source 1..80: mol_type = other DNA

SEQ ID NO: 132789 - DNA, 80 bp, synthetic construct
  misc_feature 1..80: note = Artificially Synthesized Probe
  source 1..80: mol_type = other DNA
aaatttgtagactgaaaagtgtagattctcttacccagtcctcataatttttttttcagtttcttctgaaaaccagatgg

SEQ ID NO: 132790 - DNA, 80 bp, synthetic construct
  misc_feature 1..80: note = Artificially Synthesized Probe
  source 1..80: mol_type = other DNA
tagcatttctctaattttatcaagtattaagaggactgaaaaacctcaaggccattgatgtaaagctactgcatgtgtca

SEQ ID NO: 132791 - DNA, 80 bp, synthetic construct
  misc_feature 1..80: note = Artificially Synthesized Probe
  source 1..80: mol_type = other DNA
tttctggtgtgtttcataaaatcagactatcaaagagaagaaaccccagtgggtcatgtggttaccatttcagagtactc

SEQ ID NO: 132792 - DNA, 80 bp, synthetic construct; identical to SEQ ID NO: 42071
  misc_feature 1..80: note = Artificially Synthesized Probe
  source 1..80: mol_type = other DNA

SEQ ID NO: 132793 - DNA, 80 bp, synthetic construct
  misc_feature 1..80: note = Artificially Synthesized Probe
  source 1..80: mol_type = other DNA
aaaggcaggcaaggccgcacacaccagtagtcccagctacagtggaggaggctgaggcgggaggatcacttgagctgagg

SEQ ID NO: 132794 - DNA, 80 bp, synthetic construct
  misc_feature 1..80: note = Artificially Synthesized Probe
  source 1..80: mol_type = other DNA
tggagtgctctttgcctgagtttccaagtggctctgtgctcccttccgcttgcgccctgtagactgcttctgtgtttctg

SEQ ID NO: 132795 - DNA, 80 bp, synthetic construct
  misc_feature 1..80: note = Artificially Synthesized Probe
  source 1..80: mol_type = other DNA
gtgctccactctagacctggtggctttagatctggagttagagaccagcaacggcagaagattacagggtcttttttttt

SEQ ID NO: 132796 - DNA, 80 bp, synthetic construct
  misc_feature 1..80: note = Artificially Synthesized Probe
  source 1..80: mol_type = other DNA
gattcagctatgaaagttcctcgacatgtgtataaagccagaccaacgatgtgttgtgctcttatcaccacacgctcatt

SEQ ID NO: 132797 - DNA, 80 bp, synthetic construct; identical to SEQ ID NO: 42072
  misc_feature 1..80: note = Artificially Synthesized Probe
  source 1..80: mol_type = other DNA

SEQ ID NO: 132798 - DNA, 80 bp, synthetic construct
  misc_feature 1..80: note = Artificially Synthesized Probe
  source 1..80: mol_type = other DNA
ggcaacattgcccacaatcaatgtttcattcacacctattattaaggagagaaaagtcctaacttatacatatgtattgt

SEQ ID NO: 132799 - DNA, 80 bp, synthetic construct
  misc_feature 1..80: note = Artificially Synthesized Probe
  source 1..80: mol_type = other DNA
ctccttacctctccgctccagctacctgcagaccagcagcctcttagccagtgaccaccacctcactgaagaggagcgca

SEQ ID NO: 132800 - DNA, 80 bp, synthetic construct
  misc_feature 1..80: note = Artificially Synthesized Probe
  source 1..80: mol_type = other DNA
agatataccaaccacttacagtaaacagttgctaacattttgctgtgtagctgacatgtatctatgtctttcacctgact

SEQ ID NO: 132801 - DNA, 80 bp, synthetic construct
  misc_feature 1..80: note = Artificially Synthesized Probe
  source 1..80: mol_type = other DNA
cgcagagttgcaggcgttggcgaagtaggaacagtttgttgcggggtgaagcgtcaggcagagccgccgggactgctttc

SEQ ID NO: 132802 - DNA, 80 bp, synthetic construct; identical to SEQ ID NO: 42073
  misc_feature 1..80: note = Artificially Synthesized Probe
  source 1..80: mol_type = other DNA

SEQ ID NO: 132803 - DNA, 80 bp, synthetic construct
  misc_feature 1..80: note = Artificially Synthesized Probe
  source 1..80: mol_type = other DNA
gttacgtgcgcccgccaccatgccctgctaattttttgtatttttagtagagacagtgttttgctctgttggccaggctg

SEQ ID NO: 132804 - DNA, 80 bp, synthetic construct
  misc_feature 1..80: note = Artificially Synthesized Probe
  source 1..80: mol_type = other DNA
atgtaattcactcatttgaagtttataattcaatggcttttagtctgtttcaggaatatgtgcaaccattaccacagtca

SEQ ID NO: 132805 - DNA, 80 bp, synthetic construct
  misc_feature 1..80: note = Artificially Synthesized Probe
  source 1..80: mol_type = other DNA
gtgtgccaccatgcccagttaattttttgtattttcagtagagatggggtttcgccatgttgcccaggcacgttttgaac

SEQ ID NO: 132806 - DNA, 80 bp, synthetic construct
  misc_feature 1..80: note = Artificially Synthesized Probe
  source 1..80: mol_type = other DNA
cacaggtgtgggccaccacacccagctattttttttcttctctgtctcccaggttggagtgcagtggcatgattgtagcc

SEQ ID NO: 132807 - DNA, 80 bp, synthetic construct; identical to SEQ ID NO: 42074
  misc_feature 1..80: note = Artificially Synthesized Probe
  source 1..80: mol_type = other DNA

SEQ ID NO: 132808 - DNA, 80 bp, synthetic construct
  misc_feature 1..80: note = Artificially Synthesized Probe
  source 1..80: mol_type = other DNA
ctgcctgccctgggaggccggggcaggcagatcacttgaggtcaggagtttgagaccagcctgggcaacatggcgaaacc

SEQ ID NO: 132809 - DNA, 80 bp, synthetic construct
  misc_feature 1..80: note = Artificially Synthesized Probe
  source 1..80: mol_type = other DNA
gtctcaaagaaagggggacaacaaaagatccatgtgggtgggtttctcgggagcatcatgacgttagtctgtggagtctt

SEQ ID NO: 132810 - DNA, 80 bp, synthetic construct
  misc_feature 1..80: note = Artificially Synthesized Probe
  source 1..80: mol_type = other DNA
cagtcttggcaagtcctttcgttgatgaatatttaataaatacttaactggtcacttctgcagccttgtgtattttctag

SEQ ID NO: 132811 - DNA, 80 bp, synthetic construct; identical to SEQ ID NO: 42075
  misc_feature 1..80: note = Artificially Synthesized Probe
  source 1..80: mol_type = other DNA

SEQ ID NO: 132812 - DNA, 80 bp, synthetic construct
  misc_feature 1..80: note = Artificially Synthesized Probe
  source 1..80: mol_type = other DNA
ttctgtacattttatgatttctaggcattacgtaggtatttgctaatattctgcttttgatacaatagcctttggggggt

SEQ ID NO: 132813 - DNA, 80 bp, synthetic construct
  misc_feature 1..80: note = Artificially Synthesized Probe
  source 1..80: mol_type = other DNA
ttggggagtcacttacgataatgtctatttacaggtcataagatagtgctacccatgcattcctttgcacaactgcgaga

SEQ ID NO: 132814 - DNA, 80 bp, synthetic construct
  misc_feature 1..80: note = Artificially Synthesized Probe
  source 1..80: mol_type = other DNA
cttcagcattgagaaaaacagctaccggaagactgcggagtggcttaccaagcacaagacgtccaatgggatcattaact

SEQ ID NO: 132815 - DNA, 80 bp, synthetic construct
  misc_feature 1..80: note = Artificially Synthesized Probe
  source 1..80: mol_type = other DNA
ccatctgataactccttgaacacgactgggattatctgcagaaacgtccacatgctcctgagaaggcaggagagcagctc

SEQ ID NO: 132816 - DNA, 80 bp, synthetic construct; identical to SEQ ID NO: 42076
  misc_feature 1..80: note = Artificially Synthesized Probe
  source 1..80: mol_type = other DNA

SEQ ID NO: 132817 - DNA, 80 bp, synthetic construct
  misc_feature 1..80: note = Artificially Synthesized Probe
  source 1..80: mol_type = other DNA
ctgtcctgtgtctcaccttctttcttcctcaaatctttcctctatctgctcttaatgtcaaatatagtcacagtattttg

SEQ ID NO: 132818 - DNA, 80 bp, synthetic construct
  misc_feature 1..80: note = Artificially Synthesized Probe
  source 1..80: mol_type = other DNA
atgaaaatacacaccctcatttgttaaaatgagctttcaaagaaggtggtacactttcccactcaaacttattttccttt

SEQ ID NO: 132819 - DNA, 80 bp, synthetic construct
  misc_feature 1..80: note = Artificially Synthesized Probe
  source 1..80: mol_type = other DNA
tcgtgctgaatgtctctacaatgccacaaatacagtttagataagttgaaaataccttattaaagttaaatttaagcatc

SEQ ID NO: 132820 - DNA, 80 bp, synthetic construct
  misc_feature 1..80: note = Artificially Synthesized Probe
  source 1..80: mol_type = other DNA
tgcaaaactgggtgacgtggtttcaaatgcctgattctttgactctaggccaaggaacctggaacgtatacactcaggca

SEQ ID NO: 132821 - DNA, 80 bp, synthetic construct; identical to SEQ ID NO: 42077
  misc_feature 1..80: note = Artificially Synthesized Probe
  source 1..80: mol_type = other DNA

SEQ ID NO: 132822 - DNA, 80 bp, synthetic construct
  misc_feature 1..80: note = Artificially Synthesized Probe
  source 1..80: mol_type = other DNA
tagctctgagagtggaaaaaagaaactcaaggtatttttttctattggctcactcaacctaatggtcaatgcagaggact

SEQ ID NO: 132823 - DNA, 80 bp, synthetic construct
  misc_feature 1..80: note = Artificially Synthesized Probe
  source 1..80: mol_type = other DNA
gggttcttttgcttgtgctcctgaccaactagctagaaatcagggctctcacaaccccctttctgggtttgatgaatttg

SEQ ID NO: 132824 - DNA, 80 bp, synthetic construct
  misc_feature 1..80: note = Artificially Synthesized Probe
  source 1..80: mol_type = other DNA
aaagctctccagaccctgtcctttggtttttatggaagtgacattacacaggcatgatcgattacaccactggccactga

SEQ ID NO: 132825 - DNA, 80 bp, synthetic construct; identical to SEQ ID NO: 42078
  misc_feature 1..80: note = Artificially Synthesized Probe
  source 1..80: mol_type = other DNA

SEQ ID NO: 132826 - DNA, 80 bp, synthetic construct
  misc_feature 1..80: note = Artificially Synthesized Probe
  source 1..80: mol_type = other DNA
atctctgcaaaataaaaaaatgaagtaaattagctgggtgtagtcgtgcgccacggcctctagtcctagctacaggctgg

SEQ ID NO: 132827 - DNA, 80 bp, synthetic construct; identical to SEQ ID NO: 42007
  misc_feature 1..80: note = Artificially Synthesized Probe
  source 1..80: mol_type = other DNA

SEQ ID NO: 132828 - DNA, 80 bp, synthetic construct
  misc_feature 1..80: note = Artificially Synthesized Probe
  source 1..80: mol_type = other DNA
cgtctggcatggcatttgagaaattcaaagctattgtcctttctgataagttctaaaattggaaggagttgctataaaca

SEQ ID NO: 132829 - DNA, 80 bp, synthetic construct
  misc_feature 1..80: note = Artificially Synthesized Probe
  source 1..80: mol_type = other DNA
tttctgttattcccccattccccctatttttctgcatttgtgcctcttgtgtggccaccagcaaaggctgtcagatgtgg

SEQ ID NO: 132830 - DNA, 80 bp, synthetic construct
  misc_feature 1..80: note = Artificially Synthesized Probe
  source 1..80: mol_type = other DNA
tgcctagtgtcccctgtctctgtccactctccccccggtcctggtatcttgcctgccttctgtcttccctgcagcaggat

SEQ ID NO: 132831 - DNA, 80 bp, synthetic construct; identical to SEQ ID NO: 42079
  misc_feature 1..80: note = Artificially Synthesized Probe
  source 1..80: mol_type = other DNA

SEQ ID NO: 132832 - DNA, 80 bp, synthetic construct
  misc_feature 1..80: note = Artificially Synthesized Probe
  source 1..80: mol_type = other DNA
tcatggagatcccaaaggagcaaatctttcatagtaaaagaaatagagcccctttcaccccattgcgggccctgagatgc

SEQ ID NO: 132833 - DNA, 80 bp, synthetic construct
  misc_feature 1..80: note = Artificially Synthesized Probe
  source 1..80: mol_type = other DNA
cctgtgccaggcggagagcagggctgtggtctactccaacacgagaggtgaggtgccgcccacccaggcccaaggaggat

SEQ ID NO: 132834 - DNA, 80 bp, synthetic construct
  misc_feature 1..80: note = Artificially Synthesized Probe
  source 1..80: mol_type = other DNA
tcacacgctgagtggccgagcagtgcttgtctggctgaggattaggagatgggggtcacggctggggtcacgttccatgg

SEQ ID NO: 132835 - DNA, 80 bp, synthetic construct; identical to SEQ ID NO: 42080
  misc_feature 1..80: note = Artificially Synthesized Probe
  source 1..80: mol_type = other DNA

SEQ ID NO: 132836 - DNA, 80 bp, synthetic construct
  misc_feature 1..80: note = Artificially Synthesized Probe
  source 1..80: mol_type = other DNA
ttagacagctgcgtctgtctttggaggtttgtccttcgtgtactcctgaccgagggaatgttatcttgacatttgggctt

SEQ ID NO: 132837 - DNA, 80 bp, synthetic construct
  misc_feature 1..80: note = Artificially Synthesized Probe
  source 1..80: mol_type = other DNA
tgtaaggaaaaggacaagtgaaaccgagggaacagctttgaagtgactttttctgtccttcgtagaacagtcttctgagg

SEQ ID NO: 132838 - DNA, 80 bp, synthetic construct
  misc_feature 1..80: note = Artificially Synthesized Probe
  source 1..80: mol_type = other DNA
gaagcataaggacaaacagagaactggccgctgcatggttaccacagaccacaaagtgagtagggacagtggaggagctt

SEQ ID NO: 132839 - DNA, 80 bp, synthetic construct
  misc_feature 1..80: note = Artificially Synthesized Probe
  source 1..80: mol_type = other DNA
gcaagggcagagacaagccagctctacctttccctctcagttccaggggccagggagtttgctgtaagaggttagggccg

SEQ ID NO: 132840 - DNA, 80 bp, synthetic construct; identical to SEQ ID NO: 42081
  misc_feature 1..80: note = Artificially Synthesized Probe
  source 1..80: mol_type = other DNA

SEQ ID NO: 132841 - DNA, 80 bp, synthetic construct
  misc_feature 1..80: note = Artificially Synthesized Probe
  source 1..80: mol_type = other DNA
gaatgttgtaatgttcagcttttgaagaacctgaggaagtgtctttcccttaactcacacagacgttcaccattcacgaa

SEQ ID NO: 132842 - DNA, 80 bp, synthetic construct
  misc_feature 1..80: note = Artificially Synthesized Probe
  source 1..80: mol_type = other DNA
ttaggaaaagtccagcctcttctgtgctctctcccttatgtggctttttggacatttgttacatggtgtttaatttctga

SEQ ID NO: 132843 - DNA, 80 bp, synthetic construct
  misc_feature 1..80: note = Artificially Synthesized Probe
  source 1..80: mol_type = other DNA
ccactcttccctgacactggcggcacctgtgctatgtgccgtgttatcctctcttccctggcgctggcggcacctgtgct

SEQ ID NO: 132844 - DNA, 80 bp, synthetic construct
  misc_feature 1..80: note = Artificially Synthesized Probe
  source 1..80: mol_type = other DNA
ctcttccctggcgctggtggcacctgtgctatgtgccgtgttatcctctcttccctggcgctggtggcacctgtgctgtg

SEQ ID NO: 132845 - DNA, 80 bp, synthetic construct; identical to SEQ ID NO: 42082
  misc_feature 1..80: note = Artificially Synthesized Probe
  source 1..80: mol_type = other DNA

SEQ ID NO: 132846 - DNA, 80 bp, synthetic construct
  misc_feature 1..80: note = Artificially Synthesized Probe
  source 1..80: mol_type = other DNA
ggacggctgtgctcttccgccgttgaggtgactctggtgatgtgtgcatgtcttgccagttctgcgttcgtttctcttgt

SEQ ID NO: 132847 - DNA, 80 bp, synthetic construct
  misc_feature 1..80: note = Artificially Synthesized Probe
  source 1..80: mol_type = other DNA
ggcgagtggtctgagagtgtctttgtgcttcctcctcaggtgtcgattgactgcccgtggtccatctactccacagtcat

SEQ ID NO: 132848 - DNA, 80 bp, synthetic construct; identical to SEQ ID NO: 42083
  misc_feature 1..80: note = Artificially Synthesized Probe
  source 1..80: mol_type = other DNA

SEQ ID NO: 132849 - DNA, 80 bp, synthetic construct
  misc_feature 1..80: note = Artificially Synthesized Probe
  source 1..80: mol_type = other DNA
gcctttctggatctggctggatttgttaactagttctcctgtccctgtatttcttgtcaattgcctgcaacctctagaac

SEQ ID NO: 132850 - DNA, 80 bp, synthetic construct
  misc_feature 1..80: note = Artificially Synthesized Probe
  source 1..80: mol_type = other DNA
acactgcccagtgtcctctgggtggggcggacgtgccccagtggaaaacagctgccctaaaggcttgagtagactccagt

SEQ ID NO: 132851 - DNA, 80 bp, synthetic construct
  misc_feature 1..80: note = Artificially Synthesized Probe
  source 1..80: mol_type = other DNA
ggataatttggaaacaaaaacgtcagacccatgtttagaatggaacattatactagcagcttttttccccttcaaatcac

SEQ ID NO: 132852 - DNA, 80 bp, synthetic construct
  misc_feature 1..80: note = Artificially Synthesized Probe
  source 1..80: mol_type = other DNA
cagcctgaccaacatagtgaaaccccgtctctactaaaaatacaaaaattagccgggcatggtggcgggcgcctgtaatc

SEQ ID NO: 132853 - DNA, 80 bp, synthetic construct
  misc_feature 1..80: note = Artificially Synthesized Probe
  source 1..80: mol_type = other DNA
tactgcaagctccgactccgcctcctgggttcacgctattctcctgcctcagcctcccgagtagctgggactacaggcgc

SEQ ID NO: 132854 - DNA, 80 bp, synthetic construct; identical to SEQ ID NO: 42084
  misc_feature 1..80: note = Artificially Synthesized Probe
  source 1..80: mol_type = other DNA

SEQ ID NO: 132855 - DNA, 80 bp, synthetic construct
  misc_feature 1..80: note = Artificially Synthesized Probe
  source 1..80: mol_type = other DNA
cctgtcaccaggctggagtgcagtggcgtgatctcagctcactgcaacctccacctcccaggttcaagcaatgctcgtgc

SEQ ID NO: 132856 - DNA, 80 bp, synthetic construct
  misc_feature 1..80: note = Artificially Synthesized Probe
  source 1..80: mol_type = other DNA
aggcgtgagccaccgtgcccggccaaaaaggtttattttctggcacttttcggtgtgaaatctgaagggaaacttatgca

SEQ ID NO: 132857 - DNA, 80 bp, synthetic construct; identical to SEQ ID NO: 42085
  misc_feature 1..80: note = Artificially Synthesized Probe
  source 1..80: mol_type = other DNA

SEQ ID NO: 132858 - DNA, 80 bp, synthetic construct
  misc_feature 1..80: note = Artificially Synthesized Probe
  source 1..80: mol_type = other DNA
gccctgaggctggatcgaggcttgctcctgagtaagcgggtggctggatggatgaattcttctttttagaagaattaaat

SEQ ID NO: 132859 - DNA, 80 bp, synthetic construct
  misc_feature 1..80: note = Artificially Synthesized Probe
  source 1..80: mol_type = other DNA
atgcttgtgcctgcatctggaccttgctttttctgtttatggctcgctgcctggatgaatcttgaacttgctttttccgt

SEQ ID NO: 132860 - DNA, 80 bp, synthetic construct
  misc_feature 1..80: note = Artificially Synthesized Probe
  source 1..80: mol_type = other DNA
gtggactttacatgtaatagcggtgttcagcccctgcattaggttgtgctggttcctaaaataatttaaatataaaataa

SEQ ID NO: 132861 - DNA, 80 bp, synthetic construct
  misc_feature 1..80: note = Artificially Synthesized Probe
  source 1..80: mol_type = other DNA
agcctcctgagtagctgggattacaggcacccgccaacacgcccagctaatttttgtatttttaatagagacgtggtttc

SEQ ID NO: 132862 - DNA, 80 bp, synthetic construct; identical to SEQ ID NO: 42086
  misc_feature 1..80: note = Artificially Synthesized Probe
  source 1..80: mol_type = other DNA

SEQ ID NO: 132863 - DNA, 80 bp, synthetic construct
  misc_feature 1..80: note = Artificially Synthesized Probe
  source 1..80: mol_type = other DNA
ctgaggtgagaagatctcttgaacctgggaggttgggctgcaatgagctgtgatcacaccacagcactccagcctgggtg

SEQ ID NO: 132864 - DNA, 80 bp, synthetic construct; identical to SEQ ID NO: 42008
  misc_feature 1..80: note = Artificially Synthesized Probe
  source 1..80: mol_type = other DNA

SEQ ID NO: 132865 - DNA, 80 bp, synthetic construct
  misc_feature 1..80: note = Artificially Synthesized Probe
  source 1..80: mol_type = other DNA
tcaagaccagcctgggcaacacggtgaaaccctgtctctactagaatacaaaaaatgagctgggcatggcggcgtgcatc

SEQ ID NO: 132866 - DNA, 80 bp, synthetic construct
  misc_feature 1..80: note = Artificially Synthesized Probe
  source 1..80: mol_type = other DNA
tcatatgatataaaacttatggtatcataaaaagttaaagatttaccaattttgtacaatcttctgctgggacaaggcca

SEQ ID NO: 132867 - DNA, 80 bp, synthetic construct; identical to SEQ ID NO: 42087
  misc_feature 1..80: note = Artificially Synthesized Probe
  source 1..80: mol_type = other DNA

SEQ ID NO: 132868 - DNA, 80 bp, synthetic construct
  misc_feature 1..80: note = Artificially Synthesized Probe
  source 1..80: mol_type = other DNA
tgaaagatggcattatgttctttataatctgaagaactgaatagacagcttctgtcaacataatgaaggagcagctggag

SEQ ID NO: 132869 - DNA, 80 bp, synthetic construct
  misc_feature 1..80: note = Artificially Synthesized Probe
  source 1..80: mol_type = other DNA
tttccctttctcatgttgacttagtaactccctggaaatatttcttggagtcatttcatcttcaggggcattgctttcta

SEQ ID NO: 132870 - DNA, 80 bp, synthetic construct; identical to SEQ ID NO: 42088
  misc_feature 1..80: note = Artificially Synthesized Probe
  source 1..80: mol_type = other DNA

SEQ ID NO: 132871 - DNA, 80 bp, synthetic construct
  misc_feature 1..80: note = Artificially Synthesized Probe
  source 1..80: mol_type = other DNA
cttaaataaatttaaatgaataaataaaaccacaaattattaaataatttaattaaatcaaataatagtatatattataa

SEQ ID NO: 132872 - DNA, 80 bp, synthetic construct
  misc_feature 1..80: note = Artificially Synthesized Probe
  source 1..80: mol_type = other DNA
cgtgtcaccacacctggctaattatttttattttattttatttatttatttatttatttatttattttcgagacggagtt

SEQ ID NO: 132873 - DNA, 80 bp, synthetic construct
  misc_feature 1..80: note = Artificially Synthesized Probe
  source 1..80: mol_type = other DNA
ctccatgttgatcaggctggtctcaaactctctacctcaggtgatccacctaccttggcctcccaaagtgctgggattac

SEQ ID NO: 132874 - DNA, 80 bp, synthetic construct
  misc_feature 1..80: note = Artificially Synthesized Probe
  source 1..80: mol_type = other DNA
ctgcctcagtctccggagtagctgggataacaggcatgtgctgtgccaccacgcctggctaattttttgtatttttagta

SEQ ID NO: 132875 - DNA, 80 bp, synthetic construct; identical to SEQ ID NO: 42089
  misc_feature 1..80: note = Artificially Synthesized Probe
  source 1..80: mol_type = other DNA

SEQ ID NO: 132876 - DNA, 80 bp, synthetic construct
  misc_feature 1..80: note = Artificially Synthesized Probe
  source 1..80: mol_type = other DNA
tttttagcagagccttggaactgacaaccacctgtttggatagtaactttaactcaatctgtagcttgccatttgtgggc

SEQ ID NO: 132877 - DNA, 80 bp, synthetic construct
  misc_feature 1..80: note = Artificially Synthesized Probe
  source 1..80: mol_type = other DNA
cgtgtggcccatttttctgccttctttggaaggatgtctgttcagatcctttccccatgtttaaatagggttatttgttt

SEQ ID NO: 132878 - DNA, 80 bp, synthetic construct
  misc_feature 1..80: note = Artificially Synthesized Probe
  source 1..80: mol_type = other DNA
ggacctagaaaatcattgcctttggtcaaaaagattttctcttgcatttccttccaagatgttcgtaatttgagcacttg

SEQ ID NO: 132879 - DNA, 80 bp, synthetic construct
  misc_feature 1..80: note = Artificially Synthesized Probe
  source 1..80: mol_type = other DNA
gctggccgtcagtgctcgcgtgtctctctgaagaggctctgcggttctggtccctgtgcctgagctccaggtgccgccag

SEQ ID NO: 132880 - DNA, 80 bp, synthetic construct; identical to SEQ ID NO: 42090
  misc_feature 1..80: note = Artificially Synthesized Probe
  source 1..80: mol_type = other DNA

SEQ ID NO: 132881 - DNA, 80 bp, synthetic construct
  misc_feature 1..80: note = Artificially Synthesized Probe
  source 1..80: mol_type = other DNA
tccgaacagaggtaattgggcatttggtaggagatcacctagaaaggccgctcttgggactgctgtttaggctgtgaact

SEQ ID NO: 132882 - DNA, 80 bp, synthetic construct
  misc_feature 1..80: note = Artificially Synthesized Probe
  source 1..80: mol_type = other DNA
aagtggaactgccaggttgtagtgcatgagccctttttcatcttggcagtggcagatgtgttttgatcgtttgtcatggg

SEQ ID NO: 132883 - DNA, 80 bp, synthetic construct; identical to SEQ ID NO: 42091
  misc_feature 1..80: note = Artificially Synthesized Probe
  source 1..80: mol_type = other DNA

SEQ ID NO: 132884 - DNA, 80 bp, synthetic construct
  misc_feature 1..80: note = Artificially Synthesized Probe
  source 1..80: mol_type = other DNA
ctaatttttgtatttttagtagagacggggtttcaccatgttgcccaggctggtctcgaactcctgacctcaagtgatct

SEQ ID NO: 132885 - DNA, 80 bp, synthetic construct
  misc_feature 1..80: note = Artificially Synthesized Probe
  source 1..80: mol_type = other DNA
cagtgtaactgtttagtagcacagctcggaccaatattagcatgtctgatgactcctgctttaccaagtacttagggaag

SEQ ID NO: 132886 - DNA, 80 bp, synthetic construct
  misc_feature 1..80: note = Artificially Synthesized Probe
  source 1..80: mol_type = other DNA
ggcggctggaagggctctgtgctatcctttcttcctgtggttgaaaatgttcataatttaaagaaggatgttaaggttcg

SEQ ID NO: 132887 - DNA, 80 bp, synthetic construct
  misc_feature 1..80: note = Artificially Synthesized Probe
  source 1..80: mol_type = other DNA
ggcagctctgctttttcctctagttgcatttcttgaggccacttaggtacatttcctttctattctctccctttcctgcc

SEQ ID NO: 132888 - DNA, 80 bp, synthetic construct; identical to SEQ ID NO: 42092
  misc_feature 1..80: note = Artificially Synthesized Probe
  source 1..80: mol_type = other DNA

SEQ ID NO: 132889 - DNA, 80 bp, synthetic construct
  misc_feature 1..80: note = Artificially Synthesized Probe
  source 1..80: mol_type = other DNA
gttgtgcagatcttccaaatgtgggcacctttcgtttgacaatatttttttaaaatctgcatttgtgatctctcagggag

SEQ ID NO: 132890 - DNA, 80 bp, synthetic construct
  misc_feature 1..80: note = Artificially Synthesized Probe
  source 1..80: mol_type = other DNA
ctaccaaatacccaacactgaataactagcttccccagcgctcttgcaagtgaaaagggcgttctgtgaaaacagcggct

SEQ ID NO: 132891 - DNA, 80 bp, synthetic construct
  misc_feature 1..80: note = Artificially Synthesized Probe
  source 1..80: mol_type = other DNA
ctcctcagcagtgaaacagaagggactgttgacacacgcagtgctgtggttggatctcaagggcattatactaagagaaa

SEQ ID NO: 132892 - DNA, 80 bp, synthetic construct; identical to SEQ ID NO: 42093
  misc_feature 1..80: note = Artificially Synthesized Probe
  source 1..80: mol_type = other DNA

SEQ ID NO: 132893 - DNA, 80 bp, synthetic construct
  misc_feature 1..80: note = Artificially Synthesized Probe
  source 1..80: mol_type = other DNA
tggggtctgcagcctggtccactctgtagtgaaatccagtggggtctgcagcctggttctagctgtattgaaatccagtg

SEQ ID NO: 132894 - DNA, 80 bp, synthetic construct
  misc_feature 1..80: note = Artificially Synthesized Probe
  source 1..80: mol_type = other DNA
ctgtgttacacgagatggcacagttgggtgaagctggtgatgaaggtatgtgacccctctactacttttacaacttcttg

SEQ ID NO: 132895 - DNA, 80 bp, synthetic construct
  misc_feature 1..80: note = Artificially Synthesized Probe
  source 1..80: mol_type = other DNA
ctggcccgagttcatgccattgtggttgccccagcagcgcgaggtcagcagcgtagaaaggcagcagtgtgaaagctatg

SEQ ID NO: 132896 - DNA, 80 bp, synthetic construct
  misc_feature 1..80: note = Artificially Synthesized Probe
  source 1..80: mol_type = other DNA
aattaaattcctattctgagaacttgatacccagcactgtctttgcttctcctgtagtctgttctgtcctttggggatcc

SEQ ID NO: 132897 - DNA, 80 bp, synthetic construct
  misc_feature 1..80: note = Artificially Synthesized Probe
  source 1..80: mol_type = other DNA
ctcgtggccttctggtcactcactccccctgggcggttgctcggtatcctcatgatgggaagctgtgacctctttaccag

SEQ ID NO: 132898 - DNA, 80 bp, synthetic construct; identical to SEQ ID NO: 42094
  misc_feature 1..80: note = Artificially Synthesized Probe
  source 1..80: mol_type = other DNA

SEQ ID NO: 132899 - DNA, 80 bp, synthetic construct
  misc_feature 1..80: note = Artificially Synthesized Probe
  source 1..80: mol_type = other DNA
caacatgaattctgctaaaattaaatcaagaaccaacattggccgggtgcagtggctcacgcctgtaatcccagcacttt

SEQ ID NO: 132900 - DNA, 80 bp, synthetic construct
  misc_feature 1..80: note = Artificially Synthesized Probe
  source 1..80: mol_type = other DNA
tgaacccaggaggcggaggttgcagtgagccaaaattgcgccactgcactccagcctgggcaacgagcaaaactccgcct

SEQ ID NO: 132901 - DNA, 80 bp, synthetic construct
  misc_feature 1..80: note = Artificially Synthesized Probe
  source 1..80: mol_type = other DNA
gggacgagatgatgctgaagattaaggccatagcaagcagaccatccacatccattttcaaggaaaaaattcaccttgtt

SEQ ID NO: 132902 - DNA, 80 bp, synthetic construct; identical to SEQ ID NO: 42095
  misc_feature 1..80: note = Artificially Synthesized Probe
  source 1..80: mol_type = other DNA

SEQ ID NO: 132903 - DNA, 80 bp, synthetic construct
  misc_feature 1..80: note = Artificially Synthesized Probe
  source 1..80: mol_type = other DNA
agtcaaaggacagcagcgtctgtgtattatgagattgttttgaggaagatagcaagagctttggtagaaaaacccctggg

SEQ ID NO: 132904 - DNA, 80 bp, synthetic construct
  misc_feature 1..80: note = Artificially Synthesized Probe
  source 1..80: mol_type = other DNA
gtctttaaaaggcacccatttttattcagctaataatgtagagaaagactgcgttgacatggctaaattctcaggcctcc

SEQ ID NO: 132905 - DNA, 80 bp, synthetic construct; identical to SEQ ID NO: 42096
  misc_feature 1..80: note = Artificially Synthesized Probe
  source 1..80: mol_type = other DNA

SEQ ID NO: 132906 - DNA, 80 bp, synthetic construct
  misc_feature 1..80: note = Artificially Synthesized Probe
  source 1..80: mol_type = other DNA
agatcccaaccctttgagagtttacattctgtcaagaagagatagacaatagacaaataatgttaggtgacaagtgctat

SEQ ID NO: 132907 - DNA, 80 bp, synthetic construct
  misc_feature 1..80: note = Artificially Synthesized Probe
  source 1..80: mol_type = other DNA
acaggaaaaatgcagttttctgtacacgtccagcataattcattctaatccagaactaattgaaattggactcaatgaaa

SEQ ID NO: 132908 - DNA, 80 bp, synthetic construct
  misc_feature 1..80: note = Artificially Synthesized Probe
  source 1..80: mol_type = other DNA
acacatcgcttcctctcgtttcagttgtcgacaacagtagcaactgggcagtgtgtgggaaaagctgcggtgtcatctcc

SEQ ID NO: 132909 - DNA, 80 bp, synthetic construct
  misc_feature 1..80: note = Artificially Synthesized Probe
  source 1..80: mol_type = other DNA
gtttaccttcagtatttgagcaggtgagcactttgtgcgagaggtgataaacttatgactgagcaggttggagaactagc

SEQ ID NO: 132910 - DNA, 80 bp, synthetic construct; identical to SEQ ID NO: 42097
  misc_feature 1..80: note = Artificially Synthesized Probe
  source 1..80: mol_type = other DNA

SEQ ID NO: 132911 - DNA, 80 bp, synthetic construct
  misc_feature 1..80: note = Artificially Synthesized Probe
  source 1..80: mol_type = other DNA
acaagtcctggtcatccccagccaagatgaccacgtcctggaagtcagtgtaacatgacaacgccagggtgaacacacgc

SEQ ID NO: 132912 - DNA, 80 bp, synthetic construct
  misc_feature 1..80: note = Artificially Synthesized Probe
  source 1..80: mol_type = other DNA
atctcagattcctgcttttctcaccccgtccccatgctggtgtccgacgccgcttactcagagccctggcctccctcccc

SEQ ID NO: 132913 - DNA, 80 bp, synthetic construct
  misc_feature 1..80: note = Artificially Synthesized Probe
  source 1..80: mol_type = other DNA
cagtttcctgatcggggtggatttgtgtcccctaaggggtaaaacagccgtttaccgcagatcctctcattgtgcttttc

SEQ ID NO: 132914 - DNA, 80 bp, synthetic construct
  misc_feature 1..80: note = Artificially Synthesized Probe
  source 1..80: mol_type = other DNA
cggtgaggtggtttagggataaatgtttctggaaccctgtggtcccccataatgttgatagaatatcatatgcactggga

SEQ ID NO: 132915 - DNA, 80 bp, synthetic construct; identical to SEQ ID NO: 42009
  misc_feature 1..80: note = Artificially Synthesized Probe
  source 1..80: mol_type = other DNA

SEQ ID NO: 132916 - DNA, 80 bp, synthetic construct; identical to SEQ ID NO: 42098
  misc_feature 1..80: note = Artificially Synthesized Probe
  source 1..80: mol_type = other DNA

SEQ ID NO: 132917 - DNA, 80 bp, synthetic construct; identical to SEQ ID NO: 42000
  misc_feature 1..80: note = Artificially Synthesized Probe
  source 1..80: mol_type = other DNA

SEQ ID NO: 132918 - DNA, 80 bp, synthetic construct
  misc_feature 1..80: note = Artificially Synthesized Probe
  source 1..80: mol_type = other DNA
acagactaactgatgtaatgtttatgtataagttgcaccaaaaatcaaggacaaaaataagtgtgtttgtttttacaggt

SEQ ID NO: 132919 - DNA, 80 bp, synthetic construct
  misc_feature 1..80: note = Artificially Synthesized Probe
  source 1..80: mol_type = other DNA
tgaaatagagtactcttaatttactgggcaaatgtgcttggaattgaacttgacaagattagctcaagcagatagagtcg

SEQ ID NO: 132920 - DNA, 80 bp, synthetic construct
  misc_feature 1..80: note = Artificially Synthesized Probe
  source 1..80: mol_type = other DNA
attctctgtgttgtcttttagctcattcaataaataaaggtggtgtgatttttttttcctcctgtctttttcatttgtag

SEQ ID NO: 132921 - DNA, 80 bp, synthetic construct; identical to SEQ ID NO: 42099
  misc_feature 1..80: note = Artificially Synthesized Probe
  source 1..80: mol_type = other DNA

SEQ ID NO: 132922 - DNA, 80 bp, synthetic construct
  misc_feature 1..80: note = Artificially Synthesized Probe
  source 1..80: mol_type = other DNA
gaaagtgaaggggaaatttaaaatgtttacggcgcttaattgcctggaaatgaaatgaaatcaaatttatcagttttttt

SEQ ID NO: 132923 - DNA, 80 bp, synthetic construct
  misc_feature 1..80: note = Artificially Synthesized Probe
  source 1..80: mol_type = other DNA
ctaaagtaaggtgtatgtgtttgagacaagctggttttgttgataaagagatgttaaataattgtgaagccagatatgca

SEQ ID NO: 132924 - DNA, 80 bp, synthetic construct
  misc_feature 1..80: note = Artificially Synthesized Probe
  source 1..80: mol_type = other DNA
attgttgtatttaatctgaaaatgactttacctacaacagttccattgtcagcacagcctaggaaggtcagatcctgtat

SEQ ID NO: 132925 - DNA, 80 bp, synthetic construct; identical to SEQ ID NO: 42100
  misc_feature 1..80: note = Artificially Synthesized Probe
  source 1..80: mol_type = other DNA

SEQ ID NO: 132926 - DNA, 80 bp, synthetic construct
  misc_feature 1..80: note = Artificially Synthesized Probe
  source 1..80: mol_type = other DNA
tggtttactatgaaaagtcatttttcatattatgtaatatattgttagattaaaaccattgtattaagactttaaaatgt

SEQ ID NO: 132927 - DNA, 80 bp, synthetic construct
  misc_feature 1..80: note = Artificially Synthesized Probe
  source 1..80: mol_type = other DNA
cctttattattggattagatgaggaagagtgagaggacacctcccccttgaaacgaggaaaggccacctgaggataacag

SEQ ID NO: 132928 - DNA, 80 bp, synthetic construct
  misc_feature 1..80: note = Artificially Synthesized Probe
  source 1..80: mol_type = other DNA
ttttctaagccacccagtctatggcatttttttttctttttaaaaatttctttctttttttttttctttcatggtatttt

SEQ ID NO: 132929 - DNA, 80 bp, synthetic construct; identical to SEQ ID NO: 42010
  misc_feature 1..80: note = Artificially Synthesized Probe
  source 1..80: mol_type = other DNA

SEQ ID NO: 132930 - DNA, 80 bp, synthetic construct; identical to SEQ ID NO: 42102
  misc_feature 1..80: note = Artificially Synthesized Probe
  source 1..80: mol_type = other DNA

SEQ ID NO: 132931 - DNA, 80 bp, synthetic construct; identical to SEQ ID NO: 42101
  misc_feature 1..80: note = Artificially Synthesized Probe
  source 1..80: mol_type = other DNA

SEQ ID NO: 132932 - DNA, 80 bp, synthetic construct; identical to SEQ ID NO: 42103
  misc_feature 1..80: note = Artificially Synthesized Probe
  source 1..80: mol_type = other DNA

SEQ ID NO: 132933 - DNA, 80 bp, synthetic construct
  misc_feature 1..80: note = Artificially Synthesized Probe
  source 1..80: mol_type = other DNA
attatctattactcatcacagcaacccctgtaaaactaattttctcagttgacagacaaggaaactggggctcaaagagg

SEQ ID NO: 132934 - DNA, 80 bp, synthetic construct; identical to SEQ ID NO: 42114
  misc_feature 1..80: note = Artificially Synthesized Probe
  source 1..80: mol_type = other DNA

SEQ ID NO: 132935 - DNA, 80 bp, synthetic construct
  misc_feature 1..80: note = Artificially Synthesized Probe
  source 1..80: mol_type = other DNA
ctccccctccaggagccctctgtctcccgctaaattccagggctgccagctcctatgctcaggccccacctcacagatct

SEQ ID NO: 132936 - DNA, 80 bp, synthetic construct
  misc_feature 1..80: note = Artificially Synthesized Probe
  source 1..80: mol_type = other DNA
acaagtcagagaataacaaggtcccctctgagaaacctccccttaatctccaaaatatcgtccctgaaatccctgcggaa

SEQ ID NO: 132937 - DNA, 80 bp, synthetic construct
  misc_feature 1..80: note = Artificially Synthesized Probe
  source 1..80: mol_type = other DNA
gagcaaactcggtgatcacagcacatctggtgggagacagaggactagctcataccccgcccccgccatccacactgacc

SEQ ID NO: 132938 - DNA, 80 bp, synthetic construct
  misc_feature 1..80: note = Artificially Synthesized Probe
  source 1..80: mol_type = other DNA
cgtagggcccggtgccgttctccatcgctgctgtattcggcagccctggagactgccactcgaaaaaccgggctctagag

SEQ ID NO: 132939 - DNA, 80 bp, synthetic construct; identical to SEQ ID NO: 42104
  misc_feature 1..80: note = Artificially Synthesized Probe
  source 1..80: mol_type = other DNA

SEQ ID NO: 132940 - DNA, 80 bp, synthetic construct; identical to SEQ ID NO: 42115
  misc_feature 1..80: note = Artificially Synthesized Probe
  source 1..80: mol_type = other DNA

SEQ ID NO: 132941 - DNA, 80 bp, synthetic construct
  misc_feature 1..80: note = Artificially Synthesized Probe
  source 1..80: mol_type = other DNA
atcacatgatagtggttggccagtcaatgaggaaacgtacggtgggcggccgggatcaaaatgaaagccataaaggaagc

SEQ ID NO: 132942 - DNA, 80 bp, synthetic construct
  misc_feature 1..80: note = Artificially Synthesized Probe
  source 1..80: mol_type = other DNA
atatacacattatttcagagcaccctgcaggaatgactcaggctctggagttggatttaccgggtttgaatctcagtccc

SEQ ID NO: 132943 - DNA, 80 bp, synthetic construct
  misc_feature 1..80: note = Artificially Synthesized Probe
  source 1..80: mol_type = other DNA
tgtatgaaggcaggacagcgaagtggtcccggctacctgggttccagtctcagctcgccctgcgacttgttaactctgaa

SEQ ID NO: 132944 - DNA, 80 bp, synthetic construct; identical to SEQ ID NO: 42116
  misc_feature 1..80: note = Artificially Synthesized Probe
  source 1..80: mol_type = other DNA

SEQ ID NO: 132945 - DNA, 80 bp, synthetic construct
  misc_feature 1..80: note = Artificially Synthesized Probe
  source 1..80: mol_type = other DNA
ctggtttcattcctgggctcaagcgatcttcccgccttggcccccaaagcactgggattataggaatgagccaccatgcc

SEQ ID NO: 132946 - DNA, 80 bp, synthetic construct
  misc_feature 1..80: note = Artificially Synthesized Probe
  source 1..80: mol_type = other DNA
gcccaggctggagtgcagtggtgcgatctcggctcactacaaactctgcctcaggttcaagcgattcacctgcctcagcc

SEQ ID NO: 132947 - DNA, 80 bp, synthetic construct
  misc_feature 1..80: note = Artificially Synthesized Probe
  source 1..80: mol_type = other DNA
aaagtgctgggattacaggtgtgagccactacgcccagcccagtcagcagatttagttatttttatttttatttatttat

SEQ ID NO: 132948 - DNA, 80 bp, synthetic construct
  misc_feature 1..80: note = Artificially Synthesized Probe
  source 1..80: mol_type = other DNA
ccacgcccggctaatttttttttttttttttttgtatttttagtagagacagggtttcactgtgttagccaggatggtct

SEQ ID NO: 132949 - DNA, 80 bp, synthetic construct
  misc_feature 1..80: note = Artificially Synthesized Probe
  source 1..80: mol_type = other DNA
ggatcctttcctgggatgggaagcccactcccaaacacttgcctggccccagctcccccaattctctccctgttgcccaa

SEQ ID NO: 132950 - DNA, 80 bp, synthetic construct
  misc_feature 1..80: note = Artificially Synthesized Probe
  source 1..80: mol_type = other DNA
ctctgcctcccaggttcaagcgattctcctgtctcagcctcctgagtagctgggattacaggcacccaccaccacaccat

SEQ ID NO: 132951 - DNA, 80 bp, synthetic construct
  misc_feature 1..80: note = Artificially Synthesized Probe
  source 1..80: mol_type = other DNA
cagattttgaatctcacttgaagaatgggcacgagtctgtgtggggcagcatctgtgttgtctgcacacacatgtgcttc

SEQ ID NO: 132952 - DNA, 80 bp, synthetic construct
  misc_feature 1..80: note = Artificially Synthesized Probe
  source 1..80: mol_type = other DNA
aatactaggcccaagggacctccaggtgaccaccacctgccctcccacctgcatgaggtcagccctgccctcacccagca

SEQ ID NO: 132953 - DNA, 80 bp, synthetic construct; identical to SEQ ID NO: 42106
  misc_feature 1..80: note = Artificially Synthesized Probe
  source 1..80: mol_type = other DNA

SEQ ID NO: 132954 - DNA, 80 bp, synthetic construct
  misc_feature 1..80: note = Artificially Synthesized Probe
  source 1..80: mol_type = other DNA
cgcccagctaatttttgtatttttagtagagacagggtttcaccatgttggccaggatggtctcgatctcttaaccttgt

SEQ ID NO: 132955 - DNA, 80 bp, synthetic construct
  misc_feature 1..80: note = Artificially Synthesized Probe
  source 1..80: mol_type = other DNA
gcctctcaggttcaaccaattctcctgtctcagcctcctgagtagctgagattacagggatgtgccatgacgcctggcta

SEQ ID NO: 132956 - DNA, 80 bp, synthetic construct
  misc_feature 1..80: note = Artificially Synthesized Probe
  source 1..80: mol_type = other DNA
attattattattatattttaaatggagtctcgctctgttgcccaggttgatgtgcagtggcgcaatcttggctcaccacc

SEQ ID NO: 132957 - DNA, 80 bp, synthetic construct
  misc_feature 1..80: note = Artificially Synthesized Probe
  source 1..80: mol_type = other DNA
tgacctcaagtgatctgcccacctcagcctcccaaagtgctgggaatataggcatgagccaataagcctggcctaatttt

SEQ ID NO: 132958 - DNA, 80 bp, synthetic construct; identical to SEQ ID NO: 42107
  misc_feature 1..80: note = Artificially Synthesized Probe
  source 1..80: mol_type = other DNA

SEQ ID NO: 132959 - DNA, 80 bp, synthetic construct
  misc_feature 1..80: note = Artificially Synthesized Probe
  source 1..80: mol_type = other DNA
agttctatgcatgagaatccctggacttgccccaggccaccctgtggtctgggacaggctcctcccgaccccaggggctc

SEQ ID NO: 132960 - DNA, 80 bp, synthetic construct
  misc_feature 1..80: note = Artificially Synthesized Probe
  source 1..80: mol_type = other DNA
tcctccatagcttcgtcggccgccttgcccctgtgcgaggggaggagtaggtgggaccccatctgccctttaccccttct

SEQ ID NO: 132961 - DNA, 80 bp, synthetic construct
  misc_feature 1..80: note = Artificially Synthesized Probe
  source 1..80: mol_type = other DNA
gcccggctctcacctcagtgatgacgctcaggacccctcggatccgctccgaggtgtggaagcggccggggttagcgctc

SEQ ID NO: 132962 - DNA, 80 bp, synthetic construct
  misc_feature 1..80: note = Artificially Synthesized Probe
  source 1..80: mol_type = other DNA
acctggtgtcgttgcccacagtgttcacactcgggggtcacagggggaccacaggctgcagagaacttggccctaaacag

SEQ ID NO: 132963 - DNA, 80 bp, synthetic construct; identical to SEQ ID NO: 42108
  misc_feature 1..80: note = Artificially Synthesized Probe
  source 1..80: mol_type = other DNA

SEQ ID NO: 132964 - DNA, 80 bp, synthetic construct
  misc_feature 1..80: note = Artificially Synthesized Probe
  source 1..80: mol_type = other DNA
gcagcggcaccacgaagcgctggtagcagttggcgcggaggtccaggctgtgcaggacgattctcagggcctgggggtgg

SEQ ID NO: 132965 - DNA, 80 bp, synthetic construct
  misc_feature 1..80: note = Artificially Synthesized Probe
  source 1..80: mol_type = other DNA
ctcagtttcttcatctgcaaaatcacaacagtccctgtctgtggcactgctgggggcactaaacgagtgaggaaagcata

SEQ ID NO: 132966 - DNA, 80 bp, synthetic construct
  misc_feature 1..80: note = Artificially Synthesized Probe
  source 1..80: mol_type = other DNA
cagcactttgggaggctggtcaggagtttgagaccagcctggctaacatgatgaaatccccgtctctactaaaaatacaa

SEQ ID NO: 132967 - DNA, 80 bp, synthetic construct; identical to SEQ ID NO: 42109
  misc_feature 1..80: note = Artificially Synthesized Probe
  source 1..80: mol_type = other DNA

SEQ ID NO: 132968 - DNA, 80 bp, synthetic construct
  misc_feature 1..80: note = Artificially Synthesized Probe
  source 1..80: mol_type = other DNA
gcatccaccaccacacctaggtaatttttagggtttttttgtagagatggggtcctcgctatgttgcccaggttcctgac

SEQ ID NO: 132969 - DNA, 80 bp, synthetic construct
  misc_feature 1..80: note = Artificially Synthesized Probe
  source 1..80: mol_type = other DNA
cttgttgcccaggctggagtgcaatggtgccatctcggctcaccgcaacctccacctcccgggttcaagtgattctcctg

SEQ ID NO: 132970 - DNA, 80 bp, synthetic construct
  misc_feature 1..80: note = Artificially Synthesized Probe
  source 1..80: mol_type = other DNA
cagagtgctgggattacaggcgtgagccaccgcgcccggcctatttttttttcttttttttgagacagagtcttgctctg

SEQ ID NO: 132971 - DNA, 80 bp, synthetic construct
  misc_feature 1..80: note = Artificially Synthesized Probe
  source 1..80: mol_type = other DNA
ggcctgcagcctagggaagcaggggtggggcgttggggctgggggaagctgccacacgagtgtgtccccactccccacag

SEQ ID NO: 132972 - DNA, 80 bp, synthetic construct; identical to SEQ ID NO: 42110
  misc_feature 1..80: note = Artificially Synthesized Probe
  source 1..80: mol_type = other DNA

SEQ ID NO: 132973 - DNA, 80 bp, synthetic construct
  misc_feature 1..80: note = Artificially Synthesized Probe
  source 1..80: mol_type = other DNA
gtagccgggattacaggtatctgccaccatgcctggctaatttttgtatttttagtagagatggggttttaccatgttgg

SEQ ID NO: 132974 - DNA, 80 bp, synthetic construct
  misc_feature 1..80: note = Artificially Synthesized Probe
  source 1..80: mol_type = other DNA
gaagtcacttgcccagagctaccagcaaagctaggatttaaacccagtcctggaaaaacgacctttaaaaaaaaaatttt

SEQ ID NO: 132975 - DNA, 80 bp, synthetic construct; identical to SEQ ID NO: 42111
  misc_feature 1..80: note = Artificially Synthesized Probe
  source 1..80: mol_type = other DNA

SEQ ID NO: 132976 - DNA, 80 bp, synthetic construct
  misc_feature 1..80: note = Artificially Synthesized Probe
  source 1..80: mol_type = other DNA
acacagcaaccctgcagagaggggctgggcagtgagaaccctccaacaccccaagccctgctcccaccccagtgccatcc

SEQ ID NO: 132977 - DNA, 80 bp, synthetic construct
  misc_feature 1..80: note = Artificially Synthesized Probe
  source 1..80: mol_type = other DNA
cagcctcccacgccaggtaccttctctgtcccctacacatattaactcgtacagcacagtggtttgggtctgaactccgg

SEQ ID NO: 132978 - DNA, 80 bp, synthetic construct
  misc_feature 1..80: note = Artificially Synthesized Probe
  source 1..80: mol_type = other DNA
tcgcgcctcagcctcccgagtagagtagctgggactacagacatgtgccaccacgcccagctaatttttgtatttttagt

SEQ ID NO: 132979 - DNA, 80 bp, synthetic construct; identical to SEQ ID NO: 42112
  misc_feature 1..80: note = Artificially Synthesized Probe
  source 1..80: mol_type = other DNA

SEQ ID NO: 132980 - DNA, 80 bp, synthetic construct
  misc_feature 1..80: note = Artificially Synthesized Probe
  source 1..80: mol_type = other DNA
agcttcccaagtagctgggattacaggcacgtgccaccatgcctggctaatttttatatttttagtagagacgaggtttt

SEQ ID NO: 132981 - DNA, 80 bp, synthetic construct
  misc_feature 1..80: note = Artificially Synthesized Probe
  source 1..80: mol_type = other DNA
ttgcctaggctggtcttgaaatcctggcctcaagcgatcctcctgccttggcctctcaaaatgcttgattacaggcatga

SEQ ID NO: 132982 - DNA, 80 bp, synthetic construct
  misc_feature 1..80: note = Artificially Synthesized Probe
  source 1..80: mol_type = other DNA
tgaggcgggtggatcacctgaggtcaggagttcgagaccagcctggccaacatggtgaaaccccatctccactaaaaata

SEQ ID NO: 132983 - DNA, 80 bp, synthetic construct
  misc_feature 1..80: note = Artificially Synthesized Probe
  source 1..80: mol_type = other DNA
ttttttaacctttaaaaatgtaaaaaacattcttgggttgtgggccattgataaactaggctaggccgggcgcagtggct

SEQ ID NO: 132984 - DNA, 80 bp, synthetic construct
  misc_feature 1..80: note = Artificially Synthesized Probe
  source 1..80: mol_type = other DNA
ctataatcccaccactttgggaggccgaggcgggcagatcacgaggtcaggaaatcgagaccatcctggccaccatggtg

SEQ ID NO: 132985 - DNA, 80 bp, synthetic construct; identical to SEQ ID NO: 42113
  misc_feature 1..80: note = Artificially Synthesized Probe
  source 1..80: mol_type = other DNA

SEQ ID NO: 132986 - DNA, 80 bp, synthetic construct
  misc_feature 1..80: note = Artificially Synthesized Probe
  source 1..80: mol_type = other DNA
acaaaaaaaggctgtgagccccacaggctatagtttgccaactcttgcgaaggtcaccaattttgcatgttttgtttcct

SEQ ID NO: 132987 - DNA, 80 bp, synthetic construct; identical to SEQ ID NO: 42117
  misc_feature 1..80: note = Artificially Synthesized Probe
  source 1..80: mol_type = other DNA

SEQ ID NO: 132988 - DNA, 80 bp, synthetic construct
  misc_feature 1..80: note = Artificially Synthesized Probe
  source 1..80: mol_type = other DNA
ctctgggtctctgtccccctccctgtgtgccccgctcccatgtgtccacagttcctccggctctctgaccgaacggatcc

SEQ ID NO: 132989 - DNA, 80 bp, synthetic construct
  misc_feature 1..80: note = Artificially Synthesized Probe
  source 1..80: mol_type = other DNA
gggtgggtgggggctgtctcctgggcctcggcctgcctgccatctcccccacgactgtgggtggcctcccccgccgccca

SEQ ID NO: 132990 - DNA, 80 bp, synthetic construct; identical to SEQ ID NO: 42127
  misc_feature 1..80: note = Artificially Synthesized Probe
  source 1..80: mol_type = other DNA

SEQ ID NO: 132991 - DNA, 80 bp, synthetic construct
  misc_feature 1..80: note = Artificially Synthesized Probe
  source 1..80: mol_type = other DNA
gacccggaggacggggtccagtttcccctggactacaactactcggccttcttcctggtggacgacggcacacacggctg

SEQ ID NO: 132992 - DNA, 80 bp, synthetic construct
  misc_feature 1..80: note = Artificially Synthesized Probe
  source 1..80: mol_type = other DNA
ttggggaattacctatggttaagtgtctttccccgtcattattcatggttttaaaaacttctgtctgagagtgagttagc

SEQ ID NO: 132993 - DNA, 80 bp, synthetic construct
  misc_feature 1..80: note = Artificially Synthesized Probe
  source 1..80: mol_type = other DNA
ataataataaagaataaaaaataaattagccaggtgtggtgtcgtgtgcctgtaatcccagctacttgggaggctaaggt

SEQ ID NO: 132994 - DNA, 80 bp, synthetic construct; identical to SEQ ID NO: 42128
  misc_feature 1..80: note = Artificially Synthesized Probe
  source 1..80: mol_type = other DNA

SEQ ID NO: 132995 - DNA, 80 bp, synthetic construct
  misc_feature 1..80: note = Artificially Synthesized Probe
  source 1..80: mol_type = other DNA
ctcctgaccttgtgatctgcctgctttggcctcccgaagtgctgggattacaggtgtgagccaccgcgcccggcctaatg

SEQ ID NO: 132996 - DNA, 80 bp, synthetic construct
  misc_feature 1..80: note = Artificially Synthesized Probe
  source 1..80: mol_type = other DNA
acagggttttgccatgcagcccaggtggcctcaaactcgtggtcgaaagtggtccacctgcctcagcctcccaaagtgct

SEQ ID NO: 132997 - DNA, 80 bp, synthetic construct
  misc_feature 1..80: note = Artificially Synthesized Probe
  source 1..80: mol_type = other DNA
gagctagatagggtgtgtgcgtccgcgaggagctcccgcccttcagtgacggcctctcaagcggatccaggctttctagt

SEQ ID NO: 132998 - DNA, 80 bp, synthetic construct
  misc_feature 1..80: note = Artificially Synthesized Probe
  source 1..80: mol_type = other DNA
tatttttggtggggttttccaattttctgggaatacaagccatgttttcttcaaataggtacttttgtcccttccagctt

SEQ ID NO: 132999 - DNA, 80 bp, synthetic construct; identical to SEQ ID NO: 42129
  misc_feature 1..80: note = Artificially Synthesized Probe
  source 1..80: mol_type = other DNA

SEQ ID NO: 133000 - DNA, 80 bp, synthetic construct
  misc_feature 1..80: note = Artificially Synthesized Probe
  source 1..80: mol_type = other DNA
tcccagctaatttttgtatttttggtagagacggggtttcaccatgttggccaggctggtcttgaactcttgacctcagg

SEQ ID NO: 133001 - DNA, 80 bp, synthetic construct
  misc_feature 1..80: note = Artificially Synthesized Probe
  source 1..80: mol_type = other DNA
tctattcccatttcctttactttctatttgaactttcactccctctggctcctggatggttaatcaatgacaggattgac

SEQ ID NO: 133002 - DNA, 80 bp, synthetic construct
  misc_feature 1..80: note = Artificially Synthesized Probe
  source 1..80: mol_type = other DNA
aatcccagcactttgggaggccaaggtgggaggatcccttgagtccaggaattcgagaccagcctgggcaagatggcaag

SEQ ID NO: 133003 - DNA, 80 bp, synthetic construct; identical to SEQ ID NO: 42130
  misc_feature 1..80: note = Artificially Synthesized Probe
  source 1..80: mol_type = other DNA

SEQ ID NO: 133004 - DNA, 80 bp, synthetic construct
  misc_feature 1..80: note = Artificially Synthesized Probe
  source 1..80: mol_type = other DNA
atgtttgccgactcctgggaaatgcggttttctcctatctccagcaaaggctgatgggaggtaatcaagcccccttctct

SEQ ID NO: 133005 - DNA, 80 bp, synthetic construct
  misc_feature 1..80: note = Artificially Synthesized Probe
  source 1..80: mol_type = other DNA
ggtctgactccgggtagggtgaatatcctgccttttctgacgtgatgaataaagaatgcctttatcctgtagcgaataga

SEQ ID NO: 133006 - DNA, 80 bp, synthetic construct
  misc_feature 1..80: note = Artificially Synthesized Probe
  source 1..80: mol_type = other DNA
gaccttgaggtcctgcaggcccaggtatgacactgggggcccaactctggatcctgagatgggagggaactggggacttg

SEQ ID NO: 133007 - DNA, 80 bp, synthetic construct
  misc_feature 1..80: note = Artificially Synthesized Probe
  source 1..80: mol_type = other DNA
atgcagaactggctattccacaggtggagaggattatgacccggaaggagctcctgacagtctattcttctgaggatggg

SEQ ID NO: 133008 - DNA, 80 bp, synthetic construct
  misc_feature 1..80: note = Artificially Synthesized Probe
  source 1..80: mol_type = other DNA
cacgcccggctaattttttgtattttagtagagacggggtttcaccgtgttggccaggatgatctcgatctcctgacctt

SEQ ID NO: 133009 - DNA, 80 bp, synthetic construct; identical to SEQ ID NO: 42131
  misc_feature 1..80: note = Artificially Synthesized Probe
  source 1..80: mol_type = other DNA

SEQ ID NO: 133010 - DNA, 80 bp, synthetic construct
  misc_feature 1..80: note = Artificially Synthesized Probe
  source 1..80: mol_type = other DNA
ccatcctttcacctgtccatccacacatccactgacaattcctgagaattccatccgctcattcctccatccgtcttctc

SEQ ID NO: 133011 - DNA, 80 bp, synthetic construct
  misc_feature 1..80: note = Artificially Synthesized Probe
  source 1..80: mol_type = other DNA
ccatccatccatcttctcacctgtccatctacacatccaccgaaaattcctgagaattccatccactcattcctccatcc

SEQ ID NO: 133012 - DNA, 80 bp, synthetic construct
  misc_feature 1..80: note = Artificially Synthesized Probe
  source 1..80: mol_type = other DNA
acatccactgacaattcctgagaattccatccgctcattcctccatccgtcttctcacctgtccatccacacatccactg

SEQ ID NO: 133013 - DNA, 80 bp, synthetic construct; identical to SEQ ID NO: 42132
  misc_feature 1..80: note = Artificially Synthesized Probe
  source 1..80: mol_type = other DNA

SEQ ID NO: 133014 - DNA, 80 bp, synthetic construct
  misc_feature 1..80: note = Artificially Synthesized Probe
  source 1..80: mol_type = other DNA
ccacacatccactgacaattccattcactcattcctccatccacccatcttccatccatttacccatctacccatccatc

SEQ ID NO: 133015 - DNA, 80 bp, synthetic construct
  misc_feature 1..80: note = Artificially Synthesized Probe
  source 1..80: mol_type = other DNA
tggaggacggaatgatgaaaaccaaggcgggggagcataatgcacacctgggagaggctggggagggtcttatttattta

SEQ ID NO: 133016 - DNA, 80 bp, synthetic construct; identical to SEQ ID NO: 42133
  misc_feature 1..80: note = Artificially Synthesized Probe
  source 1..80: mol_type = other DNA

SEQ ID NO: 133017 - DNA, 80 bp, synthetic construct
  misc_feature 1..80: note = Artificially Synthesized Probe
  source 1..80: mol_type = other DNA
gatacaaccttaggtaaaatttaagacagaagcacaggcaagaatcactgtcgttagaaggaaaacttcaaggaaaagtt

SEQ ID NO: 133018 - DNA, 80 bp, synthetic construct
  misc_feature 1..80: note = Artificially Synthesized Probe
  source 1..80: mol_type = other DNA
tcatgcccggctgatttttgtatttttagtagagacggtgtttcaccatgttggtcaggctggcctcgaactcctgacct

SEQ ID NO: 133019 - DNA, 80 bp, synthetic construct
  misc_feature 1..80: note = Artificially Synthesized Probe
  source 1..80: mol_type = other DNA
agcccaggagtttgagaccagcctgggcagcatggtgaaatgccacctctataaaaaatacaaataataagttggggagg

SEQ ID NO: 133020 - DNA, 80 bp, synthetic construct
  misc_feature 1..80: note = Artificially Synthesized Probe
  source 1..80: mol_type = other DNA
ccaaagcgctaggattacaggtgtgagccaccgcacctggcccaggctttctagttttttgttttttgtttttttgagac

SEQ ID NO: 133021 - DNA, 80 bp, synthetic construct; identical to SEQ ID NO: 42134
  misc_feature 1..80: note = Artificially Synthesized Probe
  source 1..80: mol_type = other DNA

SEQ ID NO: 133022 - DNA, 80 bp, synthetic construct
  misc_feature 1..80: note = Artificially Synthesized Probe
  source 1..80: mol_type = other DNA
cacaagtagctgggaccacaggcatgtgccatcatgcctggctttttttttttttttttttttttttgagacggagtttc

SEQ ID NO: 133023 - DNA, 80 bp, synthetic construct
  misc_feature 1..80: note = Artificially Synthesized Probe
  source 1..80: mol_type = other DNA
ggtttctccatattggtcaggctggtctcgaactcccgacctcgggtgatccgcccgcctcggcctcccaaagtgctggg

SEQ ID NO: 133024 - DNA, 80 bp, synthetic construct
  misc_feature 1..80: note = Artificially Synthesized Probe
  source 1..80: mol_type = other DNA
ggccagaagaattttacgggggaaatacacactaagatagaaactccccagatacacggtggcaatatatacagcattct

SEQ ID NO: 133025 - DNA, 80 bp, synthetic construct
  misc_feature 1..80: note = Artificially Synthesized Probe
  source 1..80: mol_type = other DNA
aaactccccagatacacggtggcaatatatacagcattctacctcagctccccacccatgtttgtggtgtggtatatatt

SEQ ID NO: 133026 - DNA, 80 bp, synthetic construct; identical to SEQ ID NO: 42135
  misc_feature 1..80: note = Artificially Synthesized Probe
  source 1..80: mol_type = other DNA

SEQ ID NO: 133027 - DNA, 80 bp, synthetic construct
  misc_feature 1..80: note = Artificially Synthesized Probe
  source 1..80: mol_type = other DNA
cgattctcctgcctcagcctcctgagtagctgggattacaggtgcccacaaccgcacccggctaatttttgtatttttag

SEQ ID NO: 133028 - DNA, 80 bp, synthetic construct
  misc_feature 1..80: note = Artificially Synthesized Probe
  source 1..80: mol_type = other DNA
tgtccaggctggagtgcagtgggacaatcatagctcactgcagccttgagatcctgggctcaagtgattctctcgcatca

SEQ ID NO: 133029 - DNA, 80 bp, synthetic construct
  misc_feature 1..80: note = Artificially Synthesized Probe
  source 1..80: mol_type = other DNA
gtagggtagaaagagcaagttatttttgctttggaatcagacaaaactgaatttaaataccagcttgggccgggtacagt

SEQ ID NO: 133030 - DNA, 80 bp, synthetic construct
  misc_feature 1..80: note = Artificially Synthesized Probe
  source 1..80: mol_type = other DNA
gctggcgtggtggcgggtgcctgtaatcccaactagttgggaggctgaggcaggagaatcgcttgaacccaggaggtgga

SEQ ID NO: 133031 - DNA, 80 bp, synthetic construct; identical to SEQ ID NO: 42136
  misc_feature 1..80: note = Artificially Synthesized Probe
  source 1..80: mol_type = other DNA

SEQ ID NO: 133032 - DNA, 80 bp, synthetic construct
  misc_feature 1..80: note = Artificially Synthesized Probe
  source 1..80: mol_type = other DNA
agagacgggatttcaccctgttgcccaggttggtcttgaactcttgatctcaggcaatgcacctgccttggctttccaaa

SEQ ID NO: 133033 - DNA, 80 bp, synthetic construct
  misc_feature 1..80: note = Artificially Synthesized Probe
  source 1..80: mol_type = other DNA
ggggcccaataagagggatctcctcttaatatgattccatttcctctgggggtacatccttcaatataaggtaactctca

SEQ ID NO: 133034 - DNA, 80 bp, synthetic construct
  misc_feature 1..80: note = Artificially Synthesized Probe
  source 1..80: mol_type = other DNA
tggggatagcagagttgaatggatggaatttcagcaagaaagaagggcaaggtcatgaatgcgtcttttttttttttttt

SEQ ID NO: 133035 - DNA, 80 bp, synthetic construct
  misc_feature 1..80: note = Artificially Synthesized Probe
  source 1..80: mol_type = other DNA
ttagtagagatggggtttcaccatgttggccaggatggtctcgaccttctgacctcgtgatctgcctgcctcggcctccc

SEQ ID NO: 133036 - DNA, 80 bp, synthetic construct; identical to SEQ ID NO: 42137
  misc_feature 1..80: note = Artificially Synthesized Probe
  source 1..80: mol_type = other DNA

SEQ ID NO: 133037 - DNA, 80 bp, synthetic construct
  misc_feature 1..80: note = Artificially Synthesized Probe
  source 1..80: mol_type = other DNA
taaggctgtccttgagaggcagcagaggaccagggtccgttatgtggataaaaaagactctctggccaagcgtgaaggct

SEQ ID NO: 133038 - DNA, 80 bp, synthetic construct
  misc_feature 1..80: note = Artificially Synthesized Probe
  source 1..80: mol_type = other DNA
ggcaggaggatcgcttgagcctgggaggtctcaaagctgaagtgagctgtgatggcgccactgcactccagactgggtga

SEQ ID NO: 133039 - DNA, 80 bp, synthetic construct
  misc_feature 1..80: note = Artificially Synthesized Probe
  source 1..80: mol_type = other DNA
tcaggaggctggacgtgggacatgaagcttgggggctgatggcctgtgagatgggaggagcaggaagggacaaggacagt

SEQ ID NO: 133040 - DNA, 80 bp, synthetic construct; identical to SEQ ID NO: 42138
  misc_feature 1..80: note = Artificially Synthesized Probe
  source 1..80: mol_type = other DNA

SEQ ID NO: 133041 - DNA, 80 bp, synthetic construct
  misc_feature 1..80: note = Artificially Synthesized Probe
  source 1..80: mol_type = other DNA
gatggggtttcactgtgttaaccagggtggtctcgatctcttgacctcatgatccacccatctcggcctcccaaagtgct

SEQ ID NO: 133042 - DNA, 80 bp, synthetic construct
  misc_feature 1..80: note = Artificially Synthesized Probe
  source 1..80: mol_type = other DNA
gctgggattacaggcatgagccaccacgcccagctaattttgtatttttagcagagacgaggtttctccatgttggtcag

SEQ ID NO: 133043 - DNA, 80 bp, synthetic construct; identical to SEQ ID NO: 42118
  misc_feature 1..80: note = Artificially Synthesized Probe
  source 1..80: mol_type = other DNA

SEQ ID NO: 133044 - DNA, 80 bp, synthetic construct
  misc_feature 1..80: note = Artificially Synthesized Probe
  source 1..80: mol_type = other DNA
ctgcaacctccacctcccgggttcaagcgattctcctgctcagcctcccaagtagctgggactacagacgcatgccacca

SEQ ID NO: 133045 - DNA, 80 bp, synthetic construct; identical to SEQ ID NO: 42139
  misc_feature 1..80: note = Artificially Synthesized Probe
  source 1..80: mol_type = other DNA

SEQ ID NO: 133046 - DNA, 80 bp, synthetic construct
  misc_feature 1..80: note = Artificially Synthesized Probe
  source 1..80: mol_type = other DNA
agctgtagtgtcgccacagcgtggaacttcttcccacagttactgtaattgattacagtgctatgaagggggtgccacta

SEQ ID NO: 133047 - DNA, 80 bp, synthetic construct
  misc_feature 1..80: note = Artificially Synthesized Probe
  source 1..80: mol_type = other DNA
ccagtttttggagcaaccaaaatgagatgaatttgttttggagatagatatggagcaagtggaggcagaaggaaacctaa

SEQ ID NO: 133048 - DNA, 80 bp, synthetic construct; identical to SEQ ID NO: 42140
  misc_feature 1..80: note = Artificially Synthesized Probe
  source 1..80: mol_type = other DNA

SEQ ID NO: 133049 - DNA, 80 bp, synthetic construct
  misc_feature 1..80: note = Artificially Synthesized Probe
  source 1..80: mol_type = other DNA
ccattctctgggagctctcttgggccactctatacctctgtgaccatatcctcctctgggccctaatcatattatatgcc

SEQ ID NO: 133050 - DNA, 80 bp, synthetic construct
  misc_feature 1..80: note = Artificially Synthesized Probe
  source 1..80: mol_type = other DNA
catccatctatccatccatccgttcattcatccatctctttatcctttcatccatccatttatccatcccatccatccat

SEQ ID NO: 133051 - DNA, 80 bp, synthetic construct
  misc_feature 1..80: note = Artificially Synthesized Probe
  source 1..80: mol_type = other DNA
tcagggtaggaactgtatctgatttctctctccatccctcccactgcttggtccataacatacctcaataaatattaaat

SEQ ID NO: 133052 - DNA, 80 bp, synthetic construct; identical to SEQ ID NO: 42141
  misc_feature 1..80: note = Artificially Synthesized Probe
  source 1..80: mol_type = other DNA

SEQ ID NO: 133053 - DNA, 80 bp, synthetic construct
  misc_feature 1..80: note = Artificially Synthesized Probe
  source 1..80: mol_type = other DNA
aggggacacaaaatgtcactaatggtttctggagggaggaagagtggctagtgaggtgacatttgaaagtgagctggaga

SEQ ID NO: 133054 - DNA, 80 bp, synthetic construct
  misc_feature 1..80: note = Artificially Synthesized Probe
  source 1..80: mol_type = other DNA
ggggtcagggcctgggggttgggcatactgacaaagggactgtgctgtcctccctctctgccttcttttttttttttttt

SEQ ID NO: 133055 - DNA, 80 bp, synthetic construct
  misc_feature 1..80: note = Artificially Synthesized Probe
  source 1..80: mol_type = other DNA
gtatttttagtagagacggggtttcactatgttagccaggatggtctcgatctcctgaccttgtgatccgcccgcctcag

SEQ ID NO: 133056 - DNA, 80 bp, synthetic construct
  misc_feature 1..80: note = Artificially Synthesized Probe
  source 1..80: mol_type = other DNA
cccatccatctgtctatccatccatccaccctgtacctccatctatccattcatccattcattcatccatctacttatcc

SEQ ID NO: 133057 - DNA, 80 bp, synthetic construct; identical to SEQ ID NO: 42142
  misc_feature 1..80: note = Artificially Synthesized Probe
  source 1..80: mol_type = other DNA

SEQ ID NO: 133058 - DNA, 80 bp, synthetic construct
  misc_feature 1..80: note = Artificially Synthesized Probe
  source 1..80: mol_type = other DNA
acctatccattcatccatccatccacccatccatccatccatccatccatccatccatccatccatccatccatccgtcc

SEQ ID NO: 133059 - DNA, 80 bp, synthetic construct
  misc_feature 1..80: note = Artificially Synthesized Probe
  source 1..80: mol_type = other DNA
tgggccacttcctgaccccgatgcgcctggcccaactctacagcgcggcgccctccaactcgctcatccgcaaccttttg

SEQ ID NO: 133060 - DNA, 80 bp, synthetic construct
  misc_feature 1..80: note = Artificially Synthesized Probe
  source 1..80: mol_type = other DNA
agggcttcggggagagcgtaaggaccgggcaaagctggggggcccccccgcgcgggaaggacctgggggcgggattacat

SEQ ID NO: 133061 - DNA, 80 bp, synthetic construct; identical to SEQ ID NO: 42143
  misc_feature 1..80: note = Artificially Synthesized Probe
  source 1..80: mol_type = other DNA

SEQ ID NO: 133062 - DNA, 80 bp, synthetic construct
  misc_feature 1..80: note = Artificially Synthesized Probe
  source 1..80: mol_type = other DNA
atggtgcaaccctatctctactaaaaatacaaaaattaactgggcgtattggcgcatgcctgtaatcccagctactcagg

SEQ ID NO: 133063 - DNA, 80 bp, synthetic construct
  misc_feature 1..80: note = Artificially Synthesized Probe
  source 1..80: mol_type = other DNA
tcatgcattattttatgtgtttattttttgagacagagtctcgctctgtcgcccaggctgcagtgcagtggcgcaatctt

SEQ ID NO: 133064 - DNA, 80 bp, synthetic construct
  misc_feature 1..80: note = Artificially Synthesized Probe
  source 1..80: mol_type = other DNA
ctcctgacctcaagtgatccacccgcctcggcttcccaaaatgctgggattacaggcatgtgccaccgtgcctggccaag

SEQ ID NO: 133065 - DNA, 80 bp, synthetic construct
  misc_feature 1..80: note = Artificially Synthesized Probe
  source 1..80: mol_type = other DNA
tgggttcatgccattctcctgcctcagcctcccgagtagctgggactacaggcgcccgccaccacgcccagctaattttt

SEQ ID NO: 133066 - DNA, 80 bp, synthetic construct
  misc_feature 1..80: note = Artificially Synthesized Probe
  source 1..80: mol_type = other DNA
agacttttgtctttcatcacattttggaagtttttaggacattatatcttcaaatattatttctttccctttctgtctct

SEQ ID NO: 133067 - DNA, 80 bp, synthetic construct; identical to SEQ ID NO: 42144
  misc_feature 1..80: note = Artificially Synthesized Probe
  source 1..80: mol_type = other DNA

SEQ ID NO: 133068 - DNA, 80 bp, synthetic construct
  misc_feature 1..80: note = Artificially Synthesized Probe
  source 1..80: mol_type = other DNA
tctcctgcctcagcctcccaagtagctgggactacaggtgcccgccaccacgcccagctaatttttttgtatttttttag

SEQ ID NO: 133069 - DNA, 80 bp, synthetic construct
  misc_feature 1..80: note = Artificially Synthesized Probe
  source 1..80: mol_type = other DNA
ttttgattacagtaccattctcaatctcttctacaaaaagcagaaaaaaaagcagccacttcactcaagacctatataca

SEQ ID NO: 133070 - DNA, 80 bp, synthetic construct; identical to SEQ ID NO: 42145
  misc_feature 1..80: note = Artificially Synthesized Probe
  source 1..80: mol_type = other DNA

SEQ ID NO: 133071 - DNA, 80 bp, synthetic construct
  misc_feature 1..80: note = Artificially Synthesized Probe
  source 1..80: mol_type = other DNA
tttcttttatttatttatttgttgttcttgttgttgttgttgagacagagtctcattctgtcactcagactggactgcag

SEQ ID NO: 133072 - DNA, 80 bp, synthetic construct; identical to SEQ ID NO: 42119
  misc_feature 1..80: note = Artificially Synthesized Probe
  source 1..80: mol_type = other DNA

SEQ ID NO: 133073 - DNA, 80 bp, synthetic construct
  misc_feature 1..80: note = Artificially Synthesized Probe
  source 1..80: mol_type = other DNA
agatggggtcttactatgttgcccaggttggtcttgaattcttgggctcaagcaatcctcctgcctgggcctcccaaagt

SEQ ID NO: 133074 - DNA, 80 bp, synthetic construct
  misc_feature 1..80: note = Artificially Synthesized Probe
  source 1..80: mol_type = other DNA
tatgccctccctccagggtttgttgtggctgctgctcattgtgggtcattgttgtttgtttagtgacttttcttttttct

SEQ ID NO: 133075 - DNA, 80 bp, synthetic construct
  misc_feature 1..80: note = Artificially Synthesized Probe
  source 1..80: mol_type = other DNA
ccagggcatgggggtcgagactcctgagtctggagcgggagggcgctgggggcccggactcctgtgtccgtggggagcgc

SEQ ID NO: 133076 - DNA, 80 bp, synthetic construct
  misc_feature 1..80: note = Artificially Synthesized Probe
  source 1..80: mol_type = other DNA
acacccagctaatttttgtatttttcatagagacggggtttcaccatgttagccaggctggtctcaaactcctgacctca

SEQ ID NO: 133077 - DNA, 80 bp, synthetic construct; identical to SEQ ID NO: 42146
  misc_feature 1..80: note = Artificially Synthesized Probe
  source 1..80: mol_type = other DNA

SEQ ID NO: 133078 - DNA, 80 bp, synthetic construct
  misc_feature 1..80: note = Artificially Synthesized Probe
  source 1..80: mol_type = other DNA
cagatgtaagagcttcaggttttctctggtattttctgagcacgcctctagccctagtcatgcatctagccgtctggatt

SEQ ID NO: 133079 - DNA, 80 bp, synthetic construct
  misc_feature 1..80: note = Artificially Synthesized Probe
  source 1..80: mol_type = other DNA
aacaggccgggtgcagtggctcacacctgtaatcccagcactttgggaggccgaggcaggtggatcgcctgaggtcagga

SEQ ID NO: 133080 - DNA, 80 bp, synthetic construct
  misc_feature 1..80: note = Artificially Synthesized Probe
  source 1..80: mol_type = other DNA
ttgcagcattgcactccagcctgggcaacaagagtgaaactccgtctcaaaaaaaaaaaaaaagattttaacacacactg

SEQ ID NO: 133081 - DNA, 80 bp, synthetic construct; identical to SEQ ID NO: 42147
  misc_feature 1..80: note = Artificially Synthesized Probe
  source 1..80: mol_type = other DNA

SEQ ID NO: 133082 - DNA, 80 bp, synthetic construct
  misc_feature 1..80: note = Artificially Synthesized Probe
  source 1..80: mol_type = other DNA
agctattgattgcttttgtggagggataaagttttgaagttccctacactggcatttttggtcacctctccaagggcttt

SEQ ID NO: 133083 - DNA, 80 bp, synthetic construct
  misc_feature 1..80: note = Artificially Synthesized Probe
  source 1..80: mol_type = other DNA
ggctaactaaaaaaaaaaaaattttgtagagatggagtctcaccatgttgcctggctggtcttgaattcctgggctcaag

SEQ ID NO: 133084 - DNA, 80 bp, synthetic construct
  misc_feature 1..80: note = Artificially Synthesized Probe
  source 1..80: mol_type = other DNA
cgaggattcagggatcagagcttttaaagataatttggtgggtagaggcttgggaagtggggagtgctgattggtcaggt

SEQ ID NO: 133085 - DNA, 80 bp, synthetic construct
  misc_feature 1..80: note = Artificially Synthesized Probe
  source 1..80: mol_type = other DNA
ctttctggggctgggagaggatgaacaggagctcgggaggaggctgtagagagcgtctgagcgggaggggtagtggcctg

SEQ ID NO: 133086 - DNA, 80 bp, synthetic construct; identical to SEQ ID NO: 42148
  misc_feature 1..80: note = Artificially Synthesized Probe
  source 1..80: mol_type = other DNA

SEQ ID NO: 133087 - DNA, 80 bp, synthetic construct
  misc_feature 1..80: note = Artificially Synthesized Probe
  source 1..80: mol_type = other DNA
agggttagaagcaagatggagtcggttaggtctgatttctttcattgtcataattttctcagttatcatttttgcaaagg

SEQ ID NO: 133088 - DNA, 80 bp, synthetic construct
  misc_feature 1..80: note = Artificially Synthesized Probe
  source 1..80: mol_type = other DNA
attttcaactgactttcagtttcttccagatccatctccaaacattacttcatccttggcctctgatgaccccagttagt

SEQ ID NO: 133089 - DNA, 80 bp, synthetic construct
  misc_feature 1..80: note = Artificially Synthesized Probe
  source 1..80: mol_type = other DNA
ttggggcctgtttgctgctccgggtgatggcacgcctggagcctgacgctgaggaggcagcacggaggaaagacctggcg

SEQ ID NO: 133090 - DNA, 80 bp, synthetic construct; identical to SEQ ID NO: 42149
  misc_feature 1..80: note = Artificially Synthesized Probe
  source 1..80: mol_type = other DNA

SEQ ID NO: 133091 - DNA, 80 bp, synthetic construct
  misc_feature 1..80: note = Artificially Synthesized Probe
  source 1..80: mol_type = other DNA
caccaacatcccaaacagtctccaagtggactctgggaagtatggggatgagcccctgccattgggaacatctatggtct

SEQ ID NO: 133092 - DNA, 80 bp, synthetic construct
  misc_feature 1..80: note = Artificially Synthesized Probe
  source 1..80: mol_type = other DNA
catcttcctaaaaagttccactccagatagagaaactccttgtgaccctgtcaggaaattccacctttaaccttggaagt

SEQ ID NO: 133093 - DNA, 80 bp, synthetic construct
  misc_feature 1..80: note = Artificially Synthesized Probe
  source 1..80: mol_type = other DNA
tttttttttggacataaacaaactttggtctaggaaatctcacccttcctataggaaatcatctgccttgggaagcccta

SEQ ID NO: 133094 - DNA, 80 bp, synthetic construct; identical to SEQ ID NO: 42150
  misc_feature 1..80: note = Artificially Synthesized Probe
  source 1..80: mol_type = other DNA

SEQ ID NO: 133095 - DNA, 80 bp, synthetic construct
  misc_feature 1..80: note = Artificially Synthesized Probe
  source 1..80: mol_type = other DNA
ctgtatctgccatatggtgtcaatttaagtgttgactgtttactgccaaaacctggcctaagttgtctttgcctttcacc

SEQ ID NO: 133096 - DNA, 80 bp, synthetic construct
  misc_feature 1..80: note = Artificially Synthesized Probe
  source 1..80: mol_type = other DNA
gtggggctgtccctgagatggagagctcaggagggcaagcaggtttgggaaatgtcgctgagtgcaatgtgggaatctgt

SEQ ID NO: 133097 - DNA, 80 bp, synthetic construct
  misc_feature 1..80: note = Artificially Synthesized Probe
  source 1..80: mol_type = other DNA
taatccttcccaccccccacagtctctgctgacacagaagtggtggggagatatggccagcactacacccatctgggccc

SEQ ID NO: 133098 - DNA, 80 bp, synthetic construct
  misc_feature 1..80: note = Artificially Synthesized Probe
  source 1..80: mol_type = other DNA
ctctgcccacctttcttccctcatcggcccattgtgtcccttccctaggaatgggactctctgtccctccactaagggag

SEQ ID NO: 133099 - DNA, 80 bp, synthetic construct; identical to SEQ ID NO: 42151
  misc_feature 1..80: note = Artificially Synthesized Probe
  source 1..80: mol_type = other DNA

SEQ ID NO: 133100 - DNA, 80 bp, synthetic construct
  misc_feature 1..80: note = Artificially Synthesized Probe
  source 1..80: mol_type = other DNA
gacatgtgccagttccacgttgtgttagtcccctcttgagttgctacaaagttgctaaacctgagactgagtaatttata

SEQ ID NO: 133101 - DNA, 80 bp, synthetic construct
  misc_feature 1..80: note = Artificially Synthesized Probe
  source 1..80: mol_type = other DNA
ccacatagatctcatgtgaactaactgagcaaaaagtctccaaagggatggtgctgagccatttgtgaaggacccaccac

SEQ ID NO: 133102 - DNA, 80 bp, synthetic construct; identical to SEQ ID NO: 42152
  misc_feature 1..80: note = Artificially Synthesized Probe
  source 1..80: mol_type = other DNA

SEQ ID NO: 133103 - DNA, 80 bp, synthetic construct
  misc_feature 1..80: note = Artificially Synthesized Probe
  source 1..80: mol_type = other DNA
cgctctgtcgaccaggctggagtgcagtggtgtgatctccgcctcctgggttcaagcgattctcctgcctcagcctcccg

SEQ ID NO: 133104 - DNA, 80 bp, synthetic construct
  misc_feature 1..80: note = Artificially Synthesized Probe
  source 1..80: mol_type = other DNA
ccatgcctggcccagggattacatttcaatgtgagatttggaagggacaaacatccaaactatatcacacgtcccatcag

SEQ ID NO: 133105 - DNA, 80 bp, synthetic construct
  misc_feature 1..80: note = Artificially Synthesized Probe
  source 1..80: mol_type = other DNA
tcacctattttgttcgtggtcccaaggcccctgcttttaatcactatgctatggttgccgttaaggtattttaaaagtca

SEQ ID NO: 133106 - DNA, 80 bp, synthetic construct
  misc_feature 1..80: note = Artificially Synthesized Probe
  source 1..80: mol_type = other DNA
tcaagtagctgggattacagtcacctgccaccacgcccagctaatttttttgtatttttagtagagacggggtttcacca

SEQ ID NO: 133107 - DNA, 80 bp, synthetic construct; identical to SEQ ID NO: 42153
  misc_feature 1..80: note = Artificially Synthesized Probe
  source 1..80: mol_type = other DNA

SEQ ID NO: 133108 - DNA, 80 bp, synthetic construct
  misc_feature 1..80: note = Artificially Synthesized Probe
  source 1..80: mol_type = other DNA
ttgcaaactggcaattctatagccaattgtgtgcgtgtgtttgtgtgtgtgtgtgtttagaagagcatttaaaaatatct

SEQ ID NO: 133109 - DNA, 80 bp, synthetic construct
  misc_feature 1..80: note = Artificially Synthesized Probe
  source 1..80: mol_type = other DNA
tgatggaataatctgtacaacaaacccccatgacacaaatttacctacctaacaaacctgcacatgtacctctgaactaa

SEQ ID NO: 133110 - DNA, 80 bp, synthetic construct
  misc_feature 1..80: note = Artificially Synthesized Probe
  source 1..80: mol_type = other DNA
acatgtgatgatgatgacgaccttgataacagctgatgttatgaaacacgtacaatgagcaactactgtgctcaattctt

SEQ ID NO: 133111 - DNA, 80 bp, synthetic construct
  misc_feature 1..80: note = Artificially Synthesized Probe
  source 1..80: mol_type = other DNA
gcccgccaccacgcccggctaatttttttgtatttttagtagagctggggtttccccgtgttagccaggatggtctcgat

SEQ ID NO: 133112 - DNA, 80 bp, synthetic construct; identical to SEQ ID NO: 42154
  misc_feature 1..80: note = Artificially Synthesized Probe
  source 1..80: mol_type = other DNA

SEQ ID NO: 133113 - DNA, 80 bp, synthetic construct
  misc_feature 1..80: note = Artificially Synthesized Probe
  source 1..80: mol_type = other DNA
ctcccttcttaccaggattctgcaggagaactgtgaaataccatgatggttttctctatcagtagggagcttgctgtcct

SEQ ID NO: 133114 - DNA, 80 bp, synthetic construct
  misc_feature 1..80: note = Artificially Synthesized Probe
  source 1..80: mol_type = other DNA
ccttctcctcctcttcctactcatcctcctcctcttcctccttctcctcatcctctttctcttcctcctcctcatcctcc

SEQ ID NO: 133115 - DNA, 80 bp, synthetic construct; identical to SEQ ID NO: 42155
  misc_feature 1..80: note = Artificially Synthesized Probe
  source 1..80: mol_type = other DNA

SEQ ID NO: 133116 - DNA, 80 bp, synthetic construct
  misc_feature 1..80: note = Artificially Synthesized Probe
  source 1..80: mol_type = other DNA
gtagagatggggtttcgccatgttgcccaggctggtctcaaattcgaaggcttaagtgatcttcccacctcggcttccca

SEQ ID NO: 133117 - DNA, 80 bp, synthetic construct
  misc_feature 1..80: note = Artificially Synthesized Probe
  source 1..80: mol_type = other DNA
tccctcccttccttccttcttttcttccttccttcctccctctcttttctttctttctctatctccttccctccctccct

SEQ ID NO: 133118 - DNA, 80 bp, synthetic construct
  misc_feature 1..80: note = Artificially Synthesized Probe
  source 1..80: mol_type = other DNA
gtataaacacacctggctaatttttttttttttttctgtagagatggggtttcaccatgttgcccaggctggtgttgaac

SEQ ID NO: 133119 - DNA, 80 bp, synthetic construct; identical to SEQ ID NO: 42120
  misc_feature 1..80: note = Artificially Synthesized Probe
  source 1..80: mol_type = other DNA

SEQ ID NO: 133120 - DNA, 80 bp, synthetic construct; identical to SEQ ID NO: 42156
  misc_feature 1..80: note = Artificially Synthesized Probe
  source 1..80: mol_type = other DNA

SEQ ID NO: 133121 - DNA, 80 bp, synthetic construct
  misc_feature 1..80: note = Artificially Synthesized Probe
  source 1..80: mol_type = other DNA
tttgagacggagttttgctctcgttgcccaggctggagtcaatggcgcgacctcagttcaccacaacctccgcctcccgg

SEQ ID NO: 133122 - DNA, 80 bp, synthetic construct
  misc_feature 1..80: note = Artificially Synthesized Probe
  source 1..80: mol_type = other DNA
tccccaaatgctgggattacaagcgtgagctagcgcgcccagcccgtttctactttaatttttttttttttttttttaga

SEQ ID NO: 133123 - DNA, 80 bp, synthetic construct
  misc_feature 1..80: note = Artificially Synthesized Probe
  source 1..80: mol_type = other DNA
tattttattattattattattattatttttgagacagagtctcactctgtcgcctaggctgcagtgcattgcaacctctg

SEQ ID NO: 133124 - DNA, 80 bp, synthetic construct
  misc_feature 1..80: note = Artificially Synthesized Probe
  source 1..80: mol_type = other DNA
gccttaactcccaaagtgctgcgattacaggcgtgagccaccgcgcccgatccgggtatatttttaaaatattttttgta

SEQ ID NO: 133125 - DNA, 80 bp, synthetic construct; identical to SEQ ID NO: 42157
  misc_feature 1..80: note = Artificially Synthesized Probe
  source 1..80: mol_type = other DNA

SEQ ID NO: 133126 - DNA, 80 bp, synthetic construct
  misc_feature 1..80: note = Artificially Synthesized Probe
  source 1..80: mol_type = other DNA
acgtggtcagctacctgctgttcctgctgcttttctcgcgggtgctgctcgtggatttccagccggcgccgcccggctcc

SEQ ID NO: 133127 - DNA, 80 bp, synthetic construct
  misc_feature 1..80: note = Artificially Synthesized Probe
  source 1..80: mol_type = other DNA
agtgcgacctagtggctctcacctgcttcctcctgggcgtgggctgccggtgagtgccccggggccttggaaccctggcc

SEQ ID NO: 133128 - DNA, 80 bp, synthetic construct; identical to SEQ ID NO: 42158
  misc_feature 1..80: note = Artificially Synthesized Probe
  source 1..80: mol_type = other DNA

SEQ ID NO: 133129 - DNA, 80 bp, synthetic construct
  misc_feature 1..80: note = Artificially Synthesized Probe
  source 1..80: mol_type = other DNA
ctttttctttctttctttctttctttctttctttctttctttctttctttctttctttctctctctttcttttctttctt

SEQ ID NO: 133130 - DNA, 80 bp, synthetic construct
  misc_feature 1..80: note = Artificially Synthesized Probe
  source 1..80: mol_type = other DNA
ttcaacctctgcctcctgggttcaagcgattctcctgcctcagccccccgagtagctgggattacaggcacccaccatca

SEQ ID NO: 133131 - DNA, 80 bp, synthetic construct
  misc_feature 1..80: note = Artificially Synthesized Probe
  source 1..80: mol_type = other DNA
gtttaacccttgccctgcctgcattatggagtatcctgcattaggatactcctccttttgaggagagcaaacagaaaagt

SEQ ID NO: 133132 - DNA, 80 bp, synthetic construct
  misc_feature 1..80: note = Artificially Synthesized Probe
  source 1..80: mol_type = other DNA
gattctcttgcctcagcctcgtgagtagctgggattacaggcatgcaccactacacctagctaaattttttttgtatttt

SEQ ID NO: 133133 - DNA, 80 bp, synthetic construct
  misc_feature 1..80: note = Artificially Synthesized Probe
  source 1..80: mol_type = other DNA
ctctgggcgggtctggaagcagagccggcggagggagcgccggggccctgggctgcaggaggttgcggcggccgcggcag

SEQ ID NO: 133134 - DNA, 80 bp, synthetic construct
  misc_feature 1..80: note = Artificially Synthesized Probe
  source 1..80: mol_type = other DNA
gccaacaacctggtgactgtttacaagggacctgacacatcctgaatggttgacagtgatgacagtgatgatccctactc

SEQ ID NO: 133135 - DNA, 80 bp, synthetic construct; identical to SEQ ID NO: 42159
  misc_feature 1..80: note = Artificially Synthesized Probe
  source 1..80: mol_type = other DNA

SEQ ID NO: 133136 - DNA, 80 bp, synthetic construct
  misc_feature 1..80: note = Artificially Synthesized Probe
  source 1..80: mol_type = other DNA
cacctgagatcaggagtttgagaccagcctgcccaacatggtgaaaccccatctctactaaaaatacaaaaaattagccg

SEQ ID NO: 133137 - DNA, 80 bp, synthetic construct
  misc_feature 1..80: note = Artificially Synthesized Probe
  source 1..80: mol_type = other DNA
aaagggagaaatgtctaatcatctccggaattgaatggatgaatcatcctttgtttcgccagttccctctagatggacat

SEQ ID NO: 133138 - DNA, 80 bp, synthetic construct
  misc_feature 1..80: note = Artificially Synthesized Probe
  source 1..80: mol_type = other DNA
tttttattattccaaaataataaaagtttacatcccagatgtaaagtttatgggtcaaagggtacatttatttttgacat

SEQ ID NO: 133139 - DNA, 80 bp, synthetic construct; identical to SEQ ID NO: 42160
  misc_feature 1..80: note = Artificially Synthesized Probe
  source 1..80: mol_type = other DNA

SEQ ID NO: 133140 - DNA, 80 bp, synthetic construct
  misc_feature 1..80: note = Artificially Synthesized Probe
  source 1..80: mol_type = other DNA
cctcccgggttcacgccattctcctgcctcagcctactgagtagctgggactacaggtgcctgcctccacgcccggctaa

SEQ ID NO: 133141 - DNA, 80 bp, synthetic construct
  misc_feature 1..80: note = Artificially Synthesized Probe
  source 1..80: mol_type = other DNA
actgcgaccggccaccctcccgtttttttaattggggttcattgatttgtatatgtataaatgtatatactccttatact

SEQ ID NO: 133142 - DNA, 80 bp, synthetic construct
  misc_feature 1..80: note = Artificially Synthesized Probe
  source 1..80: mol_type = other DNA
gttgagttacttgactggcctctgcacacattgggtttgagaatcatgtagggaaggcttgcactgggaacacctacact

SEQ ID NO: 133143 - DNA, 80 bp, synthetic construct
  misc_feature 1..80: note = Artificially Synthesized Probe
  source 1..80: mol_type = other DNA
accgcgtctgtccatacactaggtttttaatccatccaaagtttaagtacatgaggatgcaaaataggggtagaattttt

SEQ ID NO: 133144 - DNA, 80 bp, synthetic construct; identical to SEQ ID NO: 42161
  misc_feature 1..80: note = Artificially Synthesized Probe
  source 1..80: mol_type = other DNA

SEQ ID NO: 133145 - DNA, 80 bp, synthetic construct
  misc_feature 1..80: note = Artificially Synthesized Probe
  source 1..80: mol_type = other DNA
cacttgacccttgtggcatctccccacaccccaggctgaccccgggtttgtaccacctgggccgcactgtcctctgcatc

SEQ ID NO: 133146 - DNA, 80 bp, synthetic construct
  misc_feature 1..80: note = Artificially Synthesized Probe
  source 1..80: mol_type = other DNA
gagaaggggcgtgactttggggagcaatggggcgtgtttttgggatataggggtggggccagagtaggaaagggcggggc

SEQ ID NO: 133147 - DNA, 80 bp, synthetic construct; identical to SEQ ID NO: 42162
  misc_feature 1..80: note = Artificially Synthesized Probe
  source 1..80: mol_type = other DNA

SEQ ID NO: 133148 - DNA, 80 bp, synthetic construct
  misc_feature 1..80: note = Artificially Synthesized Probe
  source 1..80: mol_type = other DNA
tgtctttcttttttctttttttttttctttttttttgagatggatgttagaaatgtttattttgtggtgtcgtaaagaaa

SEQ ID NO: 133149 - DNA, 80 bp, synthetic construct
  misc_feature 1..80: note = Artificially Synthesized Probe
  source 1..80: mol_type = other DNA
ttggctggaaccggactttacattttgtatttgtcttgattggctagtaacttagaagtttttaaaagaagcgaaggcag

SEQ ID NO: 133150 - DNA, 80 bp, synthetic construct
  misc_feature 1..80: note = Artificially Synthesized Probe
  source 1..80: mol_type = other DNA
aagtacattgatttattttttatggctagtagatatttaagaatgttagcacaggtgtttgaataaattttgtttctaag

SEQ ID NO: 133151 - DNA, 80 bp, synthetic construct
  misc_feature 1..80: note = Artificially Synthesized Probe
  source 1..80: mol_type = other DNA
tcctatctcagcctcccgagtagctgggactacaggcgcgtgccaccacgcctggctaacagttttgtgtttttagtaga

SEQ ID NO: 133152 - DNA, 80 bp, synthetic construct; identical to SEQ ID NO: 42163
  misc_feature 1..80: note = Artificially Synthesized Probe
  source 1..80: mol_type = other DNA

SEQ ID NO: 133153 - DNA, 80 bp, synthetic construct
  misc_feature 1..80: note = Artificially Synthesized Probe
  source 1..80: mol_type = other DNA
gaaacctgaataagggccgttgtatatggagccaggcaggaaattgatgatttttatcaagaacaatttcaggccaggca

SEQ ID NO: 133154 - DNA, 80 bp, synthetic construct
  misc_feature 1..80: note = Artificially Synthesized Probe
  source 1..80: mol_type = other DNA
cgtggccctctcatgactcttgaaccccgtctaatgaattctgtttttagtccctgaactctgatccaatctaatgctgc

SEQ ID NO: 133155 - DNA, 80 bp, synthetic construct
  misc_feature 1..80: note = Artificially Synthesized Probe
  source 1..80: mol_type = other DNA
ctcgacctcctggactcaagcaatcctcctgccttcgccccataagtagctgggactacttaaaattagccaggccagca

SEQ ID NO: 133156 - DNA, 80 bp, synthetic construct; identical to SEQ ID NO: 42164
  misc_feature 1..80: note = Artificially Synthesized Probe
  source 1..80: mol_type = other DNA

SEQ ID NO: 133157 - DNA, 80 bp, synthetic construct
  misc_feature 1..80: note = Artificially Synthesized Probe
  source 1..80: mol_type = other DNA
ggagtctcgctgtgtcacccaggctagagtgcagtggcacgatctcacaatctcagctcactacaagctccgccacccgg

SEQ ID NO: 133158 - DNA, 80 bp, synthetic construct
  misc_feature 1..80: note = Artificially Synthesized Probe
  source 1..80: mol_type = other DNA
ctcccaaagtgctaggattacaggcgtgagccaccgcgccccgcctttttttgagatggagtctcgctctgtcgcccagg

SEQ ID NO: 133159 - DNA, 80 bp, synthetic construct
  misc_feature 1..80: note = Artificially Synthesized Probe
  source 1..80: mol_type = other DNA
agccaggatggtttcgatctcctgaccttgtgatccgcccgccttggcctcccagagtgctgggattactgacatgagcc

SEQ ID NO: 133160 - DNA, 80 bp, synthetic construct; identical to SEQ ID NO: 42165
  misc_feature 1..80: note = Artificially Synthesized Probe
  source 1..80: mol_type = other DNA

SEQ ID NO: 133161 - DNA, 80 bp, synthetic construct
  misc_feature 1..80: note = Artificially Synthesized Probe
  source 1..80: mol_type = other DNA
gtacaaatagaccacatttgggcccagcgtggtggctcatgcctgtaatcccagcactttgggaggcctaggcgggtgga

SEQ ID NO: 133162 - DNA, 80 bp, synthetic construct
  misc_feature 1..80: note = Artificially Synthesized Probe
  source 1..80: mol_type = other DNA
acgagagtcgcttgaacccaggaggcggaggctacagtgagccaagatcgtgccactgcactccagcctgggcaacagag

SEQ ID NO: 133163 - DNA, 80 bp, synthetic construct
  misc_feature 1..80: note = Artificially Synthesized Probe
  source 1..80: mol_type = other DNA
aaaactagccaggtactgtggcacatgcctgtaatcccagctactcaggatgctgaggcacgagagtcgcttgagcccag

SEQ ID NO: 133164 - DNA, 80 bp, synthetic construct
  misc_feature 1..80: note = Artificially Synthesized Probe
  source 1..80: mol_type = other DNA
caagtatctatttgaatccttgtttttatttcctttgggtgtgtatctcaaagtggaattcctcggtcatgtggtaattc

SEQ ID NO: 133165 - DNA, 80 bp, synthetic construct; identical to SEQ ID NO: 42166
  misc_feature 1..80: note = Artificially Synthesized Probe
  source 1..80: mol_type = other DNA

SEQ ID NO: 133166 - DNA, 80 bp, synthetic construct
  misc_feature 1..80: note = Artificially Synthesized Probe
  source 1..80: mol_type = other DNA
actacagttacgtgccaccatacctggcttgtttttttaattttttttttacttttattttatttatttatttttagtag

SEQ ID NO: 133167 - DNA, 80 bp, synthetic construct
  misc_feature 1..80: note = Artificially Synthesized Probe
  source 1..80: mol_type = other DNA
taggtctctctgtttgcttcctttcttgttggcatgatttttgctgagaaaatataaaatttcattggctttggttgttt

SEQ ID NO: 133168 - DNA, 80 bp, synthetic construct
  misc_feature 1..80: note = Artificially Synthesized Probe
  source 1..80: mol_type = other DNA
gcccctgtgctggacctattgtattagtttcctagggccgccagagtaccaaaaactgtgtggctttaaatcacagaaat

SEQ ID NO: 133169 - DNA, 80 bp, synthetic construct; identical to SEQ ID NO: 42167
  misc_feature 1..80: note = Artificially Synthesized Probe
  source 1..80: mol_type = other DNA

SEQ ID NO: 133170 - DNA, 80 bp, synthetic construct
  misc_feature 1..80: note = Artificially Synthesized Probe
  source 1..80: mol_type = other DNA
agtgcaatggcgtgatctcggctcactgcaacctccacctcctgggttcaagggattctcctgcctcagcctcccgagta

SEQ ID NO: 133171 - DNA, 80 bp, synthetic construct
  misc_feature 1..80: note = Artificially Synthesized Probe
  source 1..80: mol_type = other DNA
ggacccggccggacttcaacatatctttagcgggatacaattcaatgcatgacactcatagatttatgagtttatttctg

SEQ ID NO: 133172 - DNA, 80 bp, synthetic construct
  misc_feature 1..80: note = Artificially Synthesized Probe
  source 1..80: mol_type = other DNA
ttctcctaactcagcctcctgagtagctgggattacaggcacctgccaccacgcccggctaatttttttgtatttttggt

SEQ ID NO: 133173 - DNA, 80 bp, synthetic construct; identical to SEQ ID NO: 42168
  misc_feature 1..80: note = Artificially Synthesized Probe
  source 1..80: mol_type = other DNA

SEQ ID NO: 133174 - DNA, 80 bp, synthetic construct
  misc_feature 1..80: note = Artificially Synthesized Probe
  source 1..80: mol_type = other DNA
tctcctgcctcagcctcctgagtagctgggcttataggcatgtgccaccacgcccggctaattttgtatttttagtagag

SEQ ID NO: 133175 - DNA, 80 bp, synthetic construct; identical to SEQ ID NO: 42121
  misc_feature 1..80: note = Artificially Synthesized Probe
  source 1..80: mol_type = other DNA

SEQ ID NO: 133176 - DNA, 80 bp, synthetic construct
  misc_feature 1..80: note = Artificially Synthesized Probe
  source 1..80: mol_type = other DNA
cgggtagtattgatatttcatctaggtgttctttttaatgcttttccagcagtatttggtagttttcaggctacaaattg

SEQ ID NO: 133177 - DNA, 80 bp, synthetic construct
  misc_feature 1..80: note = Artificially Synthesized Probe
  source 1..80: mol_type = other DNA
cagccctagaagctttcttgtgattctctggcatttcctatatataggatcatgtcatctgtgaatagagatatttttac

SEQ ID NO: 133178 - DNA, 80 bp, synthetic construct; identical to SEQ ID NO: 42169
  misc_feature 1..80: note = Artificially Synthesized Probe
  source 1..80: mol_type = other DNA

SEQ ID NO: 133179 - DNA, 80 bp, synthetic construct
  misc_feature 1..80: note = Artificially Synthesized Probe
  source 1..80: mol_type = other DNA
taaaaaaataaaaaatttgccaggcgtggtggtgcatgcctgtagtcccagctactcaagaggctgaggtgggaggaagg

SEQ ID NO: 133180 - DNA, 80 bp, synthetic construct
  misc_feature 1..80: note = Artificially Synthesized Probe
  source 1..80: mol_type = other DNA
cgaggtgggcagatcatgaggtcaggagatcgagaccatcctggctaacacggttgtaggggccagccctacaaggtctg

SEQ ID NO: 133181 - DNA, 80 bp, synthetic construct
  misc_feature 1..80: note = Artificially Synthesized Probe
  source 1..80: mol_type = other DNA
acaaagcaaaaggggcagggtaaagagtgtgagtcatctccaatgattgataaggtcacgtgagtcacatgtccactgga

SEQ ID NO: 133182 - DNA, 80 bp, synthetic construct; identical to SEQ ID NO: 42170
  misc_feature 1..80: note = Artificially Synthesized Probe
  source 1..80: mol_type = other DNA

SEQ ID NO: 133183 - DNA, 80 bp, synthetic construct
  misc_feature 1..80: note = Artificially Synthesized Probe
  source 1..80: mol_type = other DNA
ggaatcttcccagatgctggcgttaccgctagaccaaggagccctctggtggccctgtccaggaataacagaaggctcac

SEQ ID NO: 133184 - DNA, 80 bp, synthetic construct
  misc_feature 1..80: note = Artificially Synthesized Probe
  source 1..80: mol_type = other DNA
atgatctatatctagtataactcttgttattttatatgttttattacactggaacagcttgtgccctcggtctcttgcct

SEQ ID NO: 133185 - DNA, 80 bp, synthetic construct
  misc_feature 1..80: note = Artificially Synthesized Probe
  source 1..80: mol_type = other DNA
ccgagattgtgccactgcactccagcctgtgggacagagcaagactccatcaaaaaaaaaaaaaaaaaatcgtgaagtgt

SEQ ID NO: 133186 - DNA, 80 bp, synthetic construct
  misc_feature 1..80: note = Artificially Synthesized Probe
  source 1..80: mol_type = other DNA
attctcctgcctcagcctcccgagtagctgggactacaggcacccgccaccatgccaagctgatttttgtatttttagta

SEQ ID NO: 133187 - DNA, 80 bp, synthetic construct; identical to SEQ ID NO: 42171
  misc_feature 1..80: note = Artificially Synthesized Probe
  source 1..80: mol_type = other DNA

SEQ ID NO: 133188 - DNA, 80 bp, synthetic construct
  misc_feature 1..80: note = Artificially Synthesized Probe
  source 1..80: mol_type = other DNA
agccatctggttttgggcttttctttattgaaacgtttttgattcaatctcttatgataattctactgagattttctgtt

SEQ ID NO: 133189 - DNA, 80 bp, synthetic construct
  misc_feature 1..80: note = Artificially Synthesized Probe
  source 1..80: mol_type = other DNA
atttgtgtccaggctaactttggagcccaactttaacctgacttcaacctccaccttataccgtgataccatcccaactt

SEQ ID NO: 133190 - DNA, 80 bp, synthetic construct
  misc_feature 1..80: note = Artificially Synthesized Probe
  source 1..80: mol_type = other DNA
agttcgcccctggactgaccccagagggtccgcggcccgctgaccccgcccgcggatggtcacgccccagccctgctcct

SEQ ID NO: 133191 - DNA, 80 bp, synthetic construct
  misc_feature 1..80: note = Artificially Synthesized Probe
  source 1..80: mol_type = other DNA
agcctccccagtagctgggattacaggtgcccaccaccacgcctggctaatttttgtatttttagtagagatggggcttc

SEQ ID NO: 133192 - DNA, 80 bp, synthetic construct; identical to SEQ ID NO: 42172
  misc_feature 1..80: note = Artificially Synthesized Probe
  source 1..80: mol_type = other DNA

SEQ ID NO: 133193 - DNA, 80 bp, synthetic construct
  misc_feature 1..80: note = Artificially Synthesized Probe
  source 1..80: mol_type = other DNA
ccgccctttatcgtcatctcccacttgcgcctcctgctcaggcaattgtgcaggcgaccccggagcccccagccgtcctc

SEQ ID NO: 133194 - DNA, 80 bp, synthetic construct
  misc_feature 1..80: note = Artificially Synthesized Probe
  source 1..80: mol_type = other DNA
cttaagcactgaggggcagtgcttacgggtgaggggcggggcatgttctcgaatcaccaggggctgggtctgggatagcg

SEQ ID NO: 133195 - DNA, 80 bp, synthetic construct
  misc_feature 1..80: note = Artificially Synthesized Probe
  source 1..80: mol_type = other DNA
acgcgctagggacaagcgggagagcgactccgagcgtctgaagcgcacgtcccagaagtgagagcggggcctggtcgggg

SEQ ID NO: 133196 - DNA, 80 bp, synthetic construct
  misc_feature 1..80: note = Artificially Synthesized Probe
  source 1..80: mol_type = other DNA
cactgaaacagctgggacacatccgcgagtacgaacagcgcctgaaagtgctggagcgggaggtgaggccttggggcctg

SEQ ID NO: 133197 - DNA, 80 bp, synthetic construct; identical to SEQ ID NO: 42173
  misc_feature 1..80: note = Artificially Synthesized Probe
  source 1..80: mol_type = other DNA

SEQ ID NO: 133198 - DNA, 80 bp, synthetic construct
  misc_feature 1..80: note = Artificially Synthesized Probe
  source 1..80: mol_type = other DNA
agctccatggctacaaagaacccatgcagctatcacattggacagtacaagctccagactattccgtgaagagcttttat

SEQ ID NO: 133199 - DNA, 80 bp, synthetic construct
  misc_feature 1..80: note = Artificially Synthesized Probe
  source 1..80: mol_type = other DNA
tggcggacttcaaggagaagcccccacaggggattttgctcctagagtaaggctcatctgggcctcggcccccgcacctg

SEQ ID NO: 133200 - DNA, 80 bp, synthetic construct
  misc_feature 1..80: note = Artificially Synthesized Probe
  source 1..80: mol_type = other DNA
aggctgcagggtccttggggtaacagggaccacagacccctcaccactcacagattcctcacactggggaaataaagcca

SEQ ID NO: 133201 - DNA, 80 bp, synthetic construct
  misc_feature 1..80: note = Artificially Synthesized Probe
  source 1..80: mol_type = other DNA
ccaccatgcccggctaatttttgtatttttagtagagataaggtttcactatgttggccaggctggtctcgaactcctga

SEQ ID NO: 133202 - DNA, 80 bp, synthetic construct; identical to SEQ ID NO: 42122
  misc_feature 1..80: note = Artificially Synthesized Probe
  source 1..80: mol_type = other DNA

SEQ ID NO: 133203 - DNA, 80 bp, synthetic construct
  misc_feature 1..80: note = Artificially Synthesized Probe
  source 1..80: mol_type = other DNA
aagttttgctcagaagagcaaactttctgggaagtagctgcaggtgttggaagtagctgcaggggaactaggggattcaa

SEQ ID NO: 133204 - DNA, 80 bp, synthetic construct
  misc_feature 1..80: note = Artificially Synthesized Probe
  source 1..80: mol_type = other DNA
ccgttcttttagtgtctttacggcttttgccaaatccttgtagcacctctgctatcccttctgtaaaattgctcttaaat

SEQ ID NO: 133205 - DNA, 80 bp, synthetic construct
  misc_feature 1..80: note = Artificially Synthesized Probe
  source 1..80: mol_type = other DNA
ctgctcactaggtttgtgtaaatacaggtctcccctgatatctgaactcctggaatctggaacaaagaatttagatacat

SEQ ID NO: 133206 - DNA, 80 bp, synthetic construct; identical to SEQ ID NO: 42123
  misc_feature 1..80: note = Artificially Synthesized Probe
  source 1..80: mol_type = other DNA

SEQ ID NO: 133207 - DNA, 80 bp, synthetic construct
  misc_feature 1..80: note = Artificially Synthesized Probe
  source 1..80: mol_type = other DNA
tggccagtctggtctcaaactcttgacctcagatgatccacccgcctcagcctcccaaagtgctgggattacaggcatga

SEQ ID NO: 133208 - DNA, 80 bp, synthetic construct
  misc_feature 1..80: note = Artificially Synthesized Probe
  source 1..80: mol_type = other DNA
tctcccaggctgaagtgatcctcctgcctcagcctcctaagcacatgctgccacacctggctaattttattttattttat

SEQ ID NO: 133209 - DNA, 80 bp, synthetic construct
  misc_feature 1..80: note = Artificially Synthesized Probe
  source 1..80: mol_type = other DNA
attctccaaacccctgttacttactcaggtgccaatcacctttagaaagcaagagagacttgtgcatttctttaggtggg

SEQ ID NO: 133210 - DNA, 80 bp, synthetic construct; identical to SEQ ID NO: 42124
  misc_feature 1..80: note = Artificially Synthesized Probe
  source 1..80: mol_type = other DNA

SEQ ID NO: 133211 - DNA, 80 bp, synthetic construct
  misc_feature 1..80: note = Artificially Synthesized Probe
  source 1..80: mol_type = other DNA
ccccgatgtctcttctatgtgcttctgtctcttcgtgtcactttctgtgtctctgtctttcccttttgggtatttctgtt

SEQ ID NO: 133212 - DNA, 80 bp, synthetic construct
  misc_feature 1..80: note = Artificially Synthesized Probe
  source 1..80: mol_type = other DNA
atttcaggaaacacggcgttctttccctggctcctcatagctccgtggagtaggccgcgctattattgtcttttcattag

SEQ ID NO: 133213 - DNA, 80 bp, synthetic construct
  misc_feature 1..80: note = Artificially Synthesized Probe
  source 1..80: mol_type = other DNA
ccccagtggccctctgccttcccacttgaggctcctcaggtgacagtgacctgcttcttcctgctcaggctttctggact

SEQ ID NO: 133214 - DNA, 80 bp, synthetic construct
  misc_feature 1..80: note = Artificially Synthesized Probe
  source 1..80: mol_type = other DNA
tgtcgacagccccctctacaggagcatgaacacgctgacagggtgctggggtcggggggcagccctgggttcacgctccg

SEQ ID NO: 133215 - DNA, 80 bp, synthetic construct; identical to SEQ ID NO: 42125
  misc_feature 1..80: note = Artificially Synthesized Probe
  source 1..80: mol_type = other DNA

SEQ ID NO: 133216 - DNA, 80 bp, synthetic construct
  misc_feature 1..80: note = Artificially Synthesized Probe
  source 1..80: mol_type = other DNA
ccctctctctctgggtctctgtccccctctctctctgggtctctgtccccctctctctctgggtctctgtccccctctct

SEQ ID NO: 133217 - DNA, 80 bp, synthetic construct
  misc_feature 1..80: note = Artificially Synthesized Probe
  source 1..80: mol_type = other DNA
ccttttctgtgggtcactgtcctcatctctttgggtctgtgtttccgcttttctctgtgtctctgtccccgtctctctgg

SEQ ID NO: 133218 - DNA, 80 bp, synthetic construct
  misc_feature 1..80: note = Artificially Synthesized Probe
  source 1..80: mol_type = other DNA
ctgtctgtttctccgggtctccgtccctgtctctccgggtctctgtttccccttttctctgggtctctgtccttgtctct

SEQ ID NO: 133219 - DNA, 80 bp, synthetic construct
  misc_feature 1..80: note = Artificially Synthesized Probe
  source 1..80: mol_type = other DNA
gtctctgtcgccatctctctgggtctctgtcccatgtctctgggtctctgtccctctctctctgggtctctgtccctctc

SEQ ID NO: 133220 - DNA, 80 bp, synthetic construct
  misc_feature 1..80: note = Artificially Synthesized Probe
  source 1..80: mol_type = other DNA
cgggtctctgtttcccctttactctgggtttctgtccccatctctctgggtctctgtccctctctctctgggtctctgtc

SEQ ID NO: 133221 - DNA, 80 bp, synthetic construct; identical to SEQ ID NO: 42126
  misc_feature 1..80: note = Artificially Synthesized Probe
  source 1..80: mol_type = other DNA

SEQ ID NO: 133222 - DNA, 80 bp, synthetic construct
  misc_feature 1..80: note = Artificially Synthesized Probe
  source 1..80: mol_type = other DNA
agtttctacattttttaatgtgccaagacaaaaagggatctgcaagccacattcactcatactccaaaataggcttcatt

SEQ ID NO: 133223 - DNA, 80 bp, synthetic construct
  misc_feature 1..80: note = Artificially Synthesized Probe
  source 1..80: mol_type = other DNA
aaaattacgaagagtttcaagatagcaactacagaacattaaatcaagtatgatgccctgtgtaactgcagaggctgcat

SEQ ID NO: 133224 - DNA, 80 bp, synthetic construct; identical to SEQ ID NO: 42185
  misc_feature 1..80: note = Artificially Synthesized Probe
  source 1..80: mol_type = other DNA

SEQ ID NO: 133225 - DNA, 80 bp, synthetic construct
  misc_feature 1..80: note = Artificially Synthesized Probe
  source 1..80: mol_type = other DNA
aaacgctagcaattctcctcttctctgtcctaacacctaagactgagtgccaccgtctctgaaacagttagatacctgtt

SEQ ID NO: 133226 - DNA, 80 bp, synthetic construct
  misc_feature 1..80: note = Artificially Synthesized Probe
  source 1..80: mol_type = other DNA
tcacaaatccttctctaactccactctcctgatgccttttttttttttctaaagtttaacttcagatacagaggatacac

SEQ ID NO: 133227 - DNA, 80 bp, synthetic construct
  misc_feature 1..80: note = Artificially Synthesized Probe
  source 1..80: mol_type = other DNA
caagtgagaacatgcgtatttgattttctgtccctgtgttaattcacttagaattatggccttcagttccatccatgttg

SEQ ID NO: 133228 - DNA, 80 bp, synthetic construct
  misc_feature 1..80: note = Artificially Synthesized Probe
  source 1..80: mol_type = other DNA
tgtcttcatggtatgatgatctattttcctttgagtgtatactcagtaataggattgctgggtcaaatggtagctttaag

SEQ ID NO: 133229 - DNA, 80 bp, synthetic construct; identical to SEQ ID NO: 42186
  misc_feature 1..80: note = Artificially Synthesized Probe
  source 1..80: mol_type = other DNA

SEQ ID NO: 133230 - DNA, 80 bp, synthetic construct; identical to SEQ ID NO: 42175
  misc_feature 1..80: note = Artificially Synthesized Probe
  source 1..80: mol_type = other DNA

SEQ ID NO: 133231 - DNA, 80 bp, synthetic construct
  misc_feature 1..80: note = Artificially Synthesized Probe
  source 1..80: mol_type = other DNA
gccaccacatccagcctgttattttttgactttttaataatagccattctgactggtgtgaaatggtgtttcagtgtggt

SEQ ID NO: 133232 - DNA, 80 bp, synthetic construct
  misc_feature 1..80: note = Artificially Synthesized Probe
  source 1..80: mol_type = other DNA
ctggatattagatctttgtcagatgcatagtttgtgaatatttatttcccatactgtaggttgtctgtttactctgtaca

SEQ ID NO: 133233 - DNA, 80 bp, synthetic construct
  misc_feature 1..80: note = Artificially Synthesized Probe
  source 1..80: mol_type = other DNA
ggtcttgcatttaaatctttaatccatcttgagttagtttgtatatatgctgaaaggtaagggtctaatttcattcttct

SEQ ID NO: 133234 - DNA, 80 bp, synthetic construct; identical to SEQ ID NO: 42187
  misc_feature 1..80: note = Artificially Synthesized Probe
  source 1..80: mol_type = other DNA

SEQ ID NO: 133235 - DNA, 80 bp, synthetic construct
  misc_feature 1..80: note = Artificially Synthesized Probe
  source 1..80: mol_type = other DNA
atttgaccctcctctctagctgcctttaagacttcttcttcttttgcattgaccttggtaaatctcatgctatgtgccct

SEQ ID NO: 133236 - DNA, 80 bp, synthetic construct
  misc_feature 1..80: note = Artificially Synthesized Probe
  source 1..80: mol_type = other DNA
ctctttacataatcccatatttctcagaggttttgttcattttaaaacattcgcttttcattatttttgtctgactgaat

SEQ ID NO: 133237 - DNA, 80 bp, synthetic construct; identical to SEQ ID NO: 42188
  misc_feature 1..80: note = Artificially Synthesized Probe
  source 1..80: mol_type = other DNA

SEQ ID NO: 133238 - DNA, 80 bp, synthetic construct
  misc_feature 1..80: note = Artificially Synthesized Probe
  source 1..80: mol_type = other DNA
cttggagctgtgtcccagcctaaatctcacgttgaactgtaatccccagtgttggaagtggggcctggtgggaggtgatt

SEQ ID NO: 133239 - DNA, 80 bp, synthetic construct
  misc_feature 1..80: note = Artificially Synthesized Probe
  source 1..80: mol_type = other DNA
ctttgccttccaccatgattgtaagtttcctgaggtctccccagaagcagaagtcgctatgcttactgtacagcctgtgg

SEQ ID NO: 133240 - DNA, 80 bp, synthetic construct
  misc_feature 1..80: note = Artificially Synthesized Probe
  source 1..80: mol_type = other DNA
ctctgtacaggatctttatgtgaaggtgaactcttgcacttggtttcacaggcgtatacattagcaagataatttttggt

SEQ ID NO: 133241 - DNA, 80 bp, synthetic construct
  misc_feature 1..80: note = Artificially Synthesized Probe
  source 1..80: mol_type = other DNA
aacagatggagggcaagaactgaatacaaagcatttaggtagatggagccaacccgttctggaagaaaaagctgaagtgt

SEQ ID NO: 133242 - DNA, 80 bp, synthetic construct; identical to SEQ ID NO: 42189
  misc_feature 1..80: note = Artificially Synthesized Probe
  source 1..80: mol_type = other DNA

SEQ ID NO: 133243 - DNA, 80 bp, synthetic construct
  misc_feature 1..80: note = Artificially Synthesized Probe
  source 1..80: mol_type = other DNA
aagtgccagccacagatctcagctctgtactcctgagttgaatgccgcagccctgggggcactggaatgtcccatggctc

SEQ ID NO: 133244 - DNA, 80 bp, synthetic construct
  misc_feature 1..80: note = Artificially Synthesized Probe
  source 1..80: mol_type = other DNA
cttttataaatgtcttattttaatatatccatcctccccatactgccagctgtttaccatagaaatatggcatacctttt

SEQ ID NO: 133245 - DNA, 80 bp, synthetic construct
  misc_feature 1..80: note = Artificially Synthesized Probe
  source 1..80: mol_type = other DNA
aacagtttaactggctgaaggtttcacaggtagtaaatggcagaaccagaacatgggctcttagagaaaatacttcggtg

SEQ ID NO: 133246 - DNA, 80 bp, synthetic construct
  misc_feature 1..80: note = Artificially Synthesized Probe
  source 1..80: mol_type = other DNA
aagtgctatagtttgctattgttaaaactattattaatttgttctattccaggtcagatttaatttcccagcatcaacaa

SEQ ID NO: 133247 - DNA, 80 bp, synthetic construct; identical to SEQ ID NO: 42190
  misc_feature 1..80: note = Artificially Synthesized Probe
  source 1..80: mol_type = other DNA

SEQ ID NO: 133248 - DNA, 80 bp, synthetic construct
  misc_feature 1..80: note = Artificially Synthesized Probe
  source 1..80: mol_type = other DNA
aagtgagtaactaacattctcatggattactatggtaaaaacaagagttactttagggctgtctaggataatttcttcta

SEQ ID NO: 133249 - DNA, 80 bp, synthetic construct
  misc_feature 1..80: note = Artificially Synthesized Probe
  source 1..80: mol_type = other DNA
tcttatatatgtttccatataattacatcttcatgctttaagcatatgcacaaacacacatggtatatttagagatatac

SEQ ID NO: 133250 - DNA, 80 bp, synthetic construct
  misc_feature 1..80: note = Artificially Synthesized Probe
  source 1..80: mol_type = other DNA
aaaatagcttgttaggtcataagttactagaaatccctcttagagaatgttgaattgaaatgagaatgactgaaatgttc

SEQ ID NO: 133251 - DNA, 80 bp, synthetic construct; identical to SEQ ID NO: 42191
  misc_feature 1..80: note = Artificially Synthesized Probe
  source 1..80: mol_type = other DNA

SEQ ID NO: 133252 - DNA, 80 bp, synthetic construct
  misc_feature 1..80: note = Artificially Synthesized Probe
  source 1..80: mol_type = other DNA
ctgaagaaataaagggaagaatcatcattggagtaatatagtagtttgaaaatctgaataaacattaggatttcttcggc

SEQ ID NO: 133253 - DNA, 80 bp, synthetic construct
  misc_feature 1..80: note = Artificially Synthesized Probe
  source 1..80: mol_type = other DNA
tgggatgccaattgtagactctttctgtaacacatctctgcagctctcatcattccttgggattgatacacatgtgccag

SEQ ID NO: 133254 - DNA, 80 bp, synthetic construct
  misc_feature 1..80: note = Artificially Synthesized Probe
  source 1..80: mol_type = other DNA
gctgtcatattgccaattcttttaacaacagctgcctattagcaaattgaccccggcaatatataaaaacaataatatat

SEQ ID NO: 133255 - DNA, 80 bp, synthetic construct
  misc_feature 1..80: note = Artificially Synthesized Probe
  source 1..80: mol_type = other DNA
ttagcatattcaaagtagaatcttcttaatctgataaggatatttataaaaacctatagcaaacaccatacttagtaatg

SEQ ID NO: 133256 - DNA, 80 bp, synthetic construct; identical to SEQ ID NO: 42192
  misc_feature 1..80: note = Artificially Synthesized Probe
  source 1..80: mol_type = other DNA

SEQ ID NO: 133257 - DNA, 80 bp, synthetic construct
  misc_feature 1..80: note = Artificially Synthesized Probe
  source 1..80: mol_type = other DNA
ttgaaaattgcaaaacaatgctgtgagaaatttcaaactaaattaaatagaggaatataccacatttgtggacagaaaat

SEQ ID NO: 133258 - DNA, 80 bp, synthetic construct
  misc_feature 1..80: note = Artificially Synthesized Probe
  source 1..80: mol_type = other DNA
tccttaactgtggtttcagttacctgtggtacaacacaataaaatactctgagagaaagagggagaccacattcatataa

SEQ ID NO: 133259 - DNA, 80 bp, synthetic construct
  misc_feature 1..80: note = Artificially Synthesized Probe
  source 1..80: mol_type = other DNA
tgtgtgtgtgtgtgtgtgtgtgtgtgtgtgtgtgtatagttcattactatttgcggtttcaggcatctactaagggtgtt

SEQ ID NO: 133260 - DNA, 80 bp, synthetic construct; identical to SEQ ID NO: 42193
  misc_feature 1..80: note = Artificially Synthesized Probe
  source 1..80: mol_type = other DNA

SEQ ID NO: 133261 - DNA, 80 bp, synthetic construct
  misc_feature 1..80: note = Artificially Synthesized Probe
  source 1..80: mol_type = other DNA
aacttcatgaacctagagtaagcaaaaagttcttaaatagaatatcccaataaagcattaaccatcatcagacttcatca

SEQ ID NO: 133262 - DNA, 80 bp, synthetic construct
  misc_feature 1..80: note = Artificially Synthesized Probe
  source 1..80: mol_type = other DNA
gcaaagcactttacacagaggatatccaaaggctcaataagcatacgaaaagttgtttgatgtcattagatatcaggtaa

SEQ ID NO: 133263 - DNA, 80 bp, synthetic construct
  misc_feature 1..80: note = Artificially Synthesized Probe
  source 1..80: mol_type = other DNA
caatttatattatcttaaaaagtaacatcctgatgctgctggtttagaaaagccacatacataaatcgcgtaaccacata

SEQ ID NO: 133264 - DNA, 80 bp, synthetic construct
  misc_feature 1..80: note = Artificially Synthesized Probe
  source 1..80: mol_type = other DNA
agtggtataaccattttagataactctttggcaggatctactaaattaaccatacatataccctatgtcccaccaaaaag

SEQ ID NO: 133265 - DNA, 80 bp, synthetic construct; identical to SEQ ID NO: 42194
  misc_feature 1..80: note = Artificially Synthesized Probe
  source 1..80: mol_type = other DNA

SEQ ID NO: 133266 - DNA, 80 bp, synthetic construct
  misc_feature 1..80: note = Artificially Synthesized Probe
  source 1..80: mol_type = other DNA
agttgggttgctagaactgttctgtatcttgatatgggaggtgttaaacaggtatgtcatatatagagtagtacttttaa

SEQ ID NO: 133267 - DNA, 80 bp, synthetic construct
  misc_feature 1..80: note = Artificially Synthesized Probe
  source 1..80: mol_type = other DNA
caaatctcatcttgaattcccatgtgttatgggagggatctggtagaaggtaactgaatcatgaggggaggtctttcctg

SEQ ID NO: 133268 - DNA, 80 bp, synthetic construct
  misc_feature 1..80: note = Artificially Synthesized Probe
  source 1..80: mol_type = other DNA
catgattgtaaggcctccccagccacagagaactgtaagtccattaaacctctttcttctgtaaattgcccagtctcagg

SEQ ID NO: 133269 - DNA, 80 bp, synthetic construct; identical to SEQ ID NO: 42195
  misc_feature 1..80: note = Artificially Synthesized Probe
  source 1..80: mol_type = other DNA

SEQ ID NO: 133270 - DNA, 80 bp, synthetic construct
  misc_feature 1..80: note = Artificially Synthesized Probe
  source 1..80: mol_type = other DNA
tatagtaagataataagcgtctataaatctatatcaaaaagcccttttgatactttctctggggcacagaggaaatataa

SEQ ID NO: 133271 - DNA, 80 bp, synthetic construct
  misc_feature 1..80: note = Artificially Synthesized Probe
  source 1..80: mol_type = other DNA
aaaagcactaaatacaggttatctgtaaagtagctagggagaaactatacatatctcctgtaaaagcagagttaaacacc

SEQ ID NO: 133272 - DNA, 80 bp, synthetic construct
  misc_feature 1..80: note = Artificially Synthesized Probe
  source 1..80: mol_type = other DNA
tcctctaaccacaataccttttagatcttgaaactgagagataacatggtgagagtgacagcaagccaaataaaaatgga

SEQ ID NO: 133273 - DNA, 80 bp, synthetic construct; identical to SEQ ID NO: 42196
  misc_feature 1..80: note = Artificially Synthesized Probe
  source 1..80: mol_type = other DNA

SEQ ID NO: 133274 - DNA, 80 bp, synthetic construct
  misc_feature 1..80: note = Artificially Synthesized Probe
  source 1..80: mol_type = other DNA
taaatatcaaactttacattaaaataacctttaaaatcagtaatgctattactgtagtctacatgtatttccctttgact

SEQ ID NO: 133275 - DNA, 80 bp, synthetic construct; identical to SEQ ID NO: 42176
  misc_feature 1..80: note = Artificially Synthesized Probe
  source 1..80: mol_type = other DNA

SEQ ID NO: 133276 - DNA, 80 bp, synthetic construct
  misc_feature 1..80: note = Artificially Synthesized Probe
  source 1..80: mol_type = other DNA
ctttcttaacctcttaacaaaggtattcactctacatgtctttcttctaggcacagccttttcaagtactgcgagtaaga

SEQ ID NO: 133277 - DNA, 80 bp, synthetic construct
  misc_feature 1..80: note = Artificially Synthesized Probe
  source 1..80: mol_type = other DNA
tatatgaagaatttctgtaaacaagtcctcccactattgtttcaaatatttctttattgcttgtccctcaatagcatact

SEQ ID NO: 133278 - DNA, 80 bp, synthetic construct; identical to SEQ ID NO: 42197
  misc_feature 1..80: note = Artificially Synthesized Probe
  source 1..80: mol_type = other DNA

SEQ ID NO: 133279 - DNA, 80 bp, synthetic construct
  misc_feature 1..80: note = Artificially Synthesized Probe
  source 1..80: mol_type = other DNA
attacacaacctccatggtaagcaattatgaaatacgatgttttcaggaaaagtcacgttcaaaactctctttaaccatt

SEQ ID NO: 133280 - DNA, 80 bp, synthetic construct
  misc_feature 1..80: note = Artificially Synthesized Probe
  source 1..80: mol_type = other DNA
cctccaatcctggcatgtaaaaacagactactgagtagattccagtcacccactcaacaatctccacagtcattctatgt

SEQ ID NO: 133281 - DNA, 80 bp, synthetic construct; identical to SEQ ID NO: 42198
  misc_feature 1..80: note = Artificially Synthesized Probe
  source 1..80: mol_type = other DNA

SEQ ID NO: 133282 - DNA, 80 bp, synthetic construct
  misc_feature 1..80: note = Artificially Synthesized Probe
  source 1..80: mol_type = other DNA
tgactggtttgtggcaagtacagtaatcaataaattttagttgttatcatcataattgtcatcaccaccactacctgctc

SEQ ID NO: 133283 - DNA, 80 bp, synthetic construct
  misc_feature 1..80: note = Artificially Synthesized Probe
  source 1..80: mol_type = other DNA
ggaactacaggcatgtgtcaccaggaccggttaattttttaattttttgtagagacagcctctcgctatgttgcctaggc

SEQ ID NO: 133284 - DNA, 80 bp, synthetic construct
  misc_feature 1..80: note = Artificially Synthesized Probe
  source 1..80: mol_type = other DNA
atacctttgtgcagagagtttcagcttcagatattcttcctgtgtctattagaccagtgacagcttgtgagagagaccac

SEQ ID NO: 133285 - DNA, 80 bp, synthetic construct; identical to SEQ ID NO: 42199
  misc_feature 1..80: note = Artificially Synthesized Probe
  source 1..80: mol_type = other DNA

SEQ ID NO: 133286 - DNA, 80 bp, synthetic construct
  misc_feature 1..80: note = Artificially Synthesized Probe
  source 1..80: mol_type = other DNA
accatcaccacaaccatgataatgaacatattcagcattatcaaaattttcctcttgtccctttgtaaccacttctgtcc

SEQ ID NO: 133287 - DNA, 80 bp, synthetic construct
  misc_feature 1..80: note = Artificially Synthesized Probe
  source 1..80: mol_type = other DNA
gttacaagattatttggattttatgatgaattggtttgccgaactttagaattcatagcaagaattaaatctttgaattt

SEQ ID NO: 133288 - DNA, 80 bp, synthetic construct
  misc_feature 1..80: note = Artificially Synthesized Probe
  source 1..80: mol_type = other DNA
ctttggcatctttcacaggtgctaatatggcaaattaccttcattttcaaatggtacatcaatcttgcattcctgggata

SEQ ID NO: 133289 - DNA, 80 bp, synthetic construct
  misc_feature 1..80: note = Artificially Synthesized Probe
  source 1..80: mol_type = other DNA
attgctggatttgaattggtgaagtgttgttatgaatttctccatctaccttcacaagcaatgttgttctttgcctggtt

SEQ ID NO: 133290 - DNA, 80 bp, synthetic construct
  misc_feature 1..80: note = Artificially Synthesized Probe
  source 1..80: mol_type = other DNA
agtaagtgaatttaagatagctattcaagatagctgattagatgcattcggtgctcgcctcgtccatggaaaggaaccaa

SEQ ID NO: 133291 - DNA, 80 bp, synthetic construct
  misc_feature 1..80: note = Artificially Synthesized Probe
  source 1..80: mol_type = other DNA
gtatttctatctaatcctattctgtagagaattctaaactaaaggaagtttaatagctccttttcataaagtgaaaagag

SEQ ID NO: 133292 - DNA, 80 bp, synthetic construct; identical to SEQ ID NO: 42200
  misc_feature 1..80: note = Artificially Synthesized Probe
  source 1..80: mol_type = other DNA

SEQ ID NO: 133293 - DNA, 80 bp, synthetic construct
  misc_feature 1..80: note = Artificially Synthesized Probe
  source 1..80: mol_type = other DNA
gcagcccaacagcccctgtatctccacagtcctagagccccactgatattccctgcccacagccactgctgctggagctg

SEQ ID NO: 133294 - DNA, 80 bp, synthetic construct
  misc_feature 1..80: note = Artificially Synthesized Probe
  source 1..80: mol_type = other DNA
ctgaaagcaaccccaccctacctagtagcagggtcacagtgcagcagctgctgctcccaacaaagcatttgctggcagcc

SEQ ID NO: 133295 - DNA, 80 bp, synthetic construct
  misc_feature 1..80: note = Artificially Synthesized Probe
  source 1..80: mol_type = other DNA
agcactcctctggggtctgaggttgggcccatccaatctgccgctaacaccgcagctggcactcacttacatgtatcaca

SEQ ID NO: 133296 - DNA, 80 bp, synthetic construct
  misc_feature 1..80: note = Artificially Synthesized Probe
  source 1..80: mol_type = other DNA
tgtgatggttaatactgagtgtcaacttgattggactgaaggatacaaagtattaatcctgggtgtgtctgtgtgggtgt

SEQ ID NO: 133297 - DNA, 80 bp, synthetic construct; identical to SEQ ID NO: 42201
  misc_feature 1..80: note = Artificially Synthesized Probe
  source 1..80: mol_type = other DNA

SEQ ID NO: 133298 - DNA, 80 bp, synthetic construct
  misc_feature 1..80: note = Artificially Synthesized Probe
  source 1..80: mol_type = other DNA
gaatgggcctgtctaaacccactaacaccaggacattgctctggcatccaaggacaggcaagcttagccaactgctgcca

SEQ ID NO: 133299 - DNA, 80 bp, synthetic construct
  misc_feature 1..80: note = Artificially Synthesized Probe
  source 1..80: mol_type = other DNA
caaagtgacctacccaaacaacaccatggatacatcttcaggaaaaagtgctcccctacgaaagaaaattccaaaattgg

SEQ ID NO: 133300 - DNA, 80 bp, synthetic construct
  misc_feature 1..80: note = Artificially Synthesized Probe
  source 1..80: mol_type = other DNA
accaaggcaataatggttttcctttcattctggttttcccaaattaaattttttttttttcagattaaaatcaggtttgg

SEQ ID NO: 133301 - DNA, 80 bp, synthetic construct
  misc_feature 1..80: note = Artificially Synthesized Probe
  source 1..80: mol_type = other DNA
tgataataaagcagctcagtaagatacaagagaatactaaaaaccagtacaaagaaattagaaaaagcaatttaggacat

SEQ ID NO: 133302 - DNA, 80 bp, synthetic construct; identical to SEQ ID NO: 42202
  misc_feature 1..80: note = Artificially Synthesized Probe
  source 1..80: mol_type = other DNA

SEQ ID NO: 133303 - DNA, 80 bp, synthetic construct
  misc_feature 1..80: note = Artificially Synthesized Probe
  source 1..80: mol_type = other DNA
aagatgttctccatggcacactatagataacccatcaaaagtcaaagacaaagagagaatactaaaaacataaagagaag

SEQ ID NO: 133304 - DNA, 80 bp, synthetic construct
  misc_feature 1..80: note = Artificially Synthesized Probe
  source 1..80: mol_type = other DNA
aagggaaaataaagttttcccagacaagtaaaagttgaatatcaccactagaccagtcctacaagaaatgctcaatggaa

SEQ ID NO: 133305 - DNA, 80 bp, synthetic construct; identical to SEQ ID NO: 42203
  misc_feature 1..80: note = Artificially Synthesized Probe
  source 1..80: mol_type = other DNA

SEQ ID NO: 133306 - DNA, 80 bp, synthetic construct
  misc_feature 1..80: note = Artificially Synthesized Probe
  source 1..80: mol_type = other DNA
gccaaaacaggaggactgcttgagcctaggagtttgagaccagcctgagcaacatagcaagacctcatttctaaaataaa

SEQ ID NO: 133307 - DNA, 80 bp, synthetic construct
  misc_feature 1..80: note = Artificially Synthesized Probe
  source 1..80: mol_type = other DNA
tatgtgtgcttacgtgtgtgtggatgtatacagactcgtatgcttatgtgtaagcaaaagagcaatgacataaaggacaa

SEQ ID NO: 133308 - DNA, 80 bp, synthetic construct
  misc_feature 1..80: note = Artificially Synthesized Probe
  source 1..80: mol_type = other DNA
catgctaacaaagaagagaaaatagcatcaaataaaatgcacaattaaaactacaaaacacagaaaaatagttggacaaa

SEQ ID NO: 133309 - DNA, 80 bp, synthetic construct
  misc_feature 1..80: note = Artificially Synthesized Probe
  source 1..80: mol_type = other DNA
tgttctttcttttaatctgaagagcatggcttcaaaataactatgttataggtatttctgaattaccacttaataaattc

SEQ ID NO: 133310 - DNA, 80 bp, synthetic construct; identical to SEQ ID NO: 42204
  misc_feature 1..80: note = Artificially Synthesized Probe
  source 1..80: mol_type = other DNA

SEQ ID NO: 133311 - DNA, 80 bp, synthetic construct
  misc_feature 1..80: note = Artificially Synthesized Probe
  source 1..80: mol_type = other DNA
tccaatgttattgtgaggacaatctctgattcagttccaatgctcttgtatctccatgagttttggcattgtttaccagc

SEQ ID NO: 133312 - DNA, 80 bp, synthetic construct
  misc_feature 1..80: note = Artificially Synthesized Probe
  source 1..80: mol_type = other DNA
tgctacaaaacaaagatttcagctaacagaacccattgggcttttaagctatctggaagagaaaatacatatgcttatca

SEQ ID NO: 133313 - DNA, 80 bp, synthetic construct
  misc_feature 1..80: note = Artificially Synthesized Probe
  source 1..80: mol_type = other DNA
cggagtctcgctctgtcacccaggctggagagcggtggcgcaatctcggctcattgcaagctccgcctcctgggttcacg

SEQ ID NO: 133314 - DNA, 80 bp, synthetic construct
  misc_feature 1..80: note = Artificially Synthesized Probe
  source 1..80: mol_type = other DNA
agtgctgggattacaggcgtgagccaccatgcccggcctaatgaatatattttttataacaacatatgctgaagccgttt

SEQ ID NO: 133315 - DNA, 80 bp, synthetic construct; identical to SEQ ID NO: 42205
  misc_feature 1..80: note = Artificially Synthesized Probe
  source 1..80: mol_type = other DNA

SEQ ID NO: 133316 - DNA, 80 bp, synthetic construct
  misc_feature 1..80: note = Artificially Synthesized Probe
  source 1..80: mol_type = other DNA
aacatatcagaggatgataaacatcctattaagctgttcatccatggctggttagctcagctgcctagagtgctgtatta

SEQ ID NO: 133317 - DNA, 80 bp, synthetic construct
  misc_feature 1..80: note = Artificially Synthesized Probe
  source 1..80: mol_type = other DNA
aggacaagtctcactcatcttcatgacttagtagttgctgttttaaagactcagtcctaggacaaggaagataacacaat

SEQ ID NO: 133318 - DNA, 80 bp, synthetic construct; identical to SEQ ID NO: 42206
  misc_feature 1..80: note = Artificially Synthesized Probe
  source 1..80: mol_type = other DNA

SEQ ID NO: 133319 - DNA, 80 bp, synthetic construct
  misc_feature 1..80: note = Artificially Synthesized Probe
  source 1..80: mol_type = other DNA
gctgtttacttcagcaagttaatattttagtcctgctactcttaaaaaaacaaatgaatgcttttaatatctcacaaggg

SEQ ID NO: 133320 - DNA, 80 bp, synthetic construct
  misc_feature 1..80: note = Artificially Synthesized Probe
  source 1..80: mol_type = other DNA
aatcaacaaaattacaagaatcattaaaatcttatgcagatcaaatacttttacaaaaagttaaatgcatacctccatat

SEQ ID NO: 133321 - DNA, 80 bp, synthetic construct
  misc_feature 1..80: note = Artificially Synthesized Probe
  source 1..80: mol_type = other DNA
aggtctagccgtgccactaattaatgtgtggtagttcttcctttaggattcattttcctataaaacaagacaactggccg

SEQ ID NO: 133322 - DNA, 80 bp, synthetic construct
  misc_feature 1..80: note = Artificially Synthesized Probe
  source 1..80: mol_type = other DNA
ccagctacttgggaggctgaggcaggagaatggcgtgaacccgggaggcggagcttgcagtgagccgagatcccgccact

SEQ ID NO: 133323 - DNA, 80 bp, synthetic construct; identical to SEQ ID NO: 42177
  misc_feature 1..80: note = Artificially Synthesized Probe
  source 1..80: mol_type = other DNA

SEQ ID NO: 133324 - DNA, 80 bp, synthetic construct; identical to SEQ ID NO: 42207
  misc_feature 1..80: note = Artificially Synthesized Probe
  source 1..80: mol_type = other DNA

SEQ ID NO: 133325 - DNA, 80 bp, synthetic construct
  misc_feature 1..80: note = Artificially Synthesized Probe
  source 1..80: mol_type = other DNA
tttaaaatatagcttgctaaagataacttttagtatcacaaaagcactaatctagcagaaattggatttttttccattca

SEQ ID NO: 133326 - DNA, 80 bp, synthetic construct
  misc_feature 1..80: note = Artificially Synthesized Probe
  source 1..80: mol_type = other DNA
gtctcaaacaggcactcatctttgccactcagtcactgttttagcatcttatgggatgtctctgcttccttgagtatgta

SEQ ID NO: 133327 - DNA, 80 bp, synthetic construct; identical to SEQ ID NO: 42208
  misc_feature 1..80: note = Artificially Synthesized Probe
  source 1..80: mol_type = other DNA

SEQ ID NO: 133328 - DNA, 80 bp, synthetic construct
  misc_feature 1..80: note = Artificially Synthesized Probe
  source 1..80: mol_type = other DNA
ttcccaacagtgcttaggcaaaagcaatagcattctgatctaacacatctgaagagttaaaagggaatacatttaataca

SEQ ID NO: 133329 - DNA, 80 bp, synthetic construct
  misc_feature 1..80: note = Artificially Synthesized Probe
  source 1..80: mol_type = other DNA
cacagttagctcaggtgaggccataactgtggcatttctaacagttaccacataagatacatccccatccttcaagaagc

SEQ ID NO: 133330 - DNA, 80 bp, synthetic construct
  misc_feature 1..80: note = Artificially Synthesized Probe
  source 1..80: mol_type = other DNA
agacattcctttaggcctctttcaataattggtgctctcttaataatcagtagccaaaagcagataatcaaacgatatgc

SEQ ID NO: 133331 - DNA, 80 bp, synthetic construct
  misc_feature 1..80: note = Artificially Synthesized Probe
  source 1..80: mol_type = other DNA
ataatgcatcaatttaaaaagtcctttctgatagcattatatattgtattaaacacttacatagtgcaaagtactttaat

SEQ ID NO: 133332 - DNA, 80 bp, synthetic construct; identical to SEQ ID NO: 42209
  misc_feature 1..80: note = Artificially Synthesized Probe
  source 1..80: mol_type = other DNA

SEQ ID NO: 133333 - DNA, 80 bp, synthetic construct
  misc_feature 1..80: note = Artificially Synthesized Probe
  source 1..80: mol_type = other DNA
tatttaataaattcaacatttcctttgtactaggacaaactaacctttccatgatttgagtccagaatatgagccacatt

SEQ ID NO: 133334 - DNA, 80 bp, synthetic construct
  misc_feature 1..80: note = Artificially Synthesized Probe
  source 1..80: mol_type = other DNA
accacacctggctaatttttgtatttttagtagagatggggtttcaccatgttggccagaggctggtctcaaacttctga

SEQ ID NO: 133335 - DNA, 80 bp, synthetic construct
  misc_feature 1..80: note = Artificially Synthesized Probe
  source 1..80: mol_type = other DNA
atcaatttattattgttgtttgaaaagactaataatcttgtgaaaggaaatcttttctactgtgaccaactctactttca

SEQ ID NO: 133336 - DNA, 80 bp, synthetic construct
  misc_feature 1..80: note = Artificially Synthesized Probe
  source 1..80: mol_type = other DNA
taaaataaataaagttcaaggcaccgtgaagctcatcattgcttcaataatcaactcaatactaaaaataagaaaaatac

SEQ ID NO: 133337 - DNA, 80 bp, synthetic construct; identical to SEQ ID NO: 42210
  misc_feature 1..80: note = Artificially Synthesized Probe
  source 1..80: mol_type = other DNA

SEQ ID NO: 133338 - DNA, 80 bp, synthetic construct
  misc_feature 1..80: note = Artificially Synthesized Probe
  source 1..80: mol_type = other DNA
catattcttaaaagcactgaaaaattgacaagatattaaggacttaccaggccaaaactgaaagggaaaactggaattca

SEQ ID NO: 133339 - DNA, 80 bp, synthetic construct
  misc_feature 1..80: note = Artificially Synthesized Probe
  source 1..80: mol_type = other DNA
tgattcttctgcctcagcctcccgagtagctgggactacaggcgtgcgccaccatgcccagctaatttttgtatttttag

SEQ ID NO: 133340 - DNA, 80 bp, synthetic construct
  misc_feature 1..80: note = Artificially Synthesized Probe
  source 1..80: mol_type = other DNA
ggctagtaggacaaaaattaaggcccaggttaacacaaggaggggagtatagaggagacctacatcagaataagctgaga

SEQ ID NO: 133341 - DNA, 80 bp, synthetic construct; identical to SEQ ID NO: 42211
  misc_feature 1..80: note = Artificially Synthesized Probe
  source 1..80: mol_type = other DNA

SEQ ID NO: 133342 - DNA, 80 bp, synthetic construct
  misc_feature 1..80: note = Artificially Synthesized Probe
  source 1..80: mol_type = other DNA
aacaagtctgtgggtcttgcagacttcagatgttggaattattagtcgtggcaagtgttcaaaacattagctattaccat

SEQ ID NO: 133343 - DNA, 80 bp, synthetic construct
  misc_feature 1..80: note = Artificially Synthesized Probe
  source 1..80: mol_type = other DNA
atagagtgtcagtgacttcatatttataattacatttttgtatattagcagtgttctagttcttactgccttatctttaa

SEQ ID NO: 133344 - DNA, 80 bp, synthetic construct
  misc_feature 1..80: note = Artificially Synthesized Probe
  source 1..80: mol_type = other DNA
ttgtagctcccacaacatctagaacagcacaaccgtatatggagaaaactcagtctagtattcgttgaatgactaatgga

SEQ ID NO: 133345 - DNA, 80 bp, synthetic construct
  misc_feature 1..80: note = Artificially Synthesized Probe
  source 1..80: mol_type = other DNA
aaagactactttatgcatagaactgttcaaatgaaattgttcctctttgaaaccacagctcaggatctaggctataggtt

SEQ ID NO: 133346 - DNA, 80 bp, synthetic construct; identical to SEQ ID NO: 42212
  misc_feature 1..80: note = Artificially Synthesized Probe
  source 1..80: mol_type = other DNA

SEQ ID NO: 133347 - DNA, 80 bp, synthetic construct
  misc_feature 1..80: note = Artificially Synthesized Probe
  source 1..80: mol_type = other DNA
aacatactttatatcacctatatacaccaacagtctttatgaaaataagaagaaaaaaatcaacaatggatgattataaa

SEQ ID NO: 133348 - DNA, 80 bp, synthetic construct
  misc_feature 1..80: note = Artificially Synthesized Probe
  source 1..80: mol_type = other DNA
cccagcaaagattgttaacaaaaatgaactctaaaaggaaaagagactacagacatgacactttactgctaaaaataaaa

SEQ ID NO: 133349 - DNA, 80 bp, synthetic construct
  misc_feature 1..80: note = Artificially Synthesized Probe
  source 1..80: mol_type = other DNA
agactaagaatattacaaacttgggaattaagagctttaatagtaaaacaaagtttgggccttaacctgactaagggcca

SEQ ID NO: 133350 - DNA, 80 bp, synthetic construct; identical to SEQ ID NO: 42213
  misc_feature 1..80: note = Artificially Synthesized Probe
  source 1..80: mol_type = other DNA

SEQ ID NO: 133351 - DNA, 80 bp, synthetic construct
  misc_feature 1..80: note = Artificially Synthesized Probe
  source 1..80: mol_type = other DNA
ggctttctgtggttggttcctttaagatagagctgtaaagatattttaaaattacccattagttagtctttttttttttt

SEQ ID NO: 133352 - DNA, 80 bp, synthetic construct
  misc_feature 1..80: note = Artificially Synthesized Probe
  source 1..80: mol_type = other DNA
tatttttagtagagacggggtttcaccatgttagctaggatggtctcaatctcctgacctcgtgatccgcccatctcggc

SEQ ID NO: 133353 - DNA, 80 bp, synthetic construct
  misc_feature 1..80: note = Artificially Synthesized Probe
  source 1..80: mol_type = other DNA
tcttggtggttaagagatagcaatttccctgactgaagcagttaaaagcatcaatgacttttcacagaccaacaaaagcc

SEQ ID NO: 133354 - DNA, 80 bp, synthetic construct; identical to SEQ ID NO: 42214
  misc_feature 1..80: note = Artificially Synthesized Probe
  source 1..80: mol_type = other DNA

SEQ ID NO: 133355 - DNA, 80 bp, synthetic construct
  misc_feature 1..80: note = Artificially Synthesized Probe
  source 1..80: mol_type = other DNA
atagcagtgtgagaactaatacactaagttttagaaacaaatataaattagcttctttgagtttcagctccaggtaagta

SEQ ID NO: 133356 - DNA, 80 bp, synthetic construct
  misc_feature 1..80: note = Artificially Synthesized Probe
  source 1..80: mol_type = other DNA
ctctatggtattgaaaccagcactttacataataagtacaaattgtctctatatccactatactccaaacgagtattttt

SEQ ID NO: 133357 - DNA, 80 bp, synthetic construct
  misc_feature 1..80: note = Artificially Synthesized Probe
  source 1..80: mol_type = other DNA
tgccacagttccatagatactgccagaagatacaggatttttaggtcacagagaaaagtcttcattattcaaggtacggc

SEQ ID NO: 133358 - DNA, 80 bp, synthetic construct
  misc_feature 1..80: note = Artificially Synthesized Probe
  source 1..80: mol_type = other DNA
aacttataagaattattatgaattttatactgtaataaaaataaaggaatttttttaaaaacttttttttttaacttaag

SEQ ID NO: 133359 - DNA, 80 bp, synthetic construct; identical to SEQ ID NO: 42215
  misc_feature 1..80: note = Artificially Synthesized Probe
  source 1..80: mol_type = other DNA

SEQ ID NO: 133360 - DNA, 80 bp, synthetic construct
  misc_feature 1..80: note = Artificially Synthesized Probe
  source 1..80: mol_type = other DNA
aggaaatactaaaatcaaaataatatctgacactgtcatacaaatcgttagttccttgttgtatccccccttctttaaca

SEQ ID NO: 133361 - DNA, 80 bp, synthetic construct
  misc_feature 1..80: note = Artificially Synthesized Probe
  source 1..80: mol_type = other DNA
ttcatgatttacataagtacatctatcggtgaagatttaacactgagatgcaatctaacatccgttaatatctgatgttt

SEQ ID NO: 133362 - DNA, 80 bp, synthetic construct
  misc_feature 1..80: note = Artificially Synthesized Probe
  source 1..80: mol_type = other DNA
atatttataacattataaaatgtcacatatctaccattacgtctttggactatttttggaagggggaaattaaaagtttt

SEQ ID NO: 133363 - DNA, 80 bp, synthetic construct; identical to SEQ ID NO: 42216
  misc_feature 1..80: note = Artificially Synthesized Probe
  source 1..80: mol_type = other DNA

SEQ ID NO: 133364 - DNA, 80 bp, synthetic construct
  misc_feature 1..80: note = Artificially Synthesized Probe
  source 1..80: mol_type = other DNA
gtgctgaatgctcaatatctgtatgttgtcttttaccatgttctaaggattttacacatggttacttattatcacagtct

SEQ ID NO: 133365 - DNA, 80 bp, synthetic construct
  misc_feature 1..80: note = Artificially Synthesized Probe
  source 1..80: mol_type = other DNA
aatgccaatgggtagaggtggaagcagttggtagtgtcaagtttgggtgaagacaggcagaaaatcaaaaacaaagaaag

SEQ ID NO: 133366 - DNA, 80 bp, synthetic construct
  misc_feature 1..80: note = Artificially Synthesized Probe
  source 1..80: mol_type = other DNA
ctaatctaatgactctaatatggggttacttttgcccttgataactgcagtaatcatgagtatctatgattcttgtcacc

SEQ ID NO: 133367 - DNA, 80 bp, synthetic construct; identical to SEQ ID NO: 42178
  misc_feature 1..80: note = Artificially Synthesized Probe
  source 1..80: mol_type = other DNA

SEQ ID NO: 133368 - DNA, 80 bp, synthetic construct
  misc_feature 1..80: note = Artificially Synthesized Probe
  source 1..80: mol_type = other DNA
gaaatgactgtaatggcacaggataggacaaaggcattacatcaaataaacaaatgtaaagtttatcctatagaactggt

SEQ ID NO: 133369 - DNA, 80 bp, synthetic construct; identical to SEQ ID NO: 42217
  misc_feature 1..80: note = Artificially Synthesized Probe
  source 1..80: mol_type = other DNA

SEQ ID NO: 133370 - DNA, 80 bp, synthetic construct
  misc_feature 1..80: note = Artificially Synthesized Probe
  source 1..80: mol_type = other DNA
aagatttacctttaaatgaaccttttaacaggttatcttgaaaaggaaagaagaaaatatctctttgggaatccaagaag

SEQ ID NO: 133371 - DNA, 80 bp, synthetic construct
  misc_feature 1..80: note = Artificially Synthesized Probe
  source 1..80: mol_type = other DNA
tgtagctccacctgtgactatcaattcagaaccaggtgggcccaatcccttttgttcacccaaaagttcctaaaacatga

SEQ ID NO: 133372 - DNA, 80 bp, synthetic construct
  misc_feature 1..80: note = Artificially Synthesized Probe
  source 1..80: mol_type = other DNA
tttgtcttgctccgattcaacaatagacaaggctctctcataggctgttacatagaagtgaaaacaaacaaaacaatata

SEQ ID NO: 133373 - DNA, 80 bp, synthetic construct; identical to SEQ ID NO: 42218
  misc_feature 1..80: note = Artificially Synthesized Probe
  source 1..80: mol_type = other DNA

SEQ ID NO: 133374 - DNA, 80 bp, synthetic construct
  misc_feature 1..80: note = Artificially Synthesized Probe
  source 1..80: mol_type = other DNA
aatcaaaatctattactaacaatggttgaggtcttcatttatcagaaattaacatctaagcagtgtagagtagtaaacat

SEQ ID NO: 133375 - DNA, 80 bp, synthetic construct
  misc_feature 1..80: note = Artificially Synthesized Probe
  source 1..80: mol_type = other DNA
tgctgactcctagtcagattttaataaacattgcaacccccaccccatctcattattacatctttctgtatgtgtgctca

SEQ ID NO: 133376 - DNA, 80 bp, synthetic construct; identical to SEQ ID NO: 42219
  misc_feature 1..80: note = Artificially Synthesized Probe
  source 1..80: mol_type = other DNA

SEQ ID NO: 133377 - DNA, 80 bp, synthetic construct
  misc_feature 1..80: note = Artificially Synthesized Probe
  source 1..80: mol_type = other DNA
aaggtcaggagctcgagaccagcctggccaacatggtgaaaccccgtctctactaaaaatacaaaaattagccggacgtg

SEQ ID NO: 133378 - DNA, 80 bp, synthetic construct
  misc_feature 1..80: note = Artificially Synthesized Probe
  source 1..80: mol_type = other DNA
aatgcctttctccaagcattcttttctttactatttctttcagcttttacgtttcaccaaaaggcaaacagtatttcaaa

SEQ ID NO: 133379 - DNA, 80 bp, synthetic construct
  misc_feature 1..80: note = Artificially Synthesized Probe
  source 1..80: mol_type = other DNA
tcttttgataatttcatgtgtacttccttttttatagtggtctactaaattacgaagtgtctcttttttttcttaacaag

SEQ ID NO: 133380 - DNA, 80 bp, synthetic construct
  misc_feature 1..80: note = Artificially Synthesized Probe
  source 1..80: mol_type = other DNA
acctatcttttgtgtaaactgtttatctgcacattttttttttcttttttggagggcatacagatacactaaaattccac

SEQ ID NO: 133381 - DNA, 80 bp, synthetic construct
  misc_feature 1..80: note = Artificially Synthesized Probe
  source 1..80: mol_type = other DNA
aaaaaaaatacaaaaattacccgggcatggtggtgggtgcctgtaattccagctactggagaggctgaggcaggagaatc

SEQ ID NO: 133382 - DNA, 80 bp, synthetic construct; identical to SEQ ID NO: 42220
  misc_feature 1..80: note = Artificially Synthesized Probe
  source 1..80: mol_type = other DNA

SEQ ID NO: 133383 - DNA, 80 bp, synthetic construct
  misc_feature 1..80: note = Artificially Synthesized Probe
  source 1..80: mol_type = other DNA
aattataaaatcaatactcaaattttgataaaggaaagaggactaccttagattgtttttggatacatacatatatatta

SEQ ID NO: 133384 - DNA, 80 bp, synthetic construct
  misc_feature 1..80: note = Artificially Synthesized Probe
  source 1..80: mol_type = other DNA
ttccagcaccttgggaggccaaggcgggcgaatcacgaggtcaggagttcgagaccagcctggccaacacggtgaaactc

SEQ ID NO: 133385 - DNA, 80 bp, synthetic construct
  misc_feature 1..80: note = Artificially Synthesized Probe
  source 1..80: mol_type = other DNA
gagactctgtccccccaaaaaaaaaaaaaagaaaaagtaacctgaagcaagctgacagaattttaagatataatttgatt

SEQ ID NO: 133386 - DNA, 80 bp, synthetic construct; identical to SEQ ID NO: 42221
  misc_feature 1..80: note = Artificially Synthesized Probe
  source 1..80: mol_type = other DNA

SEQ ID NO: 133387 - DNA, 80 bp, synthetic construct
  misc_feature 1..80: note = Artificially Synthesized Probe
  source 1..80: mol_type = other DNA
tttggatacatatatatttatatatttagatgccagagccatagcatgagaagtagagtagaaactgtcacatgtatttt

SEQ ID NO: 133388 - DNA, 80 bp, synthetic construct
  misc_feature 1..80: note = Artificially Synthesized Probe
  source 1..80: mol_type = other DNA
ataactggctacctaaggtctgccaggtagctccttaaaagatgtagcactaatcctaagacatcaaagtatagttctaa

SEQ ID NO: 133389 - DNA, 80 bp, synthetic construct
  misc_feature 1..80: note = Artificially Synthesized Probe
  source 1..80: mol_type = other DNA
gagttagaagtctctgaaaaactgaggaaagatatagagctcattccccatccccaaaaggtacccacacaacaattttt

SEQ ID NO: 133390 - DNA, 80 bp, synthetic construct; identical to SEQ ID NO: 42222
  misc_feature 1..80: note = Artificially Synthesized Probe
  source 1..80: mol_type = other DNA

SEQ ID NO: 133391 - DNA, 80 bp, synthetic construct
  misc_feature 1..80: note = Artificially Synthesized Probe
  source 1..80: mol_type = other DNA
aaaaatacgcttaccataacaatctgccgtaatttcttattgcaacattgtaagtatcttggtcttctgcagtctgtaac

SEQ ID NO: 133392 - DNA, 80 bp, synthetic construct
  misc_feature 1..80: note = Artificially Synthesized Probe
  source 1..80: mol_type = other DNA
gtaccacaaaagcacttatatatatttagattttagactttcaggaaaataacatctaaataacctcttagtaagtgaaa

SEQ ID NO: 133393 - DNA, 80 bp, synthetic construct
  misc_feature 1..80: note = Artificially Synthesized Probe
  source 1..80: mol_type = other DNA
ttcatgtgcccttgcttgtacatacagaaaaatatttaaagaaaagtaagttgagggaaggggactagtcactagaagtc

SEQ ID NO: 133394 - DNA, 80 bp, synthetic construct; identical to SEQ ID NO: 42223
  misc_feature 1..80: note = Artificially Synthesized Probe
  source 1..80: mol_type = other DNA

SEQ ID NO: 133395 - DNA, 80 bp, synthetic construct
  misc_feature 1..80: note = Artificially Synthesized Probe
  source 1..80: mol_type = other DNA
ggtgtaaccaatgttagattcacaatatctgcaataataacgatacataccaaaaaaaaaaaaaatagcaaacaccctag

SEQ ID NO: 133396 - DNA, 80 bp, synthetic construct
  misc_feature 1..80: note = Artificially Synthesized Probe
  source 1..80: mol_type = other DNA
cttcttgattacacaggctccagtaccatctagtgattactcctttgaactacggagagatccataaaagcatatggcaa

SEQ ID NO: 133397 - DNA, 80 bp, synthetic construct
  misc_feature 1..80: note = Artificially Synthesized Probe
  source 1..80: mol_type = other DNA
atccattaatttacatagaaatttatgtagatttcatttcctaccactctccagctggtcattccattgtagcacactgg

SEQ ID NO: 133398 - DNA, 80 bp, synthetic construct
  misc_feature 1..80: note = Artificially Synthesized Probe
  source 1..80: mol_type = other DNA
tatccaacattgcataggacagtacccaccctcaacccacacctaagaaaaaattgtgcattccacaatctcagtaggtt

SEQ ID NO: 133399 - DNA, 80 bp, synthetic construct; identical to SEQ ID NO: 42224
  misc_feature 1..80: note = Artificially Synthesized Probe
  source 1..80: mol_type = other DNA

SEQ ID NO: 133400 - DNA, 80 bp, synthetic construct
  misc_feature 1..80: note = Artificially Synthesized Probe
  source 1..80: mol_type = other DNA
aataaatacatagtagatattaaagtcattcaaacaaacacatcacaatgttctcatttcttgtctcattgaacacatgt

SEQ ID NO: 133401 - DNA, 80 bp, synthetic construct
  misc_feature 1..80: note = Artificially Synthesized Probe
  source 1..80: mol_type = other DNA
aaatttgggaacacatcttttcatcttctaagatgtaataatagtatacaatgaaacatcaggaaaggagtcaaaacaat

SEQ ID NO: 133402 - DNA, 80 bp, synthetic construct
  misc_feature 1..80: note = Artificially Synthesized Probe
  source 1..80: mol_type = other DNA
ggtgaggggaatggatttattgggtgaaaaggaaaaaagaaaaaaaacctctcagcaaagcgagaggggttcctgctaac

SEQ ID NO: 133403 - DNA, 80 bp, synthetic construct; identical to SEQ ID NO: 42225
  misc_feature 1..80: note = Artificially Synthesized Probe
  source 1..80: mol_type = other DNA

SEQ ID NO: 133404 - DNA, 80 bp, synthetic construct
  misc_feature 1..80: note = Artificially Synthesized Probe
  source 1..80: mol_type = other DNA
tcagtatcttaaatatcagattacctcttgagatcactcacactgttaagaatagtggcctgattttatcttgaatataa

SEQ ID NO: 133405 - DNA, 80 bp, synthetic construct
  misc_feature 1..80: note = Artificially Synthesized Probe
  source 1..80: mol_type = other DNA
acatctaattaatcaataataaaaaatggataaaaatagcagaaaattcactacaattctcaaacaaaatataacaaaag

SEQ ID NO: 133406 - DNA, 80 bp, synthetic construct
  misc_feature 1..80: note = Artificially Synthesized Probe
  source 1..80: mol_type = other DNA
cagttctttggctaattacttaagccttcctgtgattaaatttagcaataatttctcttggcggttctgttccaacatgt

SEQ ID NO: 133407 - DNA, 80 bp, synthetic construct
  misc_feature 1..80: note = Artificially Synthesized Probe
  source 1..80: mol_type = other DNA
ctaactccatcttgcttctaacctccatgctgtcctcgttcattcctgggcacaggctaaactaactttgggaggaactt

SEQ ID NO: 133408 - DNA, 80 bp, synthetic construct
  misc_feature 1..80: note = Artificially Synthesized Probe
  source 1..80: mol_type = other DNA
accctccccaaattgttcctggggataacatcactattcagagcctgcacttgatggatcagctggcatcacccagattg

SEQ ID NO: 133409 - DNA, 80 bp, synthetic construct; identical to SEQ ID NO: 42179
  misc_feature 1..80: note = Artificially Synthesized Probe
  source 1..80: mol_type = other DNA

SEQ ID NO: 133410 - DNA, 80 bp, synthetic construct; identical to SEQ ID NO: 42226
  misc_feature 1..80: note = Artificially Synthesized Probe
  source 1..80: mol_type = other DNA

SEQ ID NO: 133411 - DNA, 80 bp, synthetic construct
  misc_feature 1..80: note = Artificially Synthesized Probe
  source 1..80: mol_type = other DNA
tcaaatcctttagattatttaacaaagtacactgtaaccatatcttttgtgattgctaggttctaagatcaacaactaag

SEQ ID NO: 133412 - DNA, 80 bp, synthetic construct
  misc_feature 1..80: note = Artificially Synthesized Probe
  source 1..80: mol_type = other DNA
ggagattgagaccatcctggctaataccgtgaaaccccacctctactaaaaatacaaaaaattagccgggcgtggtggca

SEQ ID NO: 133413 - DNA, 80 bp, synthetic construct
  misc_feature 1..80: note = Artificially Synthesized Probe
  source 1..80: mol_type = other DNA
agcatgaggagatccatgccttcacatgccacacccaccctaaggcaaacccccccaagtgctgatgtttgtaaattaat

SEQ ID NO: 133414 - DNA, 80 bp, synthetic construct; identical to SEQ ID NO: 42227
  misc_feature 1..80: note = Artificially Synthesized Probe
  source 1..80: mol_type = other DNA

SEQ ID NO: 133415 - DNA, 80 bp, synthetic construct
  misc_feature 1..80: note = Artificially Synthesized Probe
  source 1..80: mol_type = other DNA
cccaatggtagttttattaaaaaagacggaattattacaacagatggttaataaaatttcaccactctgtcaacttccta

SEQ ID NO: 133416 - DNA, 80 bp, synthetic construct
  misc_feature 1..80: note = Artificially Synthesized Probe
  source 1..80: mol_type = other DNA
caggtattgttatatccactatccagggagtaaacagaagttaagggtggtaaaacacttggcctaagactgcagagaaa

SEQ ID NO: 133417 - DNA, 80 bp, synthetic construct
  misc_feature 1..80: note = Artificially Synthesized Probe
  source 1..80: mol_type = other DNA
ggtaacaatttttatctttcttcaaaagcctttattaaagtttacaaagtaaagactgcttcgctgttgcaaaaagaagg

SEQ ID NO: 133418 - DNA, 80 bp, synthetic construct; identical to SEQ ID NO: 42228
  misc_feature 1..80: note = Artificially Synthesized Probe
  source 1..80: mol_type = other DNA

SEQ ID NO: 133419 - DNA, 80 bp, synthetic construct
  misc_feature 1..80: note = Artificially Synthesized Probe
  source 1..80: mol_type = other DNA
cttcattcttacggctttttctttgcttccttactataaaataatccaatgtttataaaaaactggacaaaatattttat

SEQ ID NO: 133420 - DNA, 80 bp, synthetic construct
  misc_feature 1..80: note = Artificially Synthesized Probe
  source 1..80: mol_type = other DNA
atgaagggtcactatgataaaacacagcgaagaacatattgaaattatttgctccaatcctaacgagaagaatcaaacgg

SEQ ID NO: 133421 - DNA, 80 bp, synthetic construct
  misc_feature 1..80: note = Artificially Synthesized Probe
  source 1..80: mol_type = other DNA
ttcctagagtctcagtttctattctattaatatatgactgctactatatctattaaatctaaacatcatttcttcaccag

SEQ ID NO: 133422 - DNA, 80 bp, synthetic construct
  misc_feature 1..80: note = Artificially Synthesized Probe
  source 1..80: mol_type = other DNA
ctctgttgcccaggctggagtgcaatggcatgatcatagctcactgtatcctgaaactccaggactcaatcctcctgcct

SEQ ID NO: 133423 - DNA, 80 bp, synthetic construct; identical to SEQ ID NO: 42229
  misc_feature 1..80: note = Artificially Synthesized Probe
  source 1..80: mol_type = other DNA

SEQ ID NO: 133424 - DNA, 80 bp, synthetic construct
  misc_feature 1..80: note = Artificially Synthesized Probe
  source 1..80: mol_type = other DNA
taaaagacagtaacaataataatacaaaatgaaactgtctagaagaaccaaaggtttactagctgagcttaaaagcaaag

SEQ ID NO: 133425 - DNA, 80 bp, synthetic construct
  misc_feature 1..80: note = Artificially Synthesized Probe
  source 1..80: mol_type = other DNA
gaagtgaggtcccttggaccagcctcataatcatcacttgggagcagttagaatgcaaattcttggactccctgggttca

SEQ ID NO: 133426 - DNA, 80 bp, synthetic construct; identical to SEQ ID NO: 42230
  misc_feature 1..80: note = Artificially Synthesized Probe
  source 1..80: mol_type = other DNA

SEQ ID NO: 133427 - DNA, 80 bp, synthetic construct
  misc_feature 1..80: note = Artificially Synthesized Probe
  source 1..80: mol_type = other DNA
cctatttggcagtacaaaaatctgaatttgggggaggaaagaacactcataaacaagtgacaaaccaaatatgaagattt

SEQ ID NO: 133428 - DNA, 80 bp, synthetic construct
  misc_feature 1..80: note = Artificially Synthesized Probe
  source 1..80: mol_type = other DNA
gtggccttaggaatgacacttaggagctctgagtttctatttccacaactataaagagagtataacatcaaccatatctc

SEQ ID NO: 133429 - DNA, 80 bp, synthetic construct
  misc_feature 1..80: note = Artificially Synthesized Probe
  source 1..80: mol_type = other DNA
tgttatatttcttacttgtccaatccagcacattaaataagatggatcaagggattgagccattttgaaagcctcatgag

SEQ ID NO: 133430 - DNA, 80 bp, synthetic construct
  misc_feature 1..80: note = Artificially Synthesized Probe
  source 1..80: mol_type = other DNA
actaggtaagggctttagatcagcagttcgcaactctttacaaacctcagtacatttaatggatgacttttaaacttgtg

SEQ ID NO: 133431 - DNA, 80 bp, synthetic construct
  misc_feature 1..80: note = Artificially Synthesized Probe
  source 1..80: mol_type = other DNA
aaatttcactgtttaagcataattagcaatgcttaaagcagtgttttaactacacagttctggaacactcctgggtgcaa

SEQ ID NO: 133432 - DNA, 80 bp, synthetic construct; identical to SEQ ID NO: 42231
  misc_feature 1..80: note = Artificially Synthesized Probe
  source 1..80: mol_type = other DNA

SEQ ID NO: 133433 - DNA, 80 bp, synthetic construct
  misc_feature 1..80: note = Artificially Synthesized Probe
  source 1..80: mol_type = other DNA
tcttatttttcctatttttaaaaagtaagctcatgggcaaaaactatcccatgctacaataaaaccacatccatagctta

SEQ ID NO: 133434 - DNA, 80 bp, synthetic construct
  misc_feature 1..80: note = Artificially Synthesized Probe
  source 1..80: mol_type = other DNA
ccttgagaatattgagaaagctttttgggatgagattcaatataccagctgaaacacaaaacagttcagacatggtatta

SEQ ID NO: 133435 - DNA, 80 bp, synthetic construct; identical to SEQ ID NO: 42232
  misc_feature 1..80: note = Artificially Synthesized Probe
  source 1..80: mol_type = other DNA

SEQ ID NO: 133436 - DNA, 80 bp, synthetic construct
  misc_feature 1..80: note = Artificially Synthesized Probe
  source 1..80: mol_type = other DNA
ttgaatatcatcaattaactagcatactggagagcatactggctagataacgatgtgcaaaaacatttctccacaagaag

SEQ ID NO: 133437 - DNA, 80 bp, synthetic construct
  misc_feature 1..80: note = Artificially Synthesized Probe
  source 1..80: mol_type = other DNA
taggccccttgtctagttgaaagtctcagaaaattagtaatactaaattttgaagttctttttcatagacacatagaata

SEQ ID NO: 133438 - DNA, 80 bp, synthetic construct
  misc_feature 1..80: note = Artificially Synthesized Probe
  source 1..80: mol_type = other DNA
catgcaaccacaccaagagcattccagtataagtgattattactgtcgagtctcactgcttttttcagacactgaaaaga

SEQ ID NO: 133439 - DNA, 80 bp, synthetic construct; identical to SEQ ID NO: 42233
  misc_feature 1..80: note = Artificially Synthesized Probe
  source 1..80: mol_type = other DNA

SEQ ID NO: 133440 - DNA, 80 bp, synthetic construct
  misc_feature 1..80: note = Artificially Synthesized Probe
  source 1..80: mol_type = other DNA
attaactggcaatctttgcaaattaccttcctccaaggtggaggagctcatttttctttaatacttgttttccttctttc

SEQ ID NO: 133441 - DNA, 80 bp, synthetic construct
  misc_feature 1..80: note = Artificially Synthesized Probe
  source 1..80: mol_type = other DNA
tagcttccagaggcaggacacatcagctcgatgctgtagagcactaaaaaaagaaacattgtgattcttacaaattattt

SEQ ID NO: 133442 - DNA, 80 bp, synthetic construct
  misc_feature 1..80: note = Artificially Synthesized Probe
  source 1..80: mol_type = other DNA
aaaaccatttgtcacctctggttagtatctaattacttacaacatgcttcacaactgatcacgaccccaaggttgttggt

SEQ ID NO: 133443 - DNA, 80 bp, synthetic construct
  misc_feature 1..80: note = Artificially Synthesized Probe
  source 1..80: mol_type = other DNA
agaagaaaaggagaaagggaaggaggaagggattactttaagtgccagaaattttgtggacacttttttttgttactctt

SEQ ID NO: 133444 - DNA, 80 bp, synthetic construct; identical to SEQ ID NO: 42234
  misc_feature 1..80: note = Artificially Synthesized Probe
  source 1..80: mol_type = other DNA

SEQ ID NO: 133445 - DNA, 80 bp, synthetic construct
  misc_feature 1..80: note = Artificially Synthesized Probe
  source 1..80: mol_type = other DNA
gtcagctcctgataaaagggtaggttcagtcccattttttttctcttgcattctgcccttctgccataggatgaccctca

SEQ ID NO: 133446 - DNA, 80 bp, synthetic construct
  misc_feature 1..80: note = Artificially Synthesized Probe
  source 1..80: mol_type = other DNA
tctgaaagatttttgtaaattttattttttaattggcataactatatatattgatgaggtacagagatgttttgatacat

SEQ ID NO: 133447 - DNA, 80 bp, synthetic construct
  misc_feature 1..80: note = Artificially Synthesized Probe
  source 1..80: mol_type = other DNA
ttattcctcctatctagcgtaattttgtgtcctttaacaagtattacccatatatcctttccccctacccttcccagctt

SEQ ID NO: 133448 - DNA, 80 bp, synthetic construct
  misc_feature 1..80: note = Artificially Synthesized Probe
  source 1..80: mol_type = other DNA
tcattcttttttatggctgaatagtattccattgcatataaataccacattttctttatccattcatctgttgttgaata

SEQ ID NO: 133449 - DNA, 80 bp, synthetic construct; identical to SEQ ID NO: 42235
  misc_feature 1..80: note = Artificially Synthesized Probe
  source 1..80: mol_type = other DNA

SEQ ID NO: 133450 - DNA, 80 bp, synthetic construct
  misc_feature 1..80: note = Artificially Synthesized Probe
  source 1..80: mol_type = other DNA
gaagaactacatttaccgaaacaagagcagactgaatgaacaagctcaaaaagcaaagagaaatattaattatggtgaca

SEQ ID NO: 133451 - DNA, 80 bp, synthetic construct
  misc_feature 1..80: note = Artificially Synthesized Probe
  source 1..80: mol_type = other DNA
ctatcacaagctgctatgttactggcagatggaaaagcagatggaacatttttcatagccttttctactcatggagtcca

SEQ ID NO: 133452 - DNA, 80 bp, synthetic construct
  misc_feature 1..80: note = Artificially Synthesized Probe
  source 1..80: mol_type = other DNA
tcttagcaaaatttctaaaattgacagcaaaaaatgagaagagaggaaaaaagtgaaacaggcgattttaagagcctaaa

SEQ ID NO: 133453 - DNA, 80 bp, synthetic construct; identical to SEQ ID NO: 42236
  misc_feature 1..80: note = Artificially Synthesized Probe
  source 1..80: mol_type = other DNA

SEQ ID NO: 133454 - DNA, 80 bp, synthetic construct; identical to SEQ ID NO: 42180
  misc_feature 1..80: note = Artificially Synthesized Probe
  source 1..80: mol_type = other DNA

SEQ ID NO: 133455 - DNA, 80 bp, synthetic construct
  misc_feature 1..80: note = Artificially Synthesized Probe
  source 1..80: mol_type = other DNA
aattctggaacaaccaataaatacaaaacagaggagaaaccaagcaggaaaagaggggaagtagaagaaagatgtttaag

SEQ ID NO: 133456 - DNA, 80 bp, synthetic construct
  misc_feature 1..80: note = Artificially Synthesized Probe
  source 1..80: mol_type = other DNA
tttttccttcacagtttctcctcaggagcaatcagattgtcatttccccttaccttcaagacctactaataatcctacaa

SEQ ID NO: 133457 - DNA, 80 bp, synthetic construct; identical to SEQ ID NO: 42237
  misc_feature 1..80: note = Artificially Synthesized Probe
  source 1..80: mol_type = other DNA

SEQ ID NO: 133458 - DNA, 80 bp, synthetic construct
  misc_feature 1..80: note = Artificially Synthesized Probe
  source 1..80: mol_type = other DNA
taaaatattccagtgctttttctatgtagtctacggcttttccatcaagataatcaactagagctgcttttgccatcata

SEQ ID NO: 133459 - DNA, 80 bp, synthetic construct
  misc_feature 1..80: note = Artificially Synthesized Probe
  source 1..80: mol_type = other DNA
gcatgatcctacattcactcaataagaaattcaaatggaagaattctgttggagtaaacatgcactagaagttataaaaa

SEQ ID NO: 133460 - DNA, 80 bp, synthetic construct
  misc_feature 1..80: note = Artificially Synthesized Probe
  source 1..80: mol_type = other DNA
tctgtatagcaagctatactataagaattaaatgaaatagtgattacctaaagttcctagtaaagatttcttaaatgtga

SEQ ID NO: 133461 - DNA, 80 bp, synthetic construct; identical to SEQ ID NO: 42238
  misc_feature 1..80: note = Artificially Synthesized Probe
  source 1..80: mol_type = other DNA

SEQ ID NO: 133462 - DNA, 80 bp, synthetic construct
  misc_feature 1..80: note = Artificially Synthesized Probe
  source 1..80: mol_type = other DNA
aaatttaatgagcttgtataacttacaaagtaattaaaggtattaagatattctggagacatgatgaattaattatcaaa

SEQ ID NO: 133463 - DNA, 80 bp, synthetic construct
  misc_feature 1..80: note = Artificially Synthesized Probe
  source 1..80: mol_type = other DNA
aggttcatatggatgcttgctgttgactaaagaagtccttttcaagttattcaatacatttaggcaggaaatctactcaa

SEQ ID NO: 133464 - DNA, 80 bp, synthetic construct
  misc_feature 1..80: note = Artificially Synthesized Probe
  source 1..80: mol_type = other DNA
tatatttgcctaggatttgctgtattgctgcaaccttaaacacactgtatatggattctgggttcagctcactggctttt

SEQ ID NO: 133465 - DNA, 80 bp, synthetic construct
  misc_feature 1..80: note = Artificially Synthesized Probe
  source 1..80: mol_type = other DNA
atcaaagataaaacattttaaataaaatcaatgcctcaaacattttaaataaaatcaatgccttacgtcaataagctcat

SEQ ID NO: 133466 - DNA, 80 bp, synthetic construct
  misc_feature 1..80: note = Artificially Synthesized Probe
  source 1..80: mol_type = other DNA
ctgaaaggaaaatataaaataaataattcaagtaaacatatatatctgtggctccttctacttataaaagtgctatttaa

SEQ ID NO: 133467 - DNA, 80 bp, synthetic construct; identical to SEQ ID NO: 42239
  misc_feature 1..80: note = Artificially Synthesized Probe
  source 1..80: mol_type = other DNA

SEQ ID NO: 133468 - DNA, 80 bp, synthetic construct
  misc_feature 1..80: note = Artificially Synthesized Probe
  source 1..80: mol_type = other DNA
atttaagtactgttcaaatcaaatgactcaaattgatcatatatgagctgctcccaatgccctttaagctgccaaatgtc

SEQ ID NO: 133469 - DNA, 80 bp, synthetic construct
  misc_feature 1..80: note = Artificially Synthesized Probe
  source 1..80: mol_type = other DNA
tggctatctcctcaacaacaggacaccatttaatccatctctgcaattccactgccctgcaaacaataaacaccaatcaa

SEQ ID NO: 133470 - DNA, 80 bp, synthetic construct
  misc_feature 1..80: note = Artificially Synthesized Probe
  source 1..80: mol_type = other DNA
gtatagtcctcgcctaagccaggcccattttgccgttccagcacttgccttttgagttactgttgttaggatagctaaag

SEQ ID NO: 133471 - DNA, 80 bp, synthetic construct
  misc_feature 1..80: note = Artificially Synthesized Probe
  source 1..80: mol_type = other DNA
tagtaatttaatatctgccaatggaaaaaaacttcacttacagaggcaaaaatatttatattgcacctatagaaaaaaaa

SEQ ID NO: 133472 - DNA, 80 bp, synthetic construct; identical to SEQ ID NO: 42240
  misc_feature 1..80: note = Artificially Synthesized Probe
  source 1..80: mol_type = other DNA

SEQ ID NO: 133473 - DNA, 80 bp, synthetic construct
  misc_feature 1..80: note = Artificially Synthesized Probe
  source 1..80: mol_type = other DNA
tgccaaaaaatcctttgatgtaagatttaaaacagacaggaaagctgtccctcactgcttatagaaagtaaaaggaaata

SEQ ID NO: 133474 - DNA, 80 bp, synthetic construct
  misc_feature 1..80: note = Artificially Synthesized Probe
  source 1..80: mol_type = other DNA
tgaaaattaccttaaaagtattgtttacaagagataattatgtctcgttttctacaacacatgcttttcaaaaagtaact

SEQ ID NO: 133475 - DNA, 80 bp, synthetic construct
  misc_feature 1..80: note = Artificially Synthesized Probe
  source 1..80: mol_type = other DNA
aattgaattgtagcacttgctttaccttcagaaagtgggtaagagcctttgttttatcttttcttgtctcttcacccatg

SEQ ID NO: 133476 - DNA, 80 bp, synthetic construct
  misc_feature 1..80: note = Artificially Synthesized Probe
  source 1..80: mol_type = other DNA
atatttcctatactaatctcacacacacattatctttctcatatttttgcagatgtagtgtctgattatgattttttaat

SEQ ID NO: 133477 - DNA, 80 bp, synthetic construct; identical to SEQ ID NO: 42241
  misc_feature 1..80: note = Artificially Synthesized Probe
  source 1..80: mol_type = other DNA

SEQ ID NO: 133478 - DNA, 80 bp, synthetic construct
  misc_feature 1..80: note = Artificially Synthesized Probe
  source 1..80: mol_type = other DNA
tagatttttttttttattttttgagtccgagtcttgctctgtcatccaggctggagtacagtggaatggtcctggctcac

SEQ ID NO: 133479 - DNA, 80 bp, synthetic construct
  misc_feature 1..80: note = Artificially Synthesized Probe
  source 1..80: mol_type = other DNA
gagatcacctgccttggcctcccaaagtactgagattacaggtgtgagccaccacgcccggccaagatcagctaattaga

SEQ ID NO: 133480 - DNA, 80 bp, synthetic construct
  misc_feature 1..80: note = Artificially Synthesized Probe
  source 1..80: mol_type = other DNA
gatgtaaatggttctatgagcaatttatatatccttaccatttttctgcttgtagatagtcctttttggtgaaatgaatc

SEQ ID NO: 133481 - DNA, 80 bp, synthetic construct; identical to SEQ ID NO: 42242
  misc_feature 1..80: note = Artificially Synthesized Probe
  source 1..80: mol_type = other DNA

SEQ ID NO: 133482 - DNA, 80 bp, synthetic construct
  misc_feature 1..80: note = Artificially Synthesized Probe
  source 1..80: mol_type = other DNA
ttattaaggaaaatctcatatacataaaaaaattacagaaactagtataataaacccacatgtacccatcatccagctac

SEQ ID NO: 133483 - DNA, 80 bp, synthetic construct
  misc_feature 1..80: note = Artificially Synthesized Probe
  source 1..80: mol_type = other DNA
ccacattaccattatcatacctaaacaaaaacaacatccttaacactatcaaatttctcagttgtctcatattttaacaa

SEQ ID NO: 133484 - DNA, 80 bp, synthetic construct; identical to SEQ ID NO: 42243
  misc_feature 1..80: note = Artificially Synthesized Probe
  source 1..80: mol_type = other DNA

SEQ ID NO: 133485 - DNA, 80 bp, synthetic construct
  misc_feature 1..80: note = Artificially Synthesized Probe
  source 1..80: mol_type = other DNA
ctagagtgcaatggtctgatcttgactcactgcaacctctgctttctggcttcaagcgattctcctgcctcagcctccca

SEQ ID NO: 133486 - DNA, 80 bp, synthetic construct
  misc_feature 1..80: note = Artificially Synthesized Probe
  source 1..80: mol_type = other DNA
gcctgattgcctttgtgtgatgttagtagccattaacccttgatgcctagatctattaattcactggggattgcaaaatg

SEQ ID NO: 133487 - DNA, 80 bp, synthetic construct
  misc_feature 1..80: note = Artificially Synthesized Probe
  source 1..80: mol_type = other DNA
ttcttcatagttgggttcttagcatccccccaaacatttgttttcttgaggacatttgctgagttttctgaatcatcatg

SEQ ID NO: 133488 - DNA, 80 bp, synthetic construct
  misc_feature 1..80: note = Artificially Synthesized Probe
  source 1..80: mol_type = other DNA
gttatcctcattccaaagagaacagagagacagtcgctattttataatctactttgagtgctctacctccaatctttttg

SEQ ID NO: 133489 - DNA, 80 bp, synthetic construct; identical to SEQ ID NO: 42244
  misc_feature 1..80: note = Artificially Synthesized Probe
  source 1..80: mol_type = other DNA

SEQ ID NO: 133490 - DNA, 80 bp, synthetic construct
  misc_feature 1..80: note = Artificially Synthesized Probe
  source 1..80: mol_type = other DNA
tatgaaatacaaagccctttgaaatacataaaactgatttaaaaactcaattttaatttagaccagtaatagtctttacc

SEQ ID NO: 133491 - DNA, 80 bp, synthetic construct
  misc_feature 1..80: note = Artificially Synthesized Probe
  source 1..80: mol_type = other DNA
catgaagctaacagtgtccttaattattcttgtcaaatctgcagaacacttcctgaaggaaaaaatttggaatctcaaat

SEQ ID NO: 133492 - DNA, 80 bp, synthetic construct
  misc_feature 1..80: note = Artificially Synthesized Probe
  source 1..80: mol_type = other DNA
aagtgcagatgtggtgaattcatacctctaacacaaaatccatataagtaaattttgtggtaggcagagaatggttgttg

SEQ ID NO: 133493 - DNA, 80 bp, synthetic construct; identical to SEQ ID NO: 42245
  misc_feature 1..80: note = Artificially Synthesized Probe
  source 1..80: mol_type = other DNA

SEQ ID NO: 133494 - DNA, 80 bp, synthetic construct
  misc_feature 1..80: note = Artificially Synthesized Probe
  source 1..80: mol_type = other DNA
gaataactcaaagctaaatataaattcttccctgacttccttatggaaagacctgaatttaaaacagaacatatctgaat

SEQ ID NO: 133495 - DNA, 80 bp, synthetic construct
  misc_feature 1..80: note = Artificially Synthesized Probe
  source 1..80: mol_type = other DNA
taagaaattaaggatactggaaggggaaagcagctgaattagaatggaccaaggtgaactgtttcttagttacagggagc

SEQ ID NO: 133496 - DNA, 80 bp, synthetic construct
  misc_feature 1..80: note = Artificially Synthesized Probe
  source 1..80: mol_type = other DNA
ttgttacaaagacagaggacctccacacccaagcctaaactgactatgtcaatattccaaatgcaggaaaattttgctaa

SEQ ID NO: 133497 - DNA, 80 bp, synthetic construct
  misc_feature 1..80: note = Artificially Synthesized Probe
  source 1..80: mol_type = other DNA
tggtcacccttatatgtcaacccaaaaagtatcaaaaataccttgactgcatgaaagaacagcttctttaggtctatgca

SEQ ID NO: 133498 - DNA, 80 bp, synthetic construct; identical to SEQ ID NO: 42246
  misc_feature 1..80: note = Artificially Synthesized Probe
  source 1..80: mol_type = other DNA

SEQ ID NO: 133499 - DNA, 80 bp, synthetic construct
  misc_feature 1..80: note = Artificially Synthesized Probe
  source 1..80: mol_type = other DNA
aggctgatttacagctgtgttctaattttttctttcctaatttactaacatctatgactccaaaacttctgtactgctaa

SEQ ID NO: 133500 - DNA, 80 bp, synthetic construct
  misc_feature 1..80: note = Artificially Synthesized Probe
  source 1..80: mol_type = other DNA
tgtcaggatactgtgcaaactccttaccaagtcttgctaggcccttctacaatctcacttcttgtcccctcctgtacata

SEQ ID NO: 133501 - DNA, 80 bp, synthetic construct
  misc_feature 1..80: note = Artificially Synthesized Probe
  source 1..80: mol_type = other DNA
aatgtaggttcttccagaaacatcatacctagtaagactaagttaaagcctaagttcctaatgcatatatatctacatgt

SEQ ID NO: 133502 - DNA, 80 bp, synthetic construct; identical to SEQ ID NO: 42247
  misc_feature 1..80: note = Artificially Synthesized Probe
  source 1..80: mol_type = other DNA

SEQ ID NO: 133503 - DNA, 80 bp, synthetic construct
  misc_feature 1..80: note = Artificially Synthesized Probe
  source 1..80: mol_type = other DNA
cctggaccactttttgaatccatttccactaatctacaacaatactgctgcccctcatcagtaagatttcctggaattaa

SEQ ID NO: 133504 - DNA, 80 bp, synthetic construct
  misc_feature 1..80: note = Artificially Synthesized Probe
  source 1..80: mol_type = other DNA
tttaatttaaataattatgatttttcatcttcttaaatactggaagtagaaaccactttaggatttcagacaagaaacct

SEQ ID NO: 133505 - DNA, 80 bp, synthetic construct
  misc_feature 1..80: note = Artificially Synthesized Probe
  source 1..80: mol_type = other DNA
tcttccagcatccaaggatcacaagataggcgggttactcatcaggacactgcacaaagacttagtcacattcctcttaa

SEQ ID NO: 133506 - DNA, 80 bp, synthetic construct
  misc_feature 1..80: note = Artificially Synthesized Probe
  source 1..80: mol_type = other DNA
tatttccattttccccaatctcaatcccacaaaagcatcaaaacaaacaaaaaattgtaatttctgttttagaataaatt

SEQ ID NO: 133507 - DNA, 80 bp, synthetic construct; identical to SEQ ID NO: 42248
  misc_feature 1..80: note = Artificially Synthesized Probe
  source 1..80: mol_type = other DNA

SEQ ID NO: 133508 - DNA, 80 bp, synthetic construct
  misc_feature 1..80: note = Artificially Synthesized Probe
  source 1..80: mol_type = other DNA
tggaagaaatactactttgattagtaagccagtgaaaaagacacaagcctgctactattatgcttccaggcatgaacttc

SEQ ID NO: 133509 - DNA, 80 bp, synthetic construct
  misc_feature 1..80: note = Artificially Synthesized Probe
  source 1..80: mol_type = other DNA
acttggaagacttgttaaaacacagtctgctgagccctatccctgaagtttatggttcagtaggtctgtttaagacctaa

SEQ ID NO: 133510 - DNA, 80 bp, synthetic construct; identical to SEQ ID NO: 42181
  misc_feature 1..80: note = Artificially Synthesized Probe
  source 1..80: mol_type = other DNA

SEQ ID NO: 133511 - DNA, 80 bp, synthetic construct; identical to SEQ ID NO: 42249
  misc_feature 1..80: note = Artificially Synthesized Probe
  source 1..80: mol_type = other DNA

SEQ ID NO: 133512 - DNA, 80 bp, synthetic construct
  misc_feature 1..80: note = Artificially Synthesized Probe
  source 1..80: mol_type = other DNA
catagaaacataatttatgacagactaccttgactacataaactgcctgtattacaggaaatatacctgggatgaaaata

SEQ ID NO: 133513 - DNA, 80 bp, synthetic construct
  misc_feature 1..80: note = Artificially Synthesized Probe
  source 1..80: mol_type = other DNA
ttcctttgctaaagcctgggagcataacaataaaaacaaaataagatctggggagactatgttcatgttcggccctgggt

SEQ ID NO: 133514 - DNA, 80 bp, synthetic construct
  misc_feature 1..80: note = Artificially Synthesized Probe
  source 1..80: mol_type = other DNA
tgagaatactagctaaataaataccttggtggaggacaaaaacagaggaaatagaattcattgcttttgaatcttattca

SEQ ID NO: 133515 - DNA, 80 bp, synthetic construct
  misc_feature 1..80: note = Artificially Synthesized Probe
  source 1..80: mol_type = other DNA
gtagagggtattctgaagaggtccgtgttggatgctgagtaataactatgaaattctgtttcttaaagtttactacaaaa

SEQ ID NO: 133516 - DNA, 80 bp, synthetic construct; identical to SEQ ID NO: 42250
  misc_feature 1..80: note = Artificially Synthesized Probe
  source 1..80: mol_type = other DNA

SEQ ID NO: 133517 - DNA, 80 bp, synthetic construct
  misc_feature 1..80: note = Artificially Synthesized Probe
  source 1..80: mol_type = other DNA
tgaaatacatttgttctcagtggaggagaacccagtgattaactgctgtgaagtagcaaattctgtacatactgaagtac

SEQ ID NO: 133518 - DNA, 80 bp, synthetic construct
  misc_feature 1..80: note = Artificially Synthesized Probe
  source 1..80: mol_type = other DNA
ttgaaatgtacccaaacctgaatttctcagttccacaaattcctgcaaccaacaattcagaagggaaagaactcttccct

SEQ ID NO: 133519 - DNA, 80 bp, synthetic construct
  misc_feature 1..80: note = Artificially Synthesized Probe
  source 1..80: mol_type = other DNA
ttaaaccaagacactttctaatcaatcagtataatcccttcactatgtctttatcagagcactttgtcaaccactgaatt

SEQ ID NO: 133520 - DNA, 80 bp, synthetic construct
  misc_feature 1..80: note = Artificially Synthesized Probe
  source 1..80: mol_type = other DNA
atgttaataaatagtgctggagttgctaatcagccatatggtcttaatcttccaccatccctattttgtgatgtgtcttt

SEQ ID NO: 133521 - DNA, 80 bp, synthetic construct
  misc_feature 1..80: note = Artificially Synthesized Probe
  source 1..80: mol_type = other DNA
gagaccagcctgatcaacatggagaaaccctgtctctactaaaaatacaaaaaaattagctgggtgtggtggtgaatggc

SEQ ID NO: 133522 - DNA, 80 bp, synthetic construct; identical to SEQ ID NO: 42251
  misc_feature 1..80: note = Artificially Synthesized Probe
  source 1..80: mol_type = other DNA

SEQ ID NO: 133523 - DNA, 80 bp, synthetic construct
  misc_feature 1..80: note = Artificially Synthesized Probe
  source 1..80: mol_type = other DNA
agcttcctatcaggaaaaaaaaaaaaaaatcacaagacttcctaagtatgctccttgtgcttgatgtacctcatcctcct

SEQ ID NO: 133524 - DNA, 80 bp, synthetic construct
  misc_feature 1..80: note = Artificially Synthesized Probe
  source 1..80: mol_type = other DNA
tgcacttagtccactttcctttgtatacctgctttttcctattctttccccatcactgtaatctaagctctaattcaatc

SEQ ID NO: 133525 - DNA, 80 bp, synthetic construct
  misc_feature 1..80: note = Artificially Synthesized Probe
  source 1..80: mol_type = other DNA
tgttgcttctcgtcagagtccaccttcttctctgacctcatcccttctcttccttcacttactccctttctctttttcat

SEQ ID NO: 133526 - DNA, 80 bp, synthetic construct; identical to SEQ ID NO: 42252
  misc_feature 1..80: note = Artificially Synthesized Probe
  source 1..80: mol_type = other DNA

SEQ ID NO: 133527 - DNA, 80 bp, synthetic construct
  misc_feature 1..80: note = Artificially Synthesized Probe
  source 1..80: mol_type = other DNA
ccaccttctatacaatctgtcctgcacaccatgttagtttaagactttatactccactcactatactttttatgttctct

SEQ ID NO: 133528 - DNA, 80 bp, synthetic construct
  misc_feature 1..80: note = Artificially Synthesized Probe
  source 1..80: mol_type = other DNA
gagtgcagtggcgctatctcggctcactgcaacctccgcctcccgggttcacgcgattctcctgcctcagcctcctgagt

SEQ ID NO: 133529 - DNA, 80 bp, synthetic construct; identical to SEQ ID NO: 42253
  misc_feature 1..80: note = Artificially Synthesized Probe
  source 1..80: mol_type = other DNA

SEQ ID NO: 133530 - DNA, 80 bp, synthetic construct
  misc_feature 1..80: note = Artificially Synthesized Probe
  source 1..80: mol_type = other DNA
agtgaaaaaaattaaatggattagtaaagctccacaataattgacaatcactaccacactggtgtacgtactaatatttc

SEQ ID NO: 133531 - DNA, 80 bp, synthetic construct
  misc_feature 1..80: note = Artificially Synthesized Probe
  source 1..80: mol_type = other DNA
gaaaaaccaatacagccaacctcttgttaactggtggaataccagccctggacacaagacttccacagctacaggttacc

SEQ ID NO: 133532 - DNA, 80 bp, synthetic construct
  misc_feature 1..80: note = Artificially Synthesized Probe
  source 1..80: mol_type = other DNA
ttttttacccatatgatctttaagtaattttcttcaaatttaagtacacttctttcaacataaacattgctatagaattt

SEQ ID NO: 133533 - DNA, 80 bp, synthetic construct
  misc_feature 1..80: note = Artificially Synthesized Probe
  source 1..80: mol_type = other DNA
tacagtattcataacagtgttcttatgacactgtgacataacatcaacactgaggcagctaaactttccaaaaatccttt

SEQ ID NO: 133534 - DNA, 80 bp, synthetic construct; identical to SEQ ID NO: 42254
  misc_feature 1..80: note = Artificially Synthesized Probe
  source 1..80: mol_type = other DNA

SEQ ID NO: 133535 - DNA, 80 bp, synthetic construct
  misc_feature 1..80: note = Artificially Synthesized Probe
  source 1..80: mol_type = other DNA
cttaaacatggtagacactaaaacattttttgattaataacatcactcacataatcacacacctctaggacacacactat

SEQ ID NO: 133536 - DNA, 80 bp, synthetic construct
  misc_feature 1..80: note = Artificially Synthesized Probe
  source 1..80: mol_type = other DNA
agtagtagtaaaatgtatttatgaacactttcctaattagaaatacatacaagtcacattagagatttaaaaaatcaact

SEQ ID NO: 133537 - DNA, 80 bp, synthetic construct
  misc_feature 1..80: note = Artificially Synthesized Probe
  source 1..80: mol_type = other DNA
tataagactctcttacacaaactacacgttcaattaactgcaaatgtattctacagtctaaccctgacaacttcaacgag

SEQ ID NO: 133538 - DNA, 80 bp, synthetic construct; identical to SEQ ID NO: 42255
  misc_feature 1..80: note = Artificially Synthesized Probe
  source 1..80: mol_type = other DNA

SEQ ID NO: 133539 - DNA, 80 bp, synthetic construct
  misc_feature 1..80: note = Artificially Synthesized Probe
  source 1..80: mol_type = other DNA
tattagctgactctgaagaacattccatcacttctcttatgcagtattaactggctttgaaggccaacaggccttctaaa

SEQ ID NO: 133540 - DNA, 80 bp, synthetic construct
  misc_feature 1..80: note = Artificially Synthesized Probe
  source 1..80: mol_type = other DNA
agtatggtataaagtctatgtaaataagtaaaattttgctgccctgataaagttaacaatcttacaaagaaggaacatac

SEQ ID NO: 133541 - DNA, 80 bp, synthetic construct
  misc_feature 1..80: note = Artificially Synthesized Probe
  source 1..80: mol_type = other DNA
taaaatcttaagtacaattaattctctgtcatggaggagggtgggatagaccatccaaaaagttattttacttattttga

SEQ ID NO: 133542 - DNA, 80 bp, synthetic construct; identical to SEQ ID NO: 42182
  misc_feature 1..80: note = Artificially Synthesized Probe
  source 1..80: mol_type = other DNA

SEQ ID NO: 133543 - DNA, 80 bp, synthetic construct; identical to SEQ ID NO: 42256
  misc_feature 1..80: note = Artificially Synthesized Probe
  source 1..80: mol_type = other DNA

SEQ ID NO: 133544 - DNA, 80 bp, synthetic construct
  misc_feature 1..80: note = Artificially Synthesized Probe
  source 1..80: mol_type = other DNA
tataataagacattaagttgacttttaaagttacaaataaaaaaaggagaatgatagacatattttccaaatgtggttca

SEQ ID NO: 133545 - DNA, 80 bp, synthetic construct
  misc_feature 1..80: note = Artificially Synthesized Probe
  source 1..80: mol_type = other DNA
aaacctcaaagtaattcagtactcttagttcagaagtgtaaagaaacacacctttaaaagtataacttcttagacaccat

SEQ ID NO: 133546 - DNA, 80 bp, synthetic construct
  misc_feature 1..80: note = Artificially Synthesized Probe
  source 1..80: mol_type = other DNA
catccagactccgtatgagactacaggccaataattctgactttatctagaagagcctctgtgaatttaaaattgtacat

SEQ ID NO: 133547 - DNA, 80 bp, synthetic construct
  misc_feature 1..80: note = Artificially Synthesized Probe
  source 1..80: mol_type = other DNA
gttggctaaggacatgaacagaaaattctcaaaagaagatatacaaatggctgacaaacatgaaaaaatgctcaacatca

SEQ ID NO: 133548 - DNA, 80 bp, synthetic construct; identical to SEQ ID NO: 42257
  misc_feature 1..80: note = Artificially Synthesized Probe
  source 1..80: mol_type = other DNA

SEQ ID NO: 133549 - DNA, 80 bp, synthetic construct
  misc_feature 1..80: note = Artificially Synthesized Probe
  source 1..80: mol_type = other DNA
tgtaatcccagctacttgtgaggctgaggcaggagaattgcttgaacctaggaggcagaggttgcagtgagccgagattg

SEQ ID NO: 133550 - DNA, 80 bp, synthetic construct
  misc_feature 1..80: note = Artificially Synthesized Probe
  source 1..80: mol_type = other DNA
gtttatagcggcacaagtcacaactgcaaaaatacagaactagcccaaatgcccatcaatcaatgagtggataaagaaat

SEQ ID NO: 133551 - DNA, 80 bp, synthetic construct
  misc_feature 1..80: note = Artificially Synthesized Probe
  source 1..80: mol_type = other DNA
tcccttactggatttctggaaccagttcttccaaagtagatacagatatataaataccccccaaagtttgttaaattggt

SEQ ID NO: 133552 - DNA, 80 bp, synthetic construct; identical to SEQ ID NO: 42258
  misc_feature 1..80: note = Artificially Synthesized Probe
  source 1..80: mol_type = other DNA

SEQ ID NO: 133553 - DNA, 80 bp, synthetic construct
  misc_feature 1..80: note = Artificially Synthesized Probe
  source 1..80: mol_type = other DNA
aacttatgaaaattaaaaattaaaaaaaaaactccataaaaagaaacaaacccaataaaaaatgagcaaagatctgaaca

SEQ ID NO: 133554 - DNA, 80 bp, synthetic construct
  misc_feature 1..80: note = Artificially Synthesized Probe
  source 1..80: mol_type = other DNA
gagtcaataccaattgctgagtttcattattctggtcctctgtactttcagccaggaactgagtcaattttctccatagt

SEQ ID NO: 133555 - DNA, 80 bp, synthetic construct
  misc_feature 1..80: note = Artificially Synthesized Probe
  source 1..80: mol_type = other DNA
caataaaaatgtaaaatctgcaaataaaaacatttttaatttgttaatatataaaaatagcaaaagcatagaaccccatc

SEQ ID NO: 133556 - DNA, 80 bp, synthetic construct
  misc_feature 1..80: note = Artificially Synthesized Probe
  source 1..80: mol_type = other DNA
ccatgcccagctaattttgtatttttagtagagacagggtttctccatgttggtctggctggtctcgaactcccgacctc

SEQ ID NO: 133557 - DNA, 80 bp, synthetic construct; identical to SEQ ID NO: 42259
  misc_feature 1..80: note = Artificially Synthesized Probe
  source 1..80: mol_type = other DNA

SEQ ID NO: 133558 - DNA, 80 bp, synthetic construct
  misc_feature 1..80: note = Artificially Synthesized Probe
  source 1..80: mol_type = other DNA
aaagaaaaggtttaagaaatattatcttctattatattgactgaaaataatgtcaaagttccaaaattagtcaatcctct

SEQ ID NO: 133559 - DNA, 80 bp, synthetic construct
  misc_feature 1..80: note = Artificially Synthesized Probe
  source 1..80: mol_type = other DNA
tcatacatttcttacctctcataaagatccaggagcttttggtaaacaccaggcaagtcatccttagcatttatgtgatt

SEQ ID NO: 133560 - DNA, 80 bp, synthetic construct; identical to SEQ ID NO: 42260
  misc_feature 1..80: note = Artificially Synthesized Probe
  source 1..80: mol_type = other DNA

SEQ ID NO: 133561 - DNA, 80 bp, synthetic construct
  misc_feature 1..80: note = Artificially Synthesized Probe
  source 1..80: mol_type = other DNA
tttattgtgatatcattgacatataaaaattgtatgtttttaaggtgtacaacttgatgttttgatatatgtattcactg

SEQ ID NO: 133562 - DNA, 80 bp, synthetic construct
  misc_feature 1..80: note = Artificially Synthesized Probe
  source 1..80: mol_type = other DNA
aaattgtcatttttgcattaaagaacgatcagatatcctaaaccactcagtccattataaaagcagcaatttctctaact

SEQ ID NO: 133563 - DNA, 80 bp, synthetic construct
  misc_feature 1..80: note = Artificially Synthesized Probe
  source 1..80: mol_type = other DNA
aagcaaagcttcaaggcctcagttgtagcctcttgaaccaaagatggccagtgatcattggaaatgttagcctataaaaa

SEQ ID NO: 133564 - DNA, 80 bp, synthetic construct
  misc_feature 1..80: note = Artificially Synthesized Probe
  source 1..80: mol_type = other DNA
cattaaggccactaagtaagaaaaaagaatttaacttgcactcaaagatagaaacattaacatttttatattattttatt

SEQ ID NO: 133565 - DNA, 80 bp, synthetic construct
  misc_feature 1..80: note = Artificially Synthesized Probe
  source 1..80: mol_type = other DNA
aacatcctttgcaccactttttttctaaactaacttttaggtttagaaaaccaataaatttaaattttttcttacatggg

SEQ ID NO: 133566 - DNA, 80 bp, synthetic construct; identical to SEQ ID NO: 42261
  misc_feature 1..80: note = Artificially Synthesized Probe
  source 1..80: mol_type = other DNA

SEQ ID NO: 133567 - DNA, 80 bp, synthetic construct
  misc_feature 1..80: note = Artificially Synthesized Probe
  source 1..80: mol_type = other DNA
caaacttcagaatgccatttaacctatctggtttcagtttcctcaggggaaggagttggactgtaggagtgaccataatg

SEQ ID NO: 133568 - DNA, 80 bp, synthetic construct
  misc_feature 1..80: note = Artificially Synthesized Probe
  source 1..80: mol_type = other DNA
gctgttctccatctcatttcacttaatccaactctcatattttccttcaccatgatagtttccccatattagacacatgg

SEQ ID NO: 133569 - DNA, 80 bp, synthetic construct
  misc_feature 1..80: note = Artificially Synthesized Probe
  source 1..80: mol_type = other DNA
taaaggtaaaataaaacagcttgaagcagttagcaagtatgttctagggaaagaaaaacaaaaccagtagccaaaatgaa

SEQ ID NO: 133570 - DNA, 80 bp, synthetic construct; identical to SEQ ID NO: 42262
  misc_feature 1..80: note = Artificially Synthesized Probe
  source 1..80: mol_type = other DNA

SEQ ID NO: 133571 - DNA, 80 bp, synthetic construct
  misc_feature 1..80: note = Artificially Synthesized Probe
  source 1..80: mol_type = other DNA
taccagtgagctttctttcaaaataatacataacatttttctttccaataaaatggccaatcttctctttgttcttcaga

SEQ ID NO: 133572 - DNA, 80 bp, synthetic construct
  misc_feature 1..80: note = Artificially Synthesized Probe
  source 1..80: mol_type = other DNA
tattaatgcttatgttcccaacaccaggtacaatggctggcacttaacagctgaacaaaatgccatactcaaccagcaat

SEQ ID NO: 133573 - DNA, 80 bp, synthetic construct
  misc_feature 1..80: note = Artificially Synthesized Probe
  source 1..80: mol_type = other DNA
tgaagggatactcataccatgtgataaagcgccacaggcagacaaggtgatgatcagacaaaaccacagcaaatgcaaca

SEQ ID NO: 133574 - DNA, 80 bp, synthetic construct
  misc_feature 1..80: note = Artificially Synthesized Probe
  source 1..80: mol_type = other DNA
ccattctcctgcctcagcctccggagtagctgggactacaggcgcccgccaccacacccggctaatttttttgtattttt

SEQ ID NO: 133575 - DNA, 80 bp, synthetic construct; identical to SEQ ID NO: 42263
  misc_feature 1..80: note = Artificially Synthesized Probe
  source 1..80: mol_type = other DNA

SEQ ID NO: 133576 - DNA, 80 bp, synthetic construct
  misc_feature 1..80: note = Artificially Synthesized Probe
  source 1..80: mol_type = other DNA
ggctccatcagtcaccaccagaaacctaaacctcacaagggtatcctttacctgtttactccttagactcatcctcatat

SEQ ID NO: 133577 - DNA, 80 bp, synthetic construct
  misc_feature 1..80: note = Artificially Synthesized Probe
  source 1..80: mol_type = other DNA
cttttaaccacaccaagttctgcctcaatgaaaacatggctaattcccctatacatcctacagattgcagatgacttctt

SEQ ID NO: 133578 - DNA, 80 bp, synthetic construct; identical to SEQ ID NO: 42264
  misc_feature 1..80: note = Artificially Synthesized Probe
  source 1..80: mol_type = other DNA

SEQ ID NO: 133579 - DNA, 80 bp, synthetic construct
  misc_feature 1..80: note = Artificially Synthesized Probe
  source 1..80: mol_type = other DNA
tggtttctctaattttttctatcctaaacgctttttccattgcctatcagcccacctctcatttctcattcctctttacc

SEQ ID NO: 133580 - DNA, 80 bp, synthetic construct
  misc_feature 1..80: note = Artificially Synthesized Probe
  source 1..80: mol_type = other DNA
cactaatttcactttaatagcttgaaacttcaaatgggcaatcactagggcctgctaatctttccaatccttactagcaa

SEQ ID NO: 133581 - DNA, 80 bp, synthetic construct
  misc_feature 1..80: note = Artificially Synthesized Probe
  source 1..80: mol_type = other DNA
cttatactttgccaagaaaatagaagccattagagaagaaagcttttcccaacaccaaatctataagcccaacactgtat

SEQ ID NO: 133582 - DNA, 80 bp, synthetic construct; identical to SEQ ID NO: 42265
  misc_feature 1..80: note = Artificially Synthesized Probe
  source 1..80: mol_type = other DNA

SEQ ID NO: 133583 - DNA, 80 bp, synthetic construct
  misc_feature 1..80: note = Artificially Synthesized Probe
  source 1..80: mol_type = other DNA
agtttggcagaggtagtttatcctgctaactagaggttaaaagtccaaccattctaatggttctactaaatggccttacc

SEQ ID NO: 133584 - DNA, 80 bp, synthetic construct
  misc_feature 1..80: note = Artificially Synthesized Probe
  source 1..80: mol_type = other DNA
tctttgtattctttgtttctgattgcatctctagcactttttagagcagtcttcacttccttgctggacattctgtcaag

SEQ ID NO: 133585 - DNA, 80 bp, synthetic construct
  misc_feature 1..80: note = Artificially Synthesized Probe
  source 1..80: mol_type = other DNA
tctgtactcaaatgtcacttcctcaatgaaaccttcctttgacatgctatttaacattttaatcttgccatccccctact

SEQ ID NO: 133586 - DNA, 80 bp, synthetic construct; identical to SEQ ID NO: 42183
  misc_feature 1..80: note = Artificially Synthesized Probe
  source 1..80: mol_type = other DNA

SEQ ID NO: 133587 - DNA, 80 bp, synthetic construct; identical to SEQ ID NO: 42266
  misc_feature 1..80: note = Artificially Synthesized Probe
  source 1..80: mol_type = other DNA

SEQ ID NO: 133588 - DNA, 80 bp, synthetic construct
  misc_feature 1..80: note = Artificially Synthesized Probe
  source 1..80: mol_type = other DNA
tccaactctcccactctatacaaagctagatccagtagaataagcccaagtcacagataaaacactaacacaaataattt

SEQ ID NO: 133589 - DNA, 80 bp, synthetic construct
  misc_feature 1..80: note = Artificially Synthesized Probe
  source 1..80: mol_type = other DNA
tggataatgcaaaagggttgtatactaatttcagccataaaaagatattttaattagtagagaaagtatttcttcattta

SEQ ID NO: 133590 - DNA, 80 bp, synthetic construct
  misc_feature 1..80: note = Artificially Synthesized Probe
  source 1..80: mol_type = other DNA
acaaagctggggtaaatattaagtatttataggcttcagatgctcaagggagtaaaatgtaccaaaaagatgaatcactg

SEQ ID NO: 133591 - DNA, 80 bp, synthetic construct
  misc_feature 1..80: note = Artificially Synthesized Probe
  source 1..80: mol_type = other DNA
ttatctacagctagaaccagattccctaaataggcagataagtaacttttttgcctagttacaataattatataatttaa

SEQ ID NO: 133592 - DNA, 80 bp, synthetic construct; identical to SEQ ID NO: 42267
  misc_feature 1..80: note = Artificially Synthesized Probe
  source 1..80: mol_type = other DNA

SEQ ID NO: 133593 - DNA, 80 bp, synthetic construct
  misc_feature 1..80: note = Artificially Synthesized Probe
  source 1..80: mol_type = other DNA
agggtatgtatacaaacaaggcaggaccaaccactactaaactacatgcagcccccaagctatttgctgtgcacgatata

SEQ ID NO: 133594 - DNA, 80 bp, synthetic construct
  misc_feature 1..80: note = Artificially Synthesized Probe
  source 1..80: mol_type = other DNA
gaagatgacaagacttaaaaatggagtgaagaaggaaaattgctctactcagaggcaaatgcattagcaaagtgacagaa

SEQ ID NO: 133595 - DNA, 80 bp, synthetic construct
  misc_feature 1..80: note = Artificially Synthesized Probe
  source 1..80: mol_type = other DNA
atcctgaaagtcaaacagacaagtgtgaagttaaatacagcagcaaataggaagccattagtaatttttaagtaggttgt

SEQ ID NO: 133596 - DNA, 80 bp, synthetic construct; identical to SEQ ID NO: 42268
  misc_feature 1..80: note = Artificially Synthesized Probe
  source 1..80: mol_type = other DNA

SEQ ID NO: 133597 - DNA, 80 bp, synthetic construct
  misc_feature 1..80: note = Artificially Synthesized Probe
  source 1..80: mol_type = other DNA
ctggtagtgataaatatagagttctacatttcaaaaattatctaaggagagaggaaaggctgaaataaagtattttaata

SEQ ID NO: 133598 - DNA, 80 bp, synthetic construct
  misc_feature 1..80: note = Artificially Synthesized Probe
  source 1..80: mol_type = other DNA
ccacttaaacccattttccttccgagggtaaaaacctactacccaaaatgattccacgtaaccccatactcctctatttt

SEQ ID NO: 133599 - DNA, 80 bp, synthetic construct
  misc_feature 1..80: note = Artificially Synthesized Probe
  source 1..80: mol_type = other DNA
tctttttttaaataagagtattcattttgtacgttttcactcaagtttttctactaccaacccaaaatatttttatccaa

SEQ ID NO: 133600 - DNA, 80 bp, synthetic construct
  misc_feature 1..80: note = Artificially Synthesized Probe
  source 1..80: mol_type = other DNA
gctcatacaaagattccacaaagctaaaacaacaataataataaatagtaatgataatgacaacggaagctaattacaga

SEQ ID NO: 133601 - DNA, 80 bp, synthetic construct; identical to SEQ ID NO: 42269
  misc_feature 1..80: note = Artificially Synthesized Probe
  source 1..80: mol_type = other DNA

SEQ ID NO: 133602 - DNA, 80 bp, synthetic construct
  misc_feature 1..80: note = Artificially Synthesized Probe
  source 1..80: mol_type = other DNA
tctttcccagagagacactattcttaatctccaaacttctgaattggtctaaactatattcctgggcctcagatgataaa

SEQ ID NO: 133603 - DNA, 80 bp, synthetic construct
  misc_feature 1..80: note = Artificially Synthesized Probe
  source 1..80: mol_type = other DNA
ttgctttgaatcaaggacatctacagacaactaagggtacttatttacacccaatttgcagcctaattatattagaatag

SEQ ID NO: 133604 - DNA, 80 bp, synthetic construct; identical to SEQ ID NO: 42270
  misc_feature 1..80: note = Artificially Synthesized Probe
  source 1..80: mol_type = other DNA

SEQ ID NO: 133605 - DNA, 80 bp, synthetic construct
  misc_feature 1..80: note = Artificially Synthesized Probe
  source 1..80: mol_type = other DNA
ctaccgaaatagaagtgtcactccaacagtagaaagtcttactggtaagaaaagaaagtatggtaatccaaacaatgttt

SEQ ID NO: 133606 - DNA, 80 bp, synthetic construct
  misc_feature 1..80: note = Artificially Synthesized Probe
  source 1..80: mol_type = other DNA
agcccctttactctgtcatatccacccaccaaggcttaccctagttgagagtgagcttaggaaatcaaatggatctagga

SEQ ID NO: 133607 - DNA, 80 bp, synthetic construct
  misc_feature 1..80: note = Artificially Synthesized Probe
  source 1..80: mol_type = other DNA
ctttgctacttgccattcctaaaacaactagtgtgataactcagtgttaaaaattttccctacacattcaaatccccaac

SEQ ID NO: 133608 - DNA, 80 bp, synthetic construct; identical to SEQ ID NO: 42271
  misc_feature 1..80: note = Artificially Synthesized Probe
  source 1..80: mol_type = other DNA

SEQ ID NO: 133609 - DNA, 80 bp, synthetic construct
  misc_feature 1..80: note = Artificially Synthesized Probe
  source 1..80: mol_type = other DNA
ctgactcagaaataacaaaggtaagtatttctgaagaaacagtaacaaactaaagtgatgaacactttactgaattatgt

SEQ ID NO: 133610 - DNA, 80 bp, synthetic construct
  misc_feature 1..80: note = Artificially Synthesized Probe
  source 1..80: mol_type = other DNA
cctacaacagggatcactccctcctccaaacctccaaactgagctactcaactgcaacttaacaaatattatttttatta

SEQ ID NO: 133611 - DNA, 80 bp, synthetic construct
  misc_feature 1..80: note = Artificially Synthesized Probe
  source 1..80: mol_type = other DNA
aaaaaaatgagtgactgagggaagtgtctcaatcagtagatgtttattgagccacactttgagcacacgcctggggaaaa

SEQ ID NO: 133612 - DNA, 80 bp, synthetic construct
  misc_feature 1..80: note = Artificially Synthesized Probe
  source 1..80: mol_type = other DNA
tactgattagcaaaaatgttgtacgttcacaaaagagtaatcaaaacaatgaggaaacctgaaattatgagaactagctg

SEQ ID NO: 133613 - DNA, 80 bp, synthetic construct; identical to SEQ ID NO: 42272
  misc_feature 1..80: note = Artificially Synthesized Probe
  source 1..80: mol_type = other DNA

SEQ ID NO: 133614 - DNA, 80 bp, synthetic construct
  misc_feature 1..80: note = Artificially Synthesized Probe
  source 1..80: mol_type = other DNA
agaaagaagaaaaagatgtattcttgtaagcctgtcatcagagtacatgtcctgtggaaacaaggctgtagagagtaagc

SEQ ID NO: 133615 - DNA, 80 bp, synthetic construct
  misc_feature 1..80: note = Artificially Synthesized Probe
  source 1..80: mol_type = other DNA
ttttatgagagagcccacttgtattaccttccgtgctgtattattatttcatgtatgcttggttttgcttccctgaaatc

SEQ ID NO: 133616 - DNA, 80 bp, synthetic construct
  misc_feature 1..80: note = Artificially Synthesized Probe
  source 1..80: mol_type = other DNA
ctccctagtagctgggattacaggcgcccgccaccacgcccagtattttgcgtatttttcgtagagacggggtttcacca

SEQ ID NO: 133617 - DNA, 80 bp, synthetic construct; identical to SEQ ID NO: 42273
  misc_feature 1..80: note = Artificially Synthesized Probe
  source 1..80: mol_type = other DNA

SEQ ID NO: 133618 - DNA, 80 bp, synthetic construct
  misc_feature 1..80: note = Artificially Synthesized Probe
  source 1..80: mol_type = other DNA
gcagatgctcagtaaatgcttagtataacgctcagcacctaagtgccatgtgagtattaaataaacaaatctgttcctta

SEQ ID NO: 133619 - DNA, 80 bp, synthetic construct
  misc_feature 1..80: note = Artificially Synthesized Probe
  source 1..80: mol_type = other DNA
tgggacagaaatctgcttcttccagaactctccaaaggaattcaacagtcaaaagagaccggtttttattctgcagcaaa

SEQ ID NO: 133620 - DNA, 80 bp, synthetic construct
  misc_feature 1..80: note = Artificially Synthesized Probe
  source 1..80: mol_type = other DNA
gagcaattatctctgagtgcagtataggcaatagcaatttgtataatcaagtaagaggaagctataatgaatgtgaaaat

SEQ ID NO: 133621 - DNA, 80 bp, synthetic construct
  misc_feature 1..80: note = Artificially Synthesized Probe
  source 1..80: mol_type = other DNA
atgggagcacagtaaatcctgactgcacggggtaagagaagcaataagatgagacaggctagagatttccctgggaaggt

SEQ ID NO: 133622 - DNA, 80 bp, synthetic construct; identical to SEQ ID NO: 42274
  misc_feature 1..80: note = Artificially Synthesized Probe
  source 1..80: mol_type = other DNA

SEQ ID NO: 133623 - DNA, 80 bp, synthetic construct
  misc_feature 1..80: note = Artificially Synthesized Probe
  source 1..80: mol_type = other DNA
aaacgccgaggctgcaatgagagcgcatgcgcctttcccaggactcattcacgtgactggaagtggctgggttctgattt

SEQ ID NO: 133624 - DNA, 80 bp, synthetic construct
  misc_feature 1..80: note = Artificially Synthesized Probe
  source 1..80: mol_type = other DNA
taacataaaactctcactggatgcttttaataatatactctctaaattctatgaaatcatataaaacactctgtaaagtt

SEQ ID NO: 133625 - DNA, 80 bp, synthetic construct; identical to SEQ ID NO: 42174
  misc_feature 1..80: note = Artificially Synthesized Probe
  source 1..80: mol_type = other DNA

SEQ ID NO: 133626 - DNA, 80 bp, synthetic construct; identical to SEQ ID NO: 42184
  misc_feature 1..80: note = Artificially Synthesized Probe
  source 1..80: mol_type = other DNA

SEQ ID NO: 133627 - DNA, 80 bp, synthetic construct
  misc_feature 1..80: note = Artificially Synthesized Probe
  source 1..80: mol_type = other DNA
ctgccaactcctgtggctaattgtagcttcaggaccctactgaaatactagaaatttgcatttaactggtgccattgtaa

SEQ ID NO: 133628 - DNA, 80 bp, synthetic construct
  misc_feature 1..80: note = Artificially Synthesized Probe
  source 1..80: mol_type = other DNA
gtcaaaaaagtgagtttttaatatgaaaattctgcttaggttaaaaattaaaaaaaaaagagcgagttttatacatccgc

SEQ ID NO: 133629 - DNA, 80 bp, synthetic construct
  misc_feature 1..80: note = Artificially Synthesized Probe
  source 1..80: mol_type = other DNA
tgcctgtaatcccagctactcaggaggctgaggcaggaagatcacttaagctcagaaggtgtaggctgcagcgagctatg

SEQ ID NO: 133630 - DNA, 80 bp, synthetic construct; identical to SEQ ID NO: 42286
  misc_feature 1..80: note = Artificially Synthesized Probe
  source 1..80: mol_type = other DNA

SEQ ID NO: 133631 - DNA, 80 bp, synthetic construct
  misc_feature 1..80: note = Artificially Synthesized Probe
  source 1..80: mol_type = other DNA
ttatataaaaagtagggctgggtgcagtggctcacacctgtaatcccagcactttgggaggccgaggtgggcagatcacg

SEQ ID NO: 133632 - DNA, 80 bp, synthetic construct
  misc_feature 1..80: note = Artificially Synthesized Probe
  source 1..80: mol_type = other DNA
agccgagatcgtgccattgtactccagcctcagtgacagagcaagactctgtctcaaaaacaaaaaaaaaaagaaaagaa

SEQ ID NO: 133633 - DNA, 80 bp, synthetic construct
  misc_feature 1..80: note = Artificially Synthesized Probe
  source 1..80: mol_type = other DNA
caacctcagcctccccagttcaagcgattcttctgcctcggcctccccggtagctgggattacaggtgcacaccaccaca

SEQ ID NO: 133634 - DNA, 80 bp, synthetic construct
  misc_feature 1..80: note = Artificially Synthesized Probe
  source 1..80: mol_type = other DNA
tccccatgttggccaggctggtctcgaactcctgacctcaggtgatctgcccattcggcctcccaaagtgctgggatgac

SEQ ID NO: 133635 - DNA, 80 bp, synthetic construct; identical to SEQ ID NO: 42287
  misc_feature 1..80: note = Artificially Synthesized Probe
  source 1..80: mol_type = other DNA

SEQ ID NO: 133636 - DNA, 80 bp, synthetic construct
  misc_feature 1..80: note = Artificially Synthesized Probe
  source 1..80: mol_type = other DNA
ctggcaaatgaacttggttgggagggcgtgcagggagatgaaccaatagagccggagttcttttgtccccttggaggcct

SEQ ID NO: 133637 - DNA, 80 bp, synthetic construct
  misc_feature 1..80: note = Artificially Synthesized Probe
  source 1..80: mol_type = other DNA
acccactgaaagaggcagaggaatccacttccaaactctaccttcatatatgccaaagaagagcaggggcgttccttccc

SEQ ID NO: 133638 - DNA, 80 bp, synthetic construct
  misc_feature 1..80: note = Artificially Synthesized Probe
  source 1..80: mol_type = other DNA
caccaagttcacgtgagatgggctacagctccctgtcgtgggctgggctctgggaggggagcaaggcaggaatgtgctta

SEQ ID NO: 133639 - DNA, 80 bp, synthetic construct; identical to SEQ ID NO: 42288
  misc_feature 1..80: note = Artificially Synthesized Probe
  source 1..80: mol_type = other DNA

SEQ ID NO: 133640 - DNA, 80 bp, synthetic construct
  misc_feature 1..80: note = Artificially Synthesized Probe
  source 1..80: mol_type = other DNA
tcttcctcccgcagagctcagagattgggcactttcctcagcctgatagagggaattgatgaagccgtaatgggcatctc

SEQ ID NO: 133641 - DNA, 80 bp, synthetic construct
  misc_feature 1..80: note = Artificially Synthesized Probe
  source 1..80: mol_type = other DNA
taccccttcccaggcccttagggatccgggtgccagactattaacctctgttcccagtgacaaaagtaaatccatttaca

SEQ ID NO: 133642 - DNA, 80 bp, synthetic construct
  misc_feature 1..80: note = Artificially Synthesized Probe
  source 1..80: mol_type = other DNA
cttgagcccaggagtttgagaccagcctgagcaacacagcgagacccccgcctctacaaaaaataaaaaatttagctggg

SEQ ID NO: 133643 - DNA, 80 bp, synthetic construct; identical to SEQ ID NO: 42289
  misc_feature 1..80: note = Artificially Synthesized Probe
  source 1..80: mol_type = other DNA

SEQ ID NO: 133644 - DNA, 80 bp, synthetic construct
  misc_feature 1..80: note = Artificially Synthesized Probe
  source 1..80: mol_type = other DNA
gtggtggcgcgtgcctgtaatcccagctacttgggaggctgagacaggagaatcccttgaacctgggaggcggaggttgc

SEQ ID NO: 133645 - DNA, 80 bp, synthetic construct
  misc_feature 1..80: note = Artificially Synthesized Probe
  source 1..80: mol_type = other DNA
acggggtggtcacagcatctgggcaagtcctgggtccttcccacagtggcggggcccttctctcacggggtcctggagca

SEQ ID NO: 133646 - DNA, 80 bp, synthetic construct
  misc_feature 1..80: note = Artificially Synthesized Probe
  source 1..80: mol_type = other DNA
ggagacgcaccacagttttacaggctcctcagagacttgtgcaccctatagtcagtgaagcatagagacggggtagggag

SEQ ID NO: 133647 - DNA, 80 bp, synthetic construct
  misc_feature 1..80: note = Artificially Synthesized Probe
  source 1..80: mol_type = other DNA
taaaagcctggtatcctcatccaggccagtgcccagattactgtcccagaaaatgtctgtaagacaggaagtcattagcc

SEQ ID NO: 133648 - DNA, 80 bp, synthetic construct; identical to SEQ ID NO: 42290
  misc_feature 1..80: note = Artificially Synthesized Probe
  source 1..80: mol_type = other DNA

SEQ ID NO: 133649 - DNA, 80 bp, synthetic construct
  misc_feature 1..80: note = Artificially Synthesized Probe
  source 1..80: mol_type = other DNA
caggctgaaagaatacaggtttccttgattaaacagctaactttttctcaaagatctaccaaaatgggctggggagggag

SEQ ID NO: 133650 - DNA, 80 bp, synthetic construct
  misc_feature 1..80: note = Artificially Synthesized Probe
  source 1..80: mol_type = other DNA
ggcatctgaggcccagcaagagtgggctcttgagcaaagtcccctgtcgggatatggtggggcctggcatggaatcagat

SEQ ID NO: 133651 - DNA, 80 bp, synthetic construct; identical to SEQ ID NO: 42291
  misc_feature 1..80: note = Artificially Synthesized Probe
  source 1..80: mol_type = other DNA

SEQ ID NO: 133652 - DNA, 80 bp, synthetic construct
  misc_feature 1..80: note = Artificially Synthesized Probe
  source 1..80: mol_type = other DNA
atcacaggcatgcgccaccacacccagctaattttgtatttttagtagagataggatttcaccatgttggccaggctggt

SEQ ID NO: 133653 - DNA, 80 bp, synthetic construct
  misc_feature 1..80: note = Artificially Synthesized Probe
  source 1..80: mol_type = other DNA
ctgcaagctccgcctcccgggttcacgccattctcctgcctcagcctcccgagtagctgggactacaggcactgccacta

SEQ ID NO: 133654 - DNA, 80 bp, synthetic construct
  misc_feature 1..80: note = Artificially Synthesized Probe
  source 1..80: mol_type = other DNA
gagacagaatcttaactctgtcacccaggctggggtgcagtggtgtggtctccactcactgcaacctctacctcccgggt

SEQ ID NO: 133655 - DNA, 80 bp, synthetic construct; identical to SEQ ID NO: 42292
  misc_feature 1..80: note = Artificially Synthesized Probe
  source 1..80: mol_type = other DNA

SEQ ID NO: 133656 - DNA, 80 bp, synthetic construct
  misc_feature 1..80: note = Artificially Synthesized Probe
  source 1..80: mol_type = other DNA
agagtctcgcatgttgcccaggctggtctcaaattcctgggctcaagcaatctgcccaccttgacctcccaaagggctgg

SEQ ID NO: 133657 - DNA, 80 bp, synthetic construct
  misc_feature 1..80: note = Artificially Synthesized Probe
  source 1..80: mol_type = other DNA
agggcctagggtcccacagctggcctgtggcacaggtaagattaacctctaggacttctgatttctaattcggagttttt

SEQ ID NO: 133658 - DNA, 80 bp, synthetic construct
  misc_feature 1..80: note = Artificially Synthesized Probe
  source 1..80: mol_type = other DNA
gaaaggaaaaaagctctacaaaagggaaatttcaaaatagggcttcagcaggggcccaggtggagtgagtagttttgata

SEQ ID NO: 133659 - DNA, 80 bp, synthetic construct
  misc_feature 1..80: note = Artificially Synthesized Probe
  source 1..80: mol_type = other DNA
accacgcccagcctcttaattttcgtggttgtttcactgaagcctttcacttcaaagaggctcaatataagcctctttgg

SEQ ID NO: 133660 - DNA, 80 bp, synthetic construct
  misc_feature 1..80: note = Artificially Synthesized Probe
  source 1..80: mol_type = other DNA
tctcgaattcctgggttcaagctatcctcctgcctctgcctccctaagagctgggattacaggcgtgagccaccatacct

SEQ ID NO: 133661 - DNA, 80 bp, synthetic construct
  misc_feature 1..80: note = Artificially Synthesized Probe
  source 1..80: mol_type = other DNA
accatcctagccaacatggtgaaacctgtctctactaaaaatacaaaaattagctgggcgtggtggcgcgcacttgtagt

SEQ ID NO: 133662 - DNA, 80 bp, synthetic construct; identical to SEQ ID NO: 42293
  misc_feature 1..80: note = Artificially Synthesized Probe
  source 1..80: mol_type = other DNA

SEQ ID NO: 133663 - DNA, 80 bp, synthetic construct
  misc_feature 1..80: note = Artificially Synthesized Probe
  source 1..80: mol_type = other DNA
atcacctcaggtcaggagttcgagactagcctgggcaacatggcgaaaccctgtctctacttaaaaatacaaaaattagc

SEQ ID NO: 133664 - DNA, 80 bp, synthetic construct
  misc_feature 1..80: note = Artificially Synthesized Probe
  source 1..80: mol_type = other DNA
aaaaacattaaagagacagggcctcatggtcacccagactggagtgcattggcgtgatcgtggctcactgtaccctcaaa

SEQ ID NO: 133665 - DNA, 80 bp, synthetic construct
  misc_feature 1..80: note = Artificially Synthesized Probe
  source 1..80: mol_type = other DNA
gtgggtggatcacaagttcaggagatccagaccagcctggccaacatggtgaaactctgtcagtactaaaaatacaaaaa

SEQ ID NO: 133666 - DNA, 80 bp, synthetic construct; identical to SEQ ID NO: 42294
  misc_feature 1..80: note = Artificially Synthesized Probe
  source 1..80: mol_type = other DNA

SEQ ID NO: 133667 - DNA, 80 bp, synthetic construct
  misc_feature 1..80: note = Artificially Synthesized Probe
  source 1..80: mol_type = other DNA
tggtgattctttgagctttgggagttttgtaaagcacctttgttaaaagaatgggaagtatcccaccacacacacactcc

SEQ ID NO: 133668 - DNA, 80 bp, synthetic construct
  misc_feature 1..80: note = Artificially Synthesized Probe
  source 1..80: mol_type = other DNA
acaaaaggtacccagatgctgagtgctaatcatgtggacttctggaaaagggtggatttctgtgataagcttattaccaa

SEQ ID NO: 133669 - DNA, 80 bp, synthetic construct
  misc_feature 1..80: note = Artificially Synthesized Probe
  source 1..80: mol_type = other DNA
agggtgggagggttgctttcctgcccctccctcataggtgagatgggaagatttcatgggctttgggccagaaacctgtt

SEQ ID NO: 133670 - DNA, 80 bp, synthetic construct
  misc_feature 1..80: note = Artificially Synthesized Probe
  source 1..80: mol_type = other DNA
tggtacgatctcggctcactgcaagctctgcctcccaggttcacaccattctcctgcctcagcctcccgagtagctggga

SEQ ID NO: 133671 - DNA, 80 bp, synthetic construct; identical to SEQ ID NO: 42295
  misc_feature 1..80: note = Artificially Synthesized Probe
  source 1..80: mol_type = other DNA

SEQ ID NO: 133672 - DNA, 80 bp, synthetic construct
  misc_feature 1..80: note = Artificially Synthesized Probe
  source 1..80: mol_type = other DNA
aagtcaggacatcacagacaagacgctgctggaagtccatctccaatatatcagtttatgccaaaatagttattattgac

SEQ ID NO: 133673 - DNA, 80 bp, synthetic construct
  misc_feature 1..80: note = Artificially Synthesized Probe
  source 1..80: mol_type = other DNA
caggtttttttttgtttttttttttgtttttgagacagagtttcgctcctgttgcccaggctggagtgcaatggcgcgat

SEQ ID NO: 133674 - DNA, 80 bp, synthetic construct; identical to SEQ ID NO: 42296
  misc_feature 1..80: note = Artificially Synthesized Probe
  source 1..80: mol_type = other DNA

SEQ ID NO: 133675 - DNA, 80 bp, synthetic construct; identical to SEQ ID NO: 42277
  misc_feature 1..80: note = Artificially Synthesized Probe
  source 1..80: mol_type = other DNA

SEQ ID NO: 133676 - DNA, 80 bp, synthetic construct
  misc_feature 1..80: note = Artificially Synthesized Probe
  source 1..80: mol_type = other DNA
tgtatttttagtagaaacagggtttcaccatgtatgtgggccaggctagtctcaaacttctgacctcaggtgatccgccc

SEQ ID NO: 133677 - DNA, 80 bp, synthetic construct
  misc_feature 1..80: note = Artificially Synthesized Probe
  source 1..80: mol_type = other DNA
actgcacgatgatccagtggatctcgtcgaacagcttgctggtcacctccttgccgcgggtgctctccaggtagagccgc

SEQ ID NO: 133678 - DNA, 80 bp, synthetic construct
  misc_feature 1..80: note = Artificially Synthesized Probe
  source 1..80: mol_type = other DNA
gcaacaaggcaaacatccagacccctgccccagggagatctgggccggctattttccgttttgttttaagacagggtctc

SEQ ID NO: 133679 - DNA, 80 bp, synthetic construct
  misc_feature 1..80: note = Artificially Synthesized Probe
  source 1..80: mol_type = other DNA
ggtctcactatgttgcccagactggtcttgaactcctggcctcaagggatcctcctgccttggcctcccaaagtgttggg

SEQ ID NO: 133680 - DNA, 80 bp, synthetic construct; identical to SEQ ID NO: 42297
  misc_feature 1..80: note = Artificially Synthesized Probe
  source 1..80: mol_type = other DNA

SEQ ID NO: 133681 - DNA, 80 bp, synthetic construct
  misc_feature 1..80: note = Artificially Synthesized Probe
  source 1..80: mol_type = other DNA
cccctgctccctccaggacagctctgcagggccacccctgctccacagcgccccacggtgggcagaggcctccactgcag

SEQ ID NO: 133682 - DNA, 80 bp, synthetic construct
  misc_feature 1..80: note = Artificially Synthesized Probe
  source 1..80: mol_type = other DNA
agaagctgttacttggccaagctttcctcctgggctgggatggggctgggcctccagcccaaatgttctgatgccacttc

SEQ ID NO: 133683 - DNA, 80 bp, synthetic construct; identical to SEQ ID NO: 42298
  misc_feature 1..80: note = Artificially Synthesized Probe
  source 1..80: mol_type = other DNA

SEQ ID NO: 133684 - DNA, 80 bp, synthetic construct
  misc_feature 1..80: note = Artificially Synthesized Probe
  source 1..80: mol_type = other DNA
tcggggggctgaggcagaagaatcgcttgaacccggaaggcagaggttgcagtgagccgagatcctgccactgtactcca

SEQ ID NO: 133685 - DNA, 80 bp, synthetic construct
  misc_feature 1..80: note = Artificially Synthesized Probe
  source 1..80: mol_type = other DNA
ggtaagcagtggccatcgtcatcccaagaccagcaaggtgaacccctggctcctgttggcagctgtggggcccagagggc

SEQ ID NO: 133686 - DNA, 80 bp, synthetic construct
  misc_feature 1..80: note = Artificially Synthesized Probe
  source 1..80: mol_type = other DNA
gcccagactggcctcgaacccctgagctcaagcaatcttcctgcctcggtctcccaaagtgctgggattacaggtgtgag

SEQ ID NO: 133687 - DNA, 80 bp, synthetic construct
  misc_feature 1..80: note = Artificially Synthesized Probe
  source 1..80: mol_type = other DNA
cttccatccaaagaagattcaaatcaaagaaggagtctttcataaagaaacgagacctttggtttatgttggggtgaaat

SEQ ID NO: 133688 - DNA, 80 bp, synthetic construct
  misc_feature 1..80: note = Artificially Synthesized Probe
  source 1..80: mol_type = other DNA
acgttgtacctactactatggaaccttctccaccctctctggattatccctactcatgcttcagatctcggctccagcac

SEQ ID NO: 133689 - DNA, 80 bp, synthetic construct; identical to SEQ ID NO: 42299
  misc_feature 1..80: note = Artificially Synthesized Probe
  source 1..80: mol_type = other DNA

SEQ ID NO: 133690 - DNA, 80 bp, synthetic construct
  misc_feature 1..80: note = Artificially Synthesized Probe
  source 1..80: mol_type = other DNA
ccagcactttgggaggccgaggagggtggatcacgaggtcaagagatcaagaccattctggccaacatggggaaatccca

SEQ ID NO: 133691 - DNA, 80 bp, synthetic construct
  misc_feature 1..80: note = Artificially Synthesized Probe
  source 1..80: mol_type = other DNA
ctctgtctcttaaaaaaaaaaaagaaaagaaaagaaaaaagaaaaaaaaagaaactgcattatttaacgccaggcgcagt

SEQ ID NO: 133692 - DNA, 80 bp, synthetic construct
  misc_feature 1..80: note = Artificially Synthesized Probe
  source 1..80: mol_type = other DNA
caggaggctgaggcaggagaatcacttgaacctgggagacaggttgtggtgagctgagatcatgccactgcactctagcc

SEQ ID NO: 133693 - DNA, 80 bp, synthetic construct; identical to SEQ ID NO: 42300
  misc_feature 1..80: note = Artificially Synthesized Probe
  source 1..80: mol_type = other DNA

SEQ ID NO: 133694 - DNA, 80 bp, synthetic construct
  misc_feature 1..80: note = Artificially Synthesized Probe
  source 1..80: mol_type = other DNA
tcccgccaggtaatactatgatctccttttataaatggagaaaccgaggctctgagagttacactgacttgcccgaggcc

SEQ ID NO: 133695 - DNA, 80 bp, synthetic construct
  misc_feature 1..80: note = Artificially Synthesized Probe
  source 1..80: mol_type = other DNA
atcacttctatacccaccctgttcttgcaaaaatagaagaaagaaacccacaaagtcggtccttttttttttttttttct

SEQ ID NO: 133696 - DNA, 80 bp, synthetic construct; identical to SEQ ID NO: 34867
  misc_feature 1..80: note = Artificially Synthesized Probe
  source 1..80: mol_type = other DNA

SEQ ID NO: 133697 - DNA, 80 bp, synthetic construct; identical to SEQ ID NO: 42301
  misc_feature 1..80: note = Artificially Synthesized Probe
  source 1..80: mol_type = other DNA

SEQ ID NO: 133698 - DNA, 80 bp, synthetic construct
  misc_feature 1..80: note = Artificially Synthesized Probe
  source 1..80: mol_type = other DNA
gaagccggacaggacacccctggaactctggaatctgcctgggtggggggggtcctccaggaagcctccctggcgcctct

SEQ ID NO: 133699 - DNA, 80 bp, synthetic construct
  misc_feature 1..80: note = Artificially Synthesized Probe
  source 1..80: mol_type = other DNA
caggcaccgcacatgcactgttttatgaaacctcacaatggtgctaagaagaaagacgttttgggtgaaaacacaatcaa

SEQ ID NO: 133700 - DNA, 80 bp, synthetic construct
  misc_feature 1..80: note = Artificially Synthesized Probe
  source 1..80: mol_type = other DNA
agagagagatcacgtaggcttccttattagattgagacacaaacctaaacatggcagagaaagtaaaaattagatggtaa

SEQ ID NO: 133701 - DNA, 80 bp, synthetic construct
  misc_feature 1..80: note = Artificially Synthesized Probe
  source 1..80: mol_type = other DNA
tcaagacgagcctggtcaacacggtgaaaccccgtctctgctaaaaagaaaaaaaattagcccggtgtggtggtgtgtgc

SEQ ID NO: 133702 - DNA, 80 bp, synthetic construct; identical to SEQ ID NO: 42302
  misc_feature 1..80: note = Artificially Synthesized Probe
  source 1..80: mol_type = other DNA

SEQ ID NO: 133703 - DNA, 80 bp, synthetic construct
  misc_feature 1..80: note = Artificially Synthesized Probe
  source 1..80: mol_type = other DNA
caggcatgggggcgggtgcctgtaattccagctactccagaggctgaggcaggataatcgcttgaacccgggaggcagag

SEQ ID NO: 133704 - DNA, 80 bp, synthetic construct
  misc_feature 1..80: note = Artificially Synthesized Probe
  source 1..80: mol_type = other DNA
ctatggcctttgggtgatgatgggctggtgtcagtctgccaatttttatttatatatatatatttttgagacacagtctt

SEQ ID NO: 133705 - DNA, 80 bp, synthetic construct
  misc_feature 1..80: note = Artificially Synthesized Probe
  source 1..80: mol_type = other DNA
gattttgccatgtcggccaggctagtctcaaactcctgacctcaagtgatccgcctgccttggcctcccaaagtgctggg

SEQ ID NO: 133706 - DNA, 80 bp, synthetic construct; identical to SEQ ID NO: 42303
  misc_feature 1..80: note = Artificially Synthesized Probe
  source 1..80: mol_type = other DNA

SEQ ID NO: 133707 - DNA, 80 bp, synthetic construct
  misc_feature 1..80: note = Artificially Synthesized Probe
  source 1..80: mol_type = other DNA
gaagccgaggcaggaggatcacgaggtcaggagttcaagaccagcctaaccaacatggtgaaaccctgtctctactaaaa

SEQ ID NO: 133708 - DNA, 80 bp, synthetic construct
  misc_feature 1..80: note = Artificially Synthesized Probe
  source 1..80: mol_type = other DNA
tgcagtccagcctgggagacagagcgagacactgtctcaaaaaaaaaaaaaattaaaaaaaaaatcaagctactagaaaa

SEQ ID NO: 133709 - DNA, 80 bp, synthetic construct
  misc_feature 1..80: note = Artificially Synthesized Probe
  source 1..80: mol_type = other DNA
ctactgaatgaatggagaaaaggaccacatatggtgaccggtttcacggagcacttgtgctgatctgtgtggctcaaaaa

SEQ ID NO: 133710 - DNA, 80 bp, synthetic construct; identical to SEQ ID NO: 42304
  misc_feature 1..80: note = Artificially Synthesized Probe
  source 1..80: mol_type = other DNA

SEQ ID NO: 133711 - DNA, 80 bp, synthetic construct
  misc_feature 1..80: note = Artificially Synthesized Probe
  source 1..80: mol_type = other DNA
agtctcagctactcaggaggctgaggtgggaggatcgcttgggcctaggaggttgaggttgcagtgagccatgatcccgt

SEQ ID NO: 133712 - DNA, 80 bp, synthetic construct
  misc_feature 1..80: note = Artificially Synthesized Probe
  source 1..80: mol_type = other DNA
ttagccaggcatggtgggtgcctgtgatcccagctacttgggaggctgaggtaggcagatcgcttgaacctgggaggcgt

SEQ ID NO: 133713 - DNA, 80 bp, synthetic construct
  misc_feature 1..80: note = Artificially Synthesized Probe
  source 1..80: mol_type = other DNA
aaaaggatcagacagaagctttgccccggtgggccccgggcacttctgagcagctgagaaaaaacaaagacagagaagcc

SEQ ID NO: 133714 - DNA, 80 bp, synthetic construct; identical to SEQ ID NO: 42305
  misc_feature 1..80: note = Artificially Synthesized Probe
  source 1..80: mol_type = other DNA

SEQ ID NO: 133715 - DNA, 80 bp, synthetic construct
  misc_feature 1..80: note = Artificially Synthesized Probe
  source 1..80: mol_type = other DNA
tgggcagagtctgggactaatcacacgaagacaaccacagaaccccaccgtgacgccacgtgacagatgacgcacgcctg

SEQ ID NO: 133716 - DNA, 80 bp, synthetic construct
  misc_feature 1..80: note = Artificially Synthesized Probe
  source 1..80: mol_type = other DNA
acctctctctctttcttttttttagacagaatctcactctgtcacccaggctggagtgcatggcgcgatctcagctcact

SEQ ID NO: 133717 - DNA, 80 bp, synthetic construct
  misc_feature 1..80: note = Artificially Synthesized Probe
  source 1..80: mol_type = other DNA
cctgacctcatgatccacccacctcggcctcccaaagggctgagattacaggcatgagccaccatgcccagccgcaaaac

SEQ ID NO: 133718 - DNA, 80 bp, synthetic construct
  misc_feature 1..80: note = Artificially Synthesized Probe
  source 1..80: mol_type = other DNA
taatcctgcctgggcgacagagtgagactctgtcaaaaaaaaaccaaacaaaaacccacaaagactgcgaacagcataaa

SEQ ID NO: 133719 - DNA, 80 bp, synthetic construct; identical to SEQ ID NO: 42278
  misc_feature 1..80: note = Artificially Synthesized Probe
  source 1..80: mol_type = other DNA

SEQ ID NO: 133720 - DNA, 80 bp, synthetic construct; identical to SEQ ID NO: 42306
  misc_feature 1..80: note = Artificially Synthesized Probe
  source 1..80: mol_type = other DNA

SEQ ID NO: 133721 - DNA, 80 bp, synthetic construct
  misc_feature 1..80: note = Artificially Synthesized Probe
  source 1..80: mol_type = other DNA
agttacatttatagagcctacctaagcaccttacaaacctgtatttttcaatccccacggccacctgggagctactgtaa

SEQ ID NO: 133722 - DNA, 80 bp, synthetic construct
  misc_feature 1..80: note = Artificially Synthesized Probe
  source 1..80: mol_type = other DNA
aagaaatctgaaactattcagtccagcttttatcccggacttggacagggacacactgtcttccctgggtatagccagac

SEQ ID NO: 133723 - DNA, 80 bp, synthetic construct
  misc_feature 1..80: note = Artificially Synthesized Probe
  source 1..80: mol_type = other DNA
ggtcaggagttcgagaccagcctggccaatatggtgaaatcccatctctactaaaaatacaaaaaaaaaaaaaaaaaaaa

SEQ ID NO: 133724 - DNA, 80 bp, synthetic construct; identical to SEQ ID NO: 42307
  misc_feature 1..80: note = Artificially Synthesized Probe
  source 1..80: mol_type = other DNA

SEQ ID NO: 133725 - DNA, 80 bp, synthetic construct
  misc_feature 1..80: note = Artificially Synthesized Probe
  source 1..80: mol_type = other DNA
tagaggtattttccattttcatctttttctgccagaggactcccttctttctccagctccttcctgtatcttttgatgtt

SEQ ID NO: 133726 - DNA, 80 bp, synthetic construct
  misc_feature 1..80: note = Artificially Synthesized Probe
  source 1..80: mol_type = other DNA
catcctgaaagagatgagcaggagagacacttggcagtgatgtctgtgtggcagaagtcctttgttcccgtccccgcaaa

SEQ ID NO: 133727 - DNA, 80 bp, synthetic construct
  misc_feature 1..80: note = Artificially Synthesized Probe
  source 1..80: mol_type = other DNA
tctctggcccggagcaggcactcaatagatgtttattgattagtgataacacggattaatgataacactgtcaacaaata

SEQ ID NO: 133728 - DNA, 80 bp, synthetic construct; identical to SEQ ID NO: 42308
  misc_feature 1..80: note = Artificially Synthesized Probe
  source 1..80: mol_type = other DNA

SEQ ID NO: 133729 - DNA, 80 bp, synthetic construct
  misc_feature 1..80: note = Artificially Synthesized Probe
  source 1..80: mol_type = other DNA
gcccccagcctacccccaccccacagcaccaccctagagagggtgcccggagcccccgaagggttgctgtggattccagg

SEQ ID NO: 133730 - DNA, 80 bp, synthetic construct
  misc_feature 1..80: note = Artificially Synthesized Probe
  source 1..80: mol_type = other DNA
cacgcagagcacctggcatggacgggcggcgccgctcagatgacgtggccctcccagtcagcaccaactgctactgctgc

SEQ ID NO: 133731 - DNA, 80 bp, synthetic construct
  misc_feature 1..80: note = Artificially Synthesized Probe
  source 1..80: mol_type = other DNA
actggcatgttctgaaccaattcccagacatcatattatttcatccaaagcatttctgtaagattctctaacggttcaag

SEQ ID NO: 133732 - DNA, 80 bp, synthetic construct
  misc_feature 1..80: note = Artificially Synthesized Probe
  source 1..80: mol_type = other DNA
ctcccaggctcaagcaatcctcctctctcagcttcccaagtagctgggactacaggaaggggccaccgtgtcctgctaaa

SEQ ID NO: 133733 - DNA, 80 bp, synthetic construct; identical to SEQ ID NO: 42309
  misc_feature 1..80: note = Artificially Synthesized Probe
  source 1..80: mol_type = other DNA

SEQ ID NO: 133734 - DNA, 80 bp, synthetic construct
  misc_feature 1..80: note = Artificially Synthesized Probe
  source 1..80: mol_type = other DNA
ctcactgcaacctctgcctcgcaggttcgagccattctcctgcctcagcctcctgagtagctgggattacagacatgaac

SEQ ID NO: 133735 - DNA, 80 bp, synthetic construct
  misc_feature 1..80: note = Artificially Synthesized Probe
  source 1..80: mol_type = other DNA
ctttggaaggctgagaattggggcagggctcagctgagcaattctacttctccttgtggcactgactgaggtcattcaga

SEQ ID NO: 133736 - DNA, 80 bp, synthetic construct; identical to SEQ ID NO: 42310
  misc_feature 1..80: note = Artificially Synthesized Probe
  source 1..80: mol_type = other DNA

SEQ ID NO: 133737 - DNA, 80 bp, synthetic construct
  misc_feature 1..80: note = Artificially Synthesized Probe
  source 1..80: mol_type = other DNA
tggagtgtagtggcgtgacctcggctcactgcaatctccgcctcccgggttcacgccattctcctgtctcagcctcccga

SEQ ID NO: 133738 - DNA, 80 bp, synthetic construct
  misc_feature 1..80: note = Artificially Synthesized Probe
  source 1..80: mol_type = other DNA
accgcgcctggccaccatctttattttctctctttctttctttcttttagagacaaggtctcactctgttgcccaggctg

SEQ ID NO: 133739 - DNA, 80 bp, synthetic construct
  misc_feature 1..80: note = Artificially Synthesized Probe
  source 1..80: mol_type = other DNA
aggctggtgtcaaactcctgggctcaagagatctgtctgcctccacctcccaaaaggctgggattacaggcatgagtcac

SEQ ID NO: 133740 - DNA, 80 bp, synthetic construct; identical to SEQ ID NO: 42311
  misc_feature 1..80: note = Artificially Synthesized Probe
  source 1..80: mol_type = other DNA

SEQ ID NO: 133741 - DNA, 80 bp, synthetic construct
  misc_feature 1..80: note = Artificially Synthesized Probe
  source 1..80: mol_type = other DNA
ttcaccttgttgtctcttcaactaaaagcagtgaggctctggcctctgctgctttttctttttttttttttttttttgag

SEQ ID NO: 133742 - DNA, 80 bp, synthetic construct
  misc_feature 1..80: note = Artificially Synthesized Probe
  source 1..80: mol_type = other DNA
gcctgccactaagcccagctaatttttgtatttttagtagagacagggtttcaccatgttggccatggttggccaggctg

SEQ ID NO: 133743 - DNA, 80 bp, synthetic construct
  misc_feature 1..80: note = Artificially Synthesized Probe
  source 1..80: mol_type = other DNA
ggctggagtgcagtggtgtgatttcagctcactgcaacctctgcctcccaggttgaggccatttgcctgcctcagcctcc

SEQ ID NO: 133744 - DNA, 80 bp, synthetic construct
  misc_feature 1..80: note = Artificially Synthesized Probe
  source 1..80: mol_type = other DNA
ccgctgtgcccagcccatcataattattttaacggctgcaccataatccactcaaagtacttaacccacccccccatact

SEQ ID NO: 133745 - DNA, 80 bp, synthetic construct; identical to SEQ ID NO: 42312
  misc_feature 1..80: note = Artificially Synthesized Probe
  source 1..80: mol_type = other DNA

SEQ ID NO: 133746 - DNA, 80 bp, synthetic construct
  misc_feature 1..80: note = Artificially Synthesized Probe
  source 1..80: mol_type = other DNA
agctctcaaaatatcaattagcttggccaggcacagtggctcacgcctgtaatcctagcactttgggaggccaaggcggg

SEQ ID NO: 133747 - DNA, 80 bp, synthetic construct
  misc_feature 1..80: note = Artificially Synthesized Probe
  source 1..80: mol_type = other DNA
aggttgcaatgagccgagattgccccatggcactccagtctgggtgacaggagcgaaatttcgtctcaaaaaaaaaaaaa

SEQ ID NO: 133748 - DNA, 80 bp, synthetic construct
  misc_feature 1..80: note = Artificially Synthesized Probe
  source 1..80: mol_type = other DNA
gaggctgaagtgggaagatcacttgagtccaggagtttgagaccagcctgggcaacatgggaagactctgcctctgaaat

SEQ ID NO: 133749 - DNA, 80 bp, synthetic construct; identical to SEQ ID NO: 42313
  misc_feature 1..80: note = Artificially Synthesized Probe
  source 1..80: mol_type = other DNA

SEQ ID NO: 133750 - DNA, 80 bp, synthetic construct
  misc_feature 1..80: note = Artificially Synthesized Probe
  source 1..80: mol_type = other DNA
tgtaatcccaggtacttgggagcctaaggcaggagaatcgcttgaacccaggaggcagagattgcaatgagctgagatcg

SEQ ID NO: 133751 - DNA, 80 bp, synthetic construct
  misc_feature 1..80: note = Artificially Synthesized Probe
  source 1..80: mol_type = other DNA
gggtgaacacagtgatgtgggaacacaccacaacacatactctcacaaaaaaccttaaggaaaaatgtgtgcggggagat

SEQ ID NO: 133752 - DNA, 80 bp, synthetic construct
  misc_feature 1..80: note = Artificially Synthesized Probe
  source 1..80: mol_type = other DNA
cttttcaaagttattgatcagcactgacttctcgatatcagtgacccattttactttccctgccataatcctggaagaga

SEQ ID NO: 133753 - DNA, 80 bp, synthetic construct
  misc_feature 1..80: note = Artificially Synthesized Probe
  source 1..80: mol_type = other DNA
agcagagacgggatttcaccatgttggccaggctggtcttgaactcatgacctcaggtgagccacctgccttggcctccc

SEQ ID NO: 133754 - DNA, 80 bp, synthetic construct; identical to SEQ ID NO: 42314
  misc_feature 1..80: note = Artificially Synthesized Probe
  source 1..80: mol_type = other DNA

SEQ ID NO: 133755 - DNA, 80 bp, synthetic construct
  misc_feature 1..80: note = Artificially Synthesized Probe
  source 1..80: mol_type = other DNA
gtgtgccaggagccacaaaggaggggcacatggggctctgagagccgcagacagggcagctggggagggccaccctgaga

SEQ ID NO: 133756 - DNA, 80 bp, synthetic construct
  misc_feature 1..80: note = Artificially Synthesized Probe
  source 1..80: mol_type = other DNA
atcccagcactttgggaggccgaggcaggcggatcgcctgaggttgggagttcaagaccagcgtggccaatgtggtgaaa

SEQ ID NO: 133757 - DNA, 80 bp, synthetic construct
  misc_feature 1..80: note = Artificially Synthesized Probe
  source 1..80: mol_type = other DNA
gcgagactccatcgcaaaaaataaaaataggccgggcgcggtggctcacgcctgtaatcccaacactttgggcggccaag

SEQ ID NO: 133758 - DNA, 80 bp, synthetic construct; identical to SEQ ID NO: 42315
  misc_feature 1..80: note = Artificially Synthesized Probe
  source 1..80: mol_type = other DNA

SEQ ID NO: 133759 - DNA, 80 bp, synthetic construct
  misc_feature 1..80: note = Artificially Synthesized Probe
  source 1..80: mol_type = other DNA
aaaaccccgtctctactaaaaatacaaaaaattagccgggtgcggtggcaggcgcctgtagtcccagctacttgggaggc

SEQ ID NO: 133760 - DNA, 80 bp, synthetic construct
  misc_feature 1..80: note = Artificially Synthesized Probe
  source 1..80: mol_type = other DNA
cagggcacttaaacacacagacccctggccctcacctgcttccccaggtacacctcacaccaccttctcctttaccctct

SEQ ID NO: 133761 - DNA, 80 bp, synthetic construct
  misc_feature 1..80: note = Artificially Synthesized Probe
  source 1..80: mol_type = other DNA
ctccctgaccctccaaacaaggtgctgtacccctcggcaaccctggagctctgtatcaagcatctgctgtccctgctggg

SEQ ID NO: 133762 - DNA, 80 bp, synthetic construct; identical to SEQ ID NO: 42316
  misc_feature 1..80: note = Artificially Synthesized Probe
  source 1..80: mol_type = other DNA

SEQ ID NO: 133763 - DNA, 80 bp, synthetic construct
  misc_feature 1..80: note = Artificially Synthesized Probe
  source 1..80: mol_type = other DNA
cggatcacttgagcccaagagtttgagaccagcctgggcaacatggcaaaaccccatctctacaaaaaaatacaaaaatt

SEQ ID NO: 133764 - DNA, 80 bp, synthetic construct
  misc_feature 1..80: note = Artificially Synthesized Probe
  source 1..80: mol_type = other DNA
ctggactgaagagaaccccccaaggtcctcatgctactgacaagtctccccgcaatggtccccaccctgtacacactcac

SEQ ID NO: 133765 - DNA, 80 bp, synthetic construct
  misc_feature 1..80: note = Artificially Synthesized Probe
  source 1..80: mol_type = other DNA
tcaagagacattcactattatcatcatcatccccactgcaccaatgaggaagctgaggctcaacagttaagagcctgtgt

SEQ ID NO: 133766 - DNA, 80 bp, synthetic construct
  misc_feature 1..80: note = Artificially Synthesized Probe
  source 1..80: mol_type = other DNA
ccccgtctctactaaaaatacaaaaattagctgggcgtggtggcatgtgcctgtaatcccagctactcaggaggctgagg

SEQ ID NO: 133767 - DNA, 80 bp, synthetic construct; identical to SEQ ID NO: 42317
  misc_feature 1..80: note = Artificially Synthesized Probe
  source 1..80: mol_type = other DNA

SEQ ID NO: 133768 - DNA, 80 bp, synthetic construct
  misc_feature 1..80: note = Artificially Synthesized Probe
  source 1..80: mol_type = other DNA
tatggtgcacgtggaacctcagcagtcacaccaagatgacaataaaagcacaggagccgcaccccagagcgtgagcccat

SEQ ID NO: 133769 - DNA, 80 bp, synthetic construct
  misc_feature 1..80: note = Artificially Synthesized Probe
  source 1..80: mol_type = other DNA
cacgggagccgcaccccagagcgtgagtccatcccacacccctcacacccgcagacaaggggaccacgggagccacaccc

SEQ ID NO: 133770 - DNA, 80 bp, synthetic construct
  misc_feature 1..80: note = Artificially Synthesized Probe
  source 1..80: mol_type = other DNA
ccacagacatgggggccaagggagccgcaccccagagcgtgagcccatcccacacccctcacatctgcagacacgggggc

SEQ ID NO: 133771 - DNA, 80 bp, synthetic construct
  misc_feature 1..80: note = Artificially Synthesized Probe
  source 1..80: mol_type = other DNA
tatgtgatttcagcctccacagctgtgatttcctgatgaatcctgcttgcggcctggggaccaccccccaaccaccgccg

SEQ ID NO: 133772 - DNA, 80 bp, synthetic construct
  misc_feature 1..80: note = Artificially Synthesized Probe
  source 1..80: mol_type = other DNA
gccaggatcacggcaggctctctttcaaaggcaacaggcagggccaccaggctgctgtgtggcaaatatgacatcaccca

SEQ ID NO: 133773 - DNA, 80 bp, synthetic construct; identical to SEQ ID NO: 42318
  misc_feature 1..80: note = Artificially Synthesized Probe
  source 1..80: mol_type = other DNA

SEQ ID NO: 133774 - DNA, 80 bp, synthetic construct
  misc_feature 1..80: note = Artificially Synthesized Probe
  source 1..80: mol_type = other DNA
cactgacgccggcccctccttcttccctaaaagttaacacacagatgaaatgtacatcaaacacattaagaagacactct

SEQ ID NO: 133775 - DNA, 80 bp, synthetic construct
  misc_feature 1..80: note = Artificially Synthesized Probe
  source 1..80: mol_type = other DNA
agtgccaccacacccggttaatttttgtattttttgtagagacagggtttccccatgttggccaggctggtctcaaactc

SEQ ID NO: 133776 - DNA, 80 bp, synthetic construct; identical to SEQ ID NO: 42279
  misc_feature 1..80: note = Artificially Synthesized Probe
  source 1..80: mol_type = other DNA

SEQ ID NO: 133777 - DNA, 80 bp, synthetic construct; identical to SEQ ID NO: 42319
  misc_feature 1..80: note = Artificially Synthesized Probe
  source 1..80: mol_type = other DNA

SEQ ID NO: 133778 - DNA, 80 bp, synthetic construct
  misc_feature 1..80: note = Artificially Synthesized Probe
  source 1..80: mol_type = other DNA
atcattcaaggtacagttcaaaggtcactccctccacagagagccattctcagccttagctggatggagctaaggtgccc

SEQ ID NO: 133779 - DNA, 80 bp, synthetic construct
  misc_feature 1..80: note = Artificially Synthesized Probe
  source 1..80: mol_type = other DNA
tttttttttttttttagacaaagtctcgctctgtcacccaggctggagtgcaatggcacatcttggctcactacaacctc

SEQ ID NO: 133780 - DNA, 80 bp, synthetic construct
  misc_feature 1..80: note = Artificially Synthesized Probe
  source 1..80: mol_type = other DNA
ctgcctcggcctctcaaagtgctgggatgacaagcgtgagccaccgcgcccggctgcacagaatctttccaggctgtgat

SEQ ID NO: 133781 - DNA, 80 bp, synthetic construct; identical to SEQ ID NO: 42320
  misc_feature 1..80: note = Artificially Synthesized Probe
  source 1..80: mol_type = other DNA

SEQ ID NO: 133782 - DNA, 80 bp, synthetic construct
  misc_feature 1..80: note = Artificially Synthesized Probe
  source 1..80: mol_type = other DNA
ctgggttcaagcattctctgcctcagcctcccaagtagctgggactacaggcgcctgccaccacgcccagctaatttttg

SEQ ID NO: 133783 - DNA, 80 bp, synthetic construct
  misc_feature 1..80: note = Artificially Synthesized Probe
  source 1..80: mol_type = other DNA
tctctgtcactcaggctggagtgcagtggcaccatcttggctcactgcaacctccgcctcctgggatcaagcgagattct

SEQ ID NO: 133784 - DNA, 80 bp, synthetic construct
  misc_feature 1..80: note = Artificially Synthesized Probe
  source 1..80: mol_type = other DNA
ggattactggtgtgagtcaccgcacctggaccccttccattttttttttttttaaacaacacagataattgattacgtca

SEQ ID NO: 133785 - DNA, 80 bp, synthetic construct; identical to SEQ ID NO: 42321
  misc_feature 1..80: note = Artificially Synthesized Probe
  source 1..80: mol_type = other DNA

SEQ ID NO: 133786 - DNA, 80 bp, synthetic construct
  misc_feature 1..80: note = Artificially Synthesized Probe
  source 1..80: mol_type = other DNA
caaaaattagccaggcatggtggtgcgcgcctgtgatcccagctactcaggaggctgaggcaggagaattgcttgaaccc

SEQ ID NO: 133787 - DNA, 80 bp, synthetic construct
  misc_feature 1..80: note = Artificially Synthesized Probe
  source 1..80: mol_type = other DNA
ggtcaccaccccagatcccttggagagccaggctcctagttcatggtggtgggtgatggcaatgaccaaacagatgaaac

SEQ ID NO: 133788 - DNA, 80 bp, synthetic construct
  misc_feature 1..80: note = Artificially Synthesized Probe
  source 1..80: mol_type = other DNA
gtcaggagtttgagaccagcctggccaacatggcgaaaccccgtctctactaaaaatacaaaaattagctgggcatggtg

SEQ ID NO: 133789 - DNA, 80 bp, synthetic construct
  misc_feature 1..80: note = Artificially Synthesized Probe
  source 1..80: mol_type = other DNA
aataataaagaccaacaatactcctttttaaaaatacatatataggctgggcgcagcggctcacgcctgtaatcctagca

SEQ ID NO: 133790 - DNA, 80 bp, synthetic construct; identical to SEQ ID NO: 42322
  misc_feature 1..80: note = Artificially Synthesized Probe
  source 1..80: mol_type = other DNA

SEQ ID NO: 133791 - DNA, 80 bp, synthetic construct
  misc_feature 1..80: note = Artificially Synthesized Probe
  source 1..80: mol_type = other DNA
tcacgagttcgaggccagccggaccaacagaaaccccgtctctactaaaaatacaaaattagctgggtgtggtggcgctt

SEQ ID NO: 133792 - DNA, 80 bp, synthetic construct
  misc_feature 1..80: note = Artificially Synthesized Probe
  source 1..80: mol_type = other DNA
ccactggcaagggaatgagcatatcaaactggcttaggctaattaggatttattcctgagttggggatatgatcaccttc

SEQ ID NO: 133793 - DNA, 80 bp, synthetic construct
  misc_feature 1..80: note = Artificially Synthesized Probe
  source 1..80: mol_type = other DNA
aagcagtttggttaatttccttgacattatttactaatgcttaccaaattgctactctgtgtcatactttctactaacca

SEQ ID NO: 133794 - DNA, 80 bp, synthetic construct
  misc_feature 1..80: note = Artificially Synthesized Probe
  source 1..80: mol_type = other DNA
agtgcagtggtgcaatcttggctcactgcaacctccgcctctcaggttcaagcgattctcctgcctcagcctcctgagta

SEQ ID NO: 133795 - DNA, 80 bp, synthetic construct; identical to SEQ ID NO: 42323
  misc_feature 1..80: note = Artificially Synthesized Probe
  source 1..80: mol_type = other DNA

SEQ ID NO: 133796 - DNA, 80 bp, synthetic construct
  misc_feature 1..80: note = Artificially Synthesized Probe
  source 1..80: mol_type = other DNA
acaggcgcccgccaccacgcccggataattttttgtatttttagtagagatggggtttcaccgtgttagccaggatggtc

SEQ ID NO: 133797 - DNA, 80 bp, synthetic construct
  misc_feature 1..80: note = Artificially Synthesized Probe
  source 1..80: mol_type = other DNA
gctgggcactggagctcaaccatgcctgcacagagtaaggaatgacaaatttatatcatcattaagaacaaaagctgcca

SEQ ID NO: 133798 - DNA, 80 bp, synthetic construct
  misc_feature 1..80: note = Artificially Synthesized Probe
  source 1..80: mol_type = other DNA
cgcatgccaccatgcccggctaattttttgtatttttaatagagacgaggtttcactgtgtcagccaggatggtctccat

SEQ ID NO: 133799 - DNA, 80 bp, synthetic construct
  misc_feature 1..80: note = Artificially Synthesized Probe
  source 1..80: mol_type = other DNA
ctccaacaaccctcctccccgagagactgccacccacccccatcttctccctgtccccgctgccctctgtcttgccatcg

SEQ ID NO: 133800 - DNA, 80 bp, synthetic construct; identical to SEQ ID NO: 42324
  misc_feature 1..80: note = Artificially Synthesized Probe
  source 1..80: mol_type = other DNA

SEQ ID NO: 133801 - DNA, 80 bp, synthetic construct
  misc_feature 1..80: note = Artificially Synthesized Probe
  source 1..80: mol_type = other DNA
agctctcttgcctgccaccatgtataatgtgcctttgctcttccttcatcttccgccatgattgtgactgagtcaattaa

SEQ ID NO: 133802 - DNA, 80 bp, synthetic construct
  misc_feature 1..80: note = Artificially Synthesized Probe
  source 1..80: mol_type = other DNA
gcttccctcccacaccagatggcaactgttatttcacatgtgcctcccacattagatagcaacctcctgcggggcagcag

SEQ ID NO: 133803 - DNA, 80 bp, synthetic construct
  misc_feature 1..80: note = Artificially Synthesized Probe
  source 1..80: mol_type = other DNA
ccttcccaaccctaagcaatactaagccgttttccttagaaaagtaaataaatacctgatatcagattgttttattgttg

SEQ ID NO: 133804 - DNA, 80 bp, synthetic construct; identical to SEQ ID NO: 42325
  misc_feature 1..80: note = Artificially Synthesized Probe
  source 1..80: mol_type = other DNA

SEQ ID NO: 133805 - DNA, 80 bp, synthetic construct
  misc_feature 1..80: note = Artificially Synthesized Probe
  source 1..80: mol_type = other DNA
ctggtggtctaacttctcatccacccacacagccctgacagccactcagtgccaggcctgtaacagacagacattaaact

SEQ ID NO: 133806 - DNA, 80 bp, synthetic construct
  misc_feature 1..80: note = Artificially Synthesized Probe
  source 1..80: mol_type = other DNA
agaagattccaaatccatcctccactcccataatgtcccctctctcctgggcaactgcagcaggccccactctgtcccct

SEQ ID NO: 133807 - DNA, 80 bp, synthetic construct
  misc_feature 1..80: note = Artificially Synthesized Probe
  source 1..80: mol_type = other DNA
ctgcagatctggaccatcacctcttaggccttgtctctcaccaaccctctttagcccctggccttctttcagctcctgac

SEQ ID NO: 133808 - DNA, 80 bp, synthetic construct; identical to SEQ ID NO: 42326
  misc_feature 1..80: note = Artificially Synthesized Probe
  source 1..80: mol_type = other DNA

SEQ ID NO: 133809 - DNA, 80 bp, synthetic construct
  misc_feature 1..80: note = Artificially Synthesized Probe
  source 1..80: mol_type = other DNA
ttgaacctgggaggtggaggttgcagtgagctggcatcacgccactgcactccagcccgggcaacagagtgagactccat

SEQ ID NO: 133810 - DNA, 80 bp, synthetic construct; identical to SEQ ID NO: 42280
  misc_feature 1..80: note = Artificially Synthesized Probe
  source 1..80: mol_type = other DNA

SEQ ID NO: 133811 - DNA, 80 bp, synthetic construct
  misc_feature 1..80: note = Artificially Synthesized Probe
  source 1..80: mol_type = other DNA
tacaaatatcagccgggcgtggtggtgggcgcctgtaatccaagctatctgggaggctgaggtgggaggattgcttgaac

SEQ ID NO: 133812 - DNA, 80 bp, synthetic construct
  misc_feature 1..80: note = Artificially Synthesized Probe
  source 1..80: mol_type = other DNA
gcggatcacctgaggtcaggagctcgagaccagcctggccaacatggcgaaaccccatctctactaaaatttaaaaaatt

SEQ ID NO: 133813 - DNA, 80 bp, synthetic construct; identical to SEQ ID NO: 42327
  misc_feature 1..80: note = Artificially Synthesized Probe
  source 1..80: mol_type = other DNA

SEQ ID NO: 133814 - DNA, 80 bp, synthetic construct
  misc_feature 1..80: note = Artificially Synthesized Probe
  source 1..80: mol_type = other DNA
atctcggctcactgcaagctccgcctcccgggttcacgccattctcctgcctcagcctcccgagtagctgggactacagg

SEQ ID NO: 133815 - DNA, 80 bp, synthetic construct
  misc_feature 1..80: note = Artificially Synthesized Probe
  source 1..80: mol_type = other DNA
ccggggcccatctttttgtaccgccacaacccggcaccataatgtgctcatcaaacgtttcctgagcaaagaacctgctt

SEQ ID NO: 133816 - DNA, 80 bp, synthetic construct
  misc_feature 1..80: note = Artificially Synthesized Probe
  source 1..80: mol_type = other DNA
aatgtgctcatcaaacgtttcctgagcaaagaacctgctttgcaaatgccaaaagggctaacaatgataagatactttca

SEQ ID NO: 133817 - DNA, 80 bp, synthetic construct; identical to SEQ ID NO: 42328
  misc_feature 1..80: note = Artificially Synthesized Probe
  source 1..80: mol_type = other DNA

SEQ ID NO: 133818 - DNA, 80 bp, synthetic construct
  misc_feature 1..80: note = Artificially Synthesized Probe
  source 1..80: mol_type = other DNA
tggaggacgcggatccggcaagcagcatctgaaccgcattttcgcagccgcgtagacactggcgcccacactctctcacc

SEQ ID NO: 133819 - DNA, 80 bp, synthetic construct
  misc_feature 1..80: note = Artificially Synthesized Probe
  source 1..80: mol_type = other DNA
ggatgcctcgagccgcgccctcgccccgcctccagcccctctccggcgctcgcaggagtacgcagccgactgccaggcgc

SEQ ID NO: 133820 - DNA, 80 bp, synthetic construct
  misc_feature 1..80: note = Artificially Synthesized Probe
  source 1..80: mol_type = other DNA
tcttcctttgttttttaaaaatttacatgaaatgcacatttttgctgtgacagaagcatgtaactgtgatcctaacacac

SEQ ID NO: 133821 - DNA, 80 bp, synthetic construct
  misc_feature 1..80: note = Artificially Synthesized Probe
  source 1..80: mol_type = other DNA
tgtaagccaccgcacatgtcactgtatgtacacacaggggattctgaggccaatgttttacaaggattacgttatacacc

SEQ ID NO: 133822 - DNA, 80 bp, synthetic construct
  misc_feature 1..80: note = Artificially Synthesized Probe
  source 1..80: mol_type = other DNA
caagcgattctcctgcctcagcctcctgagtagctgacattacaagcgcgcactaccacacccggctaatttttgtattt

SEQ ID NO: 133823 - DNA, 80 bp, synthetic construct
  misc_feature 1..80: note = Artificially Synthesized Probe
  source 1..80: mol_type = other DNA
aggtcaatctttttaaaggccacttaatagaccgcagaatgaatgaaccatactgtgttcagccaccacactcctgatgg

SEQ ID NO: 133824 - DNA, 80 bp, synthetic construct; identical to SEQ ID NO: 42281
  misc_feature 1..80: note = Artificially Synthesized Probe
  source 1..80: mol_type = other DNA

SEQ ID NO: 133825 - DNA, 80 bp, synthetic construct
  misc_feature 1..80: note = Artificially Synthesized Probe
  source 1..80: mol_type = other DNA
gcacctggtctattataccaatttaaaggtggacaaactgaggctcaaacagttgcactgagttcctccctgtcacccag

SEQ ID NO: 133826 - DNA, 80 bp, synthetic construct
  misc_feature 1..80: note = Artificially Synthesized Probe
  source 1..80: mol_type = other DNA
cggccagcgggggcctggcacgtgatcagtgcaccacacatatgttttgagtaggagcatacacaatgatcaagttcagc

SEQ ID NO: 133827 - DNA, 80 bp, synthetic construct
  misc_feature 1..80: note = Artificially Synthesized Probe
  source 1..80: mol_type = other DNA
cagtggtctcccctcggaagctgacattttatacaggtcaccaggtcaaatatggcaatgactccaaaggcaacatgcat

SEQ ID NO: 133828 - DNA, 80 bp, synthetic construct
  misc_feature 1..80: note = Artificially Synthesized Probe
  source 1..80: mol_type = other DNA
tgaaaccctgtctatactaaaaatacaaaaattagccaggagtggtaacacatgcctacagtcccagctacttgggaggc

SEQ ID NO: 133829 - DNA, 80 bp, synthetic construct; identical to SEQ ID NO: 42282
  misc_feature 1..80: note = Artificially Synthesized Probe
  source 1..80: mol_type = other DNA

SEQ ID NO: 133830 - DNA, 80 bp, synthetic construct
  misc_feature 1..80: note = Artificially Synthesized Probe
  source 1..80: mol_type = other DNA
cacacttacagaatctcgtaattgccgaggacttccttaggtggcgacttgttccatttgcagtctgggatttcaccatt

SEQ ID NO: 133831 - DNA, 80 bp, synthetic construct
  misc_feature 1..80: note = Artificially Synthesized Probe
  source 1..80: mol_type = other DNA
acctgtgtctctcgctcttttggaatgaaaatgtgcactgcagaaggagatgctggctgctacacactttagtgaagttt

SEQ ID NO: 133832 - DNA, 80 bp, synthetic construct
  misc_feature 1..80: note = Artificially Synthesized Probe
  source 1..80: mol_type = other DNA
ttgtatttttattagagatggggtttcaccatattgaccaggctggtctcgaactcctgacctcaggtgatcctcccacc

SEQ ID NO: 133833 - DNA, 80 bp, synthetic construct; identical to SEQ ID NO: 42283
  misc_feature 1..80: note = Artificially Synthesized Probe
  source 1..80: mol_type = other DNA

SEQ ID NO: 133834 - DNA, 80 bp, synthetic construct
  misc_feature 1..80: note = Artificially Synthesized Probe
  source 1..80: mol_type = other DNA
cattctcactcaaatgatgaatccttccaacacatggaaaggtggtcccataaggcctctgagaagctaagcaacgtcac

SEQ ID NO: 133835 - DNA, 80 bp, synthetic construct
  misc_feature 1..80: note = Artificially Synthesized Probe
  source 1..80: mol_type = other DNA
cgggttcaagcaattctcctgcctcagcctcctgggtagctgggattacaggcatgcaccaccacgcctggctaatactt

SEQ ID NO: 133836 - DNA, 80 bp, synthetic construct; identical to SEQ ID NO: 42284
  misc_feature 1..80: note = Artificially Synthesized Probe
  source 1..80: mol_type = other DNA

SEQ ID NO: 133837 - DNA, 80 bp, synthetic construct
  misc_feature 1..80: note = Artificially Synthesized Probe
  source 1..80: mol_type = other DNA
ggcgcggtggctcatgcccgtaatcctagtactttgggacgctgaggcgggtggatcacaaggtcaagagttcgagacca

SEQ ID NO: 133838 - DNA, 80 bp, synthetic construct
  misc_feature 1..80: note = Artificially Synthesized Probe
  source 1..80: mol_type = other DNA
cgctccagcctgggtcacagagtgagactccgtctcaaaaaaaaagaaagaaaaaaaaaaagaattgttttaggctgtgt

SEQ ID NO: 133839 - DNA, 80 bp, synthetic construct; identical to SEQ ID NO: 42275
  misc_feature 1..80: note = Artificially Synthesized Probe
  source 1..80: mol_type = other DNA

SEQ ID NO: 133840 - DNA, 80 bp, synthetic construct
  misc_feature 1..80: note = Artificially Synthesized Probe
  source 1..80: mol_type = other DNA
aaaaaaaaattatctgggaagagtggcacacacctctactcccagctacacaggaggctgaggtgagaaggatcacttga

SEQ ID NO: 133841 - DNA, 80 bp, synthetic construct
  misc_feature 1..80: note = Artificially Synthesized Probe
  source 1..80: mol_type = other DNA
tgaggtccgggttcaagaccagcctgaccaacatggtaaaaccccatctctactaaaaatacaaaaattagccaggcgtg

SEQ ID NO: 133842 - DNA, 80 bp, synthetic construct; identical to SEQ ID NO: 42285
  misc_feature 1..80: note = Artificially Synthesized Probe
  source 1..80: mol_type = other DNA

SEQ ID NO: 133843 - DNA, 80 bp, synthetic construct
  misc_feature 1..80: note = Artificially Synthesized Probe
  source 1..80: mol_type = other DNA
gctcacacttgtaattccagcactttgggaagccaaggcaggaggatcacttgagcccaggagttcaaaaccagcttggg

SEQ ID NO: 133844 - DNA, 80 bp, synthetic construct
  misc_feature 1..80: note = Artificially Synthesized Probe
  source 1..80: mol_type = other DNA
taatcccagctactcgggagactgaggcaggagaatcacttgaacctgggaggcagaggttgtggtgagccaagatggcg

SEQ ID NO: 133845 - DNA, 80 bp, synthetic construct
  misc_feature 1..80: note = Artificially Synthesized Probe
  source 1..80: mol_type = other DNA
tccgagaacacctttattgtgcacgtcccccgcagagcagcctcaggcgtcctggtagtagttgttgaagttgatgcgca

SEQ ID NO: 133846 - DNA, 80 bp, synthetic construct
  misc_feature 1..80: note = Artificially Synthesized Probe
  source 1..80: mol_type = other DNA
gccccacaccgctcccgcaaagtcccctgctcagccgccatgctgaggctcacctgagctgccggccaagtttcttgaag

SEQ ID NO: 133847 - DNA, 80 bp, synthetic construct
  misc_feature 1..80: note = Artificially Synthesized Probe
  source 1..80: mol_type = other DNA
ggggcaccagtgctgggaacagcgctttgtttcttgcctcagctctgggctccatttccaagcaatgggcctctgtgagc

SEQ ID NO: 133848 - DNA, 80 bp, synthetic construct
  misc_feature 1..80: note = Artificially Synthesized Probe
  source 1..80: mol_type = other DNA
accaccaacccttcctctcatctgagcccagctgccccaggggcatggcaaaggggctgggggggaaatggcggccgtgc

SEQ ID NO: 133849 - DNA, 80 bp, synthetic construct; identical to SEQ ID NO: 42340
  misc_feature 1..80: note = Artificially Synthesized Probe
  source 1..80: mol_type = other DNA

SEQ ID NO: 133850 - DNA, 80 bp, synthetic construct
  misc_feature 1..80: note = Artificially Synthesized Probe
  source 1..80: mol_type = other DNA
ctgcgctgcctggctcctccagggctctctgcccaccttccccaacaccctcctctcaatcccccaaacccaaatgcccc

SEQ ID NO: 133851 - DNA, 80 bp, synthetic construct
  misc_feature 1..80: note = Artificially Synthesized Probe
  source 1..80: mol_type = other DNA
cagaactcccagcaatgtaaattcacccaacaggagggccctgcgctgtcagtcatccacaatgtgccgggcccactggg

SEQ ID NO: 133852 - DNA, 80 bp, synthetic construct; identical to SEQ ID NO: 42341
  misc_feature 1..80: note = Artificially Synthesized Probe
  source 1..80: mol_type = other DNA

SEQ ID NO: 133853 - DNA, 80 bp, synthetic construct; identical to SEQ ID NO: 42330
  misc_feature 1..80: note = Artificially Synthesized Probe
  source 1..80: mol_type = other DNA

SEQ ID NO: 133854 - DNA, 80 bp, synthetic construct
  misc_feature 1..80: note = Artificially Synthesized Probe
  source 1..80: mol_type = other DNA
cacttccgagagcaggctgctgatgctctcgggagacgctcctgacacgtggacgccccgcttcaccacaaaggcctggg

SEQ ID NO: 133855 - DNA, 80 bp, synthetic construct
  misc_feature 1..80: note = Artificially Synthesized Probe
  source 1..80: mol_type = other DNA
ccgagggaccaaaccgaggcacaaatcctcactgaccacactgaaaaatacatgtttaaaatgccaagtgtagaaaaggg

SEQ ID NO: 133856 - DNA, 80 bp, synthetic construct
  misc_feature 1..80: note = Artificially Synthesized Probe
  source 1..80: mol_type = other DNA
aatgatggaagatgcacaaagactcgccacaggacattctccacagtatgtttataaccagagagtggagacccccaata

SEQ ID NO: 133857 - DNA, 80 bp, synthetic construct; identical to SEQ ID NO: 42342
  misc_feature 1..80: note = Artificially Synthesized Probe
  source 1..80: mol_type = other DNA

SEQ ID NO: 133858 - DNA, 80 bp, synthetic construct
  misc_feature 1..80: note = Artificially Synthesized Probe
  source 1..80: mol_type = other DNA
tggtggctcacgcctgtaatcccagcacttcaggaggccaaggcaggtggatcacttcaggtcaggagttcatgacaagc

SEQ ID NO: 133859 - DNA, 80 bp, synthetic construct
  misc_feature 1..80: note = Artificially Synthesized Probe
  source 1..80: mol_type = other DNA
ccagcctgggagacagagcaagactccgtctcaaaaaaaaaaaaaaattaaaaattagccagccgtggtggtgcatgcct

SEQ ID NO: 133860 - DNA, 80 bp, synthetic construct
  misc_feature 1..80: note = Artificially Synthesized Probe
  source 1..80: mol_type = other DNA
tggctcacatctgtaatcccagcactttgggaggccgaagcaagcggatcacttgaggtcaggggtttgagaccagcctc

SEQ ID NO: 133861 - DNA, 80 bp, synthetic construct
  misc_feature 1..80: note = Artificially Synthesized Probe
  source 1..80: mol_type = other DNA
cctgggcaacagagcgagactctatctcaaaaaaaaaaaaaaaaaaaaaaaagcagttaaacccaaaactagcagaagga

SEQ ID NO: 133862 - DNA, 80 bp, synthetic construct; identical to SEQ ID NO: 42343
  misc_feature 1..80: note = Artificially Synthesized Probe
  source 1..80: mol_type = other DNA

SEQ ID NO: 133863 - DNA, 80 bp, synthetic construct
  misc_feature 1..80: note = Artificially Synthesized Probe
  source 1..80: mol_type = other DNA
attgacaagtcttagctagaataattaagaaaaaagatgactagggccaggcacgatggctcacgcctgtaatcccagca

SEQ ID NO: 133864 - DNA, 80 bp, synthetic construct
  misc_feature 1..80: note = Artificially Synthesized Probe
  source 1..80: mol_type = other DNA
actgggcgaactcgccgtcctccatcagcaggaagtgccgcagtgcctcatagtgcgcctccaggtgcagctccacgaag

SEQ ID NO: 133865 - DNA, 80 bp, synthetic construct
  misc_feature 1..80: note = Artificially Synthesized Probe
  source 1..80: mol_type = other DNA
ggtgtgaacccgggaggcggagcttggagtgagccgagatcgcgccactgccctccagcctgggccacagagcgagactc

SEQ ID NO: 133866 - DNA, 80 bp, synthetic construct; identical to SEQ ID NO: 42344
  misc_feature 1..80: note = Artificially Synthesized Probe
  source 1..80: mol_type = other DNA

SEQ ID NO: 133867 - DNA, 80 bp, synthetic construct
  misc_feature 1..80: note = Artificially Synthesized Probe
  source 1..80: mol_type = other DNA
tactcgggaggctgaggcaggagaattgcttgaacccgggaggcagagtttgcagtgagccgagaccgtgccattacact

SEQ ID NO: 133868 - DNA, 80 bp, synthetic construct
  misc_feature 1..80: note = Artificially Synthesized Probe
  source 1..80: mol_type = other DNA
ggctactgtgagctgtgatggtgccactgcactccagcctgggcaagagagagaccctgtctcaaaaaaaaaaaagagag

SEQ ID NO: 133869 - DNA, 80 bp, synthetic construct; identical to SEQ ID NO: 42345
  misc_feature 1..80: note = Artificially Synthesized Probe
  source 1..80: mol_type = other DNA

SEQ ID NO: 133870 - DNA, 80 bp, synthetic construct
  misc_feature 1..80: note = Artificially Synthesized Probe
  source 1..80: mol_type = other DNA
tgagaagagcagcgcaggccccagtctcgggacgctctcggcaggcagatgctcctcccgagcggtgggaaggctcggaa

SEQ ID NO: 133871 - DNA, 80 bp, synthetic construct
  misc_feature 1..80: note = Artificially Synthesized Probe
  source 1..80: mol_type = other DNA
actttttagaaccgaaatgggatgatgctggctgtcatcactggtggccctgggagctggccttccctgccactccccac

SEQ ID NO: 133872 - DNA, 80 bp, synthetic construct
  misc_feature 1..80: note = Artificially Synthesized Probe
  source 1..80: mol_type = other DNA
accagctcgcactccttcaccagcacgggctgcggggcctgtaggacgcccccagcaagcagctggagctccccttggtg

SEQ ID NO: 133873 - DNA, 80 bp, synthetic construct; identical to SEQ ID NO: 42346
  misc_feature 1..80: note = Artificially Synthesized Probe
  source 1..80: mol_type = other DNA

SEQ ID NO: 133874 - DNA, 80 bp, synthetic construct
  misc_feature 1..80: note = Artificially Synthesized Probe
  source 1..80: mol_type = other DNA
agatggtgattcactcataaagtattcttctgttagaaacaaaacaagatttgtacacccatgtacacaacagcatctac

SEQ ID NO: 133875 - DNA, 80 bp, synthetic construct; identical to SEQ ID NO: 42347
  misc_feature 1..80: note = Artificially Synthesized Probe
  source 1..80: mol_type = other DNA

SEQ ID NO: 133876 - DNA, 80 bp, synthetic construct
  misc_feature 1..80: note = Artificially Synthesized Probe
  source 1..80: mol_type = other DNA
gcgtcagcaactcgctcagctgcacagcagtctcatcagcggcagactggacctgggggtccacggggaaggcgaaggcc

SEQ ID NO: 133877 - DNA, 80 bp, synthetic construct
  misc_feature 1..80: note = Artificially Synthesized Probe
  source 1..80: mol_type = other DNA
gcagcatccacacccctgtccacagcagcatccacacccaggtccacggcagcatcatccacacccctgtccacagcagc

SEQ ID NO: 133878 - DNA, 80 bp, synthetic construct
  misc_feature 1..80: note = Artificially Synthesized Probe
  source 1..80: mol_type = other DNA
cccacacccccgtccacggcagcatcatccacacccctatccacagcagcatcatccacaccccctgtgcacggcagcat

SEQ ID NO: 133879 - DNA, 80 bp, synthetic construct
  misc_feature 1..80: note = Artificially Synthesized Probe
  source 1..80: mol_type = other DNA
acaccccctgtccacgacagcatcacccacacccctgtccctggcagcatcacccacacacacccatggcagcatcatcc

SEQ ID NO: 133880 - DNA, 80 bp, synthetic construct
  misc_feature 1..80: note = Artificially Synthesized Probe
  source 1..80: mol_type = other DNA
gtccacagcagtatccacacccctgtccatgggaacatcatccacaaccctatccactgcagcatcatccacacccgtgt

SEQ ID NO: 133881 - DNA, 80 bp, synthetic construct
  misc_feature 1..80: note = Artificially Synthesized Probe
  source 1..80: mol_type = other DNA
gtccacggcaacatccacatgcctgtccacagcagcatccacacccccgtccacggcaacaacatccacaacagccaggg

SEQ ID NO: 133882 - DNA, 80 bp, synthetic construct; identical to SEQ ID NO: 42348
  misc_feature 1..80: note = Artificially Synthesized Probe
  source 1..80: mol_type = other DNA

SEQ ID NO: 133883 - DNA, 80 bp, synthetic construct
  misc_feature 1..80: note = Artificially Synthesized Probe
  source 1..80: mol_type = other DNA
tactaaaaacacaaaaattagctgggcgtggtggcgggcatctgtaatcccagctgctcaggaggctaaggcaggagaat

SEQ ID NO: 133884 - DNA, 80 bp, synthetic construct
  misc_feature 1..80: note = Artificially Synthesized Probe
  source 1..80: mol_type = other DNA
gcagcagtgaaaatacacacagcattacaaagctgtacaactggttaagacggtaaaaacattatataaattttactgcc

SEQ ID NO: 133885 - DNA, 80 bp, synthetic construct
  misc_feature 1..80: note = Artificially Synthesized Probe
  source 1..80: mol_type = other DNA
gcctcccgagtagctgggactacaggcacgggccaccatgcctggctaattttttgtatttttagcagagatggggtttc

SEQ ID NO: 133886 - DNA, 80 bp, synthetic construct; identical to SEQ ID NO: 42349
  misc_feature 1..80: note = Artificially Synthesized Probe
  source 1..80: mol_type = other DNA

SEQ ID NO: 133887 - DNA, 80 bp, synthetic construct
  misc_feature 1..80: note = Artificially Synthesized Probe
  source 1..80: mol_type = other DNA
caggaggtggagcacgtgctgggaaccagccagcccagggctccctgccaacagcaactgctgcactcacacatggactc

SEQ ID NO: 133888 - DNA, 80 bp, synthetic construct
  misc_feature 1..80: note = Artificially Synthesized Probe
  source 1..80: mol_type = other DNA
aggctccctcaggatgagatgagcatgagaaagacacagcctctcagagcctctgtctgccccctgcatttcttcctgca

SEQ ID NO: 133889 - DNA, 80 bp, synthetic construct
  misc_feature 1..80: note = Artificially Synthesized Probe
  source 1..80: mol_type = other DNA
actcagaactgagggaaaaaaagcccacagcggaaacacaaagacacagcgcaggatcctgcaggctctggagtgaacac

SEQ ID NO: 133890 - DNA, 80 bp, synthetic construct
  misc_feature 1..80: note = Artificially Synthesized Probe
  source 1..80: mol_type = other DNA
cttaacccagcccttgcagctcagcagcagggagggccgtgagcagtcggacaatggtggttctcagggtgggcaacagc

SEQ ID NO: 133891 - DNA, 80 bp, synthetic construct; identical to SEQ ID NO: 42350
  misc_feature 1..80: note = Artificially Synthesized Probe
  source 1..80: mol_type = other DNA

SEQ ID NO: 133892 - DNA, 80 bp, synthetic construct
  misc_feature 1..80: note = Artificially Synthesized Probe
  source 1..80: mol_type = other DNA
gacactgagatgaccacagcactttcactctgcagggccctgggcagagaaagtccctacaggagctgcccaggctgtgc

SEQ ID NO: 133893 - DNA, 80 bp, synthetic construct; identical to SEQ ID NO: 42329
  misc_feature 1..80: note = Artificially Synthesized Probe
  source 1..80: mol_type = other DNA

SEQ ID NO: 133894 - DNA, 80 bp, synthetic construct
  misc_feature 1..80: note = Artificially Synthesized Probe
  source 1..80: mol_type = other DNA
gaccatgtctcctcatcagcaacccgaaaaaatgaacctagaaaagggggagttaataaatgaaatacagccagcacggt

SEQ ID NO: 133895 - DNA, 80 bp, synthetic construct
  misc_feature 1..80: note = Artificially Synthesized Probe
  source 1..80: mol_type = other DNA
tagccaggcgtggtgtcccatgcctgtaatcccactgtaatcccagctacttgggaagctgaggcaggagaatcgcttga

SEQ ID NO: 133896 - DNA, 80 bp, synthetic construct; identical to SEQ ID NO: 42351
  misc_feature 1..80: note = Artificially Synthesized Probe
  source 1..80: mol_type = other DNA

SEQ ID NO: 133897 - DNA, 80 bp, synthetic construct
  misc_feature 1..80: note = Artificially Synthesized Probe
  source 1..80: mol_type = other DNA
taaataaatacaaaaaaaaaacagaaaaaaatactattagcagacatgtacagaataaagcaataacttgtagggccagt

SEQ ID NO: 133898 - DNA, 80 bp, synthetic construct
  misc_feature 1..80: note = Artificially Synthesized Probe
  source 1..80: mol_type = other DNA
cgcctggctaattttttgtatttttagtagagacggggtttcactgtgttagccaggatggtctcgatctcctgacctcg

SEQ ID NO: 133899 - DNA, 80 bp, synthetic construct
  misc_feature 1..80: note = Artificially Synthesized Probe
  source 1..80: mol_type = other DNA
ccctggcagtcaggataaagccaccaccaccgtgctgggaagcagggagacagccaaccctgagggaatcttcatgatgt

SEQ ID NO: 133900 - DNA, 80 bp, synthetic construct; identical to SEQ ID NO: 42331
  misc_feature 1..80: note = Artificially Synthesized Probe
  source 1..80: mol_type = other DNA

SEQ ID NO: 133901 - DNA, 80 bp, synthetic construct; identical to SEQ ID NO: 42352
  misc_feature 1..80: note = Artificially Synthesized Probe
  source 1..80: mol_type = other DNA

SEQ ID NO: 133902 - DNA, 80 bp, synthetic construct
  misc_feature 1..80: note = Artificially Synthesized Probe
  source 1..80: mol_type = other DNA
gcccagctaatttttgtatttttagtagagacggggtttcaccatgttgcccaggccagtctcaaaatcctgacttcaag

SEQ ID NO: 133903 - DNA, 80 bp, synthetic construct
  misc_feature 1..80: note = Artificially Synthesized Probe
  source 1..80: mol_type = other DNA
ggtgagccagggagtgagtggctaccgcatccagagagcaagctgctggtaccagtcaggaaaaagctgctgcagctgga

SEQ ID NO: 133904 - DNA, 80 bp, synthetic construct
  misc_feature 1..80: note = Artificially Synthesized Probe
  source 1..80: mol_type = other DNA
catgcccagtgagcatttcttcctggcactaatcacacagcctgccaggcagctctcttgctcttaaggacataacttag

SEQ ID NO: 133905 - DNA, 80 bp, synthetic construct; identical to SEQ ID NO: 42353
  misc_feature 1..80: note = Artificially Synthesized Probe
  source 1..80: mol_type = other DNA

SEQ ID NO: 133906 - DNA, 80 bp, synthetic construct
  misc_feature 1..80: note = Artificially Synthesized Probe
  source 1..80: mol_type = other DNA
gctcccagcacctccgcttgctggcctcataggtaagtgcggcttcccacaggtccacgtctggggtcacgctgggctca

SEQ ID NO: 133907 - DNA, 80 bp, synthetic construct
  misc_feature 1..80: note = Artificially Synthesized Probe
  source 1..80: mol_type = other DNA
gtttcatccaagggcgatgagaatttcaggaactttatgcaaagacctaacaaaatgtttcttctgtttttctcaagcgc

SEQ ID NO: 133908 - DNA, 80 bp, synthetic construct
  misc_feature 1..80: note = Artificially Synthesized Probe
  source 1..80: mol_type = other DNA
aactttttgagatgcctcagacctggaaattccaatgtggggaacccagaattaaaaaaatcacactcaacattaaaaca

SEQ ID NO: 133909 - DNA, 80 bp, synthetic construct
  misc_feature 1..80: note = Artificially Synthesized Probe
  source 1..80: mol_type = other DNA
tggtgggcacctgtggtcccagctactcgggaggctgaggcagaagaattgcttgaacccgggaagcggaggttgcagtg

SEQ ID NO: 133910 - DNA, 80 bp, synthetic construct; identical to SEQ ID NO: 42354
  misc_feature 1..80: note = Artificially Synthesized Probe
  source 1..80: mol_type = other DNA

SEQ ID NO: 133911 - DNA, 80 bp, synthetic construct
  misc_feature 1..80: note = Artificially Synthesized Probe
  source 1..80: mol_type = other DNA
agtgcctgtggcgggtacagagccgagccggccctggctcaagcagcccctcccatgtcccccacagcagcccaggtcct

SEQ ID NO: 133912 - DNA, 80 bp, synthetic construct
  misc_feature 1..80: note = Artificially Synthesized Probe
  source 1..80: mol_type = other DNA
ctagcggaccttggtctagcggtagcgtcagtgcctaggaaaagcacccactacttagcagaccaggaaagggagtctcc

SEQ ID NO: 133913 - DNA, 80 bp, synthetic construct
  misc_feature 1..80: note = Artificially Synthesized Probe
  source 1..80: mol_type = other DNA
acacctggctctgccttctagatagcagtagcaaattagtgaaagtactaaaagtctctgaaatgcagaaataatggtgt

SEQ ID NO: 133914 - DNA, 80 bp, synthetic construct; identical to SEQ ID NO: 42355
  misc_feature 1..80: note = Artificially Synthesized Probe
  source 1..80: mol_type = other DNA

SEQ ID NO: 133915 - DNA, 80 bp, synthetic construct
  misc_feature 1..80: note = Artificially Synthesized Probe
  source 1..80: mol_type = other DNA
aggccgaggcgggcagatcacgaggtgaggagatagagaccatcctggctaacacggtgaaaccccgtctctactaaata

SEQ ID NO: 133916 - DNA, 80 bp, synthetic construct
  misc_feature 1..80: note = Artificially Synthesized Probe
  source 1..80: mol_type = other DNA
aaaaaaatcaaataaaataaaaaaataaaaatacaaacatataaaatacaaaaattagctgtgtgtggtgacgcacacct

SEQ ID NO: 133917 - DNA, 80 bp, synthetic construct
  misc_feature 1..80: note = Artificially Synthesized Probe
  source 1..80: mol_type = other DNA
gctgtagcattatgtatgtttctaaatcatctagctatcgcataagaatagaacgactagtaacaatgtatccttttggc

SEQ ID NO: 133918 - DNA, 80 bp, synthetic construct; identical to SEQ ID NO: 42356
  misc_feature 1..80: note = Artificially Synthesized Probe
  source 1..80: mol_type = other DNA

SEQ ID NO: 133919 - DNA, 80 bp, synthetic construct
  misc_feature 1..80: note = Artificially Synthesized Probe
  source 1..80: mol_type = other DNA
gataaaaggaaggtcaccgggccgggcacagtggctcatgcctgtaatcccagcactttgggaggccgagacgggtggat

SEQ ID NO: 133920 - DNA, 80 bp, synthetic construct
  misc_feature 1..80: note = Artificially Synthesized Probe
  source 1..80: mol_type = other DNA
cctagccagcatggtgaaaccccatctctactaaaaatacaaaacttagctgggcgtggtggcatgcacctaaatcccag

SEQ ID NO: 133921 - DNA, 80 bp, synthetic construct
  misc_feature 1..80: note = Artificially Synthesized Probe
  source 1..80: mol_type = other DNA
aaaaaaaaaaaaaattaagccgggcgtggtggcaggtgcctgtaatttcagctactcgggaggctgaggtacgagaattg

SEQ ID NO: 133922 - DNA, 80 bp, synthetic construct; identical to SEQ ID NO: 42357
  misc_feature 1..80: note = Artificially Synthesized Probe
  source 1..80: mol_type = other DNA

SEQ ID NO: 133923 - DNA, 80 bp, synthetic construct
  misc_feature 1..80: note = Artificially Synthesized Probe
  source 1..80: mol_type = other DNA
tggttgggtgggagccacgtctgacacgttctcccccacgctgatgctcccctccccgcagcccgagctgggggaggaca

SEQ ID NO: 133924 - DNA, 80 bp, synthetic construct
  misc_feature 1..80: note = Artificially Synthesized Probe
  source 1..80: mol_type = other DNA
ccagtgcctggagcagcctccataacctgaagtgtttcctggatcatgctgtgacacaaacactcttctctggagatcag

SEQ ID NO: 133925 - DNA, 80 bp, synthetic construct
  misc_feature 1..80: note = Artificially Synthesized Probe
  source 1..80: mol_type = other DNA
tcatagccgctgtacggaacgtttctccccacatgcttgttgttaaggaagtagtctcgttttctcggcagaacttgagg

SEQ ID NO: 133926 - DNA, 80 bp, synthetic construct
  misc_feature 1..80: note = Artificially Synthesized Probe
  source 1..80: mol_type = other DNA
ttgtttctcgctggtagttttgacatgtcaggctgcagctgttgagtctcatcttgaaaaagatttgtgaaaagagcatt

SEQ ID NO: 133927 - DNA, 80 bp, synthetic construct
  misc_feature 1..80: note = Artificially Synthesized Probe
  source 1..80: mol_type = other DNA
aaaacacctcacccgggcttcactcacgctccggaagacagggagtgagagagggtccgaagaggctgaatgacaggcgg

SEQ ID NO: 133928 - DNA, 80 bp, synthetic construct; identical to SEQ ID NO: 42358
  misc_feature 1..80: note = Artificially Synthesized Probe
  source 1..80: mol_type = other DNA

SEQ ID NO: 133929 - DNA, 80 bp, synthetic construct
  misc_feature 1..80: note = Artificially Synthesized Probe
  source 1..80: mol_type = other DNA
cacgtccacccgttctccaggcctcacccgtggaaagtgcccacggctgccgctctcgccgcctccgtcgcgtcacagcc

SEQ ID NO: 133930 - DNA, 80 bp, synthetic construct
  misc_feature 1..80: note = Artificially Synthesized Probe
  source 1..80: mol_type = other DNA
gggcggagggatgggtacatgggtgttccaccgtggccgggtggaaaccacatccgacacaggctcccccaagctgatgc

SEQ ID NO: 133931 - DNA, 80 bp, synthetic construct
  misc_feature 1..80: note = Artificially Synthesized Probe
  source 1..80: mol_type = other DNA
gctggcatcagacacgtgtccatgggtgttccaccgtggccgggcgggagccatgtctgacacagactcccccaagctga

SEQ ID NO: 133932 - DNA, 80 bp, synthetic construct; identical to SEQ ID NO: 42332
  misc_feature 1..80: note = Artificially Synthesized Probe
  source 1..80: mol_type = other DNA

SEQ ID NO: 133933 - DNA, 80 bp, synthetic construct
  misc_feature 1..80: note = Artificially Synthesized Probe
  source 1..80: mol_type = other DNA
gggaagaccaccccctgacacctgcccaaagagccgctctgtgggctggctgctcccctcctccagagcagcacgcctgg

SEQ ID NO: 133934 - DNA, 80 bp, synthetic construct
  misc_feature 1..80: note = Artificially Synthesized Probe
  source 1..80: mol_type = other DNA
agtactaaagtcgtactcctgtggcctggagggctgagtgctggctgctgcgggtgcctccccaggagctgaggggggca

SEQ ID NO: 133935 - DNA, 80 bp, synthetic construct
  misc_feature 1..80: note = Artificially Synthesized Probe
  source 1..80: mol_type = other DNA
ccccactgctagaggcttaaggggctgtggggtcagcaggcctggcctgttccagccatcccaggcaggcgagtgttgct

SEQ ID NO: 133936 - DNA, 80 bp, synthetic construct; identical to SEQ ID NO: 42333
  misc_feature 1..80: note = Artificially Synthesized Probe
  source 1..80: mol_type = other DNA

SEQ ID NO: 133937 - DNA, 80 bp, synthetic construct
  misc_feature 1..80: note = Artificially Synthesized Probe
  source 1..80: mol_type = other DNA
ctgctgggtgggctgagccgtgaccacagggacgcagccgctgcccaggcctcacctgaagacggccttgtgcaggtact

SEQ ID NO: 133938 - DNA, 80 bp, synthetic construct
  misc_feature 1..80: note = Artificially Synthesized Probe
  source 1..80: mol_type = other DNA
aaggcttgtgctgggctccagtgggacgctgggcctgcaaaaagtactccaaaaccacgagctcctcaccacctgtatct

SEQ ID NO: 133939 - DNA, 80 bp, synthetic construct
  misc_feature 1..80: note = Artificially Synthesized Probe
  source 1..80: mol_type = other DNA
ctgaatgtgtttctcatcttctaagagaaaacgaagccgtgcactctccagtcggtgcctctggattctccacagtgcct

SEQ ID NO: 133940 - DNA, 80 bp, synthetic construct
  misc_feature 1..80: note = Artificially Synthesized Probe
  source 1..80: mol_type = other DNA
tgggcccccgcccccgtctccccctaccaggggctgatagctctgggccctcacagcacctacagggcagcaccaggcag

SEQ ID NO: 133941 - DNA, 80 bp, synthetic construct; identical to SEQ ID NO: 42334
  misc_feature 1..80: note = Artificially Synthesized Probe
  source 1..80: mol_type = other DNA

SEQ ID NO: 133942 - DNA, 80 bp, synthetic construct
  misc_feature 1..80: note = Artificially Synthesized Probe
  source 1..80: mol_type = other DNA
gtagtgtctaggcctggttttctccatgtgttaacaggacagtatcgactgacatacatgcatgaacacgtactcatgca

SEQ ID NO: 133943 - DNA, 80 bp, synthetic construct
  misc_feature 1..80: note = Artificially Synthesized Probe
  source 1..80: mol_type = other DNA
caaacagccccttgaaggatccagcactactcagcctgggacagcctgatgacagcacaggacaggttgataacagcaca

SEQ ID NO: 133944 - DNA, 80 bp, synthetic construct
  misc_feature 1..80: note = Artificially Synthesized Probe
  source 1..80: mol_type = other DNA
actaaaaatacaaaaaactagctggatgtggtggcggatgcctgtaaccccagctactcaggaggctgaggcaggagaat

SEQ ID NO: 133945 - DNA, 80 bp, synthetic construct; identical to SEQ ID NO: 42335
  misc_feature 1..80: note = Artificially Synthesized Probe
  source 1..80: mol_type = other DNA

SEQ ID NO: 133946 - DNA, 80 bp, synthetic construct
  misc_feature 1..80: note = Artificially Synthesized Probe
  source 1..80: mol_type = other DNA
gcccctgccgcactgcacccctgggcctggagcccgggctgccctacctcgccttcctctccagctcctcctccagggac

SEQ ID NO: 133947 - DNA, 80 bp, synthetic construct
  misc_feature 1..80: note = Artificially Synthesized Probe
  source 1..80: mol_type = other DNA
cctggtccttcacaaattgttctttcagcctctgaaactgctcacgcttccgggcatccaaggccatccgttctgacatc

SEQ ID NO: 133948 - DNA, 80 bp, synthetic construct
  misc_feature 1..80: note = Artificially Synthesized Probe
  source 1..80: mol_type = other DNA
cacagagccggccatgtggctcagcagggctggcggagggcagaaggcagagggcagaggtgagcgcagcctccagccag

SEQ ID NO: 133949 - DNA, 80 bp, synthetic construct; identical to SEQ ID NO: 42336
  misc_feature 1..80: note = Artificially Synthesized Probe
  source 1..80: mol_type = other DNA

SEQ ID NO: 133950 - DNA, 80 bp, synthetic construct
  misc_feature 1..80: note = Artificially Synthesized Probe
  source 1..80: mol_type = other DNA
gcaggtgcctgtagtatcaactatttggcgggggtcaggggagcttaggcaggaggatcccttgagcctgggaggtggag

SEQ ID NO: 133951 - DNA, 80 bp, synthetic construct
  misc_feature 1..80: note = Artificially Synthesized Probe
  source 1..80: mol_type = other DNA
aagggttcgaggagggaccaggtgatggcaggacaccgcccccccgcccaccctcccccacccccaggctctcagcagtg

SEQ ID NO: 133952 - DNA, 80 bp, synthetic construct
  misc_feature 1..80: note = Artificially Synthesized Probe
  source 1..80: mol_type = other DNA
atccctgctgcccaccaggcaccaggccagaaagggtgttcctgggaatggcactgattgtaccaccgagcccctcccag

SEQ ID NO: 133953 - DNA, 80 bp, synthetic construct; identical to SEQ ID NO: 42337
  misc_feature 1..80: note = Artificially Synthesized Probe
  source 1..80: mol_type = other DNA

SEQ ID NO: 133954 - DNA, 80 bp, synthetic construct
  misc_feature 1..80: note = Artificially Synthesized Probe
  source 1..80: mol_type = other DNA
agaccccaggaagcagaggcaggggcgaagaaagcccccgagacctgtggtgccacgcaccttctcctccttgctgacag

SEQ ID NO: 133955 - DNA, 80 bp, synthetic construct
  misc_feature 1..80: note = Artificially Synthesized Probe
  source 1..80: mol_type = other DNA
agaggtaatgctgccaaaggggatgcaagcacagccaccagcactcagccccagcctcatactcagccccagggaagacc

SEQ ID NO: 133956 - DNA, 80 bp, synthetic construct
  misc_feature 1..80: note = Artificially Synthesized Probe
  source 1..80: mol_type = other DNA
gtccagtacaacttatctaaggtagggtgaacaccacggtggccggcatggccatggccctgaacccaggcccacaggca

SEQ ID NO: 133957 - DNA, 80 bp, synthetic construct; identical to SEQ ID NO: 42338
  misc_feature 1..80: note = Artificially Synthesized Probe
  source 1..80: mol_type = other DNA

SEQ ID NO: 133958 - DNA, 80 bp, synthetic construct
  misc_feature 1..80: note = Artificially Synthesized Probe
  source 1..80: mol_type = other DNA
gtgtctgacaagggaccgctctcaagtgtctgcctggtgggagtgcgcgcccgccgcgcctgcccagcccactgcccacc

SEQ ID NO: 133959 - DNA, 80 bp, synthetic construct
  misc_feature 1..80: note = Artificially Synthesized Probe
  source 1..80: mol_type = other DNA
gtgaggcgcagccctgccggcagcagccctccagggacacgctcagccacccccgtttcctggagcccaccaggctgaca

SEQ ID NO: 133960 - DNA, 80 bp, synthetic construct
  misc_feature 1..80: note = Artificially Synthesized Probe
  source 1..80: mol_type = other DNA
agtccacctgccaggaggcgtggctcagcaggcatcccacaggcaggcaggcccctgtcccatcccccgcggccagggct

SEQ ID NO: 133961 - DNA, 80 bp, synthetic construct
  misc_feature 1..80: note = Artificially Synthesized Probe
  source 1..80: mol_type = other DNA
atcagatcgtgagcaaagtctccacgtatctttatgctccctggggcaactaactttagatgcaggctttaaaaaccaca

SEQ ID NO: 133962 - DNA, 80 bp, synthetic construct; identical to SEQ ID NO: 42339
  misc_feature 1..80: note = Artificially Synthesized Probe
  source 1..80: mol_type = other DNA

SEQ ID NO: 133963 - DNA, 80 bp, synthetic construct
  misc_feature 1..80: note = Artificially Synthesized Probe
  source 1..80: mol_type = other DNA
accagcttgtgtgtaccggacgccacatctccagggaccctgtgtgccaattaggcaggagccaccggacctggagggcc

SEQ ID NO: 133964 - DNA, 80 bp, synthetic construct; identical to SEQ ID NO: 42359
  misc_feature 1..80: note = Artificially Synthesized Probe
  source 1..80: mol_type = other DNA

SEQ ID NO: 133965 - DNA, 80 bp, synthetic construct
  misc_feature 1..80: note = Artificially Synthesized Probe
  source 1..80: mol_type = other DNA
ggttctctgtaccaggctcttggacaatcagcttgtgttgtactgtttcctgaaagttgcaaatattgttgaatgttaat

SEQ ID NO: 133966 - DNA, 80 bp, synthetic construct
  misc_feature 1..80: note = Artificially Synthesized Probe
  source 1..80: mol_type = other DNA
tttaaatgcttgtgactatacatgatcggtgtgactctctacaacagattttgcaattaattgaagtcactgtttctgga

SEQ ID NO: 133967 - DNA, 80 bp, synthetic construct; identical to SEQ ID NO: 42370
  misc_feature 1..80: note = Artificially Synthesized Probe
  source 1..80: mol_type = other DNA

SEQ ID NO: 133968 - DNA, 80 bp, synthetic construct
  misc_feature 1..80: note = Artificially Synthesized Probe
  source 1..80: mol_type = other DNA
ccccaaaacactgaaaacagttttgttcaaacaaaaacttgtacatgaatgttcatagcaacattattcacaatagtcaa

SEQ ID NO: 133969 - DNA, 80 bp, synthetic construct
  misc_feature 1..80: note = Artificially Synthesized Probe
  source 1..80: mol_type = other DNA
aggtcaggagttcaagaccagcctggccaacatggtgaaacctcatctctactaaaaatacaaaaattagccgggtgtgg

SEQ ID NO: 133970 - DNA, 80 bp, synthetic construct
  misc_feature 1..80: note = Artificially Synthesized Probe
  source 1..80: mol_type = other DNA
atgtgctacagcatcgatgaaccttgaaaacattatgctaagctcaagaagccagatgactacatattgtgatatttggg

SEQ ID NO: 133971 - DNA, 80 bp, synthetic construct; identical to SEQ ID NO: 42371
  misc_feature 1..80: note = Artificially Synthesized Probe
  source 1..80: mol_type = other DNA

SEQ ID NO: 133972 - DNA, 80 bp, synthetic construct
  misc_feature 1..80: note = Artificially Synthesized Probe
  source 1..80: mol_type = other DNA
cacttttcagagatgttatccagtttatcctcctgcttcagcacttatccaactcttctagttgtgcctaagagcatttt

SEQ ID NO: 133973 - DNA, 80 bp, synthetic construct
  misc_feature 1..80: note = Artificially Synthesized Probe
  source 1..80: mol_type = other DNA
tgtttcttttgcctgccctctgctttttgtgacatgttgagtacacctcttgaagcctctccacagtagactgagttctc

SEQ ID NO: 133974 - DNA, 80 bp, synthetic construct
  misc_feature 1..80: note = Artificially Synthesized Probe
  source 1..80: mol_type = other DNA
tgggaagacacacaagggtggcccatgagtgcacacctctcgcctccatcagcaggctgtccacagcccagggctcgtct

SEQ ID NO: 133975 - DNA, 80 bp, synthetic construct
  misc_feature 1..80: note = Artificially Synthesized Probe
  source 1..80: mol_type = other DNA
actcagatctacccagctgctcgcgcctggggtccccggccgtcggcgccctggcctgcccagtgggcgtagaggtgcgg

SEQ ID NO: 133976 - DNA, 80 bp, synthetic construct; identical to SEQ ID NO: 42372
  misc_feature 1..80: note = Artificially Synthesized Probe
  source 1..80: mol_type = other DNA

SEQ ID NO: 133977 - DNA, 80 bp, synthetic construct
  misc_feature 1..80: note = Artificially Synthesized Probe
  source 1..80: mol_type = other DNA
agaagccccagagatggtgttgggctccaggattgtttgaattttcagaatccaaactgagggatcaggagaacttggag

SEQ ID NO: 133978 - DNA, 80 bp, synthetic construct
  misc_feature 1..80: note = Artificially Synthesized Probe
  source 1..80: mol_type = other DNA
gcgaaaccccggttctaccaaaaatacaaaaattagccggacgaggtggtgggcacctgtaatcccagctactcgggagg

SEQ ID NO: 133979 - DNA, 80 bp, synthetic construct
  misc_feature 1..80: note = Artificially Synthesized Probe
  source 1..80: mol_type = other DNA
tcccattgctgagcaaagaggaagccaccagggaggaggtgcaaagggaaagagattcccaaaagctgccaagagagagg

SEQ ID NO: 133980 - DNA, 80 bp, synthetic construct; identical to SEQ ID NO: 42373
  misc_feature 1..80: note = Artificially Synthesized Probe
  source 1..80: mol_type = other DNA

SEQ ID NO: 133981 - DNA, 80 bp, synthetic construct
  misc_feature 1..80: note = Artificially Synthesized Probe
  source 1..80: mol_type = other DNA
tagggtaactagaaagggcacctccatcactgattttccaactgactttcagagacaccatctggatgctctgaggcaag

SEQ ID NO: 133982 - DNA, 80 bp, synthetic construct
  misc_feature 1..80: note = Artificially Synthesized Probe
  source 1..80: mol_type = other DNA
gcaaagccaggcttcctggtgaatcccgttacagccgtcccgtttatccatggtttcgcttttcgaagtttcaattacag

SEQ ID NO: 133983 - DNA, 80 bp, synthetic construct
  misc_feature 1..80: note = Artificially Synthesized Probe
  source 1..80: mol_type = other DNA
tatagggttccgtaccatccttgggatcgagcatccgctgggggtcttggtgtgtatccctgtggataagggggcctact

SEQ ID NO: 133984 - DNA, 80 bp, synthetic construct; identical to SEQ ID NO: 42374
  misc_feature 1..80: note = Artificially Synthesized Probe
  source 1..80: mol_type = other DNA

SEQ ID NO: 133985 - DNA, 80 bp, synthetic construct
  misc_feature 1..80: note = Artificially Synthesized Probe
  source 1..80: mol_type = other DNA
cccatatgggcaaaaaatatgaattcataaaaggagaaattcagttggtcaataaacgcgtgaagtgttgaacttcaaca

SEQ ID NO: 133986 - DNA, 80 bp, synthetic construct
  misc_feature 1..80: note = Artificially Synthesized Probe
  source 1..80: mol_type = other DNA
ccccagggcgcccgcaggcaggtggagctgacctaggaactgggagccctgagtcccaaccttgaccctggagtacccgg

SEQ ID NO: 133987 - DNA, 80 bp, synthetic construct
  misc_feature 1..80: note = Artificially Synthesized Probe
  source 1..80: mol_type = other DNA
gagggaagaaaagctgcacaagctttctaaaggaattttgatggtaggtaagaaaagatctaggactggaaatacccttt

SEQ ID NO: 133988 - DNA, 80 bp, synthetic construct; identical to SEQ ID NO: 42375
  misc_feature 1..80: note = Artificially Synthesized Probe
  source 1..80: mol_type = other DNA

SEQ ID NO: 133989 - DNA, 80 bp, synthetic construct
  misc_feature 1..80: note = Artificially Synthesized Probe
  source 1..80: mol_type = other DNA
cctgtattacttctgcaatttgagaacacaaatccagaggtgcccagtgctttgtaaagatagtgtggcaggcacatgct

SEQ ID NO: 133990 - DNA, 80 bp, synthetic construct
  misc_feature 1..80: note = Artificially Synthesized Probe
  source 1..80: mol_type = other DNA
agaatatatttttgtatcttctgcaatctacattaaagatgcccgtccatcattttcagaagaggcctttcgtgttagga

SEQ ID NO: 133991 - DNA, 80 bp, synthetic construct
  misc_feature 1..80: note = Artificially Synthesized Probe
  source 1..80: mol_type = other DNA
tcacactgttagtgttagcatcctcatttcttctgcctttttttcactcctctctacgtagttggggatatctgttgtta

SEQ ID NO: 133992 - DNA, 80 bp, synthetic construct
  misc_feature 1..80: note = Artificially Synthesized Probe
  source 1..80: mol_type = other DNA
tttttaccaggatcaaaaatgaaaaccacgtgtccccctggccttgtatgatgaatgacaaatgtgtgggactgaggaga

SEQ ID NO: 133993 - DNA, 80 bp, synthetic construct; identical to SEQ ID NO: 42376
  misc_feature 1..80: note = Artificially Synthesized Probe
  source 1..80: mol_type = other DNA

SEQ ID NO: 133994 - DNA, 80 bp, synthetic construct
  misc_feature 1..80: note = Artificially Synthesized Probe
  source 1..80: mol_type = other DNA
atcggggcctgatcctcagttcgaagacacagatgctcactgctgtagagacataaagaaaccaagaggttaactgccag

SEQ ID NO: 133995 - DNA, 80 bp, synthetic construct
  misc_feature 1..80: note = Artificially Synthesized Probe
  source 1..80: mol_type = other DNA
cagctgccaggagcactccaagttctggtttcctctggaagagcgattagggcgtcctgcaccgggtccttttcaccaga

SEQ ID NO: 133996 - DNA, 80 bp, synthetic construct
  misc_feature 1..80: note = Artificially Synthesized Probe
  source 1..80: mol_type = other DNA
cagttccaaggcgcgccccacccggcccccaggccaggtcagcctggggaggggagaactaagggcaccaggcagcccac

SEQ ID NO: 133997 - DNA, 80 bp, synthetic construct
  misc_feature 1..80: note = Artificially Synthesized Probe
  source 1..80: mol_type = other DNA
aggcctgcaccctaccctgggaaacacctgtggggctgtccccttctctgagcatctgtgaggggttttcctctccttag

SEQ ID NO: 133998 - DNA, 80 bp, synthetic construct; identical to SEQ ID NO: 42377
  misc_feature 1..80: note = Artificially Synthesized Probe
  source 1..80: mol_type = other DNA

SEQ ID NO: 133999 - DNA, 80 bp, synthetic construct
  misc_feature 1..80: note = Artificially Synthesized Probe
  source 1..80: mol_type = other DNA
cagccagtccaattatctaaaaaatgagatttttccctccatgccaagtatggccccatcctactgagtcgggtcattat

SEQ ID NO: 134000 - DNA, 80 bp, synthetic construct
  misc_feature 1..80: note = Artificially Synthesized Probe
  source 1..80: mol_type = other DNA
cagtctgctctcaggtgctcctgtgttgggagcaaggcctgaggcgctcgtgtcaggattccctgcgggagatcgggtag

SEQ ID NO: 134001 - DNA, 80 bp, synthetic construct; identical to SEQ ID NO: 42378
  misc_feature 1..80: note = Artificially Synthesized Probe
  source 1..80: mol_type = other DNA

SEQ ID NO: 134002 - DNA, 80 bp, synthetic construct
  misc_feature 1..80: note = Artificially Synthesized Probe
  source 1..80: mol_type = other DNA
ccgccggggtcggatcggcccttcttcctggtcccatctcccgggatctgctgtcccctcttcaggcccttctttgtgtg

SEQ ID NO: 134003 - DNA, 80 bp, synthetic construct
  misc_feature 1..80: note = Artificially Synthesized Probe
  source 1..80: mol_type = other DNA
caggcctgccaggcaccgcccaggttccccatggcacgggccctgcctgctcttctgtgagctgcctctgagccctgggc

SEQ ID NO: 134004 - DNA, 80 bp, synthetic construct
  misc_feature 1..80: note = Artificially Synthesized Probe
  source 1..80: mol_type = other DNA
acctgtaatcctggcactttgggaggctgaggcaggcagatcacgaggtcaggaattcgagaccagcctggccaacatgg

SEQ ID NO: 134005 - DNA, 80 bp, synthetic construct
  misc_feature 1..80: note = Artificially Synthesized Probe
  source 1..80: mol_type = other DNA
tgctggggccgagttaaaaatccttcccccttagtatgttttagttcctcgcacatcttgcgatgtttttataaaagact

SEQ ID NO: 134006 - DNA, 80 bp, synthetic construct; identical to SEQ ID NO: 42379
  misc_feature 1..80: note = Artificially Synthesized Probe
  source 1..80: mol_type = other DNA

SEQ ID NO: 134007 - DNA, 80 bp, synthetic construct
  misc_feature 1..80: note = Artificially Synthesized Probe
  source 1..80: mol_type = other DNA
ccttcaggactgtgtccttgtcatgtatccggatgcccggctcagcccatgccctgcacaagtgggggtcatggagggag

SEQ ID NO: 134008 - DNA, 80 bp, synthetic construct
  misc_feature 1..80: note = Artificially Synthesized Probe
  source 1..80: mol_type = other DNA
cctgggggtcttgtgtttgccccaaacagaggagccagcctcttgtttcgagggccttttccgtcctcgaagccagcagc

SEQ ID NO: 134009 - DNA, 80 bp, synthetic construct
  misc_feature 1..80: note = Artificially Synthesized Probe
  source 1..80: mol_type = other DNA
actgtacagcctagcctggagacatcttgggggaaagtgattcatctgatctgggatggaagattattctggggagtaaa

SEQ ID NO: 134010 - DNA, 80 bp, synthetic construct
  misc_feature 1..80: note = Artificially Synthesized Probe
  source 1..80: mol_type = other DNA
aggaagaggctgggaggagagagttgtggctgggaaccctttgataaacaggaaagaatattttcactttggcacaggcc

SEQ ID NO: 134011 - DNA, 80 bp, synthetic construct; identical to SEQ ID NO: 42380
  misc_feature 1..80: note = Artificially Synthesized Probe
  source 1..80: mol_type = other DNA

SEQ ID NO: 134012 - DNA, 80 bp, synthetic construct
  misc_feature 1..80: note = Artificially Synthesized Probe
  source 1..80: mol_type = other DNA
ggggccaccctcctgcatgtagtgaggctcgggaaacgtggaacgaaagaaagatagaaaaaataaatgcagtataatgg

SEQ ID NO: 134013 - DNA, 80 bp, synthetic construct
  misc_feature 1..80: note = Artificially Synthesized Probe
  source 1..80: mol_type = other DNA
ggctcccaggggctctgctgagaagcccttagacatcgtctagtacagcccctgggccctctctggggtgcagacaagct

SEQ ID NO: 134014 - DNA, 80 bp, synthetic construct
  misc_feature 1..80: note = Artificially Synthesized Probe
  source 1..80: mol_type = other DNA
gggtggagagcctcagtgggggatgggggactggctaagtcaggcagactcaaggggtatggccagacggatcccagtct

SEQ ID NO: 134015 - DNA, 80 bp, synthetic construct
  misc_feature 1..80: note = Artificially Synthesized Probe
  source 1..80: mol_type = other DNA
cgaaaagctgatccagcacaggtgggttttatttcatttttttagcttttattttggtgtcactgaaaattctgtagctg

SEQ ID NO: 134016 - DNA, 80 bp, synthetic construct; identical to SEQ ID NO: 42381
  misc_feature 1..80: note = Artificially Synthesized Probe
  source 1..80: mol_type = other DNA

SEQ ID NO: 134017 - DNA, 80 bp, synthetic construct
  misc_feature 1..80: note = Artificially Synthesized Probe
  source 1..80: mol_type = other DNA
tcgcattttctagagaaaggaagttcatctcagaggggtcagttggcatcggtgtctgggttgtgagagacagtgtcgtc

SEQ ID NO: 134018 - DNA, 80 bp, synthetic construct
  misc_feature 1..80: note = Artificially Synthesized Probe
  source 1..80: mol_type = other DNA
ttgtttgcacagaatgggaaataggtccaagtgcggtgaggagtactttaaagaagggatttcacaagcggtgctggcac

SEQ ID NO: 134019 - DNA, 80 bp, synthetic construct; identical to SEQ ID NO: 42382
  misc_feature 1..80: note = Artificially Synthesized Probe
  source 1..80: mol_type = other DNA

SEQ ID NO: 134020 - DNA, 80 bp, synthetic construct
  misc_feature 1..80: note = Artificially Synthesized Probe
  source 1..80: mol_type = other DNA
gatgcttgacactaccacccatcagagaaatgcagatccaaccagaaagaggtaccagctcacacctatgaggttgccta

SEQ ID NO: 134021 - DNA, 80 bp, synthetic construct
  misc_feature 1..80: note = Artificially Synthesized Probe
  source 1..80: mol_type = other DNA
acttgagaggctgaggcaggaggatcacttgagtccaggagtttgaggttacagtgagctatgcacaccactgcactcca

SEQ ID NO: 134022 - DNA, 80 bp, synthetic construct
  misc_feature 1..80: note = Artificially Synthesized Probe
  source 1..80: mol_type = other DNA
agacagtacggagggtcctcaaaaaataaaatgcagaacaaacaaaacgacaaaacgtggtgtgtacacagacacaccat

SEQ ID NO: 134023 - DNA, 80 bp, synthetic construct
  misc_feature 1..80: note = Artificially Synthesized Probe
  source 1..80: mol_type = other DNA
cacaaaccacacaccccacacacaagccacacaccccacacacacatcacataccacacacccccacacaccccacacac

SEQ ID NO: 134024 - DNA, 80 bp, synthetic construct; identical to SEQ ID NO: 42361
  misc_feature 1..80: note = Artificially Synthesized Probe
  source 1..80: mol_type = other DNA

SEQ ID NO: 134025 - DNA, 80 bp, synthetic construct; identical to SEQ ID NO: 42383
  misc_feature 1..80: note = Artificially Synthesized Probe
  source 1..80: mol_type = other DNA

SEQ ID NO: 134026 - DNA, 80 bp, synthetic construct
  misc_feature 1..80: note = Artificially Synthesized Probe
  source 1..80: mol_type = other DNA
catcacataccacacacaagccacacaaccccccagacaccacaccccacacacacagtacacactacacacaaaccaca

SEQ ID NO: 134027 - DNA, 80 bp, synthetic construct
  misc_feature 1..80: note = Artificially Synthesized Probe
  source 1..80: mol_type = other DNA
ccacacacaccacatcctcccacacaccacacacacaccccactctgacacacaccacacacacagcacaccccactcac

SEQ ID NO: 134028 - DNA, 80 bp, synthetic construct; identical to SEQ ID NO: 42384
  misc_feature 1..80: note = Artificially Synthesized Probe
  source 1..80: mol_type = other DNA

SEQ ID NO: 134029 - DNA, 80 bp, synthetic construct
  misc_feature 1..80: note = Artificially Synthesized Probe
  source 1..80: mol_type = other DNA
acacaccttaccccacacacaccacacacacaccacatccctcccacacacaccacacacacaccacaccccacacatac

SEQ ID NO: 134030 - DNA, 80 bp, synthetic construct
  misc_feature 1..80: note = Artificially Synthesized Probe
  source 1..80: mol_type = other DNA
cccaacacacacacacacacgatggaatgtcattctgcctttaaaaaggaaggttgtctcgatagggaccatagcatgga

SEQ ID NO: 134031 - DNA, 80 bp, synthetic construct
  misc_feature 1..80: note = Artificially Synthesized Probe
  source 1..80: mol_type = other DNA
gtggggacagagtctcagtctgagaggagaaaaagagttctggagatgatggtggttaaggtcacacagcagcgtgaatg

SEQ ID NO: 134032 - DNA, 80 bp, synthetic construct
  misc_feature 1..80: note = Artificially Synthesized Probe
  source 1..80: mol_type = other DNA
agctcgagaggcagcccaagcgcttcggccggaagcggcgctacagcaagaagtcgagcgaagatggcagcccgaccccg

SEQ ID NO: 134033 - DNA, 80 bp, synthetic construct
  misc_feature 1..80: note = Artificially Synthesized Probe
  source 1..80: mol_type = other DNA
cccccatgctctctatcccactagcagtccctggccaagagtcccgggccactttatgccctcagacttgttgctcattt

SEQ ID NO: 134034 - DNA, 80 bp, synthetic construct; identical to SEQ ID NO: 42385
  misc_feature 1..80: note = Artificially Synthesized Probe
  source 1..80: mol_type = other DNA

SEQ ID NO: 134035 - DNA, 80 bp, synthetic construct
  misc_feature 1..80: note = Artificially Synthesized Probe
  source 1..80: mol_type = other DNA
gccgtgtttaaggaaaatgtcactttaattatcgttaagactgccctccagaaaattactgaaaacaaataccagtagat

SEQ ID NO: 134036 - DNA, 80 bp, synthetic construct
  misc_feature 1..80: note = Artificially Synthesized Probe
  source 1..80: mol_type = other DNA
gtcttcaaggtcattctgatgaaagctttcaggcatttttgaagctgtgagttattaaatacgtagcatctacccatggg

SEQ ID NO: 134037 - DNA, 80 bp, synthetic construct
  misc_feature 1..80: note = Artificially Synthesized Probe
  source 1..80: mol_type = other DNA
tggttttgcgtagctggtatcatgtggggcagctgcagggtccttcgtgttgccctcacatttactgagtcctggctgtt

SEQ ID NO: 134038 - DNA, 80 bp, synthetic construct; identical to SEQ ID NO: 42386
  misc_feature 1..80: note = Artificially Synthesized Probe
  source 1..80: mol_type = other DNA

SEQ ID NO: 134039 - DNA, 80 bp, synthetic construct
  misc_feature 1..80: note = Artificially Synthesized Probe
  source 1..80: mol_type = other DNA
tcaccatgaagcttgccatgggaggggaggggagggcaggcaggaaacacacaagacagcagatgtgggcttgctgacca

SEQ ID NO: 134040 - DNA, 80 bp, synthetic construct
  misc_feature 1..80: note = Artificially Synthesized Probe
  source 1..80: mol_type = other DNA
agagtagaagggagctgcagagatgtgcacgcatgagcgcacacaagagctacggggtcctgctgagtgagatgttctca

SEQ ID NO: 134041 - DNA, 80 bp, synthetic construct
  misc_feature 1..80: note = Artificially Synthesized Probe
  source 1..80: mol_type = other DNA
gatgagtgggcctgagggtacgttccggaacatctcgataccagaaacaaaataataaaaagcctttgtttgtgtcttgc

SEQ ID NO: 134042 - DNA, 80 bp, synthetic construct
  misc_feature 1..80: note = Artificially Synthesized Probe
  source 1..80: mol_type = other DNA
ttgctgatccatgttccatcaaggaaaaaactcacttgcggctctgtacctctctgagatggggttcatgcgttagagga

SEQ ID NO: 134043 - DNA, 80 bp, synthetic construct; identical to SEQ ID NO: 42387
  misc_feature 1..80: note = Artificially Synthesized Probe
  source 1..80: mol_type = other DNA

SEQ ID NO: 134044 - DNA, 80 bp, synthetic construct
  misc_feature 1..80: note = Artificially Synthesized Probe
  source 1..80: mol_type = other DNA
aagaaaaatgttaaggatgcaggcccaggagacgttgtgttatcccaggacttccacaataaaaaagcgagctttcgaaa

SEQ ID NO: 134045 - DNA, 80 bp, synthetic construct
  misc_feature 1..80: note = Artificially Synthesized Probe
  source 1..80: mol_type = other DNA
aatcttggtactttgcttgtttcttggagaatctacaggggctctctgccttggatgcttacccaggattcaggtagaag

SEQ ID NO: 134046 - DNA, 80 bp, synthetic construct
  misc_feature 1..80: note = Artificially Synthesized Probe
  source 1..80: mol_type = other DNA
tggaaaaaagcccttgaaaatataatagataattacacagttagtgggagagctgatgatctataaggagcctatttatt

SEQ ID NO: 134047 - DNA, 80 bp, synthetic construct; identical to SEQ ID NO: 42388
  misc_feature 1..80: note = Artificially Synthesized Probe
  source 1..80: mol_type = other DNA

SEQ ID NO: 134048 - DNA, 80 bp, synthetic construct
  misc_feature 1..80: note = Artificially Synthesized Probe
  source 1..80: mol_type = other DNA
acccaactgggcaagccctggctgaagagattggacatctggagtccatcactgtctgaggccatggtggacccagctct

SEQ ID NO: 134049 - DNA, 80 bp, synthetic construct
  misc_feature 1..80: note = Artificially Synthesized Probe
  source 1..80: mol_type = other DNA
agcttccagcagctttctctctagcggaaaatggattcaaccaaaagatcaaagatgaggaaatttagaagtccatgtga

SEQ ID NO: 134050 - DNA, 80 bp, synthetic construct
  misc_feature 1..80: note = Artificially Synthesized Probe
  source 1..80: mol_type = other DNA
aagaaagtgccgtgaacttcagctccctgaccggggtcacgggaatgccataaatcaggccagacaaattcccatgatgt

SEQ ID NO: 134051 - DNA, 80 bp, synthetic construct; identical to SEQ ID NO: 42389
  misc_feature 1..80: note = Artificially Synthesized Probe
  source 1..80: mol_type = other DNA

SEQ ID NO: 134052 - DNA, 80 bp, synthetic construct
  misc_feature 1..80: note = Artificially Synthesized Probe
  source 1..80: mol_type = other DNA
tggacgtgggggaccctggcagaaaggaaatctgtctcagtgagctgtgcttgtcagaaatcctcccagtgcaccggtca

SEQ ID NO: 134053 - DNA, 80 bp, synthetic construct
  misc_feature 1..80: note = Artificially Synthesized Probe
  source 1..80: mol_type = other DNA
tcctaaggagtttgaaattaggaagaataaaacttaggggaaaaaatgactacaaagtgtctcctgaactggccctacaa

SEQ ID NO: 134054 - DNA, 80 bp, synthetic construct
  misc_feature 1..80: note = Artificially Synthesized Probe
  source 1..80: mol_type = other DNA
agattagaaaaaataaagatgagaaagcctctcagagcatctgtcatggtatctaccaaaacctgtcagggataggagaa

SEQ ID NO: 134055 - DNA, 80 bp, synthetic construct; identical to SEQ ID NO: 42390
  misc_feature 1..80: note = Artificially Synthesized Probe
  source 1..80: mol_type = other DNA

SEQ ID NO: 134056 - DNA, 80 bp, synthetic construct
  misc_feature 1..80: note = Artificially Synthesized Probe
  source 1..80: mol_type = other DNA
caccttgtttttatttatcaggcacgttaggcagacatcttgtcattctttttgtctttaactcattattccctataaga

SEQ ID NO: 134057 - DNA, 80 bp, synthetic construct
  misc_feature 1..80: note = Artificially Synthesized Probe
  source 1..80: mol_type = other DNA
ccttaccttcagcggatcacctgaggtcaggagtttgagactagcctggccaacatgctgagacccccgtctctactaaa

SEQ ID NO: 134058 - DNA, 80 bp, synthetic construct
  misc_feature 1..80: note = Artificially Synthesized Probe
  source 1..80: mol_type = other DNA
aaaacagcaacaacaaaatcctaggtagcactcaagtcttttgtataaaagtcagcaggtttctcgccagtatactgttt

SEQ ID NO: 134059 - DNA, 80 bp, synthetic construct
  misc_feature 1..80: note = Artificially Synthesized Probe
  source 1..80: mol_type = other DNA
actaagaaccttgctgtctaccccatatcaaaaaaagaaatcatttgaaaatctttagaacaaatgaaacaatttagact

SEQ ID NO: 134060 - DNA, 80 bp, synthetic construct
  misc_feature 1..80: note = Artificially Synthesized Probe
  source 1..80: mol_type = other DNA
acttttatgaagaaaaatctcttagctagagagtccaatagaatattttttgaatgaggagctctatttattaggactct

SEQ ID NO: 134061 - DNA, 80 bp, synthetic construct; identical to SEQ ID NO: 42391
  misc_feature 1..80: note = Artificially Synthesized Probe
  source 1..80: mol_type = other DNA

SEQ ID NO: 134062 - DNA, 80 bp, synthetic construct
  misc_feature 1..80: note = Artificially Synthesized Probe
  source 1..80: mol_type = other DNA
acagcccaggatgtcgttaaaggctgatgttctctgttagttggtaaacagctctcatggtgccctctcccccactgtac

SEQ ID NO: 134063 - DNA, 80 bp, synthetic construct
  misc_feature 1..80: note = Artificially Synthesized Probe
  source 1..80: mol_type = other DNA
tcctacaattttctaatctagagtgaaatggccaccagagagtataaacgccagagtgtgatgagaaaaagaggatgtcg

SEQ ID NO: 134064 - DNA, 80 bp, synthetic construct
  misc_feature 1..80: note = Artificially Synthesized Probe
  source 1..80: mol_type = other DNA
agcagcccctgttgatctttttctgcagtgaagttgtgctcctcatgttaacctggagtttattcctccaggaggtaacg

SEQ ID NO: 134065 - DNA, 80 bp, synthetic construct; identical to SEQ ID NO: 42392
  misc_feature 1..80: note = Artificially Synthesized Probe
  source 1..80: mol_type = other DNA

SEQ ID NO: 134066 - DNA, 80 bp, synthetic construct
  misc_feature 1..80: note = Artificially Synthesized Probe
  source 1..80: mol_type = other DNA
tcgcatgtatgctttatacagagaagaatccagcgagcacaaaaggcaagctgactgaggttgtctcggccgtcctgggc

SEQ ID NO: 134067 - DNA, 80 bp, synthetic construct; identical to SEQ ID NO: 42362
  misc_feature 1..80: note = Artificially Synthesized Probe
  source 1..80: mol_type = other DNA

SEQ ID NO: 134068 - DNA, 80 bp, synthetic construct
  misc_feature 1..80: note = Artificially Synthesized Probe
  source 1..80: mol_type = other DNA
tgggggtagaacatcagaagtggatgacctcttgaaaaggtgacagtccctccctgtcagcccacgactgttctggtttc

SEQ ID NO: 134069 - DNA, 80 bp, synthetic construct; identical to SEQ ID NO: 42393
  misc_feature 1..80: note = Artificially Synthesized Probe
  source 1..80: mol_type = other DNA

SEQ ID NO: 134070 - DNA, 80 bp, synthetic construct
  misc_feature 1..80: note = Artificially Synthesized Probe
  source 1..80: mol_type = other DNA
tgggaagttccctggacctgcagaagggcatgattggctgtcctggtgtggtgtggtcagggagggcttcctagaggagg

SEQ ID NO: 134071 - DNA, 80 bp, synthetic construct
  misc_feature 1..80: note = Artificially Synthesized Probe
  source 1..80: mol_type = other DNA
gggaccttcacggggctctgggctgccaacattgtagggcgttatttagtgtgagtgttagtgttagtattagtgttggt

SEQ ID NO: 134072 - DNA, 80 bp, synthetic construct
  misc_feature 1..80: note = Artificially Synthesized Probe
  source 1..80: mol_type = other DNA
gtattagtgttagtatttattggtattagtgttagtactagtatttattagtgttagtgttattgttagtgttagtgttg

SEQ ID NO: 134073 - DNA, 80 bp, synthetic construct; identical to SEQ ID NO: 42394
  misc_feature 1..80: note = Artificially Synthesized Probe
  source 1..80: mol_type = other DNA

SEQ ID NO: 134074 - DNA, 80 bp, synthetic construct
  misc_feature 1..80: note = Artificially Synthesized Probe
  source 1..80: mol_type = other DNA
atgttagtatctattagtattagtgttagtgttggtgttaatattagcattagtgtcagtgttagtattagtgttagtgt

SEQ ID NO: 134075 - DNA, 80 bp, synthetic construct
  misc_feature 1..80: note = Artificially Synthesized Probe
  source 1..80: mol_type = other DNA
atgttagtgttagtatttattagtgttagtgttggtaatatttattagcattagtgttagtgttagtatttattagtatt

SEQ ID NO: 134076 - DNA, 80 bp, synthetic construct
  misc_feature 1..80: note = Artificially Synthesized Probe
  source 1..80: mol_type = other DNA
tagtgttactgttagtcttagtgttagtgtcagtattagtattagtgttagtgtcagtattagtgtatttattagtgtta

SEQ ID NO: 134077 - DNA, 80 bp, synthetic construct
  misc_feature 1..80: note = Artificially Synthesized Probe
  source 1..80: mol_type = other DNA
tctaatagaaaaatctcaaaaggatttttttagtattctcattaaatgcctgagtcttcggagcagggtcccagacacct

SEQ ID NO: 134078 - DNA, 80 bp, synthetic construct
  misc_feature 1..80: note = Artificially Synthesized Probe
  source 1..80: mol_type = other DNA
attagtgtcagtgtcagtgttagtgttagtattagtgtcggtatttattagtattagtgttagtgtgagtattagtgtta

SEQ ID NO: 134079 - DNA, 80 bp, synthetic construct; identical to SEQ ID NO: 42395
  misc_feature 1..80: note = Artificially Synthesized Probe
  source 1..80: mol_type = other DNA

SEQ ID NO: 134080 - DNA, 80 bp, synthetic construct
  misc_feature 1..80: note = Artificially Synthesized Probe
  source 1..80: mol_type = other DNA
ggacatgacgagggcttgagggaggagaaggtgccacctgctgtgtgcctgggttttccatccatgagagcccgtgggca

SEQ ID NO: 134081 - DNA, 80 bp, synthetic construct
  misc_feature 1..80: note = Artificially Synthesized Probe
  source 1..80: mol_type = other DNA
tctgtgtctctcttatggtcttatttaggggcacatggcaagtcagatttaaccctgggcctctggctcccaggtccctg

SEQ ID NO: 134082 - DNA, 80 bp, synthetic construct; identical to SEQ ID NO: 42396
  misc_feature 1..80: note = Artificially Synthesized Probe
  source 1..80: mol_type = other DNA

SEQ ID NO: 134083 - DNA, 80 bp, synthetic construct
  misc_feature 1..80: note = Artificially Synthesized Probe
  source 1..80: mol_type = other DNA
tttggggtaacattgactcatgttaggatcatttgagcctcttcaccttgactccgattggcctccaaggcagcaccgac

SEQ ID NO: 134084 - DNA, 80 bp, synthetic construct
  misc_feature 1..80: note = Artificially Synthesized Probe
  source 1..80: mol_type = other DNA
gagcctgtctgcttggagtcctgggaagtgatatcttgattttaaaagtcctccatgatcaaagcttctttcaacaaagt

SEQ ID NO: 134085 - DNA, 80 bp, synthetic construct
  misc_feature 1..80: note = Artificially Synthesized Probe
  source 1..80: mol_type = other DNA
acatcattccctccagtttgggggtgagatggacatgaatgtttcttctgtgattccttctcctccaggttctgtttttc

SEQ ID NO: 134086 - DNA, 80 bp, synthetic construct
  misc_feature 1..80: note = Artificially Synthesized Probe
  source 1..80: mol_type = other DNA
tgtgaattcttctagaaacccgagcagggcctttgcgtttctgaacctccattttctgcttttttatttacttgggtagt

SEQ ID NO: 134087 - DNA, 80 bp, synthetic construct; identical to SEQ ID NO: 42397
  misc_feature 1..80: note = Artificially Synthesized Probe
  source 1..80: mol_type = other DNA

SEQ ID NO: 134088 - DNA, 80 bp, synthetic construct
  misc_feature 1..80: note = Artificially Synthesized Probe
  source 1..80: mol_type = other DNA
ctccctatcctttaactccaatagaaggagaaggatggggattttgaagacagatcagggaaaacatttagcatttgagc

SEQ ID NO: 134089 - DNA, 80 bp, synthetic construct
  misc_feature 1..80: note = Artificially Synthesized Probe
  source 1..80: mol_type = other DNA
gctactttgaagaaattgcatgaccccttcaccatctaatatatgtgagccttttcctccctcctgaaaatttacttctc

SEQ ID NO: 134090 - DNA, 80 bp, synthetic construct
  misc_feature 1..80: note = Artificially Synthesized Probe
  source 1..80: mol_type = other DNA
ctgacagggttatgttgttgctggtttcccagctgtaagatgcacataactgtggcttttctctcctcctgcatctgcaa

SEQ ID NO: 134091 - DNA, 80 bp, synthetic construct
  misc_feature 1..80: note = Artificially Synthesized Probe
  source 1..80: mol_type = other DNA
aatctgaattcccctagggttaatccaaattcccctagggttaatccgaattcttccagccttcctcccttcggaaatct

SEQ ID NO: 134092 - DNA, 80 bp, synthetic construct
  misc_feature 1..80: note = Artificially Synthesized Probe
  source 1..80: mol_type = other DNA
ctgccccagggatcccaaggctcctgggcctgggattgcaagactctgagtcagggctctccaccttcacctggagaagt

SEQ ID NO: 134093 - DNA, 80 bp, synthetic construct; identical to SEQ ID NO: 42398
  misc_feature 1..80: note = Artificially Synthesized Probe
  source 1..80: mol_type = other DNA

SEQ ID NO: 134094 - DNA, 80 bp, synthetic construct
  misc_feature 1..80: note = Artificially Synthesized Probe
  source 1..80: mol_type = other DNA
cagcagacctagcccccagtgctggcaaaatgtacctcgcaggcctcccgcaggtcaggagcacagggagccttccggaa

SEQ ID NO: 134095 - DNA, 80 bp, synthetic construct
  misc_feature 1..80: note = Artificially Synthesized Probe
  source 1..80: mol_type = other DNA
ggggcatcagtggagcgtccccccatggaagagaatgtccacacgctcgtggagacacgtttctcctgagaagcctggag

SEQ ID NO: 134096 - DNA, 80 bp, synthetic construct
  misc_feature 1..80: note = Artificially Synthesized Probe
  source 1..80: mol_type = other DNA
ggaaccctgattcccgccctgcctcgtttgcaggctggagggcctggctcccctggatggtggtcagtcttccctctctc

SEQ ID NO: 134097 - DNA, 80 bp, synthetic construct; identical to SEQ ID NO: 42399
  misc_feature 1..80: note = Artificially Synthesized Probe
  source 1..80: mol_type = other DNA

SEQ ID NO: 134098 - DNA, 80 bp, synthetic construct
  misc_feature 1..80: note = Artificially Synthesized Probe
  source 1..80: mol_type = other DNA
gagatgaagggagtatgactgggaggcttatcaggatcacatcttaaagagaaccaatgggttttatacattttaaagta

SEQ ID NO: 134099 - DNA, 80 bp, synthetic construct
  misc_feature 1..80: note = Artificially Synthesized Probe
  source 1..80: mol_type = other DNA
agaaggcccagaggctgtactgaggcctagacaacatggtgaaaacctatctctactaaaaatacaaaaattatctgggc

SEQ ID NO: 134100 - DNA, 80 bp, synthetic construct; identical to SEQ ID NO: 42363
  misc_feature 1..80: note = Artificially Synthesized Probe
  source 1..80: mol_type = other DNA

SEQ ID NO: 134101 - DNA, 80 bp, synthetic construct
  misc_feature 1..80: note = Artificially Synthesized Probe
  source 1..80: mol_type = other DNA
cattactgatgattttctcactaagatataaaatgcaccgtgaactttgttccacaaacaacagaacagctcccacgatg

SEQ ID NO: 134102 - DNA, 80 bp, synthetic construct; identical to SEQ ID NO: 42400
  misc_feature 1..80: note = Artificially Synthesized Probe
  source 1..80: mol_type = other DNA

SEQ ID NO: 134103 - DNA, 80 bp, synthetic construct
  misc_feature 1..80: note = Artificially Synthesized Probe
  source 1..80: mol_type = other DNA
gtacacttctgggctattgtctggagccccgggggcatgggaggtttgaggctccagtgcttatctcggtgagtgattct

SEQ ID NO: 134104 - DNA, 80 bp, synthetic construct
  misc_feature 1..80: note = Artificially Synthesized Probe
  source 1..80: mol_type = other DNA
aacaagagactcttcccaccagaggagattctgaatgatgctgccattgccagaccttctgctaccaaacagagcgaaga

SEQ ID NO: 134105 - DNA, 80 bp, synthetic construct
  misc_feature 1..80: note = Artificially Synthesized Probe
  source 1..80: mol_type = other DNA
agttgttttttcaagttcagaaaatgaaccttcaccaaggtcttggaacatgaagcagagactctggtgctgactctatc

SEQ ID NO: 134106 - DNA, 80 bp, synthetic construct; identical to SEQ ID NO: 42401
  misc_feature 1..80: note = Artificially Synthesized Probe
  source 1..80: mol_type = other DNA

SEQ ID NO: 134107 - DNA, 80 bp, synthetic construct
  misc_feature 1..80: note = Artificially Synthesized Probe
  source 1..80: mol_type = other DNA
ggtgccctgggcatgtttaggaatcaaatcctggcatttggctgaaattaatgcaattaaattatcagtttctcaaatgc

SEQ ID NO: 134108 - DNA, 80 bp, synthetic construct
  misc_feature 1..80: note = Artificially Synthesized Probe
  source 1..80: mol_type = other DNA
gccaatgagatttgggaggaagcctcggtgcagcttccaggctaaagttcagaagaagctgtgtgcaggacgtcaggtct

SEQ ID NO: 134109 - DNA, 80 bp, synthetic construct
  misc_feature 1..80: note = Artificially Synthesized Probe
  source 1..80: mol_type = other DNA
gcaaacgactgctgcatgaacctcctgagattcaggggcttctttgttgcagcgtgaagcctaacttgttctgcctgaca

SEQ ID NO: 134110 - DNA, 80 bp, synthetic construct; identical to SEQ ID NO: 42402
  misc_feature 1..80: note = Artificially Synthesized Probe
  source 1..80: mol_type = other DNA

SEQ ID NO: 134111 - DNA, 80 bp, synthetic construct
  misc_feature 1..80: note = Artificially Synthesized Probe
  source 1..80: mol_type = other DNA
ctccatttcaggttttgttgaagtgttcttccctctactcactttcatccttcttgtttgattgcagggccgtgctttgt

SEQ ID NO: 134112 - DNA, 80 bp, synthetic construct
  misc_feature 1..80: note = Artificially Synthesized Probe
  source 1..80: mol_type = other DNA
cactctgttctgggtagacggcacagatgccggattccttttgcctggcaaaaaaatttaaaaaaagaaaaaaaaacacc

SEQ ID NO: 134113 - DNA, 80 bp, synthetic construct
  misc_feature 1..80: note = Artificially Synthesized Probe
  source 1..80: mol_type = other DNA
tgaaagtagatggctggattcccttataaacatcgactttgacaccactctgtatattcatggggtctgtattagaaaaa

SEQ ID NO: 134114 - DNA, 80 bp, synthetic construct; identical to SEQ ID NO: 42403
  misc_feature 1..80: note = Artificially Synthesized Probe
  source 1..80: mol_type = other DNA

SEQ ID NO: 134115 - DNA, 80 bp, synthetic construct
  misc_feature 1..80: note = Artificially Synthesized Probe
  source 1..80: mol_type = other DNA
actggagatgttctttgacacgcaaatggttgtaaatgttctcttaaaaaaattccagtgtcatccttgggtctgtcctg

SEQ ID NO: 134116 - DNA, 80 bp, synthetic construct
  misc_feature 1..80: note = Artificially Synthesized Probe
  source 1..80: mol_type = other DNA
gaattctgaatcgtggactgggtaggaacaatgtgagtgtaaaatctccaccctcaaaccatgaattcagtaaatcatga

SEQ ID NO: 134117 - DNA, 80 bp, synthetic construct
  misc_feature 1..80: note = Artificially Synthesized Probe
  source 1..80: mol_type = other DNA
taatatgtgtataccagatatataaatatcaaagaccctaaagccactaccagcctgctcttccagagcccaaactgtcc

SEQ ID NO: 134118 - DNA, 80 bp, synthetic construct
  misc_feature 1..80: note = Artificially Synthesized Probe
  source 1..80: mol_type = other DNA
atagttacctgagttatctaagctgcagtgaatagtcctctacggccccattgcagtcgtaacatggagtaggattccac

SEQ ID NO: 134119 - DNA, 80 bp, synthetic construct; identical to SEQ ID NO: 42404
  misc_feature 1..80: note = Artificially Synthesized Probe
  source 1..80: mol_type = other DNA

SEQ ID NO: 134120 - DNA, 80 bp, synthetic construct
  misc_feature 1..80: note = Artificially Synthesized Probe
  source 1..80: mol_type = other DNA
cctgctcccagggcttagttttcgaggacagctgcgtggaggatacgttcttaaagacatccctggagagcgaggttcac

SEQ ID NO: 134121 - DNA, 80 bp, synthetic construct
  misc_feature 1..80: note = Artificially Synthesized Probe
  source 1..80: mol_type = other DNA
gacgctgaccgctgctctgtgcaggaccggcacagtgagagcacagcccggcctgcgcggggcaggcaccctccagagcc

SEQ ID NO: 134122 - DNA, 80 bp, synthetic construct
  misc_feature 1..80: note = Artificially Synthesized Probe
  source 1..80: mol_type = other DNA
cagaaatgtgtgtgcatgtgtggccaactctcattcatgtcattttctagttctggaaaaaaattcactgtttaggaaaa

SEQ ID NO: 134123 - DNA, 80 bp, synthetic construct; identical to SEQ ID NO: 42405
  misc_feature 1..80: note = Artificially Synthesized Probe
  source 1..80: mol_type = other DNA

SEQ ID NO: 134124 - DNA, 80 bp, synthetic construct
  misc_feature 1..80: note = Artificially Synthesized Probe
  source 1..80: mol_type = other DNA
ggtgtctttaaaaaccctgtgaatgcatgctggaatgtctgtttatgtttgtgtcttttcctgggaaaggataaatgtgc

SEQ ID NO: 134125 - DNA, 80 bp, synthetic construct
  misc_feature 1..80: note = Artificially Synthesized Probe
  source 1..80: mol_type = other DNA
cgggaccttgccagctatttgtgggctgataagaatccgtgcactttcactcctgttctcggatcccccgagcttcggcg

SEQ ID NO: 134126 - DNA, 80 bp, synthetic construct
  misc_feature 1..80: note = Artificially Synthesized Probe
  source 1..80: mol_type = other DNA
cagagccgtccccagctccaggtgctcttagatcagcgaggccaccttgaccctatcgggagcattcggactcctggtaa

SEQ ID NO: 134127 - DNA, 80 bp, synthetic construct; identical to SEQ ID NO: 42406
  misc_feature 1..80: note = Artificially Synthesized Probe
  source 1..80: mol_type = other DNA

SEQ ID NO: 134128 - DNA, 80 bp, synthetic construct
  misc_feature 1..80: note = Artificially Synthesized Probe
  source 1..80: mol_type = other DNA
tcgagggtcatccttggctggctgacagcaccctcactctgggagctggaagctgggaaggcagaggcgtgcacattttc

SEQ ID NO: 134129 - DNA, 80 bp, synthetic construct
  misc_feature 1..80: note = Artificially Synthesized Probe
  source 1..80: mol_type = other DNA
aggacaagctgtatttgtgcacctgcgcaaggcgggaccactgaaatttagccctggagttcgttcacggagccgctgac

SEQ ID NO: 134130 - DNA, 80 bp, synthetic construct
  misc_feature 1..80: note = Artificially Synthesized Probe
  source 1..80: mol_type = other DNA
aagggtgagtccttccccaggactcagcgggtgagagactccggctcacctcacggcggaacgcagacacctgagagccc

SEQ ID NO: 134131 - DNA, 80 bp, synthetic construct; identical to SEQ ID NO: 42407
  misc_feature 1..80: note = Artificially Synthesized Probe
  source 1..80: mol_type = other DNA

SEQ ID NO: 134132 - DNA, 80 bp, synthetic construct
  misc_feature 1..80: note = Artificially Synthesized Probe
  source 1..80: mol_type = other DNA
cgcctggctaattttttgtattttagtagagacgggatttcaccatgttacccaggctggtcttgaattcctgaaatcag

SEQ ID NO: 134133 - DNA, 80 bp, synthetic construct
  misc_feature 1..80: note = Artificially Synthesized Probe
  source 1..80: mol_type = other DNA
gatttcttaatatgatgtgtttctcaacagagatcagttttattcatgtggtgcagaagtttgagaatctgaaatgggct

SEQ ID NO: 134134 - DNA, 80 bp, synthetic construct
  misc_feature 1..80: note = Artificially Synthesized Probe
  source 1..80: mol_type = other DNA
tctgggacctggcattgaattataggaggattcttcccattgcttaggtttttgcattcttctgaatataggtgaataga

SEQ ID NO: 134135 - DNA, 80 bp, synthetic construct
  misc_feature 1..80: note = Artificially Synthesized Probe
  source 1..80: mol_type = other DNA
gtaaaggcaagatgaaacactacaaacagaaactgattaaaaagatattccacatggtcacctgagtctacacgtgataa

SEQ ID NO: 134136 - DNA, 80 bp, synthetic construct; identical to SEQ ID NO: 42408
  misc_feature 1..80: note = Artificially Synthesized Probe
  source 1..80: mol_type = other DNA

SEQ ID NO: 134137 - DNA, 80 bp, synthetic construct
  misc_feature 1..80: note = Artificially Synthesized Probe
  source 1..80: mol_type = other DNA
ctcaaagcctccgtgtgctcaggctcagaacctggaacacgggcgcaccgattgcgtgagatggttgagagtcttcagcc

SEQ ID NO: 134138 - DNA, 80 bp, synthetic construct
  misc_feature 1..80: note = Artificially Synthesized Probe
  source 1..80: mol_type = other DNA
tgagcctgctcttctgaagtcctggaccctggtgacctttacgacgcgccgtcctcctgctagcagggggtggtgctctc

SEQ ID NO: 134139 - DNA, 80 bp, synthetic construct
  misc_feature 1..80: note = Artificially Synthesized Probe
  source 1..80: mol_type = other DNA
gaatccagaggcctgggttcaaatcctagcaaagcaagcatctcaacctctgtgccgattcctcctctctccaaggggag

SEQ ID NO: 134140 - DNA, 80 bp, synthetic construct
  misc_feature 1..80: note = Artificially Synthesized Probe
  source 1..80: mol_type = other DNA
tcctcctctctagatctgagtctagcttctgggtcaggatgcacccagccacccaagctgggcccctgagcggccccttg

SEQ ID NO: 134141 - DNA, 80 bp, synthetic construct; identical to SEQ ID NO: 42409
  misc_feature 1..80: note = Artificially Synthesized Probe
  source 1..80: mol_type = other DNA

SEQ ID NO: 134142 - DNA, 80 bp, synthetic construct
  misc_feature 1..80: note = Artificially Synthesized Probe
  source 1..80: mol_type = other DNA
acgagctctccaaaccctcagaaacataactgtcaccttccctgtatgtttattatggaccttttaatctctgtattata

SEQ ID NO: 134143 - DNA, 80 bp, synthetic construct
  misc_feature 1..80: note = Artificially Synthesized Probe
  source 1..80: mol_type = other DNA
ttattattacatttttgtgatagtgatttgttctgctgcttgtctccccatatgaactgtgagctggctgaggcacgtgc

SEQ ID NO: 134144 - DNA, 80 bp, synthetic construct
  misc_feature 1..80: note = Artificially Synthesized Probe
  source 1..80: mol_type = other DNA
tggcttggaccagtgtgtcagtgctgtggatacaaaaggtatttccagcccagggcttagctgacttgcgttctggggga

SEQ ID NO: 134145 - DNA, 80 bp, synthetic construct; identical to SEQ ID NO: 42364
  misc_feature 1..80: note = Artificially Synthesized Probe
  source 1..80: mol_type = other DNA

SEQ ID NO: 134146 - DNA, 80 bp, synthetic construct; identical to SEQ ID NO: 42410
  misc_feature 1..80: note = Artificially Synthesized Probe
  source 1..80: mol_type = other DNA

SEQ ID NO: 134147 - DNA, 80 bp, synthetic construct
  misc_feature 1..80: note = Artificially Synthesized Probe
  source 1..80: mol_type = other DNA
agagaggaagagggtggggtagatcctgacggaccggtcagactctgcggcctcagccccggtagagcccgccctggaga

SEQ ID NO: 134148 - DNA, 80 bp, synthetic construct
  misc_feature 1..80: note = Artificially Synthesized Probe
  source 1..80: mol_type = other DNA
cattccaagcacagtcagcctgggtccctgaagccaagcccaagctgagggagagagacagcctggcttccagctggcgt

SEQ ID NO: 134149 - DNA, 80 bp, synthetic construct
  misc_feature 1..80: note = Artificially Synthesized Probe
  source 1..80: mol_type = other DNA
tgagcaagatccagacgctcaagctggccgccaggtacatagacttcctctaccaggtcctgcagagcgacgagatggac

SEQ ID NO: 134150 - DNA, 80 bp, synthetic construct
  misc_feature 1..80: note = Artificially Synthesized Probe
  source 1..80: mol_type = other DNA
gggcggggatccggaagacggctccgcagtcgcctgactgcaccctgcctactgaccctccagaccctgacggcgaacgc

SEQ ID NO: 134151 - DNA, 80 bp, synthetic construct; identical to SEQ ID NO: 42411
  misc_feature 1..80: note = Artificially Synthesized Probe
  source 1..80: mol_type = other DNA

SEQ ID NO: 134152 - DNA, 80 bp, synthetic construct
  misc_feature 1..80: note = Artificially Synthesized Probe
  source 1..80: mol_type = other DNA
cacccatcaatcctctgggggtcctaggaactttggggtgtgagtgggggaatctcacccatgcagtcattcctgggaag

SEQ ID NO: 134153 - DNA, 80 bp, synthetic construct
  misc_feature 1..80: note = Artificially Synthesized Probe
  source 1..80: mol_type = other DNA
gcccacagacagagacaagggggtcctgcctgtaacagtcactgcttccatttggagaaaagtaggcacaccccaggggg

SEQ ID NO: 134154 - DNA, 80 bp, synthetic construct; identical to SEQ ID NO: 42412
  misc_feature 1..80: note = Artificially Synthesized Probe
  source 1..80: mol_type = other DNA

SEQ ID NO: 134155 - DNA, 80 bp, synthetic construct
  misc_feature 1..80: note = Artificially Synthesized Probe
  source 1..80: mol_type = other DNA
ccacggagtttggccaggaggaggggagcctgacccccaaggacacctgcctttttaccaagtgggacccccttgccacc

SEQ ID NO: 134156 - DNA, 80 bp, synthetic construct
  misc_feature 1..80: note = Artificially Synthesized Probe
  source 1..80: mol_type = other DNA
tgccctgcttagagctcgcagtgcagatgtggcctggaaggaggcatcacactctctaccgtgaaagcagcactctgcat

SEQ ID NO: 134157 - DNA, 80 bp, synthetic construct
  misc_feature 1..80: note = Artificially Synthesized Probe
  source 1..80: mol_type = other DNA
catattttttctgacgccatttgaggaatctcaatatatttccaatatataactaattagaagtggttccctgtaagtct

SEQ ID NO: 134158 - DNA, 80 bp, synthetic construct
  misc_feature 1..80: note = Artificially Synthesized Probe
  source 1..80: mol_type = other DNA
aatggtctctttgaacccttacccagatggaacaaggaaactcgttcagcagagcaggagggactctcccgagagtctcc

SEQ ID NO: 134159 - DNA, 80 bp, synthetic construct
  misc_feature 1..80: note = Artificially Synthesized Probe
  source 1..80: mol_type = other DNA
cccaggccctcctgcctgcctgagactgtctcaagagggctggaggctgtgttaggacccttcagaggaactgcagctgg

SEQ ID NO: 134160 - DNA, 80 bp, synthetic construct; identical to SEQ ID NO: 42413
  misc_feature 1..80: note = Artificially Synthesized Probe
  source 1..80: mol_type = other DNA

SEQ ID NO: 134161 - DNA, 80 bp, synthetic construct
  misc_feature 1..80: note = Artificially Synthesized Probe
  source 1..80: mol_type = other DNA
aatgcccatgaggccattgaggatgcaaagatcgcttggatctattggattggtacaaaaggggagttcccgccagccgc

SEQ ID NO: 134162 - DNA, 80 bp, synthetic construct
  misc_feature 1..80: note = Artificially Synthesized Probe
  source 1..80: mol_type = other DNA
agatagtgccctcgtgctaagggctttgaggcttccgttggggtgggggctggatgggcaaagtcctggaggggaggccc

SEQ ID NO: 134163 - DNA, 80 bp, synthetic construct
  misc_feature 1..80: note = Artificially Synthesized Probe
  source 1..80: mol_type = other DNA
tgaccgatgactgctcccctacatagtatgtgcctgggtcagaaggtgggcagaggctgccatctgtgccctgctgccct

SEQ ID NO: 134164 - DNA, 80 bp, synthetic construct; identical to SEQ ID NO: 42414
  misc_feature 1..80: note = Artificially Synthesized Probe
  source 1..80: mol_type = other DNA

SEQ ID NO: 134165 - DNA, 80 bp, synthetic construct
  misc_feature 1..80: note = Artificially Synthesized Probe
  source 1..80: mol_type = other DNA
ctattgttaccctcacttgggtgttttgcagaagtggaaactgagagctggacaggttaatccactctcccaaggctgcg

SEQ ID NO: 134166 - DNA, 80 bp, synthetic construct
  misc_feature 1..80: note = Artificially Synthesized Probe
  source 1..80: mol_type = other DNA
attctgcattcctggaataaacccttcttggtcatctggaattggttctttaaatacccgacttgacttgatttgctaat

SEQ ID NO: 134167 - DNA, 80 bp, synthetic construct
  misc_feature 1..80: note = Artificially Synthesized Probe
  source 1..80: mol_type = other DNA
aattttgctgggaacctgaagtgctctaaaaaaataaagtctttacaaagaaagaaagaaagaaatataaataaataata

SEQ ID NO: 134168 - DNA, 80 bp, synthetic construct
  misc_feature 1..80: note = Artificially Synthesized Probe
  source 1..80: mol_type = other DNA
ttttatattaactttcattaagcatacacacacaattctaaagccaatgatttataaaaattattcgccaagaagtatag

SEQ ID NO: 134169 - DNA, 80 bp, synthetic construct; identical to SEQ ID NO: 42415
  misc_feature 1..80: note = Artificially Synthesized Probe
  source 1..80: mol_type = other DNA

SEQ ID NO: 134170 - DNA, 80 bp, synthetic construct
  misc_feature 1..80: note = Artificially Synthesized Probe
  source 1..80: mol_type = other DNA
ttgactgtgggcctctcaagattttccttacagccactttccttctccccaacattcttatttgcttgttttgcactggg

SEQ ID NO: 134171 - DNA, 80 bp, synthetic construct
  misc_feature 1..80: note = Artificially Synthesized Probe
  source 1..80: mol_type = other DNA
tggactcgctgggtatggactttcggggctgccctgctctttccaccaacactctggacattctgggagtgtcactgagt

SEQ ID NO: 134172 - DNA, 80 bp, synthetic construct
  misc_feature 1..80: note = Artificially Synthesized Probe
  source 1..80: mol_type = other DNA
tagtctgaagattatcctgataacctgaagataatcctgaacgtggagacacgttcctctgccattttttctgatcgttt

SEQ ID NO: 134173 - DNA, 80 bp, synthetic construct
  misc_feature 1..80: note = Artificially Synthesized Probe
  source 1..80: mol_type = other DNA
aagtgttcccctgcctcagcctctggagtagctgggattacaggtgtgtgccaaccatgctggctaatttttgtattttt

SEQ ID NO: 134174 - DNA, 80 bp, synthetic construct; identical to SEQ ID NO: 42416
  misc_feature 1..80: note = Artificially Synthesized Probe
  source 1..80: mol_type = other DNA

SEQ ID NO: 134175 - DNA, 80 bp, synthetic construct
  misc_feature 1..80: note = Artificially Synthesized Probe
  source 1..80: mol_type = other DNA
gctaggcgttcagcctggatgtgccccctgagtggccctcgggtccctggggtatctccttgtctgttgtgcactcacgc

SEQ ID NO: 134176 - DNA, 80 bp, synthetic construct
  misc_feature 1..80: note = Artificially Synthesized Probe
  source 1..80: mol_type = other DNA
agaggagtggctttgtggggtggccaggacccatcgagacccatgggggtggctggcagctgggacttctccatgtctgt

SEQ ID NO: 134177 - DNA, 80 bp, synthetic construct
  misc_feature 1..80: note = Artificially Synthesized Probe
  source 1..80: mol_type = other DNA
gtgatgccaggggctgaggaaaggcagggaaagctcagggtaatgaatgtcctggacatccgctccatgctgtggatgat

SEQ ID NO: 134178 - DNA, 80 bp, synthetic construct; identical to SEQ ID NO: 42417
  misc_feature 1..80: note = Artificially Synthesized Probe
  source 1..80: mol_type = other DNA

SEQ ID NO: 134179 - DNA, 80 bp, synthetic construct
  misc_feature 1..80: note = Artificially Synthesized Probe
  source 1..80: mol_type = other DNA
tgtgttaatcagggtgtgtgtgtgatgtgataagtgtgtgatatgggatgtatgtgaattggggtatgtgtggtgtgagg

SEQ ID NO: 134180 - DNA, 80 bp, synthetic construct
  misc_feature 1..80: note = Artificially Synthesized Probe
  source 1..80: mol_type = other DNA
gagaaactcaaaccctaagcccagttatagttatttttaatgaataattgtttagaaacatattttctgtttttgtttgg

SEQ ID NO: 134181 - DNA, 80 bp, synthetic construct
  misc_feature 1..80: note = Artificially Synthesized Probe
  source 1..80: mol_type = other DNA
atgtggggttgtgtaatgtgagttgtgtgtgttgtagtgtgtgtgatatgagttgtgcatgatgtgaggtgtgtgatatg

SEQ ID NO: 134182 - DNA, 80 bp, synthetic construct
  misc_feature 1..80: note = Artificially Synthesized Probe
  source 1..80: mol_type = other DNA
atgtgtgaggtgtgtgtgatgtgtgtatgtgatatagtgtgtgtgatgtggggtgtgtgatgggtatgtgcgtgatgtga

SEQ ID NO: 134183 - DNA, 80 bp, synthetic construct; identical to SEQ ID NO: 42418
  misc_feature 1..80: note = Artificially Synthesized Probe
  source 1..80: mol_type = other DNA

SEQ ID NO: 134184 - DNA, 80 bp, synthetic construct
  misc_feature 1..80: note = Artificially Synthesized Probe
  source 1..80: mol_type = other DNA
gtgtctaatgtgaggtgtgtgatgtgggatgtgtgatatagtgtgtgtgatgtgaggtatgtttgaggtagtgtgtgtgt

SEQ ID NO: 134185 - DNA, 80 bp, synthetic construct
  misc_feature 1..80: note = Artificially Synthesized Probe
  source 1..80: mol_type = other DNA
gggtgtgtctaatgtgaggtgtgtgtgggttgtgggatgtgtgatgtagtgtgtgtgatgtgaagtatgtttgaggtagt

SEQ ID NO: 134186 - DNA, 80 bp, synthetic construct
  misc_feature 1..80: note = Artificially Synthesized Probe
  source 1..80: mol_type = other DNA
gtgtgatgtggggtgtgtgtgatgtgggtgtgtgtgtgatgtgaggtgtttgtgatgtgaggtgtgtgtgcgacgtagtg

SEQ ID NO: 134187 - DNA, 80 bp, synthetic construct
  misc_feature 1..80: note = Artificially Synthesized Probe
  source 1..80: mol_type = other DNA
aggtgtgtttgatgtagtgtgtgtgtgatgggggtgtgtctaatgtgaggtgtgtgtgtgtgatatgggatgtgtgatgt

SEQ ID NO: 134188 - DNA, 80 bp, synthetic construct
  misc_feature 1..80: note = Artificially Synthesized Probe
  source 1..80: mol_type = other DNA
agatttcacatgtgtgctcacctcccacccttcttccctgccatgctggttctgactgtccaacggtgtccatggtactt

SEQ ID NO: 134189 - DNA, 80 bp, synthetic construct; identical to SEQ ID NO: 42419
  misc_feature 1..80: note = Artificially Synthesized Probe
  source 1..80: mol_type = other DNA

SEQ ID NO: 134190 - DNA, 80 bp, synthetic construct
  misc_feature 1..80: note = Artificially Synthesized Probe
  source 1..80: mol_type = other DNA
aaaagagacttggatctgaaattggaaaagccaacacataacttgattccagcatgaggaaaatgttttagtgcttagtt

SEQ ID NO: 134191 - DNA, 80 bp, synthetic construct
  misc_feature 1..80: note = Artificially Synthesized Probe
  source 1..80: mol_type = other DNA
gaatgaaggacaggtggtacatcaatgaatggatcaatgaagaaatggatggatggaaggaaggaagagagaaagaaaaa

SEQ ID NO: 134192 - DNA, 80 bp, synthetic construct
  misc_feature 1..80: note = Artificially Synthesized Probe
  source 1..80: mol_type = other DNA
aatgcttctgtccctttgttaggccttggggatatagagttgaatggggcctcacctgctcattagggccccggtctggt

SEQ ID NO: 134193 - DNA, 80 bp, synthetic construct
  misc_feature 1..80: note = Artificially Synthesized Probe
  source 1..80: mol_type = other DNA
agccccagatgttttacatttgttgcagagaacacggcccatgtcagcagacatggctggggtcagggtgacatcaaggg

SEQ ID NO: 134194 - DNA, 80 bp, synthetic construct; identical to SEQ ID NO: 42420
  misc_feature 1..80: note = Artificially Synthesized Probe
  source 1..80: mol_type = other DNA

SEQ ID NO: 134195 - DNA, 80 bp, synthetic construct
  misc_feature 1..80: note = Artificially Synthesized Probe
  source 1..80: mol_type = other DNA
gtgcgtgtgtgtgcatgtgcgcgcatgcgcgtgtgtgcgtgtgtgtgcgtgcaggtgtgcgtgtgcgcgtgtgtgtgcgc

SEQ ID NO: 134196 - DNA, 80 bp, synthetic construct
  misc_feature 1..80: note = Artificially Synthesized Probe
  source 1..80: mol_type = other DNA
ctgggctgctggggtgaagcctggggctgggggttgggagagggctgggggtgaaggagcggaaccacacgtcccccctg

SEQ ID NO: 134197 - DNA, 80 bp, synthetic construct
  misc_feature 1..80: note = Artificially Synthesized Probe
  source 1..80: mol_type = other DNA
gacacacggacccactcacgtggatgtacacacttacaaacatgcacaccagcacttccacgggaaaacacatgcactca

SEQ ID NO: 134198 - DNA, 80 bp, synthetic construct; identical to SEQ ID NO: 42421
  misc_feature 1..80: note = Artificially Synthesized Probe
  source 1..80: mol_type = other DNA

SEQ ID NO: 134199 - DNA, 80 bp, synthetic construct
  misc_feature 1..80: note = Artificially Synthesized Probe
  source 1..80: mol_type = other DNA
acccacccctcccaccacgctcagccgctctgcgggaggagggtctcgttgcgctggtttgccccttggctcaggggagt

SEQ ID NO: 134200 - DNA, 80 bp, synthetic construct
  misc_feature 1..80: note = Artificially Synthesized Probe
  source 1..80: mol_type = other DNA
ctgctagagctcaggtctcctggcaggacagcaacacagcctgggggctgctgcaggctggcctgggtgtgtggcagaag

SEQ ID NO: 134201 - DNA, 80 bp, synthetic construct; identical to SEQ ID NO: 42365
  misc_feature 1..80: note = Artificially Synthesized Probe
  source 1..80: mol_type = other DNA

SEQ ID NO: 134202 - DNA, 80 bp, synthetic construct
  misc_feature 1..80: note = Artificially Synthesized Probe
  source 1..80: mol_type = other DNA
gccccggccacctctcagcaccttctctttgagcttggcaggcacagagggaggcgcgggattggggtccccaccccggc

SEQ ID NO: 134203 - DNA, 80 bp, synthetic construct
  misc_feature 1..80: note = Artificially Synthesized Probe
  source 1..80: mol_type = other DNA
attggcccacaagtgcgcttagaagtcacttgtgtggcatgaggggaccttgtggggctggaagaattgtgtgtcttgat

SEQ ID NO: 134204 - DNA, 80 bp, synthetic construct; identical to SEQ ID NO: 42422
  misc_feature 1..80: note = Artificially Synthesized Probe
  source 1..80: mol_type = other DNA

SEQ ID NO: 134205 - DNA, 80 bp, synthetic construct
  misc_feature 1..80: note = Artificially Synthesized Probe
  source 1..80: mol_type = other DNA
attgtacatacgcaccacatacacaaacacataccacacaaacacaccacacccccacatacacacacaaagtcacgcca

SEQ ID NO: 134206 - DNA, 80 bp, synthetic construct
  misc_feature 1..80: note = Artificially Synthesized Probe
  source 1..80: mol_type = other DNA
acacatacacacgccacactgtacacatataccccccatacaaaatacaatcccccaaacacacaccacatacaccatgc

SEQ ID NO: 134207 - DNA, 80 bp, synthetic construct; identical to SEQ ID NO: 42423
  misc_feature 1..80: note = Artificially Synthesized Probe
  source 1..80: mol_type = other DNA

SEQ ID NO: 134208 - DNA, 80 bp, synthetic construct
  misc_feature 1..80: note = Artificially Synthesized Probe
  source 1..80: mol_type = other DNA
ccatatggtatgttgtctgtgtggatatgtatgtggtatgtttgtgcagtgtgtggggtgtgtgtagtatgcagtgtgtt

SEQ ID NO: 134209 - DNA, 80 bp, synthetic construct
  misc_feature 1..80: note = Artificially Synthesized Probe
  source 1..80: mol_type = other DNA
tggtgtgtttgtgtggtgtgtggtggtgtatgtagtgtgtttgtgtatgtggcagtgtggtgtgtttgtgtgtgtggtat

SEQ ID NO: 134210 - DNA, 80 bp, synthetic construct
  misc_feature 1..80: note = Artificially Synthesized Probe
  source 1..80: mol_type = other DNA
gtgtgtatgtggggtggggtgtgttcgtgggtgtggtatgtgtatgtggtgtgtagtgtggggtgtgtgtagtgtgtggt

SEQ ID NO: 134211 - DNA, 80 bp, synthetic construct
  misc_feature 1..80: note = Artificially Synthesized Probe
  source 1..80: mol_type = other DNA
gacagggttgaactcagaagagctttcggttatcacattcgattatcctggaaaatactcctgtctttttagttcacatt

SEQ ID NO: 134212 - DNA, 80 bp, synthetic construct; identical to SEQ ID NO: 42424
  misc_feature 1..80: note = Artificially Synthesized Probe
  source 1..80: mol_type = other DNA

SEQ ID NO: 134213 - DNA, 80 bp, synthetic construct
  misc_feature 1..80: note = Artificially Synthesized Probe
  source 1..80: mol_type = other DNA
ggggcaggaaagggcactcgggggagggaaagggcttggcctggcccagggggcaggggttgcggaagcctgggctggcc

SEQ ID NO: 134214 - DNA, 80 bp, synthetic construct
  misc_feature 1..80: note = Artificially Synthesized Probe
  source 1..80: mol_type = other DNA
ttccgtatcttccaggctgtccgtcgcgtcggcggcgcaagtggaattgggatgcattcgagtctgtaacttctgaaacc

SEQ ID NO: 134215 - DNA, 80 bp, synthetic construct
  misc_feature 1..80: note = Artificially Synthesized Probe
  source 1..80: mol_type = other DNA
atcttgtttctgtttggatttttcttctgggtcttatgtttggggggaggtttattctttctgaaaatgtctagattcag

SEQ ID NO: 134216 - DNA, 80 bp, synthetic construct; identical to SEQ ID NO: 42425
  misc_feature 1..80: note = Artificially Synthesized Probe
  source 1..80: mol_type = other DNA

SEQ ID NO: 134217 - DNA, 80 bp, synthetic construct
  misc_feature 1..80: note = Artificially Synthesized Probe
  source 1..80: mol_type = other DNA
atatgttgcttgtttgttttatttattgagatatttttacaagctaagtgactgcagtgtggctgtgtatcctgctcccc

SEQ ID NO: 134218 - DNA, 80 bp, synthetic construct
  misc_feature 1..80: note = Artificially Synthesized Probe
  source 1..80: mol_type = other DNA
ttgggcaaaccccttgatttgtattaacccttcgaccttgactaaacatcagaccccaccctgtggctgaggtctgtggt

SEQ ID NO: 134219 - DNA, 80 bp, synthetic construct
  misc_feature 1..80: note = Artificially Synthesized Probe
  source 1..80: mol_type = other DNA
ctgtttttctgtcgctatccagacaaaatgccaccctagcatttctgttaaatctctgtaagtagatgcccctgctgaag

SEQ ID NO: 134220 - DNA, 80 bp, synthetic construct; identical to SEQ ID NO: 42366
  misc_feature 1..80: note = Artificially Synthesized Probe
  source 1..80: mol_type = other DNA

SEQ ID NO: 134221 - DNA, 80 bp, synthetic construct
  misc_feature 1..80: note = Artificially Synthesized Probe
  source 1..80: mol_type = other DNA
cagggttggcaaaacctataccgactgggtcccttccggaaagtttgtgtgaactttaaatctcagtctcagggagactg

SEQ ID NO: 134222 - DNA, 80 bp, synthetic construct
  misc_feature 1..80: note = Artificially Synthesized Probe
  source 1..80: mol_type = other DNA
cgccctccgctgcggggggcgggcggcaggggcgcaggggcattggggcctgctcgtgtctcctcggcgaggccccgcgg

SEQ ID NO: 134223 - DNA, 80 bp, synthetic construct
  misc_feature 1..80: note = Artificially Synthesized Probe
  source 1..80: mol_type = other DNA
cgggcatctacacgtctctgttcacatcattgacaccaatgggcgaacagtgtcttcattgaggattaattttcctgaaa

SEQ ID NO: 134224 - DNA, 80 bp, synthetic construct; identical to SEQ ID NO: 42367
  misc_feature 1..80: note = Artificially Synthesized Probe
  source 1..80: mol_type = other DNA

SEQ ID NO: 134225 - DNA, 80 bp, synthetic construct
  misc_feature 1..80: note = Artificially Synthesized Probe
  source 1..80: mol_type = other DNA
tccgcttgaggtttcactttataaaaaagtaatagaggaagaacgagaagcccaccatcaggtcccgtgatagctcagtc

SEQ ID NO: 134226 - DNA, 80 bp, synthetic construct
  misc_feature 1..80: note = Artificially Synthesized Probe
  source 1..80: mol_type = other DNA
ctattttctaaaagtattgtttcactgataccagaacaggagtgctccaaacagatatctgtaccctaagaatcccaggg

SEQ ID NO: 134227 - DNA, 80 bp, synthetic construct
  misc_feature 1..80: note = Artificially Synthesized Probe
  source 1..80: mol_type = other DNA
gtcttgtgtgactgcgaaggtgttaataggcagggtccaggtggcccatgcgagctggcagcattggaagggtagaatta

SEQ ID NO: 134228 - DNA, 80 bp, synthetic construct
  misc_feature 1..80: note = Artificially Synthesized Probe
  source 1..80: mol_type = other DNA
ttactcacctctctgctcgtttcagtgttgctgtatgtcatctcctttcttgttttactacagttcacaagtgaataata

SEQ ID NO: 134229 - DNA, 80 bp, synthetic construct; identical to SEQ ID NO: 42368
  misc_feature 1..80: note = Artificially Synthesized Probe
  source 1..80: mol_type = other DNA

SEQ ID NO: 134230 - DNA, 80 bp, synthetic construct
  misc_feature 1..80: note = Artificially Synthesized Probe
  source 1..80: mol_type = other DNA
ccctccacactgctgcaatagtgccacgagggaggccgctgcagacacagtcacttgaagaggacctcaggtgccttccc

SEQ ID NO: 134231 - DNA, 80 bp, synthetic construct
  misc_feature 1..80: note = Artificially Synthesized Probe
  source 1..80: mol_type = other DNA
gcctggggtcaaggaccactggagggagcttgggttggcctgagactgttcaggggaggggcaccatgggcatggtgccc

SEQ ID NO: 134232 - DNA, 80 bp, synthetic construct
  misc_feature 1..80: note = Artificially Synthesized Probe
  source 1..80: mol_type = other DNA
atcagctcgtgctgatgaatgtctgagcatgagcccagcacggctcagcatttgccaaggttaaggaaaggaagtggtaa

SEQ ID NO: 134233 - DNA, 80 bp, synthetic construct; identical to SEQ ID NO: 42369
  misc_feature 1..80: note = Artificially Synthesized Probe
  source 1..80: mol_type = other DNA

SEQ ID NO: 134234 - DNA, 80 bp, synthetic construct; identical to SEQ ID NO: 42360
  misc_feature 1..80: note = Artificially Synthesized Probe
  source 1..80: mol_type = other DNA

SEQ ID NO: 134235 - DNA, 80 bp, synthetic construct
  misc_feature 1..80: note = Artificially Synthesized Probe
  source 1..80: mol_type = other DNA
tgtggtggcacacggctgtaatcccagctactcaagaggttgaggcaggagaatcacttgaacccaggaggcagaggttg

SEQ ID NO: 134236 - DNA, 80 bp, synthetic construct
  misc_feature 1..80: note = Artificially Synthesized Probe
  source 1..80: mol_type = other DNA
aaaacatgagtttattaccagatggtggagatggtgggcctcaagtttggaagctgggggatttaagggctggattagtg

SEQ ID NO: 134237 - DNA, 80 bp, synthetic construct
  misc_feature 1..80: note = Artificially Synthesized Probe
  source 1..80: mol_type = other DNA
ggcttgaggttggggtgtaggagatgtttgggtaccagagtagtcagagggatgtgggtcagggtgtcggccagggtcca

SEQ ID NO: 134238 - DNA, 80 bp, synthetic construct
  misc_feature 1..80: note = Artificially Synthesized Probe
  source 1..80: mol_type = other DNA
tcatggctcactgcagccttgaactcctgggctcaagtgatccttccattccagcctcacaagtagctaggactacaggc

SEQ ID NO: 134239 - DNA, 80 bp, synthetic construct
  misc_feature 1..80: note = Artificially Synthesized Probe
  source 1..80: mol_type = other DNA
aggagttttgagctacctgcagaggaaaggaagaggtggggttaggcagggttggatgtgcaggggctgaggcctaggag

SEQ ID NO: 134240 - DNA, 80 bp, synthetic construct; identical to SEQ ID NO: 42437
  misc_feature 1..80: note = Artificially Synthesized Probe
  source 1..80: mol_type = other DNA

SEQ ID NO: 134241 - DNA, 80 bp, synthetic construct; identical to SEQ ID NO: 42427
  misc_feature 1..80: note = Artificially Synthesized Probe
  source 1..80: mol_type = other DNA

SEQ ID NO: 134242 - DNA, 80 bp, synthetic construct
  misc_feature 1..80: note = Artificially Synthesized Probe
  source 1..80: mol_type = other DNA
gggacccactcactttcagggccgcgcacacagacgccatgcacgaaggccaggtgcgtgtgggagacctggctcatgag

SEQ ID NO: 134243 - DNA, 80 bp, synthetic construct
  misc_feature 1..80: note = Artificially Synthesized Probe
  source 1..80: mol_type = other DNA
acacacccccaggcctggccctgcccactcaccagggcgatgtcatggtgactagggtccagcactttgagcaccactcg

SEQ ID NO: 134244 - DNA, 80 bp, synthetic construct
  misc_feature 1..80: note = Artificially Synthesized Probe
  source 1..80: mol_type = other DNA
ataccgccatggtgaaagttagcagctgatctcccagggcccccagcacccacatccccaggggccctgcccttgccccg

SEQ ID NO: 134245 - DNA, 80 bp, synthetic construct; identical to SEQ ID NO: 42438
  misc_feature 1..80: note = Artificially Synthesized Probe
  source 1..80: mol_type = other DNA

SEQ ID NO: 134246 - DNA, 80 bp, synthetic construct
  misc_feature 1..80: note = Artificially Synthesized Probe
  source 1..80: mol_type = other DNA
tggcaggaggtggcagaggtgggagcagtaagcaggggaccaggcagggaacgtgtccagccccagccccagcccccagc

SEQ ID NO: 134247 - DNA, 80 bp, synthetic construct
  misc_feature 1..80: note = Artificially Synthesized Probe
  source 1..80: mol_type = other DNA
cacggccaagaaagaaaaataagttcacagaggtggggtctctagacaggagtaaggcacacggtgtgggtgaggctgac

SEQ ID NO: 134248 - DNA, 80 bp, synthetic construct
  misc_feature 1..80: note = Artificially Synthesized Probe
  source 1..80: mol_type = other DNA
cactctggacccatacccgggaacaatgacactcattacctacttagagggcacacacacagctaggacaagtgtcagac

SEQ ID NO: 134249 - DNA, 80 bp, synthetic construct; identical to SEQ ID NO: 42439
  misc_feature 1..80: note = Artificially Synthesized Probe
  source 1..80: mol_type = other DNA

SEQ ID NO: 134250 - DNA, 80 bp, synthetic construct
  misc_feature 1..80: note = Artificially Synthesized Probe
  source 1..80: mol_type = other DNA
ctgatctctcttttttttttttttttttttgagacagggtcttgctctgttgcccaggctggagtgcagcggtgcaatct

SEQ ID NO: 134251 - DNA, 80 bp, synthetic construct
  misc_feature 1..80: note = Artificially Synthesized Probe
  source 1..80: mol_type = other DNA
gattctcccacctcggcctcctaaagcgctgggattacaggtgtgagccaccacacccagcctactcctactcttgtact

SEQ ID NO: 134252 - DNA, 80 bp, synthetic construct
  misc_feature 1..80: note = Artificially Synthesized Probe
  source 1..80: mol_type = other DNA
aactaatcacccaatatgacagggcaacataggggccagggcatcccagacacagaggtgacacaaacatgcactataaa

SEQ ID NO: 134253 - DNA, 80 bp, synthetic construct
  misc_feature 1..80: note = Artificially Synthesized Probe
  source 1..80: mol_type = other DNA
gccgcctgagtagctgggattacaggcacctgccaccacgcccggctaatttttgtatttttagtagagacggggtttca

SEQ ID NO: 134254 - DNA, 80 bp, synthetic construct
  misc_feature 1..80: note = Artificially Synthesized Probe
  source 1..80: mol_type = other DNA
cacaggtaggacaagggacagagagtcacagggccagtgaccagacaaagagacagtcacaaatcacgacttggcagcac

SEQ ID NO: 134255 - DNA, 80 bp, synthetic construct; identical to SEQ ID NO: 42440
  misc_feature 1..80: note = Artificially Synthesized Probe
  source 1..80: mol_type = other DNA

SEQ ID NO: 134256 - DNA, 80 bp, synthetic construct
  misc_feature 1..80: note = Artificially Synthesized Probe
  source 1..80: mol_type = other DNA
cgagtgcctgtagtcccaggtagtcagttgggaggctgaggcaggagaatcgcttgaacccgggaggcggaggctgcagt

SEQ ID NO: 134257 - DNA, 80 bp, synthetic construct
  misc_feature 1..80: note = Artificially Synthesized Probe
  source 1..80: mol_type = other DNA
ggggtccgtggatcccatcccggatgctcatcaccagccgtgggggagccacctcgtggcacaggtagtggctggagtcg

SEQ ID NO: 134258 - DNA, 80 bp, synthetic construct; identical to SEQ ID NO: 42441
  misc_feature 1..80: note = Artificially Synthesized Probe
  source 1..80: mol_type = other DNA

SEQ ID NO: 134259 - DNA, 80 bp, synthetic construct
  misc_feature 1..80: note = Artificially Synthesized Probe
  source 1..80: mol_type = other DNA
atacctcctgcactttcccctggggagagactggagccagaagggccaggcaccaacctaggttgacctcccaagtccca

SEQ ID NO: 134260 - DNA, 80 bp, synthetic construct
  misc_feature 1..80: note = Artificially Synthesized Probe
  source 1..80: mol_type = other DNA
cagggggtaagcagatggaggaccttctccaagaaactggccctagcggacaggtgccccagagccatgtggggagaggg

SEQ ID NO: 134261 - DNA, 80 bp, synthetic construct
  misc_feature 1..80: note = Artificially Synthesized Probe
  source 1..80: mol_type = other DNA
agcacctcgtgggttgggggcccagcagcagactcagggccagggtctgtaggggccaccccactgtcccggatgtagca

SEQ ID NO: 134262 - DNA, 80 bp, synthetic construct; identical to SEQ ID NO: 42442
  misc_feature 1..80: note = Artificially Synthesized Probe
  source 1..80: mol_type = other DNA

SEQ ID NO: 134263 - DNA, 80 bp, synthetic construct
  misc_feature 1..80: note = Artificially Synthesized Probe
  source 1..80: mol_type = other DNA
cttgggaagccaaggcggaaggatcgcttgaggtcaggagttcgagaccagcctggccaacatgatgaaactcagtctgt

SEQ ID NO: 134264 - DNA, 80 bp, synthetic construct
  misc_feature 1..80: note = Artificially Synthesized Probe
  source 1..80: mol_type = other DNA
agtctcgctctgtcacccagctggagtgcagtcgggagatctcggctcactgcaagctccgcctcccgggttcatgccat

SEQ ID NO: 134265 - DNA, 80 bp, synthetic construct
  misc_feature 1..80: note = Artificially Synthesized Probe
  source 1..80: mol_type = other DNA
ctccggctcagaaaaaaaaaaaagtagaggcacggcaatatgcaaagtctaccctggctcccagatgctcaggacatttc

SEQ ID NO: 134266 - DNA, 80 bp, synthetic construct
  misc_feature 1..80: note = Artificially Synthesized Probe
  source 1..80: mol_type = other DNA
ctctcattcttaaagtggtggatctcctcctcggtcgacagctcccacagtgatgccacgtcattcacaaactcatgctt

SEQ ID NO: 134267 - DNA, 80 bp, synthetic construct; identical to SEQ ID NO: 42443
  misc_feature 1..80: note = Artificially Synthesized Probe
  source 1..80: mol_type = other DNA

SEQ ID NO: 134268 - DNA, 80 bp, synthetic construct
  misc_feature 1..80: note = Artificially Synthesized Probe
  source 1..80: mol_type = other DNA
aggttgcagtgagctgagatcatgacattgcactccagcctgagcaacaagaatgaaactctgtctcaaaaaaaaaaaaa

SEQ ID NO: 134269 - DNA, 80 bp, synthetic construct
  misc_feature 1..80: note = Artificially Synthesized Probe
  source 1..80: mol_type = other DNA
gggagagaccaccatttactggaaaggccaaatacacagcatacacccctcctcttgtcaatcttgtgcctgtggcagac

SEQ ID NO: 134270 - DNA, 80 bp, synthetic construct
  misc_feature 1..80: note = Artificially Synthesized Probe
  source 1..80: mol_type = other DNA
ttactaaaaatagaaaaattagcctggggtggtggcgggcttctgtaatctcagttacttgggaggctgaggtggaagaa

SEQ ID NO: 134271 - DNA, 80 bp, synthetic construct
  misc_feature 1..80: note = Artificially Synthesized Probe
  source 1..80: mol_type = other DNA
atcacgaggtcaggagatggagaccatcctagctaacactgtgaaaccccgtctccactaaaaatacaaaaaattagctg

SEQ ID NO: 134272 - DNA, 80 bp, synthetic construct; identical to SEQ ID NO: 42444
  misc_feature 1..80: note = Artificially Synthesized Probe
  source 1..80: mol_type = other DNA

SEQ ID NO: 134273 - DNA, 80 bp, synthetic construct
  misc_feature 1..80: note = Artificially Synthesized Probe
  source 1..80: mol_type = other DNA
gccatgccagttccggaaataaaacctgcaggaaggagggacgcagctggggcttagcacagagtcagaccagcttcagc

SEQ ID NO: 134274 - DNA, 80 bp, synthetic construct
  misc_feature 1..80: note = Artificially Synthesized Probe
  source 1..80: mol_type = other DNA
atcgaagagggcaaagagattgaagcaaggaggagtgatacctggatcaggtgagaaacgaggtcaggagtcacgtcatt

SEQ ID NO: 134275 - DNA, 80 bp, synthetic construct
  misc_feature 1..80: note = Artificially Synthesized Probe
  source 1..80: mol_type = other DNA
ctgggattacaggcttgagccaccgcgcctggcccagcctatgcctttctaattgctctagcaaactcccggtggggctg

SEQ ID NO: 134276 - DNA, 80 bp, synthetic construct; identical to SEQ ID NO: 42445
  misc_feature 1..80: note = Artificially Synthesized Probe
  source 1..80: mol_type = other DNA

SEQ ID NO: 134277 - DNA, 80 bp, synthetic construct
  misc_feature 1..80: note = Artificially Synthesized Probe
  source 1..80: mol_type = other DNA
gagagcagtgacacgatcttggctcgctgcaacttccgcctcctgggttcaagtgattctcctgtctcagcctcctgagt

SEQ ID NO: 134278 - DNA, 80 bp, synthetic construct
  misc_feature 1..80: note = Artificially Synthesized Probe
  source 1..80: mol_type = other DNA
tgtgctcggccgattttaggtaaaccttgattaagatttggggggattgcttattcctgcagcaaaactaatcctagcct

SEQ ID NO: 134279 - DNA, 80 bp, synthetic construct
  misc_feature 1..80: note = Artificially Synthesized Probe
  source 1..80: mol_type = other DNA
tatggcttgttccaaacaacatatcttatctgtggttggcaaactccaaccttcccttcctctgcccttttttttttaag

SEQ ID NO: 134280 - DNA, 80 bp, synthetic construct; identical to SEQ ID NO: 42446
  misc_feature 1..80: note = Artificially Synthesized Probe
  source 1..80: mol_type = other DNA

SEQ ID NO: 134281 - DNA, 80 bp, synthetic construct
  misc_feature 1..80: note = Artificially Synthesized Probe
  source 1..80: mol_type = other DNA
tcacgcctataatcccagcactttgggaggctgaggtgggcagaccacgaggtcaggagatcaagaccatcttggctaac

SEQ ID NO: 134282 - DNA, 80 bp, synthetic construct
  misc_feature 1..80: note = Artificially Synthesized Probe
  source 1..80: mol_type = other DNA
tgggcgacagagcgagactctgtctcaaacaacacaacaaaacaaaacaaagaatcagccatggccaggctcgagggtgc

SEQ ID NO: 134283 - DNA, 80 bp, synthetic construct
  misc_feature 1..80: note = Artificially Synthesized Probe
  source 1..80: mol_type = other DNA
ctgaggcaggaggactgcttgaacccgggaggcggaggttgcagtgagccaagatcgtgccactgagctccagcctgggc

SEQ ID NO: 134284 - DNA, 80 bp, synthetic construct; identical to SEQ ID NO: 42447
  misc_feature 1..80: note = Artificially Synthesized Probe
  source 1..80: mol_type = other DNA

SEQ ID NO: 134285 - DNA, 80 bp, synthetic construct
  misc_feature 1..80: note = Artificially Synthesized Probe
  source 1..80: mol_type = other DNA
atcgcagctactcagcaggctgaggcaagagaattgcttgaacctggaggcagaggttgcagtgagccgagatcacgcca

SEQ ID NO: 134286 - DNA, 80 bp, synthetic construct
  misc_feature 1..80: note = Artificially Synthesized Probe
  source 1..80: mol_type = other DNA
gaccagcctaagcaacatagtgagacccctcatctctaaaaaaactaaaaataaaataaattagccaggtgtggctggag

SEQ ID NO: 134287 - DNA, 80 bp, synthetic construct
  misc_feature 1..80: note = Artificially Synthesized Probe
  source 1..80: mol_type = other DNA
cggggggctgcactgagggcttggggatcagaccaggctgaagccctcacctgagactgaaggaccctctgggctcagtt

SEQ ID NO: 134288 - DNA, 80 bp, synthetic construct
  misc_feature 1..80: note = Artificially Synthesized Probe
  source 1..80: mol_type = other DNA
ctggtctcaaactcctaggctcaagtgatcctcccacctcagcctcctgagtagctgggaggctgagctactcagcctcc

SEQ ID NO: 134289 - DNA, 80 bp, synthetic construct
  misc_feature 1..80: note = Artificially Synthesized Probe
  source 1..80: mol_type = other DNA
atcacctgaggtcgggagttcgagaccagcctgaccaaaatggagaaaccccgtctctactaaaaatacaaaattagctg

SEQ ID NO: 134290 - DNA, 80 bp, synthetic construct; identical to SEQ ID NO: 42448
  misc_feature 1..80: note = Artificially Synthesized Probe
  source 1..80: mol_type = other DNA

SEQ ID NO: 134291 - DNA, 80 bp, synthetic construct
  misc_feature 1..80: note = Artificially Synthesized Probe
  source 1..80: mol_type = other DNA
ttttccatatgataaacaaggcggctctaaacattctcataagtgtccctgggagcacatgagctgactgtttatagagt

SEQ ID NO: 134292 - DNA, 80 bp, synthetic construct
  misc_feature 1..80: note = Artificially Synthesized Probe
  source 1..80: mol_type = other DNA
ctcctgcctcagcctcccgagtagctgggactacaggcgcccgccaccatgcccagctaatttttttgtatttttttagt

SEQ ID NO: 134293 - DNA, 80 bp, synthetic construct; identical to SEQ ID NO: 42449
  misc_feature 1..80: note = Artificially Synthesized Probe
  source 1..80: mol_type = other DNA

SEQ ID NO: 134294 - DNA, 80 bp, synthetic construct
  misc_feature 1..80: note = Artificially Synthesized Probe
  source 1..80: mol_type = other DNA
gctcaagtgatcctcccacctcagcctcctgagtagctgggactacaggtgcacaccagcacacagcacacctggctaat

SEQ ID NO: 134295 - DNA, 80 bp, synthetic construct
  misc_feature 1..80: note = Artificially Synthesized Probe
  source 1..80: mol_type = other DNA
aagtcacaccatggaattatactgcccctctgtgaagggaggatacctccctgtgaaacaatatatattttttttagatg

SEQ ID NO: 134296 - DNA, 80 bp, synthetic construct
  misc_feature 1..80: note = Artificially Synthesized Probe
  source 1..80: mol_type = other DNA
agagtttttgctcttgttgcccaggctggagtgcagtggcgtgatctcggctcactgtaacctccaccccctgggttcaa

SEQ ID NO: 134297 - DNA, 80 bp, synthetic construct; identical to SEQ ID NO: 42450
  misc_feature 1..80: note = Artificially Synthesized Probe
  source 1..80: mol_type = other DNA

SEQ ID NO: 134298 - DNA, 80 bp, synthetic construct; identical to SEQ ID NO: 42428
  misc_feature 1..80: note = Artificially Synthesized Probe
  source 1..80: mol_type = other DNA

SEQ ID NO: 134299 - DNA, 80 bp, synthetic construct
  misc_feature 1..80: note = Artificially Synthesized Probe
  source 1..80: mol_type = other DNA
ccatgctggtctcaaactcctaacctcaagtgatctgcccgcctcagcctcccaaagtgctgggattacaggcgtgaccc

SEQ ID NO: 134300 - DNA, 80 bp, synthetic construct
  misc_feature 1..80: note = Artificially Synthesized Probe
  source 1..80: mol_type = other DNA
cccaccctggcttttgcctgctatgccccaatttcaattgttacttccccttccaaactctcaaaattgataccccagtc

SEQ ID NO: 134301 - DNA, 80 bp, synthetic construct
  misc_feature 1..80: note = Artificially Synthesized Probe
  source 1..80: mol_type = other DNA
gcactttgggaggctgaggtgggcggatcacgaggtcaggagatcgagaccatcctggctagcacagtgaaaccctgtct

SEQ ID NO: 134302 - DNA, 80 bp, synthetic construct; identical to SEQ ID NO: 42451
  misc_feature 1..80: note = Artificially Synthesized Probe
  source 1..80: mol_type = other DNA

SEQ ID NO: 134303 - DNA, 80 bp, synthetic construct
  misc_feature 1..80: note = Artificially Synthesized Probe
  source 1..80: mol_type = other DNA
tcacttgaacccgggaggcggaggttgcagtgagccgagatcacaccactgcactccagcctgggtgacagagcgagact

SEQ ID NO: 134304 - DNA, 80 bp, synthetic construct
  misc_feature 1..80: note = Artificially Synthesized Probe
  source 1..80: mol_type = other DNA
ctgggcgtggtggcaggcgcctgtaatcccagctactcaggaggctgaggcaggaggatcgctagaacccgggaggcgga

SEQ ID NO: 134305 - DNA, 80 bp, synthetic construct
  misc_feature 1..80: note = Artificially Synthesized Probe
  source 1..80: mol_type = other DNA
gtttgagaccagcatgaggcaacatgcaaaaaatacaaaaattatccgggtgtggtgacatgtgcctgtagccccagcta

SEQ ID NO: 134306 - DNA, 80 bp, synthetic construct; identical to SEQ ID NO: 42452
  misc_feature 1..80: note = Artificially Synthesized Probe
  source 1..80: mol_type = other DNA

SEQ ID NO: 134307 - DNA, 80 bp, synthetic construct
  misc_feature 1..80: note = Artificially Synthesized Probe
  source 1..80: mol_type = other DNA
cagcctgtcgttgtccagcagcacgttgcgcgcggctaggtctcggtggatgtagtgctgcgcgtgcagataggccatgc

SEQ ID NO: 134308 - DNA, 80 bp, synthetic construct
  misc_feature 1..80: note = Artificially Synthesized Probe
  source 1..80: mol_type = other DNA
aaatataaaaactagccgggcgtggggtgtgcacctgtaattccagctactcaggcggctgaggcaggagaatggcttga

SEQ ID NO: 134309 - DNA, 80 bp, synthetic construct
  misc_feature 1..80: note = Artificially Synthesized Probe
  source 1..80: mol_type = other DNA
cgaggtcaggagatcaagaccatcctggctaacacggtgaaaccccacctctactaaaaatacaaaaaaaaaaaaaaaat

SEQ ID NO: 134310 - DNA, 80 bp, synthetic construct
  misc_feature 1..80: note = Artificially Synthesized Probe
  source 1..80: mol_type = other DNA
aaagaaagactgtagtagatatatttggaagtgcaatttcctgtgcaggaggagggaaagcctttctttctttttttttt

SEQ ID NO: 134311 - DNA, 80 bp, synthetic construct
  misc_feature 1..80: note = Artificially Synthesized Probe
  source 1..80: mol_type = other DNA
acattttgtatttttagtagagatgcggtttcactacattggccaggctggtcttgaactcctgatctcaggtgatctgc

SEQ ID NO: 134312 - DNA, 80 bp, synthetic construct
  misc_feature 1..80: note = Artificially Synthesized Probe
  source 1..80: mol_type = other DNA
gctcactgcaacctccatgtcccaggttcaagctattctcctgcctcagccttctgagtagctgggattgcaggcacctg

SEQ ID NO: 134313 - DNA, 80 bp, synthetic construct; identical to SEQ ID NO: 42453
  misc_feature 1..80: note = Artificially Synthesized Probe
  source 1..80: mol_type = other DNA

SEQ ID NO: 134314 - DNA, 80 bp, synthetic construct
  misc_feature 1..80: note = Artificially Synthesized Probe
  source 1..80: mol_type = other DNA
ttttagtagagctggagttttgccatgttggccaggctgctctcaaacttctgacctcaagtgatccaccagcctcagcc

SEQ ID NO: 134315 - DNA, 80 bp, synthetic construct
  misc_feature 1..80: note = Artificially Synthesized Probe
  source 1..80: mol_type = other DNA
caggctctcaagttgctgggactacaggcatgtaccaccatgcctggctaatttctaaaaattattttgttgagacaagg

SEQ ID NO: 134316 - DNA, 80 bp, synthetic construct; identical to SEQ ID NO: 42454
  misc_feature 1..80: note = Artificially Synthesized Probe
  source 1..80: mol_type = other DNA

SEQ ID NO: 134317 - DNA, 80 bp, synthetic construct
  misc_feature 1..80: note = Artificially Synthesized Probe
  source 1..80: mol_type = other DNA
gggaggatggatgggtgggtggatggatggatgcatggataggtgggtgagtgggtgagtgggtgggtggatggatggat

SEQ ID NO: 134318 - DNA, 80 bp, synthetic construct
  misc_feature 1..80: note = Artificially Synthesized Probe
  source 1..80: mol_type = other DNA
atggatgaatgggtgggtggatggatgggtggatgggtgggtgggtggataggtgggtggatgggtgggtgagtaggtgg

SEQ ID NO: 134319 - DNA, 80 bp, synthetic construct
  misc_feature 1..80: note = Artificially Synthesized Probe
  source 1..80: mol_type = other DNA
gaggctgagccagaaagcagggacggggctagacgagcaaagctgggcaggagggcgagttgggaggggccgagccggct

SEQ ID NO: 134320 - DNA, 80 bp, synthetic construct
  misc_feature 1..80: note = Artificially Synthesized Probe
  source 1..80: mol_type = other DNA
aagggtgggtggatgggtgaatgggtgggtgaatgggtgggtggatgggtggatgggaggatggatggatgcatgggtgg

SEQ ID NO: 134321 - DNA, 80 bp, synthetic construct; identical to SEQ ID NO: 42455
  misc_feature 1..80: note = Artificially Synthesized Probe
  source 1..80: mol_type = other DNA

SEQ ID NO: 134322 - DNA, 80 bp, synthetic construct
  misc_feature 1..80: note = Artificially Synthesized Probe
  source 1..80: mol_type = other DNA
gtggctcagctggaaaggggacaatctgtcagctcccaagtctcagcccagagacccctgttagctcttcaaccttccac

SEQ ID NO: 134323 - DNA, 80 bp, synthetic construct
  misc_feature 1..80: note = Artificially Synthesized Probe
  source 1..80: mol_type = other DNA
ccccacctagatctctcatcaacaataacactgaaccctcctctctttccacaaattgacacagatataaaaatctgctc

SEQ ID NO: 134324 - DNA, 80 bp, synthetic construct; identical to SEQ ID NO: 42456
  misc_feature 1..80: note = Artificially Synthesized Probe
  source 1..80: mol_type = other DNA

SEQ ID NO: 134325 - DNA, 80 bp, synthetic construct
  misc_feature 1..80: note = Artificially Synthesized Probe
  source 1..80: mol_type = other DNA
atccacccgcctcggcctcccaaagtgctgggattacaggcgtgagccactgtgcccggcctctacaagaaatttttaaa

SEQ ID NO: 134326 - DNA, 80 bp, synthetic construct
  misc_feature 1..80: note = Artificially Synthesized Probe
  source 1..80: mol_type = other DNA
aaataaataaataaataaataagtaataaaaatatataaaaagggccaggcgcggtggctcatgactgtaatcccagcac

SEQ ID NO: 134327 - DNA, 80 bp, synthetic construct
  misc_feature 1..80: note = Artificially Synthesized Probe
  source 1..80: mol_type = other DNA
aataaaaagtaaaataaaaatctgctcttaacacacctccccaaaataaccagacaggcagatgtggtcaaacatacctg

SEQ ID NO: 134328 - DNA, 80 bp, synthetic construct
  misc_feature 1..80: note = Artificially Synthesized Probe
  source 1..80: mol_type = other DNA
tgtttcaatatagttccgcatattacacattcagcacagaccctgattcaggcacacacaaaaagaacaaatatgaccaa

SEQ ID NO: 134329 - DNA, 80 bp, synthetic construct; identical to SEQ ID NO: 42457
  misc_feature 1..80: note = Artificially Synthesized Probe
  source 1..80: mol_type = other DNA

SEQ ID NO: 134330 - DNA, 80 bp, synthetic construct
  misc_feature 1..80: note = Artificially Synthesized Probe
  source 1..80: mol_type = other DNA
atgggcatgtaacagtgtctacctcaaaaggctgctgggaggatttaacgcgaggaggcagagaaagtgcctggtataca

SEQ ID NO: 134331 - DNA, 80 bp, synthetic construct
  misc_feature 1..80: note = Artificially Synthesized Probe
  source 1..80: mol_type = other DNA
gctccagaagcaggggcggggccgaccaacctcgcagatctgctgggcgaagagcagcagctgggccagcccgatgctgt

SEQ ID NO: 134332 - DNA, 80 bp, synthetic construct
  misc_feature 1..80: note = Artificially Synthesized Probe
  source 1..80: mol_type = other DNA
acccagctttgaagacagggtcggagtgaagtttgcaactgggaaggctgcacgcccccatgtcctccccccaaaacctc

SEQ ID NO: 134333 - DNA, 80 bp, synthetic construct
  misc_feature 1..80: note = Artificially Synthesized Probe
  source 1..80: mol_type = other DNA
gtccagactcacccttccgggggaacacaagctcgaacccggacccctccccgctcccgcgggtagctactgcttgtccc

SEQ ID NO: 134334 - DNA, 80 bp, synthetic construct; identical to SEQ ID NO: 42429
  misc_feature 1..80: note = Artificially Synthesized Probe
  source 1..80: mol_type = other DNA

SEQ ID NO: 134335 - DNA, 80 bp, synthetic construct
  misc_feature 1..80: note = Artificially Synthesized Probe
  source 1..80: mol_type = other DNA
aaggccacacccacgctctaaccacgccccctcaagtctctaggactcgccgggtcccgcccaccttggtcctcgcagca

SEQ ID NO: 134336 - DNA, 80 bp, synthetic construct
  misc_feature 1..80: note = Artificially Synthesized Probe
  source 1..80: mol_type = other DNA
ggtatgaggttctcgaaggttgggcgaaaggacgcctctgtctcccagcagttcttcatgagatgatagacctagaagga

SEQ ID NO: 134337 - DNA, 80 bp, synthetic construct
  misc_feature 1..80: note = Artificially Synthesized Probe
  source 1..80: mol_type = other DNA
accttgccgaagtgaccctggtcgggagcgcacgagggtcagctccacctccccaatccctgcaccactccccaaccccc

SEQ ID NO: 134338 - DNA, 80 bp, synthetic construct
  misc_feature 1..80: note = Artificially Synthesized Probe
  source 1..80: mol_type = other DNA
ccaaactccttcccgaccaggcgggccttttagcagctcaggcccgtccctcacctcgcccagatctcggatctttttca

SEQ ID NO: 134339 - DNA, 80 bp, synthetic construct; identical to SEQ ID NO: 42430
  misc_feature 1..80: note = Artificially Synthesized Probe
  source 1..80: mol_type = other DNA

SEQ ID NO: 134340 - DNA, 80 bp, synthetic construct
  misc_feature 1..80: note = Artificially Synthesized Probe
  source 1..80: mol_type = other DNA
tggacaacatggtgaaaccccctctctacaaaaaagttaaaaaaaaaaattagccaggtgtggtggtgcatgcctgtggt

SEQ ID NO: 134341 - DNA, 80 bp, synthetic construct
  misc_feature 1..80: note = Artificially Synthesized Probe
  source 1..80: mol_type = other DNA
aaaaagaaaaaacagaaaaacctgacatctggaagttccgagattgggtagagggcacagatatttcatagagaaaagag

SEQ ID NO: 134342 - DNA, 80 bp, synthetic construct; identical to SEQ ID NO: 42431
  misc_feature 1..80: note = Artificially Synthesized Probe
  source 1..80: mol_type = other DNA

SEQ ID NO: 134343 - DNA, 80 bp, synthetic construct
  misc_feature 1..80: note = Artificially Synthesized Probe
  source 1..80: mol_type = other DNA
gctgaggcaggagaattgctcgaacccaggaggcggaggttgcagtgggccgagatcgtgccattgcactccagcctgtg

SEQ ID NO: 134344 - DNA, 80 bp, synthetic construct
  misc_feature 1..80: note = Artificially Synthesized Probe
  source 1..80: mol_type = other DNA
atggtgaattcccgtctctactaaaaatacaaaaattagcccggcgtggtggtgggcgcctgtagtcccagctacccagg

SEQ ID NO: 134345 - DNA, 80 bp, synthetic construct
  misc_feature 1..80: note = Artificially Synthesized Probe
  source 1..80: mol_type = other DNA
aaaaagaaaaaaaaaactgcagtggtctaattctctaatccaaagaagttgtgtctctccccagacaaaacattaaggag

SEQ ID NO: 134346 - DNA, 80 bp, synthetic construct
  misc_feature 1..80: note = Artificially Synthesized Probe
  source 1..80: mol_type = other DNA
aatcccagctacttgggaggctgaggtgggaggattgcttgaacctgggaggtggaggttgcagtgagccaagatcacgt

SEQ ID NO: 134347 - DNA, 80 bp, synthetic construct; identical to SEQ ID NO: 42432
  misc_feature 1..80: note = Artificially Synthesized Probe
  source 1..80: mol_type = other DNA

SEQ ID NO: 134348 - DNA, 80 bp, synthetic construct; identical to SEQ ID NO: 42426
  misc_feature 1..80: note = Artificially Synthesized Probe
  source 1..80: mol_type = other DNA

SEQ ID NO: 134349 - DNA, 80 bp, synthetic construct
  misc_feature 1..80: note = Artificially Synthesized Probe
  source 1..80: mol_type = other DNA
gaggagtcaacatcctcccctcgcccccaacccgttccccaagaggcagagtcaagtccccagagtggaccgccaggtgc

SEQ ID NO: 134350 - DNA, 80 bp, synthetic construct
  misc_feature 1..80: note = Artificially Synthesized Probe
  source 1..80: mol_type = other DNA
aagaggcagagtcaagtccccagagtggaccgccaggtgcccgctcttatcagttccattatacagatgaggcaactgag

SEQ ID NO: 134351 - DNA, 80 bp, synthetic construct
  misc_feature 1..80: note = Artificially Synthesized Probe
  source 1..80: mol_type = other DNA
cctttgcacaggccatgcactctgcctaggctgcccttcctagccaggcttgttggcataattctacacttagataaaac

SEQ ID NO: 134352 - DNA, 80 bp, synthetic construct; identical to SEQ ID NO: 42433
  misc_feature 1..80: note = Artificially Synthesized Probe
  source 1..80: mol_type = other DNA

SEQ ID NO: 134353 - DNA, 80 bp, synthetic construct
  misc_feature 1..80: note = Artificially Synthesized Probe
  source 1..80: mol_type = other DNA
ctcccatcgctgccctggtcactctgcctaaaactgaaatcaagtctcttacttgccttctgtgtgccaggcacaagtga

SEQ ID NO: 134354 - DNA, 80 bp, synthetic construct
  misc_feature 1..80: note = Artificially Synthesized Probe
  source 1..80: mol_type = other DNA
agggcccaagggtctcctagacatacctcggagggactgcggctctgcagaggggcctctccgtcaaagcagatctccag

SEQ ID NO: 134355 - DNA, 80 bp, synthetic construct
  misc_feature 1..80: note = Artificially Synthesized Probe
  source 1..80: mol_type = other DNA
tgcccaggtcccctcaggtactcaccctccctggagagggcgcccaggcccacgccaggatcactcagcttgatgaaggg

SEQ ID NO: 134356 - DNA, 80 bp, synthetic construct; identical to SEQ ID NO: 42434
  misc_feature 1..80: note = Artificially Synthesized Probe
  source 1..80: mol_type = other DNA

SEQ ID NO: 134357 - DNA, 80 bp, synthetic construct
  misc_feature 1..80: note = Artificially Synthesized Probe
  source 1..80: mol_type = other DNA
aatttttggtggagatggggtctagctatgctgctgcccaggctggggtgcagtggtgtgatcatagcttactacggcct

SEQ ID NO: 134358 - DNA, 80 bp, synthetic construct
  misc_feature 1..80: note = Artificially Synthesized Probe
  source 1..80: mol_type = other DNA
cacccgccttggcctcccaaactgctgggattacaggtatgagccaccacacctggctatttgtttatttttaaaagatg

SEQ ID NO: 134359 - DNA, 80 bp, synthetic construct
  misc_feature 1..80: note = Artificially Synthesized Probe
  source 1..80: mol_type = other DNA
ctataatcccagctacttgggaggctgaggcgggagaatcatttgaacccgggaggcgaaggttgcagtgagccgagatc

SEQ ID NO: 134360 - DNA, 80 bp, synthetic construct
  misc_feature 1..80: note = Artificially Synthesized Probe
  source 1..80: mol_type = other DNA
ttgggaggctgaggcaggaggatcgtctgaacctgggaggcggaggttgcagtgagccgagattgtgccattgcactcca

SEQ ID NO: 134361 - DNA, 80 bp, synthetic construct
  misc_feature 1..80: note = Artificially Synthesized Probe
  source 1..80: mol_type = other DNA
gtagctgagggcgctggccagctgctgggccaccaccatcttccaagccatgggcacatggccccgctccctccgcagcc

SEQ ID NO: 134362 - DNA, 80 bp, synthetic construct; identical to SEQ ID NO: 42435
  misc_feature 1..80: note = Artificially Synthesized Probe
  source 1..80: mol_type = other DNA

SEQ ID NO: 134363 - DNA, 80 bp, synthetic construct
  misc_feature 1..80: note = Artificially Synthesized Probe
  source 1..80: mol_type = other DNA
caacatgatgaaactccatcactactaaaaaaaaaaatacagccgggcgcggtggctcacgcctgtaatcccagcacttt

SEQ ID NO: 134364 - DNA, 80 bp, synthetic construct
  misc_feature 1..80: note = Artificially Synthesized Probe
  source 1..80: mol_type = other DNA
agtcccagctacttgggaggctgaggcagaagaatggtgggagacggagcttgcagtgagccgagatcacgtcattgcac

SEQ ID NO: 134365 - DNA, 80 bp, synthetic construct
  misc_feature 1..80: note = Artificially Synthesized Probe
  source 1..80: mol_type = other DNA
cgccactgtattccagcctgggtgacacagtgagactccgtctcaaaaaaattaaaaaaaaaaagagataaaggtggcag

SEQ ID NO: 134366 - DNA, 80 bp, synthetic construct; identical to SEQ ID NO: 42436
  misc_feature 1..80: note = Artificially Synthesized Probe
  source 1..80: mol_type = other DNA

SEQ ID NO: 134367 - DNA, 80 bp, synthetic construct
  misc_feature 1..80: note = Artificially Synthesized Probe
  source 1..80: mol_type = other DNA
tcggagctgccgcgccggcccttgccccccgccgcacaggagcgggacgccgagccgcgtccgccgcacggggagctgca

SEQ ID NO: 134368 - DNA, 80 bp, synthetic construct; identical to SEQ ID NO: 42468
  misc_feature 1..80: note = Artificially Synthesized Probe
  source 1..80: mol_type = other DNA

SEQ ID NO: 134369 - DNA, 80 bp, synthetic construct
  misc_feature 1..80: note = Artificially Synthesized Probe
  source 1..80: mol_type = other DNA
ttttaatgcacagaaagtttccctggacacactacccagtttcccccagtgataatatcttgggtaacatcctgtataca

SEQ ID NO: 134370 - DNA, 80 bp, synthetic construct
  misc_feature 1..80: note = Artificially Synthesized Probe
  source 1..80: mol_type = other DNA
cctggatcctgcgccagctgcgcgggggaggggactcgaaggtgtgtgagccaggggctgaccttgaccgctcagataaa

SEQ ID NO: 134371 - DNA, 80 bp, synthetic construct
  misc_feature 1..80: note = Artificially Synthesized Probe
  source 1..80: mol_type = other DNA
atctttgatgttacctttttcggaacagtgaccatgagaggactttcctcccaaaattttgagaactactgaaccagaat

SEQ ID NO: 134372 - DNA, 80 bp, synthetic construct
  misc_feature 1..80: note = Artificially Synthesized Probe
  source 1..80: mol_type = other DNA
ggtggtgtaatcattacagaggtttcctgatgtttccaagtcagtcgtgtgttgagctgctaaactctaaagtaatttta

SEQ ID NO: 134373 - DNA, 80 bp, synthetic construct; identical to SEQ ID NO: 42469
  misc_feature 1..80: note = Artificially Synthesized Probe
  source 1..80: mol_type = other DNA

SEQ ID NO: 134374 - DNA, 80 bp, synthetic construct
  misc_feature 1..80: note = Artificially Synthesized Probe
  source 1..80: mol_type = other DNA
ctttgcaggatgcaccagatgtcttgtagccatgggtcaaggggggaccctgggtaagagactgtaatagatgacctcta

SEQ ID NO: 134375 - DNA, 80 bp, synthetic construct
  misc_feature 1..80: note = Artificially Synthesized Probe
  source 1..80: mol_type = other DNA
gcttggaatccaagaggttgaaagaaccccgtcgtcttcatttatactaaccatactcttagagggaagcaatctggttt

SEQ ID NO: 134376 - DNA, 80 bp, synthetic construct
  misc_feature 1..80: note = Artificially Synthesized Probe
  source 1..80: mol_type = other DNA
tttgagacagagttttgctctgttgcccaggctggaatgcaacggcgtgatcttggctcactgtaacctctgcctcctgg

SEQ ID NO: 134377 - DNA, 80 bp, synthetic construct; identical to SEQ ID NO: 42470
  misc_feature 1..80: note = Artificially Synthesized Probe
  source 1..80: mol_type = other DNA

SEQ ID NO: 134378 - DNA, 80 bp, synthetic construct
  misc_feature 1..80: note = Artificially Synthesized Probe
  source 1..80: mol_type = other DNA
acaactccagaggccaaggcgagaggatcatttgaacccaggaatttgaggctgtagtgagtcatgatcacgccattgca

SEQ ID NO: 134379 - DNA, 80 bp, synthetic construct
  misc_feature 1..80: note = Artificially Synthesized Probe
  source 1..80: mol_type = other DNA
ctgttgcccaggctggagtgcagtggtgtgatctccgctcacggcaacctccatctcccaggttcaagtgagttcccatt

SEQ ID NO: 134380 - DNA, 80 bp, synthetic construct
  misc_feature 1..80: note = Artificially Synthesized Probe
  source 1..80: mol_type = other DNA
tgcctggccatgtaatagagacttttaatataggagggtgtaccagaagcaccagtttcctgtggcaaacagaattattc

SEQ ID NO: 134381 - DNA, 80 bp, synthetic construct
  misc_feature 1..80: note = Artificially Synthesized Probe
  source 1..80: mol_type = other DNA
gtgggacagcgtggggagttttgtctgaggagagggatccacttttctgcagctccaagcccaggggcctttgatgagcc

SEQ ID NO: 134382 - DNA, 80 bp, synthetic construct; identical to SEQ ID NO: 42471
  misc_feature 1..80: note = Artificially Synthesized Probe
  source 1..80: mol_type = other DNA

SEQ ID NO: 134383 - DNA, 80 bp, synthetic construct
  misc_feature 1..80: note = Artificially Synthesized Probe
  source 1..80: mol_type = other DNA
agatcgggagacatgggcctcggtgtgcctttcaacatcgccagctacgccctgctcacgtacatgattgcgcacatcac

SEQ ID NO: 134384 - DNA, 80 bp, synthetic construct
  misc_feature 1..80: note = Artificially Synthesized Probe
  source 1..80: mol_type = other DNA
ttactttgaaaccttcctcttctggaaggttttctggccctgtggtatacgcactaacagatctatacaggttgtttgtg

SEQ ID NO: 134385 - DNA, 80 bp, synthetic construct
  misc_feature 1..80: note = Artificially Synthesized Probe
  source 1..80: mol_type = other DNA
caagatgctgttgctacaaaaaaatggaaaagctacactaaattatttttttaaaaaaagccttgcggtgtctgcatatt

SEQ ID NO: 134386 - DNA, 80 bp, synthetic construct
  misc_feature 1..80: note = Artificially Synthesized Probe
  source 1..80: mol_type = other DNA
attagatgttatacttttgggtttggtaccttctcttgataaaaggttgactgtggaacaggcatctgctcaatgctgtg

SEQ ID NO: 134387 - DNA, 80 bp, synthetic construct; identical to SEQ ID NO: 42472
  misc_feature 1..80: note = Artificially Synthesized Probe
  source 1..80: mol_type = other DNA

SEQ ID NO: 134388 - DNA, 80 bp, synthetic construct
  misc_feature 1..80: note = Artificially Synthesized Probe
  source 1..80: mol_type = other DNA
tacaggcacatgccaccacacccagctaatttttgtattattagtagagatggggtttcatcatgttggccaggctagtc

SEQ ID NO: 134389 - DNA, 80 bp, synthetic construct
  misc_feature 1..80: note = Artificially Synthesized Probe
  source 1..80: mol_type = other DNA
ccctaagttatagcagccaacaattgatatgaaatggcaataaaaatgtaagttcatctgcttcatgagccttaaggaaa

SEQ ID NO: 134390 - DNA, 80 bp, synthetic construct; identical to SEQ ID NO: 42473
  misc_feature 1..80: note = Artificially Synthesized Probe
  source 1..80: mol_type = other DNA

SEQ ID NO: 134391 - DNA, 80 bp, synthetic construct
  misc_feature 1..80: note = Artificially Synthesized Probe
  source 1..80: mol_type = other DNA
ctgtctttaataaatttgccaagagtggttataagaacttacacctgatgaggcaccaggctcctgatgctgtgtaatgt

SEQ ID NO: 134392 - DNA, 80 bp, synthetic construct; identical to SEQ ID NO: 42459
  misc_feature 1..80: note = Artificially Synthesized Probe
  source 1..80: mol_type = other DNA

SEQ ID NO: 134393 - DNA, 80 bp, synthetic construct
  misc_feature 1..80: note = Artificially Synthesized Probe
  source 1..80: mol_type = other DNA
tgaggagcaattacaacaggtcgtacaattatggcaaaataatggccttattttgtttttagcttcagcgagaacccaga

SEQ ID NO: 134394 - DNA, 80 bp, synthetic construct
  misc_feature 1..80: note = Artificially Synthesized Probe
  source 1..80: mol_type = other DNA
tcagtctttaggggttgggctggatgccgaggtaaaagttctttttgctctaaaagaaaaaggaactaggtcaaaaatct

SEQ ID NO: 134395 - DNA, 80 bp, synthetic construct
  misc_feature 1..80: note = Artificially Synthesized Probe
  source 1..80: mol_type = other DNA
tatgtgctcttagcaaaaacatgtatgtgcatttcaatcccacgtacttataaagaaggttggtgaatttcacaagctat

SEQ ID NO: 134396 - DNA, 80 bp, synthetic construct; identical to SEQ ID NO: 42474
  misc_feature 1..80: note = Artificially Synthesized Probe
  source 1..80: mol_type = other DNA

SEQ ID NO: 134397 - DNA, 80 bp, synthetic construct
  misc_feature 1..80: note = Artificially Synthesized Probe
  source 1..80: mol_type = other DNA
ctgtgtggaattcctgtgtccactggtcaccggggcacagaagtgctgtctcagcctgaatcgggccactgatgggactt

SEQ ID NO: 134398 - DNA, 80 bp, synthetic construct
  misc_feature 1..80: note = Artificially Synthesized Probe
  source 1..80: mol_type = other DNA
aattgtttttcagatgaattccctctgctgacaaccaaacgtgtgttctggaagggtgttttggaggagttgctgtggtt

SEQ ID NO: 134399 - DNA, 80 bp, synthetic construct
  misc_feature 1..80: note = Artificially Synthesized Probe
  source 1..80: mol_type = other DNA
ggttaggaatttgagaccagcctggccaacatggcgacaccccagtctctactaataacacaaaaaattagccaggtgtg

SEQ ID NO: 134400 - DNA, 80 bp, synthetic construct
  misc_feature 1..80: note = Artificially Synthesized Probe
  source 1..80: mol_type = other DNA
aagcatatcattcctcaccctcaagcccttagtggctccatttcactcagtaagagccacggtccttatggtgtccgttt

SEQ ID NO: 134401 - DNA, 80 bp, synthetic construct; identical to SEQ ID NO: 42460
  misc_feature 1..80: note = Artificially Synthesized Probe
  source 1..80: mol_type = other DNA

SEQ ID NO: 134402 - DNA, 80 bp, synthetic construct
  misc_feature 1..80: note = Artificially Synthesized Probe
  source 1..80: mol_type = other DNA
atgtagataccacctgtgttcccatgttcatataaattctagaagagtctcttcagtaacaaggtgaaccccttccagag

SEQ ID NO: 134403 - DNA, 80 bp, synthetic construct
  misc_feature 1..80: note = Artificially Synthesized Probe
  source 1..80: mol_type = other DNA
atactagaagctgggatcccttctatagagcacttggtatggcttgtatggtcttggggcaagccagacccaagccctct

SEQ ID NO: 134404 - DNA, 80 bp, synthetic construct
  misc_feature 1..80: note = Artificially Synthesized Probe
  source 1..80: mol_type = other DNA
attcttaaactggctagagcctggtctgaatggatgaaaaggagagacttttgaagcaatatgtaaaagattgagaaatg

SEQ ID NO: 134405 - DNA, 80 bp, synthetic construct
  misc_feature 1..80: note = Artificially Synthesized Probe
  source 1..80: mol_type = other DNA
gctggggagagcgctcgggagctgccgggcgctgcggaccccgtttagtcctaacctcaatcctgcgagggaggggacgc

SEQ ID NO: 134406 - DNA, 80 bp, synthetic construct; identical to SEQ ID NO: 42461
  misc_feature 1..80: note = Artificially Synthesized Probe
  source 1..80: mol_type = other DNA

SEQ ID NO: 134407 - DNA, 80 bp, synthetic construct
  misc_feature 1..80: note = Artificially Synthesized Probe
  source 1..80: mol_type = other DNA
ttaagaaacataaaactgtcagatcggtggaatacttaaaagcacttggaggtgtttagcctaaaaagcttagttgaggg

SEQ ID NO: 134408 - DNA, 80 bp, synthetic construct
  misc_feature 1..80: note = Artificially Synthesized Probe
  source 1..80: mol_type = other DNA
ggccgaagtgggcggatcacctgaggtcaggagttcgaggccagcctgaccaacatggagaaacactgtctctactaaaa

SEQ ID NO: 134409 - DNA, 80 bp, synthetic construct; identical to SEQ ID NO: 42462
  misc_feature 1..80: note = Artificially Synthesized Probe
  source 1..80: mol_type = other DNA

SEQ ID NO: 134410 - DNA, 80 bp, synthetic construct
  misc_feature 1..80: note = Artificially Synthesized Probe
  source 1..80: mol_type = other DNA
ccgagactttttggacagcctgggattctccaccagagaagaaggggacttgggcccagtttatggcttccagtggaggc

SEQ ID NO: 134411 - DNA, 80 bp, synthetic construct
  misc_feature 1..80: note = Artificially Synthesized Probe
  source 1..80: mol_type = other DNA
tttgaccttgtgaggggtggtgccaggttaagccacaattaagcctcatgaaggccgtttcacactcttttttttttttt

SEQ ID NO: 134412 - DNA, 80 bp, synthetic construct
  misc_feature 1..80: note = Artificially Synthesized Probe
  source 1..80: mol_type = other DNA
caacagtccccagagtgtgatgttccccttcctgtgtccatatgttctcgttgttcaattcccacctatgagtgagaata

SEQ ID NO: 134413 - DNA, 80 bp, synthetic construct; identical to SEQ ID NO: 42463
  misc_feature 1..80: note = Artificially Synthesized Probe
  source 1..80: mol_type = other DNA

SEQ ID NO: 134414 - DNA, 80 bp, synthetic construct
  misc_feature 1..80: note = Artificially Synthesized Probe
  source 1..80: mol_type = other DNA
taaaagtgttcctatttctccacatcctctccagcacctgttgtttcctgactttttaatgattgccattctaactggtg

SEQ ID NO: 134415 - DNA, 80 bp, synthetic construct
  misc_feature 1..80: note = Artificially Synthesized Probe
  source 1..80: mol_type = other DNA
ataaatttgtttgagttcattgtagattctggatattagctctttgtcagatgagtaggttgcaaaaattttctcccatt

SEQ ID NO: 134416 - DNA, 80 bp, synthetic construct
  misc_feature 1..80: note = Artificially Synthesized Probe
  source 1..80: mol_type = other DNA
cgggcgtcatcgggcagcgtttgcccagtgctggagggttagggagagctgcctgggcttgaccgcgcgccggtctcaaa

SEQ ID NO: 134417 - DNA, 80 bp, synthetic construct
  misc_feature 1..80: note = Artificially Synthesized Probe
  source 1..80: mol_type = other DNA
tggtaatgcctaggttttcttctagggtttttatggttttaggtctaacgtttaagtctttaatccatcttgaattgatt

SEQ ID NO: 134418 - DNA, 80 bp, synthetic construct; identical to SEQ ID NO: 42464
  misc_feature 1..80: note = Artificially Synthesized Probe
  source 1..80: mol_type = other DNA

SEQ ID NO: 134419 - DNA, 80 bp, synthetic construct
  misc_feature 1..80: note = Artificially Synthesized Probe
  source 1..80: mol_type = other DNA
cttgatggggatggcattgaatctataaattaccttgggcagtatggccattttcacgatattgattcttcctacccatg

SEQ ID NO: 134420 - DNA, 80 bp, synthetic construct
  misc_feature 1..80: note = Artificially Synthesized Probe
  source 1..80: mol_type = other DNA
gctctctgtttgtctgttattggtgtataagaatgcttgtgatttttgcagattgattttatatcctgagactttgctga

SEQ ID NO: 134421 - DNA, 80 bp, synthetic construct
  misc_feature 1..80: note = Artificially Synthesized Probe
  source 1..80: mol_type = other DNA
gaacttccaacactatgttgaataggagtggtgagagagggcatccctgtcttgtgccagttttcaaagggaatgcttcc

SEQ ID NO: 134422 - DNA, 80 bp, synthetic construct
  misc_feature 1..80: note = Artificially Synthesized Probe
  source 1..80: mol_type = other DNA
tgtggtttttgtctttggatctgtttatatgctggattacatttattgatttgtgtatattgaaccagccttgcatccca

SEQ ID NO: 134423 - DNA, 80 bp, synthetic construct; identical to SEQ ID NO: 42465
  misc_feature 1..80: note = Artificially Synthesized Probe
  source 1..80: mol_type = other DNA

SEQ ID NO: 134424 - DNA, 80 bp, synthetic construct
  misc_feature 1..80: note = Artificially Synthesized Probe
  source 1..80: mol_type = other DNA
tagtcttgggagagtgtatgtgtcaaggaatttatccatttcttctagattttctagtttatttgcgtagaggtgtttgt

SEQ ID NO: 134425 - DNA, 80 bp, synthetic construct
  misc_feature 1..80: note = Artificially Synthesized Probe
  source 1..80: mol_type = other DNA
cctggattcattaattttttgaagggttttttgtgtctctatttccttcagttctgctctgattttagttatttcttgcc

SEQ ID NO: 134426 - DNA, 80 bp, synthetic construct; identical to SEQ ID NO: 42466
  misc_feature 1..80: note = Artificially Synthesized Probe
  source 1..80: mol_type = other DNA

SEQ ID NO: 134427 - DNA, 80 bp, synthetic construct; identical to SEQ ID NO: 42458
  misc_feature 1..80: note = Artificially Synthesized Probe
  source 1..80: mol_type = other DNA

SEQ ID NO: 134428 - DNA, 80 bp, synthetic construct
  misc_feature 1..80: note = Artificially Synthesized Probe
  source 1..80: mol_type = other DNA
cttccaactatgtggtcaattttggaataggtgtggtgcggtgctgaaaaaaatgtatattctgttgatttggggtggag

SEQ ID NO: 134429 - DNA, 80 bp, synthetic construct
  misc_feature 1..80: note = Artificially Synthesized Probe
  source 1..80: mol_type = other DNA
ttgtaggtcagatgattggcacttactgggcgcttggcactttccatactgtgtcatcggcagatagctgcatggttggt

SEQ ID NO: 134430 - DNA, 80 bp, synthetic construct
  misc_feature 1..80: note = Artificially Synthesized Probe
  source 1..80: mol_type = other DNA
tgcagaggtggagaaagaatgaaacatctcactcctggacttccactttcctgtcactgttggtgtcacctcttactgga

SEQ ID NO: 134431 - DNA, 80 bp, synthetic construct; identical to SEQ ID NO: 42467
  misc_feature 1..80: note = Artificially Synthesized Probe
  source 1..80: mol_type = other DNA

SEQ ID NO: 134432 - DNA, 80 bp, synthetic construct
  misc_feature 1..80: note = Artificially Synthesized Probe
  source 1..80: mol_type = other DNA
tagggatgacgaaaaagttcgggagatggtgatggagatggtgatggtgatggagatggtgatggtgatggagatggtga

SEQ ID NO: 134433 - DNA, 80 bp, synthetic construct
  misc_feature 1..80: note = Artificially Synthesized Probe
  source 1..80: mol_type = other DNA
tggagatggagatggtgatggtgatggtgatggagatggtgatggtgatggtgatggtgatggagatggtgatggtgatg

SEQ ID NO: 134434 - DNA, 80 bp, synthetic construct
  misc_feature 1..80: note = Artificially Synthesized Probe
  source 1..80: mol_type = other DNA
tgatggagatggtgatggagatggtgatggtgatggagatggtgatggtgatggtgatggtgatggagatggtgatggtg

SEQ ID NO: 134435 - DNA, 80 bp, synthetic construct
  misc_feature 1..80: note = Artificially Synthesized Probe
  source 1..80: mol_type = other DNA
gtgatggtgatggagatggtgatggtgatggtgatggtgatggtgatggtgatggagatgggtgatggtgatggttgcct

SEQ ID NO: 134436 - DNA, 80 bp, synthetic construct
  misc_feature 1..80: note = Artificially Synthesized Probe
  source 1..80: mol_type = other DNA
ttatcactacaaattttattcagaaacccatctttgtatgtttttttttttgttgttttttaaaaaaaattccccttatg

SEQ ID NO: 134437 - DNA, 80 bp, synthetic construct; identical to SEQ ID NO: 42485
  misc_feature 1..80: note = Artificially Synthesized Probe
  source 1..80: mol_type = other DNA

SEQ ID NO: 134438 - DNA, 80 bp, synthetic construct
  misc_feature 1..80: note = Artificially Synthesized Probe
  source 1..80: mol_type = other DNA
gtcgtccatgggcttcaaccggaaaaaacccatgtttccttctcccagctcacttacacaaagtggtagattttcttaaa

SEQ ID NO: 134439 - DNA, 80 bp, synthetic construct
  misc_feature 1..80: note = Artificially Synthesized Probe
  source 1..80: mol_type = other DNA
tggaaagacttgggcatcgattttcaaatttcaaatgttctcatcaacgtgggcacaagttttctgctccgattagaggt

SEQ ID NO: 134440 - DNA, 80 bp, synthetic construct
  misc_feature 1..80: note = Artificially Synthesized Probe
  source 1..80: mol_type = other DNA
aattaaccaaacagacccgctaagagcaatttacggcccattttctacctttcagcttaatttttcatgtttccatgacg

SEQ ID NO: 134441 - DNA, 80 bp, synthetic construct
  misc_feature 1..80: note = Artificially Synthesized Probe
  source 1..80: mol_type = other DNA
gcccactccgtgtccactggtgcctggaggaggctaacccaaggctggcacggccaccccctctggacccatgtctatca

SEQ ID NO: 134442 - DNA, 80 bp, synthetic construct; identical to SEQ ID NO: 42486
  misc_feature 1..80: note = Artificially Synthesized Probe
  source 1..80: mol_type = other DNA

SEQ ID NO: 134443 - DNA, 80 bp, synthetic construct
  misc_feature 1..80: note = Artificially Synthesized Probe
  source 1..80: mol_type = other DNA
ctctgtaagggaaaatgagagctgattattttgctgggaagatatcaaacacatggaatatgtcagcagcatgacataca

SEQ ID NO: 134444 - DNA, 80 bp, synthetic construct
  misc_feature 1..80: note = Artificially Synthesized Probe
  source 1..80: mol_type = other DNA
aaggaggttacaacatctattcttcttcttcgtaatatctgggagaataaactgcatgcccactttcaccacgagcctca

SEQ ID NO: 134445 - DNA, 80 bp, synthetic construct
  misc_feature 1..80: note = Artificially Synthesized Probe
  source 1..80: mol_type = other DNA
cctcctcctcattcaaatcccctccactttcctaactgcacagctgttctgtttgtttcttaaatggagtattaaattag

SEQ ID NO: 134446 - DNA, 80 bp, synthetic construct; identical to SEQ ID NO: 42487
  misc_feature 1..80: note = Artificially Synthesized Probe
  source 1..80: mol_type = other DNA

SEQ ID NO: 134447 - DNA, 80 bp, synthetic construct
  misc_feature 1..80: note = Artificially Synthesized Probe
  source 1..80: mol_type = other DNA
acccaccttaggaaccaccttacgtcaccttctgtctctactgcaaaaccctcccttaatactgttcaaatacgctgaca

SEQ ID NO: 134448 - DNA, 80 bp, synthetic construct
  misc_feature 1..80: note = Artificially Synthesized Probe
  source 1..80: mol_type = other DNA
ccagagttaagattgaagggcctcaacctcagtgaaatctaatggaccatgaagactgactagccactgatttattatca

SEQ ID NO: 134449 - DNA, 80 bp, synthetic construct
  misc_feature 1..80: note = Artificially Synthesized Probe
  source 1..80: mol_type = other DNA
aaactacctcagaatgggcaagccctgggcctcaacaattaatatccaattattccacacaattaaactacagacaagct

SEQ ID NO: 134450 - DNA, 80 bp, synthetic construct
  misc_feature 1..80: note = Artificially Synthesized Probe
  source 1..80: mol_type = other DNA
atcctgttccctggaagctaaaaccccacgtctccctgaaaagaaaacacaagtaacctagattaaataatcaacttttc

SEQ ID NO: 134451 - DNA, 80 bp, synthetic construct; identical to SEQ ID NO: 42488
  misc_feature 1..80: note = Artificially Synthesized Probe
  source 1..80: mol_type = other DNA

SEQ ID NO: 134452 - DNA, 80 bp, synthetic construct
  misc_feature 1..80: note = Artificially Synthesized Probe
  source 1..80: mol_type = other DNA
agattctaccatgtgtgaagaggacattttacaagatagactccatcctggaaaagagaaacattttaaatagcgtttga

SEQ ID NO: 134453 - DNA, 80 bp, synthetic construct
  misc_feature 1..80: note = Artificially Synthesized Probe
  source 1..80: mol_type = other DNA
caaacgtctgaaaacattccatttagtctaaactacagccaactcactggaaattagtacgtgccaaggtggcaattaaa

SEQ ID NO: 134454 - DNA, 80 bp, synthetic construct; identical to SEQ ID NO: 42489
  misc_feature 1..80: note = Artificially Synthesized Probe
  source 1..80: mol_type = other DNA

SEQ ID NO: 134455 - DNA, 80 bp, synthetic construct
  misc_feature 1..80: note = Artificially Synthesized Probe
  source 1..80: mol_type = other DNA
aagcactgccttttaaaaaacagaaacgacacctatgccaaaattttttttttggaagggggagggttgtgaggggagaa

SEQ ID NO: 134456 - DNA, 80 bp, synthetic construct
  misc_feature 1..80: note = Artificially Synthesized Probe
  source 1..80: mol_type = other DNA
actgaatactggcgaggctggtaccagagcttgctcgacaggacattcacagccgaaagttggaacaaacgtgtccacgt

SEQ ID NO: 134457 - DNA, 80 bp, synthetic construct
  misc_feature 1..80: note = Artificially Synthesized Probe
  source 1..80: mol_type = other DNA
gcccgctccagttttccgccgcgcggcccacgaggcggcggctccggagggcgcgcaaggggccggaagggccaccgctc

SEQ ID NO: 134458 - DNA, 80 bp, synthetic construct
  misc_feature 1..80: note = Artificially Synthesized Probe
  source 1..80: mol_type = other DNA
agatactccgccatttcccacccgccgccgccgctgccgtcgacactgctgccgacgccgccgaccctgccgacgccctc

SEQ ID NO: 134459 - DNA, 80 bp, synthetic construct
  misc_feature 1..80: note = Artificially Synthesized Probe
  source 1..80: mol_type = other DNA
ggagacatttactacctcgtgtgcacacggccccgaactgtgctcagtcacgtcactggccactcctcactcaccccatc

SEQ ID NO: 134460 - DNA, 80 bp, synthetic construct; identical to SEQ ID NO: 42476
  misc_feature 1..80: note = Artificially Synthesized Probe
  source 1..80: mol_type = other DNA

SEQ ID NO: 134461 - DNA, 80 bp, synthetic construct
  misc_feature 1..80: note = Artificially Synthesized Probe
  source 1..80: mol_type = other DNA
ctaaaaaagaaaaaagaaaccaaacatgtgagtaaacctaacttttccttagtccacacagcttctaaaccaacaggtac

SEQ ID NO: 134462 - DNA, 80 bp, synthetic construct
  misc_feature 1..80: note = Artificially Synthesized Probe
  source 1..80: mol_type = other DNA
tctcaaggtgcatggcgacaggcaccccatcctctgtcggccttggccccggcacactaagcggctgcaccactgtctcg

SEQ ID NO: 134463 - DNA, 80 bp, synthetic construct
  misc_feature 1..80: note = Artificially Synthesized Probe
  source 1..80: mol_type = other DNA
gtctctagaccgagaacgacgctcccgggatcgggatcttgatctatgcctgcaaccaaggaaaataaagaaaaccgtgc

SEQ ID NO: 134464 - DNA, 80 bp, synthetic construct
  misc_feature 1..80: note = Artificially Synthesized Probe
  source 1..80: mol_type = other DNA
aacctcctgaagggagaccacagtggtttaagactcgttatacattacaaagtgtcattagatataactcatgtatgttt

SEQ ID NO: 134465 - DNA, 80 bp, synthetic construct; identical to SEQ ID NO: 42477
  misc_feature 1..80: note = Artificially Synthesized Probe
  source 1..80: mol_type = other DNA

SEQ ID NO: 134466 - DNA, 80 bp, synthetic construct
  misc_feature 1..80: note = Artificially Synthesized Probe
  source 1..80: mol_type = other DNA
gccacattttcagaaactgtgaggaaaaagttgactctcaaactacaaattttttttttacacccacaagatgcagtctg

SEQ ID NO: 134467 - DNA, 80 bp, synthetic construct
  misc_feature 1..80: note = Artificially Synthesized Probe
  source 1..80: mol_type = other DNA
tttaatttttagtacagacagggtttcaccacgttggcaggctggtcttgaactcctgacctcaagtgatccgcctgcct

SEQ ID NO: 134468 - DNA, 80 bp, synthetic construct; identical to SEQ ID NO: 42478
  misc_feature 1..80: note = Artificially Synthesized Probe
  source 1..80: mol_type = other DNA

SEQ ID NO: 134469 - DNA, 80 bp, synthetic construct
  misc_feature 1..80: note = Artificially Synthesized Probe
  source 1..80: mol_type = other DNA
tctgtcgcccaggctggagtgcggtggcgcaatctcggctcactgcaacctccgcttcctgggctcatgcgattctctgc

SEQ ID NO: 134470 - DNA, 80 bp, synthetic construct
  misc_feature 1..80: note = Artificially Synthesized Probe
  source 1..80: mol_type = other DNA
aggtgtgagccgccgtgcccggcgcaagtattcttaagttttatattcccaaactattttcatcagtttattcttcataa

SEQ ID NO: 134471 - DNA, 80 bp, synthetic construct
  misc_feature 1..80: note = Artificially Synthesized Probe
  source 1..80: mol_type = other DNA
gatcttggctcactgcaacctccacttcctaggttcaagcaattctccttcctcagcctcccaagtaggtgggactacag

SEQ ID NO: 134472 - DNA, 80 bp, synthetic construct; identical to SEQ ID NO: 42479
  misc_feature 1..80: note = Artificially Synthesized Probe
  source 1..80: mol_type = other DNA

SEQ ID NO: 134473 - DNA, 80 bp, synthetic construct
  misc_feature 1..80: note = Artificially Synthesized Probe
  source 1..80: mol_type = other DNA
agacggcgtctcactgtctccaggctggagtgcaatggcgtgatcttggctaatttttgtagttttagtagagacggggt

SEQ ID NO: 134474 - DNA, 80 bp, synthetic construct
  misc_feature 1..80: note = Artificially Synthesized Probe
  source 1..80: mol_type = other DNA
aggagaaaaaaatgtgcaacttagaagtgaacaggtgtaataccttgcatcttctgtcttcttctagaaccaactcaaat

SEQ ID NO: 134475 - DNA, 80 bp, synthetic construct
  misc_feature 1..80: note = Artificially Synthesized Probe
  source 1..80: mol_type = other DNA
ctgagaatgatttaagttcactttctaacctatccggggctgttttagttatttttgaacttccaggaatctgctttcga

SEQ ID NO: 134476 - DNA, 80 bp, synthetic construct
  misc_feature 1..80: note = Artificially Synthesized Probe
  source 1..80: mol_type = other DNA
atgtaccttcctccccgagtagaaatcaagttataaacggccaaagtagcctattccaaagggcagattttaatatttca

SEQ ID NO: 134477 - DNA, 80 bp, synthetic construct; identical to SEQ ID NO: 42480
  misc_feature 1..80: note = Artificially Synthesized Probe
  source 1..80: mol_type = other DNA

SEQ ID NO: 134478 - DNA, 80 bp, synthetic construct
  misc_feature 1..80: note = Artificially Synthesized Probe
  source 1..80: mol_type = other DNA
tgacgaattagaatttcatctaatttgtacaatctggactccagaattggaatataacgtaattgctaaacttttagttt

SEQ ID NO: 134479 - DNA, 80 bp, synthetic construct
  misc_feature 1..80: note = Artificially Synthesized Probe
  source 1..80: mol_type = other DNA
tccattcacttttatcccagggcagggttgttaacaaaaattatttaataagtgcatatagaaacaatttccctccgcct

SEQ ID NO: 134480 - DNA, 80 bp, synthetic construct
  misc_feature 1..80: note = Artificially Synthesized Probe
  source 1..80: mol_type = other DNA
agtgtcttggcaggaaaagttgacaagaaaatctcatccacacatagaaatgtgcaccactgtgcaaggaagcacaatcc

SEQ ID NO: 134481 - DNA, 80 bp, synthetic construct
  misc_feature 1..80: note = Artificially Synthesized Probe
  source 1..80: mol_type = other DNA
gctttaaaacagaatggtgaatgggaagtgcctatctttggtttggactttctgattttaacaagagtccaggtgttcat

SEQ ID NO: 134482 - DNA, 80 bp, synthetic construct; identical to SEQ ID NO: 42481
  misc_feature 1..80: note = Artificially Synthesized Probe
  source 1..80: mol_type = other DNA

SEQ ID NO: 134483 - DNA, 80 bp, synthetic construct
  misc_feature 1..80: note = Artificially Synthesized Probe
  source 1..80: mol_type = other DNA
atttggggaacgctctcagcacaatgctcttacaactacagggtgcactccaaaatggagttcaaggaaaaaaggctaat

SEQ ID NO: 134484 - DNA, 80 bp, synthetic construct
  misc_feature 1..80: note = Artificially Synthesized Probe
  source 1..80: mol_type = other DNA
agtacattccctctaggatgacggccaaagtaaaggaagaaggggcagcagcagctccagactgtttttttttttttttt

SEQ ID NO: 134485 - DNA, 80 bp, synthetic construct
  misc_feature 1..80: note = Artificially Synthesized Probe
  source 1..80: mol_type = other DNA
tgacaataaaacaatcgccacccatctatttactagtccatgtttaacagaagagggatgagaacctctccagactcaga

SEQ ID NO: 134486 - DNA, 80 bp, synthetic construct
  misc_feature 1..80: note = Artificially Synthesized Probe
  source 1..80: mol_type = other DNA
tttttgtatctttagtagagatggggtttcaccatgttggccagattggtcttgaactcctgacctcatgatccacccgc

SEQ ID NO: 134487 - DNA, 80 bp, synthetic construct; identical to SEQ ID NO: 42482
  misc_feature 1..80: note = Artificially Synthesized Probe
  source 1..80: mol_type = other DNA

SEQ ID NO: 134488 - DNA, 80 bp, synthetic construct
  misc_feature 1..80: note = Artificially Synthesized Probe
  source 1..80: mol_type = other DNA
aaggtaaacacttaaccggctgcctctggcaagtgcttcagttgagattcagtgctgaaaagagagcaagttattttctg

SEQ ID NO: 134489 - DNA, 80 bp, synthetic construct
  misc_feature 1..80: note = Artificially Synthesized Probe
  source 1..80: mol_type = other DNA
aggctagcaccaaaatgttcttagatgtggcagaaaatttttaatgaactcggaaagaataatgcttacataaactgatg

SEQ ID NO: 134490 - DNA, 80 bp, synthetic construct; identical to SEQ ID NO: 42483
  misc_feature 1..80: note = Artificially Synthesized Probe
  source 1..80: mol_type = other DNA

SEQ ID NO: 134491 - DNA, 80 bp, synthetic construct
  misc_feature 1..80: note = Artificially Synthesized Probe
  source 1..80: mol_type = other DNA
ctcaattaagagtgggctctttaacaccattgttttaaaaaaatttctccaactgtgggacttacagtgtgagccgtcag

SEQ ID NO: 134492 - DNA, 80 bp, synthetic construct
  misc_feature 1..80: note = Artificially Synthesized Probe
  source 1..80: mol_type = other DNA
ccgcaagtcagacatttgtcttctgaagagtacaccaaaaccatcatattatgaaaacagagtttgagcagtgacttggg

SEQ ID NO: 134493 - DNA, 80 bp, synthetic construct
  misc_feature 1..80: note = Artificially Synthesized Probe
  source 1..80: mol_type = other DNA
tattcctcacacaagataatttttcaaaaccaaatgcgtaactcagctgtctgcagtacatcaagttctctggtctccta

SEQ ID NO: 134494 - DNA, 80 bp, synthetic construct; identical to SEQ ID NO: 42484
  misc_feature 1..80: note = Artificially Synthesized Probe
  source 1..80: mol_type = other DNA

SEQ ID NO: 134495 - DNA, 80 bp, synthetic construct; identical to SEQ ID NO: 42475
  misc_feature 1..80: note = Artificially Synthesized Probe
  source 1..80: mol_type = other DNA

SEQ ID NO: 134496 - DNA, 80 bp, synthetic construct
  misc_feature 1..80: note = Artificially Synthesized Probe
  source 1..80: mol_type = other DNA
ttttgtaagtggtggttttataaaaccagccagctccatttctagctctgtttaaaggggagtggttgtatgaagagttc

SEQ ID NO: 134497 - DNA, 80 bp, synthetic construct
  misc_feature 1..80: note = Artificially Synthesized Probe
  source 1..80: mol_type = other DNA
aatgaccgtaccatgacaaccctgatgaaaagctaaactgagcccaattattcaacagtaaaattcagttggtctcactc

SEQ ID NO: 134498 - DNA, 80 bp, synthetic construct
  misc_feature 1..80: note = Artificially Synthesized Probe
  source 1..80: mol_type = other DNA
cgagctccaatgggctctccccagcactgacctggaatgcctaaattaacttcacatttcacattctcaggtaatctatg

SEQ ID NO: 134499 - DNA, 80 bp, synthetic construct
  misc_feature 1..80: note = Artificially Synthesized Probe
  source 1..80: mol_type = other DNA
ttccaagtaagcattttttattttttggcataaaattaaacttttgattacaaatagtgattatatattatgaacattag

SEQ ID NO: 134500 - DNA, 80 bp, synthetic construct
  misc_feature 1..80: note = Artificially Synthesized Probe
  source 1..80: mol_type = other DNA
gtagcatacaatttccttctcatgccataaaacctgacactatatttataaagaaccaatacaacatttgtatctctcag

SEQ ID NO: 134501 - DNA, 80 bp, synthetic construct
  misc_feature 1..80: note = Artificially Synthesized Probe
  source 1..80: mol_type = other DNA
tcaaaagagttttttttttaaccaattgtttcctaacagtagatggcacaactgtctaataaattctcaagattaaaacc

SEQ ID NO: 134502 - DNA, 80 bp, synthetic construct; identical to SEQ ID NO: 42500
  misc_feature 1..80: note = Artificially Synthesized Probe
  source 1..80: mol_type = other DNA

SEQ ID NO: 134503 - DNA, 80 bp, synthetic construct
  misc_feature 1..80: note = Artificially Synthesized Probe
  source 1..80: mol_type = other DNA
ctttaaaagaaaattaagtattttattatgaagagcataaaatcctccactgttgtagacctaccttaggtaaaggtttg

SEQ ID NO: 134504 - DNA, 80 bp, synthetic construct
  misc_feature 1..80: note = Artificially Synthesized Probe
  source 1..80: mol_type = other DNA
gtagtgggtcttcctggagaaaatgtaacaagttggatggaggaaattagcttatatgtttgctgaggagaaaaaaaagc

SEQ ID NO: 134505 - DNA, 80 bp, synthetic construct
  misc_feature 1..80: note = Artificially Synthesized Probe
  source 1..80: mol_type = other DNA
aggcaagcagggagggagagagaggaaagcaaggaaaagtgagaaaaagggaagaaagaggtagaaataaagaaagagag

SEQ ID NO: 134506 - DNA, 80 bp, synthetic construct
  misc_feature 1..80: note = Artificially Synthesized Probe
  source 1..80: mol_type = other DNA
tataactacaactactgacaaattaaacattcattttctctcttcagttaaatgccagataagtttcttccccaggacag

SEQ ID NO: 134507 - DNA, 80 bp, synthetic construct
  misc_feature 1..80: note = Artificially Synthesized Probe
  source 1..80: mol_type = other DNA
tgctcgatccaggggctttacaggttgatcatggtgaattcttgataacctcatagcattctctttataactagaagaca

SEQ ID NO: 134508 - DNA, 80 bp, synthetic construct; identical to SEQ ID NO: 42501
  misc_feature 1..80: note = Artificially Synthesized Probe
  source 1..80: mol_type = other DNA

SEQ ID NO: 134509 - DNA, 80 bp, synthetic construct
  misc_feature 1..80: note = Artificially Synthesized Probe
  source 1..80: mol_type = other DNA
tcccagactccagcagggacagagaaaagtcactcctaatcctatatcacaagggaccttgcggaagtctgtcaactaac

SEQ ID NO: 134510 - DNA, 80 bp, synthetic construct
  misc_feature 1..80: note = Artificially Synthesized Probe
  source 1..80: mol_type = other DNA
tgaaagccacagtttccatctcagtgggtgtgttaggcctttctcttattcccataaagaaatacttgaaactgagtaat

SEQ ID NO: 134511 - DNA, 80 bp, synthetic construct
  misc_feature 1..80: note = Artificially Synthesized Probe
  source 1..80: mol_type = other DNA
agagtgagggcaaaggtgctatacacttaaaaaaaaaaacagatctcgtgataactcactcactatcacaagaagagtac

SEQ ID NO: 134512 - DNA, 80 bp, synthetic construct; identical to SEQ ID NO: 42502
  misc_feature 1..80: note = Artificially Synthesized Probe
  source 1..80: mol_type = other DNA

SEQ ID NO: 134513 - DNA, 80 bp, synthetic construct
  misc_feature 1..80: note = Artificially Synthesized Probe
  source 1..80: mol_type = other DNA
tgcctacatagggggagccagagcacagacttgactgacccagcctcgtgttcttgctcctgcacctgccctggtggctt

SEQ ID NO: 134514 - DNA, 80 bp, synthetic construct
  misc_feature 1..80: note = Artificially Synthesized Probe
  source 1..80: mol_type = other DNA
ttacagcatctgcaggcataataacacaaccccaagaaggaaaacacttctgcatgacctcagctatcactattacctgc

SEQ ID NO: 134515 - DNA, 80 bp, synthetic construct
  misc_feature 1..80: note = Artificially Synthesized Probe
  source 1..80: mol_type = other DNA
atgtaactcccctgccacccctgtcagagctggtgctggtatccactgatgggagactagaggacaggtcatatcactgg

SEQ ID NO: 134516 - DNA, 80 bp, synthetic construct; identical to SEQ ID NO: 42503
  misc_feature 1..80: note = Artificially Synthesized Probe
  source 1..80: mol_type = other DNA

SEQ ID NO: 134517 - DNA, 80 bp, synthetic construct
  misc_feature 1..80: note = Artificially Synthesized Probe
  source 1..80: mol_type = other DNA
ttaaaactgaaaagtagataagttcaccttattagaaggtaaaaagaggaaaatcctatcatctcaagcaataaaaacag

SEQ ID NO: 134518 - DNA, 80 bp, synthetic construct
  misc_feature 1..80: note = Artificially Synthesized Probe
  source 1..80: mol_type = other DNA
ctaatgacaactttaattcaacaatactttactgcagttaaacaagaaaaacaatttttagaataacaaagatttaggag

SEQ ID NO: 134519 - DNA, 80 bp, synthetic construct
  misc_feature 1..80: note = Artificially Synthesized Probe
  source 1..80: mol_type = other DNA
ggaagatatggatgaaatatatgcttaacacagtatgatcaaatgtagacataaaaaagtagagtaagccagttgtaaat

SEQ ID NO: 134520 - DNA, 80 bp, synthetic construct
  misc_feature 1..80: note = Artificially Synthesized Probe
  source 1..80: mol_type = other DNA
gtgcacaagtaaacgaagatttaatttaaaaactaaatttccactgaaaaacttggaatagtttttacaaaagttacata

SEQ ID NO: 134521 - DNA, 80 bp, synthetic construct; identical to SEQ ID NO: 42504
  misc_feature 1..80: note = Artificially Synthesized Probe
  source 1..80: mol_type = other DNA

SEQ ID NO: 134522 - DNA, 80 bp, synthetic construct
  misc_feature 1..80: note = Artificially Synthesized Probe
  source 1..80: mol_type = other DNA
cttattaaaatttcaaaatcacaagtttcataaacctttacaattgttgtagaactttatatgtgattctaaaatccata

SEQ ID NO: 134523 - DNA, 80 bp, synthetic construct
  misc_feature 1..80: note = Artificially Synthesized Probe
  source 1..80: mol_type = other DNA
aagatgcaggcatgcaggaaaaaatgttttcaataaatagtgatgggacagctccttacccaaaaccccatctctacatc

SEQ ID NO: 134524 - DNA, 80 bp, synthetic construct
  misc_feature 1..80: note = Artificially Synthesized Probe
  source 1..80: mol_type = other DNA
gctgagagaagaaggcttcaaacgatcaaactgctccgagctacaggaagaagttcaaacccatggcaaagaggttaaaa

SEQ ID NO: 134525 - DNA, 80 bp, synthetic construct
  misc_feature 1..80: note = Artificially Synthesized Probe
  source 1..80: mol_type = other DNA
ggaagatcaaatgaatgaaatgaagcgagaagagaagtttagagaaaaaagaataaaaagaaacgaacaaagcctccaag

SEQ ID NO: 134526 - DNA, 80 bp, synthetic construct; identical to SEQ ID NO: 42505
  misc_feature 1..80: note = Artificially Synthesized Probe
  source 1..80: mol_type = other DNA

SEQ ID NO: 134527 - DNA, 80 bp, synthetic construct
  misc_feature 1..80: note = Artificially Synthesized Probe
  source 1..80: mol_type = other DNA
atatctagccaaactaagcttcataagaggagaaggagaaataaaatactttagagacaagcaaatgctgagagattttg

SEQ ID NO: 134528 - DNA, 80 bp, synthetic construct
  misc_feature 1..80: note = Artificially Synthesized Probe
  source 1..80: mol_type = other DNA
aatgacaggatcaagttcacacataagaatattaaccttaaacataaatgggctaaatgctccaattaaaagacacagac

SEQ ID NO: 134529 - DNA, 80 bp, synthetic construct
  misc_feature 1..80: note = Artificially Synthesized Probe
  source 1..80: mol_type = other DNA
taaaacagaccttaaagcaccaaagatcaaaagagacaaagaaggccattacataatggtaaaaggatcaattcaacaag

SEQ ID NO: 134530 - DNA, 80 bp, synthetic construct; identical to SEQ ID NO: 42491
  misc_feature 1..80: note = Artificially Synthesized Probe
  source 1..80: mol_type = other DNA

SEQ ID NO: 134531 - DNA, 80 bp, synthetic construct; identical to SEQ ID NO: 42506
  misc_feature 1..80: note = Artificially Synthesized Probe
  source 1..80: mol_type = other DNA

SEQ ID NO: 134532 - DNA, 80 bp, synthetic construct
  misc_feature 1..80: note = Artificially Synthesized Probe
  source 1..80: mol_type = other DNA
gaaattcactcaaaaccgctcaactacatggaaactgaacaacctgctcctgaatgactactgggtacataacgaaatga

SEQ ID NO: 134533 - DNA, 80 bp, synthetic construct
  misc_feature 1..80: note = Artificially Synthesized Probe
  source 1..80: mol_type = other DNA
attgaaagaactagagaagcaagagcataacacattcaagacctagcagaaggcaagaaaaaactaagatcagagcagaa

SEQ ID NO: 134534 - DNA, 80 bp, synthetic construct
  misc_feature 1..80: note = Artificially Synthesized Probe
  source 1..80: mol_type = other DNA
tcaccaccgatcccacagaaatacaaagtaccatcagagaatactataaacacctctacacaaataaactagaaaatcta

SEQ ID NO: 134535 - DNA, 80 bp, synthetic construct; identical to SEQ ID NO: 42507
  misc_feature 1..80: note = Artificially Synthesized Probe
  source 1..80: mol_type = other DNA

SEQ ID NO: 134536 - DNA, 80 bp, synthetic construct
  misc_feature 1..80: note = Artificially Synthesized Probe
  source 1..80: mol_type = other DNA
accatgatcaagtgggcttcatccctgggacgcaaggctgggtcaacatacgcaaatcaacaaacgtaatccagcatata

SEQ ID NO: 134537 - DNA, 80 bp, synthetic construct
  misc_feature 1..80: note = Artificially Synthesized Probe
  source 1..80: mol_type = other DNA
tatcatactgaatggacaaaaactggaagtattccctttgaaaactggcacaagacagggatgccctctctcaccactcc

SEQ ID NO: 134538 - DNA, 80 bp, synthetic construct
  misc_feature 1..80: note = Artificially Synthesized Probe
  source 1..80: mol_type = other DNA
ctgataagcaacttcagcaaagtctcaggatacaaaatcaatgtgcaaaaatcacaagcattcttatacaccaataacag

SEQ ID NO: 134539 - DNA, 80 bp, synthetic construct
  misc_feature 1..80: note = Artificially Synthesized Probe
  source 1..80: mol_type = other DNA
ttccatgctcatgggtaggaagaatcaatatcgagaaaatggccatactgcccaaggtcatttatagattcaatgccatc

SEQ ID NO: 134540 - DNA, 80 bp, synthetic construct; identical to SEQ ID NO: 42508
  misc_feature 1..80: note = Artificially Synthesized Probe
  source 1..80: mol_type = other DNA

SEQ ID NO: 134541 - DNA, 80 bp, synthetic construct
  misc_feature 1..80: note = Artificially Synthesized Probe
  source 1..80: mol_type = other DNA
acttgccatcacaatagagatagtaacagagataacagttctaatggcttctcaaacaatattgggtggatatctacata

SEQ ID NO: 134542 - DNA, 80 bp, synthetic construct
  misc_feature 1..80: note = Artificially Synthesized Probe
  source 1..80: mol_type = other DNA
gctggattaaagacttacatgttagacctaaaaccataaaaaccctagaagaaaacctaggcaataccattcaggacata

SEQ ID NO: 134543 - DNA, 80 bp, synthetic construct
  misc_feature 1..80: note = Artificially Synthesized Probe
  source 1..80: mol_type = other DNA
tctactcatctgacaaagggctaatatccagaatctacaatgaactcaaacaaatttacaagaaacaaacaaacaaaccc

SEQ ID NO: 134544 - DNA, 80 bp, synthetic construct
  misc_feature 1..80: note = Artificially Synthesized Probe
  source 1..80: mol_type = other DNA
ttaaaaagtcaggaaacaacaggtgctggagaggatgtcgagaaataggaacacttttacactgttggtgggactgtaaa

SEQ ID NO: 134545 - DNA, 80 bp, synthetic construct
  misc_feature 1..80: note = Artificially Synthesized Probe
  source 1..80: mol_type = other DNA
tcacaatagcaaagacttggaaccaacccaaatgtccaacaatgatagactggattaagaaaatgtggcacgtatacacc

SEQ ID NO: 134546 - DNA, 80 bp, synthetic construct; identical to SEQ ID NO: 42509
  misc_feature 1..80: note = Artificially Synthesized Probe
  source 1..80: mol_type = other DNA

SEQ ID NO: 134547 - DNA, 80 bp, synthetic construct
  misc_feature 1..80: note = Artificially Synthesized Probe
  source 1..80: mol_type = other DNA
aggagggaaaaaatgaaaaaaatgcaaagaaatggactcaactctgcaaaatacacacaaaaaataatttattttattat

SEQ ID NO: 134548 - DNA, 80 bp, synthetic construct
  misc_feature 1..80: note = Artificially Synthesized Probe
  source 1..80: mol_type = other DNA
tttttgtaaaaaataaataattttaaacaaatttatatgtttaaagtaaaagcaaaaccatagcttctattaagacagca

SEQ ID NO: 134549 - DNA, 80 bp, synthetic construct
  misc_feature 1..80: note = Artificially Synthesized Probe
  source 1..80: mol_type = other DNA
ctgatattaaaagataatgagaaaaccatcataaactgtaggaagatatctgcaatatataaaactggctcaggctcatc

SEQ ID NO: 134550 - DNA, 80 bp, synthetic construct
  misc_feature 1..80: note = Artificially Synthesized Probe
  source 1..80: mol_type = other DNA
acaccaaacctagctatttttttcttttcttttctactattttttatttttcagttttaattttttgtttgtttgtgttg

SEQ ID NO: 134551 - DNA, 80 bp, synthetic construct; identical to SEQ ID NO: 42510
  misc_feature 1..80: note = Artificially Synthesized Probe
  source 1..80: mol_type = other DNA

SEQ ID NO: 134552 - DNA, 80 bp, synthetic construct
  misc_feature 1..80: note = Artificially Synthesized Probe
  source 1..80: mol_type = other DNA
gacattgttaggactggggaatggggaacatggtcatcatttacaagagaacatggtacaactagattcagcagcaggag

SEQ ID NO: 134553 - DNA, 80 bp, synthetic construct
  misc_feature 1..80: note = Artificially Synthesized Probe
  source 1..80: mol_type = other DNA
aaatgttcactgcattccacaaaaaaattacagtcaattgtcaattgacagaatgtcatgctatagtcacctgatggaaa

SEQ ID NO: 134554 - DNA, 80 bp, synthetic construct
  misc_feature 1..80: note = Artificially Synthesized Probe
  source 1..80: mol_type = other DNA
agtttttaaagagaatgttaaaaccagtcaggcttctggtttccattggaagaatcatgtttctaatactggcagcaaaa

SEQ ID NO: 134555 - DNA, 80 bp, synthetic construct
  misc_feature 1..80: note = Artificially Synthesized Probe
  source 1..80: mol_type = other DNA
tgcattgttctaattctgccattacaaaaaaaaagttgcattgaattcattgtccttatgtctctagtatgaagcaccct

SEQ ID NO: 134556 - DNA, 80 bp, synthetic construct
  misc_feature 1..80: note = Artificially Synthesized Probe
  source 1..80: mol_type = other DNA
tttcagttgacttatgaaccaattaatattatgcaccctttaaaactttaaacacaaactttaaataatctgttttaaaa

SEQ ID NO: 134557 - DNA, 80 bp, synthetic construct; identical to SEQ ID NO: 42511
  misc_feature 1..80: note = Artificially Synthesized Probe
  source 1..80: mol_type = other DNA

SEQ ID NO: 134558 - DNA, 80 bp, synthetic construct
  misc_feature 1..80: note = Artificially Synthesized Probe
  source 1..80: mol_type = other DNA
ctagcactgctacagctacacaccactggttaggaagttaaattagctaatctttttcatacccagtataacctttggtt

SEQ ID NO: 134559 - DNA, 80 bp, synthetic construct
  misc_feature 1..80: note = Artificially Synthesized Probe
  source 1..80: mol_type = other DNA
tatcagtgaagtaaaaaaagaaatctactgttttttgggtttttgtttttgttttattttttgagacagaatcttgctct

SEQ ID NO: 134560 - DNA, 80 bp, synthetic construct
  misc_feature 1..80: note = Artificially Synthesized Probe
  source 1..80: mol_type = other DNA
aacaaaatacagcagggtcataaaagtactctaagaaaatagaggtaacattatagtctcagagaatggaagtccttttc

SEQ ID NO: 134561 - DNA, 80 bp, synthetic construct
  misc_feature 1..80: note = Artificially Synthesized Probe
  source 1..80: mol_type = other DNA
cagagtttttttctccaaatctgtgtgttagcatagaaatacttctaaattattttatttgagaaaacgaaggtctaaca

SEQ ID NO: 134562 - DNA, 80 bp, synthetic construct
  misc_feature 1..80: note = Artificially Synthesized Probe
  source 1..80: mol_type = other DNA
taaatttgtacatgtgaatcaaaaaataagaagaagaaagcatgttttcctataaatgatgtgggacaaagaccatgctc

SEQ ID NO: 134563 - DNA, 80 bp, synthetic construct; identical to SEQ ID NO: 42512
  misc_feature 1..80: note = Artificially Synthesized Probe
  source 1..80: mol_type = other DNA

SEQ ID NO: 134564 - DNA, 80 bp, synthetic construct
  misc_feature 1..80: note = Artificially Synthesized Probe
  source 1..80: mol_type = other DNA
gtcagcactcatgtgaagttccagttaaaattcaagctagaaaagcatcttggaagaaactgacactagcctcaaagcct

SEQ ID NO: 134565 - DNA, 80 bp, synthetic construct
  misc_feature 1..80: note = Artificially Synthesized Probe
  source 1..80: mol_type = other DNA
ctatcgtgagttggaagatagctcatgagttggaaaaatcagtatcgttaaaatggccaaattgcccaaagtaatttaca

SEQ ID NO: 134566 - DNA, 80 bp, synthetic construct
  misc_feature 1..80: note = Artificially Synthesized Probe
  source 1..80: mol_type = other DNA
taaaagagtcgattgattgatttattaaagacagtacccaaatcttccactacaggttatataagaatatatgttgaaga

SEQ ID NO: 134567 - DNA, 80 bp, synthetic construct
  misc_feature 1..80: note = Artificially Synthesized Probe
  source 1..80: mol_type = other DNA
tttaaaaagcatggtaccagtttgaaaagagacagatagacgaatggagcagaaaacaaaactcattaataaagccacac

SEQ ID NO: 134568 - DNA, 80 bp, synthetic construct; identical to SEQ ID NO: 42513
  misc_feature 1..80: note = Artificially Synthesized Probe
  source 1..80: mol_type = other DNA

SEQ ID NO: 134569 - DNA, 80 bp, synthetic construct
  misc_feature 1..80: note = Artificially Synthesized Probe
  source 1..80: mol_type = other DNA
taataaaggtctaatatccagattatatgaaaaatttaaacaggtcaacaagcaaaaaacaaataacctcactaaaaaag

SEQ ID NO: 134570 - DNA, 80 bp, synthetic construct
  misc_feature 1..80: note = Artificially Synthesized Probe
  source 1..80: mol_type = other DNA
ggaatagaataactagaagtaaacagatacctagacatatatagcccataagactgaagtgtgaagaaatccaaaacctg

SEQ ID NO: 134571 - DNA, 80 bp, synthetic construct
  misc_feature 1..80: note = Artificially Synthesized Probe
  source 1..80: mol_type = other DNA
attctactgaaactattcaaaacatggttgaaatatgttccaaaacatagtattccaactatgtttggaataccaaaacc

SEQ ID NO: 134572 - DNA, 80 bp, synthetic construct
  misc_feature 1..80: note = Artificially Synthesized Probe
  source 1..80: mol_type = other DNA
tcatcattattacatgtgatttatctcatggatgcaaaaatttttcaacatatgcaaatcaataaatgtgatacatctta

SEQ ID NO: 134573 - DNA, 80 bp, synthetic construct; identical to SEQ ID NO: 42492
  misc_feature 1..80: note = Artificially Synthesized Probe
  source 1..80: mol_type = other DNA

SEQ ID NO: 134574 - DNA, 80 bp, synthetic construct; identical to SEQ ID NO: 42514
  misc_feature 1..80: note = Artificially Synthesized Probe
  source 1..80: mol_type = other DNA

SEQ ID NO: 134575 - DNA, 80 bp, synthetic construct
  misc_feature 1..80: note = Artificially Synthesized Probe
  source 1..80: mol_type = other DNA
cttgtatctagaaaaacctaacaacctcaccaaaaactgttttaagctgataaacccattcagtagttccaggacacaaa

SEQ ID NO: 134576 - DNA, 80 bp, synthetic construct
  misc_feature 1..80: note = Artificially Synthesized Probe
  source 1..80: mol_type = other DNA
tggatgaaaaagattgaacaggacagaaaaaaatgaaaatgttttctgttcatagaatagaggaatcgaaagcattaaaa

SEQ ID NO: 134577 - DNA, 80 bp, synthetic construct
  misc_feature 1..80: note = Artificially Synthesized Probe
  source 1..80: mol_type = other DNA
ggaggaactacattacttgacttcaaattatacttcaaagctagtagccataacagcatggcactattataaaaaaagac

SEQ ID NO: 134578 - DNA, 80 bp, synthetic construct
  misc_feature 1..80: note = Artificially Synthesized Probe
  source 1..80: mol_type = other DNA
cctctgagtagtctgttctcacattactataaagaactatctgacactgtagtttataaagaaaagaggtttaattgacc

SEQ ID NO: 134579 - DNA, 80 bp, synthetic construct; identical to SEQ ID NO: 42515
  misc_feature 1..80: note = Artificially Synthesized Probe
  source 1..80: mol_type = other DNA

SEQ ID NO: 134580 - DNA, 80 bp, synthetic construct
  misc_feature 1..80: note = Artificially Synthesized Probe
  source 1..80: mol_type = other DNA
tgatttaaaacccgaaactttgaggaaacactaagacaatgttctgggcagatttgattaataagacctcagaagcacag

SEQ ID NO: 134581 - DNA, 80 bp, synthetic construct
  misc_feature 1..80: note = Artificially Synthesized Probe
  source 1..80: mol_type = other DNA
atcagcagctcaaacaattcaaaaagaaaagaatgagtaatcaaaaagaaatggataaaagatctgaatagacgtttctc

SEQ ID NO: 134582 - DNA, 80 bp, synthetic construct
  misc_feature 1..80: note = Artificially Synthesized Probe
  source 1..80: mol_type = other DNA
aatcaaaatctaaaatatttgaagatatttatttgtagcaaaatatgagtgaccatggcccatgataaagccctcaggaa

SEQ ID NO: 134583 - DNA, 80 bp, synthetic construct
  misc_feature 1..80: note = Artificially Synthesized Probe
  source 1..80: mol_type = other DNA
aaaaaaacaggcaataacaaatgctggtgaggatatggaaaaagggaacccttgtgcactgttggtgggaatataaaatt

SEQ ID NO: 134584 - DNA, 80 bp, synthetic construct
  misc_feature 1..80: note = Artificially Synthesized Probe
  source 1..80: mol_type = other DNA
aatagccaagatatggaatcaacctatatgtgcatcaatgggtgaatcaacggacaagtgaaaatcccgtcatttgcaat

SEQ ID NO: 134585 - DNA, 80 bp, synthetic construct; identical to SEQ ID NO: 42516
  misc_feature 1..80: note = Artificially Synthesized Probe
  source 1..80: mol_type = other DNA

SEQ ID NO: 134586 - DNA, 80 bp, synthetic construct
  misc_feature 1..80: note = Artificially Synthesized Probe
  source 1..80: mol_type = other DNA
agctttcatcaaaatgtcacatttcctgtaaatcgatacaactattatgtatacataataattaaaaatgaaaacttaaa

SEQ ID NO: 134587 - DNA, 80 bp, synthetic construct
  misc_feature 1..80: note = Artificially Synthesized Probe
  source 1..80: mol_type = other DNA
gttcatttagggagataagaaatggaaaagtataagctataaatcctccatttagttggaactgtagcttctcattataa

SEQ ID NO: 134588 - DNA, 80 bp, synthetic construct
  misc_feature 1..80: note = Artificially Synthesized Probe
  source 1..80: mol_type = other DNA
tgcataagtttctgcccatgctttttccactactgttttgtagttaaaatgtaggtgaatgagaaatatgtagctggtgg

SEQ ID NO: 134589 - DNA, 80 bp, synthetic construct; identical to SEQ ID NO: 42517
  misc_feature 1..80: note = Artificially Synthesized Probe
  source 1..80: mol_type = other DNA

SEQ ID NO: 134590 - DNA, 80 bp, synthetic construct
  misc_feature 1..80: note = Artificially Synthesized Probe
  source 1..80: mol_type = other DNA
gtttataacatgtaagaaatgtatattataaaacaaattatgtgtacgtatatacgtagacgtacaaaaccaagatgaac

SEQ ID NO: 134591 - DNA, 80 bp, synthetic construct
  misc_feature 1..80: note = Artificially Synthesized Probe
  source 1..80: mol_type = other DNA
tataaatacattaaaagtttaagtagatttcattagcaacatacagggtccattaagacgttctttaaaatactaaaata

SEQ ID NO: 134592 - DNA, 80 bp, synthetic construct
  misc_feature 1..80: note = Artificially Synthesized Probe
  source 1..80: mol_type = other DNA
atcttcaatacttagtttcctgaggaagaaacaaaaccgacacagtaacagtaacaacaaaaatgaaaaacaagacttta

SEQ ID NO: 134593 - DNA, 80 bp, synthetic construct
  misc_feature 1..80: note = Artificially Synthesized Probe
  source 1..80: mol_type = other DNA
aaacatattctggttgacaattggttgagtttctctaaagacctgggatcaaagggaaggaatgcctgggttaagataaa

SEQ ID NO: 134594 - DNA, 80 bp, synthetic construct
  misc_feature 1..80: note = Artificially Synthesized Probe
  source 1..80: mol_type = other DNA
tttatatagatatttagtatccgtgtacgtaatcatcataattctatgagaaaatattatttcacagataaataggccag

SEQ ID NO: 134595 - DNA, 80 bp, synthetic construct; identical to SEQ ID NO: 42518
  misc_feature 1..80: note = Artificially Synthesized Probe
  source 1..80: mol_type = other DNA

SEQ ID NO: 134596 - DNA, 80 bp, synthetic construct
  misc_feature 1..80: note = Artificially Synthesized Probe
  source 1..80: mol_type = other DNA
ttcatgtgtaagtacacaaagattgtatattgaccattaattcctgaaaccctcgatacagtaaaatctttatgcttttc

SEQ ID NO: 134597 - DNA, 80 bp, synthetic construct
  misc_feature 1..80: note = Artificially Synthesized Probe
  source 1..80: mol_type = other DNA
aactattaaatgacaaaaaaacaaacaaaataagaccagcaagaaaccaaacttcggaaaattttctactcaacattgaa

SEQ ID NO: 134598 - DNA, 80 bp, synthetic construct
  misc_feature 1..80: note = Artificially Synthesized Probe
  source 1..80: mol_type = other DNA
tatttatatcagaaaaaagtttatcaatattgatagatacaattttaatatacaggccacctgatgtgcttcatgcctac

SEQ ID NO: 134599 - DNA, 80 bp, synthetic construct; identical to SEQ ID NO: 42519
  misc_feature 1..80: note = Artificially Synthesized Probe
  source 1..80: mol_type = other DNA

SEQ ID NO: 134600 - DNA, 80 bp, synthetic construct
  misc_feature 1..80: note = Artificially Synthesized Probe
  source 1..80: mol_type = other DNA
gatatacccagaaataaatctaacataaaaggaatataatctttttcaggtgaattattccatttgtgtgaaacttaaac

SEQ ID NO: 134601 - DNA, 80 bp, synthetic construct
  misc_feature 1..80: note = Artificially Synthesized Probe
  source 1..80: mol_type = other DNA
gcatatctaaaagctaatccatgacaatcaaataggctttatctgcagaaggcaagattggttcaacatacacaaatcaa

SEQ ID NO: 134602 - DNA, 80 bp, synthetic construct
  misc_feature 1..80: note = Artificially Synthesized Probe
  source 1..80: mol_type = other DNA
aacaccatactgaatggggaaaagctgtaagcattttccttataaactggcaaagacaagtatgccctctctcactactc

SEQ ID NO: 134603 - DNA, 80 bp, synthetic construct; identical to SEQ ID NO: 42520
  misc_feature 1..80: note = Artificially Synthesized Probe
  source 1..80: mol_type = other DNA

SEQ ID NO: 134604 - DNA, 80 bp, synthetic construct
  misc_feature 1..80: note = Artificially Synthesized Probe
  source 1..80: mol_type = other DNA
ggcctgaaacagactctcaggttaaattttaacttcctctggctgaggaggaagtccatttggatggttgggtgagaagc

SEQ ID NO: 134605 - DNA, 80 bp, synthetic construct
  misc_feature 1..80: note = Artificially Synthesized Probe
  source 1..80: mol_type = other DNA
atttcatgctcatagataggaataatcgatatcattaaaatggccatatagttcaaagcaatttagagattcaaggctat

SEQ ID NO: 134606 - DNA, 80 bp, synthetic construct
  misc_feature 1..80: note = Artificially Synthesized Probe
  source 1..80: mol_type = other DNA
tactacagggctacagtaaccaaaacagtatggcactggtacaaaaacagaaacatagacaaaggaaacagaatagagag

SEQ ID NO: 134607 - DNA, 80 bp, synthetic construct
  misc_feature 1..80: note = Artificially Synthesized Probe
  source 1..80: mol_type = other DNA
accatatacaaatatcaactcaagatggattaaaaacataaatgtaaaacccaaaactatagaaacctagaagacaactt

SEQ ID NO: 134608 - DNA, 80 bp, synthetic construct; identical to SEQ ID NO: 42521
  misc_feature 1..80: note = Artificially Synthesized Probe
  source 1..80: mol_type = other DNA

SEQ ID NO: 134609 - DNA, 80 bp, synthetic construct
  misc_feature 1..80: note = Artificially Synthesized Probe
  source 1..80: mol_type = other DNA
gtcagtcagattagcttttattaaaaagtaaaaaaaataacagatgctggcgaggttgcagagaaaaggaaacagctata

SEQ ID NO: 134610 - DNA, 80 bp, synthetic construct
  misc_feature 1..80: note = Artificially Synthesized Probe
  source 1..80: mol_type = other DNA
gaatgttcatttcagcatgattcacaatagcaaaaacatgaagtcaacctaaatgcctatcaacgacagattggataaag

SEQ ID NO: 134611 - DNA, 80 bp, synthetic construct
  misc_feature 1..80: note = Artificially Synthesized Probe
  source 1..80: mol_type = other DNA
ttagagctaaatgatgagaactcatggacacaaacaggggaacaagagacagtaaggcctacttgagggtggatggtgga

SEQ ID NO: 134612 - DNA, 80 bp, synthetic construct
  misc_feature 1..80: note = Artificially Synthesized Probe
  source 1..80: mol_type = other DNA
tttaacatatgagcttaaaatagccaagagaaattgaaagaaaaaagttatgaatacttaccaaaacatatgtcaaaata

SEQ ID NO: 134613 - DNA, 80 bp, synthetic construct
  misc_feature 1..80: note = Artificially Synthesized Probe
  source 1..80: mol_type = other DNA
ttcttaactacatagaaagtaaaagagaactgtatttttatgtgtaagaaaaccaattacaaactcactaaataaataga

SEQ ID NO: 134614 - DNA, 80 bp, synthetic construct
  misc_feature 1..80: note = Artificially Synthesized Probe
  source 1..80: mol_type = other DNA
ggcatgcattgaggatttcatgtgttatgaacttcaattctatacttgatgtctaggcaatgtgatgctgctattgtcta

SEQ ID NO: 134615 - DNA, 80 bp, synthetic construct; identical to SEQ ID NO: 42493
  misc_feature 1..80: note = Artificially Synthesized Probe
  source 1..80: mol_type = other DNA

SEQ ID NO: 134616 - DNA, 80 bp, synthetic construct
  misc_feature 1..80: note = Artificially Synthesized Probe
  source 1..80: mol_type = other DNA
tctgctaagccaacaattaggtcttggctataattttcaacacagtccacccacttgctatgggtcataaaggtctcttt

SEQ ID NO: 134617 - DNA, 80 bp, synthetic construct
  misc_feature 1..80: note = Artificially Synthesized Probe
  source 1..80: mol_type = other DNA
tttggcacaagctagtccatcctcttccatctgttcctcatgacaattcatcaaaaatgaaaatcgtagtaattgtgatt

SEQ ID NO: 134618 - DNA, 80 bp, synthetic construct; identical to SEQ ID NO: 42522
  misc_feature 1..80: note = Artificially Synthesized Probe
  source 1..80: mol_type = other DNA

SEQ ID NO: 134619 - DNA, 80 bp, synthetic construct
  misc_feature 1..80: note = Artificially Synthesized Probe
  source 1..80: mol_type = other DNA
gtcacagttttaaagagcaaatgagcagccaaggtataaaaaattctatagtaatatttaatttcttcagatggctatca

SEQ ID NO: 134620 - DNA, 80 bp, synthetic construct
  misc_feature 1..80: note = Artificially Synthesized Probe
  source 1..80: mol_type = other DNA
aaagcatttcagaaaatacaaacaagaaagataaagattttacaaaattaatgctggccagaatgcccaggacaagcacc

SEQ ID NO: 134621 - DNA, 80 bp, synthetic construct
  misc_feature 1..80: note = Artificially Synthesized Probe
  source 1..80: mol_type = other DNA
ctctgttatttcctcatttattttctgtgtgcttgtattatcaattactgagagaggaccatcataatctccaagtataa

SEQ ID NO: 134622 - DNA, 80 bp, synthetic construct
  misc_feature 1..80: note = Artificially Synthesized Probe
  source 1..80: mol_type = other DNA
ataaaatgacctttattctcataataatcatttctctgaaggtctaatttatctaatattaatgcagccactccaccttt

SEQ ID NO: 134623 - DNA, 80 bp, synthetic construct; identical to SEQ ID NO: 42523
  misc_feature 1..80: note = Artificially Synthesized Probe
  source 1..80: mol_type = other DNA

SEQ ID NO: 134624 - DNA, 80 bp, synthetic construct
  misc_feature 1..80: note = Artificially Synthesized Probe
  source 1..80: mol_type = other DNA
attagtatcatttttagcataacaactttacgacagtatacttcctgtatctcttcccagattttgtgttattgttgcca

SEQ ID NO: 134625 - DNA, 80 bp, synthetic construct
  misc_feature 1..80: note = Artificially Synthesized Probe
  source 1..80: mol_type = other DNA
tagatcgaaatttttactagagatcatttttcttctgccttcaacatttcttcaagaagtggtggtctatagaagattaa

SEQ ID NO: 134626 - DNA, 80 bp, synthetic construct
  misc_feature 1..80: note = Artificially Synthesized Probe
  source 1..80: mol_type = other DNA
ctttttaggtgtaattgctgttttgtagcttgcattgctttcaatgagaagtctgttttcattctttttttttctttgct

SEQ ID NO: 134627 - DNA, 80 bp, synthetic construct
  misc_feature 1..80: note = Artificially Synthesized Probe
  source 1..80: mol_type = other DNA
gtgtctaaaatgcctggcaaaggtcactgaatagatgtttttaagcaggttacttccgttaagaaaaagcactaaattcc

SEQ ID NO: 134628 - DNA, 80 bp, synthetic construct; identical to SEQ ID NO: 42524
  misc_feature 1..80: note = Artificially Synthesized Probe
  source 1..80: mol_type = other DNA

SEQ ID NO: 134629 - DNA, 80 bp, synthetic construct
  misc_feature 1..80: note = Artificially Synthesized Probe
  source 1..80: mol_type = other DNA
catctctggtagtttaatgtgggcttgtttatagaaattttatttttctcattatatgcttacttttatgttcttttggc

SEQ ID NO: 134630 - DNA, 80 bp, synthetic construct
  misc_feature 1..80: note = Artificially Synthesized Probe
  source 1..80: mol_type = other DNA
attagtcttgtaagttgtccaacataatatcaaattacaaaattcaatagcattctttaacccagatacaagtataaaat

SEQ ID NO: 134631 - DNA, 80 bp, synthetic construct
  misc_feature 1..80: note = Artificially Synthesized Probe
  source 1..80: mol_type = other DNA
atcatgtatgtcatgactgtgaacttgtctgtttaataatatgctatttgttgctctcagtcatatatttatgctttgtt

SEQ ID NO: 134632 - DNA, 80 bp, synthetic construct
  misc_feature 1..80: note = Artificially Synthesized Probe
  source 1..80: mol_type = other DNA
ttttatttcggagtaaattttattccaccaaagaggccatacacatctaaagactctatttggatgatgtttggagacct

SEQ ID NO: 134633 - DNA, 80 bp, synthetic construct; identical to SEQ ID NO: 42525
  misc_feature 1..80: note = Artificially Synthesized Probe
  source 1..80: mol_type = other DNA

SEQ ID NO: 134634 - DNA, 80 bp, synthetic construct
  misc_feature 1..80: note = Artificially Synthesized Probe
  source 1..80: mol_type = other DNA
attattcattttatattcattaattggaattaagagattgcttgttcattgaactgtttatacagtataaactaaaatat

SEQ ID NO: 134635 - DNA, 80 bp, synthetic construct
  misc_feature 1..80: note = Artificially Synthesized Probe
  source 1..80: mol_type = other DNA
ggtttagactcgacttctgttttcgctgcctcaaacttaaaattaaacacttctccagtgaacggtattttattttatta

SEQ ID NO: 134636 - DNA, 80 bp, synthetic construct
  misc_feature 1..80: note = Artificially Synthesized Probe
  source 1..80: mol_type = other DNA
aaatcctttgccacaataacacaatgtttacctatttgataagtcttaataaatatgtgaaatttgttttggaattactc

SEQ ID NO: 134637 - DNA, 80 bp, synthetic construct
  misc_feature 1..80: note = Artificially Synthesized Probe
  source 1..80: mol_type = other DNA
caagtttaaagcacccacacaaattcagagcaaacaccaagaccgagaaaaaataacagcctgataaccacttacacata

SEQ ID NO: 134638 - DNA, 80 bp, synthetic construct; identical to SEQ ID NO: 42526
  misc_feature 1..80: note = Artificially Synthesized Probe
  source 1..80: mol_type = other DNA

SEQ ID NO: 134639 - DNA, 80 bp, synthetic construct
  misc_feature 1..80: note = Artificially Synthesized Probe
  source 1..80: mol_type = other DNA
gaaaaggactgaagaacaaatatatttaaggttcataaacactcatgaatacaaaggcaagtgtccctgtatcaaattat

SEQ ID NO: 134640 - DNA, 80 bp, synthetic construct
  misc_feature 1..80: note = Artificially Synthesized Probe
  source 1..80: mol_type = other DNA
aatttttgcatactgaccctttatcatatatatgtcttacgaatattcacttccattccacagattgccttttaagtttg

SEQ ID NO: 134641 - DNA, 80 bp, synthetic construct
  misc_feature 1..80: note = Artificially Synthesized Probe
  source 1..80: mol_type = other DNA
ggttgaatatttaatttgtctcagggcatcaaaatgtccatgttacccaaaacaatccagattcaatgaatccatattaa

SEQ ID NO: 134642 - DNA, 80 bp, synthetic construct; identical to SEQ ID NO: 42527
  misc_feature 1..80: note = Artificially Synthesized Probe
  source 1..80: mol_type = other DNA

SEQ ID NO: 134643 - DNA, 80 bp, synthetic construct
  misc_feature 1..80: note = Artificially Synthesized Probe
  source 1..80: mol_type = other DNA
ccacaagcaaaagaaggaaattggagccttatctgaagccatcactcttcaaatttgatgaaaaaaattcttaaaactta

SEQ ID NO: 134644 - DNA, 80 bp, synthetic construct
  misc_feature 1..80: note = Artificially Synthesized Probe
  source 1..80: mol_type = other DNA
aaatacgtgaaatgcctaaaaactgaaaaaaagaaaaaagaccgccacaacttttacatactattatggtctatattgaa

SEQ ID NO: 134645 - DNA, 80 bp, synthetic construct
  misc_feature 1..80: note = Artificially Synthesized Probe
  source 1..80: mol_type = other DNA
actcttctcctgaactatgttaaagctacctttgtcatttccccagtaccacaagccatagcttttttcaaacattgcta

SEQ ID NO: 134646 - DNA, 80 bp, synthetic construct
  misc_feature 1..80: note = Artificially Synthesized Probe
  source 1..80: mol_type = other DNA
aagcaagaggaagtgataaggagataggtgagctgatgatacaagttgttaaaaatgacagttgaaagaattaataaaga

SEQ ID NO: 134647 - DNA, 80 bp, synthetic construct; identical to SEQ ID NO: 42528
  misc_feature 1..80: note = Artificially Synthesized Probe
  source 1..80: mol_type = other DNA

SEQ ID NO: 134648 - DNA, 80 bp, synthetic construct
  misc_feature 1..80: note = Artificially Synthesized Probe
  source 1..80: mol_type = other DNA
gtttgactagatagtttatgttatcaatgtgatttaccatgatcaccagtttttgctctgagggtctggagtctgggtag

SEQ ID NO: 134649 - DNA, 80 bp, synthetic construct
  misc_feature 1..80: note = Artificially Synthesized Probe
  source 1..80: mol_type = other DNA
gacccctgcaagcttgcaactgatcttttctgggctacccttcataggtcttttctctctccttattttaatctgtaatc

SEQ ID NO: 134650 - DNA, 80 bp, synthetic construct
  misc_feature 1..80: note = Artificially Synthesized Probe
  source 1..80: mol_type = other DNA
tagaaatttctttgtaaaatattttttccttaatcttgaatgtacaagtatacttaaaattccaaaataccacatgaaaa

SEQ ID NO: 134651 - DNA, 80 bp, synthetic construct; identical to SEQ ID NO: 42529
  misc_feature 1..80: note = Artificially Synthesized Probe
  source 1..80: mol_type = other DNA

SEQ ID NO: 134652 - DNA, 80 bp, synthetic construct
  misc_feature 1..80: note = Artificially Synthesized Probe
  source 1..80: mol_type = other DNA
acactcttatcctgactatgttaaagctacctttgtcatttccccagcaccacaagccatagtttttatcaaccatcact

SEQ ID NO: 134653 - DNA, 80 bp, synthetic construct
  misc_feature 1..80: note = Artificially Synthesized Probe
  source 1..80: mol_type = other DNA
cataaacagggaattataaaataggcctctaagaaaaccccagaggaatgcaagttaaaatgagacatgtactttcaaca

SEQ ID NO: 134654 - DNA, 80 bp, synthetic construct
  misc_feature 1..80: note = Artificially Synthesized Probe
  source 1..80: mol_type = other DNA
caattctaccgctggaggaattcctgatttaccaagtctccagcacacccacatacacacaacacacaaatatactatat

SEQ ID NO: 134655 - DNA, 80 bp, synthetic construct; identical to SEQ ID NO: 42530
  misc_feature 1..80: note = Artificially Synthesized Probe
  source 1..80: mol_type = other DNA

SEQ ID NO: 134656 - DNA, 80 bp, synthetic construct
  misc_feature 1..80: note = Artificially Synthesized Probe
  source 1..80: mol_type = other DNA
agtgaaattagttaagtgggctttggaggtaaatagatctatcttcccatattttttcaaaatgatgtttgtcaaagaga

SEQ ID NO: 134657 - DNA, 80 bp, synthetic construct
  misc_feature 1..80: note = Artificially Synthesized Probe
  source 1..80: mol_type = other DNA
gcacaagaaagtaggctgtcaacagatttactgcctaaccaccaataatgagaaatagtttagttatctttccaaggtat

SEQ ID NO: 134658 - DNA, 80 bp, synthetic construct
  misc_feature 1..80: note = Artificially Synthesized Probe
  source 1..80: mol_type = other DNA
agactaaactggtgctccagaagtaaagataaaaaatggaaataaaaggcattcaaagaaataatacaaaaaaaattaat

SEQ ID NO: 134659 - DNA, 80 bp, synthetic construct
  misc_feature 1..80: note = Artificially Synthesized Probe
  source 1..80: mol_type = other DNA
acaacctgaaaaagagaacaactgtagccactacatcagggtattttgggaatttgaagactacggacatattactaggc

SEQ ID NO: 134660 - DNA, 80 bp, synthetic construct
  misc_feature 1..80: note = Artificially Synthesized Probe
  source 1..80: mol_type = other DNA
gtattttgggaatttgaagactacggacatattactaggctccactgatgctgggataccaactttaatgaaatcacaat

SEQ ID NO: 134661 - DNA, 80 bp, synthetic construct
  misc_feature 1..80: note = Artificially Synthesized Probe
  source 1..80: mol_type = other DNA
gtttgtataaatccaataaataccacattatagttattagtttttctttattcctaaaattgttcacttatgtgatgtat

SEQ ID NO: 134662 - DNA, 80 bp, synthetic construct
  misc_feature 1..80: note = Artificially Synthesized Probe
  source 1..80: mol_type = other DNA
ataatttgatttgctaccatgaaggaagagggaaggcataacatgtaatgttacaaagctcaaaaggactaggttttggg

SEQ ID NO: 134663 - DNA, 80 bp, synthetic construct
  misc_feature 1..80: note = Artificially Synthesized Probe
  source 1..80: mol_type = other DNA
tcatttaggccaaaagagcataatctcacggaggataatttctatttatgaccaactaaaaacaggagggtggcaaactt

SEQ ID NO: 134664 - DNA, 80 bp, synthetic construct
  misc_feature 1..80: note = Artificially Synthesized Probe
  source 1..80: mol_type = other DNA
acagaatgaaaccctgtctctattaaaaatacaaaaattagccagacatggtgaagggctcctgtaatcccagctactct

SEQ ID NO: 134665 - DNA, 80 bp, synthetic construct; identical to SEQ ID NO: 42531
  misc_feature 1..80: note = Artificially Synthesized Probe
  source 1..80: mol_type = other DNA

SEQ ID NO: 134666 - DNA, 80 bp, synthetic construct
  misc_feature 1..80: note = Artificially Synthesized Probe
  source 1..80: mol_type = other DNA
tgttagagaggaatcccagagaatgattgatgtgttagttacacacatacacatttgatgaaagaaatcatactgtacac

SEQ ID NO: 134667 - DNA, 80 bp, synthetic construct
  misc_feature 1..80: note = Artificially Synthesized Probe
  source 1..80: mol_type = other DNA
agagctggaaccctagtatatggctagtaggtttactagtttgcacaaccttttgggaaactaaattttaatgatatcta

SEQ ID NO: 134668 - DNA, 80 bp, synthetic construct
  misc_feature 1..80: note = Artificially Synthesized Probe
  source 1..80: mol_type = other DNA
atacattaattcaatagactccatatagctataagaatgagcacagcatatctacatgcaacaacttgtacgaatttcaa

SEQ ID NO: 134669 - DNA, 80 bp, synthetic construct; identical to SEQ ID NO: 42532
  misc_feature 1..80: note = Artificially Synthesized Probe
  source 1..80: mol_type = other DNA

SEQ ID NO: 134670 - DNA, 80 bp, synthetic construct; identical to SEQ ID NO: 42494
  misc_feature 1..80: note = Artificially Synthesized Probe
  source 1..80: mol_type = other DNA

SEQ ID NO: 134671 - DNA, 80 bp, synthetic construct
  misc_feature 1..80: note = Artificially Synthesized Probe
  source 1..80: mol_type = other DNA
ggtgaaaccccgtctctactaaaaatacaaaaaattagccgggcttggtgaccggcgcctgtagtcccagctactccgga

SEQ ID NO: 134672 - DNA, 80 bp, synthetic construct
  misc_feature 1..80: note = Artificially Synthesized Probe
  source 1..80: mol_type = other DNA
ctgatcacaggaaagctacatataagaaggaattggaaggcttaggtgacgaaagattaacagaaactccaagttttcca

SEQ ID NO: 134673 - DNA, 80 bp, synthetic construct
  misc_feature 1..80: note = Artificially Synthesized Probe
  source 1..80: mol_type = other DNA
gtgattaatctagtttagttgcagacaagttggatagagggggaaggttaagaggctgtttttttcttaagttaattggg

SEQ ID NO: 134674 - DNA, 80 bp, synthetic construct
  misc_feature 1..80: note = Artificially Synthesized Probe
  source 1..80: mol_type = other DNA
ttaaaaagaaaaagggagattcctcaatctaataagagatatctaaaattagcctacagcaaacatcacccttaatggta

SEQ ID NO: 134675 - DNA, 80 bp, synthetic construct; identical to SEQ ID NO: 42533
  misc_feature 1..80: note = Artificially Synthesized Probe
  source 1..80: mol_type = other DNA

SEQ ID NO: 134676 - DNA, 80 bp, synthetic construct
  misc_feature 1..80: note = Artificially Synthesized Probe
  source 1..80: mol_type = other DNA
gcagggaaagagggcccaacatggtactgacagttaaaactaaattttaccagccaagtgtcacatagcttattactggg

SEQ ID NO: 134677 - DNA, 80 bp, synthetic construct
  misc_feature 1..80: note = Artificially Synthesized Probe
  source 1..80: mol_type = other DNA
aaggctagtctcaaattctacagtgagaactatctatttgctgtacagcagatctcttagaagttgaggaagaaataaag

SEQ ID NO: 134678 - DNA, 80 bp, synthetic construct
  misc_feature 1..80: note = Artificially Synthesized Probe
  source 1..80: mol_type = other DNA
ctgtaatcccaactacaatggaggctgaggcgggagaatcgcttgaacccgggaagcagaggttgcagtgagccaagatc

SEQ ID NO: 134679 - DNA, 80 bp, synthetic construct
  misc_feature 1..80: note = Artificially Synthesized Probe
  source 1..80: mol_type = other DNA
tggatatgagtagcagtgattttcataattcctgatatccctgttcccttagctattaaaggtatttttaaaatgttaat

SEQ ID NO: 134680 - DNA, 80 bp, synthetic construct; identical to SEQ ID NO: 42534
  misc_feature 1..80: note = Artificially Synthesized Probe
  source 1..80: mol_type = other DNA

SEQ ID NO: 134681 - DNA, 80 bp, synthetic construct
  misc_feature 1..80: note = Artificially Synthesized Probe
  source 1..80: mol_type = other DNA
aaggcagttatttgttgttcaaattatgttcagtaacatgagaagcataaaggttttaagtaaataggatatttaatttc

SEQ ID NO: 134682 - DNA, 80 bp, synthetic construct
  misc_feature 1..80: note = Artificially Synthesized Probe
  source 1..80: mol_type = other DNA
gaaataaatcctaaatattttggaataaataatctctaattcaacggtgaacactgagtcccttaaaatataggaaacag

SEQ ID NO: 134683 - DNA, 80 bp, synthetic construct; identical to SEQ ID NO: 42490
  misc_feature 1..80: note = Artificially Synthesized Probe
  source 1..80: mol_type = other DNA

SEQ ID NO: 134684 - DNA, 80 bp, synthetic construct
  misc_feature 1..80: note = Artificially Synthesized Probe
  source 1..80: mol_type = other DNA
tttttttggctactttccatttacagagccctgtggtaatataaaaagggttttatcattgcagatttcctaagtagttt

SEQ ID NO: 134685 - DNA, 80 bp, synthetic construct
  misc_feature 1..80: note = Artificially Synthesized Probe
  source 1..80: mol_type = other DNA
atcccagttagccagtggaacctgaagccacatgcatttttcaggacccttcaccttgttactttttgtatgtctcttat

SEQ ID NO: 134686 - DNA, 80 bp, synthetic construct
  misc_feature 1..80: note = Artificially Synthesized Probe
  source 1..80: mol_type = other DNA
taaaatttgaaagccagaaaaaaagaaactacggttaaattatgccttaaaggaattttaaaaatacagaactatacttg

SEQ ID NO: 134687 - DNA, 80 bp, synthetic construct; identical to SEQ ID NO: 42535
  misc_feature 1..80: note = Artificially Synthesized Probe
  source 1..80: mol_type = other DNA

SEQ ID NO: 134688 - DNA, 80 bp, synthetic construct
  misc_feature 1..80: note = Artificially Synthesized Probe
  source 1..80: mol_type = other DNA
tcattctttcatttgatactttctctgcctgctctatttaaatatgcaaactcactctaagaactatctgttcttcttac

SEQ ID NO: 134689 - DNA, 80 bp, synthetic construct
  misc_feature 1..80: note = Artificially Synthesized Probe
  source 1..80: mol_type = other DNA
tggcattcaacaaatacttttttttacacaaagtaaacaagagagaatgaaggaagaaaagtaaaaaaggaaggaaggca

SEQ ID NO: 134690 - DNA, 80 bp, synthetic construct
  misc_feature 1..80: note = Artificially Synthesized Probe
  source 1..80: mol_type = other DNA
aggggagtgagggagaaaggaaagaaagtcaaaaggtatgtaaaaaagtctttcacattacctctgtgagaaagtaccag

SEQ ID NO: 134691 - DNA, 80 bp, synthetic construct; identical to SEQ ID NO: 42536
  misc_feature 1..80: note = Artificially Synthesized Probe
  source 1..80: mol_type = other DNA

SEQ ID NO: 134692 - DNA, 80 bp, synthetic construct
  misc_feature 1..80: note = Artificially Synthesized Probe
  source 1..80: mol_type = other DNA
ttctgcagacaaagaaaataatgaaggacaaaggaggcatggtaaatcatgtatcacctcgaaaatatttgccagggtat

SEQ ID NO: 134693 - DNA, 80 bp, synthetic construct
  misc_feature 1..80: note = Artificially Synthesized Probe
  source 1..80: mol_type = other DNA
attcaaagagaataatcagggaattgtttgtacagagatataagaagtccattatcttcagctcagcatatgcagtggaa

SEQ ID NO: 134694 - DNA, 80 bp, synthetic construct
  misc_feature 1..80: note = Artificially Synthesized Probe
  source 1..80: mol_type = other DNA
tatacatatatcatattactttggtgagatctttcagagaaaaaaataagacacaatatatatacacacacactatctac

SEQ ID NO: 134695 - DNA, 80 bp, synthetic construct
  misc_feature 1..80: note = Artificially Synthesized Probe
  source 1..80: mol_type = other DNA
ctgaaatatatagtcttgcagagaataagatatggtatttttaatcctttcaccaaaggtcatctggtcagtgagctctg

SEQ ID NO: 134696 - DNA, 80 bp, synthetic construct
  misc_feature 1..80: note = Artificially Synthesized Probe
  source 1..80: mol_type = other DNA
aaaaccacctttctgaagtcttgccatcaactttgggttctttagtacaccatcacagagttgtatgttaatttgaaaga

SEQ ID NO: 134697 - DNA, 80 bp, synthetic construct; identical to SEQ ID NO: 42537
  misc_feature 1..80: note = Artificially Synthesized Probe
  source 1..80: mol_type = other DNA

SEQ ID NO: 134698 - DNA, 80 bp, synthetic construct
  misc_feature 1..80: note = Artificially Synthesized Probe
  source 1..80: mol_type = other DNA
ttaaaaaccagcatctggacaaacttcttaggcatggtaaaatcccttatggaaaccatcctactgtagatccttcaaga

SEQ ID NO: 134699 - DNA, 80 bp, synthetic construct
  misc_feature 1..80: note = Artificially Synthesized Probe
  source 1..80: mol_type = other DNA
caaattcctatatgcactaacatcattatttcagtaacagaaataaaatctggttctttttaaagaaaaggaagcacggg

SEQ ID NO: 134700 - DNA, 80 bp, synthetic construct
  misc_feature 1..80: note = Artificially Synthesized Probe
  source 1..80: mol_type = other DNA
tgcatttgatatagaatagctttcttctccataaagccaactgattgttgtctcctatgcctttgttacagggaattttt

SEQ ID NO: 134701 - DNA, 80 bp, synthetic construct; identical to SEQ ID NO: 42538
  misc_feature 1..80: note = Artificially Synthesized Probe
  source 1..80: mol_type = other DNA

SEQ ID NO: 134702 - DNA, 80 bp, synthetic construct
  misc_feature 1..80: note = Artificially Synthesized Probe
  source 1..80: mol_type = other DNA
ggctagacttggatatagtgagatcagatatggatatagtgttgcaattcttagtgaatcccaaactgagcaatagcaat

SEQ ID NO: 134703 - DNA, 80 bp, synthetic construct
  misc_feature 1..80: note = Artificially Synthesized Probe
  source 1..80: mol_type = other DNA
gcccttgagtaacaaaagaactgggaggacagagaacaggaaagacaagagagagaagtgatggttttagaatttttgca

SEQ ID NO: 134704 - DNA, 80 bp, synthetic construct
  misc_feature 1..80: note = Artificially Synthesized Probe
  source 1..80: mol_type = other DNA
tctgttgctgtcaaactttcaataaaaagtaaagaaagcaaaacattatagaaaacatgaacaaaagtctatctataaaa

SEQ ID NO: 134705 - DNA, 80 bp, synthetic construct; identical to SEQ ID NO: 42539
  misc_feature 1..80: note = Artificially Synthesized Probe
  source 1..80: mol_type = other DNA

SEQ ID NO: 134706 - DNA, 80 bp, synthetic construct
  misc_feature 1..80: note = Artificially Synthesized Probe
  source 1..80: mol_type = other DNA
atccactaccctatatcttttctctctgtgtgtatacatatactaattaaaggtatcgaatggtatatactcagtgtgaa

SEQ ID NO: 134707 - DNA, 80 bp, synthetic construct
  misc_feature 1..80: note = Artificially Synthesized Probe
  source 1..80: mol_type = other DNA
gaaagtcttctcttccgaagtgctccctgaatattgcacctgatggctaggattcaactctgctggctcttttttcattg

SEQ ID NO: 134708 - DNA, 80 bp, synthetic construct
  misc_feature 1..80: note = Artificially Synthesized Probe
  source 1..80: mol_type = other DNA
agtatattctagcactttgctttttacctcagagtggagtctgatattaaatgattcaccactttctgaattgtaactag

SEQ ID NO: 134709 - DNA, 80 bp, synthetic construct; identical to SEQ ID NO: 42540
  misc_feature 1..80: note = Artificially Synthesized Probe
  source 1..80: mol_type = other DNA

SEQ ID NO: 134710 - DNA, 80 bp, synthetic construct
  misc_feature 1..80: note = Artificially Synthesized Probe
  source 1..80: mol_type = other DNA
actcaagattatatccacacaaattgtaacttccatttccttttgttctgatactctctcatgagtgggagcgaaaaaga

SEQ ID NO: 134711 - DNA, 80 bp, synthetic construct
  misc_feature 1..80: note = Artificially Synthesized Probe
  source 1..80: mol_type = other DNA
aaaacagaaaaagaagaaggaaggaaggagagaggaaagcaaaggaatgattagtaagaaagagaaaaagaaaaaaagga

SEQ ID NO: 134712 - DNA, 80 bp, synthetic construct
  misc_feature 1..80: note = Artificially Synthesized Probe
  source 1..80: mol_type = other DNA
tagcactttattttacattaattactcatgcttagtgagcccacagttcatgcaaagatctagatattatgatcattctt

SEQ ID NO: 134713 - DNA, 80 bp, synthetic construct
  misc_feature 1..80: note = Artificially Synthesized Probe
  source 1..80: mol_type = other DNA
gtttttacagtggttaaagggtaaagtgctgttggtaacaatatgtaatgcttatggattataagtatttttaatgataa

SEQ ID NO: 134714 - DNA, 80 bp, synthetic construct; identical to SEQ ID NO: 42541
  misc_feature 1..80: note = Artificially Synthesized Probe
  source 1..80: mol_type = other DNA

SEQ ID NO: 134715 - DNA, 80 bp, synthetic construct
  misc_feature 1..80: note = Artificially Synthesized Probe
  source 1..80: mol_type = other DNA
ttctgaacagttaatagatttgcacctgaaatttaaaaagaaggaaaaacaattcctagaacaaggaaatatgacatcaa

SEQ ID NO: 134716 - DNA, 80 bp, synthetic construct
  misc_feature 1..80: note = Artificially Synthesized Probe
  source 1..80: mol_type = other DNA
atcacagtggctagtgcataggaagatattaatatatactgctatcattattatgatatccatgagtttgagctaaatgc

SEQ ID NO: 134717 - DNA, 80 bp, synthetic construct; identical to SEQ ID NO: 42495
  misc_feature 1..80: note = Artificially Synthesized Probe
  source 1..80: mol_type = other DNA

SEQ ID NO: 134718 - DNA, 80 bp, synthetic construct; identical to SEQ ID NO: 42542
  misc_feature 1..80: note = Artificially Synthesized Probe
  source 1..80: mol_type = other DNA

SEQ ID NO: 134719 - DNA, 80 bp, synthetic construct
  misc_feature 1..80: note = Artificially Synthesized Probe
  source 1..80: mol_type = other DNA
tggtcttttaaatatgactgttcatgttcctggcatcagtaagaatattgtgttttaataaagacaaacttaagtagtca

SEQ ID NO: 134720 - DNA, 80 bp, synthetic construct
  misc_feature 1..80: note = Artificially Synthesized Probe
  source 1..80: mol_type = other DNA
cattaacttacaggcaaaataaaatggaacatgtgattctgagactgccagcctaggtaaagtaaactagtggataactt

SEQ ID NO: 134721 - DNA, 80 bp, synthetic construct
  misc_feature 1..80: note = Artificially Synthesized Probe
  source 1..80: mol_type = other DNA
attcagagtcccttttagtttaccatacacctgaggatatgaaggagattttgccatcttgacagtttcattgcttcaca

SEQ ID NO: 134722 - DNA, 80 bp, synthetic construct
  misc_feature 1..80: note = Artificially Synthesized Probe
  source 1..80: mol_type = other DNA
catcccaagatttaaagatctgtttttgaattttgggccaattacttaacatacccagaggaggtgatgacttttgctat

SEQ ID NO: 134723 - DNA, 80 bp, synthetic construct; identical to SEQ ID NO: 42543
  misc_feature 1..80: note = Artificially Synthesized Probe
  source 1..80: mol_type = other DNA

SEQ ID NO: 134724 - DNA, 80 bp, synthetic construct
  misc_feature 1..80: note = Artificially Synthesized Probe
  source 1..80: mol_type = other DNA
atgtgtcaatgttaataacccatgagattacctctgagatctcatcccgtatatccagctgcttactggatttcgccaaa

SEQ ID NO: 134725 - DNA, 80 bp, synthetic construct
  misc_feature 1..80: note = Artificially Synthesized Probe
  source 1..80: mol_type = other DNA
aaactaatttagtccttttagtagccctgtcagagatgagataaatgaagttcaggtgcaaggagactgaattacttttc

SEQ ID NO: 134726 - DNA, 80 bp, synthetic construct
  misc_feature 1..80: note = Artificially Synthesized Probe
  source 1..80: mol_type = other DNA
cacacctctcaactctactgccacatctgtccaagtgttttacgtaaaatgaaaatcaggtcataatatttccctttaga

SEQ ID NO: 134727 - DNA, 80 bp, synthetic construct; identical to SEQ ID NO: 42544
  misc_feature 1..80: note = Artificially Synthesized Probe
  source 1..80: mol_type = other DNA

SEQ ID NO: 134728 - DNA, 80 bp, synthetic construct
  misc_feature 1..80: note = Artificially Synthesized Probe
  source 1..80: mol_type = other DNA
gccaggatggtctcgatctccggaccttgtgatctgccaccctcagcctcccaaagtgctaggattacaagcttgagcca

SEQ ID NO: 134729 - DNA, 80 bp, synthetic construct
  misc_feature 1..80: note = Artificially Synthesized Probe
  source 1..80: mol_type = other DNA
cttttaatgtctgatttatctgtttgtgaaatccttgaatccatggactttattttagtcttcctatctaaaagagtgct

SEQ ID NO: 134730 - DNA, 80 bp, synthetic construct
  misc_feature 1..80: note = Artificially Synthesized Probe
  source 1..80: mol_type = other DNA
ttcatcaggtaaacaccatatcacacttaagcaaattaaataagcttagcatggataaatcaccctgatcaatggttgta

SEQ ID NO: 134731 - DNA, 80 bp, synthetic construct; identical to SEQ ID NO: 42545
  misc_feature 1..80: note = Artificially Synthesized Probe
  source 1..80: mol_type = other DNA

SEQ ID NO: 134732 - DNA, 80 bp, synthetic construct
  misc_feature 1..80: note = Artificially Synthesized Probe
  source 1..80: mol_type = other DNA
catcaatacttggaattaaaaaagaatagacatagggaaataaagaagaggctctacaaaggtctgtttgttcaaattca

SEQ ID NO: 134733 - DNA, 80 bp, synthetic construct
  misc_feature 1..80: note = Artificially Synthesized Probe
  source 1..80: mol_type = other DNA
caggaacataggaaggagggtatggtaccttcccacagtgcttttccactgttgaggctggagaaaacctcaaggagtac

SEQ ID NO: 134734 - DNA, 80 bp, synthetic construct
  misc_feature 1..80: note = Artificially Synthesized Probe
  source 1..80: mol_type = other DNA
ttactttggccatctcctgatagaatctccaaatggttgaaggagatggtctattttccagccatgtcaaaacgaagtcc

SEQ ID NO: 134735 - DNA, 80 bp, synthetic construct; identical to SEQ ID NO: 42546
  misc_feature 1..80: note = Artificially Synthesized Probe
  source 1..80: mol_type = other DNA

SEQ ID NO: 134736 - DNA, 80 bp, synthetic construct
  misc_feature 1..80: note = Artificially Synthesized Probe
  source 1..80: mol_type = other DNA
gaggcaaaccattaatatccttaaaagccttctttctagaaagtgatactagtcatagtagctccatattttaggatatt

SEQ ID NO: 134737 - DNA, 80 bp, synthetic construct
  misc_feature 1..80: note = Artificially Synthesized Probe
  source 1..80: mol_type = other DNA
agcttctgtacatctcaactctacattcaggcctaggtattgaaacctcagataggaccaaaactcattcagaaatttaa

SEQ ID NO: 134738 - DNA, 80 bp, synthetic construct
  misc_feature 1..80: note = Artificially Synthesized Probe
  source 1..80: mol_type = other DNA
aataatacttataaataatatgtataacacatatagtattatattactactttagtaatatgtttacaaaaatagtttgt

SEQ ID NO: 134739 - DNA, 80 bp, synthetic construct; identical to SEQ ID NO: 42547
  misc_feature 1..80: note = Artificially Synthesized Probe
  source 1..80: mol_type = other DNA

SEQ ID NO: 134740 - DNA, 80 bp, synthetic construct
  misc_feature 1..80: note = Artificially Synthesized Probe
  source 1..80: mol_type = other DNA
tattatgaataatgtaattaaagttaggcaagtttttaggagccttagtacttacgaaggttcattaatgactgttctca

SEQ ID NO: 134741 - DNA, 80 bp, synthetic construct
  misc_feature 1..80: note = Artificially Synthesized Probe
  source 1..80: mol_type = other DNA
aagaaaaagaaaccactgcccaaagagattgaataatttgccatgttcctacagcaaaataagaaaatattacttattgg

SEQ ID NO: 134742 - DNA, 80 bp, synthetic construct
  misc_feature 1..80: note = Artificially Synthesized Probe
  source 1..80: mol_type = other DNA
aagaataaataaaagataggaactgctggtagcagtcttaaggatctctgactcccacagcctattgtattaaccactgg

SEQ ID NO: 134743 - DNA, 80 bp, synthetic construct
  misc_feature 1..80: note = Artificially Synthesized Probe
  source 1..80: mol_type = other DNA
attatgtttgtatgcatatgtctgtgaataagcagagtgatccttttcatgttaataaatcttctgaaattataaattct

SEQ ID NO: 134744 - DNA, 80 bp, synthetic construct
  misc_feature 1..80: note = Artificially Synthesized Probe
  source 1..80: mol_type = other DNA
tgaagtttctctgcagaagatgttatggtgtgcacaaaatttttgcctttctggtgtcagtctggttcatagtgacttgg

SEQ ID NO: 134745 - DNA, 80 bp, synthetic construct; identical to SEQ ID NO: 42548
  misc_feature 1..80: note = Artificially Synthesized Probe
  source 1..80: mol_type = other DNA

SEQ ID NO: 134746 - DNA, 80 bp, synthetic construct
  misc_feature 1..80: note = Artificially Synthesized Probe
  source 1..80: mol_type = other DNA
cctacaacatgcctggaggtgcacagataagattagttacacagaaccagacatgtctgtaatggaaaagtccatctcct

SEQ ID NO: 134747 - DNA, 80 bp, synthetic construct
  misc_feature 1..80: note = Artificially Synthesized Probe
  source 1..80: mol_type = other DNA
gcttgtttataaaagcctttgtattcaactgagaaatggcaatcctcttgggccccctctctgctgtggaaaactttccc

SEQ ID NO: 134748 - DNA, 80 bp, synthetic construct; identical to SEQ ID NO: 42549
  misc_feature 1..80: note = Artificially Synthesized Probe
  source 1..80: mol_type = other DNA

SEQ ID NO: 134749 - DNA, 80 bp, synthetic construct
  misc_feature 1..80: note = Artificially Synthesized Probe
  source 1..80: mol_type = other DNA
ataaaatgaaaattaaaaacaacttgagtttgagaatataaagtaataaaataaaataaacaacatatctgttaataaat

SEQ ID NO: 134750 - DNA, 80 bp, synthetic construct
  misc_feature 1..80: note = Artificially Synthesized Probe
  source 1..80: mol_type = other DNA
aatcccttctctttctcttccctagagaaattaacaagggccttcagatgaaatgacataggtaaagtgttttcagagat

SEQ ID NO: 134751 - DNA, 80 bp, synthetic construct
  misc_feature 1..80: note = Artificially Synthesized Probe
  source 1..80: mol_type = other DNA
accatgagtgataaaagctttggttttgggatgtcctaatttgaggatggagtgagaagtgggtgtgtaataataacaca

SEQ ID NO: 134752 - DNA, 80 bp, synthetic construct
  misc_feature 1..80: note = Artificially Synthesized Probe
  source 1..80: mol_type = other DNA
gacaagcagtgcgcaaaaaggcaattgctgttatgccactaatgaactttagtgtttttaaatgttttctattttaattt

SEQ ID NO: 134753 - DNA, 80 bp, synthetic construct; identical to SEQ ID NO: 42550
  misc_feature 1..80: note = Artificially Synthesized Probe
  source 1..80: mol_type = other DNA

SEQ ID NO: 134754 - DNA, 80 bp, synthetic construct
  misc_feature 1..80: note = Artificially Synthesized Probe
  source 1..80: mol_type = other DNA
actgtgtaatatgattactatatttgtgaaagctcatgaattcagagaaaaaaactaacgtatttcagaagaagctagca

SEQ ID NO: 134755 - DNA, 80 bp, synthetic construct
  misc_feature 1..80: note = Artificially Synthesized Probe
  source 1..80: mol_type = other DNA
tctctaaaaatgagaattttgcagccagtagtgccagggagagacaagctctttatgatccacagctgttaacattaaag

SEQ ID NO: 134756 - DNA, 80 bp, synthetic construct
  misc_feature 1..80: note = Artificially Synthesized Probe
  source 1..80: mol_type = other DNA
gagcatatatacaacttcctaaacagactgtgcatgctcatttcccaagggtaagaagggcactgcacatgtgggcagcc

SEQ ID NO: 134757 - DNA, 80 bp, synthetic construct; identical to SEQ ID NO: 42551
  misc_feature 1..80: note = Artificially Synthesized Probe
  source 1..80: mol_type = other DNA

SEQ ID NO: 134758 - DNA, 80 bp, synthetic construct
  misc_feature 1..80: note = Artificially Synthesized Probe
  source 1..80: mol_type = other DNA
ctttagaaaaactttatgtccttttttttttttttttttgagaccaagttttgctcttgttgtccaagctggagtgcaag

SEQ ID NO: 134759 - DNA, 80 bp, synthetic construct
  misc_feature 1..80: note = Artificially Synthesized Probe
  source 1..80: mol_type = other DNA
ttagtagagacggggtttcacctggtcttgaacttctgaccagaggtgatccaccctcctcggcctcccaaagtgctggg

SEQ ID NO: 134760 - DNA, 80 bp, synthetic construct
  misc_feature 1..80: note = Artificially Synthesized Probe
  source 1..80: mol_type = other DNA
taagaaaataaaatacccactaaagatgacatctcacatcctctcattcatgtgttgtcttaaggaccacagtggtcact

SEQ ID NO: 134761 - DNA, 80 bp, synthetic construct
  misc_feature 1..80: note = Artificially Synthesized Probe
  source 1..80: mol_type = other DNA
aggaaaagcagtaattaacagcatttgcattttctgggaatatattactgaggagatgatatctgaactgaaaatgaaac

SEQ ID NO: 134762 - DNA, 80 bp, synthetic construct; identical to SEQ ID NO: 42552
  misc_feature 1..80: note = Artificially Synthesized Probe
  source 1..80: mol_type = other DNA

SEQ ID NO: 134763 - DNA, 80 bp, synthetic construct
  misc_feature 1..80: note = Artificially Synthesized Probe
  source 1..80: mol_type = other DNA
aatatacattttatattgattatcatgaagttttctagtttcttacctgaagtttcctggaggaactttaacagcactca

SEQ ID NO: 134764 - DNA, 80 bp, synthetic construct; identical to SEQ ID NO: 42496
  misc_feature 1..80: note = Artificially Synthesized Probe
  source 1..80: mol_type = other DNA

SEQ ID NO: 134765 - DNA, 80 bp, synthetic construct
  misc_feature 1..80: note = Artificially Synthesized Probe
  source 1..80: mol_type = other DNA
ttggaagacgggaattacataagcagtagtttacaaacgttgagatacgtagtaggactgtttatatgtacctttttgta

SEQ ID NO: 134766 - DNA, 80 bp, synthetic construct
  misc_feature 1..80: note = Artificially Synthesized Probe
  source 1..80: mol_type = other DNA
atcacaacatgaaggggaaaaatcatgaagagtgttatgtgctttaaacaatacataaatataaagagtcctaggatgtg

SEQ ID NO: 134767 - DNA, 80 bp, synthetic construct
  misc_feature 1..80: note = Artificially Synthesized Probe
  source 1..80: mol_type = other DNA
cagcagggagagacaaaggaaaaatagaagactataactcacaagttaataataatcatgccaaaatctaggctttatca

SEQ ID NO: 134768 - DNA, 80 bp, synthetic construct
  misc_feature 1..80: note = Artificially Synthesized Probe
  source 1..80: mol_type = other DNA
aattgaggcttctacttctaaaccaactacactttgatagagttgtaataaaacctagacattcgaattatatttttagc

SEQ ID NO: 134769 - DNA, 80 bp, synthetic construct
  misc_feature 1..80: note = Artificially Synthesized Probe
  source 1..80: mol_type = other DNA
gacttcaaaaaagtatgtgtttctaaaataatgccaaggctcagtaggcaaatgattcaatgtgctaatgtacacaattt

SEQ ID NO: 134770 - DNA, 80 bp, synthetic construct; identical to SEQ ID NO: 42497
  misc_feature 1..80: note = Artificially Synthesized Probe
  source 1..80: mol_type = other DNA

SEQ ID NO: 134771 - DNA, 80 bp, synthetic construct
  misc_feature 1..80: note = Artificially Synthesized Probe
  source 1..80: mol_type = other DNA
cttctgacatgtagaaagatctagtttctatatttttttttggcagagtctcgctctgtcgcccaggctggagcgcagtg

SEQ ID NO: 134772 - DNA, 80 bp, synthetic construct
  misc_feature 1..80: note = Artificially Synthesized Probe
  source 1..80: mol_type = other DNA
cacctcctggcctccagtgatccacctgccttggtctcccaaagtgctggaattacaggcatgagccactgtgcccagtc

SEQ ID NO: 134773 - DNA, 80 bp, synthetic construct
  misc_feature 1..80: note = Artificially Synthesized Probe
  source 1..80: mol_type = other DNA
ttaatttaaccaatcaacagggttgtttgcaaactcataaaaacagtttttggagggaagcccaacaaaggatactgagc

SEQ ID NO: 134774 - DNA, 80 bp, synthetic construct; identical to SEQ ID NO: 42498
  misc_feature 1..80: note = Artificially Synthesized Probe
  source 1..80: mol_type = other DNA

SEQ ID NO: 134775 - DNA, 80 bp, synthetic construct
  misc_feature 1..80: note = Artificially Synthesized Probe
  source 1..80: mol_type = other DNA
atcatatctatatgaatgctactttctacagatgtatcctgcattccctgtgcaaatatttgttgggatcacactggaat

SEQ ID NO: 134776 - DNA, 80 bp, synthetic construct
  misc_feature 1..80: note = Artificially Synthesized Probe
  source 1..80: mol_type = other DNA
agggtgatatcttaagtgaaaatagattgctatttttggcttagttaatgtcaggagaatatttctgaagtcccaggaat

SEQ ID NO: 134777 - DNA, 80 bp, synthetic construct
  misc_feature 1..80: note = Artificially Synthesized Probe
  source 1..80: mol_type = other DNA
tgtacccagtgattggcgtaattatttcatcagcaatataacccatggttggtattcatatttcccaaagcctatatcga

SEQ ID NO: 134778 - DNA, 80 bp, synthetic construct; identical to SEQ ID NO: 42499
  misc_feature 1..80: note = Artificially Synthesized Probe
  source 1..80: mol_type = other DNA

SEQ ID NO: 134779 - DNA, 80 bp, synthetic construct
  misc_feature 1..80: note = Artificially Synthesized Probe
  source 1..80: mol_type = other DNA
tttttcttctttcctatcttaccaaatttttgacaggaaaacaaacaacattgtatgaccaaaaatatagccgttgtcac

SEQ ID NO: 134780 - DNA, 80 bp, synthetic construct
  misc_feature 1..80: note = Artificially Synthesized Probe
  source 1..80: mol_type = other DNA
ttataggaacctgcaactttctaaaaagattacatttgcttgtgtataaaccaagtaaataatagcctgtttcctcactc

SEQ ID NO: 134781 - DNA, 80 bp, synthetic construct; identical to SEQ ID NO: 134499
  misc_feature 1..80: note = Artificially Synthesized Probe
  source 1..80: mol_type = other DNA

SEQ ID NO: 134782 - DNA, 80 bp, synthetic construct; identical to SEQ ID NO: 134500
  misc_feature 1..80: note = Artificially Synthesized Probe
  source 1..80: mol_type = other DNA

SEQ ID NO: 134783 - DNA, 80 bp, synthetic construct; identical to SEQ ID NO: 134501
  misc_feature 1..80: note = Artificially Synthesized Probe
  source 1..80: mol_type = other DNA

SEQ ID NO: 134784 - DNA, 80 bp, synthetic construct; identical to SEQ ID NO: 42500
  misc_feature 1..80: note = Artificially Synthesized Probe
  source 1..80: mol_type = other DNA

SEQ ID NO: 134785 - DNA, 80 bp, synthetic construct; identical to SEQ ID NO: 134503
  misc_feature 1..80: note = Artificially Synthesized Probe
  source 1..80: mol_type = other DNA

SEQ ID NO: 134786 - DNA, 80 bp, synthetic construct; identical to SEQ ID NO: 134504
  misc_feature 1..80: note = Artificially Synthesized Probe
  source 1..80: mol_type = other DNA

SEQ ID NO: 134787 - DNA, 80 bp, synthetic construct; identical to SEQ ID NO: 134505
  misc_feature 1..80: note = Artificially Synthesized Probe
  source 1..80: mol_type = other DNA

SEQ ID NO: 134788 - DNA, 80 bp, synthetic construct; identical to SEQ ID NO: 134506
  misc_feature 1..80: note = Artificially Synthesized Probe
  source 1..80: mol_type = other DNA

SEQ ID NO: 134789 - DNA, 80 bp, synthetic construct; identical to SEQ ID NO: 134507
  misc_feature 1..80: note = Artificially Synthesized Probe
  source 1..80: mol_type = other DNA

SEQ ID NO: 134790 - DNA, 80 bp, synthetic construct; identical to SEQ ID NO: 42501
  misc_feature 1..80: note = Artificially Synthesized Probe
  source 1..80: mol_type = other DNA

SEQ ID NO: 134791 - DNA, 80 bp, synthetic construct; identical to SEQ ID NO: 134509
  misc_feature 1..80: note = Artificially Synthesized Probe
  source 1..80: mol_type = other DNA

SEQ ID NO: 134792 - DNA, 80 bp, synthetic construct; identical to SEQ ID NO: 134510
  misc_feature 1..80: note = Artificially Synthesized Probe
  source 1..80: mol_type = other DNA

SEQ ID NO: 134793 - DNA, 80 bp, synthetic construct; identical to SEQ ID NO: 134511
  misc_feature 1..80: note = Artificially Synthesized Probe
  source 1..80: mol_type = other DNA

SEQ ID NO: 134794 - DNA, 80 bp, synthetic construct; identical to SEQ ID NO: 42502
  misc_feature 1..80: note = Artificially Synthesized Probe
  source 1..80: mol_type = other DNA

SEQ ID NO: 134795 - DNA, 80 bp, synthetic construct; identical to SEQ ID NO: 134513
  misc_feature 1..80: note = Artificially Synthesized Probe
  source 1..80: mol_type = other DNA

SEQ ID NO: 134796 - DNA, 80 bp, synthetic construct; identical to SEQ ID NO: 134514
  misc_feature 1..80: note = Artificially Synthesized Probe
  source 1..80: mol_type = other DNA

SEQ ID NO: 134797 - DNA, 80 bp, synthetic construct; identical to SEQ ID NO: 134515
  misc_feature 1..80: note = Artificially Synthesized Probe
  source 1..80: mol_type = other DNA

SEQ ID NO: 134798 - DNA, 80 bp, synthetic construct; identical to SEQ ID NO: 42503
  misc_feature 1..80: note = Artificially Synthesized Probe
  source 1..80: mol_type = other DNA

SEQ ID NO: 134799 - DNA, 80 bp, synthetic construct; identical to SEQ ID NO: 134517
  misc_feature 1..80: note = Artificially Synthesized Probe
  source 1..80: mol_type = other DNA

SEQ ID NO: 134800 - DNA, 80 bp, synthetic construct; identical to SEQ ID NO: 134518
  misc_feature 1..80: note = Artificially Synthesized Probe
  source 1..80: mol_type = other DNA

SEQ ID NO: 134801 - DNA, 80 bp, synthetic construct; identical to SEQ ID NO: 134519
  misc_feature 1..80: note = Artificially Synthesized Probe
  source 1..80: mol_type = other DNA

SEQ ID NO: 134802 - DNA, 80 bp, synthetic construct; identical to SEQ ID NO: 134520
  misc_feature 1..80: note = Artificially Synthesized Probe
  source 1..80: mol_type = other DNA

SEQ ID NO: 134803 - DNA, 80 bp, synthetic construct; identical to SEQ ID NO: 42504
  misc_feature 1..80: note = Artificially Synthesized Probe
  source 1..80: mol_type = other DNA

SEQ ID NO: 134804 - DNA, 80 bp, synthetic construct; identical to SEQ ID NO: 134522
  misc_feature 1..80: note = Artificially Synthesized Probe
  source 1..80: mol_type = other DNA

SEQ ID NO: 134805 - DNA, 80 bp, synthetic construct; identical to SEQ ID NO: 134523
  misc_feature 1..80: note = Artificially Synthesized Probe
  source 1..80: mol_type = other DNA

SEQ ID NO: 134806 - DNA, 80 bp, synthetic construct; identical to SEQ ID NO: 134524
  misc_feature 1..80: note = Artificially Synthesized Probe
  source 1..80: mol_type = other DNA

SEQ ID NO: 134807 - DNA, 80 bp, synthetic construct; identical to SEQ ID NO: 134525
  misc_feature 1..80: note = Artificially Synthesized Probe
  source 1..80: mol_type = other DNA

SEQ ID NO: 134808 - DNA, 80 bp, synthetic construct; identical to SEQ ID NO: 42505
  misc_feature 1..80: note = Artificially Synthesized Probe
  source 1..80: mol_type = other DNA

SEQ ID NO: 134809 - DNA, 80 bp, synthetic construct; identical to SEQ ID NO: 134527
  misc_feature 1..80: note = Artificially Synthesized Probe
  source 1..80: mol_type = other DNA

SEQ ID NO: 134810 - DNA, 80 bp, synthetic construct; identical to SEQ ID NO: 134528
  misc_feature 1..80: note = Artificially Synthesized Probe
  source 1..80: mol_type = other DNA

SEQ ID NO: 134811 - DNA, 80 bp, synthetic construct; identical to SEQ ID NO: 134529
  misc_feature 1..80: note = Artificially Synthesized Probe
  source 1..80: mol_type = other DNA

SEQ ID NO: 134812 - DNA, 80 bp, synthetic construct; identical to SEQ ID NO: 42491
  misc_feature 1..80: note = Artificially Synthesized Probe
  source 1..80: mol_type = other DNA

SEQ ID NO: 134813 - DNA, 80 bp, synthetic construct; identical to SEQ ID NO: 42506
  misc_feature 1..80: note = Artificially Synthesized Probe
  source 1..80: mol_type = other DNA

SEQ ID NO: 134814 - DNA, 80 bp, synthetic construct; identical to SEQ ID NO: 134532
  misc_feature 1..80: note = Artificially Synthesized Probe
  source 1..80: mol_type = other DNA

SEQ ID NO: 134815 - DNA, 80 bp, synthetic construct; identical to SEQ ID NO: 134533
  misc_feature 1..80: note = Artificially Synthesized Probe
  source 1..80: mol_type = other DNA

SEQ ID NO: 134816 - DNA, 80 bp, synthetic construct; identical to SEQ ID NO: 134534
  misc_feature 1..80: note = Artificially Synthesized Probe
  source 1..80: mol_type = other DNA

SEQ ID NO: 134817 - DNA, 80 bp, synthetic construct; identical to SEQ ID NO: 42507
  misc_feature 1..80: note = Artificially Synthesized Probe
  source 1..80: mol_type = other DNA

SEQ ID NO: 134818 - DNA, 80 bp, synthetic construct; identical to SEQ ID NO: 134536
  misc_feature 1..80: note = Artificially Synthesized Probe
  source 1..80: mol_type = other DNA

SEQ ID NO: 134819 - DNA, 80 bp, synthetic construct; identical to SEQ ID NO: 134537
  misc_feature 1..80: note = Artificially Synthesized Probe
  source 1..80: mol_type = other DNA

SEQ ID NO: 134820 - DNA, 80 bp, synthetic construct; identical to SEQ ID NO: 134538
  misc_feature 1..80: note = Artificially Synthesized Probe
  source 1..80: mol_type = other DNA

SEQ ID NO: 134821 - DNA, 80 bp, synthetic construct; identical to SEQ ID NO: 134539
  misc_feature 1..80: note = Artificially Synthesized Probe
  source 1..80: mol_type = other DNA

SEQ ID NO: 134822 - DNA, 80 bp, synthetic construct; identical to SEQ ID NO: 42508
  misc_feature 1..80: note = Artificially Synthesized Probe
  source 1..80: mol_type = other DNA

SEQ ID NO: 134823 - DNA, 80 bp, synthetic construct; identical to SEQ ID NO: 134541
  misc_feature 1..80: note = Artificially Synthesized Probe
  source 1..80: mol_type = other DNA

SEQ ID NO: 134824 - DNA, 80 bp, synthetic construct; identical to SEQ ID NO: 134542
  misc_feature 1..80: note = Artificially Synthesized Probe
  source 1..80: mol_type = other DNA

SEQ ID NO: 134825 - DNA, 80 bp, synthetic construct; identical to SEQ ID NO: 134543
  misc_feature 1..80: note = Artificially Synthesized Probe
  source 1..80: mol_type = other DNA

SEQ ID NO: 134826 - DNA, 80 bp, synthetic construct; identical to SEQ ID NO: 134544
  misc_feature 1..80: note = Artificially Synthesized Probe
  source 1..80: mol_type = other DNA

SEQ ID NO: 134827 - DNA, 80 bp, synthetic construct; identical to SEQ ID NO: 134545
  misc_feature 1..80: note = Artificially Synthesized Probe
  source 1..80: mol_type = other DNA

SEQ ID NO: 134828 - DNA, 80 bp, synthetic construct; identical to SEQ ID NO: 42509
  misc_feature 1..80: note = Artificially Synthesized Probe
  source 1..80: mol_type = other DNA

SEQ ID NO: 134829 - DNA, 80 bp, synthetic construct; identical to SEQ ID NO: 134547
  misc_feature 1..80: note = Artificially Synthesized Probe
  source 1..80: mol_type = other DNA

SEQ ID NO: 134830 - DNA, 80 bp, synthetic construct; identical to SEQ ID NO: 134548
  misc_feature 1..80: note = Artificially Synthesized Probe
  source 1..80: mol_type = other DNA

SEQ ID NO: 134831 - DNA, 80 bp, synthetic construct; identical to SEQ ID NO: 134549
  misc_feature 1..80: note = Artificially Synthesized Probe
  source 1..80: mol_type = other DNA

SEQ ID NO: 134832 - DNA, 80 bp, synthetic construct; identical to SEQ ID NO: 134550
  misc_feature 1..80: note = Artificially Synthesized Probe
  source 1..80: mol_type = other DNA

SEQ ID NO: 134833 - DNA, 80 bp, synthetic construct; identical to SEQ ID NO: 42510
  misc_feature 1..80: note = Artificially Synthesized Probe
  source 1..80: mol_type = other DNA

SEQ ID NO: 134834 - DNA, 80 bp, synthetic construct; identical to SEQ ID NO: 134552
  misc_feature 1..80: note = Artificially Synthesized Probe
  source 1..80: mol_type = other DNA

SEQ ID NO: 134835 - DNA, 80 bp, synthetic construct; identical to SEQ ID NO: 134553
  misc_feature 1..80: note = Artificially Synthesized Probe
  source 1..80: mol_type = other DNA

SEQ ID NO: 134836 - DNA, 80 bp, synthetic construct; identical to SEQ ID NO: 134554
  misc_feature 1..80: note = Artificially Synthesized Probe
  source 1..80: mol_type = other DNA

SEQ ID NO: 134837 - DNA, 80 bp, synthetic construct; identical to SEQ ID NO: 134555
  misc_feature 1..80: note = Artificially Synthesized Probe
  source 1..80: mol_type = other DNA

SEQ ID NO: 134838 - DNA, 80 bp, synthetic construct; identical to SEQ ID NO: 134556
  misc_feature 1..80: note = Artificially Synthesized Probe
  source 1..80: mol_type = other DNA

SEQ ID NO: 134839 - DNA, 80 bp, synthetic construct; identical to SEQ ID NO: 42511
  misc_feature 1..80: note = Artificially Synthesized Probe
  source 1..80: mol_type = other DNA

SEQ ID NO: 134840 - DNA, 80 bp, synthetic construct; identical to SEQ ID NO: 134558
  misc_feature 1..80: note = Artificially Synthesized Probe
  source 1..80: mol_type = other DNA

SEQ ID NO: 134841 - DNA, 80 bp, synthetic construct; identical to SEQ ID NO: 134559
  misc_feature 1..80: note = Artificially Synthesized Probe
  source 1..80: mol_type = other DNA

SEQ ID NO: 134842 - DNA, 80 bp, synthetic construct; identical to SEQ ID NO: 134560
  misc_feature 1..80: note = Artificially Synthesized Probe
  source 1..80: mol_type = other DNA

SEQ ID NO: 134843 - DNA, 80 bp, synthetic construct; identical to SEQ ID NO: 134561
  misc_feature 1..80: note = Artificially Synthesized Probe
  source 1..80: mol_type = other DNA

SEQ ID NO: 134844 - DNA, 80 bp, synthetic construct; identical to SEQ ID NO: 134562
  misc_feature 1..80: note = Artificially Synthesized Probe
  source 1..80: mol_type = other DNA

SEQ ID NO: 134845 - DNA, 80 bp, synthetic construct; identical to SEQ ID NO: 42512
  misc_feature 1..80: note = Artificially Synthesized Probe
  source 1..80: mol_type = other DNA

SEQ ID NO: 134846 - DNA, 80 bp, synthetic construct; identical to SEQ ID NO: 134564
  misc_feature 1..80: note = Artificially Synthesized Probe
  source 1..80: mol_type = other DNA

SEQ ID NO: 134847 - DNA, 80 bp, synthetic construct; identical to SEQ ID NO: 134565
  misc_feature 1..80: note = Artificially Synthesized Probe
  source 1..80: mol_type = other DNA

SEQ ID NO: 134848 - DNA, 80 bp, synthetic construct; identical to SEQ ID NO: 134566
  misc_feature 1..80: note = Artificially Synthesized Probe
  source 1..80: mol_type = other DNA

SEQ ID NO: 134849 - DNA, 80 bp, synthetic construct; identical to SEQ ID NO: 134567
  misc_feature 1..80: note = Artificially Synthesized Probe
  source 1..80: mol_type = other DNA

SEQ ID NO: 134850 - DNA, 80 bp, synthetic construct; identical to SEQ ID NO: 42513
  misc_feature 1..80: note = Artificially Synthesized Probe
  source 1..80: mol_type = other DNA

SEQ ID NO: 134851 - DNA, 80 bp, synthetic construct; identical to SEQ ID NO: 134569
  misc_feature 1..80: note = Artificially Synthesized Probe
  source 1..80: mol_type = other DNA

SEQ ID NO: 134852 - DNA, 80 bp, synthetic construct; identical to SEQ ID NO: 134570
  misc_feature 1..80: note = Artificially Synthesized Probe
  source 1..80: mol_type = other DNA

SEQ ID NO: 134853 - DNA, 80 bp, synthetic construct; identical to SEQ ID NO: 134571
  misc_feature 1..80: note = Artificially Synthesized Probe
  source 1..80: mol_type = other DNA

SEQ ID NO: 134854 - DNA, 80 bp, synthetic construct; identical to SEQ ID NO: 134572
  misc_feature 1..80: note = Artificially Synthesized Probe
  source 1..80: mol_type = other DNA

SEQ ID NO: 134855 - DNA, 80 bp, synthetic construct; identical to SEQ ID NO: 42492
  misc_feature 1..80: note = Artificially Synthesized Probe
  source 1..80: mol_type = other DNA

SEQ ID NO: 134856 - DNA, 80 bp, synthetic construct; identical to SEQ ID NO: 42514
  misc_feature 1..80: note = Artificially Synthesized Probe
  source 1..80: mol_type = other DNA

SEQ ID NO: 134857 - DNA, 80 bp, synthetic construct; identical to SEQ ID NO: 134575
  misc_feature 1..80: note = Artificially Synthesized Probe
  source 1..80: mol_type = other DNA

SEQ ID NO: 134858 - DNA, 80 bp, synthetic construct; identical to SEQ ID NO: 134576
  misc_feature 1..80: note = Artificially Synthesized Probe
  source 1..80: mol_type = other DNA

SEQ ID NO: 134859 - DNA, 80 bp, synthetic construct; identical to SEQ ID NO: 134577
  misc_feature 1..80: note = Artificially Synthesized Probe
  source 1..80: mol_type = other DNA

SEQ ID NO: 134860 - DNA, 80 bp, synthetic construct; identical to SEQ ID NO: 134578
  misc_feature 1..80: note = Artificially Synthesized Probe
  source 1..80: mol_type = other DNA

SEQ ID NO: 134861 - DNA, 80 bp, synthetic construct; identical to SEQ ID NO: 42515
  misc_feature 1..80: note = Artificially Synthesized Probe
  source 1..80: mol_type = other DNA

SEQ ID NO: 134862 - DNA, 80 bp, synthetic construct; identical to SEQ ID NO: 134580
  misc_feature 1..80: note = Artificially Synthesized Probe
  source 1..80: mol_type = other DNA

SEQ ID NO: 134863 - DNA, 80 bp, synthetic construct; identical to SEQ ID NO: 134581
  misc_feature 1..80: note = Artificially Synthesized Probe
  source 1..80: mol_type = other DNA

SEQ ID NO: 134864 - DNA, 80 bp, synthetic construct; identical to SEQ ID NO: 134582
  misc_feature 1..80: note = Artificially Synthesized Probe
  source 1..80: mol_type = other DNA

SEQ ID NO: 134865 - DNA, 80 bp, synthetic construct; identical to SEQ ID NO: 134583
  misc_feature 1..80: note = Artificially Synthesized Probe
  source 1..80: mol_type = other DNA

SEQ ID NO: 134866 - DNA, 80 bp, synthetic construct; identical to SEQ ID NO: 134584
  misc_feature 1..80: note = Artificially Synthesized Probe
  source 1..80: mol_type = other DNA

SEQ ID NO: 134867 - DNA, 80 bp, synthetic construct; identical to SEQ ID NO: 42516
  misc_feature 1..80: note = Artificially Synthesized Probe
  source 1..80: mol_type = other DNA

SEQ ID NO: 134868 - DNA, 80 bp, synthetic construct; identical to SEQ ID NO: 134586
  misc_feature 1..80: note = Artificially Synthesized Probe
  source 1..80: mol_type = other DNA

SEQ ID NO: 134869 - DNA, 80 bp, synthetic construct; identical to SEQ ID NO: 134587
  misc_feature 1..80: note = Artificially Synthesized Probe
  source 1..80: mol_type = other DNA

SEQ ID NO: 134870 - DNA, 80 bp, synthetic construct; identical to SEQ ID NO: 134588
  misc_feature 1..80: note = Artificially Synthesized Probe
  source 1..80: mol_type = other DNA

SEQ ID NO: 134871 - DNA, 80 bp, synthetic construct; identical to SEQ ID NO: 42517
  misc_feature 1..80: note = Artificially Synthesized Probe
  source 1..80: mol_type = other DNA

SEQ ID NO: 134872 - DNA, 80 bp, synthetic construct; identical to SEQ ID NO: 134590
  misc_feature 1..80: note = Artificially Synthesized Probe
  source 1..80: mol_type = other DNA

SEQ ID NO: 134873 - DNA, 80 bp, synthetic construct; identical to SEQ ID NO: 134591
  misc_feature 1..80: note = Artificially Synthesized Probe
  source 1..80: mol_type = other DNA

SEQ ID NO: 134874 - DNA, 80 bp, synthetic construct; identical to SEQ ID NO: 134592
  misc_feature 1..80: note = Artificially Synthesized Probe
  source 1..80: mol_type = other DNA

SEQ ID NO: 134875 - DNA, 80 bp, synthetic construct; identical to SEQ ID NO: 134593
  misc_feature 1..80: note = Artificially Synthesized Probe
  source 1..80: mol_type = other DNA

SEQ ID NO: 134876 - DNA, 80 bp, synthetic construct; identical to SEQ ID NO: 134594
  misc_feature 1..80: note = Artificially Synthesized Probe
  source 1..80: mol_type = other DNA

SEQ ID NO: 134877 - DNA, 80 bp, synthetic construct; identical to SEQ ID NO: 42518
  misc_feature 1..80: note = Artificially Synthesized Probe
  source 1..80: mol_type = other DNA

SEQ ID NO: 134878 - DNA, 80 bp, synthetic construct; identical to SEQ ID NO: 134596
  misc_feature 1..80: note = Artificially Synthesized Probe
  source 1..80: mol_type = other DNA

SEQ ID NO: 134879 - DNA, 80 bp, synthetic construct; identical to SEQ ID NO: 134597
  misc_feature 1..80: note = Artificially Synthesized Probe
  source 1..80: mol_type = other DNA

SEQ ID NO: 134880 - DNA, 80 bp, synthetic construct; identical to SEQ ID NO: 134598
  misc_feature 1..80: note = Artificially Synthesized Probe
  source 1..80: mol_type = other DNA

SEQ ID NO: 134881 - DNA, 80 bp, synthetic construct; identical to SEQ ID NO: 42519
  misc_feature 1..80: note = Artificially Synthesized Probe
  source 1..80: mol_type = other DNA

SEQ ID NO: 134882 - DNA, 80 bp, synthetic construct; identical to SEQ ID NO: 134600
  misc_feature 1..80: note = Artificially Synthesized Probe
  source 1..80: mol_type = other DNA

SEQ ID NO: 134883 - DNA, 80 bp, synthetic construct; identical to SEQ ID NO: 134601
  misc_feature 1..80: note = Artificially Synthesized Probe
  source 1..80: mol_type = other DNA

SEQ ID NO: 134884 - DNA, 80 bp, synthetic construct; identical to SEQ ID NO: 134602
  misc_feature 1..80: note = Artificially Synthesized Probe
  source 1..80: mol_type = other DNA

SEQ ID NO: 134885 - DNA, 80 bp, synthetic construct; identical to SEQ ID NO: 42520
  misc_feature 1..80: note = Artificially Synthesized Probe
  source 1..80: mol_type = other DNA

SEQ ID NO: 134886 - DNA, 80 bp, synthetic construct; identical to SEQ ID NO: 134604
  misc_feature 1..80: note = Artificially Synthesized Probe
  source 1..80: mol_type = other DNA

SEQ ID NO: 134887 - DNA, 80 bp, synthetic construct; identical to SEQ ID NO: 134605
  misc_feature 1..80: note = Artificially Synthesized Probe
  source 1..80: mol_type = other DNA

SEQ ID NO: 134888 - DNA, 80 bp, synthetic construct; identical to SEQ ID NO: 134606
  misc_feature 1..80: note = Artificially Synthesized Probe
  source 1..80: mol_type = other DNA

SEQ ID NO: 134889 - DNA, 80 bp, synthetic construct; identical to SEQ ID NO: 134607
  misc_feature 1..80: note = Artificially Synthesized Probe
  source 1..80: mol_type = other DNA

SEQ ID NO: 134890 - DNA, 80 bp, synthetic construct; identical to SEQ ID NO: 42521
  misc_feature 1..80: note = Artificially Synthesized Probe
  source 1..80: mol_type = other DNA

SEQ ID NO: 134891 - DNA, 80 bp, synthetic construct; identical to SEQ ID NO: 134609
  misc_feature 1..80: note = Artificially Synthesized Probe
  source 1..80: mol_type = other DNA

SEQ ID NO: 134892 - DNA, 80 bp, synthetic construct; identical to SEQ ID NO: 134610
  misc_feature 1..80: note = Artificially Synthesized Probe
  source 1..80: mol_type = other DNA

SEQ ID NO: 134893 - DNA, 80 bp, synthetic construct; identical to SEQ ID NO: 134611
  misc_feature 1..80: note = Artificially Synthesized Probe
  source 1..80: mol_type = other DNA

SEQ ID NO: 134894 - DNA, 80 bp, synthetic construct; identical to SEQ ID NO: 134612
  misc_feature 1..80: note = Artificially Synthesized Probe
  source 1..80: mol_type = other DNA

SEQ ID NO: 134895 - DNA, 80 bp, synthetic construct; identical to SEQ ID NO: 134613
  misc_feature 1..80: note = Artificially Synthesized Probe
  source 1..80: mol_type = other DNA

SEQ ID NO: 134896 - DNA, 80 bp, synthetic construct; identical to SEQ ID NO: 134614
  misc_feature 1..80: note = Artificially Synthesized Probe
  source 1..80: mol_type = other DNA

SEQ ID NO: 134897 - DNA, 80 bp, synthetic construct; identical to SEQ ID NO: 42493
  misc_feature 1..80: note = Artificially Synthesized Probe
  source 1..80: mol_type = other DNA

SEQ ID NO: 134898 - DNA, 80 bp, synthetic construct; identical to SEQ ID NO: 134616
  misc_feature 1..80: note = Artificially Synthesized Probe
  source 1..80: mol_type = other DNA

SEQ ID NO: 134899 - DNA, 80 bp, synthetic construct; identical to SEQ ID NO: 134617
  misc_feature 1..80: note = Artificially Synthesized Probe
  source 1..80: mol_type = other DNA

SEQ ID NO: 134900 - DNA, 80 bp, synthetic construct; identical to SEQ ID NO: 42522
  misc_feature 1..80: note = Artificially Synthesized Probe
  source 1..80: mol_type = other DNA

SEQ ID NO: 134901 - DNA, 80 bp, synthetic construct; identical to SEQ ID NO: 134619
  misc_feature 1..80: note = Artificially Synthesized Probe
  source 1..80: mol_type = other DNA

SEQ ID NO: 134902 - DNA, 80 bp, synthetic construct; identical to SEQ ID NO: 134620
  misc_feature 1..80: note = Artificially Synthesized Probe
  source 1..80: mol_type = other DNA

SEQ ID NO: 134903 - DNA, 80 bp, synthetic construct; identical to SEQ ID NO: 134621
  misc_feature 1..80: note = Artificially Synthesized Probe
  source 1..80: mol_type = other DNA

SEQ ID NO: 134904 - DNA, 80 bp, synthetic construct; identical to SEQ ID NO: 134622
  misc_feature 1..80: note = Artificially Synthesized Probe
  source 1..80: mol_type = other DNA

SEQ ID NO: 134905 - DNA, 80 bp, synthetic construct; identical to SEQ ID NO: 42523
  misc_feature 1..80: note = Artificially Synthesized Probe
  source 1..80: mol_type = other DNA

SEQ ID NO: 134906 - DNA, 80 bp, synthetic construct; identical to SEQ ID NO: 134624
  misc_feature 1..80: note = Artificially Synthesized Probe
  source 1..80: mol_type = other DNA

SEQ ID NO: 134907 - DNA, 80 bp, synthetic construct; identical to SEQ ID NO: 134625
  misc_feature 1..80: note = Artificially Synthesized Probe
  source 1..80: mol_type = other DNA

SEQ ID NO: 134908 - DNA, 80 bp, synthetic construct; identical to SEQ ID NO: 134626
  misc_feature 1..80: note = Artificially Synthesized Probe
  source 1..80: mol_type = other DNA

SEQ ID NO: 134909 - DNA, 80 bp, synthetic construct; identical to SEQ ID NO: 134627
  misc_feature 1..80: note = Artificially Synthesized Probe
  source 1..80: mol_type = other DNA

SEQ ID NO: 134910 - DNA, 80 bp, synthetic construct; identical to SEQ ID NO: 42524
  misc_feature 1..80: note = Artificially Synthesized Probe
  source 1..80: mol_type = other DNA

SEQ ID NO: 134911 - DNA, 80 bp, synthetic construct; identical to SEQ ID NO: 134629
  misc_feature 1..80: note = Artificially Synthesized Probe
  source 1..80: mol_type = other DNA

SEQ ID NO: 134912 - DNA, 80 bp, synthetic construct; identical to SEQ ID NO: 134630
  misc_feature 1..80: note = Artificially Synthesized Probe
  source 1..80: mol_type = other DNA

SEQ ID NO: 134913 - DNA, 80 bp, synthetic construct; identical to SEQ ID NO: 134631
  misc_feature 1..80: note = Artificially Synthesized Probe
  source 1..80: mol_type = other DNA

SEQ ID NO: 134914 - DNA, 80 bp, synthetic construct; identical to SEQ ID NO: 134632
  misc_feature 1..80: note = Artificially Synthesized Probe
  source 1..80: mol_type = other DNA

SEQ ID NO: 134915 - DNA, 80 bp, synthetic construct; identical to SEQ ID NO: 42525
  misc_feature 1..80: note = Artificially Synthesized Probe
  source 1..80: mol_type = other DNA

SEQ ID NO: 134916 - DNA, 80 bp, synthetic construct; identical to SEQ ID NO: 134634
  misc_feature 1..80: note = Artificially Synthesized Probe
  source 1..80: mol_type = other DNA

SEQ ID NO: 134917 - DNA, 80 bp, synthetic construct; identical to SEQ ID NO: 134635
  misc_feature 1..80: note = Artificially Synthesized Probe
  source 1..80: mol_type = other DNA

SEQ ID NO: 134918 - DNA, 80 bp, synthetic construct; identical to SEQ ID NO: 134636
  misc_feature 1..80: note = Artificially Synthesized Probe
  source 1..80: mol_type = other DNA

SEQ ID NO: 134919 - DNA, 80 bp, synthetic construct; identical to SEQ ID NO: 134637
  misc_feature 1..80: note = Artificially Synthesized Probe
  source 1..80: mol_type = other DNA

SEQ ID NO: 134920 - DNA, 80 bp, synthetic construct; identical to SEQ ID NO: 42526
  misc_feature 1..80: note = Artificially Synthesized Probe
  source 1..80: mol_type = other DNA

SEQ ID NO: 134921 - DNA, 80 bp, synthetic construct; identical to SEQ ID NO: 134639
  misc_feature 1..80: note = Artificially Synthesized Probe
  source 1..80: mol_type = other DNA

SEQ ID NO: 134922 - DNA, 80 bp, synthetic construct; identical to SEQ ID NO: 134640
  misc_feature 1..80: note = Artificially Synthesized Probe
  source 1..80: mol_type = other DNA

SEQ ID NO: 134923 - DNA, 80 bp, synthetic construct; identical to SEQ ID NO: 134641
  misc_feature 1..80: note = Artificially Synthesized Probe
  source 1..80: mol_type = other DNA

SEQ ID NO: 134924 - DNA, 80 bp, synthetic construct; identical to SEQ ID NO: 42527
  misc_feature 1..80: note = Artificially Synthesized Probe
  source 1..80: mol_type = other DNA

SEQ ID NO: 134925 - DNA, 80 bp, synthetic construct; identical to SEQ ID NO: 134643
  misc_feature 1..80: note = Artificially Synthesized Probe
  source 1..80: mol_type = other DNA

SEQ ID NO: 134926 - DNA, 80 bp, synthetic construct; identical to SEQ ID NO: 134644
  misc_feature 1..80: note = Artificially Synthesized Probe
  source 1..80: mol_type = other DNA

SEQ ID NO: 134927 - DNA, 80 bp, synthetic construct; identical to SEQ ID NO: 134645
  misc_feature 1..80: note = Artificially Synthesized Probe
  source 1..80: mol_type = other DNA

SEQ ID NO: 134928 - DNA, 80 bp, synthetic construct; identical to SEQ ID NO: 134646
  misc_feature 1..80: note = Artificially Synthesized Probe
  source 1..80: mol_type = other DNA

SEQ ID NO: 134929 - DNA, 80 bp, synthetic construct; identical to SEQ ID NO: 42528
  misc_feature 1..80: note = Artificially Synthesized Probe
  source 1..80: mol_type = other DNA

SEQ ID NO: 134930 - DNA, 80 bp, synthetic construct; identical to SEQ ID NO: 134648
  misc_feature 1..80: note = Artificially Synthesized Probe
  source 1..80: mol_type = other DNA

SEQ ID NO: 134931 - DNA, 80 bp, synthetic construct; identical to SEQ ID NO: 134649
  misc_feature 1..80: note = Artificially Synthesized Probe
  source 1..80: mol_type = other DNA

SEQ ID NO: 134932 - DNA, 80 bp, synthetic construct; identical to SEQ ID NO: 134650
  misc_feature 1..80: note = Artificially Synthesized Probe
  source 1..80: mol_type = other DNA

SEQ ID NO: 134933 - DNA, 80 bp, synthetic construct; identical to SEQ ID NO: 42529
  misc_feature 1..80: note = Artificially Synthesized Probe
  source 1..80: mol_type = other DNA

SEQ ID NO: 134934 - DNA, 80 bp, synthetic construct; identical to SEQ ID NO: 134652
  misc_feature 1..80: note = Artificially Synthesized Probe
  source 1..80: mol_type = other DNA

SEQ ID NO: 134935 - DNA, 80 bp, synthetic construct; identical to SEQ ID NO: 134653
  misc_feature 1..80: note = Artificially Synthesized Probe
  source 1..80: mol_type = other DNA

SEQ ID NO: 134936 - DNA, 80 bp, synthetic construct; identical to SEQ ID NO: 134654
  misc_feature 1..80: note = Artificially Synthesized Probe
  source 1..80: mol_type = other DNA

SEQ ID NO: 134937 - DNA, 80 bp, synthetic construct; identical to SEQ ID NO: 42530
  misc_feature 1..80: note = Artificially Synthesized Probe
  source 1..80: mol_type = other DNA

SEQ ID NO: 134938 - DNA, 80 bp, synthetic construct; identical to SEQ ID NO: 134656
  misc_feature 1..80: note = Artificially Synthesized Probe
  source 1..80: mol_type = other DNA

SEQ ID NO: 134939 - DNA, 80 bp, synthetic construct; identical to SEQ ID NO: 134657
  misc_feature 1..80: note = Artificially Synthesized Probe
  source 1..80: mol_type = other DNA

SEQ ID NO: 134940 - DNA, 80 bp, synthetic construct; identical to SEQ ID NO: 134658
  misc_feature 1..80: note = Artificially Synthesized Probe
  source 1..80: mol_type = other DNA

SEQ ID NO: 134941 - DNA, 80 bp, synthetic construct; identical to SEQ ID NO: 134659
  misc_feature 1..80: note = Artificially Synthesized Probe
  source 1..80: mol_type = other DNA

SEQ ID NO: 134942 - DNA, 80 bp, synthetic construct; identical to SEQ ID NO: 134660
  misc_feature 1..80: note = Artificially Synthesized Probe
  source 1..80: mol_type = other DNA

SEQ ID NO: 134943 - DNA, 80 bp, synthetic construct; identical to SEQ ID NO: 134661
  misc_feature 1..80: note = Artificially Synthesized Probe
  source 1..80: mol_type = other DNA

SEQ ID NO: 134944 - DNA, 80 bp, synthetic construct; identical to SEQ ID NO: 134662
  misc_feature 1..80: note = Artificially Synthesized Probe
  source 1..80: mol_type = other DNA

SEQ ID NO: 134945 - DNA, 80 bp, synthetic construct; identical to SEQ ID NO: 134663
  misc_feature 1..80: note = Artificially Synthesized Probe
  source 1..80: mol_type = other DNA

SEQ ID NO: 134946 - DNA, 80 bp, synthetic construct; identical to SEQ ID NO: 134664
  misc_feature 1..80: note = Artificially Synthesized Probe
  source 1..80: mol_type = other DNA

SEQ ID NO: 134947 - DNA, 80 bp, synthetic construct; identical to SEQ ID NO: 42531
  misc_feature 1..80: note = Artificially Synthesized Probe
  source 1..80: mol_type = other DNA

SEQ ID NO: 134948 - DNA, 80 bp, synthetic construct; identical to SEQ ID NO: 134666
  misc_feature 1..80: note = Artificially Synthesized Probe
  source 1..80: mol_type = other DNA

SEQ ID NO: 134949 - DNA, 80 bp, synthetic construct; identical to SEQ ID NO: 134667
  misc_feature 1..80: note = Artificially Synthesized Probe
  source 1..80: mol_type = other DNA

SEQ ID NO: 134950 - DNA, 80 bp, synthetic construct; identical to SEQ ID NO: 134668
  misc_feature 1..80: note = Artificially Synthesized Probe
  source 1..80: mol_type = other DNA

SEQ ID NO: 134951 - DNA, 80 bp, synthetic construct; identical to SEQ ID NO: 42532
  misc_feature 1..80: note = Artificially Synthesized Probe
  source 1..80: mol_type = other DNA

SEQ ID NO: 134952 - DNA, 80 bp, synthetic construct; identical to SEQ ID NO: 42494
  misc_feature 1..80: note = Artificially Synthesized Probe
  source 1..80: mol_type = other DNA

SEQ ID NO: 134953 - DNA, 80 bp, synthetic construct; identical to SEQ ID NO: 134671
  misc_feature 1..80: note = Artificially Synthesized Probe
  source 1..80: mol_type = other DNA

SEQ ID NO: 134954 - DNA, 80 bp, synthetic construct; identical to SEQ ID NO: 134672
  misc_feature 1..80: note = Artificially Synthesized Probe
  source 1..80: mol_type = other DNA

SEQ ID NO: 134955 - DNA, 80 bp, synthetic construct; identical to SEQ ID NO: 134673
  misc_feature 1..80: note = Artificially Synthesized Probe
  source 1..80: mol_type = other DNA

SEQ ID NO: 134956 - DNA, 80 bp, synthetic construct; identical to SEQ ID NO: 134674
  misc_feature 1..80: note = Artificially Synthesized Probe
  source 1..80: mol_type = other DNA

SEQ ID NO: 134957 - DNA, 80 bp, synthetic construct; identical to SEQ ID NO: 42533
  misc_feature 1..80: note = Artificially Synthesized Probe
  source 1..80: mol_type = other DNA

SEQ ID NO: 134958 - DNA, 80 bp, synthetic construct; identical to SEQ ID NO: 134676
  misc_feature 1..80: note = Artificially Synthesized Probe
  source 1..80: mol_type = other DNA

SEQ ID NO: 134959 - DNA, 80 bp, synthetic construct; identical to SEQ ID NO: 134677
  misc_feature 1..80: note = Artificially Synthesized Probe
  source 1..80: mol_type = other DNA

SEQ ID NO: 134960 - DNA, 80 bp, synthetic construct; identical to SEQ ID NO: 134678
  misc_feature 1..80: note = Artificially Synthesized Probe
  source 1..80: mol_type = other DNA

SEQ ID NO: 134961 - DNA, 80 bp, synthetic construct; identical to SEQ ID NO: 134679
  misc_feature 1..80: note = Artificially Synthesized Probe
  source 1..80: mol_type = other DNA

SEQ ID NO: 134962 - DNA, 80 bp, synthetic construct; identical to SEQ ID NO: 42534
  misc_feature 1..80: note = Artificially Synthesized Probe
  source 1..80: mol_type = other DNA

SEQ ID NO: 134963 - DNA, 80 bp, synthetic construct; identical to SEQ ID NO: 134681
  misc_feature 1..80: note = Artificially Synthesized Probe
  source 1..80: mol_type = other DNA

SEQ ID NO: 134964 - DNA, 80 bp, synthetic construct; identical to SEQ ID NO: 134682
  misc_feature 1..80: note = Artificially Synthesized Probe
  source 1..80: mol_type = other DNA

SEQ ID NO: 134965 - DNA, 80 bp, synthetic construct; identical to SEQ ID NO: 42490
  misc_feature 1..80: note = Artificially Synthesized Probe
  source 1..80: mol_type = other DNA

SEQ ID NO: 134966 - DNA, 80 bp, synthetic construct; identical to SEQ ID NO: 134684
  misc_feature 1..80: note = Artificially Synthesized Probe
  source 1..80: mol_type = other DNA

SEQ ID NO: 134967 - DNA, 80 bp, synthetic construct; identical to SEQ ID NO: 134685
  misc_feature 1..80: note = Artificially Synthesized Probe
  source 1..80: mol_type = other DNA

SEQ ID NO: 134968 - DNA, 80 bp, synthetic construct; identical to SEQ ID NO: 134686
  misc_feature 1..80: note = Artificially Synthesized Probe
  source 1..80: mol_type = other DNA

SEQ ID NO: 134969 - DNA, 80 bp, synthetic construct; identical to SEQ ID NO: 42535
  misc_feature 1..80: note = Artificially Synthesized Probe
  source 1..80: mol_type = other DNA

SEQ ID NO: 134970 - DNA, 80 bp, synthetic construct; identical to SEQ ID NO: 134688
  misc_feature 1..80: note = Artificially Synthesized Probe
  source 1..80: mol_type = other DNA

SEQ ID NO: 134971 - DNA, 80 bp, synthetic construct; identical to SEQ ID NO: 134689
  misc_feature 1..80: note = Artificially Synthesized Probe
  source 1..80: mol_type = other DNA

SEQ ID NO: 134972 - DNA, 80 bp, synthetic construct; identical to SEQ ID NO: 134690
  misc_feature 1..80: note = Artificially Synthesized Probe
  source 1..80: mol_type = other DNA

SEQ ID NO: 134973 - DNA, 80 bp, synthetic construct; identical to SEQ ID NO: 42536
  misc_feature 1..80: note = Artificially Synthesized Probe
  source 1..80: mol_type = other DNA

SEQ ID NO: 134974 - DNA, 80 bp, synthetic construct; identical to SEQ ID NO: 134692
  misc_feature 1..80: note = Artificially Synthesized Probe
  source 1..80: mol_type = other DNA

SEQ ID NO: 134975 - DNA, 80 bp, synthetic construct; identical to SEQ ID NO: 134693
  misc_feature 1..80: note = Artificially Synthesized Probe
  source 1..80: mol_type = other DNA

SEQ ID NO: 134976 - DNA, 80 bp, synthetic construct; identical to SEQ ID NO: 134694
  misc_feature 1..80: note = Artificially Synthesized Probe
  source 1..80: mol_type = other DNA

SEQ ID NO: 134977 - DNA, 80 bp, synthetic construct; identical to SEQ ID NO: 134695
  misc_feature 1..80: note = Artificially Synthesized Probe
  source 1..80: mol_type = other DNA

SEQ ID NO: 134978 - DNA, 80 bp, synthetic construct
  misc_feature 1..80: note = Artificially Synthesized Probe
  source 1..80: mol_type = other DNA
gatcaccacagattgttactgggtctgctaccaacacatcaaaaccacctttctgaagtcttgccatcaactttgggttc

SEQ ID NO: 134979 - DNA, 80 bp, synthetic construct
  misc_feature 1..80: note = Artificially Synthesized Probe
  source 1..80: mol_type = other DNA
atcatatgctcaattaaggaatctatattgctcttcttgtaggaaacaggtatcacttcaaaattcacaggagaatcggg

SEQ ID NO: 134980 - DNA, 80 bp, synthetic construct
  misc_feature 1..80: note = Artificially Synthesized Probe
  source 1..80: mol_type = other DNA
taacacattcccacttagaacaacttcagtcagagtcaaattaaaaaccagcatctggacaaacttcttaggcatggtaa

SEQ ID NO: 134981 - DNA, 80 bp, synthetic construct; identical to SEQ ID NO: 134706
  misc_feature 1..80: note = Artificially Synthesized Probe
  source 1..80: mol_type = other DNA

SEQ ID NO: 134982 - DNA, 80 bp, synthetic construct; identical to SEQ ID NO: 42495
  misc_feature 1..80: note = Artificially Synthesized Probe
  source 1..80: mol_type = other DNA

SEQ ID NO: 134983 - DNA, 80 bp, synthetic construct; identical to SEQ ID NO: 134728
  misc_feature 1..80: note = Artificially Synthesized Probe
  source 1..80: mol_type = other DNA

SEQ ID NO: 134984 - DNA, 80 bp, synthetic construct; identical to SEQ ID NO: 134740
  misc_feature 1..80: note = Artificially Synthesized Probe
  source 1..80: mol_type = other DNA

SEQ ID NO: 134985 - DNA, 80 bp, synthetic construct; identical to SEQ ID NO: 134751
  misc_feature 1..80: note = Artificially Synthesized Probe
  source 1..80: mol_type = other DNA

SEQ ID NO: 134986 - DNA, 80 bp, synthetic construct; identical to SEQ ID NO: 134761
  misc_feature 1..80: note = Artificially Synthesized Probe
  source 1..80: mol_type = other DNA

SEQ ID NO: 134987 - DNA, 80 bp, synthetic construct; identical to SEQ ID NO: 42496
  misc_feature 1..80: note = Artificially Synthesized Probe
  source 1..80: mol_type = other DNA

SEQ ID NO: 134988 - DNA, 80 bp, synthetic construct; identical to SEQ ID NO: 134765
  misc_feature 1..80: note = Artificially Synthesized Probe
  source 1..80: mol_type = other DNA

SEQ ID NO: 134989 - DNA, 80 bp, synthetic construct; identical to SEQ ID NO: 134766
  misc_feature 1..80: note = Artificially Synthesized Probe
  source 1..80: mol_type = other DNA

SEQ ID NO: 134990 - DNA, 80 bp, synthetic construct; identical to SEQ ID NO: 134767
  misc_feature 1..80: note = Artificially Synthesized Probe
  source 1..80: mol_type = other DNA

SEQ ID NO: 134991 - DNA, 80 bp, synthetic construct; identical to SEQ ID NO: 134768
  misc_feature 1..80: note = Artificially Synthesized Probe
  source 1..80: mol_type = other DNA

SEQ ID NO: 134992 - DNA, 80 bp, synthetic construct; identical to SEQ ID NO: 134769
  misc_feature 1..80: note = Artificially Synthesized Probe
  source 1..80: mol_type = other DNA

SEQ ID NO: 134993 - DNA, 80 bp, synthetic construct; identical to SEQ ID NO: 42497
  misc_feature 1..80: note = Artificially Synthesized Probe
  source 1..80: mol_type = other DNA

SEQ ID NO: 134994 - DNA, 80 bp, synthetic construct; identical to SEQ ID NO: 134771
  misc_feature 1..80: note = Artificially Synthesized Probe
  source 1..80: mol_type = other DNA

SEQ ID NO: 134995 - DNA, 80 bp, synthetic construct; identical to SEQ ID NO: 134772
  misc_feature 1..80: note = Artificially Synthesized Probe
  source 1..80: mol_type = other DNA

SEQ ID NO: 134996 - DNA, 80 bp, synthetic construct; identical to SEQ ID NO: 134773
  misc_feature 1..80: note = Artificially Synthesized Probe
  source 1..80: mol_type = other DNA

SEQ ID NO: 134997 - DNA, 80 bp, synthetic construct; identical to SEQ ID NO: 42498
  misc_feature 1..80: note = Artificially Synthesized Probe
  source 1..80: mol_type = other DNA

SEQ ID NO: 134998 - DNA, 80 bp, synthetic construct; identical to SEQ ID NO: 134775
  misc_feature 1..80: note = Artificially Synthesized Probe
  source 1..80: mol_type = other DNA

SEQ ID NO: 134999 - DNA, 80 bp, synthetic construct; identical to SEQ ID NO: 134776
  misc_feature 1..80: note = Artificially Synthesized Probe
  source 1..80: mol_type = other DNA

SEQ ID NO: 135000 - DNA, 80 bp, synthetic construct; identical to SEQ ID NO: 134777
  misc_feature 1..80: note = Artificially Synthesized Probe
  source 1..80: mol_type = other DNA

SEQ ID NO: 135001 - DNA, 80 bp, synthetic construct; identical to SEQ ID NO: 42499
  misc_feature 1..80: note = Artificially Synthesized Probe
  source 1..80: mol_type = other DNA

SEQ ID NO: 135002 - DNA, 80 bp, synthetic construct; identical to SEQ ID NO: 134779
  misc_feature 1..80: note = Artificially Synthesized Probe
  source 1..80: mol_type = other DNA

SEQ ID NO: 135003 - DNA, 80 bp, synthetic construct; identical to SEQ ID NO: 134780
  misc_feature 1..80: note = Artificially Synthesized Probe
  source 1..80: mol_type = other DNA

SEQ ID NO: 135004 - DNA, 80 bp, synthetic construct
  misc_feature 1..80: note = Artificially Synthesized Probe
  source 1..80: mol_type = other DNA
acataatttaattattgaagatttcattggcaaaattaaaaacaaaaattctgctcaaaatgaagccaaaatattctgag

SEQ ID NO: 135005 - DNA, 80 bp, synthetic construct
  misc_feature 1..80: note = Artificially Synthesized Probe
  source 1..80: mol_type = other DNA
agaaataatgccacacatctacaactatctgatctttgacaaaccttacaaaaacaagaaatggggaaaggattccctat

SEQ ID NO: 135006 - DNA, 80 bp, synthetic construct
  misc_feature 1..80: note = Artificially Synthesized Probe
  source 1..80: mol_type = other DNA
tcaggacataggcatgggcaaggacttcatgactaaaacaccaaaagcaatggcaacaaaagccaaaattgacaaatggg

SEQ ID NO: 135007 - DNA, 80 bp, synthetic construct; identical to SEQ ID NO: 42564
  misc_feature 1..80: note = Artificially Synthesized Probe
  source 1..80: mol_type = other DNA

SEQ ID NO: 135008 - DNA, 80 bp, synthetic construct
  misc_feature 1..80: note = Artificially Synthesized Probe
  source 1..80: mol_type = other DNA
ggactgtaaactagttcaaccattgtggaagtcagtgtggcgattcctcagggatctagaactagaaatatcatttatct

SEQ ID NO: 135009 - DNA, 80 bp, synthetic construct
  misc_feature 1..80: note = Artificially Synthesized Probe
  source 1..80: mol_type = other DNA
acatacactatagaatactatgcagccataaaaaatgatgagttcatgtcctttgcagggacatggatgaagctggaaac

SEQ ID NO: 135010 - DNA, 80 bp, synthetic construct; identical to SEQ ID NO: 42554
  misc_feature 1..80: note = Artificially Synthesized Probe
  source 1..80: mol_type = other DNA

SEQ ID NO: 135011 - DNA, 80 bp, synthetic construct
  misc_feature 1..80: note = Artificially Synthesized Probe
  source 1..80: mol_type = other DNA
gagatacacttaatgttaaatgacgagttaatgggtgcagcacaccaacatggcacatgtatacatatgtagcaaagctg

SEQ ID NO: 135012 - DNA, 80 bp, synthetic construct; identical to SEQ ID NO: 42565
  misc_feature 1..80: note = Artificially Synthesized Probe
  source 1..80: mol_type = other DNA

SEQ ID NO: 135013 - DNA, 80 bp, synthetic construct
  misc_feature 1..80: note = Artificially Synthesized Probe
  source 1..80: mol_type = other DNA
tcatctgcaaatagagacaatttaacttcttctctttctatttatagaataccctttatttctttttcttgcctgattgc

SEQ ID NO: 135014 - DNA, 80 bp, synthetic construct
  misc_feature 1..80: note = Artificially Synthesized Probe
  source 1..80: mol_type = other DNA
ccaccttacatcataataatattggtaggattaatagactctgaattgatggtagctggtgtagtcacagcattttccat

SEQ ID NO: 135015 - DNA, 80 bp, synthetic construct
  misc_feature 1..80: note = Artificially Synthesized Probe
  source 1..80: mol_type = other DNA
atgttttgtgttcaaatacaatgtgtgaaacataaggaagctcagtaacttttgtgtggggtaacttttggattagaata

SEQ ID NO: 135016 - DNA, 80 bp, synthetic construct
  misc_feature 1..80: note = Artificially Synthesized Probe
  source 1..80: mol_type = other DNA
gtatctataacatattaataattcttatgaatccataataaggtaaatagaaaaatgacaaaatgttcacaagattaaaa

SEQ ID NO: 135017 - DNA, 80 bp, synthetic construct; identical to SEQ ID NO: 42566
  misc_feature 1..80: note = Artificially Synthesized Probe
  source 1..80: mol_type = other DNA

SEQ ID NO: 135018 - DNA, 80 bp, synthetic construct
  misc_feature 1..80: note = Artificially Synthesized Probe
  source 1..80: mol_type = other DNA
gccaaaattggaaagacctaaaatgtccatgccctgataaatgggtaattttggtataaacatatcaaagaatattatat

SEQ ID NO: 135019 - DNA, 80 bp, synthetic construct
  misc_feature 1..80: note = Artificially Synthesized Probe
  source 1..80: mol_type = other DNA
cggtatttttctaggactggaggtgtattgggagtgacttcatgcattttgagtttaatttgagctcacaaaaatgttat

SEQ ID NO: 135020 - DNA, 80 bp, synthetic construct
  misc_feature 1..80: note = Artificially Synthesized Probe
  source 1..80: mol_type = other DNA
agaaattttaggtattgaattgaaatattttatcatatttctctagttacataatttctattgtgtattctatcattaaa

SEQ ID NO: 135021 - DNA, 80 bp, synthetic construct; identical to SEQ ID NO: 42567
  misc_feature 1..80: note = Artificially Synthesized Probe
  source 1..80: mol_type = other DNA

SEQ ID NO: 135022 - DNA, 80 bp, synthetic construct
  misc_feature 1..80: note = Artificially Synthesized Probe
  source 1..80: mol_type = other DNA
cattttgacatatttaaagaagaattgtgtcacaactggtgaaatgtctcctaactagtttctcagcttctactctaatc

SEQ ID NO: 135023 - DNA, 80 bp, synthetic construct
  misc_feature 1..80: note = Artificially Synthesized Probe
  source 1..80: mol_type = other DNA
atagggatcccatggtagattgcctcatagatgccattggttccaccatgagttataaaagctttggttttgggatgacc

SEQ ID NO: 135024 - DNA, 80 bp, synthetic construct
  misc_feature 1..80: note = Artificially Synthesized Probe
  source 1..80: mol_type = other DNA
tacttctgctggaaaggtaagtgaaggctacatgaaaaggtggtggtctgtgtgtcttcacagtggaaacataaatttaa

SEQ ID NO: 135025 - DNA, 80 bp, synthetic construct
  misc_feature 1..80: note = Artificially Synthesized Probe
  source 1..80: mol_type = other DNA
aaatatttaaaatacttaaatttttttttaaaggcagcaaggagtagggtggaggtggtgctgaggaaggacaggttaca

SEQ ID NO: 135026 - DNA, 80 bp, synthetic construct; identical to SEQ ID NO: 42568
  misc_feature 1..80: note = Artificially Synthesized Probe
  source 1..80: mol_type = other DNA

SEQ ID NO: 135027 - DNA, 80 bp, synthetic construct
  misc_feature 1..80: note = Artificially Synthesized Probe
  source 1..80: mol_type = other DNA
attggctgttactaatatattcagtatttgttctccagagtcttaccaagaaggtcattctggggtaaccacttatacag

SEQ ID NO: 135028 - DNA, 80 bp, synthetic construct
  misc_feature 1..80: note = Artificially Synthesized Probe
  source 1..80: mol_type = other DNA
gaaataagaagaagtgatgtcaagtaatgagaactactaaaagtctgaggtaagctgaatacccacatttaatatcttta

SEQ ID NO: 135029 - DNA, 80 bp, synthetic construct
  misc_feature 1..80: note = Artificially Synthesized Probe
  source 1..80: mol_type = other DNA
cagcccttggctcactgagataaatgcatatctaattgcctcatttggagaggctaatcagaaactcaaaggaattcagc

SEQ ID NO: 135030 - DNA, 80 bp, synthetic construct; identical to SEQ ID NO: 42569
  misc_feature 1..80: note = Artificially Synthesized Probe
  source 1..80: mol_type = other DNA

SEQ ID NO: 135031 - DNA, 80 bp, synthetic construct
  misc_feature 1..80: note = Artificially Synthesized Probe
  source 1..80: mol_type = other DNA
accagcatgagctaactttatggctcaaacaaataagacaattggctgaggtctgggagcaacccctccagagaatccct

SEQ ID NO: 135032 - DNA, 80 bp, synthetic construct
  misc_feature 1..80: note = Artificially Synthesized Probe
  source 1..80: mol_type = other DNA
ctcactcccaggagggaggataaatttgaggtttctttcctacttctaggacgacagagggcagttttagcctgaaaccc

SEQ ID NO: 135033 - DNA, 80 bp, synthetic construct
  misc_feature 1..80: note = Artificially Synthesized Probe
  source 1..80: mol_type = other DNA
acctgacttgatcatatctgagtgagaattccaaattgtgggtaacaaagcctgtctaatttggtgaaaattcttcacag

SEQ ID NO: 135034 - DNA, 80 bp, synthetic construct
  misc_feature 1..80: note = Artificially Synthesized Probe
  source 1..80: mol_type = other DNA
cttgtcctaaccctttccccctgtacactttcttctagagacaatggccttctgttgttctttaaactcctgaaggtgtt

SEQ ID NO: 135035 - DNA, 80 bp, synthetic construct
  misc_feature 1..80: note = Artificially Synthesized Probe
  source 1..80: mol_type = other DNA
tgttcttttgtttacttttcctccaccctatacctccttttgtcttttgccatttgtagtaccaaaaatctagagaaggc

SEQ ID NO: 135036 - DNA, 80 bp, synthetic construct; identical to SEQ ID NO: 42570
  misc_feature 1..80: note = Artificially Synthesized Probe
  source 1..80: mol_type = other DNA

SEQ ID NO: 135037 - DNA, 80 bp, synthetic construct
  misc_feature 1..80: note = Artificially Synthesized Probe
  source 1..80: mol_type = other DNA
tattgtttttattccccaaattaatctcatttggcttgtctgtgtggatttgtgtgagaaactgaactgtggtttacata

SEQ ID NO: 135038 - DNA, 80 bp, synthetic construct
  misc_feature 1..80: note = Artificially Synthesized Probe
  source 1..80: mol_type = other DNA
aacttttaaaaaaaggctagtccaggaaacacatatgagggcagatcacccagcattttgagccctctcagaggtcatac

SEQ ID NO: 135039 - DNA, 80 bp, synthetic construct
  misc_feature 1..80: note = Artificially Synthesized Probe
  source 1..80: mol_type = other DNA
aatctaagaatgatgagaaaagaagaagaatgatcccctgatatcgcctgtttggatttatgacacctctacttggcaga

SEQ ID NO: 135040 - DNA, 80 bp, synthetic construct; identical to SEQ ID NO: 42571
  misc_feature 1..80: note = Artificially Synthesized Probe
  source 1..80: mol_type = other DNA

SEQ ID NO: 135041 - DNA, 80 bp, synthetic construct
  misc_feature 1..80: note = Artificially Synthesized Probe
  source 1..80: mol_type = other DNA
ttttcacctgaatggtttcttttaatatgcaaatgtaagattatttagctcacaactgcctatggtgatcaagtattcat

SEQ ID NO: 135042 - DNA, 80 bp, synthetic construct
  misc_feature 1..80: note = Artificially Synthesized Probe
  source 1..80: mol_type = other DNA
gagctctaattaattggcttaagaaaataaaagtgcttgaattaaatactttgccagaaaaaaagactaattaaatgctt

SEQ ID NO: 135043 - DNA, 80 bp, synthetic construct
  misc_feature 1..80: note = Artificially Synthesized Probe
  source 1..80: mol_type = other DNA
tagagagtgttttcctggccacactataggcacccataggatttctctactgcttcgttcttattttgctatttgatttc

SEQ ID NO: 135044 - DNA, 80 bp, synthetic construct
  misc_feature 1..80: note = Artificially Synthesized Probe
  source 1..80: mol_type = other DNA
taaggtgtcaaaatttgacataggggttacaaaactgtaaaccaagcccaaaacagaatgatcttcacttgtgtaatttt

SEQ ID NO: 135045 - DNA, 80 bp, synthetic construct; identical to SEQ ID NO: 42572
  misc_feature 1..80: note = Artificially Synthesized Probe
  source 1..80: mol_type = other DNA

SEQ ID NO: 135046 - DNA, 80 bp, synthetic construct
  misc_feature 1..80: note = Artificially Synthesized Probe
  source 1..80: mol_type = other DNA
atttagaatctaaggttatattaaattaaataatagatatttcattgtttgggtatttttaaaaaaaaatttgtaggaaa

SEQ ID NO: 135047 - DNA, 80 bp, synthetic construct
  misc_feature 1..80: note = Artificially Synthesized Probe
  source 1..80: mol_type = other DNA
ttttgtaaaaagcttgaagagaaataattttatatgagaaagaatcttgtgtggtaaatttagtcctagaataaaatgat

SEQ ID NO: 135048 - DNA, 80 bp, synthetic construct
  misc_feature 1..80: note = Artificially Synthesized Probe
  source 1..80: mol_type = other DNA
attaaagggaaattataatggtgtttctacagattgggcttgatgtaaaaaaagcacttatgcactaaataattggttag

SEQ ID NO: 135049 - DNA, 80 bp, synthetic construct; identical to SEQ ID NO: 42573
  misc_feature 1..80: note = Artificially Synthesized Probe
  source 1..80: mol_type = other DNA

SEQ ID NO: 135050 - DNA, 80 bp, synthetic construct
  misc_feature 1..80: note = Artificially Synthesized Probe
  source 1..80: mol_type = other DNA
tcttgaagcataaactgacttcttaataaagattataaacgttatgaaaggctgaggaaagttatatcttatggtcaaga

SEQ ID NO: 135051 - DNA, 80 bp, synthetic construct
  misc_feature 1..80: note = Artificially Synthesized Probe
  source 1..80: mol_type = other DNA
gaatgctttattttacctgtgatatcaagctttttaatcctttgatatttgacaaattttccaaaattatgtttttttct

SEQ ID NO: 135052 - DNA, 80 bp, synthetic construct
  misc_feature 1..80: note = Artificially Synthesized Probe
  source 1..80: mol_type = other DNA
caaaattatgggaaactcctataattctgatatgacttagtgtgtacattatcagtaataattatatttgttatgttaag

SEQ ID NO: 135053 - DNA, 80 bp, synthetic construct
  misc_feature 1..80: note = Artificially Synthesized Probe
  source 1..80: mol_type = other DNA
caaaagtgaaaacaccaatttatcacaaactgcatagaagaactctttcctcctgggccattttagtcactacttttatc

SEQ ID NO: 135054 - DNA, 80 bp, synthetic construct; identical to SEQ ID NO: 42574
  misc_feature 1..80: note = Artificially Synthesized Probe
  source 1..80: mol_type = other DNA

SEQ ID NO: 135055 - DNA, 80 bp, synthetic construct
  misc_feature 1..80: note = Artificially Synthesized Probe
  source 1..80: mol_type = other DNA
cttttaacaatttagtatactcctatgaaaaaaatttagaacatatttgtttccctctacctgatttttcagaatttgga

SEQ ID NO: 135056 - DNA, 80 bp, synthetic construct
  misc_feature 1..80: note = Artificially Synthesized Probe
  source 1..80: mol_type = other DNA
ttatggagccaataaaaccccttgggaaaactggcctcataccttcatctataaggtccctgtacagggttcctgaactg

SEQ ID NO: 135057 - DNA, 80 bp, synthetic construct; identical to SEQ ID NO: 42575
  misc_feature 1..80: note = Artificially Synthesized Probe
  source 1..80: mol_type = other DNA

SEQ ID NO: 135058 - DNA, 80 bp, synthetic construct
  misc_feature 1..80: note = Artificially Synthesized Probe
  source 1..80: mol_type = other DNA
tgaattctaatttttcatggctacacgtcttcaaaatagtgtcttcaggttttttttcctccccttccacaatttttcct

SEQ ID NO: 135059 - DNA, 80 bp, synthetic construct
  misc_feature 1..80: note = Artificially Synthesized Probe
  source 1..80: mol_type = other DNA
attaattttaaaggattgttcttttgtttttgtttttctcacttcctccctttattttgtcttcacagtacatgagactt

SEQ ID NO: 135060 - DNA, 80 bp, synthetic construct
  misc_feature 1..80: note = Artificially Synthesized Probe
  source 1..80: mol_type = other DNA
ttctccaaaagatttttttaaaatgtaaaatgaaaataaacctgggggccccaaagtcactaagcaaatcactgcctccc

SEQ ID NO: 135061 - DNA, 80 bp, synthetic construct; identical to SEQ ID NO: 42555
  misc_feature 1..80: note = Artificially Synthesized Probe
  source 1..80: mol_type = other DNA

SEQ ID NO: 135062 - DNA, 80 bp, synthetic construct; identical to SEQ ID NO: 42576
  misc_feature 1..80: note = Artificially Synthesized Probe
  source 1..80: mol_type = other DNA

SEQ ID NO: 135063 - DNA, 80 bp, synthetic construct
  misc_feature 1..80: note = Artificially Synthesized Probe
  source 1..80: mol_type = other DNA
tgagtgatatgggaagagtttacttatatccacttgtctactagtcataagttattttatgaatttgacatcattgatta

SEQ ID NO: 135064 - DNA, 80 bp, synthetic construct
  misc_feature 1..80: note = Artificially Synthesized Probe
  source 1..80: mol_type = other DNA
tagaaaattgtattttgctactttttgcttaactgatctttcacacttagatgatgcactacctagcattgacagccttg

SEQ ID NO: 135065 - DNA, 80 bp, synthetic construct
  misc_feature 1..80: note = Artificially Synthesized Probe
  source 1..80: mol_type = other DNA
tgatatgggagtgttaaagtaactctgtgttttcagcaaaaacttgcatagatcattcagagagggctatgcagataaga

SEQ ID NO: 135066 - DNA, 80 bp, synthetic construct; identical to SEQ ID NO: 42577
  misc_feature 1..80: note = Artificially Synthesized Probe
  source 1..80: mol_type = other DNA

SEQ ID NO: 135067 - DNA, 80 bp, synthetic construct
  misc_feature 1..80: note = Artificially Synthesized Probe
  source 1..80: mol_type = other DNA
agaacgctaaatagacctattccaatgcatgggaagtaaaaacagccagattgcttggtaagacgaagctgcatgatgca

SEQ ID NO: 135068 - DNA, 80 bp, synthetic construct
  misc_feature 1..80: note = Artificially Synthesized Probe
  source 1..80: mol_type = other DNA
aaaaggagcaaatgacagggcagaatttagtgatttctatgtacatgctacgataccatgataataccaaacttcactag

SEQ ID NO: 135069 - DNA, 80 bp, synthetic construct
  misc_feature 1..80: note = Artificially Synthesized Probe
  source 1..80: mol_type = other DNA
gaacatttctgtaatggactcttgaagagtttaacagattcatttagtagccatccacagttaaggcactttatctaacc

SEQ ID NO: 135070 - DNA, 80 bp, synthetic construct
  misc_feature 1..80: note = Artificially Synthesized Probe
  source 1..80: mol_type = other DNA
aagagcaacagcacagaaaacactgttgacaggattgttacaaacatctaagatgagaaagtcaggagctattggagtaa

SEQ ID NO: 135071 - DNA, 80 bp, synthetic construct; identical to SEQ ID NO: 42578
  misc_feature 1..80: note = Artificially Synthesized Probe
  source 1..80: mol_type = other DNA

SEQ ID NO: 135072 - DNA, 80 bp, synthetic construct
  misc_feature 1..80: note = Artificially Synthesized Probe
  source 1..80: mol_type = other DNA
tttttctgttcagttcttttagttaggagtcattggagccattacatgactatgagcaatgaggaaaagttagttacaat

SEQ ID NO: 135073 - DNA, 80 bp, synthetic construct
  misc_feature 1..80: note = Artificially Synthesized Probe
  source 1..80: mol_type = other DNA
tttttgactgaattttttaaaaaatattttttattttaaagaatcagagattgtttttagttatcattttctggatgatt

SEQ ID NO: 135074 - DNA, 80 bp, synthetic construct
  misc_feature 1..80: note = Artificially Synthesized Probe
  source 1..80: mol_type = other DNA
aaaaacaccttaaaagctgaagtataagaatcattgacgttcatcagtctggtgttggggcttggaatttccgggaaata

SEQ ID NO: 135075 - DNA, 80 bp, synthetic construct
  misc_feature 1..80: note = Artificially Synthesized Probe
  source 1..80: mol_type = other DNA
tgtgaaattgatgtgctatttataacttaccatgagggaccctcatcctcactttgctgtgtctcacagggggcacttga

SEQ ID NO: 135076 - DNA, 80 bp, synthetic construct; identical to SEQ ID NO: 42579
  misc_feature 1..80: note = Artificially Synthesized Probe
  source 1..80: mol_type = other DNA

SEQ ID NO: 135077 - DNA, 80 bp, synthetic construct
  misc_feature 1..80: note = Artificially Synthesized Probe
  source 1..80: mol_type = other DNA
ccaaccccttctatcataacaaatatactttctggtcctaatcattgggggaaatttctttataaaactgtttacgaata

SEQ ID NO: 135078 - DNA, 80 bp, synthetic construct
  misc_feature 1..80: note = Artificially Synthesized Probe
  source 1..80: mol_type = other DNA
caatcttggctcattgcgacctctgcctcccaggttcaagcaattctcctgcctcagcctcctgagtagctgggattaca

SEQ ID NO: 135079 - DNA, 80 bp, synthetic construct; identical to SEQ ID NO: 42580
  misc_feature 1..80: note = Artificially Synthesized Probe
  source 1..80: mol_type = other DNA

SEQ ID NO: 135080 - DNA, 80 bp, synthetic construct
  misc_feature 1..80: note = Artificially Synthesized Probe
  source 1..80: mol_type = other DNA
tgaagtaaaaaatcgtctgtttatagacagatcagcactgatctcattctgtgacgtctttatgaaagcaatggtaatag

SEQ ID NO: 135081 - DNA, 80 bp, synthetic construct
  misc_feature 1..80: note = Artificially Synthesized Probe
  source 1..80: mol_type = other DNA
tctcattgtatatgcctttttatcctacaaaaaaattgtgatcttgttctactcatcattctgttccttagtttccaact

SEQ ID NO: 135082 - DNA, 80 bp, synthetic construct
  misc_feature 1..80: note = Artificially Synthesized Probe
  source 1..80: mol_type = other DNA
ttccagagttttttaacgaatatttgctactaatattgaatcttaccatcatgatttattctctgtacagtttcatgtga

SEQ ID NO: 135083 - DNA, 80 bp, synthetic construct; identical to SEQ ID NO: 42581
  misc_feature 1..80: note = Artificially Synthesized Probe
  source 1..80: mol_type = other DNA

SEQ ID NO: 135084 - DNA, 80 bp, synthetic construct
  misc_feature 1..80: note = Artificially Synthesized Probe
  source 1..80: mol_type = other DNA
tacttgggagtctgaggcaggagaatcagaatcacttgaacctagagggtggaggttgcagtgagctgagatcatggtag

SEQ ID NO: 135085 - DNA, 80 bp, synthetic construct
  misc_feature 1..80: note = Artificially Synthesized Probe
  source 1..80: mol_type = other DNA
tctgtcacccaggcttgagtatgacggagcgatcttggctgactgcaacttacgtctcctgggttcaagtgattctcatg

SEQ ID NO: 135086 - DNA, 80 bp, synthetic construct
  misc_feature 1..80: note = Artificially Synthesized Probe
  source 1..80: mol_type = other DNA
taaaatattaatgaagtgcctccacctttgcaatacaactttagctttccagcgtgttcaactgactgcccaaacttaaa

SEQ ID NO: 135087 - DNA, 80 bp, synthetic construct
  misc_feature 1..80: note = Artificially Synthesized Probe
  source 1..80: mol_type = other DNA
atatttttggatcactggctatgtgtcagagacaacttaagtgttttatctgtggtaactacttttttccacacaacaca

SEQ ID NO: 135088 - DNA, 80 bp, synthetic construct; identical to SEQ ID NO: 42582
  misc_feature 1..80: note = Artificially Synthesized Probe
  source 1..80: mol_type = other DNA

SEQ ID NO: 135089 - DNA, 80 bp, synthetic construct
  misc_feature 1..80: note = Artificially Synthesized Probe
  source 1..80: mol_type = other DNA
agctgctattagaggtgcctgccaacatgcctgactaatttttgtatttttagtagagacggggtttcaccatgctggcc

SEQ ID NO: 135090 - DNA, 80 bp, synthetic construct
  misc_feature 1..80: note = Artificially Synthesized Probe
  source 1..80: mol_type = other DNA
gtaaactaaatttggagtcctgggaactgcccttactgcttttctacttttctgccttaatgcaagactttacttttttg

SEQ ID NO: 135091 - DNA, 80 bp, synthetic construct
  misc_feature 1..80: note = Artificially Synthesized Probe
  source 1..80: mol_type = other DNA
gcctcttaagtagctgggactatgagactacaggcacacaccagcatgcctggctattatttttatttttgttagagatg

SEQ ID NO: 135092 - DNA, 80 bp, synthetic construct; identical to SEQ ID NO: 42583
  misc_feature 1..80: note = Artificially Synthesized Probe
  source 1..80: mol_type = other DNA

SEQ ID NO: 135093 - DNA, 80 bp, synthetic construct
  misc_feature 1..80: note = Artificially Synthesized Probe
  source 1..80: mol_type = other DNA
acctgtggtttgcattaatcactctacaaatattttttgaagaaatgaaccatactatcttgtgggttgcacaatgaagg

SEQ ID NO: 135094 - DNA, 80 bp, synthetic construct
  misc_feature 1..80: note = Artificially Synthesized Probe
  source 1..80: mol_type = other DNA
ttttttttgacctcccatattcccctcactctgagttaaacactctgaaagaaacatatccagccattccttctgaaaat

SEQ ID NO: 135095 - DNA, 80 bp, synthetic construct
  misc_feature 1..80: note = Artificially Synthesized Probe
  source 1..80: mol_type = other DNA
aataggttcgaatgagccacatttcagctttccccattgtctcaaataatgtagtgggtcttcctgatggaaaaaaacaa

SEQ ID NO: 135096 - DNA, 80 bp, synthetic construct
  misc_feature 1..80: note = Artificially Synthesized Probe
  source 1..80: mol_type = other DNA
aatacattatattaaattaatgtatattaaataatattaaatacattatattaaattaatgtatttaatatatgttaata

SEQ ID NO: 135097 - DNA, 80 bp, synthetic construct; identical to SEQ ID NO: 42556
  misc_feature 1..80: note = Artificially Synthesized Probe
  source 1..80: mol_type = other DNA

SEQ ID NO: 135098 - DNA, 80 bp, synthetic construct
  misc_feature 1..80: note = Artificially Synthesized Probe
  source 1..80: mol_type = other DNA
atagttttaatttaatatttaaattatttaataaaataatttaatataatgtaaatacattatattaaatacatttatat

SEQ ID NO: 135099 - DNA, 80 bp, synthetic construct
  misc_feature 1..80: note = Artificially Synthesized Probe
  source 1..80: mol_type = other DNA
actgtccccacccaaatctcctctcatcttgaattataatccccataatccccatgtgtcgagggagggacccagtggca

SEQ ID NO: 135100 - DNA, 80 bp, synthetic construct
  misc_feature 1..80: note = Artificially Synthesized Probe
  source 1..80: mol_type = other DNA
ttcaccatgattctaagtttcttgaggcatcccagtcatgtagaactgagtctattaaacttcttttctttataaattgc

SEQ ID NO: 135101 - DNA, 80 bp, synthetic construct; identical to SEQ ID NO: 42584
  misc_feature 1..80: note = Artificially Synthesized Probe
  source 1..80: mol_type = other DNA

SEQ ID NO: 135102 - DNA, 80 bp, synthetic construct
  misc_feature 1..80: note = Artificially Synthesized Probe
  source 1..80: mol_type = other DNA
tcagaatttattgacatagagatatgtgctcttccttattttggcccctattttctttgatggagagatgcagtttaata

SEQ ID NO: 135103 - DNA, 80 bp, synthetic construct
  misc_feature 1..80: note = Artificially Synthesized Probe
  source 1..80: mol_type = other DNA
aatccttcttatatgaaaaacaaaatttaatttctaaatgaggaaactgaggtactcaggtacaagttcctcaatcctgc

SEQ ID NO: 135104 - DNA, 80 bp, synthetic construct
  misc_feature 1..80: note = Artificially Synthesized Probe
  source 1..80: mol_type = other DNA
gtttatgactctcttggtgtcctatagcagtgatggcaccagggttctaactgattctataaggtcaacattctatattt

SEQ ID NO: 135105 - DNA, 80 bp, synthetic construct
  misc_feature 1..80: note = Artificially Synthesized Probe
  source 1..80: mol_type = other DNA
aactggtcccacttcttcagatcatatgcttgaaaccaaaagtcaaaataaagcatatatatcatattttttatcctctc

SEQ ID NO: 135106 - DNA, 80 bp, synthetic construct; identical to SEQ ID NO: 42585
  misc_feature 1..80: note = Artificially Synthesized Probe
  source 1..80: mol_type = other DNA

SEQ ID NO: 135107 - DNA, 80 bp, synthetic construct
  misc_feature 1..80: note = Artificially Synthesized Probe
  source 1..80: mol_type = other DNA
acttctaatttaatagcagatgatttactggcattgacaagaatagaagccgaagatgtcaacacaatcacctcatgacc

SEQ ID NO: 135108 - DNA, 80 bp, synthetic construct
  misc_feature 1..80: note = Artificially Synthesized Probe
  source 1..80: mol_type = other DNA
atttaatgcgagtactggtaggttcacttttttgttgtgatctttgagatggagtctcgctctgtcaccaggctggagtg

SEQ ID NO: 135109 - DNA, 80 bp, synthetic construct
  misc_feature 1..80: note = Artificially Synthesized Probe
  source 1..80: mol_type = other DNA
aaagactgacatccatttcagagacatcctggtcttatgcagtgcttcttttccagttgttgtttctttctgtcatttct

SEQ ID NO: 135110 - DNA, 80 bp, synthetic construct
  misc_feature 1..80: note = Artificially Synthesized Probe
  source 1..80: mol_type = other DNA
tatgtaattattttataatactgttaagaacagtggcaggtgagaggctcctgcctgttcggtgcccttgacatagagag

SEQ ID NO: 135111 - DNA, 80 bp, synthetic construct; identical to SEQ ID NO: 42586
  misc_feature 1..80: note = Artificially Synthesized Probe
  source 1..80: mol_type = other DNA

SEQ ID NO: 135112 - DNA, 80 bp, synthetic construct
  misc_feature 1..80: note = Artificially Synthesized Probe
  source 1..80: mol_type = other DNA
ctgcaggtcaactgcaaggacagaccagcaattctgagaggatccacacaccctctgcaggaagcgtactgctcctgcag

SEQ ID NO: 135113 - DNA, 80 bp, synthetic construct
  misc_feature 1..80: note = Artificially Synthesized Probe
  source 1..80: mol_type = other DNA
gccaagcaaaatataggggtagaggaagtagcagaaaggtactgggagctctctggatacccaagcagctcattcctgcc

SEQ ID NO: 135114 - DNA, 80 bp, synthetic construct
  misc_feature 1..80: note = Artificially Synthesized Probe
  source 1..80: mol_type = other DNA
cagaagcaggaagagagccggccagaagacacctaccctggctggagacatgaacccttgaagatcaagaggccatccag

SEQ ID NO: 135115 - DNA, 80 bp, synthetic construct; identical to SEQ ID NO: 42587
  misc_feature 1..80: note = Artificially Synthesized Probe
  source 1..80: mol_type = other DNA

SEQ ID NO: 135116 - DNA, 80 bp, synthetic construct
  misc_feature 1..80: note = Artificially Synthesized Probe
  source 1..80: mol_type = other DNA
aacttctcagacaccaagttgtagaaggaagggctttattcagctgggagcatcggcaagctactgccttaaaatccaag

SEQ ID NO: 135117 - DNA, 80 bp, synthetic construct
  misc_feature 1..80: note = Artificially Synthesized Probe
  source 1..80: mol_type = other DNA
ttcttctgtacaatgtctggaatctctgaataacatcggtttctaagttatgagttgatttttaactactgggtttaggt

SEQ ID NO: 135118 - DNA, 80 bp, synthetic construct; identical to SEQ ID NO: 42588
  misc_feature 1..80: note = Artificially Synthesized Probe
  source 1..80: mol_type = other DNA

SEQ ID NO: 135119 - DNA, 80 bp, synthetic construct
  misc_feature 1..80: note = Artificially Synthesized Probe
  source 1..80: mol_type = other DNA
tatggtctcgatctcttgacctcgtgatctgccctcctcagccacccaaagtgctgggattacaggcttgagccaccaca

SEQ ID NO: 135120 - DNA, 80 bp, synthetic construct
  misc_feature 1..80: note = Artificially Synthesized Probe
  source 1..80: mol_type = other DNA
taaacatggcttcagggttgaatccgtgctacacttgcacaggtacatgtgccagttttgtcatatttttaactatgtct

SEQ ID NO: 135121 - DNA, 80 bp, synthetic construct
  misc_feature 1..80: note = Artificially Synthesized Probe
  source 1..80: mol_type = other DNA
tgaccggttttattagtaaaaatttctaaaacagcttgtaaccatatgattcggttgagcatgtagatgggggtccaata

SEQ ID NO: 135122 - DNA, 80 bp, synthetic construct
  misc_feature 1..80: note = Artificially Synthesized Probe
  source 1..80: mol_type = other DNA
gaagaaagaaggcttaatggtgcgaattacacagctacctgtctactgatcaggcagcttagcataagctttgtgtccac

SEQ ID NO: 135123 - DNA, 80 bp, synthetic construct; identical to SEQ ID NO: 42589
  misc_feature 1..80: note = Artificially Synthesized Probe
  source 1..80: mol_type = other DNA

SEQ ID NO: 135124 - DNA, 80 bp, synthetic construct
  misc_feature 1..80: note = Artificially Synthesized Probe
  source 1..80: mol_type = other DNA
acaaacataatatgaggtgacttgtagagactgggctacgtgttaggctaattgcaaaaagaaatttttagtttttcctg

SEQ ID NO: 135125 - DNA, 80 bp, synthetic construct
  misc_feature 1..80: note = Artificially Synthesized Probe
  source 1..80: mol_type = other DNA
ggtctgaggggtttgtgattatcaattctaaaaggttgtagctcctattcatgcaagaggggctgagttttcctttttgg

SEQ ID NO: 135126 - DNA, 80 bp, synthetic construct
  misc_feature 1..80: note = Artificially Synthesized Probe
  source 1..80: mol_type = other DNA
gcttactattaatagcggcacaagtgtcaaattttaaggttacattttgaggagctctgtttttttcggttctacctatt

SEQ ID NO: 135127 - DNA, 80 bp, synthetic construct; identical to SEQ ID NO: 42590
  misc_feature 1..80: note = Artificially Synthesized Probe
  source 1..80: mol_type = other DNA

SEQ ID NO: 135128 - DNA, 80 bp, synthetic construct
  misc_feature 1..80: note = Artificially Synthesized Probe
  source 1..80: mol_type = other DNA
tgatgtatatactggaaacagttcttagtctgaggaaggtcagttgaagtccttcctgtacaagtccaaattctgaggaa

SEQ ID NO: 135129 - DNA, 80 bp, synthetic construct
  misc_feature 1..80: note = Artificially Synthesized Probe
  source 1..80: mol_type = other DNA
gttatgtttaactgggctctctgataataggagtaagatagtgagcttagggtgttgcaaacttcaatggttatgtgggg

SEQ ID NO: 135130 - DNA, 80 bp, synthetic construct
  misc_feature 1..80: note = Artificially Synthesized Probe
  source 1..80: mol_type = other DNA
gccagggcccttggacatgggggccagcctttggaaaccccgtctagttgttttgagagacaggccattggccttggcca

SEQ ID NO: 135131 - DNA, 80 bp, synthetic construct
  misc_feature 1..80: note = Artificially Synthesized Probe
  source 1..80: mol_type = other DNA
gtcctgatactctcactcccattccatgccccgaatggccccggtgtgttttgctcccctccctgagtccatgtattctc

SEQ ID NO: 135132 - DNA, 80 bp, synthetic construct
  misc_feature 1..80: note = Artificially Synthesized Probe
  source 1..80: mol_type = other DNA
aaggaaatcctccatttaaaaccctccatgctggaataaaggaggagtcccatcttttggtcattccacttcaggctttt

SEQ ID NO: 135133 - DNA, 80 bp, synthetic construct
  misc_feature 1..80: note = Artificially Synthesized Probe
  source 1..80: mol_type = other DNA
atagatgtagtttatctaatctacatttttattgactgttatctactaaaatattgacttaaatcttgtaactatttgat

SEQ ID NO: 135134 - DNA, 80 bp, synthetic construct; identical to SEQ ID NO: 42591
  misc_feature 1..80: note = Artificially Synthesized Probe
  source 1..80: mol_type = other DNA

SEQ ID NO: 135135 - DNA, 80 bp, synthetic construct
  misc_feature 1..80: note = Artificially Synthesized Probe
  source 1..80: mol_type = other DNA
ggggctgactggcagggacttcaggatatagcagagagagcttggcatgacttattactccaggctgtagaatcctggaa

SEQ ID NO: 135136 - DNA, 80 bp, synthetic construct
  misc_feature 1..80: note = Artificially Synthesized Probe
  source 1..80: mol_type = other DNA
tgatatactgtcttaattgctaaagtttgttttaagtctttaacttttatgatcctctagtaaaatgaatatttccatta

SEQ ID NO: 135137 - DNA, 80 bp, synthetic construct
  misc_feature 1..80: note = Artificially Synthesized Probe
  source 1..80: mol_type = other DNA
atccaatttttcatagttgaccataaggtaagattttatagactctgtttaaccttttacaatttttgttaaagagcagg

SEQ ID NO: 135138 - DNA, 80 bp, synthetic construct
  misc_feature 1..80: note = Artificially Synthesized Probe
  source 1..80: mol_type = other DNA
tttttgactttttaatgtaggtaaaaatccacattcttatgcctccttataatcttctcattaaagttatattttacttt

SEQ ID NO: 135139 - DNA, 80 bp, synthetic construct
  misc_feature 1..80: note = Artificially Synthesized Probe
  source 1..80: mol_type = other DNA
atttttttcttctctttaaacaacaagttaatttatttcaggacaagaatttaccatataacactctttttacataaatt

SEQ ID NO: 135140 - DNA, 80 bp, synthetic construct
  misc_feature 1..80: note = Artificially Synthesized Probe
  source 1..80: mol_type = other DNA
gaaaaccttgtaagtttgaaatttcaattatcctttgctattaataagaccttgtttagtctaaatttacttagaattgg

SEQ ID NO: 135141 - DNA, 80 bp, synthetic construct
  misc_feature 1..80: note = Artificially Synthesized Probe
  source 1..80: mol_type = other DNA
ttacaggttaccttgtgccataccttagaaactaaaaagacctatctaggcttccttctgatggctaacctacctctaat

SEQ ID NO: 135142 - DNA, 80 bp, synthetic construct; identical to SEQ ID NO: 42592
  misc_feature 1..80: note = Artificially Synthesized Probe
  source 1..80: mol_type = other DNA

SEQ ID NO: 135143 - DNA, 80 bp, synthetic construct
  misc_feature 1..80: note = Artificially Synthesized Probe
  source 1..80: mol_type = other DNA
gcatcatattttctttatccagtctatcattgatgagtatttgtgttggttccatatctttgatattgtagatagtgctg

SEQ ID NO: 135144 - DNA, 80 bp, synthetic construct
  misc_feature 1..80: note = Artificially Synthesized Probe
  source 1..80: mol_type = other DNA
gttcaaaagactagtcctaccaagtctagccaagtcaaaaccagaacaaaggtgccaacacaggcacaccgtgggtgacc

SEQ ID NO: 135145 - DNA, 80 bp, synthetic construct
  misc_feature 1..80: note = Artificially Synthesized Probe
  source 1..80: mol_type = other DNA
ctggggcaatttcctacccaggagcgctctttggatctcatcactcaggctgcccggagtaccccacagggatgctccac

SEQ ID NO: 135146 - DNA, 80 bp, synthetic construct
  misc_feature 1..80: note = Artificially Synthesized Probe
  source 1..80: mol_type = other DNA
agatactgccttaaaatctgagctccccgagtgcacaatttctgtcctttttaagggctcactacactaaagatttcaca

SEQ ID NO: 135147 - DNA, 80 bp, synthetic construct
  misc_feature 1..80: note = Artificially Synthesized Probe
  source 1..80: mol_type = other DNA
ggaggagtcccatcttttggtcattccacttcaggcttttgatataactaatcccttttcttcttctttcctgttttggc

SEQ ID NO: 135148 - DNA, 80 bp, synthetic construct; identical to SEQ ID NO: 42557
  misc_feature 1..80: note = Artificially Synthesized Probe
  source 1..80: mol_type = other DNA

SEQ ID NO: 135149 - DNA, 80 bp, synthetic construct
  misc_feature 1..80: note = Artificially Synthesized Probe
  source 1..80: mol_type = other DNA
tttttcttgtaaatttgtttaagttacttgtagattctggatattggacctttgtcagagggatagattgcaaaaatgtt

SEQ ID NO: 135150 - DNA, 80 bp, synthetic construct
  misc_feature 1..80: note = Artificially Synthesized Probe
  source 1..80: mol_type = other DNA
atgttgcttaggttttcttccagggtttttatggttttgggttttacatttaagtctttaatccatcttgagttaatttt

SEQ ID NO: 135151 - DNA, 80 bp, synthetic construct; identical to SEQ ID NO: 42558
  misc_feature 1..80: note = Artificially Synthesized Probe
  source 1..80: mol_type = other DNA

SEQ ID NO: 135152 - DNA, 80 bp, synthetic construct
  misc_feature 1..80: note = Artificially Synthesized Probe
  source 1..80: mol_type = other DNA
cattggtcaatacatctttttggtaccagtaccattctgttttggttatgtagcctaatagtatagtttgacatcaggta

SEQ ID NO: 135153 - DNA, 80 bp, synthetic construct
  misc_feature 1..80: note = Artificially Synthesized Probe
  source 1..80: mol_type = other DNA
gaagaagccaagatggccgaataagaacagctccagtctacagctcccagtgtgaatgacacagatgaggaatgatttct

SEQ ID NO: 135154 - DNA, 80 bp, synthetic construct
  misc_feature 1..80: note = Artificially Synthesized Probe
  source 1..80: mol_type = other DNA
taggggtaacagatggcacctggaaaattgggttactcccaccctaatactgcgcttttccaaaaggttttagcaaacgg

SEQ ID NO: 135155 - DNA, 80 bp, synthetic construct
  misc_feature 1..80: note = Artificially Synthesized Probe
  source 1..80: mol_type = other DNA
gcccagaagcttgaactgggtggagcccaccgcagctcaaggacgcctgcctgcctctgtagatccacctctgggggcag

SEQ ID NO: 135156 - DNA, 80 bp, synthetic construct; identical to SEQ ID NO: 42559
  misc_feature 1..80: note = Artificially Synthesized Probe
  source 1..80: mol_type = other DNA

SEQ ID NO: 135157 - DNA, 80 bp, synthetic construct
  misc_feature 1..80: note = Artificially Synthesized Probe
  source 1..80: mol_type = other DNA
caccaaaacccatttctacatcgccatcatcaaaaaccaaaggtagataaaaccacaaagatgggggaaaaaagagcaga

SEQ ID NO: 135158 - DNA, 80 bp, synthetic construct
  misc_feature 1..80: note = Artificially Synthesized Probe
  source 1..80: mol_type = other DNA
aactcaatccagaagactgctcgatccaggggcttcaccggttgatcatgatgaattcttgataatttcatgatattctc

SEQ ID NO: 135159 - DNA, 80 bp, synthetic construct
  misc_feature 1..80: note = Artificially Synthesized Probe
  source 1..80: mol_type = other DNA
cgaaggcaaagaaggtaaaaaccttgaaaaaagattagatgaatggctaactagataaccaatgcagagaagtccttaaa

SEQ ID NO: 135160 - DNA, 80 bp, synthetic construct
  misc_feature 1..80: note = Artificially Synthesized Probe
  source 1..80: mol_type = other DNA
aatgaacaaagcctccaagaaatatgggactatgtgaaaagaccaaatctacatctgattggtgtacctgaaagtgacgg

SEQ ID NO: 135161 - DNA, 80 bp, synthetic construct; identical to SEQ ID NO: 42560
  misc_feature 1..80: note = Artificially Synthesized Probe
  source 1..80: mol_type = other DNA

SEQ ID NO: 135162 - DNA, 80 bp, synthetic construct
  misc_feature 1..80: note = Artificially Synthesized Probe
  source 1..80: mol_type = other DNA
acagacaagcaaatgctgagagattttgtcaccaccaggcctgccctaaaagagctcctgaaggaagcactaaacatgga

SEQ ID NO: 135163 - DNA, 80 bp, synthetic construct
  misc_feature 1..80: note = Artificially Synthesized Probe
  source 1..80: mol_type = other DNA
ttaaatgctagaattaaaagacacagactggcaaactggatcaagagtcaagacccatcactgtgctgtattcaggaaac

SEQ ID NO: 135164 - DNA, 80 bp, synthetic construct
  misc_feature 1..80: note = Artificially Synthesized Probe
  source 1..80: mol_type = other DNA
tggtaaagggatcaattcaacaagaagagctaactatcctaaatatacatgcacccagattcataaagcaagtccttaga

SEQ ID NO: 135165 - DNA, 80 bp, synthetic construct; identical to SEQ ID NO: 42561
  misc_feature 1..80: note = Artificially Synthesized Probe
  source 1..80: mol_type = other DNA

SEQ ID NO: 135166 - DNA, 80 bp, synthetic construct
  misc_feature 1..80: note = Artificially Synthesized Probe
  source 1..80: mol_type = other DNA
gaaatgaaggcagaattaaagatgttctttgaaaccaacgagaacaaagacacaacataccagaatctctgggacgcatt

SEQ ID NO: 135167 - DNA, 80 bp, synthetic construct
  misc_feature 1..80: note = Artificially Synthesized Probe
  source 1..80: mol_type = other DNA
gcagaactgaaggaaatagagacacaaaaaactcttcaaaaaatcaatgaatccaagagctggttttttgaaaaggccaa

SEQ ID NO: 135168 - DNA, 80 bp, synthetic construct; identical to SEQ ID NO: 42562
  misc_feature 1..80: note = Artificially Synthesized Probe
  source 1..80: mol_type = other DNA

SEQ ID NO: 135169 - DNA, 80 bp, synthetic construct; identical to SEQ ID NO: 42553
  misc_feature 1..80: note = Artificially Synthesized Probe
  source 1..80: mol_type = other DNA

SEQ ID NO: 135170 - DNA, 80 bp, synthetic construct
  misc_feature 1..80: note = Artificially Synthesized Probe
  source 1..80: mol_type = other DNA
tccctaactcattttatgaggccaacatcatcctgataccaaagcctggcagggacacaagaaaaaaaagagaattgtag

SEQ ID NO: 135171 - DNA, 80 bp, synthetic construct
  misc_feature 1..80: note = Artificially Synthesized Probe
  source 1..80: mol_type = other DNA
cacataaacagaaccaatgacaaaaaccacatgattatctcaatagatgcagaaaagacctttgacaaaattcaacaaca

SEQ ID NO: 135172 - DNA, 80 bp, synthetic construct
  misc_feature 1..80: note = Artificially Synthesized Probe
  source 1..80: mol_type = other DNA
ccactcctattcaacacagtgttggatgttctggccaggagaataaggcaggataaggaaatacagggtattcaattagg

SEQ ID NO: 135173 - DNA, 80 bp, synthetic construct
  misc_feature 1..80: note = Artificially Synthesized Probe
  source 1..80: mol_type = other DNA
cataacagacaaacagagagccaaatcatgagtgaactcccattcacaattgcttcaaagagaataaaatacctaggaat

SEQ ID NO: 135174 - DNA, 80 bp, synthetic construct; identical to SEQ ID NO: 42563
  misc_feature 1..80: note = Artificially Synthesized Probe
  source 1..80: mol_type = other DNA

SEQ ID NO: 135175 - DNA, 80 bp, synthetic construct; identical to SEQ ID NO: 42593
  misc_feature 1..80: note = Artificially Synthesized Probe
  source 1..80: mol_type = other DNA

SEQ ID NO: 135176 - DNA, 80 bp, synthetic construct
  misc_feature 1..80: note = Artificially Synthesized Probe
  source 1..80: mol_type = other DNA
tggcaaattagtttaatgtgttatctagaaaacactgtcactttcagagcatttcattgtgtatcgcattttattcctat

SEQ ID NO: 135177 - DNA, 80 bp, synthetic construct
  misc_feature 1..80: note = Artificially Synthesized Probe
  source 1..80: mol_type = other DNA
tgctcacatgaaggccaagggagcagctgttagactggacttccacacaatgtcgagtacagacctgctgaatgcactga

SEQ ID NO: 135178 - DNA, 80 bp, synthetic construct; identical to SEQ ID NO: 42604
  misc_feature 1..80: note = Artificially Synthesized Probe
  source 1..80: mol_type = other DNA

SEQ ID NO: 135179 - DNA, 80 bp, synthetic construct
  misc_feature 1..80: note = Artificially Synthesized Probe
  source 1..80: mol_type = other DNA
tataactattttcttgctgaaaaattaatttttatcatcattattttaacagacttgaaaatgagatttaatttcgatag

SEQ ID NO: 135180 - DNA, 80 bp, synthetic construct
  misc_feature 1..80: note = Artificially Synthesized Probe
  source 1..80: mol_type = other DNA
taactgcttagtcctagtctaacaccaatttgttttctttctctataagttattctctctagatatttcatataaacgga

SEQ ID NO: 135181 - DNA, 80 bp, synthetic construct
  misc_feature 1..80: note = Artificially Synthesized Probe
  source 1..80: mol_type = other DNA
tgttcatttgtcagttcattggccttttgattgtttccaattgtggctactaagaatattgctatacatgtctttgcata

SEQ ID NO: 135182 - DNA, 80 bp, synthetic construct; identical to SEQ ID NO: 42594
  misc_feature 1..80: note = Artificially Synthesized Probe
  source 1..80: mol_type = other DNA

SEQ ID NO: 135183 - DNA, 80 bp, synthetic construct; identical to SEQ ID NO: 42605
  misc_feature 1..80: note = Artificially Synthesized Probe
  source 1..80: mol_type = other DNA

SEQ ID NO: 135184 - DNA, 80 bp, synthetic construct
  misc_feature 1..80: note = Artificially Synthesized Probe
  source 1..80: mol_type = other DNA
ctacttatatattatgggtcaaatcagatatataatttttaaatattttgtcccattctgggtgcactaactttttactt

SEQ ID NO: 135185 - DNA, 80 bp, synthetic construct
  misc_feature 1..80: note = Artificially Synthesized Probe
  source 1..80: mol_type = other DNA
gtttttgtgtaaggagggtatcatctaaaggaatgctttaaaaatactttatcccaaagaaaatagaaggataatgaatg

SEQ ID NO: 135186 - DNA, 80 bp, synthetic construct
  misc_feature 1..80: note = Artificially Synthesized Probe
  source 1..80: mol_type = other DNA
gcaaataatgagtaaggacataaaacacttgaagaatacaattaacaaatggattcttacaatctaaaatgatatacaaa

SEQ ID NO: 135187 - DNA, 80 bp, synthetic construct
  misc_feature 1..80: note = Artificially Synthesized Probe
  source 1..80: mol_type = other DNA
atcatgaagactatatgatccagccatagtggaaataacggaggttaaaaatactattactaaaatatccttaatattgg

SEQ ID NO: 135188 - DNA, 80 bp, synthetic construct; identical to SEQ ID NO: 42606
  misc_feature 1..80: note = Artificially Synthesized Probe
  source 1..80: mol_type = other DNA

SEQ ID NO: 135189 - DNA, 80 bp, synthetic construct
  misc_feature 1..80: note = Artificially Synthesized Probe
  source 1..80: mol_type = other DNA
taaaaggttcagaaaaagggagttattctaggcagattgtgatagcctataccacgacctgaacagtaggtaaattggta

SEQ ID NO: 135190 - DNA, 80 bp, synthetic construct
  misc_feature 1..80: note = Artificially Synthesized Probe
  source 1..80: mol_type = other DNA
aatagagaaaattctagaggctccatcacagtttggccaataaaagcctctcttagaggtaacacttagagggaagccac

SEQ ID NO: 135191 - DNA, 80 bp, synthetic construct; identical to SEQ ID NO: 42607
  misc_feature 1..80: note = Artificially Synthesized Probe
  source 1..80: mol_type = other DNA

SEQ ID NO: 135192 - DNA, 80 bp, synthetic construct
  misc_feature 1..80: note = Artificially Synthesized Probe
  source 1..80: mol_type = other DNA
gaaggttgttatatctatatagtttatttgaaactatgtctctttatttaaaaatatgagacagattaaggttgagtaca

SEQ ID NO: 135193 - DNA, 80 bp, synthetic construct
  misc_feature 1..80: note = Artificially Synthesized Probe
  source 1..80: mol_type = other DNA
cttacagatgataattctcacatcgcattttcacaatctttcttacagcacttaaaatggctcatgatgttgagcaggta

SEQ ID NO: 135194 - DNA, 80 bp, synthetic construct
  misc_feature 1..80: note = Artificially Synthesized Probe
  source 1..80: mol_type = other DNA
atatggacccacaaaaacttaaaattaaagaattaaaaacaattaaaatgccttatattttctctgcttgaaaaaaatta

SEQ ID NO: 135195 - DNA, 80 bp, synthetic construct
  misc_feature 1..80: note = Artificially Synthesized Probe
  source 1..80: mol_type = other DNA
ttaaaagcctttcatagacttgatacatacaggccagttaacttactttcagtgttggtatctttatttttatccttcag

SEQ ID NO: 135196 - DNA, 80 bp, synthetic construct
  misc_feature 1..80: note = Artificially Synthesized Probe
  source 1..80: mol_type = other DNA
ttggatgtgattgggtttctgctggcctgtgtggcaactgtgatatttgtcgtcacaaagttttgtctgttttgtttctg

SEQ ID NO: 135197 - DNA, 80 bp, synthetic construct; identical to SEQ ID NO: 42608
  misc_feature 1..80: note = Artificially Synthesized Probe
  source 1..80: mol_type = other DNA

SEQ ID NO: 135198 - DNA, 80 bp, synthetic construct
  misc_feature 1..80: note = Artificially Synthesized Probe
  source 1..80: mol_type = other DNA
cttgaagaaccaaagataaaaggattagcttaaggagttgtgtaaactggactgttagaaaattggttttatgggtacag

SEQ ID NO: 135199 - DNA, 80 bp, synthetic construct
  misc_feature 1..80: note = Artificially Synthesized Probe
  source 1..80: mol_type = other DNA
ttctcccaccactttgcctttcttataaataaacatggacaaaatatataatacataaaaatatattattcatatacatg

SEQ ID NO: 135200 - DNA, 80 bp, synthetic construct
  misc_feature 1..80: note = Artificially Synthesized Probe
  source 1..80: mol_type = other DNA
catcttcagcttccattctttttgatcccaatgacgcattcactcttaaactcgaagtttatcctacatctttaactaaa

SEQ ID NO: 135201 - DNA, 80 bp, synthetic construct
  misc_feature 1..80: note = Artificially Synthesized Probe
  source 1..80: mol_type = other DNA
atggggaaagctgacatatggcttatgcgaaactcctggagttttcaatttcctcatccattcttaccaaacattgattt

SEQ ID NO: 135202 - DNA, 80 bp, synthetic construct; identical to SEQ ID NO: 42595
  misc_feature 1..80: note = Artificially Synthesized Probe
  source 1..80: mol_type = other DNA

SEQ ID NO: 135203 - DNA, 80 bp, synthetic construct
  misc_feature 1..80: note = Artificially Synthesized Probe
  source 1..80: mol_type = other DNA
agacagtttccgtctgcacataccttacattctactttgaaatatagaaaagtaactaatgaaaatgttttaaaaaacta

SEQ ID NO: 135204 - DNA, 80 bp, synthetic construct
  misc_feature 1..80: note = Artificially Synthesized Probe
  source 1..80: mol_type = other DNA
aggacagttctcaagtcctcaggttttgtttttagggaatgattaagaatctagatcatactaagaggtaaattagagcc

SEQ ID NO: 135205 - DNA, 80 bp, synthetic construct; identical to SEQ ID NO: 42596
  misc_feature 1..80: note = Artificially Synthesized Probe
  source 1..80: mol_type = other DNA

SEQ ID NO: 135206 - DNA, 80 bp, synthetic construct
  misc_feature 1..80: note = Artificially Synthesized Probe
  source 1..80: mol_type = other DNA
tttgttattattaccaatactactaactacttaacatgtgcaagtcacttgagatatcattcctcatttaagagaaccag

SEQ ID NO: 135207 - DNA, 80 bp, synthetic construct
  misc_feature 1..80: note = Artificially Synthesized Probe
  source 1..80: mol_type = other DNA
tagtattcgagcataaaacacttcctcaacaatacaaatgtgtgccttaaatatgtgcagacaaacccagggttcacttg

SEQ ID NO: 135208 - DNA, 80 bp, synthetic construct
  misc_feature 1..80: note = Artificially Synthesized Probe
  source 1..80: mol_type = other DNA
gtgcctgacagagaagcacagagatagtgaacaatgcatgtataataaagaacaaataatttctaccacttgtatctgaa

SEQ ID NO: 135209 - DNA, 80 bp, synthetic construct; identical to SEQ ID NO: 42597
  misc_feature 1..80: note = Artificially Synthesized Probe
  source 1..80: mol_type = other DNA

SEQ ID NO: 135210 - DNA, 80 bp, synthetic construct
  misc_feature 1..80: note = Artificially Synthesized Probe
  source 1..80: mol_type = other DNA
agtaggaggtgtaaaaggacaagaaaaaaggttgactagtagtacaatagtggtaattactaatactaggtcttgttatt

SEQ ID NO: 135211 - DNA, 80 bp, synthetic construct
  misc_feature 1..80: note = Artificially Synthesized Probe
  source 1..80: mol_type = other DNA
tgaaaaaactacaagagtcaagatttgacatcatttttgcagatgctttttttccttgtggtgagctgctggctgcgcta

SEQ ID NO: 135212 - DNA, 80 bp, synthetic construct
  misc_feature 1..80: note = Artificially Synthesized Probe
  source 1..80: mol_type = other DNA
cacttgacaaactgcatcaagtgttttaaaaatgcgtattgttattaattttataatatattcacgtgaaatcataaaaa

SEQ ID NO: 135213 - DNA, 80 bp, synthetic construct
  misc_feature 1..80: note = Artificially Synthesized Probe
  source 1..80: mol_type = other DNA
cagccatagtacagataatatgagttagaaaatgataaatataacaagatggaagtttttgcaggataaaatgtatatac

SEQ ID NO: 135214 - DNA, 80 bp, synthetic construct
  misc_feature 1..80: note = Artificially Synthesized Probe
  source 1..80: mol_type = other DNA
aatttcttacattaattttgtattatttttataatattatcactaaaggagcaacaacccgtcaatatcagtgatgaatc

SEQ ID NO: 135215 - DNA, 80 bp, synthetic construct; identical to SEQ ID NO: 42598
  misc_feature 1..80: note = Artificially Synthesized Probe
  source 1..80: mol_type = other DNA

SEQ ID NO: 135216 - DNA, 80 bp, synthetic construct
  misc_feature 1..80: note = Artificially Synthesized Probe
  source 1..80: mol_type = other DNA
gtgtaatgtggtgtgcgtgagctactcaaaagagagacaagatccccctgcagaaaggcctggtggcctcttctattctg

SEQ ID NO: 135217 - DNA, 80 bp, synthetic construct
  misc_feature 1..80: note = Artificially Synthesized Probe
  source 1..80: mol_type = other DNA
actataaactctacaattctgtatgataaatgagactctcaagactgagtcataaaaattccaaatcacaatactagact

SEQ ID NO: 135218 - DNA, 80 bp, synthetic construct; identical to SEQ ID NO: 42599
  misc_feature 1..80: note = Artificially Synthesized Probe
  source 1..80: mol_type = other DNA

SEQ ID NO: 135219 - DNA, 80 bp, synthetic construct
  misc_feature 1..80: note = Artificially Synthesized Probe
  source 1..80: mol_type = other DNA
ttttctccattacacacatgcagacacatacctacataaacacacatatttacacaaatatccttaacagaggccaacta

SEQ ID NO: 135220 - DNA, 80 bp, synthetic construct
  misc_feature 1..80: note = Artificially Synthesized Probe
  source 1..80: mol_type = other DNA
attaaacaattttttttcacaggaaatggaggaatttgtacagagctctggtgaaaatggtgttgtggtgttttctctgg

SEQ ID NO: 135221 - DNA, 80 bp, synthetic construct
  misc_feature 1..80: note = Artificially Synthesized Probe
  source 1..80: mol_type = other DNA
gactgaactctttacagccaaatacagtcttaaatatcttgtgtagcttccaccgacacaagtcatagttgtgcctcaga

SEQ ID NO: 135222 - DNA, 80 bp, synthetic construct
  misc_feature 1..80: note = Artificially Synthesized Probe
  source 1..80: mol_type = other DNA
atgatctatgtgctttattttgacttttggttccaaatgtgtgatatgaagaagtgggatcagttttacagtgaagtttt

SEQ ID NO: 135223 - DNA, 80 bp, synthetic construct; identical to SEQ ID NO: 42600
  misc_feature 1..80: note = Artificially Synthesized Probe
  source 1..80: mol_type = other DNA

SEQ ID NO: 135224 - DNA, 80 bp, synthetic construct
  misc_feature 1..80: note = Artificially Synthesized Probe
  source 1..80: mol_type = other DNA
cttggtgaatgtttacaattaaggaatgtactatttctgtttgtactttaagtcaaatgcttatgtgaaatatgtgacaa

SEQ ID NO: 135225 - DNA, 80 bp, synthetic construct
  misc_feature 1..80: note = Artificially Synthesized Probe
  source 1..80: mol_type = other DNA
atataggaaggagtcaaacagaaggaagccaggcaggggaacaggtttagatgtcccctccatagaacatagtaggaatg

SEQ ID NO: 135226 - DNA, 80 bp, synthetic construct
  misc_feature 1..80: note = Artificially Synthesized Probe
  source 1..80: mol_type = other DNA
ttattgttcactttatgaggattgctttggagtttcaaaattagtaacaaaataagaatgtcttggctatagcagaacat

SEQ ID NO: 135227 - DNA, 80 bp, synthetic construct; identical to SEQ ID NO: 42601
  misc_feature 1..80: note = Artificially Synthesized Probe
  source 1..80: mol_type = other DNA

SEQ ID NO: 135228 - DNA, 80 bp, synthetic construct
  misc_feature 1..80: note = Artificially Synthesized Probe
  source 1..80: mol_type = other DNA
cttctcatattattcaaaaacaaatgaatatattacaattaaatttggagatgaaaactgatataaaatacataaaacaa

SEQ ID NO: 135229 - DNA, 80 bp, synthetic construct
  misc_feature 1..80: note = Artificially Synthesized Probe
  source 1..80: mol_type = other DNA
ggttttttacataggtaaacttgtgtcatggggttttgttgtactaattgtttcatcacccaggtattaagactaatatt

SEQ ID NO: 135230 - DNA, 80 bp, synthetic construct
  misc_feature 1..80: note = Artificially Synthesized Probe
  source 1..80: mol_type = other DNA
ctgttagtttcctaaggctaatggcctccagctccatccttatccctgcaaaatacatatttttgtttttttatggctgc

SEQ ID NO: 135231 - DNA, 80 bp, synthetic construct
  misc_feature 1..80: note = Artificially Synthesized Probe
  source 1..80: mol_type = other DNA
ctttgcttatatacccagtaatgggattgctgggtttcatggtatttttgcctctaggtttctgaggaatggccacactg

SEQ ID NO: 135232 - DNA, 80 bp, synthetic construct; identical to SEQ ID NO: 42602
  misc_feature 1..80: note = Artificially Synthesized Probe
  source 1..80: mol_type = other DNA

SEQ ID NO: 135233 - DNA, 80 bp, synthetic construct
  misc_feature 1..80: note = Artificially Synthesized Probe
  source 1..80: mol_type = other DNA
aacattatagaaaagcttaaattataaggtctgttaaaaccctgtggccatcactcatacagaacaccccaggaaatcat

SEQ ID NO: 135234 - DNA, 80 bp, synthetic construct
  misc_feature 1..80: note = Artificially Synthesized Probe
  source 1..80: mol_type = other DNA
atttactaacatcccttgatctcattcctaccctttttacagttctaacattctataatttttgagttccactcatggaa

SEQ ID NO: 135235 - DNA, 80 bp, synthetic construct
  misc_feature 1..80: note = Artificially Synthesized Probe
  source 1..80: mol_type = other DNA
actgcacattagaatgttaatagtttatcttgaaacatgcttattgaatatttattataggaaaacaaaaagaacttctt

SEQ ID NO: 135236 - DNA, 80 bp, synthetic construct; identical to SEQ ID NO: 42603
  misc_feature 1..80: note = Artificially Synthesized Probe
  source 1..80: mol_type = other DNA

SEQ ID NO: 135237 - DNA, 80 bp, synthetic construct
  misc_feature 1..80: note = Artificially Synthesized Probe
  source 1..80: mol_type = other DNA
acaccccacatatcacactctgtgacagcacctaaaataaaactttatttcatgcccatctctttgctgtcctcttttgt

SEQ ID NO: 135238 - DNA, 80 bp, synthetic construct
  misc_feature 1..80: note = Artificially Synthesized Probe
  source 1..80: mol_type = other DNA
ttcaaggttttaattaattcccatactgataaaaataactccatgaattctgtaaaccattgcataaatgctatagtgta

SEQ ID NO: 135239 - DNA, 80 bp, synthetic construct
  misc_feature 1..80: note = Artificially Synthesized Probe
  source 1..80: mol_type = other DNA
cacaccgcacagggactgccggccaacaccgcacagagacctcagcagcgtggagcacaccgcacagggactgccggcca

SEQ ID NO: 135240 - DNA, 80 bp, synthetic construct
  misc_feature 1..80: note = Artificially Synthesized Probe
  source 1..80: mol_type = other DNA
taccttggagtagtggactagctgcagaatgtcacggacccacttcctttaaaacaacagaatgttgctatcagtttgtc

SEQ ID NO: 135241 - DNA, 80 bp, synthetic construct
  misc_feature 1..80: note = Artificially Synthesized Probe
  source 1..80: mol_type = other DNA
ggccaacaccgcacagagacctcagcagcgtggggcacaccgcacagggactgccggccaacaccgcacagagacctcag

SEQ ID NO: 135242 - DNA, 80 bp, synthetic construct
  misc_feature 1..80: note = Artificially Synthesized Probe
  source 1..80: mol_type = other DNA
ctcagcagcgtggagcacaccgcacagggactgccggccaacaccgcacagagacctcagcagcgtggggcacaccgcac

SEQ ID NO: 135243 - DNA, 80 bp, synthetic construct
  misc_feature 1..80: note = Artificially Synthesized Probe
  source 1..80: mol_type = other DNA
cgcacagggactgccggccaacaccgcacagagacctcagcagcgtggagcacaccgcacagggactgccggccaacacc

SEQ ID NO: 135244 - DNA, 80 bp, synthetic construct; identical to SEQ ID NO: 29828
  misc_feature 1..80: note = Artificially Synthesized Probe
  source 1..80: mol_type = other DNA

SEQ ID NO: 135245 - DNA, 80 bp, synthetic construct; identical to SEQ ID NO: 29829
  misc_feature 1..80: note = Artificially Synthesized Probe
  source 1..80: mol_type = other DNA

SEQ ID NO: 135246 - DNA, 80 bp, synthetic construct
  misc_feature 1..80: note = Artificially Synthesized Probe
  source 1..80: mol_type = other DNA
acctcctgcagcctcactccccacaacccaccccacccagcagggagctggctgagccaggcagggctgactcgtcagga

SEQ ID NO: 135247 - DNA, 80 bp, synthetic construct
  misc_feature 1..80: note = Artificially Synthesized Probe
  source 1..80: mol_type = other DNA
tcagcaggaaaggcaggagggtgacttctgaagaagaacgctgccctagccgcacatgagatttgtcgggaacacagctg

SEQ ID NO: 135248 - DNA, 80 bp, synthetic construct
  misc_feature 1..80: note = Artificially Synthesized Probe
  source 1..80: mol_type = other DNA
gccccccagggcagccggagtatcctcgtgccgcggtggtggccccagcggagcacaggcagaggctggcgtggacgtgg

SEQ ID NO: 135249 - DNA, 80 bp, synthetic construct; identical to SEQ ID NO: 29830
  misc_feature 1..80: note = Artificially Synthesized Probe
  source 1..80: mol_type = other DNA

SEQ ID NO: 135250 - DNA, 80 bp, synthetic construct
  misc_feature 1..80: note = Artificially Synthesized Probe
  source 1..80: mol_type = other DNA
tgaagcttttagggactttcgaaggtcttatccagaaactagagtaacaggttgggggtcggggcagccaggccaagacc

SEQ ID NO: 135251 - DNA, 80 bp, synthetic construct
  misc_feature 1..80: note = Artificially Synthesized Probe
  source 1..80: mol_type = other DNA
actcgtgtgccctcaccacccacgtggcccgcggagagccaggtcgccgtaaaccacagatgcctgttcctgctcaactc

SEQ ID NO: 135252 - DNA, 80 bp, synthetic construct
  misc_feature 1..80: note = Artificially Synthesized Probe
  source 1..80: mol_type = other DNA
ccctggcctgcagggtgggccagccctcccggtcgctgtcatccacttgacgttctcaggccatggctgaagagggcaag

SEQ ID NO: 135253 - DNA, 80 bp, synthetic construct
  misc_feature 1..80: note = Artificially Synthesized Probe
  source 1..80: mol_type = other DNA
cgctcctcctccctcactccaaggctggggcacgctcctccctcctccctccagggctggggcgctcctcctccctcagt

SEQ ID NO: 135254 - DNA, 80 bp, synthetic construct; identical to SEQ ID NO: 29831
  misc_feature 1..80: note = Artificially Synthesized Probe
  source 1..80: mol_type = other DNA

SEQ ID NO: 135255 - DNA, 80 bp, synthetic construct
  misc_feature 1..80: note = Artificially Synthesized Probe
  source 1..80: mol_type = other DNA
agtgtctgtccaagtttcttcttatagggagactggtcactggctcagggtcccaccctaccggcctcattttaacctgg

SEQ ID NO: 135256 - DNA, 80 bp, synthetic construct
  misc_feature 1..80: note = Artificially Synthesized Probe
  source 1..80: mol_type = other DNA
taacaagattaactggtaacatagatttcagcaccgcacagtaataaaagttacctgcgcaaatgctgtacactgctgtc

SEQ ID NO: 135257 - DNA, 80 bp, synthetic construct
  misc_feature 1..80: note = Artificially Synthesized Probe
  source 1..80: mol_type = other DNA
tcttcccccgccacacccagcccccccaaccgagatagagtcttgctctgtcacccaggctggagtgcaatggcgcgatc

SEQ ID NO: 135258 - DNA, 80 bp, synthetic construct; identical to SEQ ID NO: 29832
  misc_feature 1..80: note = Artificially Synthesized Probe
  source 1..80: mol_type = other DNA

SEQ ID NO: 135259 - DNA, 80 bp, synthetic construct
  misc_feature 1..80: note = Artificially Synthesized Probe
  source 1..80: mol_type = other DNA
tgcacagccctccctccctgagtcctccctcagaaaggagaccccccctctgcctccactccccctgcagctgttttctg

SEQ ID NO: 135260 - DNA, 80 bp, synthetic construct
  misc_feature 1..80: note = Artificially Synthesized Probe
  source 1..80: mol_type = other DNA
caacacagtggctctgcagccccgagcccagatgtccagcaggggccaaagcccttcctcctccctggcaaaggatccct

SEQ ID NO: 135261 - DNA, 80 bp, synthetic construct; identical to SEQ ID NO: 29833
  misc_feature 1..80: note = Artificially Synthesized Probe
  source 1..80: mol_type = other DNA

SEQ ID NO: 135262 - DNA, 80 bp, synthetic construct
  misc_feature 1..80: note = Artificially Synthesized Probe
  source 1..80: mol_type = other DNA
tgctccaggccactgagaggctgtggccgggtcctctcctgtgacctcactggccacatggatgagctccgatgataact

SEQ ID NO: 135263 - DNA, 80 bp, synthetic construct
  misc_feature 1..80: note = Artificially Synthesized Probe
  source 1..80: mol_type = other DNA
gcaggtgtcagcctgaaccatgtcagggccctggacagactcactgaggacaggcaccgaccccccaacccgcaggcctg

SEQ ID NO: 135264 - DNA, 80 bp, synthetic construct
  misc_feature 1..80: note = Artificially Synthesized Probe
  source 1..80: mol_type = other DNA
acacctggcagagatccagaaactcctcatgaaaatcaaagacgcaaagaagttgggggacaggaacggaggcgcctttt

SEQ ID NO: 135265 - DNA, 80 bp, synthetic construct
  misc_feature 1..80: note = Artificially Synthesized Probe
  source 1..80: mol_type = other DNA
cctacctcagccaagtcacctgtgctgaagcccgggaagctgcctggagaggggacgttcagggagcgtgtgggtgcccc

SEQ ID NO: 135266 - DNA, 80 bp, synthetic construct; identical to SEQ ID NO: 29834
  misc_feature 1..80: note = Artificially Synthesized Probe
  source 1..80: mol_type = other DNA

SEQ ID NO: 135267 - DNA, 80 bp, synthetic construct
  misc_feature 1..80: note = Artificially Synthesized Probe
  source 1..80: mol_type = other DNA
cgcggtcccccggggtcagggacacgcgaggacaagctacagactgctcggaactcaggacagggcgggggagccgccga

SEQ ID NO: 135268 - DNA, 80 bp, synthetic construct
  misc_feature 1..80: note = Artificially Synthesized Probe
  source 1..80: mol_type = other DNA
ttccattcaaataacattctcatgtaaatactcaaacatacagattgaggcttccagaaattaatccacttgaggcgtcc

SEQ ID NO: 135269 - DNA, 80 bp, synthetic construct
  misc_feature 1..80: note = Artificially Synthesized Probe
  source 1..80: mol_type = other DNA
ctagctaggggacgcaggcggcccgagcccgcgctgggaagcggcgagcgcccggcagaggcaggttccgagaaggcgac

SEQ ID NO: 135270 - DNA, 80 bp, synthetic construct
  misc_feature 1..80: note = Artificially Synthesized Probe
  source 1..80: mol_type = other DNA
tgccacgcgctggggccgccgccaatgctgactcacggtccgcggccgccccgcgccgccgccggggattcaaacccggc

SEQ ID NO: 135271 - DNA, 80 bp, synthetic construct
  misc_feature 1..80: note = Artificially Synthesized Probe
  source 1..80: mol_type = other DNA
gggcgcgggcagcgggggccagaggtcttcaggcagaaagccccagagctgccccgctgcccggctcctcctgccctgcc

SEQ ID NO: 135272 - DNA, 80 bp, synthetic construct; identical to SEQ ID NO: 29835
  misc_feature 1..80: note = Artificially Synthesized Probe
  source 1..80: mol_type = other DNA

SEQ ID NO: 135273 - DNA, 80 bp, synthetic construct
  misc_feature 1..80: note = Artificially Synthesized Probe
  source 1..80: mol_type = other DNA
acacctacaacctgaaggaaactgtactattaacacaaggaaaaaacgacccagtctacacaccagctttgtccaaaacc

SEQ ID NO: 135274 - DNA, 80 bp, synthetic construct
  misc_feature 1..80: note = Artificially Synthesized Probe
  source 1..80: mol_type = other DNA
gcgacatctccaaggagctacaaagcaccattgcctaggacagctctgagtaatcagaaaacagcttttttttttttttt

SEQ ID NO: 135275 - DNA, 80 bp, synthetic construct
  misc_feature 1..80: note = Artificially Synthesized Probe
  source 1..80: mol_type = other DNA
ggatgtaactttacagcgatgtctcagacatggacagaggaaaaaagtgaggctggcactgggtggcaaagctcacaatt

SEQ ID NO: 135276 - DNA, 80 bp, synthetic construct
  misc_feature 1..80: note = Artificially Synthesized Probe
  source 1..80: mol_type = other DNA
agtggcacgatctcagctcactacaacctccgcctttgcggtccaagcaattctcgtgcctcaaccacctgagtagctgg

SEQ ID NO: 135277 - DNA, 80 bp, synthetic construct
  misc_feature 1..80: note = Artificially Synthesized Probe
  source 1..80: mol_type = other DNA
cggctcaggaaatatttaagtaaatgaaagagtgtgcttcaagatcgcgagtgacatactaaaacaggtcaaaaacgtac

SEQ ID NO: 135278 - DNA, 80 bp, synthetic construct; identical to SEQ ID NO: 29836
  misc_feature 1..80: note = Artificially Synthesized Probe
  source 1..80: mol_type = other DNA

SEQ ID NO: 135279 - DNA, 80 bp, synthetic construct
  misc_feature 1..80: note = Artificially Synthesized Probe
  source 1..80: mol_type = other DNA
aggagtttgagaccagcctggccaacatggcaaaaccccgtctctattaaaaatacaaaaattagccgggcatgatggca

SEQ ID NO: 135280 - DNA, 80 bp, synthetic construct
  misc_feature 1..80: note = Artificially Synthesized Probe
  source 1..80: mol_type = other DNA
ctttagccactgtgtagacttcatccctgacctctgagtttctgaaggggatgtgtgaatttgagggtgtgatttagtaa

SEQ ID NO: 135281 - DNA, 80 bp, synthetic construct
  misc_feature 1..80: note = Artificially Synthesized Probe
  source 1..80: mol_type = other DNA
tctgaaggggatgtgtgaatttgagggtgtgatttagtaagatccagggccctggattatgcaacccatgtatgatagtg

SEQ ID NO: 135282 - DNA, 80 bp, synthetic construct; identical to SEQ ID NO: 29837
  misc_feature 1..80: note = Artificially Synthesized Probe
  source 1..80: mol_type = other DNA

SEQ ID NO: 135283 - DNA, 80 bp, synthetic construct
  misc_feature 1..80: note = Artificially Synthesized Probe
  source 1..80: mol_type = other DNA
catgtgggcttgtttctgcctgagagaaagcttaacacagcacacagcactcccacccatggagtattcacagttttaaa

SEQ ID NO: 135284 - DNA, 80 bp, synthetic construct
  misc_feature 1..80: note = Artificially Synthesized Probe
  source 1..80: mol_type = other DNA
tgaggagcccttccctgggcagggcagccccatactcccagccagtgaggacgaaacaaacgcaaacactgcttgcgcct

SEQ ID NO: 135285 - DNA, 80 bp, synthetic construct
  misc_feature 1..80: note = Artificially Synthesized Probe
  source 1..80: mol_type = other DNA
actacaggtgcccgctctcacgccaggccaatttttgtatttttactaagacggggttgcaccatgttggccaggctggt

SEQ ID NO: 135286 - DNA, 80 bp, synthetic construct
  misc_feature 1..80: note = Artificially Synthesized Probe
  source 1..80: mol_type = other DNA
gagggggagatgcacacggccacaaaagttcccagtatttgtgaaagagaccctttaaaaaatgcaggtcgggcacaatg

SEQ ID NO: 135287 - DNA, 80 bp, synthetic construct
  misc_feature 1..80: note = Artificially Synthesized Probe
  source 1..80: mol_type = other DNA
caggaggctgaggcaggagaatcacttgaacccaggaggtggaggttgcagtgagccaagattgtgccactgccctccag

SEQ ID NO: 135288 - DNA, 80 bp, synthetic construct; identical to SEQ ID NO: 42105
  misc_feature 1..80: note = Artificially Synthesized Probe
  source 1..80: mol_type = other DNA

SEQ ID NO: 135289 - DNA, 80 bp, synthetic construct
  misc_feature 1..80: note = Artificially Synthesized Probe
  source 1..80: mol_type = other DNA
aaatgtaaaggcctgggctcaaccccaagcagatgcagggatgggacggcccagcagcaacacaggccaagagctgtgcc

SEQ ID NO: 135290 - DNA, 80 bp, synthetic construct
  misc_feature 1..80: note = Artificially Synthesized Probe
  source 1..80: mol_type = other DNA
taagtggccgctgggaagagtctctctctcctcggcctccttggccggcatcgtctaggagttgctgggggcttgcagct

SEQ ID NO: 135291 - DNA, 80 bp, synthetic construct
  misc_feature 1..80: note = Artificially Synthesized Probe
  source 1..80: mol_type = other DNA
ggactgcagcgagggcccccaccacgtggctccagcagccctgtcctcctgatcccatgcccagctcccccgccacaccc

SEQ ID NO: 135292 - DNA, 80 bp, synthetic construct; identical to SEQ ID NO: 29839
  misc_feature 1..80: note = Artificially Synthesized Probe
  source 1..80: mol_type = other DNA

SEQ ID NO: 135293 - DNA, 80 bp, synthetic construct
  misc_feature 1..80: note = Artificially Synthesized Probe
  source 1..80: mol_type = other DNA
ggctgaaagggaccaaggacacacacagcccagctcctggcactgtcttgcccccagctctgcctgctgcccactccggg

SEQ ID NO: 135294 - DNA, 80 bp, synthetic construct
  misc_feature 1..80: note = Artificially Synthesized Probe
  source 1..80: mol_type = other DNA
cggatcccctctgctgcgttttttgttagtatcaaactgtctttcagagggttaagggagaaaacaaaacccatgatgct

SEQ ID NO: 135295 - DNA, 80 bp, synthetic construct
  misc_feature 1..80: note = Artificially Synthesized Probe
  source 1..80: mol_type = other DNA
caagccttcactggactccccaccccatcactgtcccccaccctcagtgccctcactggcccacaacccctactttcaat

SEQ ID NO: 135296 - DNA, 80 bp, synthetic construct
  misc_feature 1..80: note = Artificially Synthesized Probe
  source 1..80: mol_type = other DNA
tttatttttagtagagtcggggtctcactatgttgcccaggctggtcttcaacttctgggctcaagtgatcctcctgcct

SEQ ID NO: 135297 - DNA, 80 bp, synthetic construct; identical to SEQ ID NO: 29840
  misc_feature 1..80: note = Artificially Synthesized Probe
  source 1..80: mol_type = other DNA

SEQ ID NO: 135298 - DNA, 80 bp, synthetic construct
  misc_feature 1..80: note = Artificially Synthesized Probe
  source 1..80: mol_type = other DNA
gggcacgggcggggggcgcgggcagcgcagtgggggaggagctgccggagccggcgctggacgccaggctggacgccacg

SEQ ID NO: 135299 - DNA, 80 bp, synthetic construct
  misc_feature 1..80: note = Artificially Synthesized Probe
  source 1..80: mol_type = other DNA
cgccctggcgaggcccagggagagcttcccagacccggagggactctgaccgcaccgaggagaaacaccaggacggcagg

SEQ ID NO: 135300 - DNA, 80 bp, synthetic construct
  misc_feature 1..80: note = Artificially Synthesized Probe
  source 1..80: mol_type = other DNA
gggcaagccgtgcagcctgcctgcccttctccccacacctcctgggtgcccccgccccggctctcgcccaggactggctc

SEQ ID NO: 135301 - DNA, 80 bp, synthetic construct; identical to SEQ ID NO: 29841
  misc_feature 1..80: note = Artificially Synthesized Probe
  source 1..80: mol_type = other DNA

SEQ ID NO: 135302 - DNA, 80 bp, synthetic construct
  misc_feature 1..80: note = Artificially Synthesized Probe
  source 1..80: mol_type = other DNA
accagcctggccaacatggcgaaaccctgtctctactaaaaatacaaaaaaaattagccaaggccgggcgcggtggctca

SEQ ID NO: 135303 - DNA, 80 bp, synthetic construct
  misc_feature 1..80: note = Artificially Synthesized Probe
  source 1..80: mol_type = other DNA
gcacacacaggctcaggaaaactagctccttccatcaagttaaaaacatctcaatccataatcactctgcttataaatac

SEQ ID NO: 135304 - DNA, 80 bp, synthetic construct
  misc_feature 1..80: note = Artificially Synthesized Probe
  source 1..80: mol_type = other DNA
aggctgaggtaggagaattgcttgaatccgggaggcagtggttgtggtgagccgagatcgcaccaatgcactgcagccca

SEQ ID NO: 135305 - DNA, 80 bp, synthetic construct; identical to SEQ ID NO: 29842
  misc_feature 1..80: note = Artificially Synthesized Probe
  source 1..80: mol_type = other DNA

SEQ ID NO: 135306 - DNA, 80 bp, synthetic construct
  misc_feature 1..80: note = Artificially Synthesized Probe
  source 1..80: mol_type = other DNA
gagaaggggcctgccccctcgtccataatccacttcctctccctggcccagagaccacttttcctcaagccatgaaaaaa

SEQ ID NO: 135307 - DNA, 80 bp, synthetic construct
  misc_feature 1..80: note = Artificially Synthesized Probe
  source 1..80: mol_type = other DNA
ccggggaccctcccagccatgcaacaccggggacactcccagccatgcaacaccggggacactcccagccatgcatggtg

SEQ ID NO: 135308 - DNA, 80 bp, synthetic construct
  misc_feature 1..80: note = Artificially Synthesized Probe
  source 1..80: mol_type = other DNA
gcttcagaccctcagtgtggccccaggaaggctgagaaggacctcttgacagacgttctggtgaccagacatccaggagc

SEQ ID NO: 135309 - DNA, 80 bp, synthetic construct; identical to SEQ ID NO: 29843
  misc_feature 1..80: note = Artificially Synthesized Probe
  source 1..80: mol_type = other DNA

SEQ ID NO: 135310 - DNA, 80 bp, synthetic construct
  misc_feature 1..80: note = Artificially Synthesized Probe
  source 1..80: mol_type = other DNA
agctgcccctgctcagtcaggctgaggttccccatgtcctgacccaccagtagcctagaggccaccgcccgggtcacagt

SEQ ID NO: 135311 - DNA, 80 bp, synthetic construct
  misc_feature 1..80: note = Artificially Synthesized Probe
  source 1..80: mol_type = other DNA
gtggacgacgctggggtttgcagagcaggcctgccccgccctgggtcggacagggagtctgtgccccgcacctgtgtctg

SEQ ID NO: 135312 - DNA, 80 bp, synthetic construct
  misc_feature 1..80: note = Artificially Synthesized Probe
  source 1..80: mol_type = other DNA
caccctcagaagccaaggccgcctccttcccgcctgtctgcaggaggggactccaccccggaggccttccccagcctact

SEQ ID NO: 135313 - DNA, 80 bp, synthetic construct
  misc_feature 1..80: note = Artificially Synthesized Probe
  source 1..80: mol_type = other DNA
gtaccccaaggcacaatggccacagatgacgggcctggtgtgggagtccatccacatgagggatgggcacagtgagaggg

SEQ ID NO: 135314 - DNA, 80 bp, synthetic construct
  misc_feature 1..80: note = Artificially Synthesized Probe
  source 1..80: mol_type = other DNA
aaagcttcatattatcgcatattaaaaaaaaacagaaagcagcttagagcaatttataacctctaactaaattcctcggt

SEQ ID NO: 135315 - DNA, 80 bp, synthetic construct; identical to SEQ ID NO: 29844
  misc_feature 1..80: note = Artificially Synthesized Probe
  source 1..80: mol_type = other DNA

SEQ ID NO: 135316 - DNA, 80 bp, synthetic construct
  misc_feature 1..80: note = Artificially Synthesized Probe
  source 1..80: mol_type = other DNA
tgctgtctgtgaatgtgactccactagagacctcctgtgagtggaatcacgcaggttttgcctttcggtaactggctcat

SEQ ID NO: 135317 - DNA, 80 bp, synthetic construct
  misc_feature 1..80: note = Artificially Synthesized Probe
  source 1..80: mol_type = other DNA
aatcccaacactttgggaggtcaaagcaggaggattgcttgagcctaggagttcgagaacaggctgggcaaccccatttc

SEQ ID NO: 135318 - DNA, 80 bp, synthetic construct; identical to SEQ ID NO: 29845
  misc_feature 1..80: note = Artificially Synthesized Probe
  source 1..80: mol_type = other DNA

SEQ ID NO: 135319 - DNA, 80 bp, synthetic construct
  misc_feature 1..80: note = Artificially Synthesized Probe
  source 1..80: mol_type = other DNA
gactcagcccccagaactgagagagtcaagtgctgctgcttggggattggttttggtttggtttgagacagggcctcact

SEQ ID NO: 135320 - DNA, 80 bp, synthetic construct
  misc_feature 1..80: note = Artificially Synthesized Probe
  source 1..80: mol_type = other DNA
aaactacctcattcattcattcattcattcattcagagacagagtctcacagtgtcacccaggatgcagtgcagtggcac

SEQ ID NO: 135321 - DNA, 80 bp, synthetic construct
  misc_feature 1..80: note = Artificially Synthesized Probe
  source 1..80: mol_type = other DNA
actcctgacctcgtgatccgcccaccttggcctctcaaagtgctgagattacaggtgtgagccaccgtgcccggcaagtt

SEQ ID NO: 135322 - DNA, 80 bp, synthetic construct
  misc_feature 1..80: note = Artificially Synthesized Probe
  source 1..80: mol_type = other DNA
ggaaagagctaattctacaacaagcggacgtcaaccagatggctttgcgagccgagagtgggcgggaccaaggatgcatg

SEQ ID NO: 135323 - DNA, 80 bp, synthetic construct; identical to SEQ ID NO: 29846
  misc_feature 1..80: note = Artificially Synthesized Probe
  source 1..80: mol_type = other DNA

SEQ ID NO: 135324 - DNA, 80 bp, synthetic construct; identical to SEQ ID NO: 29820
  misc_feature 1..80: note = Artificially Synthesized Probe
  source 1..80: mol_type = other DNA

SEQ ID NO: 135325 - DNA, 80 bp, synthetic construct
  misc_feature 1..80: note = Artificially Synthesized Probe
  source 1..80: mol_type = other DNA
tgaggcaagaaaatcgcttgaacccaggaggtggaggttgcagtgagccgagatggcaccattgcactccagcctgggca

SEQ ID NO: 135326 - DNA, 80 bp, synthetic construct
  misc_feature 1..80: note = Artificially Synthesized Probe
  source 1..80: mol_type = other DNA
cacacacacacacacacacacacacaatatatatgtacctattcagcagtactcttggtcccttaaagatacacacacac

SEQ ID NO: 135327 - DNA, 80 bp, synthetic construct; identical to SEQ ID NO: 29847
  misc_feature 1..80: note = Artificially Synthesized Probe
  source 1..80: mol_type = other DNA

SEQ ID NO: 135328 - DNA, 80 bp, synthetic construct
  misc_feature 1..80: note = Artificially Synthesized Probe
  source 1..80: mol_type = other DNA
atctcgaaggtctcatgaaacagaagagatgcctgaacctgctggctccctgtcggttctcctgagttccatttcttttc

SEQ ID NO: 135329 - DNA, 80 bp, synthetic construct
  misc_feature 1..80: note = Artificially Synthesized Probe
  source 1..80: mol_type = other DNA
gctaatttgtgtatttttagtagagatggggtttcaccatgttcatcaggccggtctcgaactcctgacctcaggtgatc

SEQ ID NO: 135330 - DNA, 80 bp, synthetic construct
  misc_feature 1..80: note = Artificially Synthesized Probe
  source 1..80: mol_type = other DNA
aaaccccaaaccgagccattcacctaaggcagaggctcaggtgaaactgttaagaaatatatgaagggagtcagagtgtg

SEQ ID NO: 135331 - DNA, 80 bp, synthetic construct; identical to SEQ ID NO: 29848
  misc_feature 1..80: note = Artificially Synthesized Probe
  source 1..80: mol_type = other DNA

SEQ ID NO: 135332 - DNA, 80 bp, synthetic construct
  misc_feature 1..80: note = Artificially Synthesized Probe
  source 1..80: mol_type = other DNA
gattacaggcacccaccaccacacctggttaatttttgtatttttagtagagatggagtttcaccatgttggccaggctg

SEQ ID NO: 135333 - DNA, 80 bp, synthetic construct
  misc_feature 1..80: note = Artificially Synthesized Probe
  source 1..80: mol_type = other DNA
aactcatatccatccacatccctaagagttcaattaaaccaaaggacactgggcattgtcctgggaaggccgttcactta

SEQ ID NO: 135334 - DNA, 80 bp, synthetic construct
  misc_feature 1..80: note = Artificially Synthesized Probe
  source 1..80: mol_type = other DNA
ccgctggtgggcgacagtgacacgcagaagtctccgcaccacacgtcagggccgagtgtgcgcagcctcgtcacaatcat

SEQ ID NO: 135335 - DNA, 80 bp, synthetic construct; identical to SEQ ID NO: 29849
  misc_feature 1..80: note = Artificially Synthesized Probe
  source 1..80: mol_type = other DNA

SEQ ID NO: 135336 - DNA, 80 bp, synthetic construct
  misc_feature 1..80: note = Artificially Synthesized Probe
  source 1..80: mol_type = other DNA
cccagcaggaggtggctgtccccgctgaggtcaccactgcaggggctggcccttgcagtaggggcactcaggtgcggtgg

SEQ ID NO: 135337 - DNA, 80 bp, synthetic construct
  misc_feature 1..80: note = Artificially Synthesized Probe
  source 1..80: mol_type = other DNA
ggccgcgtgggttcccactgaacccaaaccccagggctgccagaaggaaacccactgcagcgtggaggaggccgcgtggg

SEQ ID NO: 135338 - DNA, 80 bp, synthetic construct
  misc_feature 1..80: note = Artificially Synthesized Probe
  source 1..80: mol_type = other DNA
ggacagaccccctctctccacaagggaggtggtgctcctgggtgggtgcctggcaagatggcagtctcggagcaaggccc

SEQ ID NO: 135339 - DNA, 80 bp, synthetic construct
  misc_feature 1..80: note = Artificially Synthesized Probe
  source 1..80: mol_type = other DNA
ggagcccagcctcacatggcacaaacaccccagggagcctccacgggcatgtcagggacccccagcccccaaccacggtg

SEQ ID NO: 135340 - DNA, 80 bp, synthetic construct; identical to SEQ ID NO: 29850
  misc_feature 1..80: note = Artificially Synthesized Probe
  source 1..80: mol_type = other DNA

SEQ ID NO: 135341 - DNA, 80 bp, synthetic construct
  misc_feature 1..80: note = Artificially Synthesized Probe
  source 1..80: mol_type = other DNA
gtagatctggggaaaaaagtgaaataaagaggttggattggaaatgggattctgtggaaagaccacagctggcatcatcc

SEQ ID NO: 135342 - DNA, 80 bp, synthetic construct
  misc_feature 1..80: note = Artificially Synthesized Probe
  source 1..80: mol_type = other DNA
ctgccctcccatcacaggcaaagtcatttccccgcttgatattttctgaaagatgcaccaaattcagagtctggtatgca

SEQ ID NO: 135343 - DNA, 80 bp, synthetic construct
  misc_feature 1..80: note = Artificially Synthesized Probe
  source 1..80: mol_type = other DNA
attttctgaaagatgcaccaaattcagagtctggtatgcagcaggtgcctaataagtgcctattaaaaggaacacgtgtg

SEQ ID NO: 135344 - DNA, 80 bp, synthetic construct
  misc_feature 1..80: note = Artificially Synthesized Probe
  source 1..80: mol_type = other DNA
aaggacacggcacctggcacgccaggcctccagtgcccacacctgcctgggtcccagcaggaagcctctctcctgacctc

SEQ ID NO: 135345 - DNA, 80 bp, synthetic construct
  misc_feature 1..80: note = Artificially Synthesized Probe
  source 1..80: mol_type = other DNA
cgagttcaagtgattctcttgcctcagcctcccaagtagctgggattacaagcatgtgccaccacacctggctaattttt

SEQ ID NO: 135346 - DNA, 80 bp, synthetic construct; identical to SEQ ID NO: 29851
  misc_feature 1..80: note = Artificially Synthesized Probe
  source 1..80: mol_type = other DNA

SEQ ID NO: 135347 - DNA, 80 bp, synthetic construct
  misc_feature 1..80: note = Artificially Synthesized Probe
  source 1..80: mol_type = other DNA
gccactgtgcctggcctgtttgtttttaatacaaatctgagtatggtcccttggcaactacacggctgggtgtgaacaca

SEQ ID NO: 135348 - DNA, 80 bp, synthetic construct
  misc_feature 1..80: note = Artificially Synthesized Probe
  source 1..80: mol_type = other DNA
ctggggagccggagggccttccgggcaggactcagcatctcaggccgcccggccaccagctacagagacagggtcaggga

SEQ ID NO: 135349 - DNA, 80 bp, synthetic construct
  misc_feature 1..80: note = Artificially Synthesized Probe
  source 1..80: mol_type = other DNA
ggtgcggctgtggcccacgtggtgccagctccactcagctgggtaccagagactggggtctgcaaccaggcctgcgtgac

SEQ ID NO: 135350 - DNA, 80 bp, synthetic construct
  misc_feature 1..80: note = Artificially Synthesized Probe
  source 1..80: mol_type = other DNA
cctcccccttggctgaggattttactttttttagatagagtcttgctctatcccccaggctggagtgcagtggcgcactc

SEQ ID NO: 135351 - DNA, 80 bp, synthetic construct; identical to SEQ ID NO: 29852
  misc_feature 1..80: note = Artificially Synthesized Probe
  source 1..80: mol_type = other DNA

SEQ ID NO: 135352 - DNA, 80 bp, synthetic construct
  misc_feature 1..80: note = Artificially Synthesized Probe
  source 1..80: mol_type = other DNA
ccgagtagctaggactacaggcgcgcaccaccacacccagctaattttggtatttttagtacagacatgttgaccaggct

SEQ ID NO: 135353 - DNA, 80 bp, synthetic construct
  misc_feature 1..80: note = Artificially Synthesized Probe
  source 1..80: mol_type = other DNA
gtggcacgatctcagctcactgcaagctccgcctcctgggttcacgccattctcctgcctcagcctcctgagtagctggg

SEQ ID NO: 135354 - DNA, 80 bp, synthetic construct; identical to SEQ ID NO: 29853
  misc_feature 1..80: note = Artificially Synthesized Probe
  source 1..80: mol_type = other DNA

SEQ ID NO: 135355 - DNA, 80 bp, synthetic construct
  misc_feature 1..80: note = Artificially Synthesized Probe
  source 1..80: mol_type = other DNA
cacatgactctttcttctgttacaggccaagtggagagactcgctggctgagggcagcccgaaggccagcaagcaagaca

SEQ ID NO: 135356 - DNA, 80 bp, synthetic construct
  misc_feature 1..80: note = Artificially Synthesized Probe
  source 1..80: mol_type = other DNA
ggacgtacctcgggatggaactgctgctccgtgcgggagtggcaatactggcagccgtcgccgccatcgcagcgtgaggg

SEQ ID NO: 135357 - DNA, 80 bp, synthetic construct
  misc_feature 1..80: note = Artificially Synthesized Probe
  source 1..80: mol_type = other DNA
acagaggacttggctccctgccccccacccccgtgcttcacgctggggcagggcgtggacctggggatgaggaggtgtca

SEQ ID NO: 135358 - DNA, 80 bp, synthetic construct
  misc_feature 1..80: note = Artificially Synthesized Probe
  source 1..80: mol_type = other DNA
atgaggaggtgtcagggggacacagaggacttggctcccccaccccgacccccgtgcttcacgctggggcagggcatgga

SEQ ID NO: 135359 - DNA, 80 bp, synthetic construct; identical to SEQ ID NO: 29854
  misc_feature 1..80: note = Artificially Synthesized Probe
  source 1..80: mol_type = other DNA

SEQ ID NO: 135360 - DNA, 80 bp, synthetic construct; identical to SEQ ID NO: 29821
  misc_feature 1..80: note = Artificially Synthesized Probe
  source 1..80: mol_type = other DNA

SEQ ID NO: 135361 - DNA, 80 bp, synthetic construct
  misc_feature 1..80: note = Artificially Synthesized Probe
  source 1..80: mol_type = other DNA
cgccaactttctataaaatggaagcgagagttttgatcccacaatttaaaactccgcaccaatttcaaattacctatgtt

SEQ ID NO: 135362 - DNA, 80 bp, synthetic construct
  misc_feature 1..80: note = Artificially Synthesized Probe
  source 1..80: mol_type = other DNA
aaaataatttttattttctttccatgacgggcgatgacaaaatctcagacactaatttgtggtttgttctacagccgttc

SEQ ID NO: 135363 - DNA, 80 bp, synthetic construct
  misc_feature 1..80: note = Artificially Synthesized Probe
  source 1..80: mol_type = other DNA
gctggacacagacagggcctcagggaggccaaggccatggcccaggcatccagacaccctgtggggtctgcaccccccca

SEQ ID NO: 135364 - DNA, 80 bp, synthetic construct; identical to SEQ ID NO: 29855
  misc_feature 1..80: note = Artificially Synthesized Probe
  source 1..80: mol_type = other DNA

SEQ ID NO: 135365 - DNA, 80 bp, synthetic construct
  misc_feature 1..80: note = Artificially Synthesized Probe
  source 1..80: mol_type = other DNA
gtccctcctgcagtgctccgtccccttgcctggcagaggggccccggtaggggactgcatgggagacactgagcgtaggt

SEQ ID NO: 135366 - DNA, 80 bp, synthetic construct
  misc_feature 1..80: note = Artificially Synthesized Probe
  source 1..80: mol_type = other DNA
cgcccaccagccggagtcctctgagcacggtcccgcaggctcacctgtactggaaccgccgggggttgcgccgcctgtcc

SEQ ID NO: 135367 - DNA, 80 bp, synthetic construct
  misc_feature 1..80: note = Artificially Synthesized Probe
  source 1..80: mol_type = other DNA
gaccaaaggtggaaggacctggctgtcccccaaatggaaggggctgcaggaggacttggggagcgcagacacacgccacg

SEQ ID NO: 135368 - DNA, 80 bp, synthetic construct; identical to SEQ ID NO: 29856
  misc_feature 1..80: note = Artificially Synthesized Probe
  source 1..80: mol_type = other DNA

SEQ ID NO: 135369 - DNA, 80 bp, synthetic construct
  misc_feature 1..80: note = Artificially Synthesized Probe
  source 1..80: mol_type = other DNA
gcaggaggtgcacggcaggggaggctgagggggcagggggtgtttgggaaatctatttttctactcagttttgctgtgaa

SEQ ID NO: 135370 - DNA, 80 bp, synthetic construct
  misc_feature 1..80: note = Artificially Synthesized Probe
  source 1..80: mol_type = other DNA
ctctactaaaaataaaaaattagccgggcatactggtgcctgcctgtaatcccagctactcaggaggctgaggcaggaga

SEQ ID NO: 135371 - DNA, 80 bp, synthetic construct
  misc_feature 1..80: note = Artificially Synthesized Probe
  source 1..80: mol_type = other DNA
ggggctgtgctggggtggggcaccgtctcctcctccctaggcccggagcagaccctggggcaggggaggaaggggacacc

SEQ ID NO: 135372 - DNA, 80 bp, synthetic construct; identical to SEQ ID NO: 29857
  misc_feature 1..80: note = Artificially Synthesized Probe
  source 1..80: mol_type = other DNA

SEQ ID NO: 135373 - DNA, 80 bp, synthetic construct
  misc_feature 1..80: note = Artificially Synthesized Probe
  source 1..80: mol_type = other DNA
cacactggagtgcagtggcgtgatcttggctcactgcaaccttcaccccccgagttcaagagattctccagcctcagcct

SEQ ID NO: 135374 - DNA, 80 bp, synthetic construct
  misc_feature 1..80: note = Artificially Synthesized Probe
  source 1..80: mol_type = other DNA
tgagccagtgctcccagccttaccacgttttttttcaaatcaaaatctcccctgcatataacctcatctgtgtgccagcc

SEQ ID NO: 135375 - DNA, 80 bp, synthetic construct
  misc_feature 1..80: note = Artificially Synthesized Probe
  source 1..80: mol_type = other DNA
tctgctgagcatcctggtgggtgcctggtgggcgccccggctctgggacaggacgcctcacgagttccggtgggagttgt

SEQ ID NO: 135376 - DNA, 80 bp, synthetic construct; identical to SEQ ID NO: 29858
  misc_feature 1..80: note = Artificially Synthesized Probe
  source 1..80: mol_type = other DNA

SEQ ID NO: 135377 - DNA, 80 bp, synthetic construct
  misc_feature 1..80: note = Artificially Synthesized Probe
  source 1..80: mol_type = other DNA
gcctgcagctccctgcaagccgaggacacagtggtcacagctctgcatctggagcctccaaagctgaaacgaggtcactg

SEQ ID NO: 135378 - DNA, 80 bp, synthetic construct
  misc_feature 1..80: note = Artificially Synthesized Probe
  source 1..80: mol_type = other DNA
ctctgtcccccaggctggagtgcagtgacgcaatcacagctcattgcagtctccatctcccgggctcaagcgatcctccc

SEQ ID NO: 135379 - DNA, 80 bp, synthetic construct
  misc_feature 1..80: note = Artificially Synthesized Probe
  source 1..80: mol_type = other DNA
aaccccagtgagctgccctccggacccagaagagaaacacacagtgagaagagctgaaggactgtctgccccagactgtg

SEQ ID NO: 135380 - DNA, 80 bp, synthetic construct
  misc_feature 1..80: note = Artificially Synthesized Probe
  source 1..80: mol_type = other DNA
cccagaatttcaggaggccgaggcgggcagatcatgaggtcaggagatggagaccatcctggctaacacagtaaaaccct

SEQ ID NO: 135381 - DNA, 80 bp, synthetic construct; identical to SEQ ID NO: 29859
  misc_feature 1..80: note = Artificially Synthesized Probe
  source 1..80: mol_type = other DNA

SEQ ID NO: 135382 - DNA, 80 bp, synthetic construct
  misc_feature 1..80: note = Artificially Synthesized Probe
  source 1..80: mol_type = other DNA
cccacagccccgcagccccggcagtgtggaggctacgcccaggccctccagctcctcctgcagctgcttcacctgtgcct

SEQ ID NO: 135383 - DNA, 80 bp, synthetic construct
  misc_feature 1..80: note = Artificially Synthesized Probe
  source 1..80: mol_type = other DNA
gcggaggcaggagaatggtgtgaacccaggaggcagggcttgcagtgagctgagatcgcgccgctgcactccagcctggg

SEQ ID NO: 135384 - DNA, 80 bp, synthetic construct
  misc_feature 1..80: note = Artificially Synthesized Probe
  source 1..80: mol_type = other DNA
caggcaggccaagtgcccactcgtggatgcccactcacctgacgtcacacacgggcggccgcaggtccagggggccgtgc

SEQ ID NO: 135385 - DNA, 80 bp, synthetic construct
  misc_feature 1..80: note = Artificially Synthesized Probe
  source 1..80: mol_type = other DNA
agctgctgggcgcgcctccacctcagcctccacggggcaccttccagccactgctgtgcctcagccacctaggagccatc

SEQ ID NO: 135386 - DNA, 80 bp, synthetic construct; identical to SEQ ID NO: 29860
  misc_feature 1..80: note = Artificially Synthesized Probe
  source 1..80: mol_type = other DNA

SEQ ID NO: 135387 - DNA, 80 bp, synthetic construct
  misc_feature 1..80: note = Artificially Synthesized Probe
  source 1..80: mol_type = other DNA
gccaaacacagcaggaaacacaatgctgaatttccacaaagctcatccttcctaatgttccaaataaacctttaaacctg

SEQ ID NO: 135388 - DNA, 80 bp, synthetic construct
  misc_feature 1..80: note = Artificially Synthesized Probe
  source 1..80: mol_type = other DNA
gggggacacgagggggatgggcagaagaggcggcagatggcgtggtggggaacacaggtgaggtagcatcaccatcccat

SEQ ID NO: 135389 - DNA, 80 bp, synthetic construct; identical to SEQ ID NO: 29861
  misc_feature 1..80: note = Artificially Synthesized Probe
  source 1..80: mol_type = other DNA

SEQ ID NO: 135390 - DNA, 80 bp, synthetic construct
  misc_feature 1..80: note = Artificially Synthesized Probe
  source 1..80: mol_type = other DNA
cagcctgggcactaggagctccagccagggatggctggggaccaagagcgattcagcaacaccaggtctagccccatcct

SEQ ID NO: 135391 - DNA, 80 bp, synthetic construct
  misc_feature 1..80: note = Artificially Synthesized Probe
  source 1..80: mol_type = other DNA
aaattacaacgctaccttggtacccagcgatcctgctcctaagtacacatccaaaaaacctggaggcagggtcttcagga

SEQ ID NO: 135392 - DNA, 80 bp, synthetic construct
  misc_feature 1..80: note = Artificially Synthesized Probe
  source 1..80: mol_type = other DNA
cttccgtccacaagacagggtaaacgtgggcttctatccacacaatggggtaaacgcgggcttccagccacacagtgggg

SEQ ID NO: 135393 - DNA, 80 bp, synthetic construct
  misc_feature 1..80: note = Artificially Synthesized Probe
  source 1..80: mol_type = other DNA
ccggcgtggtggtggacacctgtggtcccagctacttgggaggctgaggagggaggatcgcttaaagcccaaaaggccaa

SEQ ID NO: 135394 - DNA, 80 bp, synthetic construct
  misc_feature 1..80: note = Artificially Synthesized Probe
  source 1..80: mol_type = other DNA
tgcctgtgtcaccagcgatcctcccctcccctccccagcatcagctgtggccccctcacctgagacccctgcggccctcc

SEQ ID NO: 135395 - DNA, 80 bp, synthetic construct; identical to SEQ ID NO: 29862
  misc_feature 1..80: note = Artificially Synthesized Probe
  source 1..80: mol_type = other DNA

SEQ ID NO: 135396 - DNA, 80 bp, synthetic construct
  misc_feature 1..80: note = Artificially Synthesized Probe
  source 1..80: mol_type = other DNA
cgcgccactgtactccaggctgggtgacaagggcaaaactccatctcaaaaaaaaaaaagaaactggaaaaagttttaag

SEQ ID NO: 135397 - DNA, 80 bp, synthetic construct
  misc_feature 1..80: note = Artificially Synthesized Probe
  source 1..80: mol_type = other DNA
agccacgtgattacacccagcacatgggcaccgctctgcctcacgctccaatgccctggacccaccgagaccagaggata

SEQ ID NO: 135398 - DNA, 80 bp, synthetic construct; identical to SEQ ID NO: 29863
  misc_feature 1..80: note = Artificially Synthesized Probe
  source 1..80: mol_type = other DNA

SEQ ID NO: 135399 - DNA, 80 bp, synthetic construct
  misc_feature 1..80: note = Artificially Synthesized Probe
  source 1..80: mol_type = other DNA
ttgcccaggccggagtgcagtggcacaatctcagctcactgcaacctctgcctcctgcgtttaagcgattctcctgcctc

SEQ ID NO: 135400 - DNA, 80 bp, synthetic construct
  misc_feature 1..80: note = Artificially Synthesized Probe
  source 1..80: mol_type = other DNA
ggcgtgagccaccgcgcccggcctaatttttttgtagagacagaatcttgctgtttcccaggctggtcccaaactcctgg

SEQ ID NO: 135401 - DNA, 80 bp, synthetic construct
  misc_feature 1..80: note = Artificially Synthesized Probe
  source 1..80: mol_type = other DNA
ttaaacagcaaattctacacaccctgaagtgagtggaactttcacctacgccttaggtcctaaggcattcaacattttaa

SEQ ID NO: 135402 - DNA, 80 bp, synthetic construct
  misc_feature 1..80: note = Artificially Synthesized Probe
  source 1..80: mol_type = other DNA
gagttaagagatcagcctggccaacatggtgaaaccccatctctactaaaaatacacacatacacaaaaattagttgggc

SEQ ID NO: 135403 - DNA, 80 bp, synthetic construct; identical to SEQ ID NO: 29864
  misc_feature 1..80: note = Artificially Synthesized Probe
  source 1..80: mol_type = other DNA

SEQ ID NO: 135404 - DNA, 80 bp, synthetic construct
  misc_feature 1..80: note = Artificially Synthesized Probe
  source 1..80: mol_type = other DNA
ctctggaaagaagacagaggccgggcgcagtggctcattcctgtaatcccagcactttgggaggagaggtgggtggatta

SEQ ID NO: 135405 - DNA, 80 bp, synthetic construct
  misc_feature 1..80: note = Artificially Synthesized Probe
  source 1..80: mol_type = other DNA
actcacctgcttcacctgctgccaggactcctcccactgccggatcttcctcttggcctcgtccagctgccgcctgaccc

SEQ ID NO: 135406 - DNA, 80 bp, synthetic construct
  misc_feature 1..80: note = Artificially Synthesized Probe
  source 1..80: mol_type = other DNA
cacaccactgcactccagcctgggcgacagagtgaggccctgtcaaaaaaaaaaaaaaaaggacaaacctgtgtctgtgt

SEQ ID NO: 135407 - DNA, 80 bp, synthetic construct; identical to SEQ ID NO: 29865
  misc_feature 1..80: note = Artificially Synthesized Probe
  source 1..80: mol_type = other DNA

SEQ ID NO: 135408 - DNA, 80 bp, synthetic construct
  misc_feature 1..80: note = Artificially Synthesized Probe
  source 1..80: mol_type = other DNA
ccctggagaggcccggggtcccgcggggcgccttttctatttctttaccgcaatctgtttaaagagaaaagcaagcgcct

SEQ ID NO: 135409 - DNA, 80 bp, synthetic construct
  misc_feature 1..80: note = Artificially Synthesized Probe
  source 1..80: mol_type = other DNA
ggcctttcccgagcggggcggggcggggccgagatcacgctgatgcccacaggaccggcacggcgtggggtgcaacaagg

SEQ ID NO: 135410 - DNA, 80 bp, synthetic construct
  misc_feature 1..80: note = Artificially Synthesized Probe
  source 1..80: mol_type = other DNA
ctccacggagggaggggtgacggcagaggcgtccgcaggagctggtaccggtggggctgcccccagggggggctgacaga

SEQ ID NO: 135411 - DNA, 80 bp, synthetic construct; identical to SEQ ID NO: 29866
  misc_feature 1..80: note = Artificially Synthesized Probe
  source 1..80: mol_type = other DNA

SEQ ID NO: 135412 - DNA, 80 bp, synthetic construct
  misc_feature 1..80: note = Artificially Synthesized Probe
  source 1..80: mol_type = other DNA
tgtatttttagtagagacggggtttcaccatgtaggatggtctcgatctcccgacctcgtgatctgcccgcctcggcctc

SEQ ID NO: 135413 - DNA, 80 bp, synthetic construct
  misc_feature 1..80: note = Artificially Synthesized Probe
  source 1..80: mol_type = other DNA
caataggacaaactggctattccctttgttcagcgatgagaaagtcccactcccgtggaatgaaggataattatggagga

SEQ ID NO: 135414 - DNA, 80 bp, synthetic construct
  misc_feature 1..80: note = Artificially Synthesized Probe
  source 1..80: mol_type = other DNA
gccccacttaccaccctcaattataaactgtaagccattcagacagcaggctaatatttttgtaatgatgttatggaact

SEQ ID NO: 135415 - DNA, 80 bp, synthetic construct; identical to SEQ ID NO: 29822
  misc_feature 1..80: note = Artificially Synthesized Probe
  source 1..80: mol_type = other DNA

SEQ ID NO: 135416 - DNA, 80 bp, synthetic construct
  misc_feature 1..80: note = Artificially Synthesized Probe
  source 1..80: mol_type = other DNA
gtggctcatgtctgtaatcccagcacttttggaggccaaggctagcggatcacctgaggtcaggagttcaagaccagcct

SEQ ID NO: 135417 - DNA, 80 bp, synthetic construct; identical to SEQ ID NO: 29867
  misc_feature 1..80: note = Artificially Synthesized Probe
  source 1..80: mol_type = other DNA

SEQ ID NO: 135418 - DNA, 80 bp, synthetic construct
  misc_feature 1..80: note = Artificially Synthesized Probe
  source 1..80: mol_type = other DNA
aagatgctttatctttatgcattaaaagcatcacctggccaggcacggtggcccatgcctgtaatcccagcactttggga

SEQ ID NO: 135419 - DNA, 80 bp, synthetic construct
  misc_feature 1..80: note = Artificially Synthesized Probe
  source 1..80: mol_type = other DNA
ccgggaggtagaggttgcggtgagccgagatcacgccactgcactccagcctgggtgacatagagtgctgccaatcagtg

SEQ ID NO: 135420 - DNA, 80 bp, synthetic construct; identical to SEQ ID NO: 29868
  misc_feature 1..80: note = Artificially Synthesized Probe
  source 1..80: mol_type = other DNA

SEQ ID NO: 135421 - DNA, 80 bp, synthetic construct
  misc_feature 1..80: note = Artificially Synthesized Probe
  source 1..80: mol_type = other DNA
tcgcttgaggccgggtaacacagcgagactccatctctacaaaaaaattaaaaatgagccgaggtgtgtggtggctcaca

SEQ ID NO: 135422 - DNA, 80 bp, synthetic construct
  misc_feature 1..80: note = Artificially Synthesized Probe
  source 1..80: mol_type = other DNA
attagccaggcgtggtgtagagagtctatagctccagaggctgaagtgggagaatcacttgagcccaggaggtagaggct

SEQ ID NO: 135423 - DNA, 80 bp, synthetic construct
  misc_feature 1..80: note = Artificially Synthesized Probe
  source 1..80: mol_type = other DNA
tgagccctggaggttcaagttgcagtgagccgtgttcatgcccctgcactccagcccagggcacagagcaagaccctgtc

SEQ ID NO: 135424 - DNA, 80 bp, synthetic construct
  misc_feature 1..80: note = Artificially Synthesized Probe
  source 1..80: mol_type = other DNA
tggcacgcgcctgtaatcccagctactcgggaggctgaggcaggagaatcgcttgaacctgggaggcggaggttgcagtg

SEQ ID NO: 135425 - DNA, 80 bp, synthetic construct; identical to SEQ ID NO: 29869
  misc_feature 1..80: note = Artificially Synthesized Probe
  source 1..80: mol_type = other DNA

SEQ ID NO: 135426 - DNA, 80 bp, synthetic construct
  misc_feature 1..80: note = Artificially Synthesized Probe
  source 1..80: mol_type = other DNA
acgccttcctggccacctgaggagtctaaacagagaggaattaaattcaagttcctgggaccacaccatgaggtgggagg

SEQ ID NO: 135427 - DNA, 80 bp, synthetic construct
  misc_feature 1..80: note = Artificially Synthesized Probe
  source 1..80: mol_type = other DNA
tgtgaatatataatctgacttgtattttccctgttttcccattttgcatacttcagaataaagacatctgttcataacac

SEQ ID NO: 135428 - DNA, 80 bp, synthetic construct
  misc_feature 1..80: note = Artificially Synthesized Probe
  source 1..80: mol_type = other DNA
agaccagcctcgccaacatggcgaaacctcaactctattaaaaatacaaaaacttagctaggcgtggtggcgggtgcctg

SEQ ID NO: 135429 - DNA, 80 bp, synthetic construct
  misc_feature 1..80: note = Artificially Synthesized Probe
  source 1..80: mol_type = other DNA
cttaaaattaaaataaatacgtaaacatcaagagacgaaacatcccagatatattctacagcgtgaatattctaacaagc

SEQ ID NO: 135430 - DNA, 80 bp, synthetic construct; identical to SEQ ID NO: 29870
  misc_feature 1..80: note = Artificially Synthesized Probe
  source 1..80: mol_type = other DNA

SEQ ID NO: 135431 - DNA, 80 bp, synthetic construct
  misc_feature 1..80: note = Artificially Synthesized Probe
  source 1..80: mol_type = other DNA
agctacttgggaggctgagaagggaagatcacttgagcctaggagttggtggctgcagtgagccgtatcctatcattgca

SEQ ID NO: 135432 - DNA, 80 bp, synthetic construct
  misc_feature 1..80: note = Artificially Synthesized Probe
  source 1..80: mol_type = other DNA
acaagcctaaccaacatggagaaaccctgtctctactaaaaataaaaaattagctgggcatggtggcacatgcctgtaat

SEQ ID NO: 135433 - DNA, 80 bp, synthetic construct; identical to SEQ ID NO: 29871
  misc_feature 1..80: note = Artificially Synthesized Probe
  source 1..80: mol_type = other DNA

SEQ ID NO: 135434 - DNA, 80 bp, synthetic construct
  misc_feature 1..80: note = Artificially Synthesized Probe
  source 1..80: mol_type = other DNA
atccctggtcactagaaaatttcagcgtataattacgactccctctgcaggggccaggtatggacactaaggcgtccgct

SEQ ID NO: 135435 - DNA, 80 bp, synthetic construct
  misc_feature 1..80: note = Artificially Synthesized Probe
  source 1..80: mol_type = other DNA
ctgcggaggggcctgcggcgccgctggttgaggaagtgccagtggaagcaggtgaacggccggtgctgcgcgcacttgtg

SEQ ID NO: 135436 - DNA, 80 bp, synthetic construct
  misc_feature 1..80: note = Artificially Synthesized Probe
  source 1..80: mol_type = other DNA
cacattcccggcgggccccaggcgctgcgcccacccccatcccgactccagacgcgaccctcacccgacctcgtagccca

SEQ ID NO: 135437 - DNA, 80 bp, synthetic construct
  misc_feature 1..80: note = Artificially Synthesized Probe
  source 1..80: mol_type = other DNA
ggaaccaggtgccatcccagaccatgggcgccgcgctccgacctcaggcggaggccgccgagagcagagggtcgtggccc

SEQ ID NO: 135438 - DNA, 80 bp, synthetic construct
  misc_feature 1..80: note = Artificially Synthesized Probe
  source 1..80: mol_type = other DNA
cggtggctcacgcctgtaatcccagcactttgggaggccgaggcgggtggatcatgaggtcaggagatcgagaccatcct

SEQ ID NO: 135439 - DNA, 80 bp, synthetic construct; identical to SEQ ID NO: 29872
  misc_feature 1..80: note = Artificially Synthesized Probe
  source 1..80: mol_type = other DNA

SEQ ID NO: 135440 - DNA, 80 bp, synthetic construct
  misc_feature 1..80: note = Artificially Synthesized Probe
  source 1..80: mol_type = other DNA
ccgcagtccggcctgggcgacagaatgagactccgtctcaaaaaaaaaaaaaaaaaaaaaaaaaaacaggcctgtcatcc

SEQ ID NO: 135441 - DNA, 80 bp, synthetic construct; identical to SEQ ID NO: 29823
  misc_feature 1..80: note = Artificially Synthesized Probe
  source 1..80: mol_type = other DNA

SEQ ID NO: 135442 - DNA, 80 bp, synthetic construct
  misc_feature 1..80: note = Artificially Synthesized Probe
  source 1..80: mol_type = other DNA
tattagttttttttttttttttttttttttttttgaaatggagtctagctctatcgccaggctggattggagtgcagtgg

SEQ ID NO: 135443 - DNA, 80 bp, synthetic construct
  misc_feature 1..80: note = Artificially Synthesized Probe
  source 1..80: mol_type = other DNA
cctgtcctcagagccagtactgatctaggggagcaggtgccacctccatctcccagctgtccccccacccctggggctcc

SEQ ID NO: 135444 - DNA, 80 bp, synthetic construct
  misc_feature 1..80: note = Artificially Synthesized Probe
  source 1..80: mol_type = other DNA
gatatcctgacgtcgtgatccgcccacctcggcgccccaagtgctgggatgacaggcgtgagccaccacgccgggccttt

SEQ ID NO: 135445 - DNA, 80 bp, synthetic construct
  misc_feature 1..80: note = Artificially Synthesized Probe
  source 1..80: mol_type = other DNA
cggctaattttgtatttttagtagagatggggtttctccatgttggtcaggctggtcttgaactcccaatctcaggtgat

SEQ ID NO: 135446 - DNA, 80 bp, synthetic construct; identical to SEQ ID NO: 29824
  misc_feature 1..80: note = Artificially Synthesized Probe
  source 1..80: mol_type = other DNA

SEQ ID NO: 135447 - DNA, 80 bp, synthetic construct
  misc_feature 1..80: note = Artificially Synthesized Probe
  source 1..80: mol_type = other DNA
gtctgcggcgtgggggaacctgtgagcagcaggtcatgtggtttgccaccacagatagggcacaaggttccgtgtgaggc

SEQ ID NO: 135448 - DNA, 80 bp, synthetic construct
  misc_feature 1..80: note = Artificially Synthesized Probe
  source 1..80: mol_type = other DNA
atggctgaggagcccaccggccctgggaggggctgggacagcgaaccgagcggcgaggtggacgcagaggatggcgagtg

SEQ ID NO: 135449 - DNA, 80 bp, synthetic construct
  misc_feature 1..80: note = Artificially Synthesized Probe
  source 1..80: mol_type = other DNA
aggtggtggtggtggggatatggggggtgggaatataggggccaggccagccaccaccatctatgtgtttggagccacag

SEQ ID NO: 135450 - DNA, 80 bp, synthetic construct; identical to SEQ ID NO: 29825
  misc_feature 1..80: note = Artificially Synthesized Probe
  source 1..80: mol_type = other DNA

SEQ ID NO: 135451 - DNA, 80 bp, synthetic construct
  misc_feature 1..80: note = Artificially Synthesized Probe
  source 1..80: mol_type = other DNA
aaaattagctgggcgtggtggcgggcacctgtagtcccagctactccggaggctgaggcaggagaatggcgtgaacccgg

SEQ ID NO: 135452 - DNA, 80 bp, synthetic construct
  misc_feature 1..80: note = Artificially Synthesized Probe
  source 1..80: mol_type = other DNA
aagactttcaggaaaggccccgcctgtctctgcgcggccactttgctgggacaaaggtcaactgaagaagtgggcaggcc

SEQ ID NO: 135453 - DNA, 80 bp, synthetic construct
  misc_feature 1..80: note = Artificially Synthesized Probe
  source 1..80: mol_type = other DNA
ctcagctcactgcagccttgacctccccgggctcaagcgatcctccggccacagcacttggctgttcagcggctggagga

SEQ ID NO: 135454 - DNA, 80 bp, synthetic construct
  misc_feature 1..80: note = Artificially Synthesized Probe
  source 1..80: mol_type = other DNA
gaccagaggctccaaatgggaaccaagtgcataaatacaaataaaaacagagtttacacatcgatgacagtagcacaaaa

SEQ ID NO: 135455 - DNA, 80 bp, synthetic construct; identical to SEQ ID NO: 29826
  misc_feature 1..80: note = Artificially Synthesized Probe
  source 1..80: mol_type = other DNA

SEQ ID NO: 135456 - DNA, 80 bp, synthetic construct
  misc_feature 1..80: note = Artificially Synthesized Probe
  source 1..80: mol_type = other DNA
ctgctgcccctcagagtttaaatacctaagtgtgtgttagcatctgtccacgtgtgcacattcgactgtttaaaaaactt

SEQ ID NO: 135457 - DNA, 80 bp, synthetic construct
  misc_feature 1..80: note = Artificially Synthesized Probe
  source 1..80: mol_type = other DNA
accaaaaaaaaaaaaatacaaaaaattagccaggcgtggtggcgggtgcctgtagtcccagctactcgggaggctgaggc

SEQ ID NO: 135458 - DNA, 80 bp, synthetic construct; identical to SEQ ID NO: 29827
  misc_feature 1..80: note = Artificially Synthesized Probe
  source 1..80: mol_type = other DNA

SEQ ID NO: 135459 - DNA, 80 bp, synthetic construct
  misc_feature 1..80: note = Artificially Synthesized Probe
  source 1..80: mol_type = other DNA
tccctcccaagtccccacccccaaccccgaatggcaagcagggaccccactgccccttcctagaattaggaagccatcat

SEQ ID NO: 135460 - DNA, 80 bp, synthetic construct
  misc_feature 1..80: note = Artificially Synthesized Probe
  source 1..80: mol_type = other DNA
gcaggagctctgggatacaccctgtgggccggcgccgcctccccagcccagcccagtgttgtggccaacaccgcacagag

SEQ ID NO: 135461 - DNA, 80 bp, synthetic construct
  misc_feature 1..80: note = Artificially Synthesized Probe
  source 1..80: mol_type = other DNA
cagagacctcagcagcgtggggcacaccacacagggactgccggccaacaccgcagagacctcagcagcgtggagcacac

SEQ ID NO: 135462 - DNA, 80 bp, synthetic construct
  misc_feature 1..80: note = Artificially Synthesized Probe
  source 1..80: mol_type = other DNA
gcaaatcgggaaaagggggtgagctgggctggcttccgtcctggtagccaaggctaattctccctcgagttcttgggaga

SEQ ID NO: 135463 - DNA, 80 bp, synthetic construct
  misc_feature 1..80: note = Artificially Synthesized Probe
  source 1..80: mol_type = other DNA
ttttcaacacttttggatttcacttttggagcactgctgtttgactaaggctgaagttctttatctttgtcaggtttaca

SEQ ID NO: 135464 - DNA, 80 bp, synthetic construct
  misc_feature 1..80: note = Artificially Synthesized Probe
  source 1..80: mol_type = other DNA
aagttgtagtgctgcaatctccactcactgcaacctccacctcctgggttcaagtgatttttctgcctcagcctcctgaa

SEQ ID NO: 135465 - DNA, 80 bp, synthetic construct
  misc_feature 1..80: note = Artificially Synthesized Probe
  source 1..80: mol_type = other DNA
ccactgcacccggccacataagataatttcaatgtgttgtatcttatggtttgtcctagatctaaacaaataaattctgc

SEQ ID NO: 135466 - DNA, 80 bp, synthetic construct
  misc_feature 1..80: note = Artificially Synthesized Probe
  source 1..80: mol_type = other DNA
cagatttctttaatggcaaaatgcagcagaatgacttatcaaaaatgtaacatgttaaattcacatagattgaggttgga

SEQ ID NO: 135467 - DNA, 80 bp, synthetic construct
  misc_feature 1..80: note = Artificially Synthesized Probe
  source 1..80: mol_type = other DNA
attaggtattataagtaatcttgagatgatttaaagtaaggttatatgcaaatcttacaccattttatatcagggatttg

SEQ ID NO: 135468 - DNA, 80 bp, synthetic construct; identical to SEQ ID NO: 42620
  misc_feature 1..80: note = Artificially Synthesized Probe
  source 1..80: mol_type = other DNA

SEQ ID NO: 135469 - DNA, 80 bp, synthetic construct
  misc_feature 1..80: note = Artificially Synthesized Probe
  source 1..80: mol_type = other DNA
ttacagcatatccctggactattaagcatatctggaaggtgatatcggttgtgttatgtctttatcatgttgatatggct

SEQ ID NO: 135470 - DNA, 80 bp, synthetic construct
  misc_feature 1..80: note = Artificially Synthesized Probe
  source 1..80: mol_type = other DNA
gtacagtctttctcctagaaacccttcctaaaatctttggtgacatcgtaatcttatccctgtactttccctccttgtgt

SEQ ID NO: 135471 - DNA, 80 bp, synthetic construct
  misc_feature 1..80: note = Artificially Synthesized Probe
  source 1..80: mol_type = other DNA
ccgcctaactttatactcttcttagttttaatcacttacctccctacttcagaaccctgctacctttagaaaacaaagta

SEQ ID NO: 135472 - DNA, 80 bp, synthetic construct; identical to SEQ ID NO: 42621
  misc_feature 1..80: note = Artificially Synthesized Probe
  source 1..80: mol_type = other DNA

SEQ ID NO: 135473 - DNA, 80 bp, synthetic construct
  misc_feature 1..80: note = Artificially Synthesized Probe
  source 1..80: mol_type = other DNA
ctggagtgcagtggtgcgatctcggctcactgcaacctcacctcccgggttcaagtgagtctcctacttcagcctcctga

SEQ ID NO: 135474 - DNA, 80 bp, synthetic construct
  misc_feature 1..80: note = Artificially Synthesized Probe
  source 1..80: mol_type = other DNA
ttagcctcccaagtagctgggattataggcatgcactaccatgcctggctaatttttgtatttttagtagagatagggtt

SEQ ID NO: 135475 - DNA, 80 bp, synthetic construct
  misc_feature 1..80: note = Artificially Synthesized Probe
  source 1..80: mol_type = other DNA
tttgttacttgcttgtttaacccataacttcctaacttttacatctctctggatactctcttcatatttatgtatgttgc

SEQ ID NO: 135476 - DNA, 80 bp, synthetic construct; identical to SEQ ID NO: 42622
  misc_feature 1..80: note = Artificially Synthesized Probe
  source 1..80: mol_type = other DNA

SEQ ID NO: 135477 - DNA, 80 bp, synthetic construct
  misc_feature 1..80: note = Artificially Synthesized Probe
  source 1..80: mol_type = other DNA
gcagggtatgttttctggttaaactatttattcttggagaatcagagaccatatcttatatacccctttaataacctctg

SEQ ID NO: 135478 - DNA, 80 bp, synthetic construct
  misc_feature 1..80: note = Artificially Synthesized Probe
  source 1..80: mol_type = other DNA
ttagatacctcgctagaaggacatatttgatatcagttgatccatttgggagtgatagtgtggtctagagaccttttctc

SEQ ID NO: 135479 - DNA, 80 bp, synthetic construct
  misc_feature 1..80: note = Artificially Synthesized Probe
  source 1..80: mol_type = other DNA
gaaaaaaagtgaaaatgataaaaatgaaatactcagaacaaaatggtttggtgactaagacagtggactaatgtgcacag

SEQ ID NO: 135480 - DNA, 80 bp, synthetic construct; identical to SEQ ID NO: 42610
  misc_feature 1..80: note = Artificially Synthesized Probe
  source 1..80: mol_type = other DNA

SEQ ID NO: 135481 - DNA, 80 bp, synthetic construct
  misc_feature 1..80: note = Artificially Synthesized Probe
  source 1..80: mol_type = other DNA
tagatgttcattgatgtccatttgtttaatgatagtgaactggtagaatgaagattattaagagattggaaagaagtagc

SEQ ID NO: 135482 - DNA, 80 bp, synthetic construct; identical to SEQ ID NO: 42623
  misc_feature 1..80: note = Artificially Synthesized Probe
  source 1..80: mol_type = other DNA

SEQ ID NO: 135483 - DNA, 80 bp, synthetic construct
  misc_feature 1..80: note = Artificially Synthesized Probe
  source 1..80: mol_type = other DNA
taacaaaagaaacatgtaaacgctttgattattcttactgctagttcctttgacaggtaagattcccaactcttaaggca

SEQ ID NO: 135484 - DNA, 80 bp, synthetic construct
  misc_feature 1..80: note = Artificially Synthesized Probe
  source 1..80: mol_type = other DNA
accctgttagcaaaggatatggtttaggaatttttttttttaaactgctcacttgttttattgtgaatgaggaaaattag

SEQ ID NO: 135485 - DNA, 80 bp, synthetic construct
  misc_feature 1..80: note = Artificially Synthesized Probe
  source 1..80: mol_type = other DNA
agaagttaaaccagagaaaataagcactaagaggtatgatgtatccttcgctagtttgattgaatcaaatattaattttt

SEQ ID NO: 135486 - DNA, 80 bp, synthetic construct; identical to SEQ ID NO: 42624
  misc_feature 1..80: note = Artificially Synthesized Probe
  source 1..80: mol_type = other DNA

SEQ ID NO: 135487 - DNA, 80 bp, synthetic construct
  misc_feature 1..80: note = Artificially Synthesized Probe
  source 1..80: mol_type = other DNA
ctaaaaatacaaaaaattagccgggcgtggtggcgcacatctgtaatcccagctactcgggaggctgaggcaagagaatt

SEQ ID NO: 135488 - DNA, 80 bp, synthetic construct
  misc_feature 1..80: note = Artificially Synthesized Probe
  source 1..80: mol_type = other DNA
atcacctgaggtcaggagttcgataccagcctcggcaacatggtgaaaccccgtctctactaaaaatacaaaaattaact

SEQ ID NO: 135489 - DNA, 80 bp, synthetic construct; identical to SEQ ID NO: 42625
  misc_feature 1..80: note = Artificially Synthesized Probe
  source 1..80: mol_type = other DNA

SEQ ID NO: 135490 - DNA, 80 bp, synthetic construct
  misc_feature 1..80: note = Artificially Synthesized Probe
  source 1..80: mol_type = other DNA
actacccttatcccagaggaagtggtatatgtaagttggttgtatccaaacttgcatctaactttgtatcagttctgaag

SEQ ID NO: 135491 - DNA, 80 bp, synthetic construct
  misc_feature 1..80: note = Artificially Synthesized Probe
  source 1..80: mol_type = other DNA
gtggtgcacgcctgtagtcccagctactctggaggctgaggcaggagaatcgcttgaacctggaaagcgaaggttgcagt

SEQ ID NO: 135492 - DNA, 80 bp, synthetic construct
  misc_feature 1..80: note = Artificially Synthesized Probe
  source 1..80: mol_type = other DNA
tttgggatgagtcaagtgcactacatttattgtgcactttatttctattattattactctgtaatgtataatgaaattat

SEQ ID NO: 135493 - DNA, 80 bp, synthetic construct
  misc_feature 1..80: note = Artificially Synthesized Probe
  source 1..80: mol_type = other DNA
gtaatccgagcactttgggaggctgagatgggaggatcacttgaggtcaggagttcaagaccagcctgactaacatggtg

SEQ ID NO: 135494 - DNA, 80 bp, synthetic construct; identical to SEQ ID NO: 42626
  misc_feature 1..80: note = Artificially Synthesized Probe
  source 1..80: mol_type = other DNA

SEQ ID NO: 135495 - DNA, 80 bp, synthetic construct
  misc_feature 1..80: note = Artificially Synthesized Probe
  source 1..80: mol_type = other DNA
gtaaatacagatgacactttgctggctaacccaccactcatcgtctgctgtgcgtcctggttcataacaggccgtgaacc

SEQ ID NO: 135496 - DNA, 80 bp, synthetic construct
  misc_feature 1..80: note = Artificially Synthesized Probe
  source 1..80: mol_type = other DNA
agaagaatgcagattagatcgtgatgaggaaagggcctatgtactatatatgaaatacgtgactgtttataatcttatca

SEQ ID NO: 135497 - DNA, 80 bp, synthetic construct
  misc_feature 1..80: note = Artificially Synthesized Probe
  source 1..80: mol_type = other DNA
aaaagggaactaaagatacagtgttattatttacaaatgtgtataatgtgtgaactcgtacacattcttggatttgccat

SEQ ID NO: 135498 - DNA, 80 bp, synthetic construct; identical to SEQ ID NO: 42627
  misc_feature 1..80: note = Artificially Synthesized Probe
  source 1..80: mol_type = other DNA

SEQ ID NO: 135499 - DNA, 80 bp, synthetic construct
  misc_feature 1..80: note = Artificially Synthesized Probe
  source 1..80: mol_type = other DNA
actgggattacaggcatgtgccaccaagcctggctaattttgtatttttggtagagatggggtttctccatgttggtcag

SEQ ID NO: 135500 - DNA, 80 bp, synthetic construct
  misc_feature 1..80: note = Artificially Synthesized Probe
  source 1..80: mol_type = other DNA
agccatggatagggagggcaggggcaatataaatgaatagaaaaaattgatgactaggataagtgttgatagagaaaata

SEQ ID NO: 135501 - DNA, 80 bp, synthetic construct
  misc_feature 1..80: note = Artificially Synthesized Probe
  source 1..80: mol_type = other DNA
agtaaaaaaaactagctgggcgtagtggcgggcgcctgtaatccaagctgcttgggaggctgagacaggagaaccacttg

SEQ ID NO: 135502 - DNA, 80 bp, synthetic construct
  misc_feature 1..80: note = Artificially Synthesized Probe
  source 1..80: mol_type = other DNA
agtctagcactatattacgaacttttctccatgaaaatgcactcatatttatggaagtgaaaggaaaaaaatgtcttcag

SEQ ID NO: 135503 - DNA, 80 bp, synthetic construct; identical to SEQ ID NO: 42628
  misc_feature 1..80: note = Artificially Synthesized Probe
  source 1..80: mol_type = other DNA

SEQ ID NO: 135504 - DNA, 80 bp, synthetic construct
  misc_feature 1..80: note = Artificially Synthesized Probe
  source 1..80: mol_type = other DNA
gtctcgccctgtcacccaggctggagtgcggtggcacattctcagctcactgcaacctccacctttcgggttcaagcgat

SEQ ID NO: 135505 - DNA, 80 bp, synthetic construct
  misc_feature 1..80: note = Artificially Synthesized Probe
  source 1..80: mol_type = other DNA
ctgggattacaggcgtgatcctgtgagccactgtgcctggccacttatttttatttttagaggagtgtgacttttggttg

SEQ ID NO: 135506 - DNA, 80 bp, synthetic construct
  misc_feature 1..80: note = Artificially Synthesized Probe
  source 1..80: mol_type = other DNA
tcaatctcggctcactgcaacctctgcctcccaggttcaagcggttctcctgcctcagcctcccgagtagctgggactac

SEQ ID NO: 135507 - DNA, 80 bp, synthetic construct; identical to SEQ ID NO: 42629
  misc_feature 1..80: note = Artificially Synthesized Probe
  source 1..80: mol_type = other DNA

SEQ ID NO: 135508 - DNA, 80 bp, synthetic construct
  misc_feature 1..80: note = Artificially Synthesized Probe
  source 1..80: mol_type = other DNA
aattgcttaaaacgcagtgtaagtggtgctcactaaagtaaatatttttgaaagtcttaaaatttggataactttggtag

SEQ ID NO: 135509 - DNA, 80 bp, synthetic construct
  misc_feature 1..80: note = Artificially Synthesized Probe
  source 1..80: mol_type = other DNA
tcccgagtagctgggattacaggcacccgccaccacgcctggcctaatttttgtatttttagtagagacagggtttcacc

SEQ ID NO: 135510 - DNA, 80 bp, synthetic construct
  misc_feature 1..80: note = Artificially Synthesized Probe
  source 1..80: mol_type = other DNA
tttttttctatgacaaaattgggaatatttttgtagccgcctttttttttctcttcttgagaaggtagtgagtacattta

SEQ ID NO: 135511 - DNA, 80 bp, synthetic construct; identical to SEQ ID NO: 42630
  misc_feature 1..80: note = Artificially Synthesized Probe
  source 1..80: mol_type = other DNA

SEQ ID NO: 135512 - DNA, 80 bp, synthetic construct
  misc_feature 1..80: note = Artificially Synthesized Probe
  source 1..80: mol_type = other DNA
aatttagtatctctcctgtttctctggcctgcctggacttagctaagtggttttcacctagagtttaatgcgtttgtatt

SEQ ID NO: 135513 - DNA, 80 bp, synthetic construct
  misc_feature 1..80: note = Artificially Synthesized Probe
  source 1..80: mol_type = other DNA
acgaggtcttaccctgttgcccaggttagtcttgaactcctgggctcaggtggtctgcctgcctcggcctcccaaagtgc

SEQ ID NO: 135514 - DNA, 80 bp, synthetic construct
  misc_feature 1..80: note = Artificially Synthesized Probe
  source 1..80: mol_type = other DNA
gactgaatgtatgtcattgaacttccttagaaacttgtattttcactcttattttatactagaaaatgttagagatttag

SEQ ID NO: 135515 - DNA, 80 bp, synthetic construct
  misc_feature 1..80: note = Artificially Synthesized Probe
  source 1..80: mol_type = other DNA
agttccagctactcgggaggctgaggcaggggaatcgcttgaacctgggaggcggaggttgcagtgagccgagatcgcac

SEQ ID NO: 135516 - DNA, 80 bp, synthetic construct
  misc_feature 1..80: note = Artificially Synthesized Probe
  source 1..80: mol_type = other DNA
catggtgaaaccccatctctactaaaaatacgtaaaaaaaaaattagctaggtgtggtggcaggcgcctgtaatcccagc

SEQ ID NO: 135517 - DNA, 80 bp, synthetic construct; identical to SEQ ID NO: 42631
  misc_feature 1..80: note = Artificially Synthesized Probe
  source 1..80: mol_type = other DNA

SEQ ID NO: 135518 - DNA, 80 bp, synthetic construct
  misc_feature 1..80: note = Artificially Synthesized Probe
  source 1..80: mol_type = other DNA
ttttgtttaggaaatcatgaaagttgtttgaattcatatattcaggaatcaggaaagttctggtaaacctcagaagcaaa

SEQ ID NO: 135519 - DNA, 80 bp, synthetic construct
  misc_feature 1..80: note = Artificially Synthesized Probe
  source 1..80: mol_type = other DNA
atagtgtgtaacagacatgcccaaccataaacaattttttgtgtttaaatagtttaagctgggcttacaggctggctttt

SEQ ID NO: 135520 - DNA, 80 bp, synthetic construct; identical to SEQ ID NO: 42632
  misc_feature 1..80: note = Artificially Synthesized Probe
  source 1..80: mol_type = other DNA

SEQ ID NO: 135521 - DNA, 80 bp, synthetic construct
  misc_feature 1..80: note = Artificially Synthesized Probe
  source 1..80: mol_type = other DNA
agaagaatcagccaaacaaagcatgatctacttttaggctagatagacatatgataactcttatcaacagactttttttg

SEQ ID NO: 135522 - DNA, 80 bp, synthetic construct; identical to SEQ ID NO: 42611
  misc_feature 1..80: note = Artificially Synthesized Probe
  source 1..80: mol_type = other DNA

SEQ ID NO: 135523 - DNA, 80 bp, synthetic construct
  misc_feature 1..80: note = Artificially Synthesized Probe
  source 1..80: mol_type = other DNA
cttcttaaaaataagtcttatgttaactgggacacaaaaattaaatcttttgctatatcactcatattctgttcttgtgt

SEQ ID NO: 135524 - DNA, 80 bp, synthetic construct
  misc_feature 1..80: note = Artificially Synthesized Probe
  source 1..80: mol_type = other DNA
ccaggttgtattgtgctactggacgctggtcttatgggaatgaattatttactgttagtttttgttgttgttttcaaacg

SEQ ID NO: 135525 - DNA, 80 bp, synthetic construct
  misc_feature 1..80: note = Artificially Synthesized Probe
  source 1..80: mol_type = other DNA
gaaacgggggtttgccatgttggccaggctggtcttgaactcctgacctcaggtgatccacccacctcagcctcccaatg

SEQ ID NO: 135526 - DNA, 80 bp, synthetic construct; identical to SEQ ID NO: 42778
  misc_feature 1..80: note = Artificially Synthesized Probe
  source 1..80: mol_type = other DNA

SEQ ID NO: 135527 - DNA, 80 bp, synthetic construct
  misc_feature 1..80: note = Artificially Synthesized Probe
  source 1..80: mol_type = other DNA
atttttgcatttttagtggagacagggtttcaccatgttgctcaggctggtgtcaaactcctgacatcagatagatgatc

SEQ ID NO: 135528 - DNA, 80 bp, synthetic construct
  misc_feature 1..80: note = Artificially Synthesized Probe
  source 1..80: mol_type = other DNA
ttatatggctccaccattgcagctcttcatgactgagagccaaagataggtacttctgacctacaacccttctttttaca

SEQ ID NO: 135529 - DNA, 80 bp, synthetic construct; identical to SEQ ID NO: 42634
  misc_feature 1..80: note = Artificially Synthesized Probe
  source 1..80: mol_type = other DNA

SEQ ID NO: 135530 - DNA, 80 bp, synthetic construct
  misc_feature 1..80: note = Artificially Synthesized Probe
  source 1..80: mol_type = other DNA
ccgcggagaggagtgggacaactcctaaaggtagaatcagcttgtggagaggaaaggcccaaccttgagtcttttacgcc

SEQ ID NO: 135531 - DNA, 80 bp, synthetic construct
  misc_feature 1..80: note = Artificially Synthesized Probe
  source 1..80: mol_type = other DNA
ttctcctgcgtcagcttcctgagtagctgggattacaggcacataccaccacacccagctggtttttctatttttagtag

SEQ ID NO: 135532 - DNA, 80 bp, synthetic construct
  misc_feature 1..80: note = Artificially Synthesized Probe
  source 1..80: mol_type = other DNA
ttgcttagagtttcctaatgtgtaaaacttgttttatgtatcaaaagtgttttgactccagttgggatgtgagtagctat

SEQ ID NO: 135533 - DNA, 80 bp, synthetic construct
  misc_feature 1..80: note = Artificially Synthesized Probe
  source 1..80: mol_type = other DNA
tttggcgcttactcaaaaataacaatgttatttatactttttaacagagacttacaaataagtcaaatttatgaactagt

SEQ ID NO: 135534 - DNA, 80 bp, synthetic construct
  misc_feature 1..80: note = Artificially Synthesized Probe
  source 1..80: mol_type = other DNA
gatgacaaagttgtattggactcttgtttgcatttatatagcagatgaagaatcaggtacacttccaatttccagtttct

SEQ ID NO: 135535 - DNA, 80 bp, synthetic construct
  misc_feature 1..80: note = Artificially Synthesized Probe
  source 1..80: mol_type = other DNA
tgtcacatgcaatgccgagaactaacaatatgggatggttttcctataattttaggattatttccattcaatacttggac

SEQ ID NO: 135536 - DNA, 80 bp, synthetic construct; identical to SEQ ID NO: 42635
  misc_feature 1..80: note = Artificially Synthesized Probe
  source 1..80: mol_type = other DNA

SEQ ID NO: 135537 - DNA, 80 bp, synthetic construct
  misc_feature 1..80: note = Artificially Synthesized Probe
  source 1..80: mol_type = other DNA
gttagccaggatggtctcgatctcctgaccttctgatcctcctgcctcggcctcccaaagtgctgggattacaggtgtgg

SEQ ID NO: 135538 - DNA, 80 bp, synthetic construct
  misc_feature 1..80: note = Artificially Synthesized Probe
  source 1..80: mol_type = other DNA
ctgggactacaggcgcccgccacctcacccggctaattttttgtatttttagtagagacggggtttcactgtgttagcca

SEQ ID NO: 135539 - DNA, 80 bp, synthetic construct; identical to SEQ ID NO: 42636
  misc_feature 1..80: note = Artificially Synthesized Probe
  source 1..80: mol_type = other DNA

SEQ ID NO: 135540 - DNA, 80 bp, synthetic construct
  misc_feature 1..80: note = Artificially Synthesized Probe
  source 1..80: mol_type = other DNA
cttgtttcccaggctggagtacaatggcctgatctcagctcactgcaacatttgcctctcaggttcaagtcattctcctg

SEQ ID NO: 135541 - DNA, 80 bp, synthetic construct
  misc_feature 1..80: note = Artificially Synthesized Probe
  source 1..80: mol_type = other DNA
atagccatgagccactgtacccggccattagtcatgctttaaaatttaaattgtttcccttatcaacaacataatgctgt

SEQ ID NO: 135542 - DNA, 80 bp, synthetic construct
  misc_feature 1..80: note = Artificially Synthesized Probe
  source 1..80: mol_type = other DNA
caaactgagagctgtttgatgcaaataataaatagaaggaggaaactgaaagatttaaccagggtgacatatttctttac

SEQ ID NO: 135543 - DNA, 80 bp, synthetic construct
  misc_feature 1..80: note = Artificially Synthesized Probe
  source 1..80: mol_type = other DNA
tggtaaagccccgtctctactgaaaatgcaaaaaaagttagccgggtggggtggcaggcagctgtagtcccagctactca

SEQ ID NO: 135544 - DNA, 80 bp, synthetic construct; identical to SEQ ID NO: 42637
  misc_feature 1..80: note = Artificially Synthesized Probe
  source 1..80: mol_type = other DNA

SEQ ID NO: 135545 - DNA, 80 bp, synthetic construct
  misc_feature 1..80: note = Artificially Synthesized Probe
  source 1..80: mol_type = other DNA
atttttgtatttttagtagagatggggtttcaccatgttggccaggatgatcttgatctcttgacctgtgatccacctgc

SEQ ID NO: 135546 - DNA, 80 bp, synthetic construct
  misc_feature 1..80: note = Artificially Synthesized Probe
  source 1..80: mol_type = other DNA
agcaaccctgtgtgaacatatcttcatatctgtcctgtcctaattctgtaataagtcaaccacaaagctcttttcctcct

SEQ ID NO: 135547 - DNA, 80 bp, synthetic construct
  misc_feature 1..80: note = Artificially Synthesized Probe
  source 1..80: mol_type = other DNA
agcccttaacatcttggggtagattttctgctaaattctgcctaatcatctgatgtcatggtctatgaccacggaggcgt

SEQ ID NO: 135548 - DNA, 80 bp, synthetic construct
  misc_feature 1..80: note = Artificially Synthesized Probe
  source 1..80: mol_type = other DNA
ttaaggaatacttgttaagcatttatttgcctgtcccgtttcttattattatcttttttcatggacacctctcataacat

SEQ ID NO: 135549 - DNA, 80 bp, synthetic construct; identical to SEQ ID NO: 42638
  misc_feature 1..80: note = Artificially Synthesized Probe
  source 1..80: mol_type = other DNA

SEQ ID NO: 135550 - DNA, 80 bp, synthetic construct
  misc_feature 1..80: note = Artificially Synthesized Probe
  source 1..80: mol_type = other DNA
gtaggtaagtgtacggagccagactccctgggtatggatcccagtttttttcttattaattgtgtgagcttgggcaaatt

SEQ ID NO: 135551 - DNA, 80 bp, synthetic construct
  misc_feature 1..80: note = Artificially Synthesized Probe
  source 1..80: mol_type = other DNA
agtggaagcattcttgttctgtaacacctttcgtcctggcactctagtgatttgcattgaggaggcaaggtaaaacagtt

SEQ ID NO: 135552 - DNA, 80 bp, synthetic construct; identical to SEQ ID NO: 42639
  misc_feature 1..80: note = Artificially Synthesized Probe
  source 1..80: mol_type = other DNA

SEQ ID NO: 135553 - DNA, 80 bp, synthetic construct
  misc_feature 1..80: note = Artificially Synthesized Probe
  source 1..80: mol_type = other DNA
attttaacacactgattttcataaatctattgttttcccagtagaactttataatttattttgaaatattttctaatttc

SEQ ID NO: 135554 - DNA, 80 bp, synthetic construct
  misc_feature 1..80: note = Artificially Synthesized Probe
  source 1..80: mol_type = other DNA
ctcttggtgaacgtaccatgtgcacttgcaaagaaaatgtggttgttgaatatactgttctctatatgtcatttaggtca

SEQ ID NO: 135555 - DNA, 80 bp, synthetic construct
  misc_feature 1..80: note = Artificially Synthesized Probe
  source 1..80: mol_type = other DNA
tttaggcacatagttacagtttcttgatgaattgacctttttatcattatgtccctctttacctctgggaatattctttt

SEQ ID NO: 135556 - DNA, 80 bp, synthetic construct
  misc_feature 1..80: note = Artificially Synthesized Probe
  source 1..80: mol_type = other DNA
agcagacaaatagttcctatttcattttgcagatgaaagtaaactgaagagtggtggtggtattgggagtgatttacgga

SEQ ID NO: 135557 - DNA, 80 bp, synthetic construct
  misc_feature 1..80: note = Artificially Synthesized Probe
  source 1..80: mol_type = other DNA
gctaatttttgtattttttggtagagatggggttttaccatgttggccaggctggtcttgaattcctgacttcaggtgat

SEQ ID NO: 135558 - DNA, 80 bp, synthetic construct; identical to SEQ ID NO: 42640
  misc_feature 1..80: note = Artificially Synthesized Probe
  source 1..80: mol_type = other DNA

SEQ ID NO: 135559 - DNA, 80 bp, synthetic construct
  misc_feature 1..80: note = Artificially Synthesized Probe
  source 1..80: mol_type = other DNA
gtgcagtggcacacgatcttggcttgctgcagcctccacctcctgggttcaagcaattctcctatcttagcctcccaagt

SEQ ID NO: 135560 - DNA, 80 bp, synthetic construct
  misc_feature 1..80: note = Artificially Synthesized Probe
  source 1..80: mol_type = other DNA
acgcccagcctggattgaataatatttatcactctttcatcctttttttcttttgagacaatgtctcactctgttgccca

SEQ ID NO: 135561 - DNA, 80 bp, synthetic construct; identical to SEQ ID NO: 42641
  misc_feature 1..80: note = Artificially Synthesized Probe
  source 1..80: mol_type = other DNA

SEQ ID NO: 135562 - DNA, 80 bp, synthetic construct
  misc_feature 1..80: note = Artificially Synthesized Probe
  source 1..80: mol_type = other DNA
accaccaggcccagttagtttttttgtgtttttttgtagagacagggtttcaccatgttgcccaaactggtctcaagctc

SEQ ID NO: 135563 - DNA, 80 bp, synthetic construct
  misc_feature 1..80: note = Artificially Synthesized Probe
  source 1..80: mol_type = other DNA
attttcatttacgcccttgagcatagttataacagctgctctaaaatctttgtatgctaaatgcatcatcttagagtcag

SEQ ID NO: 135564 - DNA, 80 bp, synthetic construct
  misc_feature 1..80: note = Artificially Synthesized Probe
  source 1..80: mol_type = other DNA
ttaacttggctatactcaaacgttaagttttctgtcttgcctatggtaggtggcaactgacattcttttcaattcttcta

SEQ ID NO: 135565 - DNA, 80 bp, synthetic construct; identical to SEQ ID NO: 42642
  misc_feature 1..80: note = Artificially Synthesized Probe
  source 1..80: mol_type = other DNA

SEQ ID NO: 135566 - DNA, 80 bp, synthetic construct; identical to SEQ ID NO: 42612
  misc_feature 1..80: note = Artificially Synthesized Probe
  source 1..80: mol_type = other DNA

SEQ ID NO: 135567 - DNA, 80 bp, synthetic construct
  misc_feature 1..80: note = Artificially Synthesized Probe
  source 1..80: mol_type = other DNA
tagagtgtcgtgatcaccatgttcctgtcaatattagtgatcatttctgtcaatggaatacataattcagaaggaattgc

SEQ ID NO: 135568 - DNA, 80 bp, synthetic construct
  misc_feature 1..80: note = Artificially Synthesized Probe
  source 1..80: mol_type = other DNA
tagctggccgtggtggtgggagcttgtcatcccagccactcgagaggcggaggcaaggagaaacgcttgaacctgagatg

SEQ ID NO: 135569 - DNA, 80 bp, synthetic construct
  misc_feature 1..80: note = Artificially Synthesized Probe
  source 1..80: mol_type = other DNA
cactttagaccaggagttcgagaccagcctggccaacatggtgagaccccttttctactaaaaatgcaaaaattagctgg

SEQ ID NO: 135570 - DNA, 80 bp, synthetic construct; identical to SEQ ID NO: 42643
  misc_feature 1..80: note = Artificially Synthesized Probe
  source 1..80: mol_type = other DNA

SEQ ID NO: 135571 - DNA, 80 bp, synthetic construct
  misc_feature 1..80: note = Artificially Synthesized Probe
  source 1..80: mol_type = other DNA
agtaaacttaaaattttaaatatgtgaagctggcacagttatttgaatagtcaccatttctattgtatagttttatctgt

SEQ ID NO: 135572 - DNA, 80 bp, synthetic construct
  misc_feature 1..80: note = Artificially Synthesized Probe
  source 1..80: mol_type = other DNA
gtcaggagttcgagaccagcctggccaacatagtgaaaccccacctctactaaaaatacaaaaattaggtgggtatggtg

SEQ ID NO: 135573 - DNA, 80 bp, synthetic construct
  misc_feature 1..80: note = Artificially Synthesized Probe
  source 1..80: mol_type = other DNA
agccacggtggctcacacctataatcccagcactttggaaggctgaggcaggtgggtcacctgaggttaggagtttgaga

SEQ ID NO: 135574 - DNA, 80 bp, synthetic construct
  misc_feature 1..80: note = Artificially Synthesized Probe
  source 1..80: mol_type = other DNA
cactccagcctgggtgacagagcaagactctgtctcaaaaaaaaaaagaaaagaaaagaaaaaaaaaagaaaaaaagagc

SEQ ID NO: 135575 - DNA, 80 bp, synthetic construct; identical to SEQ ID NO: 42644
  misc_feature 1..80: note = Artificially Synthesized Probe
  source 1..80: mol_type = other DNA

SEQ ID NO: 135576 - DNA, 80 bp, synthetic construct
  misc_feature 1..80: note = Artificially Synthesized Probe
  source 1..80: mol_type = other DNA
ccacgcccagctaattttgtatatttagtagagatgggatttcaccatgttggtcaggctggtctcgaactcctgacctc

SEQ ID NO: 135577 - DNA, 80 bp, synthetic construct
  misc_feature 1..80: note = Artificially Synthesized Probe
  source 1..80: mol_type = other DNA
ctgacctcaggtgatctgcccgcctcagcctcccaaagtgctgggattatagccgtgagccaccatacctggcccttttt

SEQ ID NO: 135578 - DNA, 80 bp, synthetic construct
  misc_feature 1..80: note = Artificially Synthesized Probe
  source 1..80: mol_type = other DNA
gtgaagtcatcctttaaaaaaatgtaacttgggaccttggtaagactttccacagctttttgaatgtttgttttcacatt

SEQ ID NO: 135579 - DNA, 80 bp, synthetic construct; identical to SEQ ID NO: 42645
  misc_feature 1..80: note = Artificially Synthesized Probe
  source 1..80: mol_type = other DNA

SEQ ID NO: 135580 - DNA, 80 bp, synthetic construct
  misc_feature 1..80: note = Artificially Synthesized Probe
  source 1..80: mol_type = other DNA
tattttttcaactagatatgaagaagctgaagtccggaaaaaacttgaggaaaaagacaggcaggaggaagcacagcggc

SEQ ID NO: 135581 - DNA, 80 bp, synthetic construct
  misc_feature 1..80: note = Artificially Synthesized Probe
  source 1..80: mol_type = other DNA
gttaaaagactgtttctgcttgttagatgatttgcttaaaaagagttgagataccactataaagttcttttaggcaacaa

SEQ ID NO: 135582 - DNA, 80 bp, synthetic construct
  misc_feature 1..80: note = Artificially Synthesized Probe
  source 1..80: mol_type = other DNA
aatacaaaagttagctggatgtggtggtgcatgcctgtagtcccagctactcgagaggctaaagtaggagaattgcttga

SEQ ID NO: 135583 - DNA, 80 bp, synthetic construct
  misc_feature 1..80: note = Artificially Synthesized Probe
  source 1..80: mol_type = other DNA
tttctctgcattaattcgttttttagcagacattataaacttaattagagcaatagaaaaatcatttgagctgagctgtg

SEQ ID NO: 135584 - DNA, 80 bp, synthetic construct; identical to SEQ ID NO: 42646
  misc_feature 1..80: note = Artificially Synthesized Probe
  source 1..80: mol_type = other DNA

SEQ ID NO: 135585 - DNA, 80 bp, synthetic construct
  misc_feature 1..80: note = Artificially Synthesized Probe
  source 1..80: mol_type = other DNA
ccgccaccacacccggctaatttttgtatttttagtagagatggggtttcaccatgttggccaggctggtctcgaactcc

SEQ ID NO: 135586 - DNA, 80 bp, synthetic construct
  misc_feature 1..80: note = Artificially Synthesized Probe
  source 1..80: mol_type = other DNA
caacctctgcttcccgggttcaactaattctcctaggcttcagccttttgagtagctgggattacaggcacccaccacca

SEQ ID NO: 135587 - DNA, 80 bp, synthetic construct; identical to SEQ ID NO: 42647
  misc_feature 1..80: note = Artificially Synthesized Probe
  source 1..80: mol_type = other DNA

SEQ ID NO: 135588 - DNA, 80 bp, synthetic construct
  misc_feature 1..80: note = Artificially Synthesized Probe
  source 1..80: mol_type = other DNA
tttctgctttgatttttttcttagacattttgtagctttcagttatcattctgtgtggatcatcattcctttcattaaaa

SEQ ID NO: 135589 - DNA, 80 bp, synthetic construct
  misc_feature 1..80: note = Artificially Synthesized Probe
  source 1..80: mol_type = other DNA
taccatactaattcaagtaaaacagttctcatgtatagtgaataagggttaactaagccttgtctcttttgactaacaca

SEQ ID NO: 135590 - DNA, 80 bp, synthetic construct
  misc_feature 1..80: note = Artificially Synthesized Probe
  source 1..80: mol_type = other DNA
ttttgttgcccaggctggagtgcagtggcgcgatctcagctcactgcaacctccacctcccaggttgaagcaattctcct

SEQ ID NO: 135591 - DNA, 80 bp, synthetic construct
  misc_feature 1..80: note = Artificially Synthesized Probe
  source 1..80: mol_type = other DNA
tacaggcgtcagccaccgtgcctggcctctacaaacattttttaaaaaattagccagtcatgatagtgcacacctgtagt

SEQ ID NO: 135592 - DNA, 80 bp, synthetic construct; identical to SEQ ID NO: 42648
  misc_feature 1..80: note = Artificially Synthesized Probe
  source 1..80: mol_type = other DNA

SEQ ID NO: 135593 - DNA, 80 bp, synthetic construct
  misc_feature 1..80: note = Artificially Synthesized Probe
  source 1..80: mol_type = other DNA
tagctgggcgtggtagcacacgcctgtaatcccagctactcaggaggctgaggcaggagaattgcttgaacctgagaggc

SEQ ID NO: 135594 - DNA, 80 bp, synthetic construct
  misc_feature 1..80: note = Artificially Synthesized Probe
  source 1..80: mol_type = other DNA
ttgctttaattatgtggtggaggacactgaatgggatagccagaatttttgtttgattgtaagaagtactttctaatcaa

SEQ ID NO: 135595 - DNA, 80 bp, synthetic construct
  misc_feature 1..80: note = Artificially Synthesized Probe
  source 1..80: mol_type = other DNA
ctactgccaaagaaaccttttaatatcattattattcgtctgcgtttttataaaaggccagtactctgcacagttcgttt

SEQ ID NO: 135596 - DNA, 80 bp, synthetic construct
  misc_feature 1..80: note = Artificially Synthesized Probe
  source 1..80: mol_type = other DNA
agttgttttaggttctgactgagatcttttaatcagaataagcatcaggttttatacaatgagattcttagcattgttgt

SEQ ID NO: 135597 - DNA, 80 bp, synthetic construct; identical to SEQ ID NO: 42649
  misc_feature 1..80: note = Artificially Synthesized Probe
  source 1..80: mol_type = other DNA

SEQ ID NO: 135598 - DNA, 80 bp, synthetic construct
  misc_feature 1..80: note = Artificially Synthesized Probe
  source 1..80: mol_type = other DNA
gaatacatggtaaactttaagtaggacttattatcatttatgactaggttgtagatttaattttttctccccccatccat

SEQ ID NO: 135599 - DNA, 80 bp, synthetic construct
  misc_feature 1..80: note = Artificially Synthesized Probe
  source 1..80: mol_type = other DNA
tggtgaaacccctgtctctacaaaaaatacaaaaattagctgggtgtggtggtggatgcccttagtcccatctgctcagg

SEQ ID NO: 135600 - DNA, 80 bp, synthetic construct
  misc_feature 1..80: note = Artificially Synthesized Probe
  source 1..80: mol_type = other DNA
tgccgccacgcccagctaattttttgtgttttagtagagatggggtttcactgtgttgcccaggctggtcacgaactcct

SEQ ID NO: 135601 - DNA, 80 bp, synthetic construct; identical to SEQ ID NO: 42650
  misc_feature 1..80: note = Artificially Synthesized Probe
  source 1..80: mol_type = other DNA

SEQ ID NO: 135602 - DNA, 80 bp, synthetic construct
  misc_feature 1..80: note = Artificially Synthesized Probe
  source 1..80: mol_type = other DNA
ctgagtgtgctataaggtacttccctaaaagctgttactgattcattccaagattagtttttatgcatttgttcctttgt

SEQ ID NO: 135603 - DNA, 80 bp, synthetic construct
  misc_feature 1..80: note = Artificially Synthesized Probe
  source 1..80: mol_type = other DNA
cagctcactgctgaaacagcttattatataatctcaactctcttgtagtgccttttaatctttcacttcagtagagctaa

SEQ ID NO: 135604 - DNA, 80 bp, synthetic construct
  misc_feature 1..80: note = Artificially Synthesized Probe
  source 1..80: mol_type = other DNA
gaacatcaagtagaatgacaattggcaaatttttcttaaagggatagatggtaaacattttaggcttggggaaccttatg

SEQ ID NO: 135605 - DNA, 80 bp, synthetic construct
  misc_feature 1..80: note = Artificially Synthesized Probe
  source 1..80: mol_type = other DNA
taagaatacttggatatctaagtttttcaaaaagctaccgtaagactgccatcagagaccttttgaatttagaacttttc

SEQ ID NO: 135606 - DNA, 80 bp, synthetic construct; identical to SEQ ID NO: 42651
  misc_feature 1..80: note = Artificially Synthesized Probe
  source 1..80: mol_type = other DNA

SEQ ID NO: 135607 - DNA, 80 bp, synthetic construct
  misc_feature 1..80: note = Artificially Synthesized Probe
  source 1..80: mol_type = other DNA
aaattagccaggcgtggtaacagcctgtgttcccagctactcaggaggctgaggcaggagaatcacttgaacctgggagg

SEQ ID NO: 135608 - DNA, 80 bp, synthetic construct
  misc_feature 1..80: note = Artificially Synthesized Probe
  source 1..80: mol_type = other DNA
tatactttgctcttctagaaaaagcggtttgtcctgtgttttgtgatgtcagcacatcttgtgctgtttcttgtcactta

SEQ ID NO: 135609 - DNA, 80 bp, synthetic construct
  misc_feature 1..80: note = Artificially Synthesized Probe
  source 1..80: mol_type = other DNA
gtccagggtgggttattgtgtagtaaagtagtaaactgtgtagtaagtagtaaactgtggaccttagtaaatgttactac

SEQ ID NO: 135610 - DNA, 80 bp, synthetic construct; identical to SEQ ID NO: 42652
  misc_feature 1..80: note = Artificially Synthesized Probe
  source 1..80: mol_type = other DNA

SEQ ID NO: 135611 - DNA, 80 bp, synthetic construct
  misc_feature 1..80: note = Artificially Synthesized Probe
  source 1..80: mol_type = other DNA
tctcctattggtggtatttagaatcttatcaaaagagaaatgaagttgccttttccctctctccccagatgtttgttaac

SEQ ID NO: 135612 - DNA, 80 bp, synthetic construct
  misc_feature 1..80: note = Artificially Synthesized Probe
  source 1..80: mol_type = other DNA
atagtactgaaccctatatatactatgttttccctatatatacatttttatgataaagtttaacttataaattagtaaca

SEQ ID NO: 135613 - DNA, 80 bp, synthetic construct
  misc_feature 1..80: note = Artificially Synthesized Probe
  source 1..80: mol_type = other DNA
tagtctctgatgccagactctattcaaataactgtcacttactagttgcattattactaggtagtgacctaacatttcta

SEQ ID NO: 135614 - DNA, 80 bp, synthetic construct; identical to SEQ ID NO: 42653
  misc_feature 1..80: note = Artificially Synthesized Probe
  source 1..80: mol_type = other DNA

SEQ ID NO: 135615 - DNA, 80 bp, synthetic construct
  misc_feature 1..80: note = Artificially Synthesized Probe
  source 1..80: mol_type = other DNA
cctgaagcgtagagtgctttgtaaataagctatttaaaaattagagctcttaggccgggcacactggctcacacctgtaa

SEQ ID NO: 135616 - DNA, 80 bp, synthetic construct
  misc_feature 1..80: note = Artificially Synthesized Probe
  source 1..80: mol_type = other DNA
gagtggcatgaacccgggaggcggaggttgcagtgagccgagatcacggcactgcactccagcctgggctacagagggag

SEQ ID NO: 135617 - DNA, 80 bp, synthetic construct
  misc_feature 1..80: note = Artificially Synthesized Probe
  source 1..80: mol_type = other DNA
tttaaagatgctggaaaaacacccatggagccggagatagcaattcactgaattcgaatcactctctatgagccacagca

SEQ ID NO: 135618 - DNA, 80 bp, synthetic construct
  misc_feature 1..80: note = Artificially Synthesized Probe
  source 1..80: mol_type = other DNA
gagaatccacaaacaactcattgacttgcacatcctttctgagattgttaagcagattacttccatcagtactgagccag

SEQ ID NO: 135619 - DNA, 80 bp, synthetic construct; identical to SEQ ID NO: 42654
  misc_feature 1..80: note = Artificially Synthesized Probe
  source 1..80: mol_type = other DNA

SEQ ID NO: 135620 - DNA, 80 bp, synthetic construct
  misc_feature 1..80: note = Artificially Synthesized Probe
  source 1..80: mol_type = other DNA
tcttaactgaagggaacaggtctcagagctttctgtaggttacagtacctacaactagctgatagtgattactgtatttt

SEQ ID NO: 135621 - DNA, 80 bp, synthetic construct
  misc_feature 1..80: note = Artificially Synthesized Probe
  source 1..80: mol_type = other DNA
gccaccatgcccagctgatttttgtatttttttgtagagacggggttttgccacattgcccagacagctctcaaactcct

SEQ ID NO: 135622 - DNA, 80 bp, synthetic construct
  misc_feature 1..80: note = Artificially Synthesized Probe
  source 1..80: mol_type = other DNA
ttatttttgagacagagtcttgctctgtcgcccaggctggagtgcaatggtgtgatctcggccaactgcagcctccacct

SEQ ID NO: 135623 - DNA, 80 bp, synthetic construct; identical to SEQ ID NO: 42613
  misc_feature 1..80: note = Artificially Synthesized Probe
  source 1..80: mol_type = other DNA

SEQ ID NO: 135624 - DNA, 80 bp, synthetic construct; identical to SEQ ID NO: 42655
  misc_feature 1..80: note = Artificially Synthesized Probe
  source 1..80: mol_type = other DNA

SEQ ID NO: 135625 - DNA, 80 bp, synthetic construct
  misc_feature 1..80: note = Artificially Synthesized Probe
  source 1..80: mol_type = other DNA
ggtgtgcgccaccacacccggctaatttttgtatttttagtagacacagggtttcactatgttggccaggctggtcttga

SEQ ID NO: 135626 - DNA, 80 bp, synthetic construct
  misc_feature 1..80: note = Artificially Synthesized Probe
  source 1..80: mol_type = other DNA
ggtttttttttttttctgcaatctgcctacaatcccaggccttactgtagctcctaaaactgtttcccagtttctcttct

SEQ ID NO: 135627 - DNA, 80 bp, synthetic construct
  misc_feature 1..80: note = Artificially Synthesized Probe
  source 1..80: mol_type = other DNA
gttgtacatacatattttatcaccgaggtattaagctcagtacccaatagttatcttttctgctcctctccctcctctta

SEQ ID NO: 135628 - DNA, 80 bp, synthetic construct; identical to SEQ ID NO: 42656
  misc_feature 1..80: note = Artificially Synthesized Probe
  source 1..80: mol_type = other DNA

SEQ ID NO: 135629 - DNA, 80 bp, synthetic construct
  misc_feature 1..80: note = Artificially Synthesized Probe
  source 1..80: mol_type = other DNA
gtgtagttgtagtttgttcattctcattgccatatgatgttctgttgtgtgaatatagcgcaatttacttaaatatttta

SEQ ID NO: 135630 - DNA, 80 bp, synthetic construct
  misc_feature 1..80: note = Artificially Synthesized Probe
  source 1..80: mol_type = other DNA
aatttaataaaagacaagtagagcagagttggagcagattgtgaagatggtacataaaagacagaagtttgagaaatgtt

SEQ ID NO: 135631 - DNA, 80 bp, synthetic construct
  misc_feature 1..80: note = Artificially Synthesized Probe
  source 1..80: mol_type = other DNA
tccttctttgttgaccaagcatccttctgatctgtgtacatcaggagaggatattagtagacaatattttatatttcttc

SEQ ID NO: 135632 - DNA, 80 bp, synthetic construct; identical to SEQ ID NO: 42657
  misc_feature 1..80: note = Artificially Synthesized Probe
  source 1..80: mol_type = other DNA

SEQ ID NO: 135633 - DNA, 80 bp, synthetic construct
  misc_feature 1..80: note = Artificially Synthesized Probe
  source 1..80: mol_type = other DNA
cctcagcctcctgagtagctgagactccagtcatgcaccaccacttccagctaatttttgtatttttaattagagacagg

SEQ ID NO: 135634 - DNA, 80 bp, synthetic construct
  misc_feature 1..80: note = Artificially Synthesized Probe
  source 1..80: mol_type = other DNA
attcactgaacactttctgtgggctgggttactgtgttctaagtgctgggctaagccattgaacaaacaaaaaattgtct

SEQ ID NO: 135635 - DNA, 80 bp, synthetic construct; identical to SEQ ID NO: 42658
  misc_feature 1..80: note = Artificially Synthesized Probe
  source 1..80: mol_type = other DNA

SEQ ID NO: 135636 - DNA, 80 bp, synthetic construct
  misc_feature 1..80: note = Artificially Synthesized Probe
  source 1..80: mol_type = other DNA
gcatctacagtgtggatacactggacaaagggatgattcatgtcacagactgggcgaagtgaggtggtgcacaatttaaa

SEQ ID NO: 135637 - DNA, 80 bp, synthetic construct
  misc_feature 1..80: note = Artificially Synthesized Probe
  source 1..80: mol_type = other DNA
cattgtgaggactttagcttttttttttttttttttgagacagagtcttgctttgtcgcccaggctggagtgcagtggca

SEQ ID NO: 135638 - DNA, 80 bp, synthetic construct
  misc_feature 1..80: note = Artificially Synthesized Probe
  source 1..80: mol_type = other DNA
tgacctcaggtgatccacccgcctcagcctcccaaagtgctgggattacaggcatgagccaccatgcccagccggacttt

SEQ ID NO: 135639 - DNA, 80 bp, synthetic construct
  misc_feature 1..80: note = Artificially Synthesized Probe
  source 1..80: mol_type = other DNA
ttaatctgttcgtgcctcagtttccccaaaatagaaataataatgttcgtcttacaggattgttgtgaagactcaatgag

SEQ ID NO: 135640 - DNA, 80 bp, synthetic construct
  misc_feature 1..80: note = Artificially Synthesized Probe
  source 1..80: mol_type = other DNA
tggctgaaagaggagctcagataattttctctgttttcagttttgctccccccttgactttttttaaaaggtcagaatga

SEQ ID NO: 135641 - DNA, 80 bp, synthetic construct
  misc_feature 1..80: note = Artificially Synthesized Probe
  source 1..80: mol_type = other DNA
gactgtggaacaaaactgagtgtcttctgttagtatattaggacctcttgttgacttttgccccaatttaaatattaata

SEQ ID NO: 135642 - DNA, 80 bp, synthetic construct; identical to SEQ ID NO: 42659
  misc_feature 1..80: note = Artificially Synthesized Probe
  source 1..80: mol_type = other DNA

SEQ ID NO: 135643 - DNA, 80 bp, synthetic construct
  misc_feature 1..80: note = Artificially Synthesized Probe
  source 1..80: mol_type = other DNA
agctagagtacagtggcgtgatctcagctcactgcaacctccgcgtcccaggttcaagcgattctcctgcctcagcctcc

SEQ ID NO: 135644 - DNA, 80 bp, synthetic construct
  misc_feature 1..80: note = Artificially Synthesized Probe
  source 1..80: mol_type = other DNA
gcagctgcgcccagcccatcatgctttgattgtagaattttttataaattcaggtttaaaagatttgttttggctgggtg

SEQ ID NO: 135645 - DNA, 80 bp, synthetic construct
  misc_feature 1..80: note = Artificially Synthesized Probe
  source 1..80: mol_type = other DNA
ctctactaaaaattacaaaaaaattagccgggcgcagtggcgggggcctgtagtcccagctactcgggaggctgaggcag

SEQ ID NO: 135646 - DNA, 80 bp, synthetic construct; identical to SEQ ID NO: 42660
  misc_feature 1..80: note = Artificially Synthesized Probe
  source 1..80: mol_type = other DNA

SEQ ID NO: 135647 - DNA, 80 bp, synthetic construct
  misc_feature 1..80: note = Artificially Synthesized Probe
  source 1..80: mol_type = other DNA
taatagagtaaaatgaaataattacacattataataccaatttcagaacaagagttatgggcataagcatcctggaggtg

SEQ ID NO: 135648 - DNA, 80 bp, synthetic construct
  misc_feature 1..80: note = Artificially Synthesized Probe
  source 1..80: mol_type = other DNA
tgtcttacacacacacaaaaaaagattacaaggcagaagacaggcagaaatatttacaacacatatggcagtggtttaaa

SEQ ID NO: 135649 - DNA, 80 bp, synthetic construct
  misc_feature 1..80: note = Artificially Synthesized Probe
  source 1..80: mol_type = other DNA
acgagtgccattttcactgatcaagttaacaaaggtttaaaaaataatacggttgtcctcagtatttgtgggggattgat

SEQ ID NO: 135650 - DNA, 80 bp, synthetic construct; identical to SEQ ID NO: 42661
  misc_feature 1..80: note = Artificially Synthesized Probe
  source 1..80: mol_type = other DNA

SEQ ID NO: 135651 - DNA, 80 bp, synthetic construct
  misc_feature 1..80: note = Artificially Synthesized Probe
  source 1..80: mol_type = other DNA
agtagctgggactacaggtacgcaccatgcctggctaattttttaaaattttctagtagagacaaggtattgctatgttg

SEQ ID NO: 135652 - DNA, 80 bp, synthetic construct
  misc_feature 1..80: note = Artificially Synthesized Probe
  source 1..80: mol_type = other DNA
tttaatttaatttaattttatttatttcgagatggagtctcactctgtcacccaggctggagtgcagtggtgcaatcttg

SEQ ID NO: 135653 - DNA, 80 bp, synthetic construct
  misc_feature 1..80: note = Artificially Synthesized Probe
  source 1..80: mol_type = other DNA
tgccttctcagctcactgcagccttgacatcctgtgctcaggtagtcctcccaactcagcctcctgagtagctgaggcgt

SEQ ID NO: 135654 - DNA, 80 bp, synthetic construct; identical to SEQ ID NO: 42662
  misc_feature 1..80: note = Artificially Synthesized Probe
  source 1..80: mol_type = other DNA

SEQ ID NO: 135655 - DNA, 80 bp, synthetic construct
  misc_feature 1..80: note = Artificially Synthesized Probe
  source 1..80: mol_type = other DNA
actggcattgacctacaaatggcagtttggcagtttcataaagttcaaactaagatatgtgaatgattagtgtatgataa

SEQ ID NO: 135656 - DNA, 80 bp, synthetic construct
  misc_feature 1..80: note = Artificially Synthesized Probe
  source 1..80: mol_type = other DNA
ctattaggagaaagcattggtattttttagtaccttgatgtcaaatcaagatgtcataaaggaaaatgaagactgtgttt

SEQ ID NO: 135657 - DNA, 80 bp, synthetic construct
  misc_feature 1..80: note = Artificially Synthesized Probe
  source 1..80: mol_type = other DNA
tgtgatcccaggtactgaggaggctgaggcaggagaattgctggaacccagtgggcagaggttgcaatgagccgagatcg

SEQ ID NO: 135658 - DNA, 80 bp, synthetic construct
  misc_feature 1..80: note = Artificially Synthesized Probe
  source 1..80: mol_type = other DNA
catgtttatattcattcttatattgatggttcccagtcttgactggtgttagaattcatttgggaagctttttaaaaata

SEQ ID NO: 135659 - DNA, 80 bp, synthetic construct
  misc_feature 1..80: note = Artificially Synthesized Probe
  source 1..80: mol_type = other DNA
actgtttactaaaaaaattgcaaataactatagaaaaaggggcaaaggatacaattattaaatagttaagtcatagaaca

SEQ ID NO: 135660 - DNA, 80 bp, synthetic construct; identical to SEQ ID NO: 42663
  misc_feature 1..80: note = Artificially Synthesized Probe
  source 1..80: mol_type = other DNA

SEQ ID NO: 135661 - DNA, 80 bp, synthetic construct
  misc_feature 1..80: note = Artificially Synthesized Probe
  source 1..80: mol_type = other DNA
cgattctcttgcctcagcctcccaagtagctgggattataggcgcctgccaccacgcctggctaatttttgtatgtttag

SEQ ID NO: 135662 - DNA, 80 bp, synthetic construct
  misc_feature 1..80: note = Artificially Synthesized Probe
  source 1..80: mol_type = other DNA
gcaatatattgaaaaccttaaaatgttcgtgtaccttagcttaagcaactccctttctgggagttttccttaaggaggtg

SEQ ID NO: 135663 - DNA, 80 bp, synthetic construct
  misc_feature 1..80: note = Artificially Synthesized Probe
  source 1..80: mol_type = other DNA
cactttgggctgagccaggtcgatcacttaagcccaggagttcgagaccagcctgggcaacatggcgaaaccccagctca

SEQ ID NO: 135664 - DNA, 80 bp, synthetic construct; identical to SEQ ID NO: 42664
  misc_feature 1..80: note = Artificially Synthesized Probe
  source 1..80: mol_type = other DNA

SEQ ID NO: 135665 - DNA, 80 bp, synthetic construct
  misc_feature 1..80: note = Artificially Synthesized Probe
  source 1..80: mol_type = other DNA
tttctaatttttcttctaagatcattgattatttgtatggtttttaaaacctcacctatataaccatttcatttaatgtt

SEQ ID NO: 135666 - DNA, 80 bp, synthetic construct
  misc_feature 1..80: note = Artificially Synthesized Probe
  source 1..80: mol_type = other DNA
aaaatatgatttccttatttatagtgggaaagtaaaactgtcctgcgcaatgagcctttggttttagagggaggctatga

SEQ ID NO: 135667 - DNA, 80 bp, synthetic construct
  misc_feature 1..80: note = Artificially Synthesized Probe
  source 1..80: mol_type = other DNA
ttcttggttgtgtgtgtatttgtcctattagagagcagtttgttttcaggcataaaaatataagcctggaagttcacatt

SEQ ID NO: 135668 - DNA, 80 bp, synthetic construct; identical to SEQ ID NO: 42665
  misc_feature 1..80: note = Artificially Synthesized Probe
  source 1..80: mol_type = other DNA

SEQ ID NO: 135669 - DNA, 80 bp, synthetic construct
  misc_feature 1..80: note = Artificially Synthesized Probe
  source 1..80: mol_type = other DNA
aaatatatagtatagctgggcacagtgcctcacgcctgtaatcccagcactttgggaggctgagaggggcagatcacctg

SEQ ID NO: 135670 - DNA, 80 bp, synthetic construct
  misc_feature 1..80: note = Artificially Synthesized Probe
  source 1..80: mol_type = other DNA
gtgtatgtctcatccatagagattctgatttaattgtttaggagtgggatctgagcatcaatatttttttaaagttctct

SEQ ID NO: 135671 - DNA, 80 bp, synthetic construct
  misc_feature 1..80: note = Artificially Synthesized Probe
  source 1..80: mol_type = other DNA
gagtcgagattgcaccactgcaccccagcctgggtgacagcaagactctgtctcaaaaaaaaaaaaaagaattaaataca

SEQ ID NO: 135672 - DNA, 80 bp, synthetic construct; identical to SEQ ID NO: 42666
  misc_feature 1..80: note = Artificially Synthesized Probe
  source 1..80: mol_type = other DNA

SEQ ID NO: 135673 - DNA, 80 bp, synthetic construct
  misc_feature 1..80: note = Artificially Synthesized Probe
  source 1..80: mol_type = other DNA
attttggttttaaaacagtgctttagtttcatttccttagaatttgacacgcaaataacaggcatgtttaacaataatca

SEQ ID NO: 135674 - DNA, 80 bp, synthetic construct
  misc_feature 1..80: note = Artificially Synthesized Probe
  source 1..80: mol_type = other DNA
atttaaaacagtatttcacatttaaagtggatgacgtttgatttgtggagcaggtattgaatagaaaatctggtaatttt

SEQ ID NO: 135675 - DNA, 80 bp, synthetic construct
  misc_feature 1..80: note = Artificially Synthesized Probe
  source 1..80: mol_type = other DNA
gtctaaaaagagcttctctatgttattgcatttcctttcaacttaatctatttaaacgctaatccttttgtgtcccaaca

SEQ ID NO: 135676 - DNA, 80 bp, synthetic construct
  misc_feature 1..80: note = Artificially Synthesized Probe
  source 1..80: mol_type = other DNA
gtcaacatggtgaaaccccatctctactgaaaataccaaaattagccaggcgtggtggtgcgtgcctgcagtcccagcta

SEQ ID NO: 135677 - DNA, 80 bp, synthetic construct; identical to SEQ ID NO: 42667
  misc_feature 1..80: note = Artificially Synthesized Probe
  source 1..80: mol_type = other DNA

SEQ ID NO: 135678 - DNA, 80 bp, synthetic construct
  misc_feature 1..80: note = Artificially Synthesized Probe
  source 1..80: mol_type = other DNA
gccagtgaacagttttggcatatgtgggcgctagtctctgttggagagaggaagttatgatagtagataagattagaagg

SEQ ID NO: 135679 - DNA, 80 bp, synthetic construct
  misc_feature 1..80: note = Artificially Synthesized Probe
  source 1..80: mol_type = other DNA
aacatttatttttgtttctgttccacctcttattgttaacctcatccccatagtggttcttcctactttattctcaaata

SEQ ID NO: 135680 - DNA, 80 bp, synthetic construct
  misc_feature 1..80: note = Artificially Synthesized Probe
  source 1..80: mol_type = other DNA
cacagctcactgcagcctcgacttcctgggttcaagcaatcctcccacctcagcctcctgagtagctgggattataggca

SEQ ID NO: 135681 - DNA, 80 bp, synthetic construct; identical to SEQ ID NO: 42614
  misc_feature 1..80: note = Artificially Synthesized Probe
  source 1..80: mol_type = other DNA

SEQ ID NO: 135682 - DNA, 80 bp, synthetic construct; identical to SEQ ID NO: 42668
  misc_feature 1..80: note = Artificially Synthesized Probe
  source 1..80: mol_type = other DNA

SEQ ID NO: 135683 - DNA, 80 bp, synthetic construct
  misc_feature 1..80: note = Artificially Synthesized Probe
  source 1..80: mol_type = other DNA
tacctcatgtaaaagtttttagggaagattgcatttgttccctcagtaacatagttactaactgtgccaggcacagtctt

SEQ ID NO: 135684 - DNA, 80 bp, synthetic construct
  misc_feature 1..80: note = Artificially Synthesized Probe
  source 1..80: mol_type = other DNA
tggctagttctaggaaccagggaagtcttttcagagggagagatgtgtaagccaagacctaatgtgggcattatctagat

SEQ ID NO: 135685 - DNA, 80 bp, synthetic construct; identical to SEQ ID NO: 42669
  misc_feature 1..80: note = Artificially Synthesized Probe
  source 1..80: mol_type = other DNA

SEQ ID NO: 135686 - DNA, 80 bp, synthetic construct
  misc_feature 1..80: note = Artificially Synthesized Probe
  source 1..80: mol_type = other DNA
gactcaggtttttgatttgtgcaactattgggagagtgagagtggttacatccatgagattaggaccatgtttgtcgggg

SEQ ID NO: 135687 - DNA, 80 bp, synthetic construct
  misc_feature 1..80: note = Artificially Synthesized Probe
  source 1..80: mol_type = other DNA
actcttttgtatacaaaacactcaggaagaattgaaagtgttgaatcaagaggatgtaagttccagtgatgtttgaatat

SEQ ID NO: 135688 - DNA, 80 bp, synthetic construct
  misc_feature 1..80: note = Artificially Synthesized Probe
  source 1..80: mol_type = other DNA
ggttttgttgctctagattgatcgtactaaaaaaccagcagtcaaattgcctgaagagcatagaataaaatctgaaagta

SEQ ID NO: 135689 - DNA, 80 bp, synthetic construct
  misc_feature 1..80: note = Artificially Synthesized Probe
  source 1..80: mol_type = other DNA
acttcgggaaaggcagcaagaggaacagaaagagaaactgaggaaggaagaacaagaacaaaaagccaaaaagaaacaag

SEQ ID NO: 135690 - DNA, 80 bp, synthetic construct; identical to SEQ ID NO: 42670
  misc_feature 1..80: note = Artificially Synthesized Probe
  source 1..80: mol_type = other DNA

SEQ ID NO: 135691 - DNA, 80 bp, synthetic construct
  misc_feature 1..80: note = Artificially Synthesized Probe
  source 1..80: mol_type = other DNA
acactgcaccttgtgtatagtaggtatctattgtttacctaattgaagccagtttagacagtcactctttagaactaggg

SEQ ID NO: 135692 - DNA, 80 bp, synthetic construct
  misc_feature 1..80: note = Artificially Synthesized Probe
  source 1..80: mol_type = other DNA
aaaagggcaggcatttcaaatagtcttttcaggggtgatagaatgtactgatctatccacatttgctcatctattctcct

SEQ ID NO: 135693 - DNA, 80 bp, synthetic construct
  misc_feature 1..80: note = Artificially Synthesized Probe
  source 1..80: mol_type = other DNA
ttttatgtttgatgtatgatcatgggaagactagagtgaaatataatctccttctcagtatggggaaactagatgctaat

SEQ ID NO: 135694 - DNA, 80 bp, synthetic construct
  misc_feature 1..80: note = Artificially Synthesized Probe
  source 1..80: mol_type = other DNA
aattttgcccttggctacacacccaaaattgatagccgtaattttaggggactttttttgttattctttttcaatctcta

SEQ ID NO: 135695 - DNA, 80 bp, synthetic construct; identical to SEQ ID NO: 42671
  misc_feature 1..80: note = Artificially Synthesized Probe
  source 1..80: mol_type = other DNA

SEQ ID NO: 135696 - DNA, 80 bp, synthetic construct
  misc_feature 1..80: note = Artificially Synthesized Probe
  source 1..80: mol_type = other DNA
gcactccaagatacaatttaagtattattcattgagtagctactatatgccaagtattttcactgcattgtcttatttac

SEQ ID NO: 135697 - DNA, 80 bp, synthetic construct
  misc_feature 1..80: note = Artificially Synthesized Probe
  source 1..80: mol_type = other DNA
atttgtggagtcatttagtatataggtgccaaatattcctacacatctaagattgcattctttgtgtgctccttttaaaa

SEQ ID NO: 135698 - DNA, 80 bp, synthetic construct; identical to SEQ ID NO: 42672
  misc_feature 1..80: note = Artificially Synthesized Probe
  source 1..80: mol_type = other DNA

SEQ ID NO: 135699 - DNA, 80 bp, synthetic construct
  misc_feature 1..80: note = Artificially Synthesized Probe
  source 1..80: mol_type = other DNA
ctcggtctccaaaaaaaaaaaaagaatctgtgatgttataagaagatatgaatatagatttttgcattttttactattgg

SEQ ID NO: 135700 - DNA, 80 bp, synthetic construct
  misc_feature 1..80: note = Artificially Synthesized Probe
  source 1..80: mol_type = other DNA
tgtagtgtgaaccagtgcttcacagtccactttgattttcatcttttttttttcttcactgattcatcagagttctttag

SEQ ID NO: 135701 - DNA, 80 bp, synthetic construct
  misc_feature 1..80: note = Artificially Synthesized Probe
  source 1..80: mol_type = other DNA
aattttacagccatttaagattaaaggacaaccagaaagtggaattctaaggacaggaacttttagagaggatacagacg

SEQ ID NO: 135702 - DNA, 80 bp, synthetic construct
  misc_feature 1..80: note = Artificially Synthesized Probe
  source 1..80: mol_type = other DNA
ttctttttttctcatggcattctaagactcccccaattagacagggtctccctctattgctcaggctggagtgcaatggt

SEQ ID NO: 135703 - DNA, 80 bp, synthetic construct; identical to SEQ ID NO: 42673
  misc_feature 1..80: note = Artificially Synthesized Probe
  source 1..80: mol_type = other DNA

SEQ ID NO: 135704 - DNA, 80 bp, synthetic construct
  misc_feature 1..80: note = Artificially Synthesized Probe
  source 1..80: mol_type = other DNA
tccatcagcaggtgaatgcataaacaaatatggtatgtacatgtaatggaatattattcagccttaaaaaggaaagaaat

SEQ ID NO: 135705 - DNA, 80 bp, synthetic construct
  misc_feature 1..80: note = Artificially Synthesized Probe
  source 1..80: mol_type = other DNA
gggaaatggggagttattgttcagtaggtacagagtttcagttttacaagatgaaaagagttctggagattgttggcaca

SEQ ID NO: 135706 - DNA, 80 bp, synthetic construct
  misc_feature 1..80: note = Artificially Synthesized Probe
  source 1..80: mol_type = other DNA
cacgaggtcaggagatcgagatcatcctggctaacatggtgaaacgccgtctctactaaaaatacaaaaaaaaaaattag

SEQ ID NO: 135707 - DNA, 80 bp, synthetic construct
  misc_feature 1..80: note = Artificially Synthesized Probe
  source 1..80: mol_type = other DNA
cttctttgcctttgtttttccttcagagcttgagatacaatttgcataccataaaattcacccatttttagcatgcagtt

SEQ ID NO: 135708 - DNA, 80 bp, synthetic construct; identical to SEQ ID NO: 42674
  misc_feature 1..80: note = Artificially Synthesized Probe
  source 1..80: mol_type = other DNA

SEQ ID NO: 135709 - DNA, 80 bp, synthetic construct
  misc_feature 1..80: note = Artificially Synthesized Probe
  source 1..80: mol_type = other DNA
ggggataataaaagcctgcacatgttcagtacacccagagttatttttttcaagtattttcaatctgtggatggttgaat

SEQ ID NO: 135710 - DNA, 80 bp, synthetic construct
  misc_feature 1..80: note = Artificially Synthesized Probe
  source 1..80: mol_type = other DNA
acagaaagagggggaaaaaagggtatggttgctcctgcctgtaattccagcactttgggaggctgaggcaggtggatcgc

SEQ ID NO: 135711 - DNA, 80 bp, synthetic construct
  misc_feature 1..80: note = Artificially Synthesized Probe
  source 1..80: mol_type = other DNA
atacagtgagccatgatcatgctactgcattccagcctgggcaacaagggtgagaccctgtctcaaacaaaaggggaaaa

SEQ ID NO: 135712 - DNA, 80 bp, synthetic construct; identical to SEQ ID NO: 42675
  misc_feature 1..80: note = Artificially Synthesized Probe
  source 1..80: mol_type = other DNA

SEQ ID NO: 135713 - DNA, 80 bp, synthetic construct
  misc_feature 1..80: note = Artificially Synthesized Probe
  source 1..80: mol_type = other DNA
caccaaatcctagataacataattttggtgtcaatacttaattatcttccaaaacaatagggattatcaaagtcaacatt

SEQ ID NO: 135714 - DNA, 80 bp, synthetic construct
  misc_feature 1..80: note = Artificially Synthesized Probe
  source 1..80: mol_type = other DNA
ggaggatcatttgagttcaggagttcgagaccagcctggccaacatgatgaaattctgtctcaacaaaaagtagccgggt

SEQ ID NO: 135715 - DNA, 80 bp, synthetic construct
  misc_feature 1..80: note = Artificially Synthesized Probe
  source 1..80: mol_type = other DNA
attaatgtaaccaaatatcacctgtaccccaataacctatggaaaaataaaaacagaaaaaaacacgttttattaaagtt

SEQ ID NO: 135716 - DNA, 80 bp, synthetic construct
  misc_feature 1..80: note = Artificially Synthesized Probe
  source 1..80: mol_type = other DNA
acacacacatgccttctcttcttctgacatccttctgttccttttaaagagaaagagtagggattagatgactggaacca

SEQ ID NO: 135717 - DNA, 80 bp, synthetic construct; identical to SEQ ID NO: 42676
  misc_feature 1..80: note = Artificially Synthesized Probe
  source 1..80: mol_type = other DNA

SEQ ID NO: 135718 - DNA, 80 bp, synthetic construct
  misc_feature 1..80: note = Artificially Synthesized Probe
  source 1..80: mol_type = other DNA
aaatccctaaggtcataatcagtataagtataagcctaggtgtggtggcacaagcctgcagacccagctacttgtgagag

SEQ ID NO: 135719 - DNA, 80 bp, synthetic construct
  misc_feature 1..80: note = Artificially Synthesized Probe
  source 1..80: mol_type = other DNA
tttttgtggaagtccattctgtcatatttttcacatgtggattgtgctgttggtattgtatctaaggaacattttttctg

SEQ ID NO: 135720 - DNA, 80 bp, synthetic construct; identical to SEQ ID NO: 42677
  misc_feature 1..80: note = Artificially Synthesized Probe
  source 1..80: mol_type = other DNA

SEQ ID NO: 135721 - DNA, 80 bp, synthetic construct
  misc_feature 1..80: note = Artificially Synthesized Probe
  source 1..80: mol_type = other DNA
gatggagtctcgctctgccacccaggcgggagtgcagtgacacaaactcagctcactgcaacctccgcctcccaggttca

SEQ ID NO: 135722 - DNA, 80 bp, synthetic construct; identical to SEQ ID NO: 42615
  misc_feature 1..80: note = Artificially Synthesized Probe
  source 1..80: mol_type = other DNA

SEQ ID NO: 135723 - DNA, 80 bp, synthetic construct
  misc_feature 1..80: note = Artificially Synthesized Probe
  source 1..80: mol_type = other DNA
ggcctcccaaagcgctgggattacaggcgtgagccactgtgcccggccaaacctggctaattttaaaaatttttttatag

SEQ ID NO: 135724 - DNA, 80 bp, synthetic construct
  misc_feature 1..80: note = Artificially Synthesized Probe
  source 1..80: mol_type = other DNA
ggttcatcaggcgtttttgttttctattaattttttaaaggaagtggaagtatcacattcaattatattgaggttgatgc

SEQ ID NO: 135725 - DNA, 80 bp, synthetic construct
  misc_feature 1..80: note = Artificially Synthesized Probe
  source 1..80: mol_type = other DNA
ttgctaggatactataacgtctattctctacttacacctcttagcatatagagaaaaggcacacttagtcctaaagaata

SEQ ID NO: 135726 - DNA, 80 bp, synthetic construct; identical to SEQ ID NO: 42678
  misc_feature 1..80: note = Artificially Synthesized Probe
  source 1..80: mol_type = other DNA

SEQ ID NO: 135727 - DNA, 80 bp, synthetic construct
  misc_feature 1..80: note = Artificially Synthesized Probe
  source 1..80: mol_type = other DNA
attttattttaattaggctcaacgagaacctttgacaagagcacgaagtgaagaaatggggaggatcgtaccaggactgc

SEQ ID NO: 135728 - DNA, 80 bp, synthetic construct
  misc_feature 1..80: note = Artificially Synthesized Probe
  source 1..80: mol_type = other DNA
gagatttctcaatacccaacctgagatgctggctacaatatatgagcattctggcatttatcatttagaaatagtgtatt

SEQ ID NO: 135729 - DNA, 80 bp, synthetic construct; identical to SEQ ID NO: 42679
  misc_feature 1..80: note = Artificially Synthesized Probe
  source 1..80: mol_type = other DNA

SEQ ID NO: 135730 - DNA, 80 bp, synthetic construct
  misc_feature 1..80: note = Artificially Synthesized Probe
  source 1..80: mol_type = other DNA
ctattcaagaggaagagaagaggaagccaacagtaactccaacagttaatcgggaaaacaagtatgtttatcttaactcc

SEQ ID NO: 135731 - DNA, 80 bp, synthetic construct
  misc_feature 1..80: note = Artificially Synthesized Probe
  source 1..80: mol_type = other DNA
ctgtggatggctataccagccgttattatttaccacagagaacaaaacaaatgaatagagaaaatgttgttggtttttct

SEQ ID NO: 135732 - DNA, 80 bp, synthetic construct
  misc_feature 1..80: note = Artificially Synthesized Probe
  source 1..80: mol_type = other DNA
tgtttatctggtccaaaatgtgagtgatggcaaggttgagaaacgctgctgtaaactgatcagttttaaactgcagtatt

SEQ ID NO: 135733 - DNA, 80 bp, synthetic construct
  misc_feature 1..80: note = Artificially Synthesized Probe
  source 1..80: mol_type = other DNA
gcaatattgagcttgccttgttgcagcactcaagttccaaactttttttccccttagccaataatgtaagcgaagttttc

SEQ ID NO: 135734 - DNA, 80 bp, synthetic construct; identical to SEQ ID NO: 42680
  misc_feature 1..80: note = Artificially Synthesized Probe
  source 1..80: mol_type = other DNA

SEQ ID NO: 135735 - DNA, 80 bp, synthetic construct
  misc_feature 1..80: note = Artificially Synthesized Probe
  source 1..80: mol_type = other DNA
taagttgaacacatcctaagaaagttgaaattttttcttcctgagaacttaccctgccaggtgcagacttattcgaagga

SEQ ID NO: 135736 - DNA, 80 bp, synthetic construct
  misc_feature 1..80: note = Artificially Synthesized Probe
  source 1..80: mol_type = other DNA
tatgctgtttgtgtatttttttatatattgaacagaaaaagcacacgagtacatgcacctgagtacaggtaaagaggagc

SEQ ID NO: 135737 - DNA, 80 bp, synthetic construct
  misc_feature 1..80: note = Artificially Synthesized Probe
  source 1..80: mol_type = other DNA
tagtagttccacatataaatcaaacacaccatattacagaagtctagaaggcattctctgccccagcactgtccagcaga

SEQ ID NO: 135738 - DNA, 80 bp, synthetic construct
  misc_feature 1..80: note = Artificially Synthesized Probe
  source 1..80: mol_type = other DNA
caacgtctgcctcctcaagcgattctcctgcctcagcctcctgagtagctgggactatagacgtccactatcatgcccag

SEQ ID NO: 135739 - DNA, 80 bp, synthetic construct; identical to SEQ ID NO: 42681
  misc_feature 1..80: note = Artificially Synthesized Probe
  source 1..80: mol_type = other DNA

SEQ ID NO: 135740 - DNA, 80 bp, synthetic construct
  misc_feature 1..80: note = Artificially Synthesized Probe
  source 1..80: mol_type = other DNA
tgataatgccaaacttccagggatcatttaaaggagtttaaaagagccttctctactagagctcctagttcatgagaagt

SEQ ID NO: 135741 - DNA, 80 bp, synthetic construct; identical to SEQ ID NO: 42609
  misc_feature 1..80: note = Artificially Synthesized Probe
  source 1..80: mol_type = other DNA

SEQ ID NO: 135742 - DNA, 80 bp, synthetic construct
  misc_feature 1..80: note = Artificially Synthesized Probe
  source 1..80: mol_type = other DNA
actgtttacaagatgcctgtggtacaggtgctacagtttgctgccatttatagtatagaaccttaatttcatatgctcag

SEQ ID NO: 135743 - DNA, 80 bp, synthetic construct
  misc_feature 1..80: note = Artificially Synthesized Probe
  source 1..80: mol_type = other DNA
accagctcttactggacttcgtaacttaggaaatacttgttatatgaactcaatattgcagtgcctatgtaacgctccac

SEQ ID NO: 135744 - DNA, 80 bp, synthetic construct; identical to SEQ ID NO: 42682
  misc_feature 1..80: note = Artificially Synthesized Probe
  source 1..80: mol_type = other DNA

SEQ ID NO: 135745 - DNA, 80 bp, synthetic construct
  misc_feature 1..80: note = Artificially Synthesized Probe
  source 1..80: mol_type = other DNA
tgaccttgtagttactcttttccatagtatcattcccttgttctcatctcctttcaatcttacttacatatccctaattt

SEQ ID NO: 135746 - DNA, 80 bp, synthetic construct
  misc_feature 1..80: note = Artificially Synthesized Probe
  source 1..80: mol_type = other DNA
caacacctgaattttggaatatttgacgtgaatctggtggtaacctatgaataagtaagcattttggtgtagggctacag

SEQ ID NO: 135747 - DNA, 80 bp, synthetic construct
  misc_feature 1..80: note = Artificially Synthesized Probe
  source 1..80: mol_type = other DNA
cactttgggaggctgacgtgggcagatcacttggggcccaggagtttgagaccagtctgggcaacaaggcaaaactccgt

SEQ ID NO: 135748 - DNA, 80 bp, synthetic construct; identical to SEQ ID NO: 42683
  misc_feature 1..80: note = Artificially Synthesized Probe
  source 1..80: mol_type = other DNA

SEQ ID NO: 135749 - DNA, 80 bp, synthetic construct
  misc_feature 1..80: note = Artificially Synthesized Probe
  source 1..80: mol_type = other DNA
aataagtagtttaatgtagtgctacagtatgtgaataatttcatgttgacatcaagaatctactgtaccttgcttaactt

SEQ ID NO: 135750 - DNA, 80 bp, synthetic construct
  misc_feature 1..80: note = Artificially Synthesized Probe
  source 1..80: mol_type = other DNA
gggaagatcaatgaccagtttgcaggatacagtcagcaagattcacaagaattgcttctgttcctaatggatggtctcca

SEQ ID NO: 135751 - DNA, 80 bp, synthetic construct
  misc_feature 1..80: note = Artificially Synthesized Probe
  source 1..80: mol_type = other DNA
atcaggtaagtgtaatatttgaagcatatacagttggtatttactaattaacaagcagtattgctgagaaatttgcaaat

SEQ ID NO: 135752 - DNA, 80 bp, synthetic construct; identical to SEQ ID NO: 42684
  misc_feature 1..80: note = Artificially Synthesized Probe
  source 1..80: mol_type = other DNA

SEQ ID NO: 135753 - DNA, 80 bp, synthetic construct
  misc_feature 1..80: note = Artificially Synthesized Probe
  source 1..80: mol_type = other DNA
attggctgggtgtagtggcatgtgcctgtaatcccagctactcaggtggctgaagcaggagaatcgcttgaacctgggag

SEQ ID NO: 135754 - DNA, 80 bp, synthetic construct
  misc_feature 1..80: note = Artificially Synthesized Probe
  source 1..80: mol_type = other DNA
ccaccctccatttacatactacaacttctttttagcactttttgtctcacatattttggggtcaccattcttaaccactg

SEQ ID NO: 135755 - DNA, 80 bp, synthetic construct
  misc_feature 1..80: note = Artificially Synthesized Probe
  source 1..80: mol_type = other DNA
catatatacatatatagagagagagaggctagggcaacaaaattatatatgtccagttgtagccctaattcccagctata

SEQ ID NO: 135756 - DNA, 80 bp, synthetic construct
  misc_feature 1..80: note = Artificially Synthesized Probe
  source 1..80: mol_type = other DNA
aaccaccacatctggcccttttcagctttttaaataaaaatttgggaaatttcaacaagtcacattccttcaataaagtg

SEQ ID NO: 135757 - DNA, 80 bp, synthetic construct; identical to SEQ ID NO: 42616
  misc_feature 1..80: note = Artificially Synthesized Probe
  source 1..80: mol_type = other DNA

SEQ ID NO: 135758 - DNA, 80 bp, synthetic construct; identical to SEQ ID NO: 42685
  misc_feature 1..80: note = Artificially Synthesized Probe
  source 1..80: mol_type = other DNA

SEQ ID NO: 135759 - DNA, 80 bp, synthetic construct
  misc_feature 1..80: note = Artificially Synthesized Probe
  source 1..80: mol_type = other DNA
agtctattattgttgcactttttcagggtcaattcaaatctacagtacagtgcctcacatgtcacaaaaagtctaggaca

SEQ ID NO: 135760 - DNA, 80 bp, synthetic construct
  misc_feature 1..80: note = Artificially Synthesized Probe
  source 1..80: mol_type = other DNA
tatcagtaaaactcggccgggcgcagtggctcataccttgtactcccagcactttgggaggccgaggtgggcggatcacg

SEQ ID NO: 135761 - DNA, 80 bp, synthetic construct
  misc_feature 1..80: note = Artificially Synthesized Probe
  source 1..80: mol_type = other DNA
gagctgagatctcgccactgcactccagcctaggggacagaacaagactccgtcttaaaaaaaaaaaaaaaaaaaacctt

SEQ ID NO: 135762 - DNA, 80 bp, synthetic construct; identical to SEQ ID NO: 42686
  misc_feature 1..80: note = Artificially Synthesized Probe
  source 1..80: mol_type = other DNA

SEQ ID NO: 135763 - DNA, 80 bp, synthetic construct
  misc_feature 1..80: note = Artificially Synthesized Probe
  source 1..80: mol_type = other DNA
gtgctgtcattgttcacttgtctatgcttctcactagatcacaagctttgggaaggcaggaactcttttgtgtagattgc

SEQ ID NO: 135764 - DNA, 80 bp, synthetic construct
  misc_feature 1..80: note = Artificially Synthesized Probe
  source 1..80: mol_type = other DNA
tttccaaagaagaaaaactcacagataacaacagattttactgcagtcattgcagagctcgacgggattctctaaaaaag

SEQ ID NO: 135765 - DNA, 80 bp, synthetic construct; identical to SEQ ID NO: 42687
  misc_feature 1..80: note = Artificially Synthesized Probe
  source 1..80: mol_type = other DNA

SEQ ID NO: 135766 - DNA, 80 bp, synthetic construct
  misc_feature 1..80: note = Artificially Synthesized Probe
  source 1..80: mol_type = other DNA
acagtataattcaaacaaattagcacatgaaatgtaacattcaaacagcagactaaagcataacagacttagttatgtgt

SEQ ID NO: 135767 - DNA, 80 bp, synthetic construct
  misc_feature 1..80: note = Artificially Synthesized Probe
  source 1..80: mol_type = other DNA
agaaggaataatgacaagagttataaaacacgaaccagatcttttgctgattctttggtcttcacataatcacataatcc

SEQ ID NO: 135768 - DNA, 80 bp, synthetic construct
  misc_feature 1..80: note = Artificially Synthesized Probe
  source 1..80: mol_type = other DNA
acatgttcagatttctcttgtgtaaatttttctaacaaaagctagttttttccattgtcctagttgaggattctggaagt

SEQ ID NO: 135769 - DNA, 80 bp, synthetic construct
  misc_feature 1..80: note = Artificially Synthesized Probe
  source 1..80: mol_type = other DNA
cccctgggttcaagagattctcctgcctcagcctcctgagtaggtggaattacaggcgtccaccaccatgcccagctaat

SEQ ID NO: 135770 - DNA, 80 bp, synthetic construct; identical to SEQ ID NO: 42688
  misc_feature 1..80: note = Artificially Synthesized Probe
  source 1..80: mol_type = other DNA

SEQ ID NO: 135771 - DNA, 80 bp, synthetic construct
  misc_feature 1..80: note = Artificially Synthesized Probe
  source 1..80: mol_type = other DNA
aaaatggaaatgaagccaaatgtctttaacaggttcctctactactaaaattccaagtctttgtatttgaaatggatttt

SEQ ID NO: 135772 - DNA, 80 bp, synthetic construct
  misc_feature 1..80: note = Artificially Synthesized Probe
  source 1..80: mol_type = other DNA
aattacagacatctgtggacttcccgttagaaaatcttgacttgtcacagtatgttattggtccaaagaacaatttgaag

SEQ ID NO: 135773 - DNA, 80 bp, synthetic construct
  misc_feature 1..80: note = Artificially Synthesized Probe
  source 1..80: mol_type = other DNA
aactgaattgatttttttttctatcttgtttggcacagaatcactacggtgggctggatggaggccactacacagcctat

SEQ ID NO: 135774 - DNA, 80 bp, synthetic construct
  misc_feature 1..80: note = Artificially Synthesized Probe
  source 1..80: mol_type = other DNA
aactagttatcttttaaaaggctcagcaacacaactcttgaaatgcttatcaggataatggtagctatagctggccattt

SEQ ID NO: 135775 - DNA, 80 bp, synthetic construct; identical to SEQ ID NO: 42689
  misc_feature 1..80: note = Artificially Synthesized Probe
  source 1..80: mol_type = other DNA

SEQ ID NO: 135776 - DNA, 80 bp, synthetic construct
  misc_feature 1..80: note = Artificially Synthesized Probe
  source 1..80: mol_type = other DNA
gtggtccttttgtgaaacctagaactcagaggattgctttttttctttcagcctattttgagttaacttcagtgctttct

SEQ ID NO: 135777 - DNA, 80 bp, synthetic construct
  misc_feature 1..80: note = Artificially Synthesized Probe
  source 1..80: mol_type = other DNA
cctgtgggtgttctgtctttaatattgtattatcaaatataggacagtaaaaccatagattttatatacacacgtgctat

SEQ ID NO: 135778 - DNA, 80 bp, synthetic construct; identical to SEQ ID NO: 42690
  misc_feature 1..80: note = Artificially Synthesized Probe
  source 1..80: mol_type = other DNA

SEQ ID NO: 135779 - DNA, 80 bp, synthetic construct
  misc_feature 1..80: note = Artificially Synthesized Probe
  source 1..80: mol_type = other DNA
agggagaagatgaaaggatggggttcaaattgtgaagctgacaacttttcatgttttacaattagtctaagagaccactt

SEQ ID NO: 135780 - DNA, 80 bp, synthetic construct
  misc_feature 1..80: note = Artificially Synthesized Probe
  source 1..80: mol_type = other DNA
gaaacctgaactcactatataattgcagtgttttgaaggcctgcatccattagcattgcattatattcacactgcctttt

SEQ ID NO: 135781 - DNA, 80 bp, synthetic construct
  misc_feature 1..80: note = Artificially Synthesized Probe
  source 1..80: mol_type = other DNA
gctaaattctgtcctcaaggccaggttctctctctcatcacatcatcatgagcactgcgtgtgtatgaggattttaaagc

SEQ ID NO: 135782 - DNA, 80 bp, synthetic construct
  misc_feature 1..80: note = Artificially Synthesized Probe
  source 1..80: mol_type = other DNA
agtgttcaggaaacaccattttcctggctcttaacgcttttgtattggtatggaaaagggctggcagctatagaacagga

SEQ ID NO: 135783 - DNA, 80 bp, synthetic construct; identical to SEQ ID NO: 42691
  misc_feature 1..80: note = Artificially Synthesized Probe
  source 1..80: mol_type = other DNA

SEQ ID NO: 135784 - DNA, 80 bp, synthetic construct
  misc_feature 1..80: note = Artificially Synthesized Probe
  source 1..80: mol_type = other DNA
aacatttagttagcacttaatatacatcaactattaagcattaaaggaaattttacaataagaagataattcaggccggg

SEQ ID NO: 135785 - DNA, 80 bp, synthetic construct
  misc_feature 1..80: note = Artificially Synthesized Probe
  source 1..80: mol_type = other DNA
acacctgtagtcccagctacttgggaagttggggtgggaggatctctcgagcctgagaggtcgaggctgcaatgagccgt

SEQ ID NO: 135786 - DNA, 80 bp, synthetic construct
  misc_feature 1..80: note = Artificially Synthesized Probe
  source 1..80: mol_type = other DNA
tacagcacaaattgagggggctatgtagcaacaacccctcaatcccccatagggtacaaaaaataatgtatctcattttc

SEQ ID NO: 135787 - DNA, 80 bp, synthetic construct
  misc_feature 1..80: note = Artificially Synthesized Probe
  source 1..80: mol_type = other DNA
gaatgatatagatcacaagcattgtaggattcacatgaagaaacaaattccaagaactgggaccataaaggatggaagag

SEQ ID NO: 135788 - DNA, 80 bp, synthetic construct
  misc_feature 1..80: note = Artificially Synthesized Probe
  source 1..80: mol_type = other DNA
ttaaatttttatatggttggggaaaagatccaagtaataatagtattgttatatgtgaaaattttatgaaattcaaatgt

SEQ ID NO: 135789 - DNA, 80 bp, synthetic construct; identical to SEQ ID NO: 42692
  misc_feature 1..80: note = Artificially Synthesized Probe
  source 1..80: mol_type = other DNA

SEQ ID NO: 135790 - DNA, 80 bp, synthetic construct
  misc_feature 1..80: note = Artificially Synthesized Probe
  source 1..80: mol_type = other DNA
ttcactgtgttagccaggatggtctcgatctcgacctcgggatcctcccacttcggcctcccaaagttatttatttttat

SEQ ID NO: 135791 - DNA, 80 bp, synthetic construct
  misc_feature 1..80: note = Artificially Synthesized Probe
  source 1..80: mol_type = other DNA
tttttagtagagatggggtttcgccgtgttggccaggctggtcttgaactcctgacctcaagtgatccacctgcctccac

SEQ ID NO: 135792 - DNA, 80 bp, synthetic construct
  misc_feature 1..80: note = Artificially Synthesized Probe
  source 1..80: mol_type = other DNA
accatgtccagaatgaaaatggatctgactagttaattccaacgtgaattcgggtgtaatagtacattgtgaccttagcg

SEQ ID NO: 135793 - DNA, 80 bp, synthetic construct; identical to SEQ ID NO: 42693
  misc_feature 1..80: note = Artificially Synthesized Probe
  source 1..80: mol_type = other DNA

SEQ ID NO: 135794 - DNA, 80 bp, synthetic construct
  misc_feature 1..80: note = Artificially Synthesized Probe
  source 1..80: mol_type = other DNA
gtaatcccagctacttgggaggctgaggcagaatcatttgaacctgggagatggaggttgcagtgagctgagatcatgcc

SEQ ID NO: 135795 - DNA, 80 bp, synthetic construct
  misc_feature 1..80: note = Artificially Synthesized Probe
  source 1..80: mol_type = other DNA
ttaggcccccctacaaggtgagaagttggattgagatccacatacaaagccaggacctttaaagacattcaccctcaatg

SEQ ID NO: 135796 - DNA, 80 bp, synthetic construct
  misc_feature 1..80: note = Artificially Synthesized Probe
  source 1..80: mol_type = other DNA
tacctaccatttctccctatctctgccctttaggcaacaacaatactcaacataaatatctgttcttgaactcctgggct

SEQ ID NO: 135797 - DNA, 80 bp, synthetic construct
  misc_feature 1..80: note = Artificially Synthesized Probe
  source 1..80: mol_type = other DNA
attcaaatttatactacctgtgtggtctgcgaatcctgtgaacttaatatgaaaagtatttctagggcagttgccagaag

SEQ ID NO: 135798 - DNA, 80 bp, synthetic construct; identical to SEQ ID NO: 42694
  misc_feature 1..80: note = Artificially Synthesized Probe
  source 1..80: mol_type = other DNA

SEQ ID NO: 135799 - DNA, 80 bp, synthetic construct
  misc_feature 1..80: note = Artificially Synthesized Probe
  source 1..80: mol_type = other DNA
taaaaatatacatattttaaaatacagtgtaacaactatttacatagtatttatattgtattagatattataagtaatcc

SEQ ID NO: 135800 - DNA, 80 bp, synthetic construct
  misc_feature 1..80: note = Artificially Synthesized Probe
  source 1..80: mol_type = other DNA
gcaaaaccctgtctacacaaaatacaaaaattgaccaggcatagtggcacgtgcctatagtcccagctacttggtaggtt

SEQ ID NO: 135801 - DNA, 80 bp, synthetic construct
  misc_feature 1..80: note = Artificially Synthesized Probe
  source 1..80: mol_type = other DNA
tggattttgatagtcaaagggatcctggaaccaactccctgcagatactgaggtacaactgtactggaaattaacttaat

SEQ ID NO: 135802 - DNA, 80 bp, synthetic construct
  misc_feature 1..80: note = Artificially Synthesized Probe
  source 1..80: mol_type = other DNA
aaaaaaaattagctgggcctggtggcgtgcacctgtaatcccagctacttgagaggctgaagcaggagaatcgcttgaac

SEQ ID NO: 135803 - DNA, 80 bp, synthetic construct; identical to SEQ ID NO: 42695
  misc_feature 1..80: note = Artificially Synthesized Probe
  source 1..80: mol_type = other DNA

SEQ ID NO: 135804 - DNA, 80 bp, synthetic construct
  misc_feature 1..80: note = Artificially Synthesized Probe
  source 1..80: mol_type = other DNA
ccacaagaatctaacctgctggtagaagttctccatagcagccatagaaatcagagacaatacagtagcttcaaaataat

SEQ ID NO: 135805 - DNA, 80 bp, synthetic construct
  misc_feature 1..80: note = Artificially Synthesized Probe
  source 1..80: mol_type = other DNA
ggaagaagtgatacataatagacagtgattaacaaaaaagactgatgaagatccgggcaaatataacccaatatgaacag

SEQ ID NO: 135806 - DNA, 80 bp, synthetic construct
  misc_feature 1..80: note = Artificially Synthesized Probe
  source 1..80: mol_type = other DNA
gcccaggagtttgagaccagcctgggcaacatagtgagacctggtctctaaaaaaaataaaaaagttggccatgcacagt

SEQ ID NO: 135807 - DNA, 80 bp, synthetic construct; identical to SEQ ID NO: 42696
  misc_feature 1..80: note = Artificially Synthesized Probe
  source 1..80: mol_type = other DNA

SEQ ID NO: 135808 - DNA, 80 bp, synthetic construct; identical to SEQ ID NO: 42617
  misc_feature 1..80: note = Artificially Synthesized Probe
  source 1..80: mol_type = other DNA

SEQ ID NO: 135809 - DNA, 80 bp, synthetic construct
  misc_feature 1..80: note = Artificially Synthesized Probe
  source 1..80: mol_type = other DNA
ggctgcctgtccctgacctgttcaggacctggctgcacagcaggaagcgagcggcaaacctaccctgagcaccgcctcct

SEQ ID NO: 135810 - DNA, 80 bp, synthetic construct
  misc_feature 1..80: note = Artificially Synthesized Probe
  source 1..80: mol_type = other DNA
ccatgggaaaaaaaccgcatcagtggaaaaattgtcttccacaaaaatcagtccctggtgccaacaaggttggggactgc

SEQ ID NO: 135811 - DNA, 80 bp, synthetic construct
  misc_feature 1..80: note = Artificially Synthesized Probe
  source 1..80: mol_type = other DNA
atctcagcacttggggaggccgaggggggcggatcacgaggtcaggagatcaagactatcctggccaacacggtgaaacc

SEQ ID NO: 135812 - DNA, 80 bp, synthetic construct; identical to SEQ ID NO: 42697
  misc_feature 1..80: note = Artificially Synthesized Probe
  source 1..80: mol_type = other DNA

SEQ ID NO: 135813 - DNA, 80 bp, synthetic construct
  misc_feature 1..80: note = Artificially Synthesized Probe
  source 1..80: mol_type = other DNA
aggcaggagagttgcttgaacctgggaggtggaggttgcagtgagccaagatcatgccactgcactccagcctggggcac

SEQ ID NO: 135814 - DNA, 80 bp, synthetic construct
  misc_feature 1..80: note = Artificially Synthesized Probe
  source 1..80: mol_type = other DNA
gatgctcaacttgtcgtaggtagatatgaccaagagaaagctgaagtagctatacatcagctaaaatggtccctaagata

SEQ ID NO: 135815 - DNA, 80 bp, synthetic construct; identical to SEQ ID NO: 42698
  misc_feature 1..80: note = Artificially Synthesized Probe
  source 1..80: mol_type = other DNA

SEQ ID NO: 135816 - DNA, 80 bp, synthetic construct
  misc_feature 1..80: note = Artificially Synthesized Probe
  source 1..80: mol_type = other DNA
tcgagaccagcctggccaacatggagaaaccccgtctctactaaaaatacaaaaaattagctgggcatggtgtcggctgc

SEQ ID NO: 135817 - DNA, 80 bp, synthetic construct
  misc_feature 1..80: note = Artificially Synthesized Probe
  source 1..80: mol_type = other DNA
atttagaccctagtctttgaacacaatacaattagcagtcaatacaaaatgatacccccacaaaaaatcaatacttttgg

SEQ ID NO: 135818 - DNA, 80 bp, synthetic construct
  misc_feature 1..80: note = Artificially Synthesized Probe
  source 1..80: mol_type = other DNA
taagatgaattgatcatttattttatattcaaatatcttgcttcagcaagctagttgatggatgcatggcggtttgttat

SEQ ID NO: 135819 - DNA, 80 bp, synthetic construct
  misc_feature 1..80: note = Artificially Synthesized Probe
  source 1..80: mol_type = other DNA
ttaatgctgatcatgaccttctaatggattttaaaaacactgccctcaagcatttagcacagtgctagagacatagtagt

SEQ ID NO: 135820 - DNA, 80 bp, synthetic construct; identical to SEQ ID NO: 42699
  misc_feature 1..80: note = Artificially Synthesized Probe
  source 1..80: mol_type = other DNA

SEQ ID NO: 135821 - DNA, 80 bp, synthetic construct
  misc_feature 1..80: note = Artificially Synthesized Probe
  source 1..80: mol_type = other DNA
ccgtctctataaaaaaaaaaagagtacaggccaggcgcggtggctcacgcctgtaatcccagcactttgggaggccgagg

SEQ ID NO: 135822 - DNA, 80 bp, synthetic construct
  misc_feature 1..80: note = Artificially Synthesized Probe
  source 1..80: mol_type = other DNA
ggagcttgcagtgagccaagatcgcgccactgtgctccagcctgggcgacagagcgagactccgtcacaaaaaaaaaaaa

SEQ ID NO: 135823 - DNA, 80 bp, synthetic construct
  misc_feature 1..80: note = Artificially Synthesized Probe
  source 1..80: mol_type = other DNA
agaccctctctcaaaaatagtaacttggacgtcaatagtaagatttagagaataagagacaaggcggccgggcgcggtgg

SEQ ID NO: 135824 - DNA, 80 bp, synthetic construct
  misc_feature 1..80: note = Artificially Synthesized Probe
  source 1..80: mol_type = other DNA
ggctgagacaggagaatgacttgaacccgggaggcggagcttgccgtgagctgagatcgtgccattgcactccagcctgg

SEQ ID NO: 135825 - DNA, 80 bp, synthetic construct; identical to SEQ ID NO: 42700
  misc_feature 1..80: note = Artificially Synthesized Probe
  source 1..80: mol_type = other DNA

SEQ ID NO: 135826 - DNA, 80 bp, synthetic construct
  misc_feature 1..80: note = Artificially Synthesized Probe
  source 1..80: mol_type = other DNA
ctactgaaaaataagaataaagttgtgatggtaatgacttagggaataatgatggttcttgctctgccagatatcaatgt

SEQ ID NO: 135827 - DNA, 80 bp, synthetic construct
  misc_feature 1..80: note = Artificially Synthesized Probe
  source 1..80: mol_type = other DNA
tgtgaacaaattgaccaacagacacacacagcataggaaaaccagcattatatgttactgaggaaaagaagaggctgaga

SEQ ID NO: 135828 - DNA, 80 bp, synthetic construct
  misc_feature 1..80: note = Artificially Synthesized Probe
  source 1..80: mol_type = other DNA
actaactagaaaagattgatgttccaaccaaattaaaacttgattgtcagcaattacaataagatacaacaaccaaatgc

SEQ ID NO: 135829 - DNA, 80 bp, synthetic construct; identical to SEQ ID NO: 42701
  misc_feature 1..80: note = Artificially Synthesized Probe
  source 1..80: mol_type = other DNA

SEQ ID NO: 135830 - DNA, 80 bp, synthetic construct
  misc_feature 1..80: note = Artificially Synthesized Probe
  source 1..80: mol_type = other DNA
tgaggtcaggagttcgagaccagcctggccaacatggagaaaccctgtctctactaaaatacaaaaattagtggggcatg

SEQ ID NO: 135831 - DNA, 80 bp, synthetic construct
  misc_feature 1..80: note = Artificially Synthesized Probe
  source 1..80: mol_type = other DNA
ggagtgcagtggcgctatctcggctcactgcaagctccgcctcctgggttcacgccattctcctgcctcagcctcctgag

SEQ ID NO: 135832 - DNA, 80 bp, synthetic construct
  misc_feature 1..80: note = Artificially Synthesized Probe
  source 1..80: mol_type = other DNA
accgtgcccggccgatgtacaccaatgttctctgtacaattctttcagattttctgaatgtttgcaaagttttattttaa

SEQ ID NO: 135833 - DNA, 80 bp, synthetic construct; identical to SEQ ID NO: 42702
  misc_feature 1..80: note = Artificially Synthesized Probe
  source 1..80: mol_type = other DNA

SEQ ID NO: 135834 - DNA, 80 bp, synthetic construct
  misc_feature 1..80: note = Artificially Synthesized Probe
  source 1..80: mol_type = other DNA
ggaaatgtggtatatcctatacaatggaatattatttggcaataaaaaggaatgaagtacagatacatgctatgacatga

SEQ ID NO: 135835 - DNA, 80 bp, synthetic construct
  misc_feature 1..80: note = Artificially Synthesized Probe
  source 1..80: mol_type = other DNA
tctggagtttgagaccagcctgggcaatatagcaaaaccccatctcaaccaaaatacacaaaaattattggggcatggtg

SEQ ID NO: 135836 - DNA, 80 bp, synthetic construct
  misc_feature 1..80: note = Artificially Synthesized Probe
  source 1..80: mol_type = other DNA
tacgcagaataggcacatctatagaaatatataaagtagaggccaggagaagtggttcatgcctgtaatccgagcacttt

SEQ ID NO: 135837 - DNA, 80 bp, synthetic construct
  misc_feature 1..80: note = Artificially Synthesized Probe
  source 1..80: mol_type = other DNA
ttgcagtgagctgaaatcatgccactgcactccagcctgggcaacagagcaagactctgttaaaaaaaaaaaaaatagcg

SEQ ID NO: 135838 - DNA, 80 bp, synthetic construct; identical to SEQ ID NO: 42703
  misc_feature 1..80: note = Artificially Synthesized Probe
  source 1..80: mol_type = other DNA

SEQ ID NO: 135839 - DNA, 80 bp, synthetic construct
  misc_feature 1..80: note = Artificially Synthesized Probe
  source 1..80: mol_type = other DNA
tcacaccaccgcactccagcctgggcgacagagccagactctgtctcaaaaacaaacaaaacaaaaacaacaaaaaacac

SEQ ID NO: 135840 - DNA, 80 bp, synthetic construct
  misc_feature 1..80: note = Artificially Synthesized Probe
  source 1..80: mol_type = other DNA
gactctttccaatcaataagaagaaaaataacccagtttgtaaaaaatgtgcaaaagacaaatatttcatacaataggaa

SEQ ID NO: 135841 - DNA, 80 bp, synthetic construct; identical to SEQ ID NO: 42618
  misc_feature 1..80: note = Artificially Synthesized Probe
  source 1..80: mol_type = other DNA

SEQ ID NO: 135842 - DNA, 80 bp, synthetic construct
  misc_feature 1..80: note = Artificially Synthesized Probe
  source 1..80: mol_type = other DNA
actcttatgcacatatatatgcaggaatgtctgcataatgttgttcatgccagcaaaaatttggaaacaatgaaatatca

SEQ ID NO: 135843 - DNA, 80 bp, synthetic construct; identical to SEQ ID NO: 42704
  misc_feature 1..80: note = Artificially Synthesized Probe
  source 1..80: mol_type = other DNA

SEQ ID NO: 135844 - DNA, 80 bp, synthetic construct
  misc_feature 1..80: note = Artificially Synthesized Probe
  source 1..80: mol_type = other DNA
ccacaatgccattctactatatgggcaaccagaagggccaaaacaaaacgaacaaaagactaccaagtgttaacaaggat

SEQ ID NO: 135845 - DNA, 80 bp, synthetic construct
  misc_feature 1..80: note = Artificially Synthesized Probe
  source 1..80: mol_type = other DNA
tgttcaccaaaaaacaagaatgtttatagcaaccctctttgcattagtcaaaagctagtaattacccaaaagttcctgaa

SEQ ID NO: 135846 - DNA, 80 bp, synthetic construct; identical to SEQ ID NO: 42705
  misc_feature 1..80: note = Artificially Synthesized Probe
  source 1..80: mol_type = other DNA

SEQ ID NO: 135847 - DNA, 80 bp, synthetic construct
  misc_feature 1..80: note = Artificially Synthesized Probe
  source 1..80: mol_type = other DNA
ctctgttctgctggttacatgggtatgttcacttgaaaatccatcaagttttatcctcatggtttgtgtacttttctgta

SEQ ID NO: 135848 - DNA, 80 bp, synthetic construct
  misc_feature 1..80: note = Artificially Synthesized Probe
  source 1..80: mol_type = other DNA
cactttttaccttttagtcttcactttgtggttccagtcatcaaatccctactctttgtcttagaaaggagcagaaggat

SEQ ID NO: 135849 - DNA, 80 bp, synthetic construct
  misc_feature 1..80: note = Artificially Synthesized Probe
  source 1..80: mol_type = other DNA
gaatctgcaaagcatcgttagttttgtaaatatcttgctgcagccattaaaaatgccaagtggtatttgttaaggaagta

SEQ ID NO: 135850 - DNA, 80 bp, synthetic construct
  misc_feature 1..80: note = Artificially Synthesized Probe
  source 1..80: mol_type = other DNA
acaggtgcccgccaccgtgcccggctaattttttgtctttttagtagagacggggtttcaccgtgttagccaggatggtc

SEQ ID NO: 135851 - DNA, 80 bp, synthetic construct; identical to SEQ ID NO: 42619
  misc_feature 1..80: note = Artificially Synthesized Probe
  source 1..80: mol_type = other DNA

SEQ ID NO: 135852 - DNA, 80 bp, synthetic construct
  misc_feature 1..80: note = Artificially Synthesized Probe
  source 1..80: mol_type = other DNA
cttcacctcctgggttcaagcgatttttctgcctcagcctcctgaatagctgggattacaggtgtgcgccaccacgtccg

SEQ ID NO: 135853 - DNA, 80 bp, synthetic construct; identical to SEQ ID NO: 42706
  misc_feature 1..80: note = Artificially Synthesized Probe
  source 1..80: mol_type = other DNA

SEQ ID NO: 135854 - DNA, 80 bp, synthetic construct
  misc_feature 1..80: note = Artificially Synthesized Probe
  source 1..80: mol_type = other DNA
agtaagagtgcatgagaaagaattctaggttggaaattcttttcccttagaattctgaagccctggctccgctgtcttcc

SEQ ID NO: 135855 - DNA, 80 bp, synthetic construct; identical to SEQ ID NO: 42716
  misc_feature 1..80: note = Artificially Synthesized Probe
  source 1..80: mol_type = other DNA

SEQ ID NO: 135856 - DNA, 80 bp, synthetic construct
  misc_feature 1..80: note = Artificially Synthesized Probe
  source 1..80: mol_type = other DNA
ctctttctttttttattttattttattttattattattatactttaagttttagggtacatgtgcacaatgtgcaggtta

SEQ ID NO: 135857 - DNA, 80 bp, synthetic construct
  misc_feature 1..80: note = Artificially Synthesized Probe
  source 1..80: mol_type = other DNA
tcttccctgttattcatttatttgtttctgttagtccgtttggcctctgcctttcatgttaaaggctttcctcatgtctg

SEQ ID NO: 135858 - DNA, 80 bp, synthetic construct
  misc_feature 1..80: note = Artificially Synthesized Probe
  source 1..80: mol_type = other DNA
cctggtgagtattggcctggctatcagcattctaaggggaaaaaaaagaatggtgttctcaacattcagtgagaaatgtt

SEQ ID NO: 135859 - DNA, 80 bp, synthetic construct
  misc_feature 1..80: note = Artificially Synthesized Probe
  source 1..80: mol_type = other DNA
ccccacttactccttttctagaatatctggggtccccaattcctgagtccaaggattccatagtataaatcaggtggctt

SEQ ID NO: 135860 - DNA, 80 bp, synthetic construct; identical to SEQ ID NO: 42717
  misc_feature 1..80: note = Artificially Synthesized Probe
  source 1..80: mol_type = other DNA

SEQ ID NO: 135861 - DNA, 80 bp, synthetic construct
  misc_feature 1..80: note = Artificially Synthesized Probe
  source 1..80: mol_type = other DNA
ctcccgtgccccccgcccgcggcctgacctgcaatggcggccgccgagcgcggcgccgcgcggccaacgggcgacaaccg

SEQ ID NO: 135862 - DNA, 80 bp, synthetic construct
  misc_feature 1..80: note = Artificially Synthesized Probe
  source 1..80: mol_type = other DNA
gttccgagatcaggttcaccagaactaccatttataggctgactgttcagtcagctcacctaccatatcatgcttaccgc

SEQ ID NO: 135863 - DNA, 80 bp, synthetic construct
  misc_feature 1..80: note = Artificially Synthesized Probe
  source 1..80: mol_type = other DNA
gaaataagtaccatttgaaggtgtgcttttctgatttttcaggcagcgctgttcataagatgattgtggacaggcagtat

SEQ ID NO: 135864 - DNA, 80 bp, synthetic construct
  misc_feature 1..80: note = Artificially Synthesized Probe
  source 1..80: mol_type = other DNA
ttgctgtagctgacgtgagtacagtccctgtttagagtggttgatgtacacccttgtggggtgagttgagaaagcagcct

SEQ ID NO: 135865 - DNA, 80 bp, synthetic construct; identical to SEQ ID NO: 42718
  misc_feature 1..80: note = Artificially Synthesized Probe
  source 1..80: mol_type = other DNA

SEQ ID NO: 135866 - DNA, 80 bp, synthetic construct
  misc_feature 1..80: note = Artificially Synthesized Probe
  source 1..80: mol_type = other DNA
gcctcccaaagtgctgggattataggcaggaaccacggcacctggccaaaatgtcttatttagtagtagttctttttttt

SEQ ID NO: 135867 - DNA, 80 bp, synthetic construct
  misc_feature 1..80: note = Artificially Synthesized Probe
  source 1..80: mol_type = other DNA
ttttatatttttagtagagatggggtttcaccatgttgggcaggctagtctcgaactcctgacctcaggtgatccaccca

SEQ ID NO: 135868 - DNA, 80 bp, synthetic construct
  misc_feature 1..80: note = Artificially Synthesized Probe
  source 1..80: mol_type = other DNA
ggagcaatttctcctgcctcagcctccgaagtaggtgagattacaggcgcccgcctctgtgcccagctaatttttatatg

SEQ ID NO: 135869 - DNA, 80 bp, synthetic construct; identical to SEQ ID NO: 42719
  misc_feature 1..80: note = Artificially Synthesized Probe
  source 1..80: mol_type = other DNA

SEQ ID NO: 135870 - DNA, 80 bp, synthetic construct
  misc_feature 1..80: note = Artificially Synthesized Probe
  source 1..80: mol_type = other DNA
gtttttttagaacagtttgatgtatgttaaggccctgaaaaacatagatgtcacacgtaagtgataatagtggtataagt

SEQ ID NO: 135871 - DNA, 80 bp, synthetic construct
  misc_feature 1..80: note = Artificially Synthesized Probe
  source 1..80: mol_type = other DNA
gttcaagacgagcctggtcaacatggtgaaaccctgtctctactaaaaatgcaaaaattagctgggcgtggtggtgggcg

SEQ ID NO: 135872 - DNA, 80 bp, synthetic construct; identical to SEQ ID NO: 42720
  misc_feature 1..80: note = Artificially Synthesized Probe
  source 1..80: mol_type = other DNA

SEQ ID NO: 135873 - DNA, 80 bp, synthetic construct
  misc_feature 1..80: note = Artificially Synthesized Probe
  source 1..80: mol_type = other DNA
tggggaaggggcgtgggaagcggctgcgagagctgggggggtcttacaaggtggccggcccagggtcggcgtccggctga

SEQ ID NO: 135874 - DNA, 80 bp, synthetic construct
  misc_feature 1..80: note = Artificially Synthesized Probe
  source 1..80: mol_type = other DNA
tcagcctcccaagtagctaggattacaggtgcatgccaccatgccaggctaatttttgtaattgtagtagagactgggtt

SEQ ID NO: 135875 - DNA, 80 bp, synthetic construct
  misc_feature 1..80: note = Artificially Synthesized Probe
  source 1..80: mol_type = other DNA
tttttgtaaattaagtaaactgtgtcgttggaggtgggggagtgtttgagttcctaagctgctgggtatgtccacttttg

SEQ ID NO: 135876 - DNA, 80 bp, synthetic construct
  misc_feature 1..80: note = Artificially Synthesized Probe
  source 1..80: mol_type = other DNA
aaaatgctttcctttctggtacacagtcatgaccctgcaagagagttggcataaggttaaggcagtgtggtgttcccaga

SEQ ID NO: 135877 - DNA, 80 bp, synthetic construct
  misc_feature 1..80: note = Artificially Synthesized Probe
  source 1..80: mol_type = other DNA
tgattcatacaagtatgaaatggaaataagtccgattttctgtaattccttaatgagggaactggtaaaatatttcaagc

SEQ ID NO: 135878 - DNA, 80 bp, synthetic construct; identical to SEQ ID NO: 42721
  misc_feature 1..80: note = Artificially Synthesized Probe
  source 1..80: mol_type = other DNA

SEQ ID NO: 135879 - DNA, 80 bp, synthetic construct
  misc_feature 1..80: note = Artificially Synthesized Probe
  source 1..80: mol_type = other DNA
tagcatattgttctcaaggttcatccatcttgcagcattatcagtatttcattccttactaagactgcataatatttgtg

SEQ ID NO: 135880 - DNA, 80 bp, synthetic construct
  misc_feature 1..80: note = Artificially Synthesized Probe
  source 1..80: mol_type = other DNA
ttcgagaccagcctggccagtatgatgaaaccctgtctctactaaaaatacaaaaattaagccgggcgcggtggctcacg

SEQ ID NO: 135881 - DNA, 80 bp, synthetic construct
  misc_feature 1..80: note = Artificially Synthesized Probe
  source 1..80: mol_type = other DNA
gtgaggctgaggcaggagaatggcgtgaaccagagaggcggagcttgcattgagtgcgatcgcgccactgcactccagcc

SEQ ID NO: 135882 - DNA, 80 bp, synthetic construct
  misc_feature 1..80: note = Artificially Synthesized Probe
  source 1..80: mol_type = other DNA
cattgcactccagcctggtcaacagagtgcaactccagctcaaaataataataataataataataataataataataata

SEQ ID NO: 135883 - DNA, 80 bp, synthetic construct; identical to SEQ ID NO: 42722
  misc_feature 1..80: note = Artificially Synthesized Probe
  source 1..80: mol_type = other DNA

SEQ ID NO: 135884 - DNA, 80 bp, synthetic construct
  misc_feature 1..80: note = Artificially Synthesized Probe
  source 1..80: mol_type = other DNA
tggatttttttttggattttggaatatttgcatatacataatgagatatcttggggatgggaccccagcctatacaagaa

SEQ ID NO: 135885 - DNA, 80 bp, synthetic construct
  misc_feature 1..80: note = Artificially Synthesized Probe
  source 1..80: mol_type = other DNA
cagtgaggggcgaacaagacctggtctctactctcggccagtatatatgttggcgggcgtcggggggacggggtagggta

SEQ ID NO: 135886 - DNA, 80 bp, synthetic construct
  misc_feature 1..80: note = Artificially Synthesized Probe
  source 1..80: mol_type = other DNA
gtttcggattttggattaggaatcctttttttttctttttagctgggactacaggctcatgccaccacgcctgtctaatt

SEQ ID NO: 135887 - DNA, 80 bp, synthetic construct
  misc_feature 1..80: note = Artificially Synthesized Probe
  source 1..80: mol_type = other DNA
caggcgcccgccaccacacccggctaattttttgtattttttttttcagtagagatgggttttcaccgtgttagccagga

SEQ ID NO: 135888 - DNA, 80 bp, synthetic construct; identical to SEQ ID NO: 42723
  misc_feature 1..80: note = Artificially Synthesized Probe
  source 1..80: mol_type = other DNA

SEQ ID NO: 135889 - DNA, 80 bp, synthetic construct
  misc_feature 1..80: note = Artificially Synthesized Probe
  source 1..80: mol_type = other DNA
tcctgccttcaattcttttggatgtatatcttcattactttttttttttttttttgagacacggtcttgctctgtcaccc

SEQ ID NO: 135890 - DNA, 80 bp, synthetic construct
  misc_feature 1..80: note = Artificially Synthesized Probe
  source 1..80: mol_type = other DNA
ggttggtctcaaattcctgggttgaagtgattctcctgccttccaaagtgcgggattacagatgtgagccatcacatcta

SEQ ID NO: 135891 - DNA, 80 bp, synthetic construct; identical to SEQ ID NO: 42724
  misc_feature 1..80: note = Artificially Synthesized Probe
  source 1..80: mol_type = other DNA

SEQ ID NO: 135892 - DNA, 80 bp, synthetic construct
  misc_feature 1..80: note = Artificially Synthesized Probe
  source 1..80: mol_type = other DNA
cttgaaccaaggaggcaggggttgtggtgagctgagatcgcgccattgcactccagcctgggcgacaagagtgaaactct

SEQ ID NO: 135893 - DNA, 80 bp, synthetic construct
  misc_feature 1..80: note = Artificially Synthesized Probe
  source 1..80: mol_type = other DNA
gcgaaactccgtctcaaaaaatacaaacaaacaaacaaaaaaagatgaggtctcactatgttgtgcagactggtctccaa

SEQ ID NO: 135894 - DNA, 80 bp, synthetic construct
  misc_feature 1..80: note = Artificially Synthesized Probe
  source 1..80: mol_type = other DNA
tggagtgcagtggtgcgatcttggcgtactgcaacctctgcctcccaggttcaagtgattctcgtgcctcagccgtccaa

SEQ ID NO: 135895 - DNA, 80 bp, synthetic construct
  misc_feature 1..80: note = Artificially Synthesized Probe
  source 1..80: mol_type = other DNA
ccatgcctggctgatgtttcttggatatttttaatgaaataaacgttattaagaaacacctgttctagttccaaataaag

SEQ ID NO: 135896 - DNA, 80 bp, synthetic construct
  misc_feature 1..80: note = Artificially Synthesized Probe
  source 1..80: mol_type = other DNA
taaaatgcggattcctaggcgccccgagataggaactctggagctatggagtaggaccctttttgattttttgctgaagc

SEQ ID NO: 135897 - DNA, 80 bp, synthetic construct; identical to SEQ ID NO: 42725
  misc_feature 1..80: note = Artificially Synthesized Probe
  source 1..80: mol_type = other DNA

SEQ ID NO: 135898 - DNA, 80 bp, synthetic construct
  misc_feature 1..80: note = Artificially Synthesized Probe
  source 1..80: mol_type = other DNA
tgagacagaaagcctcggaatatttttccaaccagaccttgttttgcttacgtgtacctccctcatgatttaattcctca

SEQ ID NO: 135899 - DNA, 80 bp, synthetic construct
  misc_feature 1..80: note = Artificially Synthesized Probe
  source 1..80: mol_type = other DNA
ctgatatctggaggtgggttccccctctggtgaggctgctgctttaccctgcccagttctggctgttctcgtgaggatga

SEQ ID NO: 135900 - DNA, 80 bp, synthetic construct
  misc_feature 1..80: note = Artificially Synthesized Probe
  source 1..80: mol_type = other DNA
ctcatctccccatccctgtgtccccctgtcccacaagctctgaacacagctcacgctcggcaaatttgtaggactttttt

SEQ ID NO: 135901 - DNA, 80 bp, synthetic construct; identical to SEQ ID NO: 42726
  misc_feature 1..80: note = Artificially Synthesized Probe
  source 1..80: mol_type = other DNA

SEQ ID NO: 135902 - DNA, 80 bp, synthetic construct
  misc_feature 1..80: note = Artificially Synthesized Probe
  source 1..80: mol_type = other DNA
ggttcatgccattctcctgcctcagccttccgagtggctgggactacaggtgcccaccaccacgcccggctaattttttt

SEQ ID NO: 135903 - DNA, 80 bp, synthetic construct
  misc_feature 1..80: note = Artificially Synthesized Probe
  source 1..80: mol_type = other DNA
gagatattgtaggactttctgtagctaccttcttcattccttctgtttttgaggcaagccactgcaaagacatttatggg

SEQ ID NO: 135904 - DNA, 80 bp, synthetic construct
  misc_feature 1..80: note = Artificially Synthesized Probe
  source 1..80: mol_type = other DNA
tggtaccatcttcccaagctagaaaacttgctccccacacctgctgccccattcattcaagcagtaaacctcattgagtc

SEQ ID NO: 135905 - DNA, 80 bp, synthetic construct; identical to SEQ ID NO: 42727
  misc_feature 1..80: note = Artificially Synthesized Probe
  source 1..80: mol_type = other DNA

SEQ ID NO: 135906 - DNA, 80 bp, synthetic construct
  misc_feature 1..80: note = Artificially Synthesized Probe
  source 1..80: mol_type = other DNA
cttgagctcaagcagtcctcccacatcagcctcccgagttgctggagctgcaggcatgcgccaccaggctcagctaattt

SEQ ID NO: 135907 - DNA, 80 bp, synthetic construct; identical to SEQ ID NO: 42707
  misc_feature 1..80: note = Artificially Synthesized Probe
  source 1..80: mol_type = other DNA

SEQ ID NO: 135908 - DNA, 80 bp, synthetic construct
  misc_feature 1..80: note = Artificially Synthesized Probe
  source 1..80: mol_type = other DNA
cccgccaccacgcctaggtaattttttttgtatttttagtagagacagggtttcaccatgttggccaggctggtcttgaa

SEQ ID NO: 135909 - DNA, 80 bp, synthetic construct
  misc_feature 1..80: note = Artificially Synthesized Probe
  source 1..80: mol_type = other DNA
tcaagcaatcctcgcacctcagcctctcgattgctggcattacaggcatgagccactgctccaggcccattgatctgttt

SEQ ID NO: 135910 - DNA, 80 bp, synthetic construct; identical to SEQ ID NO: 42728
  misc_feature 1..80: note = Artificially Synthesized Probe
  source 1..80: mol_type = other DNA

SEQ ID NO: 135911 - DNA, 80 bp, synthetic construct
  misc_feature 1..80: note = Artificially Synthesized Probe
  source 1..80: mol_type = other DNA
atactgtgtttagccgtgttaaaattcttggcacactgaagtctaattgctgatttaattctgtgtcacccctttagaag

SEQ ID NO: 135912 - DNA, 80 bp, synthetic construct
  misc_feature 1..80: note = Artificially Synthesized Probe
  source 1..80: mol_type = other DNA
aatgtgctaaggtggtgctactgtatctggtactaaggcagtagatgaccctgacttatttttttaacttcttgattctt

SEQ ID NO: 135913 - DNA, 80 bp, synthetic construct; identical to SEQ ID NO: 42729
  misc_feature 1..80: note = Artificially Synthesized Probe
  source 1..80: mol_type = other DNA

SEQ ID NO: 135914 - DNA, 80 bp, synthetic construct
  misc_feature 1..80: note = Artificially Synthesized Probe
  source 1..80: mol_type = other DNA
agaatcgtagtttgcgctagcttaactgaggtgaaaacaggctgttgaaaaacaacaagatttaatgatgggtaatgata

SEQ ID NO: 135915 - DNA, 80 bp, synthetic construct
  misc_feature 1..80: note = Artificially Synthesized Probe
  source 1..80: mol_type = other DNA
ggaattagtgatgtatcagaggatagaagcaaaagaagtactcactgctttctcttcatatacccctcaaaaattgtgag

SEQ ID NO: 135916 - DNA, 80 bp, synthetic construct
  misc_feature 1..80: note = Artificially Synthesized Probe
  source 1..80: mol_type = other DNA
gaagtttcttgtttcaggcaagaatggggatactcttccactctctaaaaatgcagatcatttactgcacctaaagacaa

SEQ ID NO: 135917 - DNA, 80 bp, synthetic construct; identical to SEQ ID NO: 42730
  misc_feature 1..80: note = Artificially Synthesized Probe
  source 1..80: mol_type = other DNA

SEQ ID NO: 135918 - DNA, 80 bp, synthetic construct
  misc_feature 1..80: note = Artificially Synthesized Probe
  source 1..80: mol_type = other DNA
cctcctgggttcaagcgattctcctgctttagccccccaagtagctgggattacatgcatgcgccaccacgcccggctaa

SEQ ID NO: 135919 - DNA, 80 bp, synthetic construct
  misc_feature 1..80: note = Artificially Synthesized Probe
  source 1..80: mol_type = other DNA
taatttcttctgaagttcaagaagcttgtatgtcttttataatcaaactgattgagtgacttcctagcccctctgaagtt

SEQ ID NO: 135920 - DNA, 80 bp, synthetic construct
  misc_feature 1..80: note = Artificially Synthesized Probe
  source 1..80: mol_type = other DNA
ggtatacaatgaaaaaaaaatcattttgtgagtttttaaaaactacatacatgttacattcaacttttctttattctcca

SEQ ID NO: 135921 - DNA, 80 bp, synthetic construct
  misc_feature 1..80: note = Artificially Synthesized Probe
  source 1..80: mol_type = other DNA
cccaggtagctgggactacaggtgtgcaccaccatgcccggctaattttttgtagagtcagggtttcaccatgttgtcca

SEQ ID NO: 135922 - DNA, 80 bp, synthetic construct
  misc_feature 1..80: note = Artificially Synthesized Probe
  source 1..80: mol_type = other DNA
tgctagagctacaaacacttcctatttctagtcccacccactttctgggacttctcaatccgcttcccccctcttctcca

SEQ ID NO: 135923 - DNA, 80 bp, synthetic construct
  misc_feature 1..80: note = Artificially Synthesized Probe
  source 1..80: mol_type = other DNA
agtctttaaagcagaacgccgtacacaaaacagaaaataagtacttcaaaccacctatcctccagagctttccttcagta

SEQ ID NO: 135924 - DNA, 80 bp, synthetic construct; identical to SEQ ID NO: 42731
  misc_feature 1..80: note = Artificially Synthesized Probe
  source 1..80: mol_type = other DNA

SEQ ID NO: 135925 - DNA, 80 bp, synthetic construct
  misc_feature 1..80: note = Artificially Synthesized Probe
  source 1..80: mol_type = other DNA
gtatctccccatgtggaagttggatagcctattctacagtttctcggttttttctctatcggctgaattatgaacatgac

SEQ ID NO: 135926 - DNA, 80 bp, synthetic construct
  misc_feature 1..80: note = Artificially Synthesized Probe
  source 1..80: mol_type = other DNA
tgaagtggaaatcaactggatgtgaatccttgctcagttaaaaactatttggagatttggagaaggctgttatgaaacag

SEQ ID NO: 135927 - DNA, 80 bp, synthetic construct; identical to SEQ ID NO: 42732
  misc_feature 1..80: note = Artificially Synthesized Probe
  source 1..80: mol_type = other DNA

SEQ ID NO: 135928 - DNA, 80 bp, synthetic construct
  misc_feature 1..80: note = Artificially Synthesized Probe
  source 1..80: mol_type = other DNA
gcaatctctgcctctcgggttcaagccattctcctgcctcagcctcccgagtagctgggattacaggtgcccaccaccag

SEQ ID NO: 135929 - DNA, 80 bp, synthetic construct
  misc_feature 1..80: note = Artificially Synthesized Probe
  source 1..80: mol_type = other DNA
cattttgaaattttgaggtatgttcttagagggatagggtaatgccctacaggcaataaaattaaagcttttctgtttag

SEQ ID NO: 135930 - DNA, 80 bp, synthetic construct
  misc_feature 1..80: note = Artificially Synthesized Probe
  source 1..80: mol_type = other DNA
tgtgattgtttctgatgggctgtaggtctcccttctctcactggcttttattattggttcacccaaaggtttccaaaatg

SEQ ID NO: 135931 - DNA, 80 bp, synthetic construct; identical to SEQ ID NO: 42733
  misc_feature 1..80: note = Artificially Synthesized Probe
  source 1..80: mol_type = other DNA

SEQ ID NO: 135932 - DNA, 80 bp, synthetic construct
  misc_feature 1..80: note = Artificially Synthesized Probe
  source 1..80: mol_type = other DNA
attgttggtatatcagtctcaacaccattgcagctttggtaagcaaaatttcctgcagggagtatcagtactgtttcatt

SEQ ID NO: 135933 - DNA, 80 bp, synthetic construct
  misc_feature 1..80: note = Artificially Synthesized Probe
  source 1..80: mol_type = other DNA
tccttagtttgttagcagaacaagaagaaagttaaagtcatttgcaatcctgacacccagaaatagctaccattaatatt

SEQ ID NO: 135934 - DNA, 80 bp, synthetic construct
  misc_feature 1..80: note = Artificially Synthesized Probe
  source 1..80: mol_type = other DNA
agacactcaccactatgcccagctaattttttcattttttttgtagagacggggtctcattatgttgacaaagttggtct

SEQ ID NO: 135935 - DNA, 80 bp, synthetic construct
  misc_feature 1..80: note = Artificially Synthesized Probe
  source 1..80: mol_type = other DNA
agtattaatgaatgagtgtggctatgtagctagctatggctaactgttaaggacttggactcagtttccagattaagctg

SEQ ID NO: 135936 - DNA, 80 bp, synthetic construct
  misc_feature 1..80: note = Artificially Synthesized Probe
  source 1..80: mol_type = other DNA
ggctggagtgcagtggtgcgatcatggctcactgcagcctcaccctccccaggctcagaaaatccttccacctcagcctc

SEQ ID NO: 135937 - DNA, 80 bp, synthetic construct; identical to SEQ ID NO: 42734
  misc_feature 1..80: note = Artificially Synthesized Probe
  source 1..80: mol_type = other DNA

SEQ ID NO: 135938 - DNA, 80 bp, synthetic construct
  misc_feature 1..80: note = Artificially Synthesized Probe
  source 1..80: mol_type = other DNA
ctttattttttccacttctctcatctcacttccccttgtagtcaaaatggtttcttcacagctctcaaacctgcatattc

SEQ ID NO: 135939 - DNA, 80 bp, synthetic construct
  misc_feature 1..80: note = Artificially Synthesized Probe
  source 1..80: mol_type = other DNA
gcacgcattttggcatagagcatcactgtccaatttttatcccacactagttgtcgtgttgccagattggtttaaagtct

SEQ ID NO: 135940 - DNA, 80 bp, synthetic construct; identical to SEQ ID NO: 42735
  misc_feature 1..80: note = Artificially Synthesized Probe
  source 1..80: mol_type = other DNA

SEQ ID NO: 135941 - DNA, 80 bp, synthetic construct
  misc_feature 1..80: note = Artificially Synthesized Probe
  source 1..80: mol_type = other DNA
ctcccaaagtgctgggattacaggtgtgagctaccacgcctggcctgtccataattttggcttaaaaaaaatttaggggc

SEQ ID NO: 135942 - DNA, 80 bp, synthetic construct
  misc_feature 1..80: note = Artificially Synthesized Probe
  source 1..80: mol_type = other DNA
aaattagctgggtgtggtggtgcacgcctgtagtcccagctacttgggaggctgaggcaggagaatggcttgaacccgag

SEQ ID NO: 135943 - DNA, 80 bp, synthetic construct
  misc_feature 1..80: note = Artificially Synthesized Probe
  source 1..80: mol_type = other DNA
atgcagaggtctattagtcctttttcttctcccctccaagggcactgactagtgattttcttcgggtgcaacatcttagt

SEQ ID NO: 135944 - DNA, 80 bp, synthetic construct
  misc_feature 1..80: note = Artificially Synthesized Probe
  source 1..80: mol_type = other DNA
tcaggagttcaagaccagcccagccaacatggtgaaaccccatctctactaaaaatacaaaaattagccaggcatggtgg

SEQ ID NO: 135945 - DNA, 80 bp, synthetic construct
  misc_feature 1..80: note = Artificially Synthesized Probe
  source 1..80: mol_type = other DNA
ccatttggtaggaaaggagtttgaaacaattaaagtatatattttagtggcagatgctgccgtcattctctattcctgta

SEQ ID NO: 135946 - DNA, 80 bp, synthetic construct; identical to SEQ ID NO: 42736
  misc_feature 1..80: note = Artificially Synthesized Probe
  source 1..80: mol_type = other DNA

SEQ ID NO: 135947 - DNA, 80 bp, synthetic construct
  misc_feature 1..80: note = Artificially Synthesized Probe
  source 1..80: mol_type = other DNA
gctaaaggtgagcatagggtttcatggcagcagtttgaatcattgtacaggagccagttcaccctgcagttacaagattc

SEQ ID NO: 135948 - DNA, 80 bp, synthetic construct
  misc_feature 1..80: note = Artificially Synthesized Probe
  source 1..80: mol_type = other DNA
aaatgattctcctgtctcagcctcctgagtagctgggattacaggtgtgtgcctccacacctggctaatttttgtatttt

SEQ ID NO: 135949 - DNA, 80 bp, synthetic construct; identical to SEQ ID NO: 42737
  misc_feature 1..80: note = Artificially Synthesized Probe
  source 1..80: mol_type = other DNA

SEQ ID NO: 135950 - DNA, 80 bp, synthetic construct
  misc_feature 1..80: note = Artificially Synthesized Probe
  source 1..80: mol_type = other DNA
cctttcatggcttgccttgtaatctcaaggtaaacataatcaaaacttcgaaaaaggaatactgggaaaacatttttcac

SEQ ID NO: 135951 - DNA, 80 bp, synthetic construct
  misc_feature 1..80: note = Artificially Synthesized Probe
  source 1..80: mol_type = other DNA
gttaactgcatagtgtaacctttgttgcattatggtaggagcatgtactgagcacttgtctttgagccttgcctggcatt

SEQ ID NO: 135952 - DNA, 80 bp, synthetic construct
  misc_feature 1..80: note = Artificially Synthesized Probe
  source 1..80: mol_type = other DNA
tataagcagtttgtacagatggatttactcagagggaaaggctttactctcagttctccacaaacgctgttagttttgta

SEQ ID NO: 135953 - DNA, 80 bp, synthetic construct; identical to SEQ ID NO: 42738
  misc_feature 1..80: note = Artificially Synthesized Probe
  source 1..80: mol_type = other DNA

SEQ ID NO: 135954 - DNA, 80 bp, synthetic construct
  misc_feature 1..80: note = Artificially Synthesized Probe
  source 1..80: mol_type = other DNA
ctcctaggttcaagtgattctcctgcctcaccctcctgagtagctgggattacaggtgcacgccaccacacccagctaat

SEQ ID NO: 135955 - DNA, 80 bp, synthetic construct; identical to SEQ ID NO: 42708
  misc_feature 1..80: note = Artificially Synthesized Probe
  source 1..80: mol_type = other DNA

SEQ ID NO: 135956 - DNA, 80 bp, synthetic construct
  misc_feature 1..80: note = Artificially Synthesized Probe
  source 1..80: mol_type = other DNA
tgcgcccggccaaccaataggtatttttttaagaaaatgaggactggtgcggtggcttacgcctgtaatcccagcacttt

SEQ ID NO: 135957 - DNA, 80 bp, synthetic construct
  misc_feature 1..80: note = Artificially Synthesized Probe
  source 1..80: mol_type = other DNA
gaggtcaggagtttgagaccagcctggccaacatggtgaaaccccgtctctactaaaaatacaaaaattagccaggcatg

SEQ ID NO: 135958 - DNA, 80 bp, synthetic construct
  misc_feature 1..80: note = Artificially Synthesized Probe
  source 1..80: mol_type = other DNA
aaaattagccgggtgtggtggtaggcgcctgtaatcccagctacttgggaggctgaggcaggagaatcacttgaacctgg

SEQ ID NO: 135959 - DNA, 80 bp, synthetic construct; identical to SEQ ID NO: 42739
  misc_feature 1..80: note = Artificially Synthesized Probe
  source 1..80: mol_type = other DNA

SEQ ID NO: 135960 - DNA, 80 bp, synthetic construct
  misc_feature 1..80: note = Artificially Synthesized Probe
  source 1..80: mol_type = other DNA
tggatagtaacctagaagctggaatattgggcagttgcggggagcttttttttgaaggtgttggaggatataaggtagtt

SEQ ID NO: 135961 - DNA, 80 bp, synthetic construct
  misc_feature 1..80: note = Artificially Synthesized Probe
  source 1..80: mol_type = other DNA
acaagagggaggaggaattttgaagtactcattttcctgattgttttagaggagagatgacatgggcttgggtattaaac

SEQ ID NO: 135962 - DNA, 80 bp, synthetic construct; identical to SEQ ID NO: 42740
  misc_feature 1..80: note = Artificially Synthesized Probe
  source 1..80: mol_type = other DNA

SEQ ID NO: 135963 - DNA, 80 bp, synthetic construct
  misc_feature 1..80: note = Artificially Synthesized Probe
  source 1..80: mol_type = other DNA
atgttaatatctacctcactgagctgttgggaagattaaatgtaatccaggaagcacatttaagtagagtgctaggcaaa

SEQ ID NO: 135964 - DNA, 80 bp, synthetic construct
  misc_feature 1..80: note = Artificially Synthesized Probe
  source 1..80: mol_type = other DNA
gctggactacaggcgcccgccaccatgcccggctaattttttgtatttttagtagagatggagtttcaccatgttagcca

SEQ ID NO: 135965 - DNA, 80 bp, synthetic construct
  misc_feature 1..80: note = Artificially Synthesized Probe
  source 1..80: mol_type = other DNA
ttgagtccttgaccaaagactgaaagagtagtgaagccacacatctttgcctttgtcacacataatgataatttccccca

SEQ ID NO: 135966 - DNA, 80 bp, synthetic construct
  misc_feature 1..80: note = Artificially Synthesized Probe
  source 1..80: mol_type = other DNA
ctaacccttttggaggacatgttggcaataccttaaaaattttaaagtccacatggtctttgacttagaaatttcagttc

SEQ ID NO: 135967 - DNA, 80 bp, synthetic construct
  misc_feature 1..80: note = Artificially Synthesized Probe
  source 1..80: mol_type = other DNA
ccacaaatgggttacattctgtggtatgaagaacatgcgctggcgtgtgcttattgcatcctgtgattttcttttttttt

SEQ ID NO: 135968 - DNA, 80 bp, synthetic construct; identical to SEQ ID NO: 42741
  misc_feature 1..80: note = Artificially Synthesized Probe
  source 1..80: mol_type = other DNA

SEQ ID NO: 135969 - DNA, 80 bp, synthetic construct
  misc_feature 1..80: note = Artificially Synthesized Probe
  source 1..80: mol_type = other DNA
acgaggtcaggagatcaagaccatcctggctaacacagtgaaaccccatctctactaaaaatacaaaaaattagccgggc

SEQ ID NO: 135970 - DNA, 80 bp, synthetic construct
  misc_feature 1..80: note = Artificially Synthesized Probe
  source 1..80: mol_type = other DNA
gagagcatagaatgaatataatacagttgaagctttgtatagatactttctggttagggatgagaatgcccttctggtct

SEQ ID NO: 135971 - DNA, 80 bp, synthetic construct; identical to SEQ ID NO: 42742
  misc_feature 1..80: note = Artificially Synthesized Probe
  source 1..80: mol_type = other DNA

SEQ ID NO: 135972 - DNA, 80 bp, synthetic construct
  misc_feature 1..80: note = Artificially Synthesized Probe
  source 1..80: mol_type = other DNA
ctacatgttctgcatcattgacaagtcattggtgagttcttcactgctacctcccaaatcttcttctgaatcttaaagtt

SEQ ID NO: 135973 - DNA, 80 bp, synthetic construct
  misc_feature 1..80: note = Artificially Synthesized Probe
  source 1..80: mol_type = other DNA
ggaaggggctggcctttgtatactggcttttgctgatttgactatttgtctactttgcgagtaagcacataaatcttaca

SEQ ID NO: 135974 - DNA, 80 bp, synthetic construct
  misc_feature 1..80: note = Artificially Synthesized Probe
  source 1..80: mol_type = other DNA
aagctactaaaacgctgtctgcaggcttgaggaactggtcttaacatcttcgaaaaacccagctaggaaaattcttcatg

SEQ ID NO: 135975 - DNA, 80 bp, synthetic construct
  misc_feature 1..80: note = Artificially Synthesized Probe
  source 1..80: mol_type = other DNA
gattacaaccatcacacggtgttttggtgtgtttgtgaaggtgggggtggaaggaacatgggggaaagcagcagatggct

SEQ ID NO: 135976 - DNA, 80 bp, synthetic construct; identical to SEQ ID NO: 42743
  misc_feature 1..80: note = Artificially Synthesized Probe
  source 1..80: mol_type = other DNA

SEQ ID NO: 135977 - DNA, 80 bp, synthetic construct
  misc_feature 1..80: note = Artificially Synthesized Probe
  source 1..80: mol_type = other DNA
cctgcacttgccagtttgttccattctgacaaagtgatactgatgagacaggccagaagccgcagaagggccctttgatc

SEQ ID NO: 135978 - DNA, 80 bp, synthetic construct
  misc_feature 1..80: note = Artificially Synthesized Probe
  source 1..80: mol_type = other DNA
ttttttattttcatagagacgaggtttcaccatgttggccagcctggtctcgaactcctgacctcaagtgatctgcccac

SEQ ID NO: 135979 - DNA, 80 bp, synthetic construct
  misc_feature 1..80: note = Artificially Synthesized Probe
  source 1..80: mol_type = other DNA
gaattaacgaatgtcagggaggtactgaatatatatgatggttagaagatgatgttgggctcaaaatgcactacagatct

SEQ ID NO: 135980 - DNA, 80 bp, synthetic construct
  misc_feature 1..80: note = Artificially Synthesized Probe
  source 1..80: mol_type = other DNA
gatatataaggtaaaacatcttgtgttgttattctggatagttggttcctttgtgataccaaaatgtaataaactccaca

SEQ ID NO: 135981 - DNA, 80 bp, synthetic construct; identical to SEQ ID NO: 42744
  misc_feature 1..80: note = Artificially Synthesized Probe
  source 1..80: mol_type = other DNA

SEQ ID NO: 135982 - DNA, 80 bp, synthetic construct
  misc_feature 1..80: note = Artificially Synthesized Probe
  source 1..80: mol_type = other DNA
agttctgtaaattactgattactcaaatgactcaaatgtgattagcttcttgatgcatttgtagcttgccagttgtcagt

SEQ ID NO: 135983 - DNA, 80 bp, synthetic construct
  misc_feature 1..80: note = Artificially Synthesized Probe
  source 1..80: mol_type = other DNA
tgccttaggctgggtatggtgattcacgcctgtaatctcagtactttaggaggttgaggctggagttcaagaccagtctg

SEQ ID NO: 135984 - DNA, 80 bp, synthetic construct
  misc_feature 1..80: note = Artificially Synthesized Probe
  source 1..80: mol_type = other DNA
gcactccaggctgggtaacatcgagattctgtctgagaaaaaaaagaacttaggctttaaagtccttgcttaacattgat

SEQ ID NO: 135985 - DNA, 80 bp, synthetic construct
  misc_feature 1..80: note = Artificially Synthesized Probe
  source 1..80: mol_type = other DNA
cacgagttcaggagatcgagaccatcctggctaacacggtgaaaccccatctctactaaaaatacaaaaaattagccggg

SEQ ID NO: 135986 - DNA, 80 bp, synthetic construct; identical to SEQ ID NO: 42745
  misc_feature 1..80: note = Artificially Synthesized Probe
  source 1..80: mol_type = other DNA

SEQ ID NO: 135987 - DNA, 80 bp, synthetic construct
  misc_feature 1..80: note = Artificially Synthesized Probe
  source 1..80: mol_type = other DNA
tttaaatcatttgagccttgaactaggctaaccttttagcttagatggtgtctacctacagtcagttctttcaggactag

SEQ ID NO: 135988 - DNA, 80 bp, synthetic construct
  misc_feature 1..80: note = Artificially Synthesized Probe
  source 1..80: mol_type = other DNA
aaaacagggcactgtctgtgtccttccttgaactgtctaccctgttgcttttcacaaatcatggtaataaaacaagttat

SEQ ID NO: 135989 - DNA, 80 bp, synthetic construct; identical to SEQ ID NO: 42746
  misc_feature 1..80: note = Artificially Synthesized Probe
  source 1..80: mol_type = other DNA

SEQ ID NO: 135990 - DNA, 80 bp, synthetic construct
  misc_feature 1..80: note = Artificially Synthesized Probe
  source 1..80: mol_type = other DNA
tgtgtgtttgtttaatgtctttcttccatgctgaacttccaattttatgaggataggaaccatgtcagtgatactcacat

SEQ ID NO: 135991 - DNA, 80 bp, synthetic construct
  misc_feature 1..80: note = Artificially Synthesized Probe
  source 1..80: mol_type = other DNA
ataagggagtgctccatctaaaaaatagatgcctttgacctttgacagtcagccgttaattttatttaaaagtaaaaaaa

SEQ ID NO: 135992 - DNA, 80 bp, synthetic construct
  misc_feature 1..80: note = Artificially Synthesized Probe
  source 1..80: mol_type = other DNA
gggagaccctatccctaaagaaatacaatatgaaaaaaaagatacaggagctgggcacacatcagtagtcccagctactc

SEQ ID NO: 135993 - DNA, 80 bp, synthetic construct
  misc_feature 1..80: note = Artificially Synthesized Probe
  source 1..80: mol_type = other DNA
tagggattaagagtagagatggggacccgagagcccaccatgtatttcacatttttcattctcttctacctgctctgaca

SEQ ID NO: 135994 - DNA, 80 bp, synthetic construct
  misc_feature 1..80: note = Artificially Synthesized Probe
  source 1..80: mol_type = other DNA
tttgttttggggatggagggctgaagtgtgggcagagaagtgtgtgggttctgataacatcttgaatgaagggttggtga

SEQ ID NO: 135995 - DNA, 80 bp, synthetic construct; identical to SEQ ID NO: 42747
  misc_feature 1..80: note = Artificially Synthesized Probe
  source 1..80: mol_type = other DNA

SEQ ID NO: 135996 - DNA, 80 bp, synthetic construct
  misc_feature 1..80: note = Artificially Synthesized Probe
  source 1..80: mol_type = other DNA
gaaactccatccctacaaaacatacaaaaattagccaggcgtggtggcaagcacctgtagtcccagcttctcaggaggct

SEQ ID NO: 135997 - DNA, 80 bp, synthetic construct
  misc_feature 1..80: note = Artificially Synthesized Probe
  source 1..80: mol_type = other DNA
gaatacatttttttctgtaaggtatatttttccagtctggattagactggactattagggacctttttagtttactgaag

SEQ ID NO: 135998 - DNA, 80 bp, synthetic construct
  misc_feature 1..80: note = Artificially Synthesized Probe
  source 1..80: mol_type = other DNA
ggaggccaaggcaggcagatcacttgaggttcaggagttcaagccagcctggccaacatggcaaaaccccatctctacta

SEQ ID NO: 135999 - DNA, 80 bp, synthetic construct; identical to SEQ ID NO: 42748
  misc_feature 1..80: note = Artificially Synthesized Probe
  source 1..80: mol_type = other DNA

SEQ ID NO: 136000 - DNA, 80 bp, synthetic construct
  misc_feature 1..80: note = Artificially Synthesized Probe
  source 1..80: mol_type = other DNA
ccagtgatttgtacttccttaaatggtatgggaagtaagtgctttgggccttgaaattcttccgaagtagaaaacttgga

SEQ ID NO: 136001 - DNA, 80 bp, synthetic construct; identical to SEQ ID NO: 42709
  misc_feature 1..80: note = Artificially Synthesized Probe
  source 1..80: mol_type = other DNA

SEQ ID NO: 136002 - DNA, 80 bp, synthetic construct
  misc_feature 1..80: note = Artificially Synthesized Probe
  source 1..80: mol_type = other DNA
tattaaaaaaggggaacgctttagtgcatgggtttcagggtgtttttactttgggggtttgtgtaacctagacatttaaa

SEQ ID NO: 136003 - DNA, 80 bp, synthetic construct
  misc_feature 1..80: note = Artificially Synthesized Probe
  source 1..80: mol_type = other DNA
tgactcaaatgctttaaaaattcactcttctcatgtactggttagtaaactaatctctgaatggataattcacatgtacc

SEQ ID NO: 136004 - DNA, 80 bp, synthetic construct; identical to SEQ ID NO: 42749
  misc_feature 1..80: note = Artificially Synthesized Probe
  source 1..80: mol_type = other DNA

SEQ ID NO: 136005 - DNA, 80 bp, synthetic construct
  misc_feature 1..80: note = Artificially Synthesized Probe
  source 1..80: mol_type = other DNA
cggctaattttttgtattttagtagagacggggtttcagcatgttggccaggatggtctcaatcccctgacctggtgatc

SEQ ID NO: 136006 - DNA, 80 bp, synthetic construct
  misc_feature 1..80: note = Artificially Synthesized Probe
  source 1..80: mol_type = other DNA
agcttattcccccactatctcagttataggaccctaatcataaatatgattgtcagaagcatttgaaccaaagcaaatgt

SEQ ID NO: 136007 - DNA, 80 bp, synthetic construct; identical to SEQ ID NO: 42750
  misc_feature 1..80: note = Artificially Synthesized Probe
  source 1..80: mol_type = other DNA

SEQ ID NO: 136008 - DNA, 80 bp, synthetic construct
  misc_feature 1..80: note = Artificially Synthesized Probe
  source 1..80: mol_type = other DNA
gcagatcacctgaggtcaggagttccagaccaacctggccaacttggtgaaaccccgtctctactaaaaaaaaatacaaa

SEQ ID NO: 136009 - DNA, 80 bp, synthetic construct
  misc_feature 1..80: note = Artificially Synthesized Probe
  source 1..80: mol_type = other DNA
agaaaagaaccataaaaatgggcaaccagccttgaggctgctctggctttccttcacttgcttaataaacttgctttcac

SEQ ID NO: 136010 - DNA, 80 bp, synthetic construct
  misc_feature 1..80: note = Artificially Synthesized Probe
  source 1..80: mol_type = other DNA
tagctgtaatattgagttatgtgggcagtcttttgtgttagtcatatagagtgtagtaatgtacaatctaggacattgtc

SEQ ID NO: 136011 - DNA, 80 bp, synthetic construct; identical to SEQ ID NO: 42751
  misc_feature 1..80: note = Artificially Synthesized Probe
  source 1..80: mol_type = other DNA

SEQ ID NO: 136012 - DNA, 80 bp, synthetic construct
  misc_feature 1..80: note = Artificially Synthesized Probe
  source 1..80: mol_type = other DNA
ggagtgcagtggcgcagtcttggctcactgccagctccgcctcccgggttcaaggcattctcctgcctcagcctcctgag

SEQ ID NO: 136013 - DNA, 80 bp, synthetic construct
  misc_feature 1..80: note = Artificially Synthesized Probe
  source 1..80: mol_type = other DNA
tgtggtgttgtatgcccatagttccagctacttggagggttgaggcggaaggatcgcttgagctcaggaggttgaggcta

SEQ ID NO: 136014 - DNA, 80 bp, synthetic construct
  misc_feature 1..80: note = Artificially Synthesized Probe
  source 1..80: mol_type = other DNA
cgtgtccagccgtgttgtctttttcttttagtatttcaaggtattttatgacgtagatcagcactgtccaataaactttc

SEQ ID NO: 136015 - DNA, 80 bp, synthetic construct
  misc_feature 1..80: note = Artificially Synthesized Probe
  source 1..80: mol_type = other DNA
agtggcgcatgcctataatctcagctacttgggaggctgaggtgggagaattacttgagcctgggaggtggaagttgtag

SEQ ID NO: 136016 - DNA, 80 bp, synthetic construct; identical to SEQ ID NO: 42752
  misc_feature 1..80: note = Artificially Synthesized Probe
  source 1..80: mol_type = other DNA

SEQ ID NO: 136017 - DNA, 80 bp, synthetic construct
  misc_feature 1..80: note = Artificially Synthesized Probe
  source 1..80: mol_type = other DNA
cactcctgcctgggtaacagagcaagactccttctcaaaaaaaaaaaattctgttcttagtcacactagcaacattgcaa

SEQ ID NO: 136018 - DNA, 80 bp, synthetic construct
  misc_feature 1..80: note = Artificially Synthesized Probe
  source 1..80: mol_type = other DNA
cctgggttcaagcgattctcctgcctcagcctcccaagtagctgggactacaggcatgcgccaccatgcccggctaattt

SEQ ID NO: 136019 - DNA, 80 bp, synthetic construct
  misc_feature 1..80: note = Artificially Synthesized Probe
  source 1..80: mol_type = other DNA
ccaaagattactctttaaacgtcctttctctaccaccctcgttctccaaattgttcccggttctcaagtactccactcct

SEQ ID NO: 136020 - DNA, 80 bp, synthetic construct
  misc_feature 1..80: note = Artificially Synthesized Probe
  source 1..80: mol_type = other DNA
ttttattggcctcctgctcctcaaagggtaccctgcttctgctggcttaatgcctcagaactttggtgtcgttggtctca

SEQ ID NO: 136021 - DNA, 80 bp, synthetic construct
  misc_feature 1..80: note = Artificially Synthesized Probe
  source 1..80: mol_type = other DNA
acaatttttatattttttatagagacaaggtttcaccatgttggccaggctggaactcctaacctcaggtgatctgcctg

SEQ ID NO: 136022 - DNA, 80 bp, synthetic construct; identical to SEQ ID NO: 42753
  misc_feature 1..80: note = Artificially Synthesized Probe
  source 1..80: mol_type = other DNA

SEQ ID NO: 136023 - DNA, 80 bp, synthetic construct
  misc_feature 1..80: note = Artificially Synthesized Probe
  source 1..80: mol_type = other DNA
cagtgagaccccatctctacgaaaacatttttttaaaattagccagatgtggtggcacatgcctgtgtttcctagctact

SEQ ID NO: 136024 - DNA, 80 bp, synthetic construct
  misc_feature 1..80: note = Artificially Synthesized Probe
  source 1..80: mol_type = other DNA
gaaggaagctaagcagtttaggaaagtatgtggaaaagacaagttgttttggatacagagtccttgagccaacatgtagt

SEQ ID NO: 136025 - DNA, 80 bp, synthetic construct
  misc_feature 1..80: note = Artificially Synthesized Probe
  source 1..80: mol_type = other DNA
gggaattcgagaccagcctgaccaacatggagaaaccccgtctctactaaaaatacaaaaaaaaatagcgggacgtggtg

SEQ ID NO: 136026 - DNA, 80 bp, synthetic construct; identical to SEQ ID NO: 42754
  misc_feature 1..80: note = Artificially Synthesized Probe
  source 1..80: mol_type = other DNA

SEQ ID NO: 136027 - DNA, 80 bp, synthetic construct
  misc_feature 1..80: note = Artificially Synthesized Probe
  source 1..80: mol_type = other DNA
tggctaatttttttttttaatagcccaaactgtcattttttctttttctttcttttttttttttggaatagagtctcact

SEQ ID NO: 136028 - DNA, 80 bp, synthetic construct
  misc_feature 1..80: note = Artificially Synthesized Probe
  source 1..80: mol_type = other DNA
ttcaccatgttggtcaggctggtctcaaactcctgatctcaagtgatccacccgtctcggcctcccaaagtgttgggatt

SEQ ID NO: 136029 - DNA, 80 bp, synthetic construct
  misc_feature 1..80: note = Artificially Synthesized Probe
  source 1..80: mol_type = other DNA
attataggcgtgagccactgtgccagaccagaaatttattttctcatagttctggaggctaaaggtctgagattgagatc

SEQ ID NO: 136030 - DNA, 80 bp, synthetic construct
  misc_feature 1..80: note = Artificially Synthesized Probe
  source 1..80: mol_type = other DNA
cctcagcctcctgagtagctgggattacaaccatgcaacaccatgcccagctaatttttgtatttttagtagagatggag

SEQ ID NO: 136031 - DNA, 80 bp, synthetic construct; identical to SEQ ID NO: 42755
  misc_feature 1..80: note = Artificially Synthesized Probe
  source 1..80: mol_type = other DNA

SEQ ID NO: 136032 - DNA, 80 bp, synthetic construct
  misc_feature 1..80: note = Artificially Synthesized Probe
  source 1..80: mol_type = other DNA
cattttaactcagttacctctttaaagattcaatctccaggctgggtgtggtggctcacacctgtaatcccagcactgtg

SEQ ID NO: 136033 - DNA, 80 bp, synthetic construct
  misc_feature 1..80: note = Artificially Synthesized Probe
  source 1..80: mol_type = other DNA
gaacccaggaagcggaggttgcagtgagccgagatggtgccattgcactccagtctgggcaacaagagggaaacttcatc

SEQ ID NO: 136034 - DNA, 80 bp, synthetic construct
  misc_feature 1..80: note = Artificially Synthesized Probe
  source 1..80: mol_type = other DNA
gtgggggcaggtgcctgtagtcccagctactcgggaggctgagacaggagaatggcatgaacccaggaggcggagcttgc

SEQ ID NO: 136035 - DNA, 80 bp, synthetic construct; identical to SEQ ID NO: 42756
  misc_feature 1..80: note = Artificially Synthesized Probe
  source 1..80: mol_type = other DNA

SEQ ID NO: 136036 - DNA, 80 bp, synthetic construct; identical to SEQ ID NO: 42710
  misc_feature 1..80: note = Artificially Synthesized Probe
  source 1..80: mol_type = other DNA

SEQ ID NO: 136037 - DNA, 80 bp, synthetic construct
  misc_feature 1..80: note = Artificially Synthesized Probe
  source 1..80: mol_type = other DNA
aggattacaggcgtgagccaccgtgctgggctgacttttatttttagatattatttgaatttcatgacaaattatgtaat

SEQ ID NO: 136038 - DNA, 80 bp, synthetic construct
  misc_feature 1..80: note = Artificially Synthesized Probe
  source 1..80: mol_type = other DNA
ggaatgtggttagcagatgtgggttttcatagtcatgctgtatgagatcgttagtccatttttgcgggtttcagatggtt

SEQ ID NO: 136039 - DNA, 80 bp, synthetic construct
  misc_feature 1..80: note = Artificially Synthesized Probe
  source 1..80: mol_type = other DNA
tgatcctgctgccttcttagtggggaagagttatgcatagataatttttcaaagctggatgttggatcagttattttata

SEQ ID NO: 136040 - DNA, 80 bp, synthetic construct; identical to SEQ ID NO: 42757
  misc_feature 1..80: note = Artificially Synthesized Probe
  source 1..80: mol_type = other DNA

SEQ ID NO: 136041 - DNA, 80 bp, synthetic construct
  misc_feature 1..80: note = Artificially Synthesized Probe
  source 1..80: mol_type = other DNA
tcttcttttccctcccttccttctttccttccttccctccctcctttcttgctctctcttctcttccctccctccctccc

SEQ ID NO: 136042 - DNA, 80 bp, synthetic construct
  misc_feature 1..80: note = Artificially Synthesized Probe
  source 1..80: mol_type = other DNA
aagtgatcctcccaccttaggctacctagtagctaggactacaggtgcccaccaccacacccagttagtttttgtatttt

SEQ ID NO: 136043 - DNA, 80 bp, synthetic construct; identical to SEQ ID NO: 42758
  misc_feature 1..80: note = Artificially Synthesized Probe
  source 1..80: mol_type = other DNA

SEQ ID NO: 136044 - DNA, 80 bp, synthetic construct
  misc_feature 1..80: note = Artificially Synthesized Probe
  source 1..80: mol_type = other DNA
gatggggtttcaccgtgttagccaggatagtctcgatctcctgacctcatgatcagcccgcctcagcctcccaaagtact

SEQ ID NO: 136045 - DNA, 80 bp, synthetic construct
  misc_feature 1..80: note = Artificially Synthesized Probe
  source 1..80: mol_type = other DNA
cgattctcctgcctcagcctcccgagtagctgggattataggcatgcaccaccacgcccagctaatttttgtatttttag

SEQ ID NO: 136046 - DNA, 80 bp, synthetic construct
  misc_feature 1..80: note = Artificially Synthesized Probe
  source 1..80: mol_type = other DNA
tggagtgcaatggcgtgatctcagctcactataacctctgcctcctcagttcaagcgattctcgtccctcagcctcctga

SEQ ID NO: 136047 - DNA, 80 bp, synthetic construct
  misc_feature 1..80: note = Artificially Synthesized Probe
  source 1..80: mol_type = other DNA
aggctcactgcagcctccgcctcccaggctcaaacaatcctcccccgtcagcctccgtagtagctgggactataagtgtg

SEQ ID NO: 136048 - DNA, 80 bp, synthetic construct; identical to SEQ ID NO: 42759
  misc_feature 1..80: note = Artificially Synthesized Probe
  source 1..80: mol_type = other DNA

SEQ ID NO: 136049 - DNA, 80 bp, synthetic construct
  misc_feature 1..80: note = Artificially Synthesized Probe
  source 1..80: mol_type = other DNA
aaccaataaccttcagaggaattatttgaaaggactatagcgcagaaggcactgaatctcaatcaatcatatgtttaatg

SEQ ID NO: 136050 - DNA, 80 bp, synthetic construct
  misc_feature 1..80: note = Artificially Synthesized Probe
  source 1..80: mol_type = other DNA
aattgttcaaaggaaaattcccaatgaactgaggagtcaggcaaagctgaaatgaaagcttgctaggtggtaagggaatt

SEQ ID NO: 136051 - DNA, 80 bp, synthetic construct
  misc_feature 1..80: note = Artificially Synthesized Probe
  source 1..80: mol_type = other DNA
aaaagttcatttcggttctgatggaaggccttgcagatacagcttgacagttgggggatttttttttttatggacatatt

SEQ ID NO: 136052 - DNA, 80 bp, synthetic construct
  misc_feature 1..80: note = Artificially Synthesized Probe
  source 1..80: mol_type = other DNA
cgcccagctaatttttgtatttttagtagagatggggtttcaccatgttgcccaggatggtctggatctcctgacctcgt

SEQ ID NO: 136053 - DNA, 80 bp, synthetic construct; identical to SEQ ID NO: 42760
  misc_feature 1..80: note = Artificially Synthesized Probe
  source 1..80: mol_type = other DNA

SEQ ID NO: 136054 - DNA, 80 bp, synthetic construct
  misc_feature 1..80: note = Artificially Synthesized Probe
  source 1..80: mol_type = other DNA
ggcctctgggggctcacgcctcagctggagcagagccagaacgtctgtgaccgcaggtgcacttgggcacattgggacct

SEQ ID NO: 136055 - DNA, 80 bp, synthetic construct
  misc_feature 1..80: note = Artificially Synthesized Probe
  source 1..80: mol_type = other DNA
tctttcttcatttgggctctggacacttcccagcctctacatttattattttaacttctgttacaggaggctcttcagaa

SEQ ID NO: 136056 - DNA, 80 bp, synthetic construct; identical to SEQ ID NO: 42761
  misc_feature 1..80: note = Artificially Synthesized Probe
  source 1..80: mol_type = other DNA

SEQ ID NO: 136057 - DNA, 80 bp, synthetic construct
  misc_feature 1..80: note = Artificially Synthesized Probe
  source 1..80: mol_type = other DNA
tcctgagtagctgagataggggtgtgtaccaccacacctggctaatttttttttttttttttttttgtatttttagtaga

SEQ ID NO: 136058 - DNA, 80 bp, synthetic construct
  misc_feature 1..80: note = Artificially Synthesized Probe
  source 1..80: mol_type = other DNA
gagctgaaaaaatgaaaatgtcattaggcatgatctgatagcacaaaaccccacactagttatttatggggaagttgttt

SEQ ID NO: 136059 - DNA, 80 bp, synthetic construct
  misc_feature 1..80: note = Artificially Synthesized Probe
  source 1..80: mol_type = other DNA
cttatttttgaggtctgaagggtactgtatagtgaaaataaccctggatccagaggctggtagtcctgagttgtctctgc

SEQ ID NO: 136060 - DNA, 80 bp, synthetic construct
  misc_feature 1..80: note = Artificially Synthesized Probe
  source 1..80: mol_type = other DNA
ctcatggcctttggtcagggaaacttcctgccaattggatgaatcacaggcttcaaaaaaataccttagagaccaaattt

SEQ ID NO: 136061 - DNA, 80 bp, synthetic construct; identical to SEQ ID NO: 42762
  misc_feature 1..80: note = Artificially Synthesized Probe
  source 1..80: mol_type = other DNA

SEQ ID NO: 136062 - DNA, 80 bp, synthetic construct
  misc_feature 1..80: note = Artificially Synthesized Probe
  source 1..80: mol_type = other DNA
ctcctcgatattttgttatgcttttcagctgggcgtggtggctcatgcctgtaatcccagcactttgggaggccgaggcg

SEQ ID NO: 136063 - DNA, 80 bp, synthetic construct
  misc_feature 1..80: note = Artificially Synthesized Probe
  source 1..80: mol_type = other DNA
agaggttgcagtgagccgagatcgcgccattgcactccagcctgggcaaaaagagtgaaactcttgtctcagaaaaaaaa

SEQ ID NO: 136064 - DNA, 80 bp, synthetic construct
  misc_feature 1..80: note = Artificially Synthesized Probe
  source 1..80: mol_type = other DNA
tgggtatacctgtgtgggtgtttcaggaagagattagcatttccacggtagactctaaagaagatcaccctcaccaatgt

SEQ ID NO: 136065 - DNA, 80 bp, synthetic construct; identical to SEQ ID NO: 42763
  misc_feature 1..80: note = Artificially Synthesized Probe
  source 1..80: mol_type = other DNA

SEQ ID NO: 136066 - DNA, 80 bp, synthetic construct
  misc_feature 1..80: note = Artificially Synthesized Probe
  source 1..80: mol_type = other DNA
ccaggctggactcgaactcctgacctcaagtgatctgcctgcctcggtctcccaaagtgctgggattacaagcgtgagtc

SEQ ID NO: 136067 - DNA, 80 bp, synthetic construct
  misc_feature 1..80: note = Artificially Synthesized Probe
  source 1..80: mol_type = other DNA
gcgcctgccaccacacctggctaattttttgtatttttagtagagacggggtttcaccatgttggccagactggtctata

SEQ ID NO: 136068 - DNA, 80 bp, synthetic construct
  misc_feature 1..80: note = Artificially Synthesized Probe
  source 1..80: mol_type = other DNA
agtgcaatggtgccatctcagctcaccgcaatctctgcctcccaggttcaagcaattctcctgcctcagcctcccaagta

SEQ ID NO: 136069 - DNA, 80 bp, synthetic construct
  misc_feature 1..80: note = Artificially Synthesized Probe
  source 1..80: mol_type = other DNA
tggcgagattatggagtatgatttacaggcgttaaacatcaagtatgctatggatgcctttggaggacctatttggagca

SEQ ID NO: 136070 - DNA, 80 bp, synthetic construct
  misc_feature 1..80: note = Artificially Synthesized Probe
  source 1..80: mol_type = other DNA
cgcgcccggcccagactttcaatctcaggtttataccactgattctgggtctcaggcctttgggcttggattggaagtgc

SEQ ID NO: 136071 - DNA, 80 bp, synthetic construct; identical to SEQ ID NO: 42764
  misc_feature 1..80: note = Artificially Synthesized Probe
  source 1..80: mol_type = other DNA

SEQ ID NO: 136072 - DNA, 80 bp, synthetic construct
  misc_feature 1..80: note = Artificially Synthesized Probe
  source 1..80: mol_type = other DNA
tagtatcacacctagttggttggttctgcattttccttccccactagaccgcaaactctcagctgttgttggtactattg

SEQ ID NO: 136073 - DNA, 80 bp, synthetic construct
  misc_feature 1..80: note = Artificially Synthesized Probe
  source 1..80: mol_type = other DNA
cgtgaattgcacggtagaggtcaggagtttctggggggtccgtggggagccaatggaaggatgaggagaaatgcagtccc

SEQ ID NO: 136074 - DNA, 80 bp, synthetic construct; identical to SEQ ID NO: 42765
  misc_feature 1..80: note = Artificially Synthesized Probe
  source 1..80: mol_type = other DNA

SEQ ID NO: 136075 - DNA, 80 bp, synthetic construct
  misc_feature 1..80: note = Artificially Synthesized Probe
  source 1..80: mol_type = other DNA
caacggcctcccaaacggcggcggcgcgggcgactcgctgcccgggagcccaagccgcggcctggggcccccgagcccgc

SEQ ID NO: 136076 - DNA, 80 bp, synthetic construct
  misc_feature 1..80: note = Artificially Synthesized Probe
  source 1..80: mol_type = other DNA
tgccgaccagagccgggcgctgcggctgggcgacgccatcctgtcggtgaacggcaccgacctgcgccaggccacccacg

SEQ ID NO: 136077 - DNA, 80 bp, synthetic construct
  misc_feature 1..80: note = Artificially Synthesized Probe
  source 1..80: mol_type = other DNA
ctccaaacccgggtttctggagctttcagtgtggaaaaacggatgcttcttgcaggaaaagttgggcagccgccgaagtg

SEQ ID NO: 136078 - DNA, 80 bp, synthetic construct
  misc_feature 1..80: note = Artificially Synthesized Probe
  source 1..80: mol_type = other DNA
cgcttaactcactcacctctggctcctcggggcgggcgggtctattaaaaaaaaaaaaaagtccatcttcaccgatgcca

SEQ ID NO: 136079 - DNA, 80 bp, synthetic construct
  misc_feature 1..80: note = Artificially Synthesized Probe
  source 1..80: mol_type = other DNA
atattatggcatgtggcaaccccaactataagattggaattgatagtgaagattttaaaaatccccagcattctttttgc

SEQ ID NO: 136080 - DNA, 80 bp, synthetic construct; identical to SEQ ID NO: 42766
  misc_feature 1..80: note = Artificially Synthesized Probe
  source 1..80: mol_type = other DNA

SEQ ID NO: 136081 - DNA, 80 bp, synthetic construct
  misc_feature 1..80: note = Artificially Synthesized Probe
  source 1..80: mol_type = other DNA
tggatctttcatgatgaatttgaactaaggcaaaaataaaattcctctcctctaaggactcatgcatgttggaggtgata

SEQ ID NO: 136082 - DNA, 80 bp, synthetic construct
  misc_feature 1..80: note = Artificially Synthesized Probe
  source 1..80: mol_type = other DNA
caaaacaacttatagggaggaaaggaatgaagttggtgattacgtcgtgaaactatacttaaatgccaaaggaatgcaaa

SEQ ID NO: 136083 - DNA, 80 bp, synthetic construct; identical to SEQ ID NO: 42767
  misc_feature 1..80: note = Artificially Synthesized Probe
  source 1..80: mol_type = other DNA

SEQ ID NO: 136084 - DNA, 80 bp, synthetic construct
  misc_feature 1..80: note = Artificially Synthesized Probe
  source 1..80: mol_type = other DNA
gtctaggtggggctagacattgctcggaaattagtgttaatagaaggagtaaaattatagattgtggtttgggtgtgtgt

SEQ ID NO: 136085 - DNA, 80 bp, synthetic construct
  misc_feature 1..80: note = Artificially Synthesized Probe
  source 1..80: mol_type = other DNA
tattgaatttagtactatttatgtagtcctcagttgtgatgggcagacagttgaaccttgtacaccatatttagaaaaaa

SEQ ID NO: 136086 - DNA, 80 bp, synthetic construct
  misc_feature 1..80: note = Artificially Synthesized Probe
  source 1..80: mol_type = other DNA
aatcccagctcctagggaggctgaggcaggggaatcgtttgaacctcagaggtggaggctgcagtgagccaagatctcac

SEQ ID NO: 136087 - DNA, 80 bp, synthetic construct; identical to SEQ ID NO: 42768
  misc_feature 1..80: note = Artificially Synthesized Probe
  source 1..80: mol_type = other DNA

SEQ ID NO: 136088 - DNA, 80 bp, synthetic construct
  misc_feature 1..80: note = Artificially Synthesized Probe
  source 1..80: mol_type = other DNA
ttgaaccagtcaaacattatttaaaattgagagctggtgtcccatccaggtaggccacttttaaaagacagattttaagt

SEQ ID NO: 136089 - DNA, 80 bp, synthetic construct
  misc_feature 1..80: note = Artificially Synthesized Probe
  source 1..80: mol_type = other DNA
gcacacttttgccaatcccacaccagggaaagctatagtctttggttgcctgtggttaaggaattgagttaaaagtttcc

SEQ ID NO: 136090 - DNA, 80 bp, synthetic construct
  misc_feature 1..80: note = Artificially Synthesized Probe
  source 1..80: mol_type = other DNA
agatgtggggaaacggagaagtaaataagtacagcagagggctaaaagtgctgttttaatagaagtttgcacaacccaaa

SEQ ID NO: 136091 - DNA, 80 bp, synthetic construct; identical to SEQ ID NO: 42711
  misc_feature 1..80: note = Artificially Synthesized Probe
  source 1..80: mol_type = other DNA

SEQ ID NO: 136092 - DNA, 80 bp, synthetic construct; identical to SEQ ID NO: 42769
  misc_feature 1..80: note = Artificially Synthesized Probe
  source 1..80: mol_type = other DNA

SEQ ID NO: 136093 - DNA, 80 bp, synthetic construct
  misc_feature 1..80: note = Artificially Synthesized Probe
  source 1..80: mol_type = other DNA
tcacgaaggtatgccaccagttaacaaagacactctcaaaacaggaaggatggcaagtcgttaaaataacatccagggct

SEQ ID NO: 136094 - DNA, 80 bp, synthetic construct
  misc_feature 1..80: note = Artificially Synthesized Probe
  source 1..80: mol_type = other DNA
agctttaaaaaaaaaaaaagaaagaaagaaaagaaaagagaaaaaaagaaaaaccaagtgtggtggctcatgcctgtaat

SEQ ID NO: 136095 - DNA, 80 bp, synthetic construct
  misc_feature 1..80: note = Artificially Synthesized Probe
  source 1..80: mol_type = other DNA
cagaggctgaggtgggaggattcttgagcccaggaggtcgaggctacagtggtgattgtgccactgtactccagcctgga

SEQ ID NO: 136096 - DNA, 80 bp, synthetic construct
  misc_feature 1..80: note = Artificially Synthesized Probe
  source 1..80: mol_type = other DNA
agtggtgcgatctcagctcactgcaagctccgcctaccgggttcacgccattctgctgcctcagcctcccaagtagctgg

SEQ ID NO: 136097 - DNA, 80 bp, synthetic construct; identical to SEQ ID NO: 42770
  misc_feature 1..80: note = Artificially Synthesized Probe
  source 1..80: mol_type = other DNA

SEQ ID NO: 136098 - DNA, 80 bp, synthetic construct
  misc_feature 1..80: note = Artificially Synthesized Probe
  source 1..80: mol_type = other DNA
gaggaaagaccgaaggtgggaaaaacagcagctgttgtagtgaaaagtaatccaagccagaggtgatcacctttggagcc

SEQ ID NO: 136099 - DNA, 80 bp, synthetic construct
  misc_feature 1..80: note = Artificially Synthesized Probe
  source 1..80: mol_type = other DNA
acagagaatcttctgcagtgagtttatcagtggaaaagtgaaataatttggagagtgttaccctcatactgttcagcttt

SEQ ID NO: 136100 - DNA, 80 bp, synthetic construct
  misc_feature 1..80: note = Artificially Synthesized Probe
  source 1..80: mol_type = other DNA
gcactaatttgcacgatatctgaaggtgtttccatttaggttataatgttagtaggtcttttatttaggccaagggtctc

SEQ ID NO: 136101 - DNA, 80 bp, synthetic construct
  misc_feature 1..80: note = Artificially Synthesized Probe
  source 1..80: mol_type = other DNA
tcctttggagaaatgatggtatggtcagttatgtttaatattttgtgcctggagaaatacaattgatttggttactttat

SEQ ID NO: 136102 - DNA, 80 bp, synthetic construct; identical to SEQ ID NO: 42771
  misc_feature 1..80: note = Artificially Synthesized Probe
  source 1..80: mol_type = other DNA

SEQ ID NO: 136103 - DNA, 80 bp, synthetic construct
  misc_feature 1..80: note = Artificially Synthesized Probe
  source 1..80: mol_type = other DNA
ttgagcagtgtatttttgaatttaatctgtcatgcatgtaaaatgttacacctaggcaggtgtggttggtcattcctgta

SEQ ID NO: 136104 - DNA, 80 bp, synthetic construct
  misc_feature 1..80: note = Artificially Synthesized Probe
  source 1..80: mol_type = other DNA
aaagagactcagatggtatagacttttttttttttttttttttttttttttgagacagtgtcttgctctgttgctcaggc

SEQ ID NO: 136105 - DNA, 80 bp, synthetic construct
  misc_feature 1..80: note = Artificially Synthesized Probe
  source 1..80: mol_type = other DNA
tttttgtatttttagtagagacagggtttctccatgttggccaggctggtctcaaactcctgacctcaggtgatccgcct

SEQ ID NO: 136106 - DNA, 80 bp, synthetic construct; identical to SEQ ID NO: 42772
  misc_feature 1..80: note = Artificially Synthesized Probe
  source 1..80: mol_type = other DNA

SEQ ID NO: 136107 - DNA, 80 bp, synthetic construct
  misc_feature 1..80: note = Artificially Synthesized Probe
  source 1..80: mol_type = other DNA
tgtagaatttattttggcatatggtatgcagtagaggtttaactttatttgtttttccaaatagttaactgattgcctca

SEQ ID NO: 136108 - DNA, 80 bp, synthetic construct
  misc_feature 1..80: note = Artificially Synthesized Probe
  source 1..80: mol_type = other DNA
gggtgcaatatgcatgctatacatctgcccctcttgggatgagatgacctgtccttttctcattgattttaaatatacct

SEQ ID NO: 136109 - DNA, 80 bp, synthetic construct
  misc_feature 1..80: note = Artificially Synthesized Probe
  source 1..80: mol_type = other DNA
tcaagtggactgtaccagccaagaaaaatttgaaaagtaacaatagacaattgccggctggtatagtatagttacttatt

SEQ ID NO: 136110 - DNA, 80 bp, synthetic construct; identical to SEQ ID NO: 42773
  misc_feature 1..80: note = Artificially Synthesized Probe
  source 1..80: mol_type = other DNA

SEQ ID NO: 136111 - DNA, 80 bp, synthetic construct
  misc_feature 1..80: note = Artificially Synthesized Probe
  source 1..80: mol_type = other DNA
aagggggaatggatgctaggcaggcataaatagcagacattcattacattgctctaaaaccatcagaagataatatagat

SEQ ID NO: 136112 - DNA, 80 bp, synthetic construct
  misc_feature 1..80: note = Artificially Synthesized Probe
  source 1..80: mol_type = other DNA
atgatttttctttttcacggcaactgatagctttaaggaggaagagagaatagagagagtgtgtgttggggggtgtgtgt

SEQ ID NO: 136113 - DNA, 80 bp, synthetic construct
  misc_feature 1..80: note = Artificially Synthesized Probe
  source 1..80: mol_type = other DNA
tggtattttgaacatcacatttctatgaatttcaagcaagtttgtaactgcattgagatcatatttttataggtagaaca

SEQ ID NO: 136114 - DNA, 80 bp, synthetic construct
  misc_feature 1..80: note = Artificially Synthesized Probe
  source 1..80: mol_type = other DNA
aaagtatctatttgttgttattatttttttttagagacagggtttcactctgttgcccaggttggagtacaatggcatga

SEQ ID NO: 136115 - DNA, 80 bp, synthetic construct; identical to SEQ ID NO: 42774
  misc_feature 1..80: note = Artificially Synthesized Probe
  source 1..80: mol_type = other DNA

SEQ ID NO: 136116 - DNA, 80 bp, synthetic construct
  misc_feature 1..80: note = Artificially Synthesized Probe
  source 1..80: mol_type = other DNA
tatcagtttggagataggaaggactccaatagttctgctttgccagttcctcggacctatcactattaccaaaatgatgg

SEQ ID NO: 136117 - DNA, 80 bp, synthetic construct
  misc_feature 1..80: note = Artificially Synthesized Probe
  source 1..80: mol_type = other DNA
cacacctgtaatcccagcactttgggaggtccaggtggaatcacttcagcctagtagttcaagaccagcctgcacaacat

SEQ ID NO: 136118 - DNA, 80 bp, synthetic construct; identical to SEQ ID NO: 42775
  misc_feature 1..80: note = Artificially Synthesized Probe
  source 1..80: mol_type = other DNA

SEQ ID NO: 136119 - DNA, 80 bp, synthetic construct
  misc_feature 1..80: note = Artificially Synthesized Probe
  source 1..80: mol_type = other DNA
cctctgcctcctgggttcaagcgattctcctgcctcagcctcctgagtagctgggattacagacacgcgctaccatgccc

SEQ ID NO: 136120 - DNA, 80 bp, synthetic construct
  misc_feature 1..80: note = Artificially Synthesized Probe
  source 1..80: mol_type = other DNA
tgtgagtcaggtggcatcatccccatataaaatataaataaattgagtcctggaagattaaacagtcagtgcaaggttat

SEQ ID NO: 136121 - DNA, 80 bp, synthetic construct
  misc_feature 1..80: note = Artificially Synthesized Probe
  source 1..80: mol_type = other DNA
tttcaggaaaattgtgctttggattctgtgttgttgcatctatctggaggttatccagttaatgtctctcagtcttttcc

SEQ ID NO: 136122 - DNA, 80 bp, synthetic construct
  misc_feature 1..80: note = Artificially Synthesized Probe
  source 1..80: mol_type = other DNA
ctgcacataagtgaatccaaagtatttcatacattataagtggtagacaaatgctgagagaacttggaataagtgagcaa

SEQ ID NO: 136123 - DNA, 80 bp, synthetic construct; identical to SEQ ID NO: 42712
  misc_feature 1..80: note = Artificially Synthesized Probe
  source 1..80: mol_type = other DNA

SEQ ID NO: 136124 - DNA, 80 bp, synthetic construct; identical to SEQ ID NO: 42776
  misc_feature 1..80: note = Artificially Synthesized Probe
  source 1..80: mol_type = other DNA

SEQ ID NO: 136125 - DNA, 80 bp, synthetic construct
  misc_feature 1..80: note = Artificially Synthesized Probe
  source 1..80: mol_type = other DNA
gccaaacttttttgttactgcttttacttttgatatattactatgttattttacttttggaaaacaccagttttaacaaa

SEQ ID NO: 136126 - DNA, 80 bp, synthetic construct
  misc_feature 1..80: note = Artificially Synthesized Probe
  source 1..80: mol_type = other DNA
gtaaaagtatttacattgttagctctgttttcattgcagtaagggatggcaacattttagaaaaccactagtagtgtaga

SEQ ID NO: 136127 - DNA, 80 bp, synthetic construct; identical to SEQ ID NO: 42777
  misc_feature 1..80: note = Artificially Synthesized Probe
  source 1..80: mol_type = other DNA

SEQ ID NO: 136128 - DNA, 80 bp, synthetic construct
  misc_feature 1..80: note = Artificially Synthesized Probe
  source 1..80: mol_type = other DNA
ctcctgcctcagcctcctgagtagctgggactacagtcctacaccaccacgcccagctagttttttgtacttttggtaag

SEQ ID NO: 136129 - DNA, 80 bp, synthetic construct
  misc_feature 1..80: note = Artificially Synthesized Probe
  source 1..80: mol_type = other DNA
cacatgtgtatttttgacaagagaaatgtcttcattgcacgttctgcctctgcttctctttaaggagtttgtgtgtggtt

SEQ ID NO: 136130 - DNA, 80 bp, synthetic construct
  misc_feature 1..80: note = Artificially Synthesized Probe
  source 1..80: mol_type = other DNA
aaaattacctgatttttcttgggaaaaaatacagcaaaacatttcggatggctgttaactttgtgtgaccttggcaaaaa

SEQ ID NO: 136131 - DNA, 80 bp, synthetic construct
  misc_feature 1..80: note = Artificially Synthesized Probe
  source 1..80: mol_type = other DNA
gtttttttttttttttttttgagacagtttcactcttgttgctcgggctggagtgcaatggcacgatctcggctcactgc

SEQ ID NO: 136132 - DNA, 80 bp, synthetic construct
  misc_feature 1..80: note = Artificially Synthesized Probe
  source 1..80: mol_type = other DNA
tcacccgccttagcctgccaaagtgctgggattacaggcgtgagccaccacgcctggcctataataatgatttttaacac

SEQ ID NO: 136133 - DNA, 80 bp, synthetic construct
  misc_feature 1..80: note = Artificially Synthesized Probe
  source 1..80: mol_type = other DNA
ctcccctttctgctcttcccgctacttcctaggttccagttctactccgctcccgcaagcatagcgggctgggctccctc

SEQ ID NO: 136134 - DNA, 80 bp, synthetic construct
  misc_feature 1..80: note = Artificially Synthesized Probe
  source 1..80: mol_type = other DNA
ttccacctttcattttaactagcagctaatcgccttcaaatctacacaggcagcattaattaaagcgatgttggcctggc

SEQ ID NO: 136135 - DNA, 80 bp, synthetic construct
  misc_feature 1..80: note = Artificially Synthesized Probe
  source 1..80: mol_type = other DNA
atctttttctcttaagcgcagatgaatcacttagcaaagagagaaatattgagcaatctagattgcagttaattttgtca

SEQ ID NO: 136136 - DNA, 80 bp, synthetic construct
  misc_feature 1..80: note = Artificially Synthesized Probe
  source 1..80: mol_type = other DNA
tcaatttgttagttatcacttacttttgtgatgttttaacaagcgtacatgaagtcttgaactacaattttgtcattagg

SEQ ID NO: 136137 - DNA, 80 bp, synthetic construct; identical to SEQ ID NO: 42779
  misc_feature 1..80: note = Artificially Synthesized Probe
  source 1..80: mol_type = other DNA

SEQ ID NO: 136138 - DNA, 80 bp, synthetic construct
  misc_feature 1..80: note = Artificially Synthesized Probe
  source 1..80: mol_type = other DNA
agtagagatggggtttcaccgtgttagccaggatggtctcaatctcctgacctcgtgatccgcctgcctcggcctcccaa

SEQ ID NO: 136139 - DNA, 80 bp, synthetic construct
  misc_feature 1..80: note = Artificially Synthesized Probe
  source 1..80: mol_type = other DNA
cagcacgctagtatgaaattatttttctgtcaggcattctactcctccagactgtaccatccttccactagaagggtgga

SEQ ID NO: 136140 - DNA, 80 bp, synthetic construct
  misc_feature 1..80: note = Artificially Synthesized Probe
  source 1..80: mol_type = other DNA
gagcaggaggaagataaatggcgtcaaggagaggttcatgggggttttttgttagtgaaactgagaatgttaacagtgat

SEQ ID NO: 136141 - DNA, 80 bp, synthetic construct; identical to SEQ ID NO: 42780
  misc_feature 1..80: note = Artificially Synthesized Probe
  source 1..80: mol_type = other DNA

SEQ ID NO: 136142 - DNA, 80 bp, synthetic construct
  misc_feature 1..80: note = Artificially Synthesized Probe
  source 1..80: mol_type = other DNA
acaaatcgagtcatttctctgctttttaaaataattactcctcatcacactttcagggcctccaggggcctggtttgaaa

SEQ ID NO: 136143 - DNA, 80 bp, synthetic construct
  misc_feature 1..80: note = Artificially Synthesized Probe
  source 1..80: mol_type = other DNA
attaatgtcactgaactagaaggactcctcattaacaccaataaatgggagagaatgcactaagccaaaaagttgccatc

SEQ ID NO: 136144 - DNA, 80 bp, synthetic construct
  misc_feature 1..80: note = Artificially Synthesized Probe
  source 1..80: mol_type = other DNA
gctgaataggaaaaaacatagcaaaatggaaaggattagggaggcggggacataaaatcctttaatactgcttagtaagg

SEQ ID NO: 136145 - DNA, 80 bp, synthetic construct
  misc_feature 1..80: note = Artificially Synthesized Probe
  source 1..80: mol_type = other DNA
ttctcagaaaacaaaacaaaaagcccagagcaaaccaaaaaaccaaaaatgtttgagaaattattctcagattgtcagaa

SEQ ID NO: 136146 - DNA, 80 bp, synthetic construct; identical to SEQ ID NO: 42781
  misc_feature 1..80: note = Artificially Synthesized Probe
  source 1..80: mol_type = other DNA

SEQ ID NO: 136147 - DNA, 80 bp, synthetic construct
  misc_feature 1..80: note = Artificially Synthesized Probe
  source 1..80: mol_type = other DNA
tgtctgtgatgtttagctgtacctttttgtccccagcctttcagttatcccttcacatttaaccgtgactgaggcaaact

SEQ ID NO: 136148 - DNA, 80 bp, synthetic construct
  misc_feature 1..80: note = Artificially Synthesized Probe
  source 1..80: mol_type = other DNA
tccaggcacgtgccatcgtgccctgctaattttcgtatttttagtagagacaggatttcaccatgttggccaggctggtc

SEQ ID NO: 136149 - DNA, 80 bp, synthetic construct
  misc_feature 1..80: note = Artificially Synthesized Probe
  source 1..80: mol_type = other DNA
taaagaaaacaaggagtaactcctcacatgtccctagttagtaggcattactttgaacaaacatacattcttagtttata

SEQ ID NO: 136150 - DNA, 80 bp, synthetic construct; identical to SEQ ID NO: 42782
  misc_feature 1..80: note = Artificially Synthesized Probe
  source 1..80: mol_type = other DNA

SEQ ID NO: 136151 - DNA, 80 bp, synthetic construct
  misc_feature 1..80: note = Artificially Synthesized Probe
  source 1..80: mol_type = other DNA
tggctaatttttgtatttttagtagagatggggtttcgccatgttggccaggctggtctcgacctcctggcctcaagtga

SEQ ID NO: 136152 - DNA, 80 bp, synthetic construct
  misc_feature 1..80: note = Artificially Synthesized Probe
  source 1..80: mol_type = other DNA
tcccaaagttctaggattaaaggtgtgagccactgtgcacagcctgttttctttttttttgagacagagtctcgctcttg

SEQ ID NO: 136153 - DNA, 80 bp, synthetic construct
  misc_feature 1..80: note = Artificially Synthesized Probe
  source 1..80: mol_type = other DNA
ccgtgttggctaggctggtctcgaactcctgacctcaggtgatctgcccacctcagcctcccaaagtgctgggattacag

SEQ ID NO: 136154 - DNA, 80 bp, synthetic construct; identical to SEQ ID NO: 42783
  misc_feature 1..80: note = Artificially Synthesized Probe
  source 1..80: mol_type = other DNA

SEQ ID NO: 136155 - DNA, 80 bp, synthetic construct
  misc_feature 1..80: note = Artificially Synthesized Probe
  source 1..80: mol_type = other DNA
aacagtttccataaaccctccctttcccttttttattgcagtgggaatccattgcttgtttattaataataataataatt

SEQ ID NO: 136156 - DNA, 80 bp, synthetic construct
  misc_feature 1..80: note = Artificially Synthesized Probe
  source 1..80: mol_type = other DNA
aggctggagcgtagtggcgcgatcccggcttactgcaacctccacctcccaggttcaagcaattctcctgcctcagcctc

SEQ ID NO: 136157 - DNA, 80 bp, synthetic construct
  misc_feature 1..80: note = Artificially Synthesized Probe
  source 1..80: mol_type = other DNA
gctactgtgcctggccagaatctattatttattgagaacttcctcttaatattgtctgatcagctaaagactggtgagta

SEQ ID NO: 136158 - DNA, 80 bp, synthetic construct; identical to SEQ ID NO: 42784
  misc_feature 1..80: note = Artificially Synthesized Probe
  source 1..80: mol_type = other DNA

SEQ ID NO: 136159 - DNA, 80 bp, synthetic construct
  misc_feature 1..80: note = Artificially Synthesized Probe
  source 1..80: mol_type = other DNA
ctccacctgggctgaattggcattgaccctttagaacaggggttggcagactgtttctgtaaaggaccagatagtaaaca

SEQ ID NO: 136160 - DNA, 80 bp, synthetic construct
  misc_feature 1..80: note = Artificially Synthesized Probe
  source 1..80: mol_type = other DNA
ctttgtggaaagaaaagatctcaagttaatttccacaacctaaatgaattgactgtggagtttaagctctgggaaaacta

SEQ ID NO: 136161 - DNA, 80 bp, synthetic construct
  misc_feature 1..80: note = Artificially Synthesized Probe
  source 1..80: mol_type = other DNA
ggcctacatgagtatttttccactccagtttgccacatctttcttggcatcaaattacttttctacttaaatgaaattgc

SEQ ID NO: 136162 - DNA, 80 bp, synthetic construct
  misc_feature 1..80: note = Artificially Synthesized Probe
  source 1..80: mol_type = other DNA
gcagagtagaactccttagcaaacaagagtcctcatacacatgacccaatttacttccctagactttaagggaggaaatg

SEQ ID NO: 136163 - DNA, 80 bp, synthetic construct
  misc_feature 1..80: note = Artificially Synthesized Probe
  source 1..80: mol_type = other DNA
tctcctgcctcagccttccaagtagctaggactacaggcacgcgccaccacgcttggcaaattttttttttttttttttt

SEQ ID NO: 136164 - DNA, 80 bp, synthetic construct; identical to SEQ ID NO: 42785
  misc_feature 1..80: note = Artificially Synthesized Probe
  source 1..80: mol_type = other DNA

SEQ ID NO: 136165 - DNA, 80 bp, synthetic construct
  misc_feature 1..80: note = Artificially Synthesized Probe
  source 1..80: mol_type = other DNA
ttccaacctgcttctttcatatttctcacatatggccccctagtgatcccagacaaagaagtctaaggttctggtaactt

SEQ ID NO: 136166 - DNA, 80 bp, synthetic construct
  misc_feature 1..80: note = Artificially Synthesized Probe
  source 1..80: mol_type = other DNA
tcagctatgtgcttgttaggaagtgatgggaatgtaggaactctttgctcccacttttttgttgttgttgtcaaaggcaa

SEQ ID NO: 136167 - DNA, 80 bp, synthetic construct; identical to SEQ ID NO: 42786
  misc_feature 1..80: note = Artificially Synthesized Probe
  source 1..80: mol_type = other DNA

SEQ ID NO: 136168 - DNA, 80 bp, synthetic construct
  misc_feature 1..80: note = Artificially Synthesized Probe
  source 1..80: mol_type = other DNA
tctaggccaggcgcggtggctcacgcctgtaatcccagcactttgggaggccaaggtgggtggatcgggagttcgagacc

SEQ ID NO: 136169 - DNA, 80 bp, synthetic construct
  misc_feature 1..80: note = Artificially Synthesized Probe
  source 1..80: mol_type = other DNA
actccagcctgggcaacaagagcaaaactccatctcagaaagaaaaaaaaaaaaagaaaatatcttctataagcctttgt

SEQ ID NO: 136170 - DNA, 80 bp, synthetic construct
  misc_feature 1..80: note = Artificially Synthesized Probe
  source 1..80: mol_type = other DNA
gctgggactacaggcgcctgccaccatgcccaactaattttttgtatttttagtagagatggggtttcaccatgttggcc

SEQ ID NO: 136171 - DNA, 80 bp, synthetic construct; identical to SEQ ID NO: 42713
  misc_feature 1..80: note = Artificially Synthesized Probe
  source 1..80: mol_type = other DNA

SEQ ID NO: 136172 - DNA, 80 bp, synthetic construct; identical to SEQ ID NO: 42787
  misc_feature 1..80: note = Artificially Synthesized Probe
  source 1..80: mol_type = other DNA

SEQ ID NO: 136173 - DNA, 80 bp, synthetic construct
  misc_feature 1..80: note = Artificially Synthesized Probe
  source 1..80: mol_type = other DNA
tcgaactcctgacctcaggtgatccgcctgccttggcctcccaaagtgctgggattacaggcgtgagccaccgcgcctgg

SEQ ID NO: 136174 - DNA, 80 bp, synthetic construct
  misc_feature 1..80: note = Artificially Synthesized Probe
  source 1..80: mol_type = other DNA
agtgcacagatcataaaaacgtgcagctggatgaattttcacaggctgacaatacttttgttagcagtgcccagatcagg

SEQ ID NO: 136175 - DNA, 80 bp, synthetic construct
  misc_feature 1..80: note = Artificially Synthesized Probe
  source 1..80: mol_type = other DNA
ccagcactttgggaggctgaggcaggcggatcacctgagatcaggagttcgagaccagcctggccaacatgatgaaaccc

SEQ ID NO: 136176 - DNA, 80 bp, synthetic construct; identical to SEQ ID NO: 42788
  misc_feature 1..80: note = Artificially Synthesized Probe
  source 1..80: mol_type = other DNA

SEQ ID NO: 136177 - DNA, 80 bp, synthetic construct
  misc_feature 1..80: note = Artificially Synthesized Probe
  source 1..80: mol_type = other DNA
gcggaggtggcagtgaaccgagatcgtgccactgcactccagcctgggcaacaagagcaaaacttcgtctcaaaaaaaaa

SEQ ID NO: 136178 - DNA, 80 bp, synthetic construct
  misc_feature 1..80: note = Artificially Synthesized Probe
  source 1..80: mol_type = other DNA
agtgtagaagaggttcagagacagattctgtatttgccagaggcacagaattaaaaaagaaaagctctttaaaacagtga

SEQ ID NO: 136179 - DNA, 80 bp, synthetic construct
  misc_feature 1..80: note = Artificially Synthesized Probe
  source 1..80: mol_type = other DNA
aaacccagtgtctactaaaaatacaaaaaaaaaaaaatctggagtacgagaaccagaaatatacatatttccttctgtac

SEQ ID NO: 136180 - DNA, 80 bp, synthetic construct
  misc_feature 1..80: note = Artificially Synthesized Probe
  source 1..80: mol_type = other DNA
cctcctgggttcaagcaattctcctgcctcagcctccctagtagctgggactacaggtgcgtgccaccatgcccggctag

SEQ ID NO: 136181 - DNA, 80 bp, synthetic construct
  misc_feature 1..80: note = Artificially Synthesized Probe
  source 1..80: mol_type = other DNA
caagctccgcctcccaggttcaggccattctcctgcctcctgagtagctgagactgcaggtgcctgccaccacacccggc

SEQ ID NO: 136182 - DNA, 80 bp, synthetic construct; identical to SEQ ID NO: 42789
  misc_feature 1..80: note = Artificially Synthesized Probe
  source 1..80: mol_type = other DNA

SEQ ID NO: 136183 - DNA, 80 bp, synthetic construct
  misc_feature 1..80: note = Artificially Synthesized Probe
  source 1..80: mol_type = other DNA
gtagacattgaatgaacatcccctacgtattagtcagtgttgcagaggtgcttgtttgaaatctggccattggtggaaat

SEQ ID NO: 136184 - DNA, 80 bp, synthetic construct
  misc_feature 1..80: note = Artificially Synthesized Probe
  source 1..80: mol_type = other DNA
tatatctaatttagaaggagagatatagtacaaagatacctttttcttatataaccgaatgagtcccccacctcaagatg

SEQ ID NO: 136185 - DNA, 80 bp, synthetic construct
  misc_feature 1..80: note = Artificially Synthesized Probe
  source 1..80: mol_type = other DNA
ttaattttttttttttttttttttttttagacggagttttgcttttgttgcccaggctggagtgcaatggcgcaatctca

SEQ ID NO: 136186 - DNA, 80 bp, synthetic construct; identical to SEQ ID NO: 42790
  misc_feature 1..80: note = Artificially Synthesized Probe
  source 1..80: mol_type = other DNA

SEQ ID NO: 136187 - DNA, 80 bp, synthetic construct
  misc_feature 1..80: note = Artificially Synthesized Probe
  source 1..80: mol_type = other DNA
ccagagtgctaggattacaggcatgagccaccgcgcccggccatattatgtttttagagacaggctcttgctctgttgcc

SEQ ID NO: 136188 - DNA, 80 bp, synthetic construct
  misc_feature 1..80: note = Artificially Synthesized Probe
  source 1..80: mol_type = other DNA
taatcccagcactttgggaggctgaggtgggcggatcccctgaggtcaggagttccagactagcatggccaatatgggga

SEQ ID NO: 136189 - DNA, 80 bp, synthetic construct
  misc_feature 1..80: note = Artificially Synthesized Probe
  source 1..80: mol_type = other DNA
tgcacccggcctgggtgttctttctcaattacaaaggtaatacaatgctttttaaaaatctcatacattttgtcaagtat

SEQ ID NO: 136190 - DNA, 80 bp, synthetic construct; identical to SEQ ID NO: 42791
  misc_feature 1..80: note = Artificially Synthesized Probe
  source 1..80: mol_type = other DNA

SEQ ID NO: 136191 - DNA, 80 bp, synthetic construct
  misc_feature 1..80: note = Artificially Synthesized Probe
  source 1..80: mol_type = other DNA
gcttagggtaatattctgggacactttggagagaaacaacttctataattttaatttcatgcccagtacttttgagtgta

SEQ ID NO: 136192 - DNA, 80 bp, synthetic construct
  misc_feature 1..80: note = Artificially Synthesized Probe
  source 1..80: mol_type = other DNA
tgaggtgggagaatcatttgaacccaggagtttgaggtttgagtccagcttgggcaacataatgagaccccatctcaagg

SEQ ID NO: 136193 - DNA, 80 bp, synthetic construct
  misc_feature 1..80: note = Artificially Synthesized Probe
  source 1..80: mol_type = other DNA
cacagaaaatgcctttactagagtatgtgttattacctgagggtgggactcccttagcaaacaccttatactaatgtcct

SEQ ID NO: 136194 - DNA, 80 bp, synthetic construct
  misc_feature 1..80: note = Artificially Synthesized Probe
  source 1..80: mol_type = other DNA
ggttttagggtacttctttcctttgtgtacttatcttggtagctctttaaggaagaataatccctaacagccaagactac

SEQ ID NO: 136195 - DNA, 80 bp, synthetic construct; identical to SEQ ID NO: 42792
  misc_feature 1..80: note = Artificially Synthesized Probe
  source 1..80: mol_type = other DNA

SEQ ID NO: 136196 - DNA, 80 bp, synthetic construct
  misc_feature 1..80: note = Artificially Synthesized Probe
  source 1..80: mol_type = other DNA
ttatttatttatttatttatttttgagacagagtctctctgtcaccaggctggactgcagtggcgtgatctcagctcact

SEQ ID NO: 136197 - DNA, 80 bp, synthetic construct
  misc_feature 1..80: note = Artificially Synthesized Probe
  source 1..80: mol_type = other DNA
accatgttggccaggatggtctcgatctcttgacttcatgatccacccacctcggcctcccaaagtgctgggattacagg

SEQ ID NO: 136198 - DNA, 80 bp, synthetic construct
  misc_feature 1..80: note = Artificially Synthesized Probe
  source 1..80: mol_type = other DNA
aggcatgcactaccacacctggctaattttgtatttttgtagagataggatttctccatgttgatcaggctggttttgaa

SEQ ID NO: 136199 - DNA, 80 bp, synthetic construct; identical to SEQ ID NO: 42793
  misc_feature 1..80: note = Artificially Synthesized Probe
  source 1..80: mol_type = other DNA

SEQ ID NO: 136200 - DNA, 80 bp, synthetic construct
  misc_feature 1..80: note = Artificially Synthesized Probe
  source 1..80: mol_type = other DNA
tggtagtaaaaggggtgatttcatgtgtgtcctctgttatatattggcttcttgaataaaacacatggaatgtgttttat

SEQ ID NO: 136201 - DNA, 80 bp, synthetic construct
  misc_feature 1..80: note = Artificially Synthesized Probe
  source 1..80: mol_type = other DNA
agacatggtggcaggtgcctgtaatctcagctactagggaggctgaggcaggagaatcacttgaacctgggaggcggagg

SEQ ID NO: 136202 - DNA, 80 bp, synthetic construct
  misc_feature 1..80: note = Artificially Synthesized Probe
  source 1..80: mol_type = other DNA
tattcttcttatttttttttttgagatggagtctcactctgtcactgaggctggagagcagtggcataatcttggctcac

SEQ ID NO: 136203 - DNA, 80 bp, synthetic construct; identical to SEQ ID NO: 42794
  misc_feature 1..80: note = Artificially Synthesized Probe
  source 1..80: mol_type = other DNA

SEQ ID NO: 136204 - DNA, 80 bp, synthetic construct
  misc_feature 1..80: note = Artificially Synthesized Probe
  source 1..80: mol_type = other DNA
catgcccggctaatttttttgtagtttttagtagagatggagtttcaccatcttggccaggctggtcttgaactcctgac

SEQ ID NO: 136205 - DNA, 80 bp, synthetic construct
  misc_feature 1..80: note = Artificially Synthesized Probe
  source 1..80: mol_type = other DNA
catctctcaggttcaagtgattctcctgcctcagcctcccaagtagctgggatcacaagtgtgcaccaccacgcctggct

SEQ ID NO: 136206 - DNA, 80 bp, synthetic construct
  misc_feature 1..80: note = Artificially Synthesized Probe
  source 1..80: mol_type = other DNA
gagtttttgtgtagtgtgttgtggcttcaacatatatacaactctaataaacatatattttatatgtacatatgtgtgta

SEQ ID NO: 136207 - DNA, 80 bp, synthetic construct
  misc_feature 1..80: note = Artificially Synthesized Probe
  source 1..80: mol_type = other DNA
ttggtatatttagtagagatggggtttcaccatgttggccaggctggtctggaactcctgacctcaggtgatccacccat

SEQ ID NO: 136208 - DNA, 80 bp, synthetic construct; identical to SEQ ID NO: 42795
  misc_feature 1..80: note = Artificially Synthesized Probe
  source 1..80: mol_type = other DNA

SEQ ID NO: 136209 - DNA, 80 bp, synthetic construct
  misc_feature 1..80: note = Artificially Synthesized Probe
  source 1..80: mol_type = other DNA
gggttacttaccatcctgggtaatgcagtgagagcctgtctctatgaaaatattaaaaaattagccaggtgtggtgatgc

SEQ ID NO: 136210 - DNA, 80 bp, synthetic construct
  misc_feature 1..80: note = Artificially Synthesized Probe
  source 1..80: mol_type = other DNA
tcctattaaagaagccattatggttcatacgtgtatgttctcctactcattccaggtacttctttgcattgttactgaga

SEQ ID NO: 136211 - DNA, 80 bp, synthetic construct; identical to SEQ ID NO: 42796
  misc_feature 1..80: note = Artificially Synthesized Probe
  source 1..80: mol_type = other DNA

SEQ ID NO: 136212 - DNA, 80 bp, synthetic construct
  misc_feature 1..80: note = Artificially Synthesized Probe
  source 1..80: mol_type = other DNA
ctctagagatagttgtgggaagagagctcagttactcttcgtatatttatgtgtatgtcactttctttttttgttgtcca

SEQ ID NO: 136213 - DNA, 80 bp, synthetic construct
  misc_feature 1..80: note = Artificially Synthesized Probe
  source 1..80: mol_type = other DNA
aggctcaagtgatccttgcacctcagcctcctgagtagctaggaccaccggtatgcaccactgtgcctggctaattaaaa

SEQ ID NO: 136214 - DNA, 80 bp, synthetic construct
  misc_feature 1..80: note = Artificially Synthesized Probe
  source 1..80: mol_type = other DNA
tacttcttggaaggaggttctaattattttgttaattcattcagtaaacacttactgagctcctgctctttaccatgtac

SEQ ID NO: 136215 - DNA, 80 bp, synthetic construct
  misc_feature 1..80: note = Artificially Synthesized Probe
  source 1..80: mol_type = other DNA
ttaatcttcataataattccctaaggataggtattatgattttatatataaagaaattgaaatcaggctgggcatggtgg

SEQ ID NO: 136216 - DNA, 80 bp, synthetic construct
  misc_feature 1..80: note = Artificially Synthesized Probe
  source 1..80: mol_type = other DNA
tcaggaggctgagatgggaagatcgcttatacatgggaagtcacagctgcattgagctgtgattgcaccattgtactcca

SEQ ID NO: 136217 - DNA, 80 bp, synthetic construct; identical to SEQ ID NO: 42797
  misc_feature 1..80: note = Artificially Synthesized Probe
  source 1..80: mol_type = other DNA

SEQ ID NO: 136218 - DNA, 80 bp, synthetic construct
  misc_feature 1..80: note = Artificially Synthesized Probe
  source 1..80: mol_type = other DNA
atagaaaaagtgagttatttctgagtgaaaagactgtggcctgaatctttacagtacgttaacggtaaagtaataaaatg

SEQ ID NO: 136219 - DNA, 80 bp, synthetic construct
  misc_feature 1..80: note = Artificially Synthesized Probe
  source 1..80: mol_type = other DNA
aaaccctgtctctacaaaaaatacaaaaattagccgaacattgtggcatgcacctgtaatcccaggtacttgggaggctg

SEQ ID NO: 136220 - DNA, 80 bp, synthetic construct
  misc_feature 1..80: note = Artificially Synthesized Probe
  source 1..80: mol_type = other DNA
ttaatcttagataaaagctgactacttcagtttttaactataaagacccagtgagcaagcttgagttctgactcatttgt

SEQ ID NO: 136221 - DNA, 80 bp, synthetic construct; identical to SEQ ID NO: 42798
  misc_feature 1..80: note = Artificially Synthesized Probe
  source 1..80: mol_type = other DNA

SEQ ID NO: 136222 - DNA, 80 bp, synthetic construct
  misc_feature 1..80: note = Artificially Synthesized Probe
  source 1..80: mol_type = other DNA
acactttgtgtgtgtggtggcaggtggtaaacacaatacacttggagttaatagttatttcattaatcttctctaagtat

SEQ ID NO: 136223 - DNA, 80 bp, synthetic construct; identical to SEQ ID NO: 42714
  misc_feature 1..80: note = Artificially Synthesized Probe
  source 1..80: mol_type = other DNA

SEQ ID NO: 136224 - DNA, 80 bp, synthetic construct
  misc_feature 1..80: note = Artificially Synthesized Probe
  source 1..80: mol_type = other DNA
tataggaagctaatattaacacatattggctgtcagttgcaagggcaaacttccacatatccaaagctgctctatagtat

SEQ ID NO: 136225 - DNA, 80 bp, synthetic construct
  misc_feature 1..80: note = Artificially Synthesized Probe
  source 1..80: mol_type = other DNA
ttgttgcccaggctggagtgcagtggcacgatctcggctcactgcaagctctgcctcccaggttcacgccattctcctgc

SEQ ID NO: 136226 - DNA, 80 bp, synthetic construct; identical to SEQ ID NO: 42799
  misc_feature 1..80: note = Artificially Synthesized Probe
  source 1..80: mol_type = other DNA

SEQ ID NO: 136227 - DNA, 80 bp, synthetic construct
  misc_feature 1..80: note = Artificially Synthesized Probe
  source 1..80: mol_type = other DNA
ctgtcctctttatcaagaaaagctttcccagatgccccttacagattttagcttacatcttgttggccataactagtgga

SEQ ID NO: 136228 - DNA, 80 bp, synthetic construct
  misc_feature 1..80: note = Artificially Synthesized Probe
  source 1..80: mol_type = other DNA
acatacttgttaagtttgcagtacctgtaagacatcaggtctggttcaggaacttttcattgtttagccataaataccat

SEQ ID NO: 136229 - DNA, 80 bp, synthetic construct; identical to SEQ ID NO: 42800
  misc_feature 1..80: note = Artificially Synthesized Probe
  source 1..80: mol_type = other DNA

SEQ ID NO: 136230 - DNA, 80 bp, synthetic construct
  misc_feature 1..80: note = Artificially Synthesized Probe
  source 1..80: mol_type = other DNA
gagggggaaagaaaataactcagttctctgaggcagtgaatatgattctagtatatttaaaaagtccgtctcatttggtt

SEQ ID NO: 136231 - DNA, 80 bp, synthetic construct
  misc_feature 1..80: note = Artificially Synthesized Probe
  source 1..80: mol_type = other DNA
tcttggctcactgcaacctccgactccctggtttaagcaattctcctgcctcagcctctcgagtaactgggattataggc

SEQ ID NO: 136232 - DNA, 80 bp, synthetic construct
  misc_feature 1..80: note = Artificially Synthesized Probe
  source 1..80: mol_type = other DNA
tttgcatttttaagcgaaggtacccataacttacttaagcctcttgatggttttatgtaagtatttagaaaatgtatgtt

SEQ ID NO: 136233 - DNA, 80 bp, synthetic construct
  misc_feature 1..80: note = Artificially Synthesized Probe
  source 1..80: mol_type = other DNA
ggactacaggcgcccgccaccacacccggctaattttttgtatttttagtagagacggggtttcatcatgttagccagga

SEQ ID NO: 136234 - DNA, 80 bp, synthetic construct; identical to SEQ ID NO: 42801
  misc_feature 1..80: note = Artificially Synthesized Probe
  source 1..80: mol_type = other DNA

SEQ ID NO: 136235 - DNA, 80 bp, synthetic construct
  misc_feature 1..80: note = Artificially Synthesized Probe
  source 1..80: mol_type = other DNA
cccagtccttggtaaaaatgggcttctgtcattgaggaacataagatttttgtagcataattggtgaaacatgagatcag

SEQ ID NO: 136236 - DNA, 80 bp, synthetic construct
  misc_feature 1..80: note = Artificially Synthesized Probe
  source 1..80: mol_type = other DNA
attaaaaaaaattttttttagagacaaggtctccctatattgcccaggctagtctcaaactcttggcctcaagcgatcca

SEQ ID NO: 136237 - DNA, 80 bp, synthetic construct
  misc_feature 1..80: note = Artificially Synthesized Probe
  source 1..80: mol_type = other DNA
agttagtccttttctccaacaagagccagtctctagcaaccactactttgttttctgcctttattgttttgccttttcca

SEQ ID NO: 136238 - DNA, 80 bp, synthetic construct; identical to SEQ ID NO: 42802
  misc_feature 1..80: note = Artificially Synthesized Probe
  source 1..80: mol_type = other DNA

SEQ ID NO: 136239 - DNA, 80 bp, synthetic construct
  misc_feature 1..80: note = Artificially Synthesized Probe
  source 1..80: mol_type = other DNA
ttataagaaactaatagaatgtctggaaattttctaccaaaaatcttgaaacttctgtataagaaattcattatgtcaga

SEQ ID NO: 136240 - DNA, 80 bp, synthetic construct
  misc_feature 1..80: note = Artificially Synthesized Probe
  source 1..80: mol_type = other DNA
atcccagctcctcgggaggctgagacacgagaattgcttgaaccaatgaggtggtggttgcagtgagcccagataatgcc

SEQ ID NO: 136241 - DNA, 80 bp, synthetic construct
  misc_feature 1..80: note = Artificially Synthesized Probe
  source 1..80: mol_type = other DNA
atggaactcaggtatgagctgatagatacaaagcaaagcaaaacaaaacctactgaagcctctggttgcaaaatagcaca

SEQ ID NO: 136242 - DNA, 80 bp, synthetic construct; identical to SEQ ID NO: 42803
  misc_feature 1..80: note = Artificially Synthesized Probe
  source 1..80: mol_type = other DNA

SEQ ID NO: 136243 - DNA, 80 bp, synthetic construct
  misc_feature 1..80: note = Artificially Synthesized Probe
  source 1..80: mol_type = other DNA
tgaggtcaggcattcgacatcagcctggccaacatggtgaaaccccgtctctactaaaaatacaaaaattggttgggcgt

SEQ ID NO: 136244 - DNA, 80 bp, synthetic construct
  misc_feature 1..80: note = Artificially Synthesized Probe
  source 1..80: mol_type = other DNA
taagatgtgttaaaaagcaagataaaaattctatgtatgattatagctattaaaatgcctagacacaaaatacatagaca

SEQ ID NO: 136245 - DNA, 80 bp, synthetic construct
  misc_feature 1..80: note = Artificially Synthesized Probe
  source 1..80: mol_type = other DNA
actgcaacctctgcctcccaggttcaagcaattctcctgcctcagcctcccgagtagctgggattactggcacatgccac

SEQ ID NO: 136246 - DNA, 80 bp, synthetic construct
  misc_feature 1..80: note = Artificially Synthesized Probe
  source 1..80: mol_type = other DNA
ctgtaatcccagcactttgggaggccgaggtgggtggatcacctgaggtcgggagttcaagaccagcctgaccaacatgg

SEQ ID NO: 136247 - DNA, 80 bp, synthetic construct; identical to SEQ ID NO: 42804
  misc_feature 1..80: note = Artificially Synthesized Probe
  source 1..80: mol_type = other DNA

SEQ ID NO: 136248 - DNA, 80 bp, synthetic construct
  misc_feature 1..80: note = Artificially Synthesized Probe
  source 1..80: mol_type = other DNA
gcgccccagccaccacgcctggctaatttttgtatttttagtggagtcaaggtttcgccatgttggccaggctggtttcc

SEQ ID NO: 136249 - DNA, 80 bp, synthetic construct
  misc_feature 1..80: note = Artificially Synthesized Probe
  source 1..80: mol_type = other DNA
cccttcccccacactcctggccctcccaccccggaggcccctccgggcttgcccccacctccgcgccgccctcccgccgc

SEQ ID NO: 136250 - DNA, 80 bp, synthetic construct
  misc_feature 1..80: note = Artificially Synthesized Probe
  source 1..80: mol_type = other DNA
gatcccacattacacttcgttgtcatgtttcctttgtttcctccaatctgtgacagttttgttttttttttgagacggag

SEQ ID NO: 136251 - DNA, 80 bp, synthetic construct
  misc_feature 1..80: note = Artificially Synthesized Probe
  source 1..80: mol_type = other DNA
gagacggggtttcactgtgttagccaggatggtcttgatctcctgacctcgtgatccacccgcctcagcctcccgaagtg

SEQ ID NO: 136252 - DNA, 80 bp, synthetic construct; identical to SEQ ID NO: 42805
  misc_feature 1..80: note = Artificially Synthesized Probe
  source 1..80: mol_type = other DNA

SEQ ID NO: 136253 - DNA, 80 bp, synthetic construct
  misc_feature 1..80: note = Artificially Synthesized Probe
  source 1..80: mol_type = other DNA
ctgcctcccaggttcaagcgattctcctgcctcagcctccctagtagctggaattacaggctcgcgccaccacgcccggc

SEQ ID NO: 136254 - DNA, 80 bp, synthetic construct
  misc_feature 1..80: note = Artificially Synthesized Probe
  source 1..80: mol_type = other DNA
tggtgagattatgcaaacacacagttattctttaaacttttgcccagtaattttagcataaatcattggatcttgcctgc

SEQ ID NO: 136255 - DNA, 80 bp, synthetic construct
  misc_feature 1..80: note = Artificially Synthesized Probe
  source 1..80: mol_type = other DNA
tattctgtgggttataatcctgtattactgttacttattttgatgctcaaattgttccagcttttgtttttattactttt

SEQ ID NO: 136256 - DNA, 80 bp, synthetic construct
  misc_feature 1..80: note = Artificially Synthesized Probe
  source 1..80: mol_type = other DNA
gaatgaagagggaaagaacacgaagacatctttgtcttttctctttccctgaactcagttaattctgcctatttggtctg

SEQ ID NO: 136257 - DNA, 80 bp, synthetic construct; identical to SEQ ID NO: 42806
  misc_feature 1..80: note = Artificially Synthesized Probe
  source 1..80: mol_type = other DNA

SEQ ID NO: 136258 - DNA, 80 bp, synthetic construct; identical to SEQ ID NO: 42715
  misc_feature 1..80: note = Artificially Synthesized Probe
  source 1..80: mol_type = other DNA

SEQ ID NO: 136259 - DNA, 80 bp, synthetic construct
  misc_feature 1..80: note = Artificially Synthesized Probe
  source 1..80: mol_type = other DNA
ttcgttgtctcgtggaagttttgttgtctagtggaaaaacattagtaagtatttttatatttttcagtgattttatttta

SEQ ID NO: 136260 - DNA, 80 bp, synthetic construct
  misc_feature 1..80: note = Artificially Synthesized Probe
  source 1..80: mol_type = other DNA
tgtgtgtcaaacattttaaagatccacgtgctttgcacataggagagagttgttgaaaaggggggaacattgtagctctt

SEQ ID NO: 136261 - DNA, 80 bp, synthetic construct; identical to SEQ ID NO: 42807
  misc_feature 1..80: note = Artificially Synthesized Probe
  source 1..80: mol_type = other DNA

SEQ ID NO: 136262 - DNA, 80 bp, synthetic construct
  misc_feature 1..80: note = Artificially Synthesized Probe
  source 1..80: mol_type = other DNA
attctcccgcctcagcctcccaagtagctgggaatacaggcacccgccatcatgaccagctaatttttgtatttttgtag

SEQ ID NO: 136263 - DNA, 80 bp, synthetic construct
  misc_feature 1..80: note = Artificially Synthesized Probe
  source 1..80: mol_type = other DNA
catatgtgctagcaatagataaaaccctatatgttgggttcctgaggcaaggactgactttctaataagaatattttaat

SEQ ID NO: 136264 - DNA, 80 bp, synthetic construct
  misc_feature 1..80: note = Artificially Synthesized Probe
  source 1..80: mol_type = other DNA
acctctcaagctcaagcagtcctcccacgtcagtgtcctgagttgctgggactacaagcatatgccaccacatcaggcta

SEQ ID NO: 136265 - DNA, 80 bp, synthetic construct; identical to SEQ ID NO: 42808
  misc_feature 1..80: note = Artificially Synthesized Probe
  source 1..80: mol_type = other DNA

SEQ ID NO: 136266 - DNA, 80 bp, synthetic construct
  misc_feature 1..80: note = Artificially Synthesized Probe
  source 1..80: mol_type = other DNA
acatagtggggctgaccaagggccttttattcaaacagttgcaagaatccttaatctagagcaattagcaacaacattta

SEQ ID NO: 136267 - DNA, 80 bp, synthetic construct
  misc_feature 1..80: note = Artificially Synthesized Probe
  source 1..80: mol_type = other DNA
tgactgtacatcttctgtgcattagtgattccagctatgaactgtttctcaatgcactgacaatttttgaccaatgtata

SEQ ID NO: 136268 - DNA, 80 bp, synthetic construct
  misc_feature 1..80: note = Artificially Synthesized Probe
  source 1..80: mol_type = other DNA
catccacacttcctcccgatcctcccagtatggttatattataactttgttcaaattagtaattgatgttttcattatta

SEQ ID NO: 136269 - DNA, 80 bp, synthetic construct
  misc_feature 1..80: note = Artificially Synthesized Probe
  source 1..80: mol_type = other DNA
atgaatgtgcaaaataatgtattcaaggcctaatggctctacacaaaccgcaacacagttctgaagggtgactaggaaaa

SEQ ID NO: 136270 - DNA, 80 bp, synthetic construct; identical to SEQ ID NO: 42809
  misc_feature 1..80: note = Artificially Synthesized Probe
  source 1..80: mol_type = other DNA

SEQ ID NO: 136271 - DNA, 80 bp, synthetic construct
  misc_feature 1..80: note = Artificially Synthesized Probe
  source 1..80: mol_type = other DNA
cacccaggctggagttcagtggcatgatcatagctcactgcagcctcaaattcctgggcttaagcgattctcccctctca

SEQ ID NO: 136272 - DNA, 80 bp, synthetic construct
  misc_feature 1..80: note = Artificially Synthesized Probe
  source 1..80: mol_type = other DNA
gttatgttcagtgcctaatgtctttcagacactgttaaacagtttacttttattagttaagcttctttaacatctcagtt

SEQ ID NO: 136273 - DNA, 80 bp, synthetic construct
  misc_feature 1..80: note = Artificially Synthesized Probe
  source 1..80: mol_type = other DNA
tctctactaaaaatacaaaaattagccaggcatggtggtgcacacctgtaatcccagctacttgggaggttgaggtggga

SEQ ID NO: 136274 - DNA, 80 bp, synthetic construct; identical to SEQ ID NO: 42810
  misc_feature 1..80: note = Artificially Synthesized Probe
  source 1..80: mol_type = other DNA

SEQ ID NO: 136275 - DNA, 80 bp, synthetic construct
  misc_feature 1..80: note = Artificially Synthesized Probe
  source 1..80: mol_type = other DNA
ctgtgtacctttcacacattatgtcatttaatcccccacaacagcacttaaggatggtatattatgttttgcaaatgaga

SEQ ID NO: 136276 - DNA, 80 bp, synthetic construct
  misc_feature 1..80: note = Artificially Synthesized Probe
  source 1..80: mol_type = other DNA
tatccagagagcatcaatcgtaggctaatgcaaattcattgtagggtataagatacagatgtaaggcaattccatactga

SEQ ID NO: 136277 - DNA, 80 bp, synthetic construct
  misc_feature 1..80: note = Artificially Synthesized Probe
  source 1..80: mol_type = other DNA
ggctggagtgcagtggcacgatcaagacactgtagcctcagccacccaggctcagatgatcctcccacttcagcctcctg

SEQ ID NO: 136278 - DNA, 80 bp, synthetic construct
  misc_feature 1..80: note = Artificially Synthesized Probe
  source 1..80: mol_type = other DNA
attaggttcaagtccatctgattttctttctccacttttatctttgtgaataagtccctcccggtgccttctgacccact

SEQ ID NO: 136279 - DNA, 80 bp, synthetic construct; identical to SEQ ID NO: 42811
  misc_feature 1..80: note = Artificially Synthesized Probe
  source 1..80: mol_type = other DNA

SEQ ID NO: 136280 - DNA, 80 bp, synthetic construct
  misc_feature 1..80: note = Artificially Synthesized Probe
  source 1..80: mol_type = other DNA
tctgggcatagtggcgcacgcctgtagtctcagctacttgggaggctgaggcaggagaatcacttgaacccgggaggcag

SEQ ID NO: 136281 - DNA, 80 bp, synthetic construct
  misc_feature 1..80: note = Artificially Synthesized Probe
  source 1..80: mol_type = other DNA
gctaccatgcctggctaattttaaatttttttgtagatacatggtcctagtatattgcccaggctggtctcggactcttg

SEQ ID NO: 136282 - DNA, 80 bp, synthetic construct
  misc_feature 1..80: note = Artificially Synthesized Probe
  source 1..80: mol_type = other DNA
tttctaaaatggaagttcctgtaattgcactcacaaatgtgaccactattagcaaattggcatattttcttgagcacttt

SEQ ID NO: 136283 - DNA, 80 bp, synthetic construct
  misc_feature 1..80: note = Artificially Synthesized Probe
  source 1..80: mol_type = other DNA
caacggcgcaatctcggctgacgataacctctgcctcccaggttcaagtgagtctcctgcctcagccttctgagtagctg

SEQ ID NO: 136284 - DNA, 80 bp, synthetic construct; identical to SEQ ID NO: 42812
  misc_feature 1..80: note = Artificially Synthesized Probe
  source 1..80: mol_type = other DNA

SEQ ID NO: 136285 - DNA, 80 bp, synthetic construct
  misc_feature 1..80: note = Artificially Synthesized Probe
  source 1..80: mol_type = other DNA
tccctcagcctcccgagtagctgggactacaggcgtgtgccaacacacccagctaatgtttgtattttcagtagagatgg

SEQ ID NO: 136286 - DNA, 80 bp, synthetic construct
  misc_feature 1..80: note = Artificially Synthesized Probe
  source 1..80: mol_type = other DNA
tacaggcatgagccaccgcgcccagcaccaacccgtttcttatgcaaactgcctttctcattgcggctggcttagtgaaa

SEQ ID NO: 136287 - DNA, 80 bp, synthetic construct
  misc_feature 1..80: note = Artificially Synthesized Probe
  source 1..80: mol_type = other DNA
tacagagggcagtggacgggcagcttggctgtgctgttgagcctgagggctgagaggacaccccggggcagtgtaaagga

SEQ ID NO: 136288 - DNA, 80 bp, synthetic construct
  misc_feature 1..80: note = Artificially Synthesized Probe
  source 1..80: mol_type = other DNA
gcagggctgccgcgaggggctggaggctggagggaggtttggggtgcctctggtgggtgaagctgggagcagagaccgtc

SEQ ID NO: 136289 - DNA, 80 bp, synthetic construct
  misc_feature 1..80: note = Artificially Synthesized Probe
  source 1..80: mol_type = other DNA
cagtcgggccttaggactggaggtacacagcggccaccctgagctcccacagcagtgctgtctctcaggcacctctccct

SEQ ID NO: 136290 - DNA, 80 bp, synthetic construct; identical to SEQ ID NO: 42824
  misc_feature 1..80: note = Artificially Synthesized Probe
  source 1..80: mol_type = other DNA

SEQ ID NO: 136291 - DNA, 80 bp, synthetic construct
  misc_feature 1..80: note = Artificially Synthesized Probe
  source 1..80: mol_type = other DNA
gggtgctggtcaacaccttgctccacaaggaaatacttctgtgagttgtgacgaaaatatactttttgcaatgcgaaagg

SEQ ID NO: 136292 - DNA, 80 bp, synthetic construct
  misc_feature 1..80: note = Artificially Synthesized Probe
  source 1..80: mol_type = other DNA
gggggctgccggctggggtcacgggcacttccctgtggctcacattgaggccctttcaaggtcactgcccggtctccacg

SEQ ID NO: 136293 - DNA, 80 bp, synthetic construct; identical to SEQ ID NO: 42814
  misc_feature 1..80: note = Artificially Synthesized Probe
  source 1..80: mol_type = other DNA

SEQ ID NO: 136294 - DNA, 80 bp, synthetic construct; identical to SEQ ID NO: 42825
  misc_feature 1..80: note = Artificially Synthesized Probe
  source 1..80: mol_type = other DNA

SEQ ID NO: 136295 - DNA, 80 bp, synthetic construct
  misc_feature 1..80: note = Artificially Synthesized Probe
  source 1..80: mol_type = other DNA
tgggcccctccagctggttattggtgagggtccacagagcagaggggggctgatgggtggcatggtctggtctcatcagg

SEQ ID NO: 136296 - DNA, 80 bp, synthetic construct
  misc_feature 1..80: note = Artificially Synthesized Probe
  source 1..80: mol_type = other DNA
gccctccaagtggggttggctggtggaagtgaatctgggcagcctccgggactgctggcagctcggcctgcttgggtgag

SEQ ID NO: 136297 - DNA, 80 bp, synthetic construct
  misc_feature 1..80: note = Artificially Synthesized Probe
  source 1..80: mol_type = other DNA
tcatgagtgttcagctcagcctggctcctgccgtgtgtgggctcaggagtgctggcctcccagacctctgcaggctgcag

SEQ ID NO: 136298 - DNA, 80 bp, synthetic construct
  misc_feature 1..80: note = Artificially Synthesized Probe
  source 1..80: mol_type = other DNA
agcagctgctgctcccacccaccaggtcccggggaccccgccgacactgttagctgtctctgagcttctgagtgactctc

SEQ ID NO: 136299 - DNA, 80 bp, synthetic construct; identical to SEQ ID NO: 42826
  misc_feature 1..80: note = Artificially Synthesized Probe
  source 1..80: mol_type = other DNA

SEQ ID NO: 136300 - DNA, 80 bp, synthetic construct
  misc_feature 1..80: note = Artificially Synthesized Probe
  source 1..80: mol_type = other DNA
cagttgaatggacactttctagactcttctccgcaaactggtttctttttaaagcaccgttctgaagtccttggagattt

SEQ ID NO: 136301 - DNA, 80 bp, synthetic construct
  misc_feature 1..80: note = Artificially Synthesized Probe
  source 1..80: mol_type = other DNA
cgtgtgtgcggcaggtggggctggctgacaaacgtggacgttaattagagccattttaattagaaattatggacgaggtg

SEQ ID NO: 136302 - DNA, 80 bp, synthetic construct; identical to SEQ ID NO: 42827
  misc_feature 1..80: note = Artificially Synthesized Probe
  source 1..80: mol_type = other DNA

SEQ ID NO: 136303 - DNA, 80 bp, synthetic construct
  misc_feature 1..80: note = Artificially Synthesized Probe
  source 1..80: mol_type = other DNA
taacatttcccacttggtttctacgtaatactgttttccttttgacgcagatgttctgtcttcagaaaatacttaggcgg

SEQ ID NO: 136304 - DNA, 80 bp, synthetic construct
  misc_feature 1..80: note = Artificially Synthesized Probe
  source 1..80: mol_type = other DNA
atctcctggatcaatgtgcagcgtcatttggtagattgcgtgtccagccttgccgcgctgtagggtgggtgtgatcatcc

SEQ ID NO: 136305 - DNA, 80 bp, synthetic construct
  misc_feature 1..80: note = Artificially Synthesized Probe
  source 1..80: mol_type = other DNA
gcaacggcgagaaaggccgcgtcgagcggtaggtgcagtcgtcgctgtggtgaccccaggtcctgatgcgtccggcccag

SEQ ID NO: 136306 - DNA, 80 bp, synthetic construct
  misc_feature 1..80: note = Artificially Synthesized Probe
  source 1..80: mol_type = other DNA
gttctctttagtaccgtcagcgtggctctgtctttccttctgctagttaccgggttacttgtttccgtggctgaaagata

SEQ ID NO: 136307 - DNA, 80 bp, synthetic construct; identical to SEQ ID NO: 42828
  misc_feature 1..80: note = Artificially Synthesized Probe
  source 1..80: mol_type = other DNA

SEQ ID NO: 136308 - DNA, 80 bp, synthetic construct
  misc_feature 1..80: note = Artificially Synthesized Probe
  source 1..80: mol_type = other DNA
gacccaccaggcacaggcaggggaggagggacctaaatcagcgctgctgggaaaccttgtaccgccctagggctgggaaa

SEQ ID NO: 136309 - DNA, 80 bp, synthetic construct
  misc_feature 1..80: note = Artificially Synthesized Probe
  source 1..80: mol_type = other DNA
ggccttgtgccagccctccctcccacaccggtggcacagacccgtcttttgggctttcaccgtccctcagtacctgtctg

SEQ ID NO: 136310 - DNA, 80 bp, synthetic construct
  misc_feature 1..80: note = Artificially Synthesized Probe
  source 1..80: mol_type = other DNA
gcctccttgtccaggcctggcctcctgatgaatgtaagtgcgcctgacaaacccgtgctatggccgcgcccagaggctgg

SEQ ID NO: 136311 - DNA, 80 bp, synthetic construct; identical to SEQ ID NO: 42829
  misc_feature 1..80: note = Artificially Synthesized Probe
  source 1..80: mol_type = other DNA

SEQ ID NO: 136312 - DNA, 80 bp, synthetic construct
  misc_feature 1..80: note = Artificially Synthesized Probe
  source 1..80: mol_type = other DNA
acaccagtttggctgccccaggagaagaggccgccctggcccagctccatccatctggagagcaacacagacccaggacc

SEQ ID NO: 136313 - DNA, 80 bp, synthetic construct
  misc_feature 1..80: note = Artificially Synthesized Probe
  source 1..80: mol_type = other DNA
tggtgctgtggtcctggcccctgcagctgggactccaggaagcggcccgaggcccaccatgctggctggcagctcccaag

SEQ ID NO: 136314 - DNA, 80 bp, synthetic construct
  misc_feature 1..80: note = Artificially Synthesized Probe
  source 1..80: mol_type = other DNA
gggcgggggtcgcgccggttcggtccccggggctctgcgggcgccgggcagagacctgcggccagggcgtgtcccgtgtg

SEQ ID NO: 136315 - DNA, 80 bp, synthetic construct
  misc_feature 1..80: note = Artificially Synthesized Probe
  source 1..80: mol_type = other DNA
cagcagaacctccaggctctcgtttcagaggtgaggacacgcctatggtgctgtgtctgtgtccagcaggttctgctcgg

SEQ ID NO: 136316 - DNA, 80 bp, synthetic construct
  misc_feature 1..80: note = Artificially Synthesized Probe
  source 1..80: mol_type = other DNA
attagcatataaatagcagatgcaatgacgaccatcacagctgagcacgtttaatttttggtttataagatagaatgggt

SEQ ID NO: 136317 - DNA, 80 bp, synthetic construct; identical to SEQ ID NO: 42813
  misc_feature 1..80: note = Artificially Synthesized Probe
  source 1..80: mol_type = other DNA

SEQ ID NO: 136318 - DNA, 80 bp, synthetic construct; identical to SEQ ID NO: 42830
  misc_feature 1..80: note = Artificially Synthesized Probe
  source 1..80: mol_type = other DNA

SEQ ID NO: 136319 - DNA, 80 bp, synthetic construct
  misc_feature 1..80: note = Artificially Synthesized Probe
  source 1..80: mol_type = other DNA
ttatgatcgtggaggctcatttttctaaatccttttaagtgtgggtgagaatccatttgtatgaagccagcagaggccgg

SEQ ID NO: 136320 - DNA, 80 bp, synthetic construct
  misc_feature 1..80: note = Artificially Synthesized Probe
  source 1..80: mol_type = other DNA
cattagggaaggtgtgggcacgggtcacagcccccttgggaggggacagcctgcaggtgacctgtgcctcccatgcccct

SEQ ID NO: 136321 - DNA, 80 bp, synthetic construct
  misc_feature 1..80: note = Artificially Synthesized Probe
  source 1..80: mol_type = other DNA
gcaccggtgcccagcccctcagcagggcttgcagacccgtggtgctggcccctggctcatctgtccctcaccttgagggc

SEQ ID NO: 136322 - DNA, 80 bp, synthetic construct; identical to SEQ ID NO: 42831
  misc_feature 1..80: note = Artificially Synthesized Probe
  source 1..80: mol_type = other DNA

SEQ ID NO: 136323 - DNA, 80 bp, synthetic construct
  misc_feature 1..80: note = Artificially Synthesized Probe
  source 1..80: mol_type = other DNA
agccttgcatttagtatccgcagtgaagcccctcaatgctgagttgctgtggtttgaggggtaccacggcctcagtagtt

SEQ ID NO: 136324 - DNA, 80 bp, synthetic construct
  misc_feature 1..80: note = Artificially Synthesized Probe
  source 1..80: mol_type = other DNA
gaacaaaggggaacccagggctccaaatttagtcacagaaatgaaccattatttggggagaaagaaggtgtaattcctaa

SEQ ID NO: 136325 - DNA, 80 bp, synthetic construct
  misc_feature 1..80: note = Artificially Synthesized Probe
  source 1..80: mol_type = other DNA
tctaccttttagaaaattaaaacacataaattctgtttagtgtgtgataacgcgctgcactggctgagaaccgtaatgcc

SEQ ID NO: 136326 - DNA, 80 bp, synthetic construct
  misc_feature 1..80: note = Artificially Synthesized Probe
  source 1..80: mol_type = other DNA
ttccccgagtagggcgcagcttcccagcctccgccccggcctcgcctggcgcttccttccgggtccttcggcctttccct

SEQ ID NO: 136327 - DNA, 80 bp, synthetic construct; identical to SEQ ID NO: 42832
  misc_feature 1..80: note = Artificially Synthesized Probe
  source 1..80: mol_type = other DNA

SEQ ID NO: 136328 - DNA, 80 bp, synthetic construct
  misc_feature 1..80: note = Artificially Synthesized Probe
  source 1..80: mol_type = other DNA
tttgatcagtgttagactgataacaaaaattacagtttccagtgattaatgtctcctgtgcttcccagatgctcagcagt

SEQ ID NO: 136329 - DNA, 80 bp, synthetic construct
  misc_feature 1..80: note = Artificially Synthesized Probe
  source 1..80: mol_type = other DNA
cctggctccgtgggggccacctcccggcagggtgctggtgcccgggccccgtggccttgtgtggcctggctccgtggggg

SEQ ID NO: 136330 - DNA, 80 bp, synthetic construct
  misc_feature 1..80: note = Artificially Synthesized Probe
  source 1..80: mol_type = other DNA
ccgtggcattgtgtggcctggctccgtgggggccacctccccgcacggtgctggtgcgcgggccccgtggccttgtgtgg

SEQ ID NO: 136331 - DNA, 80 bp, synthetic construct; identical to SEQ ID NO: 42833
  misc_feature 1..80: note = Artificially Synthesized Probe
  source 1..80: mol_type = other DNA

SEQ ID NO: 136332 - DNA, 80 bp, synthetic construct
  misc_feature 1..80: note = Artificially Synthesized Probe
  source 1..80: mol_type = other DNA
ccccagggcaccaccaccctggccaccctgggggcatgaccttcagctgccctagcagccctgccagcccctctcctggc

SEQ ID NO: 136333 - DNA, 80 bp, synthetic construct
  misc_feature 1..80: note = Artificially Synthesized Probe
  source 1..80: mol_type = other DNA
gcgagctcccacaccctgtcctgggccgtggtggggctgttggaaggatgcaggccagagggaaggtgaggcggagaaga

SEQ ID NO: 136334 - DNA, 80 bp, synthetic construct
  misc_feature 1..80: note = Artificially Synthesized Probe
  source 1..80: mol_type = other DNA
ttttgggaagagaaaggctttaccagggcaggcagcagggaggcaggtgcctccccagttcttcttggccctgttatgcc

SEQ ID NO: 136335 - DNA, 80 bp, synthetic construct
  misc_feature 1..80: note = Artificially Synthesized Probe
  source 1..80: mol_type = other DNA
cctctgcccactaagtcgggcgcaggaaggggcagggtgggctcaaggaactggcttttctcaggggaaaaagaaagcaa

SEQ ID NO: 136336 - DNA, 80 bp, synthetic construct; identical to SEQ ID NO: 42834
  misc_feature 1..80: note = Artificially Synthesized Probe
  source 1..80: mol_type = other DNA

SEQ ID NO: 136337 - DNA, 80 bp, synthetic construct
  misc_feature 1..80: note = Artificially Synthesized Probe
  source 1..80: mol_type = other DNA
tgccctaagcctcaggggcaccgcagacgcacctgctccacctggtgagaagataactgccctaagcctcgggggcacca

SEQ ID NO: 136338 - DNA, 80 bp, synthetic construct
  misc_feature 1..80: note = Artificially Synthesized Probe
  source 1..80: mol_type = other DNA
taaacagcccccagcacaggggcagtgcagaggtggtgtgattttggggaacaagaacagccttggagacgatcttaaat

SEQ ID NO: 136339 - DNA, 80 bp, synthetic construct
  misc_feature 1..80: note = Artificially Synthesized Probe
  source 1..80: mol_type = other DNA
ctggaggctgccctgcggaatctgagtgaataagggaaacagcaacagtcacgttggggaaaagctgattcggacagcgc

SEQ ID NO: 136340 - DNA, 80 bp, synthetic construct
  misc_feature 1..80: note = Artificially Synthesized Probe
  source 1..80: mol_type = other DNA
ttgtattggggtgtttttccacagacagaagccctgggggatgcggaggaagatgaggacgatgaggactttgtggaggt

SEQ ID NO: 136341 - DNA, 80 bp, synthetic construct; identical to SEQ ID NO: 42835
  misc_feature 1..80: note = Artificially Synthesized Probe
  source 1..80: mol_type = other DNA

SEQ ID NO: 136342 - DNA, 80 bp, synthetic construct
  misc_feature 1..80: note = Artificially Synthesized Probe
  source 1..80: mol_type = other DNA
ctcaggtgcccgggtctgggacaggggccaccatcctacccttggttcttgtgtgtggaggacaccggcctgcacaccca

SEQ ID NO: 136343 - DNA, 80 bp, synthetic construct
  misc_feature 1..80: note = Artificially Synthesized Probe
  source 1..80: mol_type = other DNA
ttgagggttgtgggtgtgattcccgcagctacaggagctgttgctggcaggtgggaggggccaccaccccgcgccttcca

SEQ ID NO: 136344 - DNA, 80 bp, synthetic construct
  misc_feature 1..80: note = Artificially Synthesized Probe
  source 1..80: mol_type = other DNA
gcctgtgccgtggagggcttaggtttttcaaaaatacctcccaaaactgcgttccagtgacacacccaggattgtggccc

SEQ ID NO: 136345 - DNA, 80 bp, synthetic construct; identical to SEQ ID NO: 42836
  misc_feature 1..80: note = Artificially Synthesized Probe
  source 1..80: mol_type = other DNA

SEQ ID NO: 136346 - DNA, 80 bp, synthetic construct
  misc_feature 1..80: note = Artificially Synthesized Probe
  source 1..80: mol_type = other DNA
agcttgagggtctggaagaaagcctcagacacctggagccagccgggacctcgctctgggaaccactgtggcctggccca

SEQ ID NO: 136347 - DNA, 80 bp, synthetic construct
  misc_feature 1..80: note = Artificially Synthesized Probe
  source 1..80: mol_type = other DNA
cacacacactgttcttccaacaccagcatccacctgaaatggtgtttctgctgattccccacctcgggcaggcgtcccca

SEQ ID NO: 136348 - DNA, 80 bp, synthetic construct
  misc_feature 1..80: note = Artificially Synthesized Probe
  source 1..80: mol_type = other DNA
taggcagccgtcttgtctgcgcaggcctgtcctgacctggcctgctgggctgcctcatctcccggacccctcctgggcat

SEQ ID NO: 136349 - DNA, 80 bp, synthetic construct; identical to SEQ ID NO: 42837
  misc_feature 1..80: note = Artificially Synthesized Probe
  source 1..80: mol_type = other DNA

SEQ ID NO: 136350 - DNA, 80 bp, synthetic construct; identical to SEQ ID NO: 42815
  misc_feature 1..80: note = Artificially Synthesized Probe
  source 1..80: mol_type = other DNA

SEQ ID NO: 136351 - DNA, 80 bp, synthetic construct
  misc_feature 1..80: note = Artificially Synthesized Probe
  source 1..80: mol_type = other DNA
agggggccgagcggcctcgcagcccctgccgggtgtgctgggacgcctgctctgacacagccctgctgcaggtacaccga

SEQ ID NO: 136352 - DNA, 80 bp, synthetic construct
  misc_feature 1..80: note = Artificially Synthesized Probe
  source 1..80: mol_type = other DNA
tcctggtccagggaagtgtgcacagctggtgcactggcggctggttctttcgctgcagccgcaggtccccacagcgccct

SEQ ID NO: 136353 - DNA, 80 bp, synthetic construct; identical to SEQ ID NO: 42838
  misc_feature 1..80: note = Artificially Synthesized Probe
  source 1..80: mol_type = other DNA

SEQ ID NO: 136354 - DNA, 80 bp, synthetic construct
  misc_feature 1..80: note = Artificially Synthesized Probe
  source 1..80: mol_type = other DNA
gagctgccctctggggtgcgcagggaggacccctggccccactcagcttcacaccccgggggccccaggagtgccggagg

SEQ ID NO: 136355 - DNA, 80 bp, synthetic construct
  misc_feature 1..80: note = Artificially Synthesized Probe
  source 1..80: mol_type = other DNA
ttctcatttcttcctctgaattttcactgaggggcctttatcttccccttaatcctaccatttctgtcaggacataatct

SEQ ID NO: 136356 - DNA, 80 bp, synthetic construct
  misc_feature 1..80: note = Artificially Synthesized Probe
  source 1..80: mol_type = other DNA
ccacttggccaatgtaaacagaaaaggggatttggacatttttatgattctttctcaaaacaactgtgggagtgaatttg

SEQ ID NO: 136357 - DNA, 80 bp, synthetic construct
  misc_feature 1..80: note = Artificially Synthesized Probe
  source 1..80: mol_type = other DNA
ctgaggaatgctgtctgatttttggggttttgctttgaaagtatgtcagagagattgattttccacgcgatgcgcaagtg

SEQ ID NO: 136358 - DNA, 80 bp, synthetic construct; identical to SEQ ID NO: 42839
  misc_feature 1..80: note = Artificially Synthesized Probe
  source 1..80: mol_type = other DNA

SEQ ID NO: 136359 - DNA, 80 bp, synthetic construct
  misc_feature 1..80: note = Artificially Synthesized Probe
  source 1..80: mol_type = other DNA
cgcgcctcggggctggaggtccgtccccatcacctgctctgtgtggctctgtctcacaccctccgctttcagcccctggg

SEQ ID NO: 136360 - DNA, 80 bp, synthetic construct
  misc_feature 1..80: note = Artificially Synthesized Probe
  source 1..80: mol_type = other DNA
aagaaaatttgcaagtatgtcttagggttcagtaacagtaactgactggcccactgagcccaggacacacacagggccct

SEQ ID NO: 136361 - DNA, 80 bp, synthetic construct
  misc_feature 1..80: note = Artificially Synthesized Probe
  source 1..80: mol_type = other DNA
tgggtgccagtaacaccctattcacgaaaacaggcggtgggctggacttggctcatagccacaggctggcgagccctgca

SEQ ID NO: 136362 - DNA, 80 bp, synthetic construct
  misc_feature 1..80: note = Artificially Synthesized Probe
  source 1..80: mol_type = other DNA
tgattcacgggatgcttgtcatgggcctgagcaaggccctttgtccttacccacttccctccctggaagcccctgtgccc

SEQ ID NO: 136363 - DNA, 80 bp, synthetic construct; identical to SEQ ID NO: 42840
  misc_feature 1..80: note = Artificially Synthesized Probe
  source 1..80: mol_type = other DNA

SEQ ID NO: 136364 - DNA, 80 bp, synthetic construct
  misc_feature 1..80: note = Artificially Synthesized Probe
  source 1..80: mol_type = other DNA
gacacagtctgggcggtgctgattcttgggaggtgactgaggcccctgttgacttagtacttggttttctttcgtcagtt

SEQ ID NO: 136365 - DNA, 80 bp, synthetic construct
  misc_feature 1..80: note = Artificially Synthesized Probe
  source 1..80: mol_type = other DNA
caagaaggagcaagtcacatcttaacgtggatggcagcaggcagggagagggcttgtgcggagaaactcccgcttttaca

SEQ ID NO: 136366 - DNA, 80 bp, synthetic construct; identical to SEQ ID NO: 42841
  misc_feature 1..80: note = Artificially Synthesized Probe
  source 1..80: mol_type = other DNA

SEQ ID NO: 136367 - DNA, 80 bp, synthetic construct
  misc_feature 1..80: note = Artificially Synthesized Probe
  source 1..80: mol_type = other DNA
agcattcctttttttaccctcctattttttacttaaaatccagcttttctagtacccacataggacctcctctgtctttt

SEQ ID NO: 136368 - DNA, 80 bp, synthetic construct
  misc_feature 1..80: note = Artificially Synthesized Probe
  source 1..80: mol_type = other DNA
tctttctgttaatctgaatctgtttagttaacggttgttacgaagtcttcaaaagacacatctggcggcctgtcacgcgt

SEQ ID NO: 136369 - DNA, 80 bp, synthetic construct
  misc_feature 1..80: note = Artificially Synthesized Probe
  source 1..80: mol_type = other DNA
ttgtagaaaggatttacacacatatgtgtttctcaatttctgtactatttcctgcataaaacaaataacctagcaccctc

SEQ ID NO: 136370 - DNA, 80 bp, synthetic construct
  misc_feature 1..80: note = Artificially Synthesized Probe
  source 1..80: mol_type = other DNA
cccgcatctcagagcactcatctcctgctactcagcactcacctcccgcgtccctgcactcacctcccgcgtctcagggc

SEQ ID NO: 136371 - DNA, 80 bp, synthetic construct
  misc_feature 1..80: note = Artificially Synthesized Probe
  source 1..80: mol_type = other DNA
cccatttgtgtggtctggagcacatcctgtaggagttcttgagtgcacaaatgtgattcagagagaaacgtgcatctttt

SEQ ID NO: 136372 - DNA, 80 bp, synthetic construct; identical to SEQ ID NO: 42842
  misc_feature 1..80: note = Artificially Synthesized Probe
  source 1..80: mol_type = other DNA

SEQ ID NO: 136373 - DNA, 80 bp, synthetic construct
  misc_feature 1..80: note = Artificially Synthesized Probe
  source 1..80: mol_type = other DNA
gcattcacggttgctattgaaaatcttgtgtcaatagaatttttattttttgaaagtatcagctaatttatatgaccaca

SEQ ID NO: 136374 - DNA, 80 bp, synthetic construct
  misc_feature 1..80: note = Artificially Synthesized Probe
  source 1..80: mol_type = other DNA
ctttatattcgttggcagctgactagatggtgcccaccagattaagggtggatctgccttccccagcccactgactcaaa

SEQ ID NO: 136375 - DNA, 80 bp, synthetic construct; identical to SEQ ID NO: 42843
  misc_feature 1..80: note = Artificially Synthesized Probe
  source 1..80: mol_type = other DNA

SEQ ID NO: 136376 - DNA, 80 bp, synthetic construct
  misc_feature 1..80: note = Artificially Synthesized Probe
  source 1..80: mol_type = other DNA
aacaagtcctctgcacctgacaattttccttgccctttgtctttggtggaggcatcttcaggatcccctcacttcctggc

SEQ ID NO: 136377 - DNA, 80 bp, synthetic construct
  misc_feature 1..80: note = Artificially Synthesized Probe
  source 1..80: mol_type = other DNA
ggacgccttgctcggtctgttttcttccatggcagctctccgaagtctggcttccctgcggtccaggttcttctggggtc

SEQ ID NO: 136378 - DNA, 80 bp, synthetic construct
  misc_feature 1..80: note = Artificially Synthesized Probe
  source 1..80: mol_type = other DNA
ccagcttagccgctagggagtataggccccgccctgaccgagaggcgccgtcagggtcggggtgagccccacggagcagc

SEQ ID NO: 136379 - DNA, 80 bp, synthetic construct
  misc_feature 1..80: note = Artificially Synthesized Probe
  source 1..80: mol_type = other DNA
gttggtgagacgcagcgccatggccttgtcttgctggcggcggggcggaccctcttcgacgggcactccgggacggcatc

SEQ ID NO: 136380 - DNA, 80 bp, synthetic construct; identical to SEQ ID NO: 42844
  misc_feature 1..80: note = Artificially Synthesized Probe
  source 1..80: mol_type = other DNA

SEQ ID NO: 136381 - DNA, 80 bp, synthetic construct
  misc_feature 1..80: note = Artificially Synthesized Probe
  source 1..80: mol_type = other DNA
agcctggcgaatccatctgctcaggctggcacttctgcaaagcccggcagcacagtgtgtgaacagcgtggccacaaggc

SEQ ID NO: 136382 - DNA, 80 bp, synthetic construct
  misc_feature 1..80: note = Artificially Synthesized Probe
  source 1..80: mol_type = other DNA
cggtcttgcctgatgtgcctggcgggttgtgggagtggtggcagggagtggacacgtgtctgtttcagggctggaggcag

SEQ ID NO: 136383 - DNA, 80 bp, synthetic construct; identical to SEQ ID NO: 42816
  misc_feature 1..80: note = Artificially Synthesized Probe
  source 1..80: mol_type = other DNA

SEQ ID NO: 136384 - DNA, 80 bp, synthetic construct
  misc_feature 1..80: note = Artificially Synthesized Probe
  source 1..80: mol_type = other DNA
ccccctgcccggcgctgccacagcctctgcccagagcactggccggcctcgagaggctgcttagtgccttttctggatat

SEQ ID NO: 136385 - DNA, 80 bp, synthetic construct; identical to SEQ ID NO: 42845
  misc_feature 1..80: note = Artificially Synthesized Probe
  source 1..80: mol_type = other DNA

SEQ ID NO: 136386 - DNA, 80 bp, synthetic construct
  misc_feature 1..80: note = Artificially Synthesized Probe
  source 1..80: mol_type = other DNA
cccactctgctcctgtagcccctccagagcgttgccagagccacaggaggcccagaagctggcagcagagcgggcccggg

SEQ ID NO: 136387 - DNA, 80 bp, synthetic construct
  misc_feature 1..80: note = Artificially Synthesized Probe
  source 1..80: mol_type = other DNA
gggtctgaggaagctggccctgcctcccagctctgccccaccttccgggcacctggaggggcacaggggtgggcctcccc

SEQ ID NO: 136388 - DNA, 80 bp, synthetic construct; identical to SEQ ID NO: 42846
  misc_feature 1..80: note = Artificially Synthesized Probe
  source 1..80: mol_type = other DNA

SEQ ID NO: 136389 - DNA, 80 bp, synthetic construct
  misc_feature 1..80: note = Artificially Synthesized Probe
  source 1..80: mol_type = other DNA
ccacctgggtactccagcgcctgccacagctcgctggcacggcctatcgggggaacagggcccctgccgccgcctcagct

SEQ ID NO: 136390 - DNA, 80 bp, synthetic construct
  misc_feature 1..80: note = Artificially Synthesized Probe
  source 1..80: mol_type = other DNA
tgtgacacggaatattgccgtccccacagcacccatttcaagggccgggctgcctgtgcaaacaccgtaaccactaaagc

SEQ ID NO: 136391 - DNA, 80 bp, synthetic construct
  misc_feature 1..80: note = Artificially Synthesized Probe
  source 1..80: mol_type = other DNA
tctgtgtctggatgcccaggaacgggccccgagtgccgggacgtcctggcacattgtccacagctgcctgtgttcccggg

SEQ ID NO: 136392 - DNA, 80 bp, synthetic construct; identical to SEQ ID NO: 42847
  misc_feature 1..80: note = Artificially Synthesized Probe
  source 1..80: mol_type = other DNA

SEQ ID NO: 136393 - DNA, 80 bp, synthetic construct
  misc_feature 1..80: note = Artificially Synthesized Probe
  source 1..80: mol_type = other DNA
gctgctggtgaggacccggttagtcctggatggcaccggggccctgctgggcaggcctggcttcacgttccacctgcctg

SEQ ID NO: 136394 - DNA, 80 bp, synthetic construct
  misc_feature 1..80: note = Artificially Synthesized Probe
  source 1..80: mol_type = other DNA
taggccttccttccttcctgcagcaggaggcacccagctgaaacagtgtgcgtgctgggcggtgtgcgttgtgccaggcg

SEQ ID NO: 136395 - DNA, 80 bp, synthetic construct
  misc_feature 1..80: note = Artificially Synthesized Probe
  source 1..80: mol_type = other DNA
tgggctggtgcaggagatggcacctgggtgccacatgtgccccacagccagttgagggccacactcctcctggctggccc

SEQ ID NO: 136396 - DNA, 80 bp, synthetic construct
  misc_feature 1..80: note = Artificially Synthesized Probe
  source 1..80: mol_type = other DNA
ccaggccgtggtgggagacagggctgatgggggtggcggccacaggcaaccactagaacaaagccgtcctggtacacaga

SEQ ID NO: 136397 - DNA, 80 bp, synthetic construct
  misc_feature 1..80: note = Artificially Synthesized Probe
  source 1..80: mol_type = other DNA
ggtggcgtgcgcctgtaatcccagctactcgagactgaggcgggagaatcgcttgaacccaggaggcggagtttgcagtg

SEQ ID NO: 136398 - DNA, 80 bp, synthetic construct; identical to SEQ ID NO: 42848
  misc_feature 1..80: note = Artificially Synthesized Probe
  source 1..80: mol_type = other DNA

SEQ ID NO: 136399 - DNA, 80 bp, synthetic construct
  misc_feature 1..80: note = Artificially Synthesized Probe
  source 1..80: mol_type = other DNA
gggcagcacattctgcctgcgttcccacccactgccttatcccaaaccagcctcatcccagaccaaggtggatgcagaaa

SEQ ID NO: 136400 - DNA, 80 bp, synthetic construct
  misc_feature 1..80: note = Artificially Synthesized Probe
  source 1..80: mol_type = other DNA
agcttcgggcagagccgaccgttccccagtcagcaggcaatgagcagcctctcatcactgggagcccttggcactgccca

SEQ ID NO: 136401 - DNA, 80 bp, synthetic construct
  misc_feature 1..80: note = Artificially Synthesized Probe
  source 1..80: mol_type = other DNA
gcctcctcttggccggcacacccagcccccccatcccatggcatccgccggaaagcgtccctaaccaggttgatgacaac

SEQ ID NO: 136402 - DNA, 80 bp, synthetic construct; identical to SEQ ID NO: 42849
  misc_feature 1..80: note = Artificially Synthesized Probe
  source 1..80: mol_type = other DNA

SEQ ID NO: 136403 - DNA, 80 bp, synthetic construct
  misc_feature 1..80: note = Artificially Synthesized Probe
  source 1..80: mol_type = other DNA
gcgcggctggttcatgtggcgtcagaattcagacccagccgggagtgaccgtgttctccctgggtgctgtccacagtgtt

SEQ ID NO: 136404 - DNA, 80 bp, synthetic construct
  misc_feature 1..80: note = Artificially Synthesized Probe
  source 1..80: mol_type = other DNA
gtggtcaatgccgacatctccgagatgctccggagccgccacatcacttttgccgggaagtttgagcctgtgcagcactg

SEQ ID NO: 136405 - DNA, 80 bp, synthetic construct
  misc_feature 1..80: note = Artificially Synthesized Probe
  source 1..80: mol_type = other DNA
tggtttgtgtttcaggctttgctgtaatgcctcagttgtgaacacagctgtagatgatgtaggtggatagatgggcgacg

SEQ ID NO: 136406 - DNA, 80 bp, synthetic construct; identical to SEQ ID NO: 42850
  misc_feature 1..80: note = Artificially Synthesized Probe
  source 1..80: mol_type = other DNA

SEQ ID NO: 136407 - DNA, 80 bp, synthetic construct
  misc_feature 1..80: note = Artificially Synthesized Probe
  source 1..80: mol_type = other DNA
ccagccgggcagctgggcatggtgcaggggggtcgctatggccatgctggatgagggaggcctagactttccacagctgc

SEQ ID NO: 136408 - DNA, 80 bp, synthetic construct
  misc_feature 1..80: note = Artificially Synthesized Probe
  source 1..80: mol_type = other DNA
gggggaggtggtcaaggcaagcggacccctccccgccatcagccaccgtgtcctcgctgtgcagtgccctttccatggga

SEQ ID NO: 136409 - DNA, 80 bp, synthetic construct
  misc_feature 1..80: note = Artificially Synthesized Probe
  source 1..80: mol_type = other DNA
gtgtgtctgcagagtcacagagcacccgctctgccagcttcgtccatggagctacaagcctctcggtcataactggcaga

SEQ ID NO: 136410 - DNA, 80 bp, synthetic construct; identical to SEQ ID NO: 42851
  misc_feature 1..80: note = Artificially Synthesized Probe
  source 1..80: mol_type = other DNA

SEQ ID NO: 136411 - DNA, 80 bp, synthetic construct
  misc_feature 1..80: note = Artificially Synthesized Probe
  source 1..80: mol_type = other DNA
gcccaccctgtctcaccccaggcccatctgcccgccctgcctcccctcgggcccatctgcccaccctgcatatctgtttt

SEQ ID NO: 136412 - DNA, 80 bp, synthetic construct
  misc_feature 1..80: note = Artificially Synthesized Probe
  source 1..80: mol_type = other DNA
atcctcgtgcctcagcctgccaagtagctggaattatcatgccaccatgcccgactaatttttgtatttttatttttagt

SEQ ID NO: 136413 - DNA, 80 bp, synthetic construct
  misc_feature 1..80: note = Artificially Synthesized Probe
  source 1..80: mol_type = other DNA
gggttcacaccttgtcttgaagagcagctctgggggcccaggatcccttccaagctgtctctgtcatggctcccgggtgt

SEQ ID NO: 136414 - DNA, 80 bp, synthetic construct; identical to SEQ ID NO: 42852
  misc_feature 1..80: note = Artificially Synthesized Probe
  source 1..80: mol_type = other DNA

SEQ ID NO: 136415 - DNA, 80 bp, synthetic construct
  misc_feature 1..80: note = Artificially Synthesized Probe
  source 1..80: mol_type = other DNA
gctgcagggcccgtcagcgcccaggaaggccgcgcggtcccagcatctattgattttcctcaaaggcttttaaattgctc

SEQ ID NO: 136416 - DNA, 80 bp, synthetic construct
  misc_feature 1..80: note = Artificially Synthesized Probe
  source 1..80: mol_type = other DNA
agaccctgctctagaaaaggggagaatgaagatgggaaggcagtggtggtccctgccacacgtgcgtgcggcatccatgc

SEQ ID NO: 136417 - DNA, 80 bp, synthetic construct
  misc_feature 1..80: note = Artificially Synthesized Probe
  source 1..80: mol_type = other DNA
taaactgtttggacagttttccttaatcttggattaatcgttcctgtatctgaattgtgggccccgtattccttcacttc

SEQ ID NO: 136418 - DNA, 80 bp, synthetic construct
  misc_feature 1..80: note = Artificially Synthesized Probe
  source 1..80: mol_type = other DNA
ccccttctgtgagccagggttgtctgtaagtcccatggccatcacagtcccgtcaggggtggccttcccgagcccgacca

SEQ ID NO: 136419 - DNA, 80 bp, synthetic construct; identical to SEQ ID NO: 42853
  misc_feature 1..80: note = Artificially Synthesized Probe
  source 1..80: mol_type = other DNA

SEQ ID NO: 136420 - DNA, 80 bp, synthetic construct
  misc_feature 1..80: note = Artificially Synthesized Probe
  source 1..80: mol_type = other DNA
ggagcttgcggatggtgccaccccccaaccgctggccttagccgccttccagcctgggaggcccatgggtgccctaggag

SEQ ID NO: 136421 - DNA, 80 bp, synthetic construct
  misc_feature 1..80: note = Artificially Synthesized Probe
  source 1..80: mol_type = other DNA
tctcaggcttgctgctgccagggtacggccgtgggcaaggcgacccagcccccctgtcaggacgagaccaagagcccctc

SEQ ID NO: 136422 - DNA, 80 bp, synthetic construct
  misc_feature 1..80: note = Artificially Synthesized Probe
  source 1..80: mol_type = other DNA
agaagaggaggtaccccagcctcaccaacctgaaggctcaggctgataccgcccgcgctcgcattgggagaaaagtcttc

SEQ ID NO: 136423 - DNA, 80 bp, synthetic construct
  misc_feature 1..80: note = Artificially Synthesized Probe
  source 1..80: mol_type = other DNA
ggggaggggcagtgccagccagcaggggcagcaggcaggtctgctcaggaacgccccccagcattccccaggataagagg

SEQ ID NO: 136424 - DNA, 80 bp, synthetic construct; identical to SEQ ID NO: 42854
  misc_feature 1..80: note = Artificially Synthesized Probe
  source 1..80: mol_type = other DNA

SEQ ID NO: 136425 - DNA, 80 bp, synthetic construct
  misc_feature 1..80: note = Artificially Synthesized Probe
  source 1..80: mol_type = other DNA
ttcatattgccttgttctcgcctaagaaaatccagaatgcttgtttagaagccacctgaggctgttgactccctcccaaa

SEQ ID NO: 136426 - DNA, 80 bp, synthetic construct
  misc_feature 1..80: note = Artificially Synthesized Probe
  source 1..80: mol_type = other DNA
tgagtgggctcgggtgggaggcgccttcacagcactcagaccaggcttcccccaggcttgtgggtggtacatccacagcc

SEQ ID NO: 136427 - DNA, 80 bp, synthetic construct; identical to SEQ ID NO: 42817
  misc_feature 1..80: note = Artificially Synthesized Probe
  source 1..80: mol_type = other DNA

SEQ ID NO: 136428 - DNA, 80 bp, synthetic construct; identical to SEQ ID NO: 42855
  misc_feature 1..80: note = Artificially Synthesized Probe
  source 1..80: mol_type = other DNA

SEQ ID NO: 136429 - DNA, 80 bp, synthetic construct
  misc_feature 1..80: note = Artificially Synthesized Probe
  source 1..80: mol_type = other DNA
accacattgtggcctcaggccctgctggctccacagctccacaccctcgtgggtcgcagcagctgagctggtcagcacag

SEQ ID NO: 136430 - DNA, 80 bp, synthetic construct
  misc_feature 1..80: note = Artificially Synthesized Probe
  source 1..80: mol_type = other DNA
gccaagggggaggctgccctcatcctggagtgcgggaggccacgggagaagtgccaaggtggggctggggccaccttcac

SEQ ID NO: 136431 - DNA, 80 bp, synthetic construct
  misc_feature 1..80: note = Artificially Synthesized Probe
  source 1..80: mol_type = other DNA
cagaagctggtgctgcagagaggggcggcgcagggagtccctcttcttttcctttttaaaataattgctttactgagata

SEQ ID NO: 136432 - DNA, 80 bp, synthetic construct
  misc_feature 1..80: note = Artificially Synthesized Probe
  source 1..80: mol_type = other DNA
ggaccagtgcctaactttggtgatgccgccactgggagcccaggcccctggcggaagcctcccaggtcacatcttgcctt

SEQ ID NO: 136433 - DNA, 80 bp, synthetic construct; identical to SEQ ID NO: 42856
  misc_feature 1..80: note = Artificially Synthesized Probe
  source 1..80: mol_type = other DNA

SEQ ID NO: 136434 - DNA, 80 bp, synthetic construct
  misc_feature 1..80: note = Artificially Synthesized Probe
  source 1..80: mol_type = other DNA
tccagagggcttctgcgagtcctcgtgagaccagtgcttgtcgtggtgtggggttcagcacggacggaatgtgtgtgcag

SEQ ID NO: 136435 - DNA, 80 bp, synthetic construct
  misc_feature 1..80: note = Artificially Synthesized Probe
  source 1..80: mol_type = other DNA
tgtcctcttgtccctggcttcttacacttggcgttgtttttaaggtttatccatgcagttcccctccaatgtataaaaca

SEQ ID NO: 136436 - DNA, 80 bp, synthetic construct
  misc_feature 1..80: note = Artificially Synthesized Probe
  source 1..80: mol_type = other DNA
gagtctattcaaacctcttgcctatttttaattgaatgatttatcttgagttgtaacagttgttttttttgtttttcctt

SEQ ID NO: 136437 - DNA, 80 bp, synthetic construct
  misc_feature 1..80: note = Artificially Synthesized Probe
  source 1..80: mol_type = other DNA
tacaggcacacaccacaacacctggctaattttttaaattttttgtagagatgaggtctcactgtgttgcccacggtgat

SEQ ID NO: 136438 - DNA, 80 bp, synthetic construct; identical to SEQ ID NO: 42857
  misc_feature 1..80: note = Artificially Synthesized Probe
  source 1..80: mol_type = other DNA

SEQ ID NO: 136439 - DNA, 80 bp, synthetic construct
  misc_feature 1..80: note = Artificially Synthesized Probe
  source 1..80: mol_type = other DNA
ttagtagagacgggatttcactgtgttggctgggatggtcttgatctcttgacctcgtgatccacccacctcggcctccc

SEQ ID NO: 136440 - DNA, 80 bp, synthetic construct
  misc_feature 1..80: note = Artificially Synthesized Probe
  source 1..80: mol_type = other DNA
taggtgggcctggcccattttttcagagactggttacctgacgtgaggagggcagacgataccagggtgaagatgcgcct

SEQ ID NO: 136441 - DNA, 80 bp, synthetic construct
  misc_feature 1..80: note = Artificially Synthesized Probe
  source 1..80: mol_type = other DNA
cttttgctgtcacatttcagaagccatcacctaatccaagatcacagagatttacacctagtttctaataagcattttat

SEQ ID NO: 136442 - DNA, 80 bp, synthetic construct; identical to SEQ ID NO: 42858
  misc_feature 1..80: note = Artificially Synthesized Probe
  source 1..80: mol_type = other DNA

SEQ ID NO: 136443 - DNA, 80 bp, synthetic construct
  misc_feature 1..80: note = Artificially Synthesized Probe
  source 1..80: mol_type = other DNA
agtttcttcaaaaaaaaaaaaaaagcagctgagatttttgataggaattacattaaatctagagattgctttggaatgta

SEQ ID NO: 136444 - DNA, 80 bp, synthetic construct
  misc_feature 1..80: note = Artificially Synthesized Probe
  source 1..80: mol_type = other DNA
tattttgttaaatttactcatattttattatttttgatttataaccaaaaggactataaatgcaattataaattattaaa

SEQ ID NO: 136445 - DNA, 80 bp, synthetic construct
  misc_feature 1..80: note = Artificially Synthesized Probe
  source 1..80: mol_type = other DNA
ccagcattccttgctgaacttgtttattcattctaattagttgtatgttccctaagattttccatacacaaaatcatgtc

SEQ ID NO: 136446 - DNA, 80 bp, synthetic construct; identical to SEQ ID NO: 42859
  misc_feature 1..80: note = Artificially Synthesized Probe
  source 1..80: mol_type = other DNA

SEQ ID NO: 136447 - DNA, 80 bp, synthetic construct
  misc_feature 1..80: note = Artificially Synthesized Probe
  source 1..80: mol_type = other DNA
tatagtgatacagtatattacattgtttctcatatattgaaccgaccttgcattcatggggcaaattctacttgttcatg

SEQ ID NO: 136448 - DNA, 80 bp, synthetic construct
  misc_feature 1..80: note = Artificially Synthesized Probe
  source 1..80: mol_type = other DNA
gtctttttgtgatgtctttagctttagtcacgtcactactgacctcatagattgaggtgggaagtgttccctcccctcct

SEQ ID NO: 136449 - DNA, 80 bp, synthetic construct
  misc_feature 1..80: note = Artificially Synthesized Probe
  source 1..80: mol_type = other DNA
gagtttgtccctttctaggttctttgttgcaatctgttcatatataatggttcatagcattaaaaaaaatttttttaact

SEQ ID NO: 136450 - DNA, 80 bp, synthetic construct
  misc_feature 1..80: note = Artificially Synthesized Probe
  source 1..80: mol_type = other DNA
gttttgttttgtttgagacagagtcttgctctgtcacccaggctggagtacagtagcacaatcatggctcactacagctt

SEQ ID NO: 136451 - DNA, 80 bp, synthetic construct; identical to SEQ ID NO: 42860
  misc_feature 1..80: note = Artificially Synthesized Probe
  source 1..80: mol_type = other DNA

SEQ ID NO: 136452 - DNA, 80 bp, synthetic construct
  misc_feature 1..80: note = Artificially Synthesized Probe
  source 1..80: mol_type = other DNA
ggtggagctgaggctgcatgtgtcattttttatgtgcgtgtaggagacaaaggaaaagccaaatccaacttttcagatgc

SEQ ID NO: 136453 - DNA, 80 bp, synthetic construct
  misc_feature 1..80: note = Artificially Synthesized Probe
  source 1..80: mol_type = other DNA
gattcttctctcttttactccccttagtctagctaaagatttatcaattttgttgatctatttaaagaaacaacttctgg

SEQ ID NO: 136454 - DNA, 80 bp, synthetic construct
  misc_feature 1..80: note = Artificially Synthesized Probe
  source 1..80: mol_type = other DNA
gacatttgtagctataaatttttatctcagcactgatttacttcatcccttaagttctgctatattgtgttttccctttt

SEQ ID NO: 136455 - DNA, 80 bp, synthetic construct
  misc_feature 1..80: note = Artificially Synthesized Probe
  source 1..80: mol_type = other DNA
tctcccaggctggagtgcagtgcagtgatcgcagctcactgcagccttgacctcccacctcagcctcctgagtagctgag

SEQ ID NO: 136456 - DNA, 80 bp, synthetic construct; identical to SEQ ID NO: 42861
  misc_feature 1..80: note = Artificially Synthesized Probe
  source 1..80: mol_type = other DNA

SEQ ID NO: 136457 - DNA, 80 bp, synthetic construct
  misc_feature 1..80: note = Artificially Synthesized Probe
  source 1..80: mol_type = other DNA
tgttgtatagatgcctgttgggtctgattggtttgtagtgttgtatagatgcctgttgggtcagaggttggtttgtagtg

SEQ ID NO: 136458 - DNA, 80 bp, synthetic construct
  misc_feature 1..80: note = Artificially Synthesized Probe
  source 1..80: mol_type = other DNA
agatgcctgctgggtctgattggtttgtagggttgtatagatgcatgttgggtctgattggtttgtagtgttatatggat

SEQ ID NO: 136459 - DNA, 80 bp, synthetic construct
  misc_feature 1..80: note = Artificially Synthesized Probe
  source 1..80: mol_type = other DNA
tgttgggtctgattggtttgtagtgttgtatagaagcctgttaggtctgattggtttgtagtctgattgtttatgtcttc

SEQ ID NO: 136460 - DNA, 80 bp, synthetic construct; identical to SEQ ID NO: 42862
  misc_feature 1..80: note = Artificially Synthesized Probe
  source 1..80: mol_type = other DNA

SEQ ID NO: 136461 - DNA, 80 bp, synthetic construct
  misc_feature 1..80: note = Artificially Synthesized Probe
  source 1..80: mol_type = other DNA
cagcatatagtgggatcatgtttcttatctgtcctgctggtctctgccgtgaatctaaagtgtgtttcttgtaaacagca

SEQ ID NO: 136462 - DNA, 80 bp, synthetic construct
  misc_feature 1..80: note = Artificially Synthesized Probe
  source 1..80: mol_type = other DNA
ctgagaaagttggatttgtatctgccatttctaaatttgtttactatattgtcttttttgtctttcttcctttatttctc

SEQ ID NO: 136463 - DNA, 80 bp, synthetic construct
  misc_feature 1..80: note = Artificially Synthesized Probe
  source 1..80: mol_type = other DNA
cctaccgtgccccttaccccacctgccacgaaggctcagtcctccccagtgcaatgacccagccctgctggcttccctgt

SEQ ID NO: 136464 - DNA, 80 bp, synthetic construct
  misc_feature 1..80: note = Artificially Synthesized Probe
  source 1..80: mol_type = other DNA
atgtacaaaaaccttcacttcaagtagctttgtttcctctcagcttcttggtgctgtatttgtcatataaatgctacctt

SEQ ID NO: 136465 - DNA, 80 bp, synthetic construct; identical to SEQ ID NO: 42863
  misc_feature 1..80: note = Artificially Synthesized Probe
  source 1..80: mol_type = other DNA

SEQ ID NO: 136466 - DNA, 80 bp, synthetic construct
  misc_feature 1..80: note = Artificially Synthesized Probe
  source 1..80: mol_type = other DNA
ctctttttagcttctgactgtttgactgtggtgtgtctaattgtggatctttcagtgtgtcctacctgcagttctttgag

SEQ ID NO: 136467 - DNA, 80 bp, synthetic construct
  misc_feature 1..80: note = Artificially Synthesized Probe
  source 1..80: mol_type = other DNA
ttaagtgctttgcaccagtaactctcatggttctgctgacacacagttgatgtgtggtgagtatgccttcagcgctccat

SEQ ID NO: 136468 - DNA, 80 bp, synthetic construct; identical to SEQ ID NO: 42864
  misc_feature 1..80: note = Artificially Synthesized Probe
  source 1..80: mol_type = other DNA

SEQ ID NO: 136469 - DNA, 80 bp, synthetic construct
  misc_feature 1..80: note = Artificially Synthesized Probe
  source 1..80: mol_type = other DNA
atgtgtagaagctgatttaaagtacttgtctaagccgggcgtggtggtgtgcacctgtaatcccagctacttgggaggca

SEQ ID NO: 136470 - DNA, 80 bp, synthetic construct
  misc_feature 1..80: note = Artificially Synthesized Probe
  source 1..80: mol_type = other DNA
aggataagataagatagataggtgacttgtctactaagttcaacatcagggcttattcaggggaagttcctattgatgac

SEQ ID NO: 136471 - DNA, 80 bp, synthetic construct
  misc_feature 1..80: note = Artificially Synthesized Probe
  source 1..80: mol_type = other DNA
cctctccacgagtttattgttgttctgttgctgttaccttttgtttagtgtgtgttctggactaatttgaagtgtccacc

SEQ ID NO: 136472 - DNA, 80 bp, synthetic construct
  misc_feature 1..80: note = Artificially Synthesized Probe
  source 1..80: mol_type = other DNA
catcgcggttctgctgacacgcagttgatatgtggtcagtgctccagcaggcagctgccaactgtgcctttgccttcact

SEQ ID NO: 136473 - DNA, 80 bp, synthetic construct; identical to SEQ ID NO: 42865
  misc_feature 1..80: note = Artificially Synthesized Probe
  source 1..80: mol_type = other DNA

SEQ ID NO: 136474 - DNA, 80 bp, synthetic construct
  misc_feature 1..80: note = Artificially Synthesized Probe
  source 1..80: mol_type = other DNA
ccaggaaacccagtttttaaatttcaaatagctgtccaggtgtccctgcacctcttatgcatgagccctcgctttgtgcc

SEQ ID NO: 136475 - DNA, 80 bp, synthetic construct
  misc_feature 1..80: note = Artificially Synthesized Probe
  source 1..80: mol_type = other DNA
agacgtgctggctttcccgggctcagacagcagagagacgtgcattgtgttttgttgtaatgcactgtgaacacctgggt

SEQ ID NO: 136476 - DNA, 80 bp, synthetic construct
  misc_feature 1..80: note = Artificially Synthesized Probe
  source 1..80: mol_type = other DNA
agtgcccgcctgctcacacacgtgtccatgtggagtgcccacctgctcatgtgcccatgtggagtgcccacctgctcaca

SEQ ID NO: 136477 - DNA, 80 bp, synthetic construct; identical to SEQ ID NO: 42866
  misc_feature 1..80: note = Artificially Synthesized Probe
  source 1..80: mol_type = other DNA

SEQ ID NO: 136478 - DNA, 80 bp, synthetic construct
  misc_feature 1..80: note = Artificially Synthesized Probe
  source 1..80: mol_type = other DNA
cacgtgccgatgcggagtgcccgcctgctcacacgtgccgatgcggagtgcccgcctgctcacacgtgcccatgtggagt

SEQ ID NO: 136479 - DNA, 80 bp, synthetic construct
  misc_feature 1..80: note = Artificially Synthesized Probe
  source 1..80: mol_type = other DNA
ctcacacgtgccgacgtggagtgcccgcctgctcacgtgcccatatggagtgcccgcctgctcacacgtgccattgtgga

SEQ ID NO: 136480 - DNA, 80 bp, synthetic construct
  misc_feature 1..80: note = Artificially Synthesized Probe
  source 1..80: mol_type = other DNA
tgcctgcctgctcacacacgtgcccatgtggagtgcccgcctgctcacacaaagccctggcatggtggttctgtaggttt

SEQ ID NO: 136481 - DNA, 80 bp, synthetic construct; identical to SEQ ID NO: 42867
  misc_feature 1..80: note = Artificially Synthesized Probe
  source 1..80: mol_type = other DNA

SEQ ID NO: 136482 - DNA, 80 bp, synthetic construct; identical to SEQ ID NO: 42818
  misc_feature 1..80: note = Artificially Synthesized Probe
  source 1..80: mol_type = other DNA

SEQ ID NO: 136483 - DNA, 80 bp, synthetic construct
  misc_feature 1..80: note = Artificially Synthesized Probe
  source 1..80: mol_type = other DNA
ccaccacacctggctattttttgtttttaagatggagtattgctttgttgcccaggttggagtgcagtggtgcgatctca

SEQ ID NO: 136484 - DNA, 80 bp, synthetic construct
  misc_feature 1..80: note = Artificially Synthesized Probe
  source 1..80: mol_type = other DNA
ggatttcaccgtgttagccaggatggtctcaatctcctgaccttgtgacccacctgcttcggcctcccaaagtgctgggg

SEQ ID NO: 136485 - DNA, 80 bp, synthetic construct
  misc_feature 1..80: note = Artificially Synthesized Probe
  source 1..80: mol_type = other DNA
ctgcctcaatctcccaagtagctgggactacaggcgcccgccacctcgcctggctaattttttttttgtatttttagtag

SEQ ID NO: 136486 - DNA, 80 bp, synthetic construct; identical to SEQ ID NO: 42819
  misc_feature 1..80: note = Artificially Synthesized Probe
  source 1..80: mol_type = other DNA

SEQ ID NO: 136487 - DNA, 80 bp, synthetic construct
  misc_feature 1..80: note = Artificially Synthesized Probe
  source 1..80: mol_type = other DNA
aggttttgagacaggctaggtggagaggattcaggtcgggccggaaggcgttcttagccgtaggcctcccaggctgtcca

SEQ ID NO: 136488 - DNA, 80 bp, synthetic construct
  misc_feature 1..80: note = Artificially Synthesized Probe
  source 1..80: mol_type = other DNA
cgtctgctctgcgtggcctgtgccgggcgccccgcgagtggggtccacaccacgctcctccgaagccacggtttcccaag

SEQ ID NO: 136489 - DNA, 80 bp, synthetic construct
  misc_feature 1..80: note = Artificially Synthesized Probe
  source 1..80: mol_type = other DNA
gaaggccctgccacctgtttattttgtggctgtcttgcccttgccagccccttccccaaaacttcactgtttgcttctcg

SEQ ID NO: 136490 - DNA, 80 bp, synthetic construct
  misc_feature 1..80: note = Artificially Synthesized Probe
  source 1..80: mol_type = other DNA
ccagatccttctcctgacagactgtggtcccaggtgtgggacctgccacaggccactggaaacgcaggcctcagggcagc

SEQ ID NO: 136491 - DNA, 80 bp, synthetic construct; identical to SEQ ID NO: 42820
  misc_feature 1..80: note = Artificially Synthesized Probe
  source 1..80: mol_type = other DNA

SEQ ID NO: 136492 - DNA, 80 bp, synthetic construct
  misc_feature 1..80: note = Artificially Synthesized Probe
  source 1..80: mol_type = other DNA
gtgtctgtagtcccagctaatcaggaggctgaggcggctgcactacctgagcctggaaggtcgaggctggggtgagctgt

SEQ ID NO: 136493 - DNA, 80 bp, synthetic construct
  misc_feature 1..80: note = Artificially Synthesized Probe
  source 1..80: mol_type = other DNA
ttgacggaggtagagagctgctttaggctgctggtgccttttgactttgacccgaacccggagacggaatcccttggcat

SEQ ID NO: 136494 - DNA, 80 bp, synthetic construct
  misc_feature 1..80: note = Artificially Synthesized Probe
  source 1..80: mol_type = other DNA
tcccagacagccacaggtgacccctcagatgaggacgaggacagcgacctcgaggagtttgtgcggagccacgggctggg

SEQ ID NO: 136495 - DNA, 80 bp, synthetic construct; identical to SEQ ID NO: 42821
  misc_feature 1..80: note = Artificially Synthesized Probe
  source 1..80: mol_type = other DNA

SEQ ID NO: 136496 - DNA, 80 bp, synthetic construct
  misc_feature 1..80: note = Artificially Synthesized Probe
  source 1..80: mol_type = other DNA
ggctgtgtgggcatcccgtcagctcacaggcctgtcagggtcccgtgtcgccatgaggggtcaggtagcaccggcccttg

SEQ ID NO: 136497 - DNA, 80 bp, synthetic construct
  misc_feature 1..80: note = Artificially Synthesized Probe
  source 1..80: mol_type = other DNA
ttgcgtatgtgtgtggcttcaaatcgctctctttgaggaaccttcttctttggaagcaggcacagcaggtgtcccttcac

SEQ ID NO: 136498 - DNA, 80 bp, synthetic construct
  misc_feature 1..80: note = Artificially Synthesized Probe
  source 1..80: mol_type = other DNA
gccggacactgagggtgccacagcgggggaagccacggcagggcagaactggagttggggtgtccagcggaggagaggcc

SEQ ID NO: 136499 - DNA, 80 bp, synthetic construct; identical to SEQ ID NO: 42822
  misc_feature 1..80: note = Artificially Synthesized Probe
  source 1..80: mol_type = other DNA

SEQ ID NO: 136500 - DNA, 80 bp, synthetic construct
  misc_feature 1..80: note = Artificially Synthesized Probe
  source 1..80: mol_type = other DNA
cccgaagacccccaagcccgcccagggattcccttcccgaggccggagcggggaggcgccgcggggttcagggcgccctg

SEQ ID NO: 136501 - DNA, 80 bp, synthetic construct
  misc_feature 1..80: note = Artificially Synthesized Probe
  source 1..80: mol_type = other DNA
gtcggcgccctcttgtgacctctgtgtgcttctccccagagggcctgaaggtgcaggagaacgaggacaaccttgctctc

SEQ ID NO: 136502 - DNA, 80 bp, synthetic construct
  misc_feature 1..80: note = Artificially Synthesized Probe
  source 1..80: mol_type = other DNA
ccggtgactgaatggcccttaacccgcgagggctctgtccctcacccgcagctttgtcctctgcatcccaggtgtgccag

SEQ ID NO: 136503 - DNA, 80 bp, synthetic construct; identical to SEQ ID NO: 42823
  misc_feature 1..80: note = Artificially Synthesized Probe
  source 1..80: mol_type = other DNA

SEQ ID NO: 136504 - DNA, 80 bp, synthetic construct
  misc_feature 1..80: note = Artificially Synthesized Probe
  source 1..80: mol_type = other DNA
cccggcggaccccagccacaccccaagcccactcagcctcagcaggacctgcctccccagcgagggcttcctgtgagccc

SEQ ID NO: 136505 - DNA, 80 bp, synthetic construct
  misc_feature 1..80: note = Artificially Synthesized Probe
  source 1..80: mol_type = other DNA
tgtcccccccgtgactccttctagggagtcatcagcagtgcggcacctgtcctggcaggcactgtatccaccagaggaga

SEQ ID NO: 136506 - DNA, 80 bp, synthetic construct
  misc_feature 1..80: note = Artificially Synthesized Probe
  source 1..80: mol_type = other DNA
agcggcggcggcggcggggctctgcctctccaggagcccagcgcaggccgcagagccggggccgctgtgagccgagaccg

SEQ ID NO: 136507 - DNA, 80 bp, synthetic construct; identical to SEQ ID NO: 42878
  misc_feature 1..80: note = Artificially Synthesized Probe
  source 1..80: mol_type = other DNA

SEQ ID NO: 136508 - DNA, 80 bp, synthetic construct
  misc_feature 1..80: note = Artificially Synthesized Probe
  source 1..80: mol_type = other DNA
tcttagggcctgctgtgttactgacctgtagaatgtttgttaagtagaagagcaaatgaatgaataaagaaatcagtgaa

SEQ ID NO: 136509 - DNA, 80 bp, synthetic construct
  misc_feature 1..80: note = Artificially Synthesized Probe
  source 1..80: mol_type = other DNA
gattaaatgagattatgcatgtgaagcatgtaacacagtacaggctggaggtcagtcaacagtggctaaagtaatgctgt

SEQ ID NO: 136510 - DNA, 80 bp, synthetic construct
  misc_feature 1..80: note = Artificially Synthesized Probe
  source 1..80: mol_type = other DNA
aaaacagcagtgagctacatatatctaattatttacaagcccatctggattactaacgtagaaagaggtttgggagggtg

SEQ ID NO: 136511 - DNA, 80 bp, synthetic construct
  misc_feature 1..80: note = Artificially Synthesized Probe
  source 1..80: mol_type = other DNA
ttctcaaagatgtttgatgacttgaggaaacgttcatgagaccatgttaaaagaaacaggattcaaaatgttgtatgctg

SEQ ID NO: 136512 - DNA, 80 bp, synthetic construct; identical to SEQ ID NO: 42879
  misc_feature 1..80: note = Artificially Synthesized Probe
  source 1..80: mol_type = other DNA

SEQ ID NO: 136513 - DNA, 80 bp, synthetic construct
  misc_feature 1..80: note = Artificially Synthesized Probe
  source 1..80: mol_type = other DNA
tgattgtgtagatggcccatgcattttgttaaaactcttgacctggctttggttagaaatgaatgtattcttagacactt

SEQ ID NO: 136514 - DNA, 80 bp, synthetic construct
  misc_feature 1..80: note = Artificially Synthesized Probe
  source 1..80: mol_type = other DNA
ttttaaaataccaattttgtttagcactaccaattcccttgtcaataccaggcttccctcatccacaccacaatgacaga

SEQ ID NO: 136515 - DNA, 80 bp, synthetic construct
  misc_feature 1..80: note = Artificially Synthesized Probe
  source 1..80: mol_type = other DNA
cttggggcctccagaaattgatattccaatgcccttgtagtaactttaagagactgtaacttccaattaaaacaacacgc

SEQ ID NO: 136516 - DNA, 80 bp, synthetic construct; identical to SEQ ID NO: 42880
  misc_feature 1..80: note = Artificially Synthesized Probe
  source 1..80: mol_type = other DNA

SEQ ID NO: 136517 - DNA, 80 bp, synthetic construct
  misc_feature 1..80: note = Artificially Synthesized Probe
  source 1..80: mol_type = other DNA
gggtattttgtccaaggagtgttcctgtgaaggctgccctgctcagaggtttgttgggaacttgaatggaagggtaggag

SEQ ID NO: 136518 - DNA, 80 bp, synthetic construct
  misc_feature 1..80: note = Artificially Synthesized Probe
  source 1..80: mol_type = other DNA
gactggccaggttccaagcagatgacaagtgactgttttctaacaaagaggtcagtggcctggttttgcgatgcctgcag

SEQ ID NO: 136519 - DNA, 80 bp, synthetic construct
  misc_feature 1..80: note = Artificially Synthesized Probe
  source 1..80: mol_type = other DNA
aacagctgtttctggtatttcataactaaatctgatcagtttacccaccagctgaaatgtgtgattcaattcttatggcc

SEQ ID NO: 136520 - DNA, 80 bp, synthetic construct
  misc_feature 1..80: note = Artificially Synthesized Probe
  source 1..80: mol_type = other DNA
actgctttgggggtgtctgctaggcccctccctcatagccattgtctcctattctcacagcagtcctagaatggcgggag

SEQ ID NO: 136521 - DNA, 80 bp, synthetic construct; identical to SEQ ID NO: 42881
  misc_feature 1..80: note = Artificially Synthesized Probe
  source 1..80: mol_type = other DNA

SEQ ID NO: 136522 - DNA, 80 bp, synthetic construct
  misc_feature 1..80: note = Artificially Synthesized Probe
  source 1..80: mol_type = other DNA
aaataggcaaacaacagaaacaggactaaataatcttcccaggaaatgctgactgtaagtgagaacagtgagaattacag

SEQ ID NO: 136523 - DNA, 80 bp, synthetic construct
  misc_feature 1..80: note = Artificially Synthesized Probe
  source 1..80: mol_type = other DNA
gatatacttatctttactcatacaggcagatgttgcgtggagacaaattcagagataaagatacgaagaaaaactctcgt

SEQ ID NO: 136524 - DNA, 80 bp, synthetic construct
  misc_feature 1..80: note = Artificially Synthesized Probe
  source 1..80: mol_type = other DNA
tctgcaagtgagatggcagaaattgtctgaatacagggagaggtaattagccattttctgtaaccactaattatagagtt

SEQ ID NO: 136525 - DNA, 80 bp, synthetic construct
  misc_feature 1..80: note = Artificially Synthesized Probe
  source 1..80: mol_type = other DNA
actctcctggtctcccatttccatactcttagatgccgtgaacagattgtcttcatcattggggaaccctctcccagaca

SEQ ID NO: 136526 - DNA, 80 bp, synthetic construct; identical to SEQ ID NO: 42882
  misc_feature 1..80: note = Artificially Synthesized Probe
  source 1..80: mol_type = other DNA

SEQ ID NO: 136527 - DNA, 80 bp, synthetic construct
  misc_feature 1..80: note = Artificially Synthesized Probe
  source 1..80: mol_type = other DNA
actgcacactgtcctgagcttttctcccaacttcatccacttcatactattttaataaagcggtgctgtgtattataaca

SEQ ID NO: 136528 - DNA, 80 bp, synthetic construct
  misc_feature 1..80: note = Artificially Synthesized Probe
  source 1..80: mol_type = other DNA
gtcacctgggatgctgggaaaaattttgatttctgttgtctcccttccagaaaattatttgagagtggggccaacaaatc

SEQ ID NO: 136529 - DNA, 80 bp, synthetic construct; identical to SEQ ID NO: 42883
  misc_feature 1..80: note = Artificially Synthesized Probe
  source 1..80: mol_type = other DNA

SEQ ID NO: 136530 - DNA, 80 bp, synthetic construct
  misc_feature 1..80: note = Artificially Synthesized Probe
  source 1..80: mol_type = other DNA
ggaatttgtgctgtcacaagatttgacccatgggactagtgaatagatagatgggttaggtgagcatgtgacttggctgg

SEQ ID NO: 136531 - DNA, 80 bp, synthetic construct
  misc_feature 1..80: note = Artificially Synthesized Probe
  source 1..80: mol_type = other DNA
ctctcccaaattgtttatagtttctcacagtgggtgccttttgaagtgattgtatttgacagcccagagtgttgggcaca

SEQ ID NO: 136532 - DNA, 80 bp, synthetic construct
  misc_feature 1..80: note = Artificially Synthesized Probe
  source 1..80: mol_type = other DNA
ccatagtaggtgtgaatagaagtggtggcaacagacctgaattcaggtctgccactgactataatactagcttgagaagt

SEQ ID NO: 136533 - DNA, 80 bp, synthetic construct; identical to SEQ ID NO: 42884
  misc_feature 1..80: note = Artificially Synthesized Probe
  source 1..80: mol_type = other DNA

SEQ ID NO: 136534 - DNA, 80 bp, synthetic construct
  misc_feature 1..80: note = Artificially Synthesized Probe
  source 1..80: mol_type = other DNA
caaacgttgatgtctctcagtataattagtgaaaacactcagtgtggaatttcactattaacaatgttggcagtgaggct

SEQ ID NO: 136535 - DNA, 80 bp, synthetic construct
  misc_feature 1..80: note = Artificially Synthesized Probe
  source 1..80: mol_type = other DNA
ggcttctagagaggcctcaggaagcttacagtcatggcagaaagtgaagcagtagcaggcacatcacatggtgaaagcgg

SEQ ID NO: 136536 - DNA, 80 bp, synthetic construct
  misc_feature 1..80: note = Artificially Synthesized Probe
  source 1..80: mol_type = other DNA
acaattgagcatgagatttgggtagggacaactatctgaactgtatcagcaatagagtgtgattataagttatgctgtag

SEQ ID NO: 136537 - DNA, 80 bp, synthetic construct
  misc_feature 1..80: note = Artificially Synthesized Probe
  source 1..80: mol_type = other DNA
gttgtgtgttaatagttctatttacatctctttctccaaggttatacacactctgcatcactaagtcaagacaccattct

SEQ ID NO: 136538 - DNA, 80 bp, synthetic construct; identical to SEQ ID NO: 42885
  misc_feature 1..80: note = Artificially Synthesized Probe
  source 1..80: mol_type = other DNA

SEQ ID NO: 136539 - DNA, 80 bp, synthetic construct
  misc_feature 1..80: note = Artificially Synthesized Probe
  source 1..80: mol_type = other DNA
agctggagggggagtgccagttcccataagtggttattgcccaggttgtgaccttggcttggccagtgattggttcattt

SEQ ID NO: 136540 - DNA, 80 bp, synthetic construct
  misc_feature 1..80: note = Artificially Synthesized Probe
  source 1..80: mol_type = other DNA
ccacccacacaccctccacccctcttggtgtctttggccttttttcctagcttgtttgtttctatgggtgtcttcaagtt

SEQ ID NO: 136541 - DNA, 80 bp, synthetic construct
  misc_feature 1..80: note = Artificially Synthesized Probe
  source 1..80: mol_type = other DNA
tcctttcttctgttgtccaaaggtgaagggtgacaatgtgtcccagatttttttggatattctacaaaaaaatagatatt

SEQ ID NO: 136542 - DNA, 80 bp, synthetic construct; identical to SEQ ID NO: 42886
  misc_feature 1..80: note = Artificially Synthesized Probe
  source 1..80: mol_type = other DNA

SEQ ID NO: 136543 - DNA, 80 bp, synthetic construct
  misc_feature 1..80: note = Artificially Synthesized Probe
  source 1..80: mol_type = other DNA
tgtgctagctcattgttgtttttcagggaaagaactagagagagacacaagtcaccccggaataaagacggcagagggtc

SEQ ID NO: 136544 - DNA, 80 bp, synthetic construct
  misc_feature 1..80: note = Artificially Synthesized Probe
  source 1..80: mol_type = other DNA
gatttttgtctttatttttctagcatgctaattagtttatctatgtcccatggtctcttgttggtctaaggacagcctgt

SEQ ID NO: 136545 - DNA, 80 bp, synthetic construct; identical to SEQ ID NO: 42869
  misc_feature 1..80: note = Artificially Synthesized Probe
  source 1..80: mol_type = other DNA

SEQ ID NO: 136546 - DNA, 80 bp, synthetic construct
  misc_feature 1..80: note = Artificially Synthesized Probe
  source 1..80: mol_type = other DNA
ccacgactcatttcaaaatggaacagtataagggggagaaggaaactcagaaaacctaagaagtttaaaaaacatggggc

SEQ ID NO: 136547 - DNA, 80 bp, synthetic construct
  misc_feature 1..80: note = Artificially Synthesized Probe
  source 1..80: mol_type = other DNA
gcctcagtgtcagtgctgtagtgtggtgtgaaggagcctatggctaactggagaatgcatttcctctgtaaaggaaacag

SEQ ID NO: 136548 - DNA, 80 bp, synthetic construct; identical to SEQ ID NO: 42887
  misc_feature 1..80: note = Artificially Synthesized Probe
  source 1..80: mol_type = other DNA

SEQ ID NO: 136549 - DNA, 80 bp, synthetic construct
  misc_feature 1..80: note = Artificially Synthesized Probe
  source 1..80: mol_type = other DNA
actgaaactggaattcctcagagtacacaaggtgttcttgggacacaaaactacaattgtgggttgaacgtgggattcat

SEQ ID NO: 136550 - DNA, 80 bp, synthetic construct
  misc_feature 1..80: note = Artificially Synthesized Probe
  source 1..80: mol_type = other DNA
tcttctttctctgcatctcctctgcacctcgtagctgagaacactttgagaagctcttggtgttgccccaggatgatctg

SEQ ID NO: 136551 - DNA, 80 bp, synthetic construct; identical to SEQ ID NO: 42888
  misc_feature 1..80: note = Artificially Synthesized Probe
  source 1..80: mol_type = other DNA

SEQ ID NO: 136552 - DNA, 80 bp, synthetic construct
  misc_feature 1..80: note = Artificially Synthesized Probe
  source 1..80: mol_type = other DNA
catgttttggtatgtttcaacagcttattctttttatttttgctgagtagtattccattgtatcagtctaccacaatttg

SEQ ID NO: 136553 - DNA, 80 bp, synthetic construct
  misc_feature 1..80: note = Artificially Synthesized Probe
  source 1..80: mol_type = other DNA
agcctcccgaatagccgggattacaggcacgcaccaccacgcccagctaatttttgtattttcagtagagatgggctttc

SEQ ID NO: 136554 - DNA, 80 bp, synthetic construct
  misc_feature 1..80: note = Artificially Synthesized Probe
  source 1..80: mol_type = other DNA
atagctaagtgtatatttagatttatatgaaaccgccagagtggttttccagaggcactgtaccacggtccacttccacc

SEQ ID NO: 136555 - DNA, 80 bp, synthetic construct
  misc_feature 1..80: note = Artificially Synthesized Probe
  source 1..80: mol_type = other DNA
aactattttagatccatttcttttctcctgagtgccccacgatgcttggaacactgaacctgtgagtagaagttgaaatt

SEQ ID NO: 136556 - DNA, 80 bp, synthetic construct
  misc_feature 1..80: note = Artificially Synthesized Probe
  source 1..80: mol_type = other DNA
tcaccaccaccgcttcttaccatagcccatacatttcataaatcatggtttttttggtcattactagattcggagttatt

SEQ ID NO: 136557 - DNA, 80 bp, synthetic construct; identical to SEQ ID NO: 42889
  misc_feature 1..80: note = Artificially Synthesized Probe
  source 1..80: mol_type = other DNA

SEQ ID NO: 136558 - DNA, 80 bp, synthetic construct
  misc_feature 1..80: note = Artificially Synthesized Probe
  source 1..80: mol_type = other DNA
ctatgcccttgatgtttagttcctcgtgaaaacatgttttagaaagaatttttaagccaatctggccatacacggattcc

SEQ ID NO: 136559 - DNA, 80 bp, synthetic construct
  misc_feature 1..80: note = Artificially Synthesized Probe
  source 1..80: mol_type = other DNA
cagctcactgcaacctccgactcccgggttcaagcgattctcctgcctcagcctcctgagtagctgggattacaggcatg

SEQ ID NO: 136560 - DNA, 80 bp, synthetic construct; identical to SEQ ID NO: 42890
  misc_feature 1..80: note = Artificially Synthesized Probe
  source 1..80: mol_type = other DNA

SEQ ID NO: 136561 - DNA, 80 bp, synthetic construct
  misc_feature 1..80: note = Artificially Synthesized Probe
  source 1..80: mol_type = other DNA
aaacagctccaggccctcagagctgctcaaggcttttcaacccaggggatgataatcaatgttatgtcaatgaatcagcc

SEQ ID NO: 136562 - DNA, 80 bp, synthetic construct
  misc_feature 1..80: note = Artificially Synthesized Probe
  source 1..80: mol_type = other DNA
tgcagcgggccctgcatgttcactgccctttgtagcttttacaaatgacctgtgtcatgtcatcctcactgtcttctccc

SEQ ID NO: 136563 - DNA, 80 bp, synthetic construct
  misc_feature 1..80: note = Artificially Synthesized Probe
  source 1..80: mol_type = other DNA
gacttctagttttcctcacccctattgccttcatccttttacctccgatcctgtggagggatgagctggagccttgtggc

SEQ ID NO: 136564 - DNA, 80 bp, synthetic construct; identical to SEQ ID NO: 42891
  misc_feature 1..80: note = Artificially Synthesized Probe
  source 1..80: mol_type = other DNA

SEQ ID NO: 136565 - DNA, 80 bp, synthetic construct
  misc_feature 1..80: note = Artificially Synthesized Probe
  source 1..80: mol_type = other DNA
aaggatggctgatgtcttgctgggagacagctgctctgtagcacgtgaggggtggtgacagatgccaagagctaggacca

SEQ ID NO: 136566 - DNA, 80 bp, synthetic construct
  misc_feature 1..80: note = Artificially Synthesized Probe
  source 1..80: mol_type = other DNA
ggctcctgtggcagtctggtttccctaactaacatgatattaatgtcttatttttcttaaacacttgttatgcggattaa

SEQ ID NO: 136567 - DNA, 80 bp, synthetic construct
  misc_feature 1..80: note = Artificially Synthesized Probe
  source 1..80: mol_type = other DNA
aaatgatggagaaaggagatgcatagtgatggctgccttctttgactctgaaattggccaatggacaacagataaagtga

SEQ ID NO: 136568 - DNA, 80 bp, synthetic construct
  misc_feature 1..80: note = Artificially Synthesized Probe
  source 1..80: mol_type = other DNA
gagactccaaatgtgtaatccttgagtgttgtgaaaatgtatgcgtgagaaaaagttagaagtcagttgggttgtcatac

SEQ ID NO: 136569 - DNA, 80 bp, synthetic construct; identical to SEQ ID NO: 42892
  misc_feature 1..80: note = Artificially Synthesized Probe
  source 1..80: mol_type = other DNA

SEQ ID NO: 136570 - DNA, 80 bp, synthetic construct
  misc_feature 1..80: note = Artificially Synthesized Probe
  source 1..80: mol_type = other DNA
actgagatgttctctgggtgaatgcagagcctgggacatttgacttcaaagcctttaccctctcccaggctctctgcctc

SEQ ID NO: 136571 - DNA, 80 bp, synthetic construct
  misc_feature 1..80: note = Artificially Synthesized Probe
  source 1..80: mol_type = other DNA
ggctgggctccaggaaggtggctcagcctgtatttggagtcaggccatgctgccaaaccatcttcatgttggtgtgtacc

SEQ ID NO: 136572 - DNA, 80 bp, synthetic construct
  misc_feature 1..80: note = Artificially Synthesized Probe
  source 1..80: mol_type = other DNA
gctctgaagacaagtaggtcaccgctttgctgcatattcatctcagaaggctttcttttcccatgttttgcatcagggaa

SEQ ID NO: 136573 - DNA, 80 bp, synthetic construct; identical to SEQ ID NO: 42893
  misc_feature 1..80: note = Artificially Synthesized Probe
  source 1..80: mol_type = other DNA

SEQ ID NO: 136574 - DNA, 80 bp, synthetic construct
  misc_feature 1..80: note = Artificially Synthesized Probe
  source 1..80: mol_type = other DNA
cgaccccgggtggccggctcccgcctcgggccgggggctccctcccctcctccggagcgctccgggtagtgcttcctctg

SEQ ID NO: 136575 - DNA, 80 bp, synthetic construct
  misc_feature 1..80: note = Artificially Synthesized Probe
  source 1..80: mol_type = other DNA
gtgtgaattccacctgtgtaggtgggaaagggcagggcatcttctcaccataggtcatgcagggtggtgggaccgactta

SEQ ID NO: 136576 - DNA, 80 bp, synthetic construct
  misc_feature 1..80: note = Artificially Synthesized Probe
  source 1..80: mol_type = other DNA
cagctctgctggtcagggcagagctggatgggagaagccagactgattgtgctgcatggctcccaggcttgctgcaaacc

SEQ ID NO: 136577 - DNA, 80 bp, synthetic construct
  misc_feature 1..80: note = Artificially Synthesized Probe
  source 1..80: mol_type = other DNA
taggaccattggtgttcctcctctccctgcctttaataaggccccctttgtccctctcgtggagagcctgagttaggagg

SEQ ID NO: 136578 - DNA, 80 bp, synthetic construct
  misc_feature 1..80: note = Artificially Synthesized Probe
  source 1..80: mol_type = other DNA
tttccttaagatggaaaagattaggtgggcttgtgattggaccatgtttctgttagcaatattggtttggtgttagcagt

SEQ ID NO: 136579 - DNA, 80 bp, synthetic construct; identical to SEQ ID NO: 42894
  misc_feature 1..80: note = Artificially Synthesized Probe
  source 1..80: mol_type = other DNA

SEQ ID NO: 136580 - DNA, 80 bp, synthetic construct
  misc_feature 1..80: note = Artificially Synthesized Probe
  source 1..80: mol_type = other DNA
cttcaccgtggcagcaccctattgggcttaggtgccaagcgatggtgagttcttttttatgttttcaaagatgattttat

SEQ ID NO: 136581 - DNA, 80 bp, synthetic construct
  misc_feature 1..80: note = Artificially Synthesized Probe
  source 1..80: mol_type = other DNA
aaaaagttgttgcagaaagtaagataccataaatagattgagatacttcctaacctctgcccagtgccctaggagttatg

SEQ ID NO: 136582 - DNA, 80 bp, synthetic construct
  misc_feature 1..80: note = Artificially Synthesized Probe
  source 1..80: mol_type = other DNA
cacaccgcttaccccaccgcactttctacagcgtcctggtgtctcacacagtcgctttgtcattttccatacacaccttg

SEQ ID NO: 136583 - DNA, 80 bp, synthetic construct
  misc_feature 1..80: note = Artificially Synthesized Probe
  source 1..80: mol_type = other DNA
ttgaaacctctaaagggaaataagtgtgaatactggtgcacaggcactagtgtaattgactggttgaatgtgaaatggta

SEQ ID NO: 136584 - DNA, 80 bp, synthetic construct; identical to SEQ ID NO: 42895
  misc_feature 1..80: note = Artificially Synthesized Probe
  source 1..80: mol_type = other DNA

SEQ ID NO: 136585 - DNA, 80 bp, synthetic construct
  misc_feature 1..80: note = Artificially Synthesized Probe
  source 1..80: mol_type = other DNA
aacccagaagcattttttgagtgtttcccatgtgccagcctcggtgccagatatttttgtatacattatcctgtttcact

SEQ ID NO: 136586 - DNA, 80 bp, synthetic construct
  misc_feature 1..80: note = Artificially Synthesized Probe
  source 1..80: mol_type = other DNA
ccttaaagtcatagcagtaggtttgagcctttggtcagacctttttaacttcctatacttcacatgtctcaaagaaaata

SEQ ID NO: 136587 - DNA, 80 bp, synthetic construct; identical to SEQ ID NO: 42896
  misc_feature 1..80: note = Artificially Synthesized Probe
  source 1..80: mol_type = other DNA

SEQ ID NO: 136588 - DNA, 80 bp, synthetic construct
  misc_feature 1..80: note = Artificially Synthesized Probe
  source 1..80: mol_type = other DNA
tcccacatttaaggagagaggacgacacaagacagaggctactaggatgttaagttcaatgtcacagacccccacaacca

SEQ ID NO: 136589 - DNA, 80 bp, synthetic construct
  misc_feature 1..80: note = Artificially Synthesized Probe
  source 1..80: mol_type = other DNA
gctgctttaaggaggtatatgaacatcaatgaaaaatgatagctgatagtcatcaacaaggagggagacagagaaaccac

SEQ ID NO: 136590 - DNA, 80 bp, synthetic construct; identical to SEQ ID NO: 42870
  misc_feature 1..80: note = Artificially Synthesized Probe
  source 1..80: mol_type = other DNA

SEQ ID NO: 136591 - DNA, 80 bp, synthetic construct
  misc_feature 1..80: note = Artificially Synthesized Probe
  source 1..80: mol_type = other DNA
tttaagcttcagggtcaaagttttggggtaaaaaatgcttcattcattgagactgagagagagtagcttataaattgaca

SEQ ID NO: 136592 - DNA, 80 bp, synthetic construct
  misc_feature 1..80: note = Artificially Synthesized Probe
  source 1..80: mol_type = other DNA
atctgatcgttttataagaggaaaccttataaaaggtggctctcattttcttcgttgtctgtaagatgtgccatgtaaga

SEQ ID NO: 136593 - DNA, 80 bp, synthetic construct; identical to SEQ ID NO: 42897
  misc_feature 1..80: note = Artificially Synthesized Probe
  source 1..80: mol_type = other DNA

SEQ ID NO: 136594 - DNA, 80 bp, synthetic construct
  misc_feature 1..80: note = Artificially Synthesized Probe
  source 1..80: mol_type = other DNA
gatcccataggactggcatccttacaagaacagataccagagagcttgctctgtctctgcacacacccttagaaaaggct

SEQ ID NO: 136595 - DNA, 80 bp, synthetic construct
  misc_feature 1..80: note = Artificially Synthesized Probe
  source 1..80: mol_type = other DNA
cagcagcctgagctgagacaggaatattacatacactggagacttgtgaccccaaagacttttgacctgttgaatagagc

SEQ ID NO: 136596 - DNA, 80 bp, synthetic construct; identical to SEQ ID NO: 42898
  misc_feature 1..80: note = Artificially Synthesized Probe
  source 1..80: mol_type = other DNA

SEQ ID NO: 136597 - DNA, 80 bp, synthetic construct
  misc_feature 1..80: note = Artificially Synthesized Probe
  source 1..80: mol_type = other DNA
atgtgtgtttttgtactcctgtaattactttttaataaagatattttgccagtccttagctccactccatagcaaagcaa

SEQ ID NO: 136598 - DNA, 80 bp, synthetic construct
  misc_feature 1..80: note = Artificially Synthesized Probe
  source 1..80: mol_type = other DNA
cacactgaagccctgtgtttattcagctgcctcctgccagcggctacagctgggatggcttccctcgcacggcgtctgcc

SEQ ID NO: 136599 - DNA, 80 bp, synthetic construct
  misc_feature 1..80: note = Artificially Synthesized Probe
  source 1..80: mol_type = other DNA
caggtcccgtattctccacactcaccacaagtggctgggtgtgacttgacacggtgtgaaagtggaggggcgcgagcact

SEQ ID NO: 136600 - DNA, 80 bp, synthetic construct; identical to SEQ ID NO: 42899
  misc_feature 1..80: note = Artificially Synthesized Probe
  source 1..80: mol_type = other DNA

SEQ ID NO: 136601 - DNA, 80 bp, synthetic construct
  misc_feature 1..80: note = Artificially Synthesized Probe
  source 1..80: mol_type = other DNA
aatcattcatttataagctgttgtaataaaagaatcattgggtttgtcacaaatgccataagcccagcagatcctcacat

SEQ ID NO: 136602 - DNA, 80 bp, synthetic construct
  misc_feature 1..80: note = Artificially Synthesized Probe
  source 1..80: mol_type = other DNA
cgcggcctacaagcagggctgcatgctccccaggcagactgtggcagagccaagcccctcacttgtagggaagcgtgtct

SEQ ID NO: 136603 - DNA, 80 bp, synthetic construct
  misc_feature 1..80: note = Artificially Synthesized Probe
  source 1..80: mol_type = other DNA
gtgcatatgttgacaaccttgtattgcttagttgctgagaccagaagatccaggtaattgcatgagctattagctacttc

SEQ ID NO: 136604 - DNA, 80 bp, synthetic construct
  misc_feature 1..80: note = Artificially Synthesized Probe
  source 1..80: mol_type = other DNA
tgcactttggagatcattctgtgattcccaagtcctgctgattccacttccttggcgctctgggattagatatcctaggc

SEQ ID NO: 136605 - DNA, 80 bp, synthetic construct
  misc_feature 1..80: note = Artificially Synthesized Probe
  source 1..80: mol_type = other DNA
aggcacgagtgaatccaggtggcccgaggaagagccttcccatgggcctcagcagccacacagagcctctgatctgtttc

SEQ ID NO: 136606 - DNA, 80 bp, synthetic construct; identical to SEQ ID NO: 42900
  misc_feature 1..80: note = Artificially Synthesized Probe
  source 1..80: mol_type = other DNA

SEQ ID NO: 136607 - DNA, 80 bp, synthetic construct
  misc_feature 1..80: note = Artificially Synthesized Probe
  source 1..80: mol_type = other DNA
ttcagcgtccaggggctaattatattctcttctctgggactcacacaaatattgccacaaatgtacctgactgtcagact

SEQ ID NO: 136608 - DNA, 80 bp, synthetic construct
  misc_feature 1..80: note = Artificially Synthesized Probe
  source 1..80: mol_type = other DNA
ttggggattctgcattttagagttctctcaaagacctaggtttgggccctaaaatgcagccaccagagcaggcacacctt

SEQ ID NO: 136609 - DNA, 80 bp, synthetic construct; identical to SEQ ID NO: 42901
  misc_feature 1..80: note = Artificially Synthesized Probe
  source 1..80: mol_type = other DNA

SEQ ID NO: 136610 - DNA, 80 bp, synthetic construct
  misc_feature 1..80: note = Artificially Synthesized Probe
  source 1..80: mol_type = other DNA
actccagtttctgcccccatcattacatgacctcctctctgtgggtctctgtatgtcctctttttttttttttttttttt

SEQ ID NO: 136611 - DNA, 80 bp, synthetic construct
  misc_feature 1..80: note = Artificially Synthesized Probe
  source 1..80: mol_type = other DNA
tttttagtagagatggggtttcactttgttggtcaggctggtcttgaactcctgacctcaaatgatctgcctgtgtcggc

SEQ ID NO: 136612 - DNA, 80 bp, synthetic construct
  misc_feature 1..80: note = Artificially Synthesized Probe
  source 1..80: mol_type = other DNA
acctggggatggtaaatagaggcctgtaagaaacagaatagaaatcacttgttactcagctatagctaatagtagcagtt

SEQ ID NO: 136613 - DNA, 80 bp, synthetic construct
  misc_feature 1..80: note = Artificially Synthesized Probe
  source 1..80: mol_type = other DNA
tgggagacactatttgccactacgggtttctccaagttgtgctgtcctgtgactgaacactgaccctgttgctctattgt

SEQ ID NO: 136614 - DNA, 80 bp, synthetic construct
  misc_feature 1..80: note = Artificially Synthesized Probe
  source 1..80: mol_type = other DNA
tccctcttctcctggtgtacatgttctgtcacggtctctggatcacttgactgtacttattgtttgagtggtactcacca

SEQ ID NO: 136615 - DNA, 80 bp, synthetic construct; identical to SEQ ID NO: 42902
  misc_feature 1..80: note = Artificially Synthesized Probe
  source 1..80: mol_type = other DNA

SEQ ID NO: 136616 - DNA, 80 bp, synthetic construct
  misc_feature 1..80: note = Artificially Synthesized Probe
  source 1..80: mol_type = other DNA
gggaattagcatacaagaagtactttgacattttccacgtgtgaagaaagctgtttttattgacctagctgaagggatca

SEQ ID NO: 136617 - DNA, 80 bp, synthetic construct
  misc_feature 1..80: note = Artificially Synthesized Probe
  source 1..80: mol_type = other DNA
aacatgtaagaatacaagtttgattgcagaagccacaatcaagttcaagggagggtgaatgaatgggaagtagaagggac

SEQ ID NO: 136618 - DNA, 80 bp, synthetic construct; identical to SEQ ID NO: 42903
  misc_feature 1..80: note = Artificially Synthesized Probe
  source 1..80: mol_type = other DNA

SEQ ID NO: 136619 - DNA, 80 bp, synthetic construct
  misc_feature 1..80: note = Artificially Synthesized Probe
  source 1..80: mol_type = other DNA
tactaaaatacaaaaaatgagccaggcgtggtggcatgtgcctgtagtcccagctactccggtaggccgaggcacgagaa

SEQ ID NO: 136620 - DNA, 80 bp, synthetic construct
  misc_feature 1..80: note = Artificially Synthesized Probe
  source 1..80: mol_type = other DNA
ggatcatctgaggtcaggagtgcaagaccagcctggccaacatggcgaaaccccatctccactaaaaatcagccaggcat

SEQ ID NO: 136621 - DNA, 80 bp, synthetic construct
  misc_feature 1..80: note = Artificially Synthesized Probe
  source 1..80: mol_type = other DNA
acaattggtatatggattgggagattggactgatggactcttgatttctctgattcttgaatctctgcttgggtgaacac

SEQ ID NO: 136622 - DNA, 80 bp, synthetic construct
  misc_feature 1..80: note = Artificially Synthesized Probe
  source 1..80: mol_type = other DNA
tttgtacaatgcattatagtttataaatgccttcactgtcattatttcatttgctcttctcaacaaccacatgcagtggt

SEQ ID NO: 136623 - DNA, 80 bp, synthetic construct; identical to SEQ ID NO: 42904
  misc_feature 1..80: note = Artificially Synthesized Probe
  source 1..80: mol_type = other DNA

SEQ ID NO: 136624 - DNA, 80 bp, synthetic construct
  misc_feature 1..80: note = Artificially Synthesized Probe
  source 1..80: mol_type = other DNA
cactgttctaataatttttatgaattatctcatttaatacctaccacagatctataatataagtaaaataaaatctgttg

SEQ ID NO: 136625 - DNA, 80 bp, synthetic construct
  misc_feature 1..80: note = Artificially Synthesized Probe
  source 1..80: mol_type = other DNA
aagttggccgcttcaacatatatggccatataagctcgtggtggctatcgtttatgaattatttactttgaataaccact

SEQ ID NO: 136626 - DNA, 80 bp, synthetic construct
  misc_feature 1..80: note = Artificially Synthesized Probe
  source 1..80: mol_type = other DNA
aactagctttgaagtctcataatgtcatagaacttggaatcatcccaatggatatttaagctcatgagacttaacctgcc

SEQ ID NO: 136627 - DNA, 80 bp, synthetic construct; identical to SEQ ID NO: 42905
  misc_feature 1..80: note = Artificially Synthesized Probe
  source 1..80: mol_type = other DNA

SEQ ID NO: 136628 - DNA, 80 bp, synthetic construct
  misc_feature 1..80: note = Artificially Synthesized Probe
  source 1..80: mol_type = other DNA
atggggaggcagtggatggtctagatatgcagggcattaatttggtttgtatttttttcttcagaatttatctttaaaaa

SEQ ID NO: 136629 - DNA, 80 bp, synthetic construct
  misc_feature 1..80: note = Artificially Synthesized Probe
  source 1..80: mol_type = other DNA
tgattagacacaaaagaccacagcatttctcattccaccctctttgtcctgcaaagaaaataggccagtaggcaatgtgg

SEQ ID NO: 136630 - DNA, 80 bp, synthetic construct
  misc_feature 1..80: note = Artificially Synthesized Probe
  source 1..80: mol_type = other DNA
cacaactaggcgtaccttcatgtgctgttttccacaaatctatgtggtctgggagagagtatttctttccctgggttgtg

SEQ ID NO: 136631 - DNA, 80 bp, synthetic construct; identical to SEQ ID NO: 42906
  misc_feature 1..80: note = Artificially Synthesized Probe
  source 1..80: mol_type = other DNA

SEQ ID NO: 136632 - DNA, 80 bp, synthetic construct
  misc_feature 1..80: note = Artificially Synthesized Probe
  source 1..80: mol_type = other DNA
aagcctgcaagtattatatacccatggaggaaccaaaggacgtgtcccctgtgtgtcagggatttgcatgggcaagcttg

SEQ ID NO: 136633 - DNA, 80 bp, synthetic construct
  misc_feature 1..80: note = Artificially Synthesized Probe
  source 1..80: mol_type = other DNA
ccatatttggagggtggagaggaatcaaggcaagaggaatgctgggcacggacagtggcggagggaatggctgctccctg

SEQ ID NO: 136634 - DNA, 80 bp, synthetic construct
  misc_feature 1..80: note = Artificially Synthesized Probe
  source 1..80: mol_type = other DNA
tcctgatggaacccagtgtcttcactgccttatgtacgtggcacagctcactgttaagatgcgtaatcatcatctggagt

SEQ ID NO: 136635 - DNA, 80 bp, synthetic construct
  misc_feature 1..80: note = Artificially Synthesized Probe
  source 1..80: mol_type = other DNA
gtgagaccccgtccttactaaaaatacaaaatttagctgggcgtggtggcacgtgctgtagtcccagctatttgggagcc

SEQ ID NO: 136636 - DNA, 80 bp, synthetic construct; identical to SEQ ID NO: 42871
  misc_feature 1..80: note = Artificially Synthesized Probe
  source 1..80: mol_type = other DNA

SEQ ID NO: 136637 - DNA, 80 bp, synthetic construct; identical to SEQ ID NO: 42907
  misc_feature 1..80: note = Artificially Synthesized Probe
  source 1..80: mol_type = other DNA

SEQ ID NO: 136638 - DNA, 80 bp, synthetic construct
  misc_feature 1..80: note = Artificially Synthesized Probe
  source 1..80: mol_type = other DNA
cagagccagagggagtgcaggacgcctgcactttccccttgtttggtatttttgagcaaagactctcactctttgggagg

SEQ ID NO: 136639 - DNA, 80 bp, synthetic construct
  misc_feature 1..80: note = Artificially Synthesized Probe
  source 1..80: mol_type = other DNA
tgaggccccgtgctggaaggcggtgggccgggagccctgctggagacagaagccactgctctgggcagtgcatcacactc

SEQ ID NO: 136640 - DNA, 80 bp, synthetic construct; identical to SEQ ID NO: 42908
  misc_feature 1..80: note = Artificially Synthesized Probe
  source 1..80: mol_type = other DNA

SEQ ID NO: 136641 - DNA, 80 bp, synthetic construct
  misc_feature 1..80: note = Artificially Synthesized Probe
  source 1..80: mol_type = other DNA
acaccagggagtgtgtgtgtgtgtgtgtgtgtgtgtgtgtgtgtgtgtatgtgagagagagagagagagagatcagggag

SEQ ID NO: 136642 - DNA, 80 bp, synthetic construct
  misc_feature 1..80: note = Artificially Synthesized Probe
  source 1..80: mol_type = other DNA
tgagaccttcagggcaagcagactagacttctgcaggaagagctctcgtgacacacaaacctccacggaagtccgcctcc

SEQ ID NO: 136643 - DNA, 80 bp, synthetic construct
  misc_feature 1..80: note = Artificially Synthesized Probe
  source 1..80: mol_type = other DNA
cactcaaatatggaatgacgagtgaacaactgagtaactgaatggtcagaattttcaaaatgcagatttgctgttaggag

SEQ ID NO: 136644 - DNA, 80 bp, synthetic construct; identical to SEQ ID NO: 42909
  misc_feature 1..80: note = Artificially Synthesized Probe
  source 1..80: mol_type = other DNA

SEQ ID NO: 136645 - DNA, 80 bp, synthetic construct
  misc_feature 1..80: note = Artificially Synthesized Probe
  source 1..80: mol_type = other DNA
gtaagccgatctgcttagcagagtactagaaaggaaaatccaaagggcaagataaaaatatatctgtggtatttaacatg

SEQ ID NO: 136646 - DNA, 80 bp, synthetic construct
  misc_feature 1..80: note = Artificially Synthesized Probe
  source 1..80: mol_type = other DNA
tacctcgaatgattgtgagggttaaatgagaatcaggtatgtgcaaacccttgctgtatcattgcaaggtgttcttcaaa

SEQ ID NO: 136647 - DNA, 80 bp, synthetic construct
  misc_feature 1..80: note = Artificially Synthesized Probe
  source 1..80: mol_type = other DNA
gtctctgtaacccttacaaagtaactttccaaaccagagctcccttaattacttaatagctctaggcagagctgttgatg

SEQ ID NO: 136648 - DNA, 80 bp, synthetic construct
  misc_feature 1..80: note = Artificially Synthesized Probe
  source 1..80: mol_type = other DNA
gacctagaatatcggaacatagatagtcaccttcatacccctctgccaaaggccagagatagcactccaaggggcagggg

SEQ ID NO: 136649 - DNA, 80 bp, synthetic construct
  misc_feature 1..80: note = Artificially Synthesized Probe
  source 1..80: mol_type = other DNA
tcccgtttcagcctcccgagtagctgggattacaggtgcatgccactacaccccggtaatttttgtatttttagtagaga

SEQ ID NO: 136650 - DNA, 80 bp, synthetic construct; identical to SEQ ID NO: 42910
  misc_feature 1..80: note = Artificially Synthesized Probe
  source 1..80: mol_type = other DNA

SEQ ID NO: 136651 - DNA, 80 bp, synthetic construct
  misc_feature 1..80: note = Artificially Synthesized Probe
  source 1..80: mol_type = other DNA
agttcttgtgtgcctaaagctaaatgtaagttatgagttacaacttcttcctctttcaacaaagggctagatgggatgtg

SEQ ID NO: 136652 - DNA, 80 bp, synthetic construct
  misc_feature 1..80: note = Artificially Synthesized Probe
  source 1..80: mol_type = other DNA
ggatttttcgtttaggacctgcttcttcagtgaaaaagctttgcattaattttgttctttttttctcagtatccagcgag

SEQ ID NO: 136653 - DNA, 80 bp, synthetic construct
  misc_feature 1..80: note = Artificially Synthesized Probe
  source 1..80: mol_type = other DNA
ggcacagttgggtgactatttaagattcatggtacgtttggttcgacttcttctctgggcctacctttatggtacattct

SEQ ID NO: 136654 - DNA, 80 bp, synthetic construct
  misc_feature 1..80: note = Artificially Synthesized Probe
  source 1..80: mol_type = other DNA
ggaagctgttaggaaagggttgcttttcaaaattggtgcacattacccacaaactcagaaagctacctaaatcattaaga

SEQ ID NO: 136655 - DNA, 80 bp, synthetic construct; identical to SEQ ID NO: 42911
  misc_feature 1..80: note = Artificially Synthesized Probe
  source 1..80: mol_type = other DNA

SEQ ID NO: 136656 - DNA, 80 bp, synthetic construct
  misc_feature 1..80: note = Artificially Synthesized Probe
  source 1..80: mol_type = other DNA
aaatttcacctgtgatctaaaaacttaggaaagattcccactagtgaaaccaagtcaccagccaagtagatcatccgtaa

SEQ ID NO: 136657 - DNA, 80 bp, synthetic construct
  misc_feature 1..80: note = Artificially Synthesized Probe
  source 1..80: mol_type = other DNA
atttcctagaaaagttgtggctgccatgacattctagcatagcttgctttccattgtagactcagtgtctcatgtccttt

SEQ ID NO: 136658 - DNA, 80 bp, synthetic construct
  misc_feature 1..80: note = Artificially Synthesized Probe
  source 1..80: mol_type = other DNA
ggctgattatcttcattttgcttttgataaagggtggtgaaggaggttctttctgacatttttgcctaggaagtccagaa

SEQ ID NO: 136659 - DNA, 80 bp, synthetic construct
  misc_feature 1..80: note = Artificially Synthesized Probe
  source 1..80: mol_type = other DNA
gtaacagatggtaacatcttcagcacactctatgtgttgtttttggccaacattttaattgccaccgttcttcatgccct

SEQ ID NO: 136660 - DNA, 80 bp, synthetic construct; identical to SEQ ID NO: 42912
  misc_feature 1..80: note = Artificially Synthesized Probe
  source 1..80: mol_type = other DNA

SEQ ID NO: 136661 - DNA, 80 bp, synthetic construct
  misc_feature 1..80: note = Artificially Synthesized Probe
  source 1..80: mol_type = other DNA
gagtaaagaagcggaaagcaaggtatactgccctcctgatgccagtaccctcttacagacttttaaatttttattttatt

SEQ ID NO: 136662 - DNA, 80 bp, synthetic construct
  misc_feature 1..80: note = Artificially Synthesized Probe
  source 1..80: mol_type = other DNA
cgcccggctaatatttggtatttttagtagagatggggtttcgctatgttggccagactggtctcaaactcctgacctcg

SEQ ID NO: 136663 - DNA, 80 bp, synthetic construct; identical to SEQ ID NO: 42913
  misc_feature 1..80: note = Artificially Synthesized Probe
  source 1..80: mol_type = other DNA

SEQ ID NO: 136664 - DNA, 80 bp, synthetic construct
  misc_feature 1..80: note = Artificially Synthesized Probe
  source 1..80: mol_type = other DNA
cccctggacccttgctggtgttcaccgtcaggtcatattcactgaaggggacagaggtgcattccatcatgtgtgctgtg

SEQ ID NO: 136665 - DNA, 80 bp, synthetic construct
  misc_feature 1..80: note = Artificially Synthesized Probe
  source 1..80: mol_type = other DNA
attgcagagatgaaaaaaggactagtgcatttcccaagctcattggtggcagaattcagaacagagttcatctcccagtc

SEQ ID NO: 136666 - DNA, 80 bp, synthetic construct
  misc_feature 1..80: note = Artificially Synthesized Probe
  source 1..80: mol_type = other DNA
gggtagacaagcgtcattctgttctcacaccctgtggcaggcaccatcctgattacttagtgttgcatcaccttctaggc

SEQ ID NO: 136667 - DNA, 80 bp, synthetic construct
  misc_feature 1..80: note = Artificially Synthesized Probe
  source 1..80: mol_type = other DNA
gcagaactaccacagcatggagagcatcctgcagcacctggccttctgcatcaccaacggcatgacccccaaggtgcgct

SEQ ID NO: 136668 - DNA, 80 bp, synthetic construct; identical to SEQ ID NO: 42914
  misc_feature 1..80: note = Artificially Synthesized Probe
  source 1..80: mol_type = other DNA

SEQ ID NO: 136669 - DNA, 80 bp, synthetic construct
  misc_feature 1..80: note = Artificially Synthesized Probe
  source 1..80: mol_type = other DNA
atactaataactatctcatttgtatgttttgggaactgaaagagcaggatacacatatagtgcaacatataaacagaggt

SEQ ID NO: 136670 - DNA, 80 bp, synthetic construct
  misc_feature 1..80: note = Artificially Synthesized Probe
  source 1..80: mol_type = other DNA
ggtgaggcaagatgctcttgggcagtggctgaaagaggctgctgctgatttttactcagtgtgtctggcatacgaactct

SEQ ID NO: 136671 - DNA, 80 bp, synthetic construct
  misc_feature 1..80: note = Artificially Synthesized Probe
  source 1..80: mol_type = other DNA
ggctggcctttggagtgcgccccttcggtgcgcgtgccggggcggcgggcaggccggcagggagtggccgagcgttggag

SEQ ID NO: 136672 - DNA, 80 bp, synthetic construct
  misc_feature 1..80: note = Artificially Synthesized Probe
  source 1..80: mol_type = other DNA
aaacaagtgtagaggaactgaaacagttaattcatgtgaagtgcttgaaacagtacctgtcatatgatgaggatggacta

SEQ ID NO: 136673 - DNA, 80 bp, synthetic construct
  misc_feature 1..80: note = Artificially Synthesized Probe
  source 1..80: mol_type = other DNA
cagaattagttttactgagtggtcttttagattatgatatttaggacactttaagaagtgttacaagaaacagccatgta

SEQ ID NO: 136674 - DNA, 80 bp, synthetic construct; identical to SEQ ID NO: 42915
  misc_feature 1..80: note = Artificially Synthesized Probe
  source 1..80: mol_type = other DNA

SEQ ID NO: 136675 - DNA, 80 bp, synthetic construct
  misc_feature 1..80: note = Artificially Synthesized Probe
  source 1..80: mol_type = other DNA
tgacagggttgttgtgtaagaattacattgaatatggcaacaaggcatgtaaatcgcatggtagagagtagatgagcttg

SEQ ID NO: 136676 - DNA, 80 bp, synthetic construct
  misc_feature 1..80: note = Artificially Synthesized Probe
  source 1..80: mol_type = other DNA
attcactaatctctctcctaggaaaactatttcctacaatcatatatacacatgaatatacacaaaggtggtgttttgca

SEQ ID NO: 136677 - DNA, 80 bp, synthetic construct; identical to SEQ ID NO: 42916
  misc_feature 1..80: note = Artificially Synthesized Probe
  source 1..80: mol_type = other DNA

SEQ ID NO: 136678 - DNA, 80 bp, synthetic construct
  misc_feature 1..80: note = Artificially Synthesized Probe
  source 1..80: mol_type = other DNA
ttttcagcccctgccccaaaacagtttttaccgataaggagttggtatatattctttcaaatatatgtagatgtttttta

SEQ ID NO: 136679 - DNA, 80 bp, synthetic construct
  misc_feature 1..80: note = Artificially Synthesized Probe
  source 1..80: mol_type = other DNA
agggtttcgccatgttggccaggctggtctagaactcctcagctcaagtaatctacctgcctcagccttgcaaagtgcta

SEQ ID NO: 136680 - DNA, 80 bp, synthetic construct
  misc_feature 1..80: note = Artificially Synthesized Probe
  source 1..80: mol_type = other DNA
tatcattcatagatagagatttacatactacatctctctatacaatgtatattatctttctctatatatatgtagagaga

SEQ ID NO: 136681 - DNA, 80 bp, synthetic construct; identical to SEQ ID NO: 42917
  misc_feature 1..80: note = Artificially Synthesized Probe
  source 1..80: mol_type = other DNA

SEQ ID NO: 136682 - DNA, 80 bp, synthetic construct; identical to SEQ ID NO: 42872
  misc_feature 1..80: note = Artificially Synthesized Probe
  source 1..80: mol_type = other DNA

SEQ ID NO: 136683 - DNA, 80 bp, synthetic construct
  misc_feature 1..80: note = Artificially Synthesized Probe
  source 1..80: mol_type = other DNA
tggtgaatacttttttacatatgtatttgtacaagtatttctgaagcctaagtttcaagtagaggaaaagccaggtcaga

SEQ ID NO: 136684 - DNA, 80 bp, synthetic construct
  misc_feature 1..80: note = Artificially Synthesized Probe
  source 1..80: mol_type = other DNA
aatttatatttcttcttttttttttttttctttgagacggagtctcactctgtcacccaggatggagtgcagtggcacga

SEQ ID NO: 136685 - DNA, 80 bp, synthetic construct
  misc_feature 1..80: note = Artificially Synthesized Probe
  source 1..80: mol_type = other DNA
tctcctgacctcgtgatctgcctgcttcaacctcccaaagttctgggattacaggcatgagccactgcgcccagcctata

SEQ ID NO: 136686 - DNA, 80 bp, synthetic construct; identical to SEQ ID NO: 42918
  misc_feature 1..80: note = Artificially Synthesized Probe
  source 1..80: mol_type = other DNA

SEQ ID NO: 136687 - DNA, 80 bp, synthetic construct
  misc_feature 1..80: note = Artificially Synthesized Probe
  source 1..80: mol_type = other DNA
ggcgtggtggcgcatgcctgtaatcccagctactcaggagactgaggcaggagaattgcttgaaacgggaggcggaggtt

SEQ ID NO: 136688 - DNA, 80 bp, synthetic construct
  misc_feature 1..80: note = Artificially Synthesized Probe
  source 1..80: mol_type = other DNA
cactaatggccaggagttcaagaccagcctggccaacatggtgaaaccccatctctactaaaaacacaaaaattagccag

SEQ ID NO: 136689 - DNA, 80 bp, synthetic construct
  misc_feature 1..80: note = Artificially Synthesized Probe
  source 1..80: mol_type = other DNA
ttgactctgtctgggacctgattgatatatcccagtatgtttctatctgtattactggctcatttcattcttccttcccc

SEQ ID NO: 136690 - DNA, 80 bp, synthetic construct; identical to SEQ ID NO: 42919
  misc_feature 1..80: note = Artificially Synthesized Probe
  source 1..80: mol_type = other DNA

SEQ ID NO: 136691 - DNA, 80 bp, synthetic construct
  misc_feature 1..80: note = Artificially Synthesized Probe
  source 1..80: mol_type = other DNA
tcaagagaagagccttaagaagatttgaagggcagggaagaatgagctgaatgacagtgtttagctggaggaacagcaca

SEQ ID NO: 136692 - DNA, 80 bp, synthetic construct
  misc_feature 1..80: note = Artificially Synthesized Probe
  source 1..80: mol_type = other DNA
tttttgagagctaacactttcatccttacggcagccctgtgacttaggtagtgtcattgcgtccactaatagagagtgta

SEQ ID NO: 136693 - DNA, 80 bp, synthetic construct
  misc_feature 1..80: note = Artificially Synthesized Probe
  source 1..80: mol_type = other DNA
aacttttggttcaggaggaggaagacatggagaaacacatcaagtaggaccataccctaagaatggagtgatgcagccat

SEQ ID NO: 136694 - DNA, 80 bp, synthetic construct
  misc_feature 1..80: note = Artificially Synthesized Probe
  source 1..80: mol_type = other DNA
tgaaggatcaggaaaggcctcttgaaaggagcagtatttaaattaaggagtgatgagtaggaatttggcaaaacagggca

SEQ ID NO: 136695 - DNA, 80 bp, synthetic construct
  misc_feature 1..80: note = Artificially Synthesized Probe
  source 1..80: mol_type = other DNA
attgagtgtgatgagctgggctctggtctaagctggtttatttggaaaaagttctttatagatgtgagagtggatagccg

SEQ ID NO: 136696 - DNA, 80 bp, synthetic construct; identical to SEQ ID NO: 42920
  misc_feature 1..80: note = Artificially Synthesized Probe
  source 1..80: mol_type = other DNA

SEQ ID NO: 136697 - DNA, 80 bp, synthetic construct
  misc_feature 1..80: note = Artificially Synthesized Probe
  source 1..80: mol_type = other DNA
tcttttttaaaaattcttcttcattgctgactgaaactggcagatgattgaccagtatcctttgaccatctgcactttat

SEQ ID NO: 136698 - DNA, 80 bp, synthetic construct
  misc_feature 1..80: note = Artificially Synthesized Probe
  source 1..80: mol_type = other DNA
gccattccttggagcttctgttacagctgtaaaccaaagtggagctggtgcttcttgggagcctcgccttacaactaatt

SEQ ID NO: 136699 - DNA, 80 bp, synthetic construct; identical to SEQ ID NO: 42921
  misc_feature 1..80: note = Artificially Synthesized Probe
  source 1..80: mol_type = other DNA

SEQ ID NO: 136700 - DNA, 80 bp, synthetic construct
  misc_feature 1..80: note = Artificially Synthesized Probe
  source 1..80: mol_type = other DNA
ccccacctggctggcagccctggctctccatgtgtgccctccggctctgtgtgaagcctcaagtcagtcccagcattgtt

SEQ ID NO: 136701 - DNA, 80 bp, synthetic construct
  misc_feature 1..80: note = Artificially Synthesized Probe
  source 1..80: mol_type = other DNA
aggtgcaacttggagccacttaatttcctggggacgtaagttcttcccaagcttagagcaagctgccctgccaaaggaga

SEQ ID NO: 136702 - DNA, 80 bp, synthetic construct
  misc_feature 1..80: note = Artificially Synthesized Probe
  source 1..80: mol_type = other DNA
acactctacagagtttggggaagggagagtagggagcccatcttgtccagaaagattcatctgtggtctgtctgttaaac

SEQ ID NO: 136703 - DNA, 80 bp, synthetic construct
  misc_feature 1..80: note = Artificially Synthesized Probe
  source 1..80: mol_type = other DNA
caaatgaaagatttttgtattttatttaaagtgcagtgggacaccacggaaaggttttaaacagggaagtgacgtctgca

SEQ ID NO: 136704 - DNA, 80 bp, synthetic construct; identical to SEQ ID NO: 42922
  misc_feature 1..80: note = Artificially Synthesized Probe
  source 1..80: mol_type = other DNA

SEQ ID NO: 136705 - DNA, 80 bp, synthetic construct
  misc_feature 1..80: note = Artificially Synthesized Probe
  source 1..80: mol_type = other DNA
ggatctttgtaatacacctgtacctgaaaaagtaaacaacattcttcaattactagccttcagcttgaaaagacatgctg

SEQ ID NO: 136706 - DNA, 80 bp, synthetic construct
  misc_feature 1..80: note = Artificially Synthesized Probe
  source 1..80: mol_type = other DNA
ctttctcaggaaatattttgggaaatggggtaagagatggcaagtgtgagacgggctgtgtcagaggttgctacgtcatg

SEQ ID NO: 136707 - DNA, 80 bp, synthetic construct
  misc_feature 1..80: note = Artificially Synthesized Probe
  source 1..80: mol_type = other DNA
agggtgaagaaaggtttaaattaaagaatttattttctctctcccccttcctctttctcccagtctttgcataggagaat

SEQ ID NO: 136708 - DNA, 80 bp, synthetic construct
  misc_feature 1..80: note = Artificially Synthesized Probe
  source 1..80: mol_type = other DNA
agtgggaacaatgtaaatgacatttaaaagatttaaggtttcagaaagctgcatcccacaattgaacacaatgcattttt

SEQ ID NO: 136709 - DNA, 80 bp, synthetic construct; identical to SEQ ID NO: 42923
  misc_feature 1..80: note = Artificially Synthesized Probe
  source 1..80: mol_type = other DNA

SEQ ID NO: 136710 - DNA, 80 bp, synthetic construct
  misc_feature 1..80: note = Artificially Synthesized Probe
  source 1..80: mol_type = other DNA
ggctaaaattcataaagtaagccctagagaaaatacttgaccaccaaatttttgcccaactatcatcacctcccttcccc

SEQ ID NO: 136711 - DNA, 80 bp, synthetic construct
  misc_feature 1..80: note = Artificially Synthesized Probe
  source 1..80: mol_type = other DNA
atagggataaagtgctcacccctgccctctctacagtagttggtggtagatttctctctcattttgcctcataatcactt

SEQ ID NO: 136712 - DNA, 80 bp, synthetic construct; identical to SEQ ID NO: 42924
  misc_feature 1..80: note = Artificially Synthesized Probe
  source 1..80: mol_type = other DNA

SEQ ID NO: 136713 - DNA, 80 bp, synthetic construct
  misc_feature 1..80: note = Artificially Synthesized Probe
  source 1..80: mol_type = other DNA
gtgagggtgtctgtgtttctgcagtcccctgtgtttgagagatgacttaataaccctgtgttttgagaggtcgctctaaa

SEQ ID NO: 136714 - DNA, 80 bp, synthetic construct
  misc_feature 1..80: note = Artificially Synthesized Probe
  source 1..80: mol_type = other DNA
tccattaaactctttcttgctttaggactctgaaaacagcaagaaacaaacaaacaaaggtcaagctctaagaaaattac

SEQ ID NO: 136715 - DNA, 80 bp, synthetic construct
  misc_feature 1..80: note = Artificially Synthesized Probe
  source 1..80: mol_type = other DNA
attaccctgggaacctgattccttttcattgctttattgtcttttctgataagggattccttctgaccttatcatgagtt

SEQ ID NO: 136716 - DNA, 80 bp, synthetic construct
  misc_feature 1..80: note = Artificially Synthesized Probe
  source 1..80: mol_type = other DNA
atttaaatagtcctgcagcagagaccctgcgattgtaaagtgatttaagtatttctgggtagtgtttgtgatttacggat

SEQ ID NO: 136717 - DNA, 80 bp, synthetic construct
  misc_feature 1..80: note = Artificially Synthesized Probe
  source 1..80: mol_type = other DNA
agtgcagtagcgaaatgagatagtttagacactgttgaaataactgcattgagctttaaccaagtgtatgctcagaaaat

SEQ ID NO: 136718 - DNA, 80 bp, synthetic construct; identical to SEQ ID NO: 42925
  misc_feature 1..80: note = Artificially Synthesized Probe
  source 1..80: mol_type = other DNA

SEQ ID NO: 136719 - DNA, 80 bp, synthetic construct
  misc_feature 1..80: note = Artificially Synthesized Probe
  source 1..80: mol_type = other DNA
ggaaagcttctccactatgctagcaaatatcttaggatatttgatggaaagaacttgagaatcccttctggaaaacccag

SEQ ID NO: 136720 - DNA, 80 bp, synthetic construct
  misc_feature 1..80: note = Artificially Synthesized Probe
  source 1..80: mol_type = other DNA
cctctctctggtgccatggcaacattatgccccaaacttcttccctggttggagtgagaggggctgtccacagccccatc

SEQ ID NO: 136721 - DNA, 80 bp, synthetic construct
  misc_feature 1..80: note = Artificially Synthesized Probe
  source 1..80: mol_type = other DNA
atgtagtaagttttgattcagttgtgcataaaccatagttttctgccctgctgtttgctttcaatggaagacagtaaagg

SEQ ID NO: 136722 - DNA, 80 bp, synthetic construct; identical to SEQ ID NO: 42926
  misc_feature 1..80: note = Artificially Synthesized Probe
  source 1..80: mol_type = other DNA

SEQ ID NO: 136723 - DNA, 80 bp, synthetic construct
  misc_feature 1..80: note = Artificially Synthesized Probe
  source 1..80: mol_type = other DNA
tttggcacttcttttggcactgaaatggtatttgggaagcattatttgaatgtacagttgtttggttttgtatgtgctta

SEQ ID NO: 136724 - DNA, 80 bp, synthetic construct
  misc_feature 1..80: note = Artificially Synthesized Probe
  source 1..80: mol_type = other DNA
atctgcaggtgacaagtttagttcaactgaagttgtagggaatttagacagttgcacatcattgccgttctaggggcctt

SEQ ID NO: 136725 - DNA, 80 bp, synthetic construct; identical to SEQ ID NO: 42927
  misc_feature 1..80: note = Artificially Synthesized Probe
  source 1..80: mol_type = other DNA

SEQ ID NO: 136726 - DNA, 80 bp, synthetic construct; identical to SEQ ID NO: 42873
  misc_feature 1..80: note = Artificially Synthesized Probe
  source 1..80: mol_type = other DNA

SEQ ID NO: 136727 - DNA, 80 bp, synthetic construct
  misc_feature 1..80: note = Artificially Synthesized Probe
  source 1..80: mol_type = other DNA
ttatttgataattgctttggttagaaggactttacatttcctgatttcaagtccagcaccaatttagaaagttcagagat

SEQ ID NO: 136728 - DNA, 80 bp, synthetic construct
  misc_feature 1..80: note = Artificially Synthesized Probe
  source 1..80: mol_type = other DNA
aggcctgagtgagttcctgcataaactgggtagtgggctcttttgacacatttgcaagcatgtaaatgaatgaatgacac

SEQ ID NO: 136729 - DNA, 80 bp, synthetic construct
  misc_feature 1..80: note = Artificially Synthesized Probe
  source 1..80: mol_type = other DNA
tccccccctcatcccaattaactgtaaaatgttttacacatcacattttttatactgtaaacttggaaaataaactgaaa

SEQ ID NO: 136730 - DNA, 80 bp, synthetic construct
  misc_feature 1..80: note = Artificially Synthesized Probe
  source 1..80: mol_type = other DNA
ggtattgctttagctgaggaattgggaagaacaggacaggatactggagagcacctatgagagggatgatggtattccca

SEQ ID NO: 136731 - DNA, 80 bp, synthetic construct
  misc_feature 1..80: note = Artificially Synthesized Probe
  source 1..80: mol_type = other DNA
gttcaaggagcttctgccataggaaatctgtggatggagaagactgagaagagttttgaatgtcaagggataacgtgatg

SEQ ID NO: 136732 - DNA, 80 bp, synthetic construct
  misc_feature 1..80: note = Artificially Synthesized Probe
  source 1..80: mol_type = other DNA
cctagcattgcctagcatggtcttgtaggtgccacttaatatggaggtggatggactaataaatgaaataaaaagcactg

SEQ ID NO: 136733 - DNA, 80 bp, synthetic construct
  misc_feature 1..80: note = Artificially Synthesized Probe
  source 1..80: mol_type = other DNA
gggagggaaaccagactagggtggttggtagagttagataaagcctttccctggagggcagttgggacccatggtttcct

SEQ ID NO: 136734 - DNA, 80 bp, synthetic construct; identical to SEQ ID NO: 42874
  misc_feature 1..80: note = Artificially Synthesized Probe
  source 1..80: mol_type = other DNA

SEQ ID NO: 136735 - DNA, 80 bp, synthetic construct
  misc_feature 1..80: note = Artificially Synthesized Probe
  source 1..80: mol_type = other DNA
ctggaggcctggggggcgagtccggttgcgcctcggagagcgcaacaggcaggtaggagtttactttcaaaaacgccggg

SEQ ID NO: 136736 - DNA, 80 bp, synthetic construct
  misc_feature 1..80: note = Artificially Synthesized Probe
  source 1..80: mol_type = other DNA
gaagggttaattatgaatctagaagagagtgggaaatcggtgttctgggccagggaactggacatttgaatctgcagatc

SEQ ID NO: 136737 - DNA, 80 bp, synthetic construct
  misc_feature 1..80: note = Artificially Synthesized Probe
  source 1..80: mol_type = other DNA
gattgaaattgctagtgaaaatggtggagacagtaggcagaaaaaaagatgactcagcccttgaagtcttctaggaaagt

SEQ ID NO: 136738 - DNA, 80 bp, synthetic construct
  misc_feature 1..80: note = Artificially Synthesized Probe
  source 1..80: mol_type = other DNA
ctgctgtgttttcacatttaatctttacagctacctccccccacaaacccccaccataataggctgccttgcttcctttt

SEQ ID NO: 136739 - DNA, 80 bp, synthetic construct; identical to SEQ ID NO: 42875
  misc_feature 1..80: note = Artificially Synthesized Probe
  source 1..80: mol_type = other DNA

SEQ ID NO: 136740 - DNA, 80 bp, synthetic construct
  misc_feature 1..80: note = Artificially Synthesized Probe
  source 1..80: mol_type = other DNA
ttgactggggcctgatagctaataagtgagtaaaacccgagattggaacccacctttggaaactgtgtctgcttatattt

SEQ ID NO: 136741 - DNA, 80 bp, synthetic construct
  misc_feature 1..80: note = Artificially Synthesized Probe
  source 1..80: mol_type = other DNA
atggcagaggagaagtgaaatggtaagtcagggcatcagggacaaaggaggctggccctgggtggcagaccttggaagtg

SEQ ID NO: 136742 - DNA, 80 bp, synthetic construct; identical to SEQ ID NO: 42876
  misc_feature 1..80: note = Artificially Synthesized Probe
  source 1..80: mol_type = other DNA

SEQ ID NO: 136743 - DNA, 80 bp, synthetic construct
  misc_feature 1..80: note = Artificially Synthesized Probe
  source 1..80: mol_type = other DNA
tttattgcaaagcaatatctaatgaaaatgtgggagaagacccaggagcctgcaaataataaattgcctgctttcatttt

SEQ ID NO: 136744 - DNA, 80 bp, synthetic construct
  misc_feature 1..80: note = Artificially Synthesized Probe
  source 1..80: mol_type = other DNA
atacttttctggtggatgaaccatgttttccttacctattcctgtattctgggggcattcagattgtttctagcatttta

SEQ ID NO: 136745 - DNA, 80 bp, synthetic construct; identical to SEQ ID NO: 42868
  misc_feature 1..80: note = Artificially Synthesized Probe
  source 1..80: mol_type = other DNA

SEQ ID NO: 136746 - DNA, 80 bp, synthetic construct
  misc_feature 1..80: note = Artificially Synthesized Probe
  source 1..80: mol_type = other DNA
ttcgctgggtattgtttttttaaccagcaaactggcagtggggggctgggcattgtgtggagggtcgcagatgtggaaag

SEQ ID NO: 136747 - DNA, 80 bp, synthetic construct
  misc_feature 1..80: note = Artificially Synthesized Probe
  source 1..80: mol_type = other DNA
ttacagttcagttgcttcaccctcactcgcttgttccatgatagagaccccagagaggaggtgtggctttgtcatttatc

SEQ ID NO: 136748 - DNA, 80 bp, synthetic construct; identical to SEQ ID NO: 42877
  misc_feature 1..80: note = Artificially Synthesized Probe
  source 1..80: mol_type = other DNA

SEQ ID NO: 136749 - DNA, 80 bp, synthetic construct
  misc_feature 1..80: note = Artificially Synthesized Probe
  source 1..80: mol_type = other DNA
aagagcatttaacattcttgggagtaactacgtcaccagtttacattttatagccaccattagagttgatgactttagtt

SEQ ID NO: 136750 - DNA, 80 bp, synthetic construct
  misc_feature 1..80: note = Artificially Synthesized Probe
  source 1..80: mol_type = other DNA
cacgccactctcctgcctcagcctcccgagtagctgagactacaggcgcccaccaccacgcctggctaatttttgtattt

SEQ ID NO: 136751 - DNA, 80 bp, synthetic construct
  misc_feature 1..80: note = Artificially Synthesized Probe
  source 1..80: mol_type = other DNA
acttggctgattgatctaagaaactttattgctcagaaccttccctccctgggcaatggaaagagctttggagaccagcc

SEQ ID NO: 136752 - DNA, 80 bp, synthetic construct; identical to SEQ ID NO: 42929
  misc_feature 1..80: note = Artificially Synthesized Probe
  source 1..80: mol_type = other DNA

SEQ ID NO: 136753 - DNA, 80 bp, synthetic construct
  misc_feature 1..80: note = Artificially Synthesized Probe
  source 1..80: mol_type = other DNA
cactgcactccagcctggtgacagagcgagactatgtcgcaaaaaaaaaaaaaaaaaaaaaaaaaaaattagctgggtgc

SEQ ID NO: 136754 - DNA, 80 bp, synthetic construct
  misc_feature 1..80: note = Artificially Synthesized Probe
  source 1..80: mol_type = other DNA
tctctgaagctcttgccattgcccagggagggaaagttctgagcaataaaatttcttaaataaatcggccaagtctgaac

SEQ ID NO: 136755 - DNA, 80 bp, synthetic construct
  misc_feature 1..80: note = Artificially Synthesized Probe
  source 1..80: mol_type = other DNA
tcttccactcccttggttcctctctctgttcttatgggactagatacaaattttcctgctgagcactaaatgagacaaaa

SEQ ID NO: 136756 - DNA, 80 bp, synthetic construct; identical to SEQ ID NO: 42930
  misc_feature 1..80: note = Artificially Synthesized Probe
  source 1..80: mol_type = other DNA

SEQ ID NO: 136757 - DNA, 80 bp, synthetic construct
  misc_feature 1..80: note = Artificially Synthesized Probe
  source 1..80: mol_type = other DNA
aacaaacaaaaaacctggggacctaggatgtctttaagggcccttcagcctctaacagtacttaaaccaattaaaagact

SEQ ID NO: 136758 - DNA, 80 bp, synthetic construct
  misc_feature 1..80: note = Artificially Synthesized Probe
  source 1..80: mol_type = other DNA
ctcacctaacaatagctgtagtgtgtagaagatgcaaccgaatatgctgttggattgattgaggatgctgtcctgtccca

SEQ ID NO: 136759 - DNA, 80 bp, synthetic construct
  misc_feature 1..80: note = Artificially Synthesized Probe
  source 1..80: mol_type = other DNA
ctagtccaagggtcgatgatctcctggcaccgggcacctttggccacgtcaggattccatgtcactgaccctatcctccc

SEQ ID NO: 136760 - DNA, 80 bp, synthetic construct
  misc_feature 1..80: note = Artificially Synthesized Probe
  source 1..80: mol_type = other DNA
cgcgatctcggctcactgaaacctccgcctcccgggttcaagcgattctcctgccttagcccccccgagtagctgggatt

SEQ ID NO: 136761 - DNA, 80 bp, synthetic construct; identical to SEQ ID NO: 42931
  misc_feature 1..80: note = Artificially Synthesized Probe
  source 1..80: mol_type = other DNA

SEQ ID NO: 136762 - DNA, 80 bp, synthetic construct
  misc_feature 1..80: note = Artificially Synthesized Probe
  source 1..80: mol_type = other DNA
aaactgagccacatcaggctcacgttgatagcataggtggtgatacaaacaatgcagaaatcatagagcacgaagaacag

SEQ ID NO: 136763 - DNA, 80 bp, synthetic construct
  misc_feature 1..80: note = Artificially Synthesized Probe
  source 1..80: mol_type = other DNA
cttgagaccatcgtcaatctctaccgccatcctgcctccccgcctttcctggtcaccgttattccttggcatccaattca

SEQ ID NO: 136764 - DNA, 80 bp, synthetic construct
  misc_feature 1..80: note = Artificially Synthesized Probe
  source 1..80: mol_type = other DNA
ctccagaataatcatctggcatcctggccgccctgctccgaggccccacgcctcccactcccgtgcacacctggaggaga

SEQ ID NO: 136765 - DNA, 80 bp, synthetic construct
  misc_feature 1..80: note = Artificially Synthesized Probe
  source 1..80: mol_type = other DNA
cattatctccaggttccgcccgaggcgcccgcggagaaaaccagccacggagcaggggccgggcggcgaatggccgcgcc

SEQ ID NO: 136766 - DNA, 80 bp, synthetic construct; identical to SEQ ID NO: 42932
  misc_feature 1..80: note = Artificially Synthesized Probe
  source 1..80: mol_type = other DNA

SEQ ID NO: 136767 - DNA, 80 bp, synthetic construct
  misc_feature 1..80: note = Artificially Synthesized Probe
  source 1..80: mol_type = other DNA
ctgtaatcccagctactcgggaggctgaggcaggagaattgcttgagccggggagccggaggttgcagtgagccgagatc

SEQ ID NO: 136768 - DNA, 80 bp, synthetic construct
  misc_feature 1..80: note = Artificially Synthesized Probe
  source 1..80: mol_type = other DNA
aggggatccagcgaatacggcgatccgattcgggaaccaagcatttcccctgaaactatttcaggcaccattcgggctgc

SEQ ID NO: 136769 - DNA, 80 bp, synthetic construct
  misc_feature 1..80: note = Artificially Synthesized Probe
  source 1..80: mol_type = other DNA
catcaactcaacagtcagtctctcctttccaagctgtgggccagatgaggtctctccttcacagacgtcccatctgatgg

SEQ ID NO: 136770 - DNA, 80 bp, synthetic construct; identical to SEQ ID NO: 42933
  misc_feature 1..80: note = Artificially Synthesized Probe
  source 1..80: mol_type = other DNA

SEQ ID NO: 136771 - DNA, 80 bp, synthetic construct; identical to SEQ ID NO: 42928
  misc_feature 1..80: note = Artificially Synthesized Probe
  source 1..80: mol_type = other DNA

SEQ ID NO: 136772 - DNA, 80 bp, synthetic construct
  misc_feature 1..80: note = Artificially Synthesized Probe
  source 1..80: mol_type = other DNA
ggggtggatcacctgaggttaggagttcgagagcagcctggccaacatggcaaaaccccatctctaataaaaatacaaaa

SEQ ID NO: 136773 - DNA, 80 bp, synthetic construct
  misc_feature 1..80: note = Artificially Synthesized Probe
  source 1..80: mol_type = other DNA
tagttttagttctaaaaactaaacattaaaaatggtaataacgcaacgcgcatcctcaaatgtcttctgggggcaaatgt

SEQ ID NO: 136774 - DNA, 80 bp, synthetic construct
  misc_feature 1..80: note = Artificially Synthesized Probe
  source 1..80: mol_type = other DNA
tggacttaggtgacccttgcacctcagcctcctgagtagctaagaatgcaagtgcacactaccacgccctgctcatttta

SEQ ID NO: 136775 - DNA, 80 bp, synthetic construct
  misc_feature 1..80: note = Artificially Synthesized Probe
  source 1..80: mol_type = other DNA
cggcccactgctcatttttttttttgacagaatatttatctgaagagtaaagatgatttataactaaactcatacactat

SEQ ID NO: 136776 - DNA, 80 bp, synthetic construct
  misc_feature 1..80: note = Artificially Synthesized Probe
  source 1..80: mol_type = other DNA
caattccagaacatttttcacccccaaaagcaacccctacctgttactgggaagctgttacttcccagtcttccccttcc

SEQ ID NO: 136777 - DNA, 80 bp, synthetic construct
  misc_feature 1..80: note = Artificially Synthesized Probe
  source 1..80: mol_type = other DNA
aggtcagggcacgtatcagcacttcattccttttacgtgaataatattccactgtacggacagaccacgttttggttatt

SEQ ID NO: 136778 - DNA, 80 bp, synthetic construct
  misc_feature 1..80: note = Artificially Synthesized Probe
  source 1..80: mol_type = other DNA
tgtaattaaaaaaaaagaattcagattgctttgctttttctatttggcagagttaccccttcacattaggcatggcacat

SEQ ID NO: 136779 - DNA, 80 bp, synthetic construct; identical to SEQ ID NO: 43042
  misc_feature 1..80: note = Artificially Synthesized Probe
  source 1..80: mol_type = other DNA

SEQ ID NO: 136780 - DNA, 80 bp, synthetic construct
  misc_feature 1..80: note = Artificially Synthesized Probe
  source 1..80: mol_type = other DNA
gctcggtggctcacgcctgtaatccgatactcaggaggctgaggcaggagaattgcttgaacctgggaggcggaggttgc

SEQ ID NO: 136781 - DNA, 80 bp, synthetic construct
  misc_feature 1..80: note = Artificially Synthesized Probe
  source 1..80: mol_type = other DNA
tgaaaccgtctctactaaaaatataaaaaaaaaaattagccaggcgtggtggcgggcgcctgtagtcccagctacgcgga

SEQ ID NO: 136782 - DNA, 80 bp, synthetic construct
  misc_feature 1..80: note = Artificially Synthesized Probe
  source 1..80: mol_type = other DNA
gacaaaaatattcatatagccctatttataaaagtgagaaaaaactaagggtcctacgagaaaagaataattaggggaat

SEQ ID NO: 136783 - DNA, 80 bp, synthetic construct; identical to SEQ ID NO: 43043
  misc_feature 1..80: note = Artificially Synthesized Probe
  source 1..80: mol_type = other DNA

SEQ ID NO: 136784 - DNA, 80 bp, synthetic construct
  misc_feature 1..80: note = Artificially Synthesized Probe
  source 1..80: mol_type = other DNA
cactatgagaggtcgaggcgggtggatcacttgaggccaggagttcaagaccagcctggccaacacggcaaaaccccgcc

SEQ ID NO: 136785 - DNA, 80 bp, synthetic construct
  misc_feature 1..80: note = Artificially Synthesized Probe
  source 1..80: mol_type = other DNA
agcctgggcaacagagtgagactctgtctcaagaaaaaaaaaaaaaagttatagaatatatctagaatgtgtaaacaact

SEQ ID NO: 136786 - DNA, 80 bp, synthetic construct
  misc_feature 1..80: note = Artificially Synthesized Probe
  source 1..80: mol_type = other DNA
ggattataggcacccgccaccacgcctggctaagttttgtatttttagtacagacggggtttcaccatgttggccaggct

SEQ ID NO: 136787 - DNA, 80 bp, synthetic construct
  misc_feature 1..80: note = Artificially Synthesized Probe
  source 1..80: mol_type = other DNA
atactactctacacccatgagaatggctataattaggggaacaaaggagacacgcgtcagcaaggatatggggaaactgg

SEQ ID NO: 136788 - DNA, 80 bp, synthetic construct; identical to SEQ ID NO: 43044
  misc_feature 1..80: note = Artificially Synthesized Probe
  source 1..80: mol_type = other DNA

SEQ ID NO: 136789 - DNA, 80 bp, synthetic construct
  misc_feature 1..80: note = Artificially Synthesized Probe
  source 1..80: mol_type = other DNA
gaaaacctgcacagatattcacagcagtattcaaatagtgaattcacacagtgaaaacctgtacaaatattcacatagtg

SEQ ID NO: 136790 - DNA, 80 bp, synthetic construct
  misc_feature 1..80: note = Artificially Synthesized Probe
  source 1..80: mol_type = other DNA
gtacaaatattcacagtgagttcacacagtgaaaacctgtaaaaatattcacatagtgagttcacacagtgaaaacctgt

SEQ ID NO: 136791 - DNA, 80 bp, synthetic construct
  misc_feature 1..80: note = Artificially Synthesized Probe
  source 1..80: mol_type = other DNA
acctatcctccactgctgcctctgcttcacgaaccagagatcacctaaatcgccctcttagagcccagcccttactcagc

SEQ ID NO: 136792 - DNA, 80 bp, synthetic construct
  misc_feature 1..80: note = Artificially Synthesized Probe
  source 1..80: mol_type = other DNA
agttcacacagtgaaaacctgtacagatattcacagcagtattcaaatagtgaattcacacagtgaaaacctgtacaaat

SEQ ID NO: 136793 - DNA, 80 bp, synthetic construct; identical to SEQ ID NO: 43045
  misc_feature 1..80: note = Artificially Synthesized Probe
  source 1..80: mol_type = other DNA

SEQ ID NO: 136794 - DNA, 80 bp, synthetic construct
  misc_feature 1..80: note = Artificially Synthesized Probe
  source 1..80: mol_type = other DNA
attcacagcagtattcaaatagtgaattcacacagtgaaaacctgtacaaatattcacatagtgagttcacacagtgaaa

SEQ ID NO: 136795 - DNA, 80 bp, synthetic construct
  misc_feature 1..80: note = Artificially Synthesized Probe
  source 1..80: mol_type = other DNA
agtgagttcacacagtgaaaacctgtacagatattcacagcagtattcaaatagtgaattcacacagtgaaaacctgtac

SEQ ID NO: 136796 - DNA, 80 bp, synthetic construct
  misc_feature 1..80: note = Artificially Synthesized Probe
  source 1..80: mol_type = other DNA
aaaacctgcacagatattcacagcagtattcacacagtgaaaacctgtacagatattcacagcagtattcaaatagtgaa

SEQ ID NO: 136797 - DNA, 80 bp, synthetic construct
  misc_feature 1..80: note = Artificially Synthesized Probe
  source 1..80: mol_type = other DNA
ctgtacaaatattcacatagtgagttcacacagtgaaaacctgtacaaatattcacatagtgagttcacacagtgaaaac

SEQ ID NO: 136798 - DNA, 80 bp, synthetic construct
  misc_feature 1..80: note = Artificially Synthesized Probe
  source 1..80: mol_type = other DNA
atagtgagttcacacagtgaaaacctgtacagatattcatagcagtattcaaatagtgaattcacacagtgaaaacctgt

SEQ ID NO: 136799 - DNA, 80 bp, synthetic construct
  misc_feature 1..80: note = Artificially Synthesized Probe
  source 1..80: mol_type = other DNA
gtgcatcacccacacaacggtgcactattcagccatcaaaatgatgcactgacacacacctcatcatgggtaaggctcgc

SEQ ID NO: 136800 - DNA, 80 bp, synthetic construct
  misc_feature 1..80: note = Artificially Synthesized Probe
  source 1..80: mol_type = other DNA
atttcttctggggtaacagaaatgtcctggagttgcacagctgggatcgtggcatcatcttatgaatatatgaaaaccaa

SEQ ID NO: 136801 - DNA, 80 bp, synthetic construct
  misc_feature 1..80: note = Artificially Synthesized Probe
  source 1..80: mol_type = other DNA
tggatgacttttttcctgcttctctattctcgccataatttccaaattttctatcctgaccctgtattattctcttctca

SEQ ID NO: 136802 - DNA, 80 bp, synthetic construct; identical to SEQ ID NO: 43047
  misc_feature 1..80: note = Artificially Synthesized Probe
  source 1..80: mol_type = other DNA

SEQ ID NO: 136803 - DNA, 80 bp, synthetic construct; identical to SEQ ID NO: 42945
  misc_feature 1..80: note = Artificially Synthesized Probe
  source 1..80: mol_type = other DNA

SEQ ID NO: 136804 - DNA, 80 bp, synthetic construct
  misc_feature 1..80: note = Artificially Synthesized Probe
  source 1..80: mol_type = other DNA
cttacactcaaattccatggctgacaattgtacccatatagcttctatctttagaatgtaattctaaaaactggggaagt

SEQ ID NO: 136805 - DNA, 80 bp, synthetic construct
  misc_feature 1..80: note = Artificially Synthesized Probe
  source 1..80: mol_type = other DNA
aaaaagctaatccgatctagtctgcttttctgctttcagcagaaggctgaatgtcatttgctcaccttgaatctaatcat

SEQ ID NO: 136806 - DNA, 80 bp, synthetic construct; identical to SEQ ID NO: 43048
  misc_feature 1..80: note = Artificially Synthesized Probe
  source 1..80: mol_type = other DNA

SEQ ID NO: 136807 - DNA, 80 bp, synthetic construct
  misc_feature 1..80: note = Artificially Synthesized Probe
  source 1..80: mol_type = other DNA
actggagaggtttggaatgatacagtgaaggcggcagtgggggtagggtggggatgacgtacagcctagggaggggcagc

SEQ ID NO: 136808 - DNA, 80 bp, synthetic construct
  misc_feature 1..80: note = Artificially Synthesized Probe
  source 1..80: mol_type = other DNA
caaaatggtagccaaaaaggagtttccaaagagtgtatcctgaaaggaaggtagcatggggaaggggtcaggggccaggg

SEQ ID NO: 136809 - DNA, 80 bp, synthetic construct
  misc_feature 1..80: note = Artificially Synthesized Probe
  source 1..80: mol_type = other DNA
gaataaaggtgaagaaggtcgtgcacggcccacaatgagatgatggtggggaccaggctcagtgtgaacatcagctagag

SEQ ID NO: 136810 - DNA, 80 bp, synthetic construct; identical to SEQ ID NO: 43049
  misc_feature 1..80: note = Artificially Synthesized Probe
  source 1..80: mol_type = other DNA

SEQ ID NO: 136811 - DNA, 80 bp, synthetic construct
  misc_feature 1..80: note = Artificially Synthesized Probe
  source 1..80: mol_type = other DNA
atttaaagaccagttctgccaaaacatttcaaatatgaaaaccaaaaaggaaggagctggggaaaaaggctcaagtgttc

SEQ ID NO: 136812 - DNA, 80 bp, synthetic construct
  misc_feature 1..80: note = Artificially Synthesized Probe
  source 1..80: mol_type = other DNA
gtctgacagttggccaactgccattctgacagtcctgtacctgtgttttacaataaagcattgtctttgcaaacttgagt

SEQ ID NO: 136813 - DNA, 80 bp, synthetic construct; identical to SEQ ID NO: 43050
  misc_feature 1..80: note = Artificially Synthesized Probe
  source 1..80: mol_type = other DNA

SEQ ID NO: 136814 - DNA, 80 bp, synthetic construct
  misc_feature 1..80: note = Artificially Synthesized Probe
  source 1..80: mol_type = other DNA
cccacgggggacagcgcagtatctggatatggggtcagcagaggctctggagacagcatagttactccaggctgaggatg

SEQ ID NO: 136815 - DNA, 80 bp, synthetic construct
  misc_feature 1..80: note = Artificially Synthesized Probe
  source 1..80: mol_type = other DNA
gccgtgggagctcagggggctactcccagggtggggcctgtgctcaatgctgaaccctcatgcttgtcgccgggcagatc

SEQ ID NO: 136816 - DNA, 80 bp, synthetic construct
  misc_feature 1..80: note = Artificially Synthesized Probe
  source 1..80: mol_type = other DNA
atacttctcaggagaaactcaggattccttcagtgggatctctgttcctatttcctttccttttctgtttttttgagaca

SEQ ID NO: 136817 - DNA, 80 bp, synthetic construct
  misc_feature 1..80: note = Artificially Synthesized Probe
  source 1..80: mol_type = other DNA
actacaggcgtgcgccatcaggccccgctattatttcccaggtagctgggactacaggcatgcaccaccacgccccacta

SEQ ID NO: 136818 - DNA, 80 bp, synthetic construct
  misc_feature 1..80: note = Artificially Synthesized Probe
  source 1..80: mol_type = other DNA
ggtagctgggactacaggcgtgcgccaccacgccccactaatatttcccgggtagctgggactacaggcgtgcaccacca

SEQ ID NO: 136819 - DNA, 80 bp, synthetic construct; identical to SEQ ID NO: 43051
  misc_feature 1..80: note = Artificially Synthesized Probe
  source 1..80: mol_type = other DNA

SEQ ID NO: 136820 - DNA, 80 bp, synthetic construct
  misc_feature 1..80: note = Artificially Synthesized Probe
  source 1..80: mol_type = other DNA
gccccactaatatttcctgggtagctgggactacaggggtgcaccaccacgccccactaatatttcccgggtagctggga

SEQ ID NO: 136821 - DNA, 80 bp, synthetic construct
  misc_feature 1..80: note = Artificially Synthesized Probe
  source 1..80: mol_type = other DNA
gcgccatcaggccccgctattatttcccaggtagctgggactacaggcatgcaccaccatgcccagctaatatttcccgg

SEQ ID NO: 136822 - DNA, 80 bp, synthetic construct; identical to SEQ ID NO: 43052
  misc_feature 1..80: note = Artificially Synthesized Probe
  source 1..80: mol_type = other DNA

SEQ ID NO: 136823 - DNA, 80 bp, synthetic construct
  misc_feature 1..80: note = Artificially Synthesized Probe
  source 1..80: mol_type = other DNA
cacaccaccacgccccgctaatatttcccgggtagctgggactacaggcgtgcaccaccacgcccagctaatatttcccg

SEQ ID NO: 136824 - DNA, 80 bp, synthetic construct
  misc_feature 1..80: note = Artificially Synthesized Probe
  source 1..80: mol_type = other DNA
gtgcaccaccacacctgctaatattttccgggtagctgggactacaggcgcgcaccaccacgccccgctaatatttcccg

SEQ ID NO: 136825 - DNA, 80 bp, synthetic construct
  misc_feature 1..80: note = Artificially Synthesized Probe
  source 1..80: mol_type = other DNA
tgccccatcctccctgtgcaggtggtctcagcggggcatgcagggcctgtcagaatcctgaagtgcacgtgcccggggcc

SEQ ID NO: 136826 - DNA, 80 bp, synthetic construct
  misc_feature 1..80: note = Artificially Synthesized Probe
  source 1..80: mol_type = other DNA
ctacaggcgtgcaccaccacaccccgctaatatttcccgggtagctgggactacaggcatgcaccaccacaccccgctaa

SEQ ID NO: 136827 - DNA, 80 bp, synthetic construct
  misc_feature 1..80: note = Artificially Synthesized Probe
  source 1..80: mol_type = other DNA
gtagctgggactacaggcgtgcaccaccacgccccgctaatatttcccgggtagctgggactacaggcgtgcaccaccac

SEQ ID NO: 136828 - DNA, 80 bp, synthetic construct; identical to SEQ ID NO: 43053
  misc_feature 1..80: note = Artificially Synthesized Probe
  source 1..80: mol_type = other DNA

SEQ ID NO: 136829 - DNA, 80 bp, synthetic construct
  misc_feature 1..80: note = Artificially Synthesized Probe
  source 1..80: mol_type = other DNA
tggtttcagctgcattttattctaataaagtcgtgagtgagcccaagtaggcaggaccttgtggtctggcctcaaaattg

SEQ ID NO: 136830 - DNA, 80 bp, synthetic construct
  misc_feature 1..80: note = Artificially Synthesized Probe
  source 1..80: mol_type = other DNA
gggacaaagagggaattgcactgaagtctcagggttttaggaccagaagggtaggagctagagaaggtggcagaggtgaa

SEQ ID NO: 136831 - DNA, 80 bp, synthetic construct; identical to SEQ ID NO: 42935
  misc_feature 1..80: note = Artificially Synthesized Probe
  source 1..80: mol_type = other DNA

SEQ ID NO: 136832 - DNA, 80 bp, synthetic construct; identical to SEQ ID NO: 43054
  misc_feature 1..80: note = Artificially Synthesized Probe
  source 1..80: mol_type = other DNA

SEQ ID NO: 136833 - DNA, 80 bp, synthetic construct
  misc_feature 1..80: note = Artificially Synthesized Probe
  source 1..80: mol_type = other DNA
aaactcctgaccttaagtgatcatcccacctcagcctctcaaagtgctgggattataggcatgagccaccgcacccggcc

SEQ ID NO: 136834 - DNA, 80 bp, synthetic construct
  misc_feature 1..80: note = Artificially Synthesized Probe
  source 1..80: mol_type = other DNA
ggaaaaaaatatttccttgcttctctacctactctcactccaacttccttcccaagagacatccactgttaccatttcca

SEQ ID NO: 136835 - DNA, 80 bp, synthetic construct
  misc_feature 1..80: note = Artificially Synthesized Probe
  source 1..80: mol_type = other DNA
ccacttttaaactgctgtgtagcatctcacagtatggatgcactgtaatttatttaaccatcttcaataataaacattac

SEQ ID NO: 136836 - DNA, 80 bp, synthetic construct
  misc_feature 1..80: note = Artificially Synthesized Probe
  source 1..80: mol_type = other DNA
ggacatgcatatttacatttctgaaagttctgataatgacaatttatgcaccaaaaaggttgtatcaagctgtatactag

SEQ ID NO: 136837 - DNA, 80 bp, synthetic construct; identical to SEQ ID NO: 43055
  misc_feature 1..80: note = Artificially Synthesized Probe
  source 1..80: mol_type = other DNA

SEQ ID NO: 136838 - DNA, 80 bp, synthetic construct; identical to SEQ ID NO: 42946
  misc_feature 1..80: note = Artificially Synthesized Probe
  source 1..80: mol_type = other DNA

SEQ ID NO: 136839 - DNA, 80 bp, synthetic construct
  misc_feature 1..80: note = Artificially Synthesized Probe
  source 1..80: mol_type = other DNA
tcttcatggcttttgggttttatgtcttatttagtctccctaatattctgttattaaaggataggtgggcatggtggctc

SEQ ID NO: 136840 - DNA, 80 bp, synthetic construct
  misc_feature 1..80: note = Artificially Synthesized Probe
  source 1..80: mol_type = other DNA
caggcttagtggtgtgcacctgtaatcccagctacccaggaggctgaggcaggagaattgcttgaacctgggaggcagag

SEQ ID NO: 136841 - DNA, 80 bp, synthetic construct; identical to SEQ ID NO: 43056
  misc_feature 1..80: note = Artificially Synthesized Probe
  source 1..80: mol_type = other DNA

SEQ ID NO: 136842 - DNA, 80 bp, synthetic construct
  misc_feature 1..80: note = Artificially Synthesized Probe
  source 1..80: mol_type = other DNA
tacaattcctgtattcaaggagctcaatgtctacgcatatgtaatgatgcaaacagaaattaccatagaacagagtcact

SEQ ID NO: 136843 - DNA, 80 bp, synthetic construct
  misc_feature 1..80: note = Artificially Synthesized Probe
  source 1..80: mol_type = other DNA
ctcctgggctgaagtgatcctcctgcctcagcctcccaagtgattgggactaaggggtgcacccgactaatttttttttt

SEQ ID NO: 136844 - DNA, 80 bp, synthetic construct
  misc_feature 1..80: note = Artificially Synthesized Probe
  source 1..80: mol_type = other DNA
caaaaagaagaggtttccggagtgaaaatttggacctggtctttgactacacagagacaaacgtttaaccggcagtacta

SEQ ID NO: 136845 - DNA, 80 bp, synthetic construct; identical to SEQ ID NO: 43057
  misc_feature 1..80: note = Artificially Synthesized Probe
  source 1..80: mol_type = other DNA

SEQ ID NO: 136846 - DNA, 80 bp, synthetic construct
  misc_feature 1..80: note = Artificially Synthesized Probe
  source 1..80: mol_type = other DNA
aaatgatgacagggcattctagaaacatgatgtactgcgtaagagacaaacaataaatccacacagagtgttctgtatca

SEQ ID NO: 136847 - DNA, 80 bp, synthetic construct
  misc_feature 1..80: note = Artificially Synthesized Probe
  source 1..80: mol_type = other DNA
cagggtgcagccggagaagcgttttgcaagaaacccctcaaagttagttgttctttgaatagcaaaaagaagcaatttca

SEQ ID NO: 136848 - DNA, 80 bp, synthetic construct
  misc_feature 1..80: note = Artificially Synthesized Probe
  source 1..80: mol_type = other DNA
aaaccctgaggtctgttaccaccttagtctaaaacctggggaatagaaatacatattctaaacaagatttttaaggtgaa

SEQ ID NO: 136849 - DNA, 80 bp, synthetic construct
  misc_feature 1..80: note = Artificially Synthesized Probe
  source 1..80: mol_type = other DNA
ttgtatttttagtagagatagtgtttcaccatgttggccaggctggtctcaaactcctgacctcaagagatccgcccacc

SEQ ID NO: 136850 - DNA, 80 bp, synthetic construct
  misc_feature 1..80: note = Artificially Synthesized Probe
  source 1..80: mol_type = other DNA
acttgcccgccgagcgctaaatggattctgagaggtttccttaagcagcagcaacccagactagaaacgccccagtggcc

SEQ ID NO: 136851 - DNA, 80 bp, synthetic construct; identical to SEQ ID NO: 43058
  misc_feature 1..80: note = Artificially Synthesized Probe
  source 1..80: mol_type = other DNA

SEQ ID NO: 136852 - DNA, 80 bp, synthetic construct
  misc_feature 1..80: note = Artificially Synthesized Probe
  source 1..80: mol_type = other DNA
gctggtgaacagggacatgtgagttcttagtaaggactaagctaccatcttctcacacaaataaatgacaaaatgaaaca

SEQ ID NO: 136853 - DNA, 80 bp, synthetic construct
  misc_feature 1..80: note = Artificially Synthesized Probe
  source 1..80: mol_type = other DNA
ccaggctccatttctcactgagctggtttgcaagtctgctgaactgtaggctaaaaagaattagctaacagtttctcaag

SEQ ID NO: 136854 - DNA, 80 bp, synthetic construct
  misc_feature 1..80: note = Artificially Synthesized Probe
  source 1..80: mol_type = other DNA
gaattcactctttattttgttaattgggatttagaaggtgacaatctcaactcatcttaaaccaatgctaaaaggttctc

SEQ ID NO: 136855 - DNA, 80 bp, synthetic construct
  misc_feature 1..80: note = Artificially Synthesized Probe
  source 1..80: mol_type = other DNA
catctcatcttcacatgccactacagcaatgtcctaaatttgctgaatcctaaatacacctgcgctgctgtttgaagtat

SEQ ID NO: 136856 - DNA, 80 bp, synthetic construct; identical to SEQ ID NO: 43059
  misc_feature 1..80: note = Artificially Synthesized Probe
  source 1..80: mol_type = other DNA

SEQ ID NO: 136857 - DNA, 80 bp, synthetic construct
  misc_feature 1..80: note = Artificially Synthesized Probe
  source 1..80: mol_type = other DNA
cataaaccaccaagcctggcccaatgtgtttcttagaataacagccacacagaatggagctcagtgcacctgtagttgca

SEQ ID NO: 136858 - DNA, 80 bp, synthetic construct
  misc_feature 1..80: note = Artificially Synthesized Probe
  source 1..80: mol_type = other DNA
gtgaacaccaagcgtgaacactaccatgaactatggaccatcactctgggtaatgatgatgtgtccgtgtagtttcatga

SEQ ID NO: 136859 - DNA, 80 bp, synthetic construct
  misc_feature 1..80: note = Artificially Synthesized Probe
  source 1..80: mol_type = other DNA
tcccttaaaacacttttgccccacaatgtgtttgaaacatgcaatttgactttactttccatgattttaataaaaaagac

SEQ ID NO: 136860 - DNA, 80 bp, synthetic construct; identical to SEQ ID NO: 43060
  misc_feature 1..80: note = Artificially Synthesized Probe
  source 1..80: mol_type = other DNA

SEQ ID NO: 136861 - DNA, 80 bp, synthetic construct
  misc_feature 1..80: note = Artificially Synthesized Probe
  source 1..80: mol_type = other DNA
actctggctttagctttgtcatagatatactgatttaaccttcctgggctttgggtttttttaatataaagagactatct

SEQ ID NO: 136862 - DNA, 80 bp, synthetic construct
  misc_feature 1..80: note = Artificially Synthesized Probe
  source 1..80: mol_type = other DNA
cttcaagaccagcctggccaacgtggtgaaaccccatctctactaaaaatacaaaaatgagccaggtgtggttacacaca

SEQ ID NO: 136863 - DNA, 80 bp, synthetic construct
  misc_feature 1..80: note = Artificially Synthesized Probe
  source 1..80: mol_type = other DNA
cacactgtattgggagtgggaaattcattcaacaaatgtttcctctgtgtctgctatatcattaaggtagatactaccct

SEQ ID NO: 136864 - DNA, 80 bp, synthetic construct
  misc_feature 1..80: note = Artificially Synthesized Probe
  source 1..80: mol_type = other DNA
aggtcaatctggtgtataagccttgagttggtggagaaggtagagatggcttgaggcaagaactacaccacggaaagtcc

SEQ ID NO: 136865 - DNA, 80 bp, synthetic construct; identical to SEQ ID NO: 43061
  misc_feature 1..80: note = Artificially Synthesized Probe
  source 1..80: mol_type = other DNA

SEQ ID NO: 136866 - DNA, 80 bp, synthetic construct
  misc_feature 1..80: note = Artificially Synthesized Probe
  source 1..80: mol_type = other DNA
gtactatgattcctgagaaatgggtggcaaaaggagctggtataagtaagtggatttctgcaaaaacaaaaatgccaaag

SEQ ID NO: 136867 - DNA, 80 bp, synthetic construct
  misc_feature 1..80: note = Artificially Synthesized Probe
  source 1..80: mol_type = other DNA
gtggttagaagtagaaatggcagttcaaggaaacaagcaaaaacacagagccaagcaaaagggaaccaacctctgtattt

SEQ ID NO: 136868 - DNA, 80 bp, synthetic construct
  misc_feature 1..80: note = Artificially Synthesized Probe
  source 1..80: mol_type = other DNA
tcagcagatcacctgaggtcagttcgagaccagcctgaccaacatggagaaaccccgtccctactaaaaaatacaaaaat

SEQ ID NO: 136869 - DNA, 80 bp, synthetic construct; identical to SEQ ID NO: 43062
  misc_feature 1..80: note = Artificially Synthesized Probe
  source 1..80: mol_type = other DNA

SEQ ID NO: 136870 - DNA, 80 bp, synthetic construct
  misc_feature 1..80: note = Artificially Synthesized Probe
  source 1..80: mol_type = other DNA
gacagtcatgtaatacgaggtctaaattagtaggcttgacagcactcatgtttcaataaaattcaaatgttacatctgat

SEQ ID NO: 136871 - DNA, 80 bp, synthetic construct
  misc_feature 1..80: note = Artificially Synthesized Probe
  source 1..80: mol_type = other DNA
gtctctagtaaaacaaacatgtaccaggtgaaaagccagaaacaacctttaaacctcatggcttctcacagccactactt

SEQ ID NO: 136872 - DNA, 80 bp, synthetic construct
  misc_feature 1..80: note = Artificially Synthesized Probe
  source 1..80: mol_type = other DNA
caagcgacagaaaaactaccctgtgaatctgcaatgagatattttgggaaatgggcagtaatgatcacgggaaatttgac

SEQ ID NO: 136873 - DNA, 80 bp, synthetic construct; identical to SEQ ID NO: 43063
  misc_feature 1..80: note = Artificially Synthesized Probe
  source 1..80: mol_type = other DNA

SEQ ID NO: 136874 - DNA, 80 bp, synthetic construct
  misc_feature 1..80: note = Artificially Synthesized Probe
  source 1..80: mol_type = other DNA
caattcaatgaccaaagttttgctgagactttctttacagtacgtcactgagtgaacatgactggctaagtggactacag

SEQ ID NO: 136875 - DNA, 80 bp, synthetic construct
  misc_feature 1..80: note = Artificially Synthesized Probe
  source 1..80: mol_type = other DNA
tcaactgaagttccacgcttctaaagtgttatataagctgcctgagacctgagtttttaaaatgttgacttactccatgc

SEQ ID NO: 136876 - DNA, 80 bp, synthetic construct
  misc_feature 1..80: note = Artificially Synthesized Probe
  source 1..80: mol_type = other DNA
tttttaaaaatcttaattcccacttgtgaaatggaaatagtaacacaaggcctttaagaaaagcccatagtctttaaaaa

SEQ ID NO: 136877 - DNA, 80 bp, synthetic construct
  misc_feature 1..80: note = Artificially Synthesized Probe
  source 1..80: mol_type = other DNA
tggcgggtgcctgtagtcctagctactcaggaggctgaggcaagagaatggcatgaactcggaaggtggagcttgcagtg

SEQ ID NO: 136878 - DNA, 80 bp, synthetic construct; identical to SEQ ID NO: 42947
  misc_feature 1..80: note = Artificially Synthesized Probe
  source 1..80: mol_type = other DNA

SEQ ID NO: 136879 - DNA, 80 bp, synthetic construct; identical to SEQ ID NO: 43064
  misc_feature 1..80: note = Artificially Synthesized Probe
  source 1..80: mol_type = other DNA

SEQ ID NO: 136880 - DNA, 80 bp, synthetic construct
  misc_feature 1..80: note = Artificially Synthesized Probe
  source 1..80: mol_type = other DNA
cggatcacctgaggttgggagttcgaaaccatcctggccaacatggagaaaccccgtctctactaaaaatacaaaaatta

SEQ ID NO: 136881 - DNA, 80 bp, synthetic construct
  misc_feature 1..80: note = Artificially Synthesized Probe
  source 1..80: mol_type = other DNA
caaacaaaaaaaaaaacctgaaacgggcagctgagtacacgtgaggctaaccttgtcctaagaagagcccagtgcttctc

SEQ ID NO: 136882 - DNA, 80 bp, synthetic construct
  misc_feature 1..80: note = Artificially Synthesized Probe
  source 1..80: mol_type = other DNA
ggaatatgaggttctccaaggaaagtgctttacaaataagcatctgattactagcagacagccacaaaatgtgaagacat

SEQ ID NO: 136883 - DNA, 80 bp, synthetic construct; identical to SEQ ID NO: 43065
  misc_feature 1..80: note = Artificially Synthesized Probe
  source 1..80: mol_type = other DNA

SEQ ID NO: 136884 - DNA, 80 bp, synthetic construct
  misc_feature 1..80: note = Artificially Synthesized Probe
  source 1..80: mol_type = other DNA
gagctaaaagcagttccccaagcaggatggcagcttgttacatgagaagtgcaaccaacagctcccaagtgaaatgctgt

SEQ ID NO: 136885 - DNA, 80 bp, synthetic construct
  misc_feature 1..80: note = Artificially Synthesized Probe
  source 1..80: mol_type = other DNA
acataagatggtggatgctccacccagttgtcttttcaccaaaccaaaaccagtaagttatgtaacaatcctaaaaacac

SEQ ID NO: 136886 - DNA, 80 bp, synthetic construct
  misc_feature 1..80: note = Artificially Synthesized Probe
  source 1..80: mol_type = other DNA
atttaaaatccagggtggtctcattaccctgaacctgcagcagaaggatttgcagctgccagcgagcatgactggaatga

SEQ ID NO: 136887 - DNA, 80 bp, synthetic construct; identical to SEQ ID NO: 43066
  misc_feature 1..80: note = Artificially Synthesized Probe
  source 1..80: mol_type = other DNA

SEQ ID NO: 136888 - DNA, 80 bp, synthetic construct
  misc_feature 1..80: note = Artificially Synthesized Probe
  source 1..80: mol_type = other DNA
acctgaggtcatatgtattaatctttatacagttccactgggggatagtcatgctgtgggaaaatgttatagaatcacat

SEQ ID NO: 136889 - DNA, 80 bp, synthetic construct
  misc_feature 1..80: note = Artificially Synthesized Probe
  source 1..80: mol_type = other DNA
gagagatccagtctccacgaaaaacaaactaaaataaaaagtacccaggtgcgggggcacacacctgtactcgggaggct

SEQ ID NO: 136890 - DNA, 80 bp, synthetic construct
  misc_feature 1..80: note = Artificially Synthesized Probe
  source 1..80: mol_type = other DNA
acctacatgagctcttcacccttacctacatgagctgcttcatcctcacccacatcccaccggtgtctgaggccctgctg

SEQ ID NO: 136891 - DNA, 80 bp, synthetic construct; identical to SEQ ID NO: 43067
  misc_feature 1..80: note = Artificially Synthesized Probe
  source 1..80: mol_type = other DNA

SEQ ID NO: 136892 - DNA, 80 bp, synthetic construct
  misc_feature 1..80: note = Artificially Synthesized Probe
  source 1..80: mol_type = other DNA
taaataaacaataaattattaaccgtagtcaccctattgttctaccaaatactagatcgtatcattctaactgtattttt

SEQ ID NO: 136893 - DNA, 80 bp, synthetic construct
  misc_feature 1..80: note = Artificially Synthesized Probe
  source 1..80: mol_type = other DNA
ttcatttcacatcacgtccagttcaatccatgcagctgcagtgttttgggtttcctgttaacccagaaaccaacaagctc

SEQ ID NO: 136894 - DNA, 80 bp, synthetic construct
  misc_feature 1..80: note = Artificially Synthesized Probe
  source 1..80: mol_type = other DNA
aaatgatcactagtgagggccactgagtgaccatttaagttcagaagtttgtgaatatgaaaacggaactgcaaggaaaa

SEQ ID NO: 136895 - DNA, 80 bp, synthetic construct
  misc_feature 1..80: note = Artificially Synthesized Probe
  source 1..80: mol_type = other DNA
atggatcataccccacgatcaatcacgccccgcaatggatcaggccccgcaatcacgtcccgcaatcgatcacgccccac

SEQ ID NO: 136896 - DNA, 80 bp, synthetic construct; identical to SEQ ID NO: 43068
  misc_feature 1..80: note = Artificially Synthesized Probe
  source 1..80: mol_type = other DNA

SEQ ID NO: 136897 - DNA, 80 bp, synthetic construct
  misc_feature 1..80: note = Artificially Synthesized Probe
  source 1..80: mol_type = other DNA
cttattccaaatactttccaaggtttttccagtatcttcaaaacttttaaaaccactcttagaggtgggtttgtagcctt

SEQ ID NO: 136898 - DNA, 80 bp, synthetic construct
  misc_feature 1..80: note = Artificially Synthesized Probe
  source 1..80: mol_type = other DNA
ttccttcagcgtgaactttgacatgagagaaaagaataaaattgtacttcggagcttcttgtgatgcgcacacgaggagg

SEQ ID NO: 136899 - DNA, 80 bp, synthetic construct
  misc_feature 1..80: note = Artificially Synthesized Probe
  source 1..80: mol_type = other DNA
agttctcctcacaggggaagtccagccgctagccagggcacccacagtcacattctcaggactactggccatctcaatga

SEQ ID NO: 136900 - DNA, 80 bp, synthetic construct; identical to SEQ ID NO: 43069
  misc_feature 1..80: note = Artificially Synthesized Probe
  source 1..80: mol_type = other DNA

SEQ ID NO: 136901 - DNA, 80 bp, synthetic construct
  misc_feature 1..80: note = Artificially Synthesized Probe
  source 1..80: mol_type = other DNA
ttacattagctatatctcctaatgctatccctcccccctccccccaccccacaacaggccccggtgtgtgatgttcccct

SEQ ID NO: 136902 - DNA, 80 bp, synthetic construct
  misc_feature 1..80: note = Artificially Synthesized Probe
  source 1..80: mol_type = other DNA
gggcttcagacgttcctcactcgaagtacagtcttgttaaatggggctttaaaatatccatttgctgattagattcagtt

SEQ ID NO: 136903 - DNA, 80 bp, synthetic construct
  misc_feature 1..80: note = Artificially Synthesized Probe
  source 1..80: mol_type = other DNA
gtattccatggtgtatatgtgccacattttcttaatccagtctatcattgatggacatttgggttggttccaagtctttg

SEQ ID NO: 136904 - DNA, 80 bp, synthetic construct; identical to SEQ ID NO: 43070
  misc_feature 1..80: note = Artificially Synthesized Probe
  source 1..80: mol_type = other DNA

SEQ ID NO: 136905 - DNA, 80 bp, synthetic construct
  misc_feature 1..80: note = Artificially Synthesized Probe
  source 1..80: mol_type = other DNA
cttcttgatggggttgtttgtttttttcttgtaaatttgtttgagttatttatagattctggatattagcccttcatcag

SEQ ID NO: 136906 - DNA, 80 bp, synthetic construct
  misc_feature 1..80: note = Artificially Synthesized Probe
  source 1..80: mol_type = other DNA
gcccatgcctatgtcctgaatggtattgcctaggttttcttctagggtttttatggttttaggtctaacatttaagtctt

SEQ ID NO: 136907 - DNA, 80 bp, synthetic construct
  misc_feature 1..80: note = Artificially Synthesized Probe
  source 1..80: mol_type = other DNA
gatgtgtggtattatttctgagggctctgttctgttccattgatctacatctctgttttggtaccagtaccatgctgttt

SEQ ID NO: 136908 - DNA, 80 bp, synthetic construct
  misc_feature 1..80: note = Artificially Synthesized Probe
  source 1..80: mol_type = other DNA
cttgatggggatggcactgaatctataaattaccttgggcagtatggccattttcacgatattggttcttcctatccatg

SEQ ID NO: 136909 - DNA, 80 bp, synthetic construct; identical to SEQ ID NO: 43071
  misc_feature 1..80: note = Artificially Synthesized Probe
  source 1..80: mol_type = other DNA

SEQ ID NO: 136910 - DNA, 80 bp, synthetic construct
  misc_feature 1..80: note = Artificially Synthesized Probe
  source 1..80: mol_type = other DNA
ccttggccagatcttccaacactatgttgaataggaatggtgaaagagggcatccctgtcttgtgccagttttcaaaggg

SEQ ID NO: 136911 - DNA, 80 bp, synthetic construct
  misc_feature 1..80: note = Artificially Synthesized Probe
  source 1..80: mol_type = other DNA
agataatcatgtggtttttgtctttggttctgtttatatgatgaattacattttttgatttgcatatgttgaaccagcct

SEQ ID NO: 136912 - DNA, 80 bp, synthetic construct
  misc_feature 1..80: note = Artificially Synthesized Probe
  source 1..80: mol_type = other DNA
gtatcaggatgatgctggtctcataaaatgagttagggaggattccctctttttctattgattggaatagtttcagaagg

SEQ ID NO: 136913 - DNA, 80 bp, synthetic construct
  misc_feature 1..80: note = Artificially Synthesized Probe
  source 1..80: mol_type = other DNA
gcttgaccacatttgatcacaagagaatcccacgccaacaagaaattcatttgtcagaaggaattactgagccctaataa

SEQ ID NO: 136914 - DNA, 80 bp, synthetic construct; identical to SEQ ID NO: 43072
  misc_feature 1..80: note = Artificially Synthesized Probe
  source 1..80: mol_type = other DNA

SEQ ID NO: 136915 - DNA, 80 bp, synthetic construct
  misc_feature 1..80: note = Artificially Synthesized Probe
  source 1..80: mol_type = other DNA
ttttgaagggttttttgtgtctctatctccctcagttctgctctgatcttagttatttcttgacttctgcgagcttttga

SEQ ID NO: 136916 - DNA, 80 bp, synthetic construct
  misc_feature 1..80: note = Artificially Synthesized Probe
  source 1..80: mol_type = other DNA
cattggtttcaaagaacatcttcatgtctgccttcatttcattatgtatccagtagtcattcaggagcaggttgttcagt

SEQ ID NO: 136917 - DNA, 80 bp, synthetic construct; identical to SEQ ID NO: 43073
  misc_feature 1..80: note = Artificially Synthesized Probe
  source 1..80: mol_type = other DNA

SEQ ID NO: 136918 - DNA, 80 bp, synthetic construct
  misc_feature 1..80: note = Artificially Synthesized Probe
  source 1..80: mol_type = other DNA
gtgcatatatatttaggatagttagctcttcttgttgaattgatccctttaccattaagtaatggccttctttgtctctt

SEQ ID NO: 136919 - DNA, 80 bp, synthetic construct
  misc_feature 1..80: note = Artificially Synthesized Probe
  source 1..80: mol_type = other DNA
atgggtcttgactcttgagccaatttgccagtctgtgtcttttaattggagcatttagcccatatacatttaaggttaat

SEQ ID NO: 136920 - DNA, 80 bp, synthetic construct
  misc_feature 1..80: note = Artificially Synthesized Probe
  source 1..80: mol_type = other DNA
ggagctcttgtagggcaggcctggtggtgaaaaaatctctcagcatttgcttgtctgtaaaggattttatttctccttca

SEQ ID NO: 136921 - DNA, 80 bp, synthetic construct; identical to SEQ ID NO: 43074
  misc_feature 1..80: note = Artificially Synthesized Probe
  source 1..80: mol_type = other DNA

SEQ ID NO: 136922 - DNA, 80 bp, synthetic construct; identical to SEQ ID NO: 42948
  misc_feature 1..80: note = Artificially Synthesized Probe
  source 1..80: mol_type = other DNA

SEQ ID NO: 136923 - DNA, 80 bp, synthetic construct
  misc_feature 1..80: note = Artificially Synthesized Probe
  source 1..80: mol_type = other DNA
tttggtcttttcacatagtcccgtatttcttggaggctttgttcatttctttttactctttattctctaaacttctcttc

SEQ ID NO: 136924 - DNA, 80 bp, synthetic construct
  misc_feature 1..80: note = Artificially Synthesized Probe
  source 1..80: mol_type = other DNA
agccattcgtctaatcttttttcaaggtttttagcttctttgtgatgggttcaaacttcctcctttagctcagagaagtt

SEQ ID NO: 136925 - DNA, 80 bp, synthetic construct
  misc_feature 1..80: note = Artificially Synthesized Probe
  source 1..80: mol_type = other DNA
atctacctttggtttttgatgatggtgacgtacagatggggttttggtgtggatgtcctttctgtttgttagttttcctt

SEQ ID NO: 136926 - DNA, 80 bp, synthetic construct
  misc_feature 1..80: note = Artificially Synthesized Probe
  source 1..80: mol_type = other DNA
tgtgaggtgtcagtctgcccctactggagggtgcctcccagttaggctactcgggggtcagggacccacttgaggaggca

SEQ ID NO: 136927 - DNA, 80 bp, synthetic construct; identical to SEQ ID NO: 43075
  misc_feature 1..80: note = Artificially Synthesized Probe
  source 1..80: mol_type = other DNA

SEQ ID NO: 136928 - DNA, 80 bp, synthetic construct
  misc_feature 1..80: note = Artificially Synthesized Probe
  source 1..80: mol_type = other DNA
gagtgacccaattttccaggtgccgtctgtcacacctttgcttgtctatgaaagggaattccctgaccccttgcgcttcc

SEQ ID NO: 136929 - DNA, 80 bp, synthetic construct
  misc_feature 1..80: note = Artificially Synthesized Probe
  source 1..80: mol_type = other DNA
gactagagctgttcctattcagccatcttagaactgcctatgtcgccatgttcttcattttcaaagtcacctcttgagat

SEQ ID NO: 136930 - DNA, 80 bp, synthetic construct; identical to SEQ ID NO: 43076
  misc_feature 1..80: note = Artificially Synthesized Probe
  source 1..80: mol_type = other DNA

SEQ ID NO: 136931 - DNA, 80 bp, synthetic construct
  misc_feature 1..80: note = Artificially Synthesized Probe
  source 1..80: mol_type = other DNA
gggattacaggcgcctgccaccacgcctggctaattttttgtatttttagtagagacagggtttcaccatgttggccagg

SEQ ID NO: 136932 - DNA, 80 bp, synthetic construct
  misc_feature 1..80: note = Artificially Synthesized Probe
  source 1..80: mol_type = other DNA
atgactcagatgaaagcaactattcccttacagacatcactgatggtatctatagacccaaacctcaatcccatgcattt

SEQ ID NO: 136933 - DNA, 80 bp, synthetic construct
  misc_feature 1..80: note = Artificially Synthesized Probe
  source 1..80: mol_type = other DNA
ccgagtggactcatgccgatgagtcatgtttttctcgttatacacgtaacacattcttgttgcaaaaaattggggaaata

SEQ ID NO: 136934 - DNA, 80 bp, synthetic construct
  misc_feature 1..80: note = Artificially Synthesized Probe
  source 1..80: mol_type = other DNA
taaccatgaaaaggttcccactacaaagaggtagctcaactgataactgtcagcaaagcacatatatgtgccaaactacc

SEQ ID NO: 136935 - DNA, 80 bp, synthetic construct
  misc_feature 1..80: note = Artificially Synthesized Probe
  source 1..80: mol_type = other DNA
gggactataggtgtgcacctccatgcccagctaattcttgtattttttgtagagatggagttttgccatgttgcccaggc

SEQ ID NO: 136936 - DNA, 80 bp, synthetic construct; identical to SEQ ID NO: 43077
  misc_feature 1..80: note = Artificially Synthesized Probe
  source 1..80: mol_type = other DNA

SEQ ID NO: 136937 - DNA, 80 bp, synthetic construct
  misc_feature 1..80: note = Artificially Synthesized Probe
  source 1..80: mol_type = other DNA
gacagcaaattatgaacattgttcagatatctgtggataaagtagccctgagacttttgttaccttgtgagtgacagtcc

SEQ ID NO: 136938 - DNA, 80 bp, synthetic construct
  misc_feature 1..80: note = Artificially Synthesized Probe
  source 1..80: mol_type = other DNA
cagcctagaatcttgagtgaccccatgagacacttctgagatcaccaaggacaacactcatacttggcaaccgaggacaa

SEQ ID NO: 136939 - DNA, 80 bp, synthetic construct
  misc_feature 1..80: note = Artificially Synthesized Probe
  source 1..80: mol_type = other DNA
catacttggaaaccgaggacaacactcatacttggaaagcgaggacaacactcatacttggaaagcgaggacaacactca

SEQ ID NO: 136940 - DNA, 80 bp, synthetic construct
  misc_feature 1..80: note = Artificially Synthesized Probe
  source 1..80: mol_type = other DNA
tggcaaccgaggacaacactcatacttggaaagcgaggacaacactcatacttggaaagcgaggacaacactcatacttg

SEQ ID NO: 136941 - DNA, 80 bp, synthetic construct; identical to SEQ ID NO: 43079
  misc_feature 1..80: note = Artificially Synthesized Probe
  source 1..80: mol_type = other DNA

SEQ ID NO: 136942 - DNA, 80 bp, synthetic construct; identical to SEQ ID NO: 43078
  misc_feature 1..80: note = Artificially Synthesized Probe
  source 1..80: mol_type = other DNA

SEQ ID NO: 136943 - DNA, 80 bp, synthetic construct
  misc_feature 1..80: note = Artificially Synthesized Probe
  source 1..80: mol_type = other DNA
ctcatacttggaaagcgaggacaacactcatacttggaaatcaaggacaacactcatacttggaaatcaaggacaacact

SEQ ID NO: 136944 - DNA, 80 bp, synthetic construct
  misc_feature 1..80: note = Artificially Synthesized Probe
  source 1..80: mol_type = other DNA
cttggaaagcgaggacaacactcatacttggaaagtgaggacaacactcatacttggaaagtgaggacaacactcatact

SEQ ID NO: 136945 - DNA, 80 bp, synthetic construct
  misc_feature 1..80: note = Artificially Synthesized Probe
  source 1..80: mol_type = other DNA
aggatcgcttgagctcaggaatttgagaccagcctgggcaacatggcaaaaccccgcctctacaaaaaatgcaaaaatta

SEQ ID NO: 136946 - DNA, 80 bp, synthetic construct
  misc_feature 1..80: note = Artificially Synthesized Probe
  source 1..80: mol_type = other DNA
gtccatttccaggttgagttcttttttcactccatcatgagacctgccaagcctttctcacatttataagaggttagaaa

SEQ ID NO: 136947 - DNA, 80 bp, synthetic construct
  misc_feature 1..80: note = Artificially Synthesized Probe
  source 1..80: mol_type = other DNA
aaaaactctttcctccaatgctacattaagcatggaagcatttgccagaagggtagttggaagaattagctatgctcaaa

SEQ ID NO: 136948 - DNA, 80 bp, synthetic construct
  misc_feature 1..80: note = Artificially Synthesized Probe
  source 1..80: mol_type = other DNA
caaatagctatttctctcatttccagatggttctaccatcagcacgtaaacataagggaagcaaattcaccagaaaggat

SEQ ID NO: 136949 - DNA, 80 bp, synthetic construct
  misc_feature 1..80: note = Artificially Synthesized Probe
  source 1..80: mol_type = other DNA
gctccacccctcaccagtcacatatcaaatcctggctcgcccctcaccagtcacatatcaaatcctggctcgcccctcac

SEQ ID NO: 136950 - DNA, 80 bp, synthetic construct; identical to SEQ ID NO: 43080
  misc_feature 1..80: note = Artificially Synthesized Probe
  source 1..80: mol_type = other DNA

SEQ ID NO: 136951 - DNA, 80 bp, synthetic construct
  misc_feature 1..80: note = Artificially Synthesized Probe
  source 1..80: mol_type = other DNA
cactttttgtatttttggtagagacagggtttcaccatgttgtccaggctggtcttgaactccagagctcaagcgatctg

SEQ ID NO: 136952 - DNA, 80 bp, synthetic construct
  misc_feature 1..80: note = Artificially Synthesized Probe
  source 1..80: mol_type = other DNA
ttgcgaaatgaactaaaagataagtaaatcctcctgtgtttgcagcaaccttatgtgataatgaatgtttggagcactga

SEQ ID NO: 136953 - DNA, 80 bp, synthetic construct; identical to SEQ ID NO: 43081
  misc_feature 1..80: note = Artificially Synthesized Probe
  source 1..80: mol_type = other DNA

SEQ ID NO: 136954 - DNA, 80 bp, synthetic construct
  misc_feature 1..80: note = Artificially Synthesized Probe
  source 1..80: mol_type = other DNA
tggaaatattcttcccattctgtgcattgccattttaccctgctgatagtgttttttcatgcacaagttttaaaattttt

SEQ ID NO: 136955 - DNA, 80 bp, synthetic construct
  misc_feature 1..80: note = Artificially Synthesized Probe
  source 1..80: mol_type = other DNA
gttattaacgaatccctatgctggtttctgccaaataaaagttagttctgtcatgttcctgccatgcacaaccccttcct

SEQ ID NO: 136956 - DNA, 80 bp, synthetic construct
  misc_feature 1..80: note = Artificially Synthesized Probe
  source 1..80: mol_type = other DNA
ttctaattcataccacggactggagactggctcccacacacatctccgtgaccgtgtggccactgcctcctaagggtctt

SEQ ID NO: 136957 - DNA, 80 bp, synthetic construct
  misc_feature 1..80: note = Artificially Synthesized Probe
  source 1..80: mol_type = other DNA
cacaactcctccataaaactaaatcagaatcatactgtatgtatattcaattttataacctggttttctcacttaatata

SEQ ID NO: 136958 - DNA, 80 bp, synthetic construct
  misc_feature 1..80: note = Artificially Synthesized Probe
  source 1..80: mol_type = other DNA
taagggtcttatcttttctaattcataccacggactggagactggctcccacacacatctccgtgaccgtgtggcctctg

SEQ ID NO: 136959 - DNA, 80 bp, synthetic construct
  misc_feature 1..80: note = Artificially Synthesized Probe
  source 1..80: mol_type = other DNA
gtggccactgcctcctaagggtcttatcttttctaatccataccactgactggagattggctcccacacacatctccgtg

SEQ ID NO: 136960 - DNA, 80 bp, synthetic construct
  misc_feature 1..80: note = Artificially Synthesized Probe
  source 1..80: mol_type = other DNA
catctccgtgaccgcgtggccactgcctcctaagggtcttatcttttctaatccatatcacggactggagactggctccc

SEQ ID NO: 136961 - DNA, 80 bp, synthetic construct; identical to SEQ ID NO: 43082
  misc_feature 1..80: note = Artificially Synthesized Probe
  source 1..80: mol_type = other DNA

SEQ ID NO: 136962 - DNA, 80 bp, synthetic construct; identical to SEQ ID NO: 43083
  misc_feature 1..80: note = Artificially Synthesized Probe
  source 1..80: mol_type = other DNA

SEQ ID NO: 136963 - DNA, 80 bp, synthetic construct
  misc_feature 1..80: note = Artificially Synthesized Probe
  source 1..80: mol_type = other DNA
tcttctattaatgtctttcttctccatacaaaaatggtgaactctttgaaggcagagagtgtgtatttcttatctttgtg

SEQ ID NO: 136964 - DNA, 80 bp, synthetic construct
  misc_feature 1..80: note = Artificially Synthesized Probe
  source 1..80: mol_type = other DNA
agcaaatctgcctgctccatccaggctccttctttcttgcagctcataaagtcctgttcgcctgctttcttggctgcctc

SEQ ID NO: 136965 - DNA, 80 bp, synthetic construct
  misc_feature 1..80: note = Artificially Synthesized Probe
  source 1..80: mol_type = other DNA
gttgcaacctcccattcctgccccggagcgtcagaaataataaaaagattttcatgaaaatccaaatccagacaagaaaa

SEQ ID NO: 136966 - DNA, 80 bp, synthetic construct; identical to SEQ ID NO: 43084
  misc_feature 1..80: note = Artificially Synthesized Probe
  source 1..80: mol_type = other DNA

SEQ ID NO: 136967 - DNA, 80 bp, synthetic construct
  misc_feature 1..80: note = Artificially Synthesized Probe
  source 1..80: mol_type = other DNA
taatggctgtgcagtactctgtgatgtgtgtggttgtgtaaactttaagatctttccaatggaatggacccatttacacc

SEQ ID NO: 136968 - DNA, 80 bp, synthetic construct
  misc_feature 1..80: note = Artificially Synthesized Probe
  source 1..80: mol_type = other DNA
ttgatcagactaatagagaatgtcaaaaataaaaataaggccgggcacggtggctcacacctgtcatcccagcactttgg

SEQ ID NO: 136969 - DNA, 80 bp, synthetic construct
  misc_feature 1..80: note = Artificially Synthesized Probe
  source 1..80: mol_type = other DNA
ttaaacccaggaggcggcgattgcagtgagctgagattgtgccactgcactccagcctgggcgatggagtgagacttggt

SEQ ID NO: 136970 - DNA, 80 bp, synthetic construct; identical to SEQ ID NO: 43085
  misc_feature 1..80: note = Artificially Synthesized Probe
  source 1..80: mol_type = other DNA

SEQ ID NO: 136971 - DNA, 80 bp, synthetic construct
  misc_feature 1..80: note = Artificially Synthesized Probe
  source 1..80: mol_type = other DNA
ggaggacagaggaatggaacaggcaatgaagatcttacactagaggacagaggaatgaacaggcaatgaaaatcttacac

SEQ ID NO: 136972 - DNA, 80 bp, synthetic construct
  misc_feature 1..80: note = Artificially Synthesized Probe
  source 1..80: mol_type = other DNA
acactggaggacagaggaatggaacaggcaccgaagatcttacactagaggacagaggaatggaacaggcaccgaagatc

SEQ ID NO: 136973 - DNA, 80 bp, synthetic construct
  misc_feature 1..80: note = Artificially Synthesized Probe
  source 1..80: mol_type = other DNA
atcttacactggaggacagaggaatggaacaggcaatgaagatcttacactggaggacagaggaatggaacaggcactga

SEQ ID NO: 136974 - DNA, 80 bp, synthetic construct
  misc_feature 1..80: note = Artificially Synthesized Probe
  source 1..80: mol_type = other DNA
tgaagatcttacagtggaggacagaggaatggaacaggcactgaagagcttacacttgaggacagagaaatggaacaggc

SEQ ID NO: 136975 - DNA, 80 bp, synthetic construct
  misc_feature 1..80: note = Artificially Synthesized Probe
  source 1..80: mol_type = other DNA
tgggagagacatgagaatattatgcccatgagaaaagaatcagctagatatgctggaaattaaaaagctggatttttaaa

SEQ ID NO: 136976 - DNA, 80 bp, synthetic construct; identical to SEQ ID NO: 43086
  misc_feature 1..80: note = Artificially Synthesized Probe
  source 1..80: mol_type = other DNA

SEQ ID NO: 136977 - DNA, 80 bp, synthetic construct
  misc_feature 1..80: note = Artificially Synthesized Probe
  source 1..80: mol_type = other DNA
aacataagaagatcccacctctacagaaaaatgttaaaaatcagccaggcatggtggtatttgcctgtattcctggctac

SEQ ID NO: 136978 - DNA, 80 bp, synthetic construct; identical to SEQ ID NO: 42949
  misc_feature 1..80: note = Artificially Synthesized Probe
  source 1..80: mol_type = other DNA

SEQ ID NO: 136979 - DNA, 80 bp, synthetic construct
  misc_feature 1..80: note = Artificially Synthesized Probe
  source 1..80: mol_type = other DNA
taaaggaaccggataccgttttcaaccataagatagataaaaatgaaaaacaacaatatcaagtgttgctgagggtaagg

SEQ ID NO: 136980 - DNA, 80 bp, synthetic construct; identical to SEQ ID NO: 43087
  misc_feature 1..80: note = Artificially Synthesized Probe
  source 1..80: mol_type = other DNA

SEQ ID NO: 136981 - DNA, 80 bp, synthetic construct
  misc_feature 1..80: note = Artificially Synthesized Probe
  source 1..80: mol_type = other DNA
tttatataaatacacacacaaatccggagagataggattaaaactatagatttatgtaaatacacacacaaatccagagc

SEQ ID NO: 136982 - DNA, 80 bp, synthetic construct
  misc_feature 1..80: note = Artificially Synthesized Probe
  source 1..80: mol_type = other DNA
gataacaattaccacctctgaggacaacaatgggattctgaagtctaggtaaagggaacttaggtttcacctgtatacat

SEQ ID NO: 136983 - DNA, 80 bp, synthetic construct
  misc_feature 1..80: note = Artificially Synthesized Probe
  source 1..80: mol_type = other DNA
aaaaagtaacaaagttagttgggtgaggtgctgcgtgcttgtagtcccagctgcttgggaaactgtggtgggaggatcac

SEQ ID NO: 136984 - DNA, 80 bp, synthetic construct; identical to SEQ ID NO: 43088
  misc_feature 1..80: note = Artificially Synthesized Probe
  source 1..80: mol_type = other DNA

SEQ ID NO: 136985 - DNA, 80 bp, synthetic construct
  misc_feature 1..80: note = Artificially Synthesized Probe
  source 1..80: mol_type = other DNA
ccttcgctctgagaaattactttcctttccactggatctgaatctgggattaaaactcaacagcaataagaaggaaagaa

SEQ ID NO: 136986 - DNA, 80 bp, synthetic construct
  misc_feature 1..80: note = Artificially Synthesized Probe
  source 1..80: mol_type = other DNA
cctcagcttcccgagtagctgggattacaggcacctgccaccatgtccagataatttttgtatttttagtagagacgggg

SEQ ID NO: 136987 - DNA, 80 bp, synthetic construct
  misc_feature 1..80: note = Artificially Synthesized Probe
  source 1..80: mol_type = other DNA
gctttttgtaacaatgtgactttgacattcctcccgttagtgggtgggagaagactatgttccttcctcttgaatcttag

SEQ ID NO: 136988 - DNA, 80 bp, synthetic construct
  misc_feature 1..80: note = Artificially Synthesized Probe
  source 1..80: mol_type = other DNA
aacaaagaatcccagcaacggcctggccaagctcccagctgacagcaagcaccaaggagccagccatgagagtgagccaa

SEQ ID NO: 136989 - DNA, 80 bp, synthetic construct; identical to SEQ ID NO: 43089
  misc_feature 1..80: note = Artificially Synthesized Probe
  source 1..80: mol_type = other DNA

SEQ ID NO: 136990 - DNA, 80 bp, synthetic construct
  misc_feature 1..80: note = Artificially Synthesized Probe
  source 1..80: mol_type = other DNA
ggggttagacaaaagttggacgggaagctggaattcatttccggttgccaggtaacggggttagagaaaaggtggactgg

SEQ ID NO: 136991 - DNA, 80 bp, synthetic construct
  misc_feature 1..80: note = Artificially Synthesized Probe
  source 1..80: mol_type = other DNA
ctagcaccaggtccttttctgaaagcaagatcacttcttccggtgacagtttaccttttggaaagtttagctgccggatc

SEQ ID NO: 136992 - DNA, 80 bp, synthetic construct
  misc_feature 1..80: note = Artificially Synthesized Probe
  source 1..80: mol_type = other DNA
acctttcggaaagctgccggatctgcggaatccccatatactttccctctggtgacagtttacctttcggaaagctgccg

SEQ ID NO: 136993 - DNA, 80 bp, synthetic construct
  misc_feature 1..80: note = Artificially Synthesized Probe
  source 1..80: mol_type = other DNA
gtttaaaagtctagaaaaacactaaagacgcaagatacagacacagaacaacccacgctagctctcaaacagatatcaac

SEQ ID NO: 136994 - DNA, 80 bp, synthetic construct; identical to SEQ ID NO: 43090
  misc_feature 1..80: note = Artificially Synthesized Probe
  source 1..80: mol_type = other DNA

SEQ ID NO: 136995 - DNA, 80 bp, synthetic construct
  misc_feature 1..80: note = Artificially Synthesized Probe
  source 1..80: mol_type = other DNA
cgctgtgggaggccgaggtggctcacgcctgtcatacccacactgtgggaggccgaggcgggcagatcacgaagtcacga

SEQ ID NO: 136996 - DNA, 80 bp, synthetic construct
  misc_feature 1..80: note = Artificially Synthesized Probe
  source 1..80: mol_type = other DNA
tcgtgccactgcactccagccagggtgacagtgggagactccgtctcaaaaacaaaaacaaaaatacacaaagagcagca

SEQ ID NO: 136997 - DNA, 80 bp, synthetic construct; identical to SEQ ID NO: 43091
  misc_feature 1..80: note = Artificially Synthesized Probe
  source 1..80: mol_type = other DNA

SEQ ID NO: 136998 - DNA, 80 bp, synthetic construct
  misc_feature 1..80: note = Artificially Synthesized Probe
  source 1..80: mol_type = other DNA
ttaaccgggcttagtggcgggcgcctgtagtcccagctactcgggaggctgaggcaggagaatggcgggaacccgggagg

SEQ ID NO: 136999 - DNA, 80 bp, synthetic construct
  misc_feature 1..80: note = Artificially Synthesized Probe
  source 1..80: mol_type = other DNA
ctggtcttaccaccgcccagtcttaccactgcctggtctgatggtttggtggacaccgaccaccccacgaaggaacaaat

SEQ ID NO: 137000 - DNA, 80 bp, synthetic construct
  misc_feature 1..80: note = Artificially Synthesized Probe
  source 1..80: mol_type = other DNA
tttgaatgctgcatctcagtttctatgacgatgcgctttccctgtccacatacggaatcacactgaggctggagcagggg

SEQ ID NO: 137001 - DNA, 80 bp, synthetic construct; identical to SEQ ID NO: 43092
  misc_feature 1..80: note = Artificially Synthesized Probe
  source 1..80: mol_type = other DNA

SEQ ID NO: 137002 - DNA, 80 bp, synthetic construct
  misc_feature 1..80: note = Artificially Synthesized Probe
  source 1..80: mol_type = other DNA
ctgctcttggcaaccagggagcagagaaatggctgaagacagaagggtgtactctggcctgttgagatggcttaggagaa

SEQ ID NO: 137003 - DNA, 80 bp, synthetic construct
  misc_feature 1..80: note = Artificially Synthesized Probe
  source 1..80: mol_type = other DNA
cactctgtctgccttgatggtacagagccacagcctgaagatgggccatattcttggagtcgtcctgaaaggcttctggg

SEQ ID NO: 137004 - DNA, 80 bp, synthetic construct
  misc_feature 1..80: note = Artificially Synthesized Probe
  source 1..80: mol_type = other DNA
tcctggctgagaagtaaataggcgacaacaccattttctctatgcgatacatttcccgtggccccaaaagagaaagttgg

SEQ ID NO: 137005 - DNA, 80 bp, synthetic construct
  misc_feature 1..80: note = Artificially Synthesized Probe
  source 1..80: mol_type = other DNA
acggtcaagaaagatgtaaaacacttctgcaagtagctctgtaagaaacgaatgcagatgaagcagggaaaaatctcagg

SEQ ID NO: 137006 - DNA, 80 bp, synthetic construct
  misc_feature 1..80: note = Artificially Synthesized Probe
  source 1..80: mol_type = other DNA
gaactttatttttttaccccaaatgaaatgatccaaacagcaattcagtattgagcacacaggacagaggaggtaagcac

SEQ ID NO: 137007 - DNA, 80 bp, synthetic construct; identical to SEQ ID NO: 43093
  misc_feature 1..80: note = Artificially Synthesized Probe
  source 1..80: mol_type = other DNA

SEQ ID NO: 137008 - DNA, 80 bp, synthetic construct
  misc_feature 1..80: note = Artificially Synthesized Probe
  source 1..80: mol_type = other DNA
aaaaattccccaactttactaacacccaggtgaaatcatccactgtgtttcttggtccatgctgactaagaaatgtgtgt

SEQ ID NO: 137009 - DNA, 80 bp, synthetic construct
  misc_feature 1..80: note = Artificially Synthesized Probe
  source 1..80: mol_type = other DNA
ggggaagagaaatccatcgtttgttgcccttgccaatagtgaaaatgttggaaacttgagtgccaaagctgttgccactg

SEQ ID NO: 137010 - DNA, 80 bp, synthetic construct
  misc_feature 1..80: note = Artificially Synthesized Probe
  source 1..80: mol_type = other DNA
tggtgtcattcaccttgatgaggggtcagggtagcggatggtgcgagcatcatgagtcaccagatgagggattccttttg

SEQ ID NO: 137011 - DNA, 80 bp, synthetic construct; identical to SEQ ID NO: 43094
  misc_feature 1..80: note = Artificially Synthesized Probe
  source 1..80: mol_type = other DNA

SEQ ID NO: 137012 - DNA, 80 bp, synthetic construct
  misc_feature 1..80: note = Artificially Synthesized Probe
  source 1..80: mol_type = other DNA
ggctgcattaggcaaggaaaagaggacctttgtcttccggtgcacatagcgaaagtttcttaatagcaatttggttgccc

SEQ ID NO: 137013 - DNA, 80 bp, synthetic construct; identical to SEQ ID NO: 42950
  misc_feature 1..80: note = Artificially Synthesized Probe
  source 1..80: mol_type = other DNA

SEQ ID NO: 137014 - DNA, 80 bp, synthetic construct
  misc_feature 1..80: note = Artificially Synthesized Probe
  source 1..80: mol_type = other DNA
tagatacatcctcattaaagtgagaaactcggccgttgaggtcgtggatagatatatcctcattaaagtgagaaactcgg

SEQ ID NO: 137015 - DNA, 80 bp, synthetic construct; identical to SEQ ID NO: 43095
  misc_feature 1..80: note = Artificially Synthesized Probe
  source 1..80: mol_type = other DNA

SEQ ID NO: 137016 - DNA, 80 bp, synthetic construct
  misc_feature 1..80: note = Artificially Synthesized Probe
  source 1..80: mol_type = other DNA
aagtgagaaactcggccgtgagttcgtggatagatacatcccactgaagtgagacactcggccgtgagttcgtggataga

SEQ ID NO: 137017 - DNA, 80 bp, synthetic construct
  misc_feature 1..80: note = Artificially Synthesized Probe
  source 1..80: mol_type = other DNA
ctcggcagggagttcgtggatagatacatcccaccaaagtgagaaacttggccgtgagttcttggatagatacatcgcac

SEQ ID NO: 137018 - DNA, 80 bp, synthetic construct
  misc_feature 1..80: note = Artificially Synthesized Probe
  source 1..80: mol_type = other DNA
agttcgtggatagatacatcccactgaagtgagaaactcggccgtgagttcgtggatagatacatcccactgaagtgaga

SEQ ID NO: 137019 - DNA, 80 bp, synthetic construct; identical to SEQ ID NO: 43096
  misc_feature 1..80: note = Artificially Synthesized Probe
  source 1..80: mol_type = other DNA

SEQ ID NO: 137020 - DNA, 80 bp, synthetic construct
  misc_feature 1..80: note = Artificially Synthesized Probe
  source 1..80: mol_type = other DNA
actctgaaatcagcatcctttttcctacaaaaaaatctctgtatctcttccagcgtttttagcttcagtctaacataggg

SEQ ID NO: 137021 - DNA, 80 bp, synthetic construct
  misc_feature 1..80: note = Artificially Synthesized Probe
  source 1..80: mol_type = other DNA
gctccacgacgcctggttaatttttgtatttttagtagagacacggttttgccatgttggccaggctggtcttgaactcc

SEQ ID NO: 137022 - DNA, 80 bp, synthetic construct
  misc_feature 1..80: note = Artificially Synthesized Probe
  source 1..80: mol_type = other DNA
ctgcttcatctcaagactctatcccttctctctatgtcctaaatattctccctctgcttcatctcaagactctatccctt

SEQ ID NO: 137023 - DNA, 80 bp, synthetic construct; identical to SEQ ID NO: 43097
  misc_feature 1..80: note = Artificially Synthesized Probe
  source 1..80: mol_type = other DNA

SEQ ID NO: 137024 - DNA, 80 bp, synthetic construct
  misc_feature 1..80: note = Artificially Synthesized Probe
  source 1..80: mol_type = other DNA
ttcatgcagctagtcaaaggcctgcaccacgcaggtcattcaactgtagccagcaaagtgcagggcattttggacctttc

SEQ ID NO: 137025 - DNA, 80 bp, synthetic construct
  misc_feature 1..80: note = Artificially Synthesized Probe
  source 1..80: mol_type = other DNA
gatctagggctgaaccccagctctaccactcaccaacgatgcatcctagaacaagtttctcagcctcactgagtctcagt

SEQ ID NO: 137026 - DNA, 80 bp, synthetic construct
  misc_feature 1..80: note = Artificially Synthesized Probe
  source 1..80: mol_type = other DNA
cctcttcctcccttcagcacagcactgtccaggaaagcaagctgctttaaaataagacatctcataacttgggagtaaac

SEQ ID NO: 137027 - DNA, 80 bp, synthetic construct
  misc_feature 1..80: note = Artificially Synthesized Probe
  source 1..80: mol_type = other DNA
gcacccttggggaaggacgagggcccctgggtgctgctgggtgtggtgcatccttggtgaaggacgagggcccctgggtg

SEQ ID NO: 137028 - DNA, 80 bp, synthetic construct
  misc_feature 1..80: note = Artificially Synthesized Probe
  source 1..80: mol_type = other DNA
gacagacaggacattattgagtctgaatctgaacccaggatccagcacttcccagcgcctcccatggaggaggagaaggt

SEQ ID NO: 137029 - DNA, 80 bp, synthetic construct; identical to SEQ ID NO: 43098
  misc_feature 1..80: note = Artificially Synthesized Probe
  source 1..80: mol_type = other DNA

SEQ ID NO: 137030 - DNA, 80 bp, synthetic construct
  misc_feature 1..80: note = Artificially Synthesized Probe
  source 1..80: mol_type = other DNA
tttctctactaaaaatacaaaaaattagccgggcgtggtggcaggcgcctgtaatcccagctacttgggcggctgaggca

SEQ ID NO: 137031 - DNA, 80 bp, synthetic construct
  misc_feature 1..80: note = Artificially Synthesized Probe
  source 1..80: mol_type = other DNA
agggctgcaaacacagggcagcagagatggtgagccaccactgaccagcagctccccttgaattgatctgaacgcattca

SEQ ID NO: 137032 - DNA, 80 bp, synthetic construct; identical to SEQ ID NO: 43099
  misc_feature 1..80: note = Artificially Synthesized Probe
  source 1..80: mol_type = other DNA

SEQ ID NO: 137033 - DNA, 80 bp, synthetic construct
  misc_feature 1..80: note = Artificially Synthesized Probe
  source 1..80: mol_type = other DNA
tgcgaacaggtaaacactcgggactcttaccaatgttcctcacaaagtttcaacttaaaactaaatgattcccctctacc

SEQ ID NO: 137034 - DNA, 80 bp, synthetic construct
  misc_feature 1..80: note = Artificially Synthesized Probe
  source 1..80: mol_type = other DNA
cctgaaccgtgaatggggactccagaactgcaacaaatcttaaagactttcatagtaagccatttgaaaaccaatgaaat

SEQ ID NO: 137035 - DNA, 80 bp, synthetic construct
  misc_feature 1..80: note = Artificially Synthesized Probe
  source 1..80: mol_type = other DNA
cagtggaaatgactgctgcttttcctcggaggaacccagaacaagcctctaaagcattctaggtggattaaattcttaga

SEQ ID NO: 137036 - DNA, 80 bp, synthetic construct
  misc_feature 1..80: note = Artificially Synthesized Probe
  source 1..80: mol_type = other DNA
gcacagtggcacgcacctgtagtcccagctactcaggaagctgaggcagaagaattgcttgaacccgggaggcagagctt

SEQ ID NO: 137037 - DNA, 80 bp, synthetic construct
  misc_feature 1..80: note = Artificially Synthesized Probe
  source 1..80: mol_type = other DNA
aaagaaagagaaagaaagaaaaaaagaaagaaagagaaagagaaagaaaggaaggaaggaaggaaggaaggaaggaagga

SEQ ID NO: 137038 - DNA, 80 bp, synthetic construct; identical to SEQ ID NO: 43100
  misc_feature 1..80: note = Artificially Synthesized Probe
  source 1..80: mol_type = other DNA

SEQ ID NO: 137039 - DNA, 80 bp, synthetic construct
  misc_feature 1..80: note = Artificially Synthesized Probe
  source 1..80: mol_type = other DNA
gagcccagcatttccactgaaataaaaacctacaaggacagatgctacacaatgaaagtattacaacacagctgcagctt

SEQ ID NO: 137040 - DNA, 80 bp, synthetic construct
  misc_feature 1..80: note = Artificially Synthesized Probe
  source 1..80: mol_type = other DNA
acagacgtgtatcgaccacatgcactggaccatccgtgagtaaagactacctacagctaaagtacctgtgagtgccagca

SEQ ID NO: 137041 - DNA, 80 bp, synthetic construct; identical to SEQ ID NO: 43101
  misc_feature 1..80: note = Artificially Synthesized Probe
  source 1..80: mol_type = other DNA

SEQ ID NO: 137042 - DNA, 80 bp, synthetic construct
  misc_feature 1..80: note = Artificially Synthesized Probe
  source 1..80: mol_type = other DNA
aaataaagaaacaagataattcctaagtgtggtgaattgacaggtgtggtgaaggacttatgcagtgatgagaataaggg

SEQ ID NO: 137043 - DNA, 80 bp, synthetic construct
  misc_feature 1..80: note = Artificially Synthesized Probe
  source 1..80: mol_type = other DNA
agctcactgcaacctctgcctcccaggttcaagcaattctcctgcctcagcctcccgagtagctgggactacaggcacct

SEQ ID NO: 137044 - DNA, 80 bp, synthetic construct
  misc_feature 1..80: note = Artificially Synthesized Probe
  source 1..80: mol_type = other DNA
ggattttcagcagagagaaaagcaaatgtgaagatcctgacagagaaaagacctcggtgttttggaggtccgaaaagaca

SEQ ID NO: 137045 - DNA, 80 bp, synthetic construct
  misc_feature 1..80: note = Artificially Synthesized Probe
  source 1..80: mol_type = other DNA
ggccaacatggagaaaccccatctctactaaaaatacaaaaattagccgggtgtggtggcgcatgcctgtaatcccagct

SEQ ID NO: 137046 - DNA, 80 bp, synthetic construct; identical to SEQ ID NO: 43102
  misc_feature 1..80: note = Artificially Synthesized Probe
  source 1..80: mol_type = other DNA

SEQ ID NO: 137047 - DNA, 80 bp, synthetic construct
  misc_feature 1..80: note = Artificially Synthesized Probe
  source 1..80: mol_type = other DNA
atgacgcccgggttttggttgaaaagccaaggccagggttcactgtctgaaccagggaatgcaggaggaggacgggcttg

SEQ ID NO: 137048 - DNA, 80 bp, synthetic construct
  misc_feature 1..80: note = Artificially Synthesized Probe
  source 1..80: mol_type = other DNA
tgaccaggtcatgaggggtttgccctcacgaacaaatgaatggcattatctcgggagtgggttcttgataaaaggatctg

SEQ ID NO: 137049 - DNA, 80 bp, synthetic construct
  misc_feature 1..80: note = Artificially Synthesized Probe
  source 1..80: mol_type = other DNA
agcccttgcctgatgtgggccccttgaccttggacttcccagcctccagaattataagaaatctcttttctttataaatg

SEQ ID NO: 137050 - DNA, 80 bp, synthetic construct; identical to SEQ ID NO: 43103
  misc_feature 1..80: note = Artificially Synthesized Probe
  source 1..80: mol_type = other DNA

SEQ ID NO: 137051 - DNA, 80 bp, synthetic construct
  misc_feature 1..80: note = Artificially Synthesized Probe
  source 1..80: mol_type = other DNA
tgaggtcaagagttcaagacagcctggccaacatggtgaaaccccgtctctactaaaaatacaaaaattagatgggcgtg

SEQ ID NO: 137052 - DNA, 80 bp, synthetic construct
  misc_feature 1..80: note = Artificially Synthesized Probe
  source 1..80: mol_type = other DNA
ttgagatcaagtagagacattaagttggacataagattctggagcttggaagagaggtgataggttgggatttaaattca

SEQ ID NO: 137053 - DNA, 80 bp, synthetic construct
  misc_feature 1..80: note = Artificially Synthesized Probe
  source 1..80: mol_type = other DNA
aagtctaaaataaaaaaaagcagagatgcagagaaaaaccaccagtgacatgagaaaaaatcagggacgatgggtgttac

SEQ ID NO: 137054 - DNA, 80 bp, synthetic construct
  misc_feature 1..80: note = Artificially Synthesized Probe
  source 1..80: mol_type = other DNA
agcctgaccaatatgatgaaaccctgtctctactcaaaatacaaaaattagccgggcgtggtggcaggcgcctgtaatcc

SEQ ID NO: 137055 - DNA, 80 bp, synthetic construct; identical to SEQ ID NO: 43104
  misc_feature 1..80: note = Artificially Synthesized Probe
  source 1..80: mol_type = other DNA

SEQ ID NO: 137056 - DNA, 80 bp, synthetic construct
  misc_feature 1..80: note = Artificially Synthesized Probe
  source 1..80: mol_type = other DNA
gggtggagaagaatgtcaaacatcagaaagaatgaaccacctaccctaaaatgaaaggcatctatatcagaagaaacaaa

SEQ ID NO: 137057 - DNA, 80 bp, synthetic construct
  misc_feature 1..80: note = Artificially Synthesized Probe
  source 1..80: mol_type = other DNA
attttgacaacagggaagttgttggtgaccttgacaagagcagtctcaatgcagtcaagggaatggacagcgatgacatg

SEQ ID NO: 137058 - DNA, 80 bp, synthetic construct
  misc_feature 1..80: note = Artificially Synthesized Probe
  source 1..80: mol_type = other DNA
gacttttgccacacaatggcagagataaatagttacaacagagaccatatggtcagtaaaggctaaaatatttactatcc

SEQ ID NO: 137059 - DNA, 80 bp, synthetic construct; identical to SEQ ID NO: 43105
  misc_feature 1..80: note = Artificially Synthesized Probe
  source 1..80: mol_type = other DNA

SEQ ID NO: 137060 - DNA, 80 bp, synthetic construct
  misc_feature 1..80: note = Artificially Synthesized Probe
  source 1..80: mol_type = other DNA
aagaggactgttttaaacataatgttctgggggggggggcaatgggttaattacagaagaggacttttttaaacataatg

SEQ ID NO: 137061 - DNA, 80 bp, synthetic construct
  misc_feature 1..80: note = Artificially Synthesized Probe
  source 1..80: mol_type = other DNA
agattctcataggagcgcgaaccctactgtgaactgcacacgcgagggatctaggttgcaagctccttaacagaatctaa

SEQ ID NO: 137062 - DNA, 80 bp, synthetic construct
  misc_feature 1..80: note = Artificially Synthesized Probe
  source 1..80: mol_type = other DNA
tggtttagtgtatgagtattagccctttagcagggttataagtatcctttagaatggggaccaaggatatgaacagcact

SEQ ID NO: 137063 - DNA, 80 bp, synthetic construct
  misc_feature 1..80: note = Artificially Synthesized Probe
  source 1..80: mol_type = other DNA
gcacagtgggaccttgacaaatattgcccactgattaaaagtatcatggtgcacctgtaagagtgctggtgctgaggcta

SEQ ID NO: 137064 - DNA, 80 bp, synthetic construct
  misc_feature 1..80: note = Artificially Synthesized Probe
  source 1..80: mol_type = other DNA
ctcaccagtcacatatcaaatcctggctcgcccctcaccagtcacatatcaaatcctggctcgcccctcaccagtcacat

SEQ ID NO: 137065 - DNA, 80 bp, synthetic construct; identical to SEQ ID NO: 43106
  misc_feature 1..80: note = Artificially Synthesized Probe
  source 1..80: mol_type = other DNA

SEQ ID NO: 137066 - DNA, 80 bp, synthetic construct
  misc_feature 1..80: note = Artificially Synthesized Probe
  source 1..80: mol_type = other DNA
atgaagaagtctgcatgatcctatctcagagaaagggtttctatccctttctctcttacattaaacctggcatcctacca

SEQ ID NO: 137067 - DNA, 80 bp, synthetic construct
  misc_feature 1..80: note = Artificially Synthesized Probe
  source 1..80: mol_type = other DNA
atgtactataattcattttgcagagtttaaaaactcctctgaagcactggtgctatcaggcaagtccattctcaacacac

SEQ ID NO: 137068 - DNA, 80 bp, synthetic construct; identical to SEQ ID NO: 43107
  misc_feature 1..80: note = Artificially Synthesized Probe
  source 1..80: mol_type = other DNA

SEQ ID NO: 137069 - DNA, 80 bp, synthetic construct; identical to SEQ ID NO: 42951
  misc_feature 1..80: note = Artificially Synthesized Probe
  source 1..80: mol_type = other DNA

SEQ ID NO: 137070 - DNA, 80 bp, synthetic construct
  misc_feature 1..80: note = Artificially Synthesized Probe
  source 1..80: mol_type = other DNA
ctatagttccagctactccggaggctgaggcatgagaatcacttgagcccaggaggcggaggctgcagtgagccaagatt

SEQ ID NO: 137071 - DNA, 80 bp, synthetic construct
  misc_feature 1..80: note = Artificially Synthesized Probe
  source 1..80: mol_type = other DNA
atggtgaaaccccatctctactaaaaatacaaaaattagctgggtgtggtggcgcatgcctgtaatcccagctactcggg

SEQ ID NO: 137072 - DNA, 80 bp, synthetic construct
  misc_feature 1..80: note = Artificially Synthesized Probe
  source 1..80: mol_type = other DNA
ccattccaagctgtatgtggattaaaaacagaactaatcactcccaaaaatgtctgcatttaatctaccccactagagtt

SEQ ID NO: 137073 - DNA, 80 bp, synthetic construct
  misc_feature 1..80: note = Artificially Synthesized Probe
  source 1..80: mol_type = other DNA
aattctatacacacacagcctgcatcctaaagtgttataaagcggcgactgtgtttaatctgcccctactggagtttctg

SEQ ID NO: 137074 - DNA, 80 bp, synthetic construct; identical to SEQ ID NO: 43108
  misc_feature 1..80: note = Artificially Synthesized Probe
  source 1..80: mol_type = other DNA

SEQ ID NO: 137075 - DNA, 80 bp, synthetic construct
  misc_feature 1..80: note = Artificially Synthesized Probe
  source 1..80: mol_type = other DNA
ggctctgattcattggcagtgccttaagaaatgagcatccctctggctctcaggtccatctaattttgcagtctgcgcca

SEQ ID NO: 137076 - DNA, 80 bp, synthetic construct
  misc_feature 1..80: note = Artificially Synthesized Probe
  source 1..80: mol_type = other DNA
attattcacggttactggggagaaaattagatttttccactattttgctaccatttctgttttccaacttgacatctatc

SEQ ID NO: 137077 - DNA, 80 bp, synthetic construct
  misc_feature 1..80: note = Artificially Synthesized Probe
  source 1..80: mol_type = other DNA
taaaaatacaaaaactagccagccatcatggtacacacctgtaatcccagctactggggaggatgaggcaggagaatcgc

SEQ ID NO: 137078 - DNA, 80 bp, synthetic construct; identical to SEQ ID NO: 43109
  misc_feature 1..80: note = Artificially Synthesized Probe
  source 1..80: mol_type = other DNA

SEQ ID NO: 137079 - DNA, 80 bp, synthetic construct
  misc_feature 1..80: note = Artificially Synthesized Probe
  source 1..80: mol_type = other DNA
cctgaaaggtagtaaggaatgtgagagtagaaaatatgtttggaatcgtttacccaacactcttcccctccgcatgcgaa

SEQ ID NO: 137080 - DNA, 80 bp, synthetic construct
  misc_feature 1..80: note = Artificially Synthesized Probe
  source 1..80: mol_type = other DNA
acactgaaattcagactagtggtgacagtagaagttagttcaagcacgttgggggaaatttagcaacatttccttagctg

SEQ ID NO: 137081 - DNA, 80 bp, synthetic construct
  misc_feature 1..80: note = Artificially Synthesized Probe
  source 1..80: mol_type = other DNA
aagtgattctcatgcctcagcctcctgagtagctgggattacaggcacccgccaccacacccagctaatttttgtatttt

SEQ ID NO: 137082 - DNA, 80 bp, synthetic construct
  misc_feature 1..80: note = Artificially Synthesized Probe
  source 1..80: mol_type = other DNA
aagaagtgaaactgagttagagagcagctaggttccccaggaagggcaggaggctggactacaggtagagatgatgaggg

SEQ ID NO: 137083 - DNA, 80 bp, synthetic construct; identical to SEQ ID NO: 43110
  misc_feature 1..80: note = Artificially Synthesized Probe
  source 1..80: mol_type = other DNA

SEQ ID NO: 137084 - DNA, 80 bp, synthetic construct
  misc_feature 1..80: note = Artificially Synthesized Probe
  source 1..80: mol_type = other DNA
atcagaggttgttactcatcttttagagctttgtaaataagatggctaagttcagtatctgcaggcagactcagaagaac

SEQ ID NO: 137085 - DNA, 80 bp, synthetic construct
  misc_feature 1..80: note = Artificially Synthesized Probe
  source 1..80: mol_type = other DNA
tgtatctttaaagggcttgtaaggaatacatgtctgaattatacacaaaatgatacaaagagcgatgaataaagaatggc

SEQ ID NO: 137086 - DNA, 80 bp, synthetic construct
  misc_feature 1..80: note = Artificially Synthesized Probe
  source 1..80: mol_type = other DNA
tgtagtcccagctactcgggagacttaggcaggagaatggcgtgaacccaggaggtggagcttgcagtgagccgagattg

SEQ ID NO: 137087 - DNA, 80 bp, synthetic construct; identical to SEQ ID NO: 43111
  misc_feature 1..80: note = Artificially Synthesized Probe
  source 1..80: mol_type = other DNA

SEQ ID NO: 137088 - DNA, 80 bp, synthetic construct
  misc_feature 1..80: note = Artificially Synthesized Probe
  source 1..80: mol_type = other DNA
acccagcctcagcaatgccaacaacgcagcccactccccatgatggtgctcaacagcagcagaggctgtcggactctcac

SEQ ID NO: 137089 - DNA, 80 bp, synthetic construct
  misc_feature 1..80: note = Artificially Synthesized Probe
  source 1..80: mol_type = other DNA
ggctttatttaaagcacagatttctttccaagtttgtgaaccaaaaaccaaaggactgtaaagagcaaacggagtaattc

SEQ ID NO: 137090 - DNA, 80 bp, synthetic construct; identical to SEQ ID NO: 43112
  misc_feature 1..80: note = Artificially Synthesized Probe
  source 1..80: mol_type = other DNA

SEQ ID NO: 137091 - DNA, 80 bp, synthetic construct
  misc_feature 1..80: note = Artificially Synthesized Probe
  source 1..80: mol_type = other DNA
attcgtgcaatggaatatgctgctgaggtgaaaatgaatgggtgcacacagcatgcattaacatgcataaatctcagaaa

SEQ ID NO: 137092 - DNA, 80 bp, synthetic construct
  misc_feature 1..80: note = Artificially Synthesized Probe
  source 1..80: mol_type = other DNA
aagaaattcaatatttttggaaatggggcacattaaaaggaacaacttgtccaagtttaacaaaggactacttttcccaa

SEQ ID NO: 137093 - DNA, 80 bp, synthetic construct
  misc_feature 1..80: note = Artificially Synthesized Probe
  source 1..80: mol_type = other DNA
ctcagctgactttttgagacaccttctgtgccaaatgcccttcaggctgcgaggattcatctgtgtgatttttttctctt

SEQ ID NO: 137094 - DNA, 80 bp, synthetic construct
  misc_feature 1..80: note = Artificially Synthesized Probe
  source 1..80: mol_type = other DNA
ctgccattatttgaaattccttatgaatcagccttccaggctccacagcaaaacaggtggctcccaaatctgcttttaaa

SEQ ID NO: 137095 - DNA, 80 bp, synthetic construct
  misc_feature 1..80: note = Artificially Synthesized Probe
  source 1..80: mol_type = other DNA
tacgtggcctaattcacacatctttgtaaacatgtgaatcgagtaaatcaagtaaagtaatatatgcaacaatattttgc

SEQ ID NO: 137096 - DNA, 80 bp, synthetic construct; identical to SEQ ID NO: 43113
  misc_feature 1..80: note = Artificially Synthesized Probe
  source 1..80: mol_type = other DNA

SEQ ID NO: 137097 - DNA, 80 bp, synthetic construct
  misc_feature 1..80: note = Artificially Synthesized Probe
  source 1..80: mol_type = other DNA
ttcccttgtgactaggaacaagaaaagctcaagtacaacaaggagacaggagttaagaattcggtctgagatggggtaaa

SEQ ID NO: 137098 - DNA, 80 bp, synthetic construct
  misc_feature 1..80: note = Artificially Synthesized Probe
  source 1..80: mol_type = other DNA
acctggtgaaaacccgtctctaccgaaaatacaaaaattagccgggtgtggtggcaggcacctgtaatctcagctactca

SEQ ID NO: 137099 - DNA, 80 bp, synthetic construct; identical to SEQ ID NO: 43114
  misc_feature 1..80: note = Artificially Synthesized Probe
  source 1..80: mol_type = other DNA

SEQ ID NO: 137100 - DNA, 80 bp, synthetic construct
  misc_feature 1..80: note = Artificially Synthesized Probe
  source 1..80: mol_type = other DNA
gatgtattatctttggttttgcaaaactaatctccttccagaggagaccctggagtccaaattggagcaaaggaaatttt

SEQ ID NO: 137101 - DNA, 80 bp, synthetic construct; identical to SEQ ID NO: 42952
  misc_feature 1..80: note = Artificially Synthesized Probe
  source 1..80: mol_type = other DNA

SEQ ID NO: 137102 - DNA, 80 bp, synthetic construct
  misc_feature 1..80: note = Artificially Synthesized Probe
  source 1..80: mol_type = other DNA
ggaggccaagttcttccatgaagacagaaagccaaattcccatccattgtacaaacatatctcagtgacttcttgtatca

SEQ ID NO: 137103 - DNA, 80 bp, synthetic construct
  misc_feature 1..80: note = Artificially Synthesized Probe
  source 1..80: mol_type = other DNA
tgatgaatggcattttcctcttgagacgcagagtctagtttaaacttgtgactgcctctaacatggaaataagcagatgg

SEQ ID NO: 137104 - DNA, 80 bp, synthetic construct; identical to SEQ ID NO: 43115
  misc_feature 1..80: note = Artificially Synthesized Probe
  source 1..80: mol_type = other DNA

SEQ ID NO: 137105 - DNA, 80 bp, synthetic construct
  misc_feature 1..80: note = Artificially Synthesized Probe
  source 1..80: mol_type = other DNA
aagacaaaacagaacgcttgtgttaatgcacctgagtctatggaaagaatgaatctatgaaagttcagaacaatatggaa

SEQ ID NO: 137106 - DNA, 80 bp, synthetic construct
  misc_feature 1..80: note = Artificially Synthesized Probe
  source 1..80: mol_type = other DNA
ggaaacaatccaagtgtccatggacagatgaatggatacacacaatgtggtggaactacaccacggaatattattcaccc

SEQ ID NO: 137107 - DNA, 80 bp, synthetic construct
  misc_feature 1..80: note = Artificially Synthesized Probe
  source 1..80: mol_type = other DNA
atagaggttacaagaagttgaggaaagtgggcaggggaaggaaggacttaatggttttaatgtttacagagtttctattt

SEQ ID NO: 137108 - DNA, 80 bp, synthetic construct
  misc_feature 1..80: note = Artificially Synthesized Probe
  source 1..80: mol_type = other DNA
gaacagtatactttaaatagatgaattatatgtgaattatagctcactaatgctgttaaaatatagccatataaaaaatt

SEQ ID NO: 137109 - DNA, 80 bp, synthetic construct; identical to SEQ ID NO: 43116
  misc_feature 1..80: note = Artificially Synthesized Probe
  source 1..80: mol_type = other DNA

SEQ ID NO: 137110 - DNA, 80 bp, synthetic construct
  misc_feature 1..80: note = Artificially Synthesized Probe
  source 1..80: mol_type = other DNA
gctcacgcctgaagtcccagcactttgagaggtcaaatgaggcaggcggactgcctgaggtcaggagtttcagactagcc

SEQ ID NO: 137111 - DNA, 80 bp, synthetic construct
  misc_feature 1..80: note = Artificially Synthesized Probe
  source 1..80: mol_type = other DNA
ctccagactgggtgacagagtgagactctgtctcaaaataacaaaaacaaaaaacccataaaaataaaaacaataaaaat

SEQ ID NO: 137112 - DNA, 80 bp, synthetic construct
  misc_feature 1..80: note = Artificially Synthesized Probe
  source 1..80: mol_type = other DNA
gtgagaccttgtctctacaaaaacaaaaataataagattagacaggcacagtggcacacacttgtagtctcagctactta

SEQ ID NO: 137113 - DNA, 80 bp, synthetic construct
  misc_feature 1..80: note = Artificially Synthesized Probe
  source 1..80: mol_type = other DNA
ggctaaatatatatatatatatatttttttgagacagagtctcgctctgtcgcccaggtagagtgcagtggcatgatctc

SEQ ID NO: 137114 - DNA, 80 bp, synthetic construct
  misc_feature 1..80: note = Artificially Synthesized Probe
  source 1..80: mol_type = other DNA
tgacctcgtgatctgcccgcctcggcctcccaaagtgccgggatgacaggcgtgagccaccgcgcccccgccattaaaaa

SEQ ID NO: 137115 - DNA, 80 bp, synthetic construct; identical to SEQ ID NO: 43117
  misc_feature 1..80: note = Artificially Synthesized Probe
  source 1..80: mol_type = other DNA

SEQ ID NO: 137116 - DNA, 80 bp, synthetic construct
  misc_feature 1..80: note = Artificially Synthesized Probe
  source 1..80: mol_type = other DNA
tactaaaaatacaaaaattagccaggcgtggtggcggccacctgtagtcccagctacttgggaggctgaggcgggagaat

SEQ ID NO: 137117 - DNA, 80 bp, synthetic construct
  misc_feature 1..80: note = Artificially Synthesized Probe
  source 1..80: mol_type = other DNA
catctgagtaaaattattttcaagaacaaggacttactaaaatcaactcaagaagtggaagatgtaactataaccacaga

SEQ ID NO: 137118 - DNA, 80 bp, synthetic construct; identical to SEQ ID NO: 43118
  misc_feature 1..80: note = Artificially Synthesized Probe
  source 1..80: mol_type = other DNA

SEQ ID NO: 137119 - DNA, 80 bp, synthetic construct
  misc_feature 1..80: note = Artificially Synthesized Probe
  source 1..80: mol_type = other DNA
tcacgcctgtaatcccagcactttgggaggccgaagtgggtgaatcatttcaggtcaggagttcaagaccaatctggcca

SEQ ID NO: 137120 - DNA, 80 bp, synthetic construct
  misc_feature 1..80: note = Artificially Synthesized Probe
  source 1..80: mol_type = other DNA
tgggtgacaaagcgagattccgtctcaaaataacaacaacaaaaactgacataaacccgatacaaaatctaacaatgata

SEQ ID NO: 137121 - DNA, 80 bp, synthetic construct
  misc_feature 1..80: note = Artificially Synthesized Probe
  source 1..80: mol_type = other DNA
ttaaacaaatcaacaacatgaaaaaacccctatgactatattcagtacatgctgagagggcatatgataaaatccaacgt

SEQ ID NO: 137122 - DNA, 80 bp, synthetic construct; identical to SEQ ID NO: 43119
  misc_feature 1..80: note = Artificially Synthesized Probe
  source 1..80: mol_type = other DNA

SEQ ID NO: 137123 - DNA, 80 bp, synthetic construct
  misc_feature 1..80: note = Artificially Synthesized Probe
  source 1..80: mol_type = other DNA
agaactttgggaggctgaggtgggaggatcacttaaggtcaggaatttgagaccagcctggccaacatggtgagacccca

SEQ ID NO: 137124 - DNA, 80 bp, synthetic construct
  misc_feature 1..80: note = Artificially Synthesized Probe
  source 1..80: mol_type = other DNA
tgaggagtttaaataaaaaatatgtatctgttaatccatttaaacatgacaatgataaatatattacatgttagcataaa

SEQ ID NO: 137125 - DNA, 80 bp, synthetic construct
  misc_feature 1..80: note = Artificially Synthesized Probe
  source 1..80: mol_type = other DNA
ctgggttcaagttattcttctgcctcagcctcccgagtagctgggcctacaggtgcatgccaccacactcagctaacttt

SEQ ID NO: 137126 - DNA, 80 bp, synthetic construct
  misc_feature 1..80: note = Artificially Synthesized Probe
  source 1..80: mol_type = other DNA
ctggggtgtctctgcaaaaatctttagtgtctgctctgataaacaccagctggactcccatacacgcttccatattgaat

SEQ ID NO: 137127 - DNA, 80 bp, synthetic construct
  misc_feature 1..80: note = Artificially Synthesized Probe
  source 1..80: mol_type = other DNA
acagaaattgttaacagtcctggaagctggaaagtccaagatggaggcaccaggagatctggtgcccagtgagggccctt

SEQ ID NO: 137128 - DNA, 80 bp, synthetic construct; identical to SEQ ID NO: 43120
  misc_feature 1..80: note = Artificially Synthesized Probe
  source 1..80: mol_type = other DNA

SEQ ID NO: 137129 - DNA, 80 bp, synthetic construct
  misc_feature 1..80: note = Artificially Synthesized Probe
  source 1..80: mol_type = other DNA
ttcaggtacttggtgataagccttttttaaactacactaaaactcaaaaagtggtagattcttgaggattagctgcagtg

SEQ ID NO: 137130 - DNA, 80 bp, synthetic construct
  misc_feature 1..80: note = Artificially Synthesized Probe
  source 1..80: mol_type = other DNA
gaggaaaacggaaactgaaaaccacaacttttcttgaacctagcagagagctaaaggtaaccaagcatcctgaaatccaa

SEQ ID NO: 137131 - DNA, 80 bp, synthetic construct
  misc_feature 1..80: note = Artificially Synthesized Probe
  source 1..80: mol_type = other DNA
aggcctggaaagtgtaagcacaggtgggtttgcacccactctcaggctcttttccaagaccttcactgggtgttcatgag

SEQ ID NO: 137132 - DNA, 80 bp, synthetic construct; identical to SEQ ID NO: 43121
  misc_feature 1..80: note = Artificially Synthesized Probe
  source 1..80: mol_type = other DNA

SEQ ID NO: 137133 - DNA, 80 bp, synthetic construct
  misc_feature 1..80: note = Artificially Synthesized Probe
  source 1..80: mol_type = other DNA
gatcgcgccattgtactccagactgggcaacacggtgagacattttctcaaaaaaaaaaaaaaaaaaaaaaaagatgtaa

SEQ ID NO: 137134 - DNA, 80 bp, synthetic construct
  misc_feature 1..80: note = Artificially Synthesized Probe
  source 1..80: mol_type = other DNA
aatgctagaaaaaaggacatggtgtcagagctgaagaattccttcaacagcctcatcacactcgacacagcaaaaaaagg

SEQ ID NO: 137135 - DNA, 80 bp, synthetic construct
  misc_feature 1..80: note = Artificially Synthesized Probe
  source 1..80: mol_type = other DNA
agagataatggctgagaatttttttttaagtgaaaggcattaaaccactgatccaagaagtgctgagatcccaagaggaa

SEQ ID NO: 137136 - DNA, 80 bp, synthetic construct; identical to SEQ ID NO: 43122
  misc_feature 1..80: note = Artificially Synthesized Probe
  source 1..80: mol_type = other DNA

SEQ ID NO: 137137 - DNA, 80 bp, synthetic construct
  misc_feature 1..80: note = Artificially Synthesized Probe
  source 1..80: mol_type = other DNA
ccttacatatacacaatacaatttacttcttcaaacataaaataaaatagctgggtgtggtggcacacgccaatagcctc

SEQ ID NO: 137138 - DNA, 80 bp, synthetic construct
  misc_feature 1..80: note = Artificially Synthesized Probe
  source 1..80: mol_type = other DNA
ctctaattagcaaaaatagcaacagtgatggtgttcataatacgtaaaaacaagatgtggggcagagtggaatgcagaga

SEQ ID NO: 137139 - DNA, 80 bp, synthetic construct
  misc_feature 1..80: note = Artificially Synthesized Probe
  source 1..80: mol_type = other DNA
gacccaggacaaggaagtacaagaacaaacagaaaacaagcaagatgctagatttaaatccaactatatcatgggaacaa

SEQ ID NO: 137140 - DNA, 80 bp, synthetic construct
  misc_feature 1..80: note = Artificially Synthesized Probe
  source 1..80: mol_type = other DNA
ttcagcaaagctgcacaatataaggtcaataaataaaaatcaattacatttccacaactagcaagagacaactggaaatt

SEQ ID NO: 137141 - DNA, 80 bp, synthetic construct; identical to SEQ ID NO: 43123
  misc_feature 1..80: note = Artificially Synthesized Probe
  source 1..80: mol_type = other DNA

SEQ ID NO: 137142 - DNA, 80 bp, synthetic construct
  misc_feature 1..80: note = Artificially Synthesized Probe
  source 1..80: mol_type = other DNA
aatacaaaaaattagccaggcatggtggctcacgcctgtaatcccagcgactcgagagattgaggcaggagaatcacttg

SEQ ID NO: 137143 - DNA, 80 bp, synthetic construct
  misc_feature 1..80: note = Artificially Synthesized Probe
  source 1..80: mol_type = other DNA
aactctgtcttccatgtagcaaattttgagagccttgtcaaaatcaaagccatgtcttagcattcatttgttggtaggaa

SEQ ID NO: 137144 - DNA, 80 bp, synthetic construct
  misc_feature 1..80: note = Artificially Synthesized Probe
  source 1..80: mol_type = other DNA
actgccttgctttagagatgcaatgagagacagagaaaacaaaaagacagatgtactcaacacaaacagctggagtggag

SEQ ID NO: 137145 - DNA, 80 bp, synthetic construct; identical to SEQ ID NO: 43124
  misc_feature 1..80: note = Artificially Synthesized Probe
  source 1..80: mol_type = other DNA

SEQ ID NO: 137146 - DNA, 80 bp, synthetic construct
  misc_feature 1..80: note = Artificially Synthesized Probe
  source 1..80: mol_type = other DNA
ctgagcaaataaatttaaggcacggtaggctaagctatgatgttcagtaaattacatgtattaataaattttcaacttag

SEQ ID NO: 137147 - DNA, 80 bp, synthetic construct
  misc_feature 1..80: note = Artificially Synthesized Probe
  source 1..80: mol_type = other DNA
taaggagtccaagaccagccagagcaataaaggaacaccccatcactacaaaaaaaaactttttaaattaaaaaattagc

SEQ ID NO: 137148 - DNA, 80 bp, synthetic construct
  misc_feature 1..80: note = Artificially Synthesized Probe
  source 1..80: mol_type = other DNA
aagagaattggctggttgcagtggctcatgcctgtaattccagcactctgggaagcgtaggtgggaggatcacctgaagc

SEQ ID NO: 137149 - DNA, 80 bp, synthetic construct; identical to SEQ ID NO: 43125
  misc_feature 1..80: note = Artificially Synthesized Probe
  source 1..80: mol_type = other DNA

SEQ ID NO: 137150 - DNA, 80 bp, synthetic construct
  misc_feature 1..80: note = Artificially Synthesized Probe
  source 1..80: mol_type = other DNA
acaagagaaatgaacctttgaccaccactgttgccacagcagatattctggaccataggtaagctgtgccgccattttta

SEQ ID NO: 137151 - DNA, 80 bp, synthetic construct
  misc_feature 1..80: note = Artificially Synthesized Probe
  source 1..80: mol_type = other DNA
aggaaaactgaaattccagtggactgtgtatcagcagcactggtgttcctgccatttactaaacatgagtgagcccaaca

SEQ ID NO: 137152 - DNA, 80 bp, synthetic construct; identical to SEQ ID NO: 42953
  misc_feature 1..80: note = Artificially Synthesized Probe
  source 1..80: mol_type = other DNA

SEQ ID NO: 137153 - DNA, 80 bp, synthetic construct
  misc_feature 1..80: note = Artificially Synthesized Probe
  source 1..80: mol_type = other DNA
actagcctgggcaacatagcgagacctcatctacacaatacttaaaaattacattagctgggcgcagtggctcacgcctg

SEQ ID NO: 137154 - DNA, 80 bp, synthetic construct
  misc_feature 1..80: note = Artificially Synthesized Probe
  source 1..80: mol_type = other DNA
ggtggtggtcgcctgtaatctcagctacttgggaggctgaggcagggagaatcacttgaacccaggagacggaggttgca

SEQ ID NO: 137155 - DNA, 80 bp, synthetic construct; identical to SEQ ID NO: 43126
  misc_feature 1..80: note = Artificially Synthesized Probe
  source 1..80: mol_type = other DNA

SEQ ID NO: 137156 - DNA, 80 bp, synthetic construct
  misc_feature 1..80: note = Artificially Synthesized Probe
  source 1..80: mol_type = other DNA
ctcgggacgctgaagtgagaggatcacttgagcccacgaggttgagggcgcagcgagctgtgattgcaccactccactct

SEQ ID NO: 137157 - DNA, 80 bp, synthetic construct
  misc_feature 1..80: note = Artificially Synthesized Probe
  source 1..80: mol_type = other DNA
agataacagcagagacaaaatttaaattcaaagctcaagtttttttcactttaccaagatgccatccaatgttacatcac

SEQ ID NO: 137158 - DNA, 80 bp, synthetic construct; identical to SEQ ID NO: 43127
  misc_feature 1..80: note = Artificially Synthesized Probe
  source 1..80: mol_type = other DNA

SEQ ID NO: 137159 - DNA, 80 bp, synthetic construct
  misc_feature 1..80: note = Artificially Synthesized Probe
  source 1..80: mol_type = other DNA
attcttcctctctcctgccaccttgtgaagaaggatgggtttgcttccctttccaccatgattgtaagtttcctgaggca

SEQ ID NO: 137160 - DNA, 80 bp, synthetic construct
  misc_feature 1..80: note = Artificially Synthesized Probe
  source 1..80: mol_type = other DNA
tacattgttaaacagttaacggacattttatgagtccccgcctcaactacaaccagtagcactctagaagcaggcaaaat

SEQ ID NO: 137161 - DNA, 80 bp, synthetic construct
  misc_feature 1..80: note = Artificially Synthesized Probe
  source 1..80: mol_type = other DNA
gaaatcctggttgggaaatgactgtgagcccgaatcaaaactctgcccctacaaaaggctgatctaacaacccgactcca

SEQ ID NO: 137162 - DNA, 80 bp, synthetic construct; identical to SEQ ID NO: 43128
  misc_feature 1..80: note = Artificially Synthesized Probe
  source 1..80: mol_type = other DNA

SEQ ID NO: 137163 - DNA, 80 bp, synthetic construct
  misc_feature 1..80: note = Artificially Synthesized Probe
  source 1..80: mol_type = other DNA
gtgagctgacaatgacaaattcaaaatcccacataatgaagatcaatgccatgctgggaagtcagtcttggagagcagtt

SEQ ID NO: 137164 - DNA, 80 bp, synthetic construct
  misc_feature 1..80: note = Artificially Synthesized Probe
  source 1..80: mol_type = other DNA
caactttgaaatagttgataattcatcttcttaggcatgagacattgggcaaggggtggctattgccacattcatttctg

SEQ ID NO: 137165 - DNA, 80 bp, synthetic construct
  misc_feature 1..80: note = Artificially Synthesized Probe
  source 1..80: mol_type = other DNA
ttttttttttttttttttttttttgagatggagtctcactctgtcaccaaggctggagtgcagtggcaccatctcagctc

SEQ ID NO: 137166 - DNA, 80 bp, synthetic construct
  misc_feature 1..80: note = Artificially Synthesized Probe
  source 1..80: mol_type = other DNA
aggcgatccgcccacctccgcctcccaaagtgttgggattacaggcgtaagctaccaagcccggcctattttcgttctaa

SEQ ID NO: 137167 - DNA, 80 bp, synthetic construct
  misc_feature 1..80: note = Artificially Synthesized Probe
  source 1..80: mol_type = other DNA
aagaaggcaagtattaacagcctccttttttggtgaaaatcaagacatgggaagatgaagaaacagccccggacgacaca

SEQ ID NO: 137168 - DNA, 80 bp, synthetic construct; identical to SEQ ID NO: 43129
  misc_feature 1..80: note = Artificially Synthesized Probe
  source 1..80: mol_type = other DNA

SEQ ID NO: 137169 - DNA, 80 bp, synthetic construct
  misc_feature 1..80: note = Artificially Synthesized Probe
  source 1..80: mol_type = other DNA
acactaagccaatagttaaaaattgtgagagttacatgaaaatccggatttccggctgctcttgaaaaactgatagatct

SEQ ID NO: 137170 - DNA, 80 bp, synthetic construct
  misc_feature 1..80: note = Artificially Synthesized Probe
  source 1..80: mol_type = other DNA
ctgggggtttcaggtgactgccaactcagtagaagccaaccatgtaatacggctgccaaaaatctcagcaaatccaaggt

SEQ ID NO: 137171 - DNA, 80 bp, synthetic construct
  misc_feature 1..80: note = Artificially Synthesized Probe
  source 1..80: mol_type = other DNA
tggcccttaagttttgaagagtcacagactccttagaaaatctagaaaaatcaataagttttcctcccataaatatgtct

SEQ ID NO: 137172 - DNA, 80 bp, synthetic construct; identical to SEQ ID NO: 43130
  misc_feature 1..80: note = Artificially Synthesized Probe
  source 1..80: mol_type = other DNA

SEQ ID NO: 137173 - DNA, 80 bp, synthetic construct
  misc_feature 1..80: note = Artificially Synthesized Probe
  source 1..80: mol_type = other DNA
aggagtttctcacaactaaagctataaaactgaactagtctgtcctgtggaccaacaaagtagcaagctccccatcactg

SEQ ID NO: 137174 - DNA, 80 bp, synthetic construct
  misc_feature 1..80: note = Artificially Synthesized Probe
  source 1..80: mol_type = other DNA
aatacagcaccccctccttatcagcagttcactttctgaggttttagccacctgtagttgactgtggtccaaaaatatta

SEQ ID NO: 137175 - DNA, 80 bp, synthetic construct
  misc_feature 1..80: note = Artificially Synthesized Probe
  source 1..80: mol_type = other DNA
ttggggacatgatgactatcaacagtgatgaaaattttgcgtaaataagatacaggcccacactcctagaagacaaagaa

SEQ ID NO: 137176 - DNA, 80 bp, synthetic construct
  misc_feature 1..80: note = Artificially Synthesized Probe
  source 1..80: mol_type = other DNA
agcagccatctcggctattacatacagctccaaatcacaagaggagtgatgctggcatactgtcataattgtgctatttt

SEQ ID NO: 137177 - DNA, 80 bp, synthetic construct; identical to SEQ ID NO: 43131
  misc_feature 1..80: note = Artificially Synthesized Probe
  source 1..80: mol_type = other DNA

SEQ ID NO: 137178 - DNA, 80 bp, synthetic construct
  misc_feature 1..80: note = Artificially Synthesized Probe
  source 1..80: mol_type = other DNA
caagccatccattttaattcttgggaagctgcaaaaatttcatagcataccacatcatgtacttgttgaattgactcatc

SEQ ID NO: 137179 - DNA, 80 bp, synthetic construct
  misc_feature 1..80: note = Artificially Synthesized Probe
  source 1..80: mol_type = other DNA
gtggtcaaaaaacaaagactctgcaaacgtttagcagaatgttaaccaagcggctggtatttcagaaacttcaagaagct

SEQ ID NO: 137180 - DNA, 80 bp, synthetic construct
  misc_feature 1..80: note = Artificially Synthesized Probe
  source 1..80: mol_type = other DNA
cacatatcgaatcctggctcgcccctcactagtcacatatcaaatcctggcttgtccccttgctagtcacgtatcaaatc

SEQ ID NO: 137181 - DNA, 80 bp, synthetic construct; identical to SEQ ID NO: 43132
  misc_feature 1..80: note = Artificially Synthesized Probe
  source 1..80: mol_type = other DNA

SEQ ID NO: 137182 - DNA, 80 bp, synthetic construct
  misc_feature 1..80: note = Artificially Synthesized Probe
  source 1..80: mol_type = other DNA
ggcggaccatgaagtcaggagtttgagaccagcctgaccaacatggtgaaatcccgtctctactaaaaatacaaaaatta

SEQ ID NO: 137183 - DNA, 80 bp, synthetic construct
  misc_feature 1..80: note = Artificially Synthesized Probe
  source 1..80: mol_type = other DNA
acaaagaagcaagaagcacatctaggctgggtatagcctagcagccatctcggctattacatacagctccaaatcacaag

SEQ ID NO: 137184 - DNA, 80 bp, synthetic construct
  misc_feature 1..80: note = Artificially Synthesized Probe
  source 1..80: mol_type = other DNA
gcatccactgggggtcttggaatgtatcccccacaggtaagtggggacgacttgtaataataagtgtctcatgcctataa

SEQ ID NO: 137185 - DNA, 80 bp, synthetic construct
  misc_feature 1..80: note = Artificially Synthesized Probe
  source 1..80: mol_type = other DNA
ggaggctaaggtgggaggatcacttggccccaggagttcaaggttaccgtgaaaaatgattgcactccagcctgagcaac

SEQ ID NO: 137186 - DNA, 80 bp, synthetic construct; identical to SEQ ID NO: 43133
  misc_feature 1..80: note = Artificially Synthesized Probe
  source 1..80: mol_type = other DNA

SEQ ID NO: 137187 - DNA, 80 bp, synthetic construct
  misc_feature 1..80: note = Artificially Synthesized Probe
  source 1..80: mol_type = other DNA
acaaagtgctggaaaagacagatggggccatgacaggaaaagcagttatttcttctgggcttcctttctgtctggattct

SEQ ID NO: 137188 - DNA, 80 bp, synthetic construct
  misc_feature 1..80: note = Artificially Synthesized Probe
  source 1..80: mol_type = other DNA
tcacagagtacacaaacaccacgtatgccatttgatcaacatccagacatgtgcacatcctgctgcctaacggaagacag

SEQ ID NO: 137189 - DNA, 80 bp, synthetic construct
  misc_feature 1..80: note = Artificially Synthesized Probe
  source 1..80: mol_type = other DNA
ttctgggtctgactctgtaataccgctagtttgcaagagtccagaaccacaggttgaaacgtaaataactgaaagataca

SEQ ID NO: 137190 - DNA, 80 bp, synthetic construct; identical to SEQ ID NO: 43134
  misc_feature 1..80: note = Artificially Synthesized Probe
  source 1..80: mol_type = other DNA

SEQ ID NO: 137191 - DNA, 80 bp, synthetic construct
  misc_feature 1..80: note = Artificially Synthesized Probe
  source 1..80: mol_type = other DNA
caccattacagctcactgaagcttgtactaccacacccagctaattattttaccttttcgtagagacgtgtattgctatg

SEQ ID NO: 137192 - DNA, 80 bp, synthetic construct
  misc_feature 1..80: note = Artificially Synthesized Probe
  source 1..80: mol_type = other DNA
tgtggcctatgtgtagtgaaatagaaagatgacaaagatacagttcttaccttccaggagcttacaaacatcaaagggat

SEQ ID NO: 137193 - DNA, 80 bp, synthetic construct
  misc_feature 1..80: note = Artificially Synthesized Probe
  source 1..80: mol_type = other DNA
tccagttcaaaattctgattccttggtgtattcagataaggtccatggaaaacatcgtcaagaaactagtatctgagctg

SEQ ID NO: 137194 - DNA, 80 bp, synthetic construct; identical to SEQ ID NO: 43135
  misc_feature 1..80: note = Artificially Synthesized Probe
  source 1..80: mol_type = other DNA

SEQ ID NO: 137195 - DNA, 80 bp, synthetic construct
  misc_feature 1..80: note = Artificially Synthesized Probe
  source 1..80: mol_type = other DNA
gcctcctcagtagctgggactacaggcacaggccaccaccatgcccagctaattttgtactttttgaagatgcagggttt

SEQ ID NO: 137196 - DNA, 80 bp, synthetic construct
  misc_feature 1..80: note = Artificially Synthesized Probe
  source 1..80: mol_type = other DNA
ggccagagctgatacggtgtctgaagaggtagacaatacgatcaaacacagattaggacagctaagcagcagaatgcagc

SEQ ID NO: 137197 - DNA, 80 bp, synthetic construct
  misc_feature 1..80: note = Artificially Synthesized Probe
  source 1..80: mol_type = other DNA
acagttttaggaacctaatgtgtctacacacaaattctgatgatgacaagaaggccagctactcacaaacaggccaaagg

SEQ ID NO: 137198 - DNA, 80 bp, synthetic construct; identical to SEQ ID NO: 42954
  misc_feature 1..80: note = Artificially Synthesized Probe
  source 1..80: mol_type = other DNA

SEQ ID NO: 137199 - DNA, 80 bp, synthetic construct; identical to SEQ ID NO: 43136
  misc_feature 1..80: note = Artificially Synthesized Probe
  source 1..80: mol_type = other DNA

SEQ ID NO: 137200 - DNA, 80 bp, synthetic construct
  misc_feature 1..80: note = Artificially Synthesized Probe
  source 1..80: mol_type = other DNA
acgatgcctcaacagaagaacagaatcaaataaaaagggaaatggttcacagataacatctggcccctcaattattaaag

SEQ ID NO: 137201 - DNA, 80 bp, synthetic construct
  misc_feature 1..80: note = Artificially Synthesized Probe
  source 1..80: mol_type = other DNA
tgtcgtccatgctggagtgcagcggtgcaatctcgcctcactgcaacctctggctcctgggttcaagtgactctcatgcc

SEQ ID NO: 137202 - DNA, 80 bp, synthetic construct
  misc_feature 1..80: note = Artificially Synthesized Probe
  source 1..80: mol_type = other DNA
aaaatatcaaaaccccaacaactcagctgacgaatgcagcaacctcatttagccacagcccacaaaataaaagagggcac

SEQ ID NO: 137203 - DNA, 80 bp, synthetic construct
  misc_feature 1..80: note = Artificially Synthesized Probe
  source 1..80: mol_type = other DNA
aacggatcaatcggaaagtgctctgcaagagggcacatcgacgttttggtcatctggttgccgggagaaaccaggggagc

SEQ ID NO: 137204 - DNA, 80 bp, synthetic construct; identical to SEQ ID NO: 43137
  misc_feature 1..80: note = Artificially Synthesized Probe
  source 1..80: mol_type = other DNA

SEQ ID NO: 137205 - DNA, 80 bp, synthetic construct
  misc_feature 1..80: note = Artificially Synthesized Probe
  source 1..80: mol_type = other DNA
gacaaagttccggagcctttacgtgaacatgccagataactcaaattacctcacacacaatccctttctcggtcccctta

SEQ ID NO: 137206 - DNA, 80 bp, synthetic construct
  misc_feature 1..80: note = Artificially Synthesized Probe
  source 1..80: mol_type = other DNA
ggttagctgttatgtgaccaagggatacacatataagcccatcttcatgtctaagccttgggaacacaaaaacaggtaaa

SEQ ID NO: 137207 - DNA, 80 bp, synthetic construct
  misc_feature 1..80: note = Artificially Synthesized Probe
  source 1..80: mol_type = other DNA
atcttcatgtctaagccttgggaacacaaaaacaggtaaatccacaaaaacagggaaataaagccattaaaaagctagtc

SEQ ID NO: 137208 - DNA, 80 bp, synthetic construct
  misc_feature 1..80: note = Artificially Synthesized Probe
  source 1..80: mol_type = other DNA
aactgctggatcatggggtaggcatatgtttggctaactgcctaggagttttccaatgtggctgggctaacttccatttc

SEQ ID NO: 137209 - DNA, 80 bp, synthetic construct; identical to SEQ ID NO: 43138
  misc_feature 1..80: note = Artificially Synthesized Probe
  source 1..80: mol_type = other DNA

SEQ ID NO: 137210 - DNA, 80 bp, synthetic construct
  misc_feature 1..80: note = Artificially Synthesized Probe
  source 1..80: mol_type = other DNA
tataaacattagcaaagtgtggtggtgcgcctgtagtcccagctactcaggaggctgaggtgggaggatcacttgagccc

SEQ ID NO: 137211 - DNA, 80 bp, synthetic construct
  misc_feature 1..80: note = Artificially Synthesized Probe
  source 1..80: mol_type = other DNA
actctatcacagcttccttccttttgtatgaagaattgaagactggccaaagcattgagttccttgccacaaagttcata

SEQ ID NO: 137212 - DNA, 80 bp, synthetic construct
  misc_feature 1..80: note = Artificially Synthesized Probe
  source 1..80: mol_type = other DNA
gtggtggctcacacctgtaatcccagctactagggaggctaaggcaggagaatcacttgaacctgggaggtggaggttgc

SEQ ID NO: 137213 - DNA, 80 bp, synthetic construct
  misc_feature 1..80: note = Artificially Synthesized Probe
  source 1..80: mol_type = other DNA
gtgattaactaaattaacaatatacttttcattaattatgaacaatcacacagctttactcaccttattttcagcctaat

SEQ ID NO: 137214 - DNA, 80 bp, synthetic construct; identical to SEQ ID NO: 43139
  misc_feature 1..80: note = Artificially Synthesized Probe
  source 1..80: mol_type = other DNA

SEQ ID NO: 137215 - DNA, 80 bp, synthetic construct
  misc_feature 1..80: note = Artificially Synthesized Probe
  source 1..80: mol_type = other DNA
ctatctggacctttacaggagagtctgctgacccatggtgtacgtgattgtgacaaattcacgtaacgaaatacagcaac

SEQ ID NO: 137216 - DNA, 80 bp, synthetic construct
  misc_feature 1..80: note = Artificially Synthesized Probe
  source 1..80: mol_type = other DNA
gaacaggcaaggaaaggccttctgaagatttttttaaatgttttatttcttgatctgggtggcagttacatggctatgtt

SEQ ID NO: 137217 - DNA, 80 bp, synthetic construct; identical to SEQ ID NO: 43140
  misc_feature 1..80: note = Artificially Synthesized Probe
  source 1..80: mol_type = other DNA

SEQ ID NO: 137218 - DNA, 80 bp, synthetic construct
  misc_feature 1..80: note = Artificially Synthesized Probe
  source 1..80: mol_type = other DNA
gttgtcccaactactcaagaggctgcggcaggagaatcgcttgaacccgggaggcagaggttgcagtgagctgagaatgt

SEQ ID NO: 137219 - DNA, 80 bp, synthetic construct
  misc_feature 1..80: note = Artificially Synthesized Probe
  source 1..80: mol_type = other DNA
ggctcaactgatcctcctgtctcagcttcccgagtggctaggactacaggcacgtgccacacttggctaatttttaaatt

SEQ ID NO: 137220 - DNA, 80 bp, synthetic construct
  misc_feature 1..80: note = Artificially Synthesized Probe
  source 1..80: mol_type = other DNA
cttagagatgagaaaatgtgaggaaatggtgccccctaatggacaagaggaggtacaattttatagtactattttaattc

SEQ ID NO: 137221 - DNA, 80 bp, synthetic construct
  misc_feature 1..80: note = Artificially Synthesized Probe
  source 1..80: mol_type = other DNA
gtaagagaaacaggccatgagtgtttgagatgtcagactgggttgtcacagctcatcctactgttctgaccaagccaaca

SEQ ID NO: 137222 - DNA, 80 bp, synthetic construct; identical to SEQ ID NO: 43141
  misc_feature 1..80: note = Artificially Synthesized Probe
  source 1..80: mol_type = other DNA

SEQ ID NO: 137223 - DNA, 80 bp, synthetic construct
  misc_feature 1..80: note = Artificially Synthesized Probe
  source 1..80: mol_type = other DNA
tttttgtgtgtgatggagactagctctgtcaccaggctggagtgcaatggcgcgatctcggctcactgcaacctccgact

SEQ ID NO: 137224 - DNA, 80 bp, synthetic construct
  misc_feature 1..80: note = Artificially Synthesized Probe
  source 1..80: mol_type = other DNA
ggcctcccaaagtgctaggattacaggtatgagccaccgcgcctggccaagaggaaaacatttctaatatcattttatga

SEQ ID NO: 137225 - DNA, 80 bp, synthetic construct
  misc_feature 1..80: note = Artificially Synthesized Probe
  source 1..80: mol_type = other DNA
aaaggtacatgcactgagcctggctaattttattattttgttataaacacagggtcttgctatgctgtccaagctgatct

SEQ ID NO: 137226 - DNA, 80 bp, synthetic construct; identical to SEQ ID NO: 43142
  misc_feature 1..80: note = Artificially Synthesized Probe
  source 1..80: mol_type = other DNA

SEQ ID NO: 137227 - DNA, 80 bp, synthetic construct
  misc_feature 1..80: note = Artificially Synthesized Probe
  source 1..80: mol_type = other DNA
caaaaagaaaaaataaataaaaataaaataaaaataggctgggcgcggtggctcatgcctgtaatcccagcactttgagg

SEQ ID NO: 137228 - DNA, 80 bp, synthetic construct
  misc_feature 1..80: note = Artificially Synthesized Probe
  source 1..80: mol_type = other DNA
ggccaaagtcttttaagtactcaaaataaccaatcttttcttttatggttagtgcttttaatgttttgtttaagggatct

SEQ ID NO: 137229 - DNA, 80 bp, synthetic construct
  misc_feature 1..80: note = Artificially Synthesized Probe
  source 1..80: mol_type = other DNA
cccaggaagcagaggttgcggtgagccgagatcgcgccactgcactccagcctggataacagaaggagactctgtctcaa

SEQ ID NO: 137230 - DNA, 80 bp, synthetic construct
  misc_feature 1..80: note = Artificially Synthesized Probe
  source 1..80: mol_type = other DNA
aggcacttcacagaaattatttcccttaatcccctctgccaggcgaggcacacttttctcctcttcaacgttaagattgg

SEQ ID NO: 137231 - DNA, 80 bp, synthetic construct
  misc_feature 1..80: note = Artificially Synthesized Probe
  source 1..80: mol_type = other DNA
gcttgctggtgcacacctgtggtcccagctactcaggaggctgaggtgggaggatcgcttgagcctgggaggcagaggtt

SEQ ID NO: 137232 - DNA, 80 bp, synthetic construct; identical to SEQ ID NO: 43143
  misc_feature 1..80: note = Artificially Synthesized Probe
  source 1..80: mol_type = other DNA

SEQ ID NO: 137233 - DNA, 80 bp, synthetic construct
  misc_feature 1..80: note = Artificially Synthesized Probe
  source 1..80: mol_type = other DNA
ggaaaagccctgtgggaatccacattggctgggcagaggggtttatcctgctttgagaatcactcatctcgtttagttat

SEQ ID NO: 137234 - DNA, 80 bp, synthetic construct
  misc_feature 1..80: note = Artificially Synthesized Probe
  source 1..80: mol_type = other DNA
agtatgaccacaatcagaatttttgcgtattgccttctactacgaaactgtatagctgtacaaaaataaactgggatgat

SEQ ID NO: 137235 - DNA, 80 bp, synthetic construct; identical to SEQ ID NO: 43144
  misc_feature 1..80: note = Artificially Synthesized Probe
  source 1..80: mol_type = other DNA

SEQ ID NO: 137236 - DNA, 80 bp, synthetic construct
  misc_feature 1..80: note = Artificially Synthesized Probe
  source 1..80: mol_type = other DNA
atgattatcttcagtttactattaggaggctaaaacgattttctagaccactgcgaccaaacctggctactatttaaacc

SEQ ID NO: 137237 - DNA, 80 bp, synthetic construct
  misc_feature 1..80: note = Artificially Synthesized Probe
  source 1..80: mol_type = other DNA
acttccactcaacagaaacatattctcaccctcctcctcacagtaacactaaattcactctggaaatactgaaatctact

SEQ ID NO: 137238 - DNA, 80 bp, synthetic construct
  misc_feature 1..80: note = Artificially Synthesized Probe
  source 1..80: mol_type = other DNA
cttttcattaagatccacaggaatctggcttagatttcactcagatgacctgctaagtgaaactctgagactagagaagt

SEQ ID NO: 137239 - DNA, 80 bp, synthetic construct; identical to SEQ ID NO: 43145
  misc_feature 1..80: note = Artificially Synthesized Probe
  source 1..80: mol_type = other DNA

SEQ ID NO: 137240 - DNA, 80 bp, synthetic construct; identical to SEQ ID NO: 42955
  misc_feature 1..80: note = Artificially Synthesized Probe
  source 1..80: mol_type = other DNA

SEQ ID NO: 137241 - DNA, 80 bp, synthetic construct
  misc_feature 1..80: note = Artificially Synthesized Probe
  source 1..80: mol_type = other DNA
agtatatccattaaaaaaagtttggaaggatctgccaaaatattcacaatgatggggatcaagagctctgcactcaaata

SEQ ID NO: 137242 - DNA, 80 bp, synthetic construct
  misc_feature 1..80: note = Artificially Synthesized Probe
  source 1..80: mol_type = other DNA
gtaaagtggaaagctgccattacccatccagtcagccaaatctggctacctagaaaccagttcaaaattcttaacttagg

SEQ ID NO: 137243 - DNA, 80 bp, synthetic construct
  misc_feature 1..80: note = Artificially Synthesized Probe
  source 1..80: mol_type = other DNA
ggctcactcctgtaatcccagcactttgggaggctggggcagatggatcatgaggtcaggagatcgagaccatcctatcc

SEQ ID NO: 137244 - DNA, 80 bp, synthetic construct; identical to SEQ ID NO: 43146
  misc_feature 1..80: note = Artificially Synthesized Probe
  source 1..80: mol_type = other DNA

SEQ ID NO: 137245 - DNA, 80 bp, synthetic construct
  misc_feature 1..80: note = Artificially Synthesized Probe
  source 1..80: mol_type = other DNA
aaaaattattaacttggcctgtagtattcagctaaaacaccatttcctcaagggagtaagccttttcaatccatcttgag

SEQ ID NO: 137246 - DNA, 80 bp, synthetic construct
  misc_feature 1..80: note = Artificially Synthesized Probe
  source 1..80: mol_type = other DNA
ggataacaaagtggagtttatcactgtttagtgcctagagtgctgtcgggtacacaggaagtatctaataaagattacta

SEQ ID NO: 137247 - DNA, 80 bp, synthetic construct
  misc_feature 1..80: note = Artificially Synthesized Probe
  source 1..80: mol_type = other DNA
ccaacatggtgaaaccccgtctctactaaaaatacaaaaattagccaggcttggtggcgcgtgtctgtaaactcagctac

SEQ ID NO: 137248 - DNA, 80 bp, synthetic construct
  misc_feature 1..80: note = Artificially Synthesized Probe
  source 1..80: mol_type = other DNA
cctataatctgttactgtgagattaactatcaagatagactatgaagtctgtgttggtagactatatctgtcttgctcac

SEQ ID NO: 137249 - DNA, 80 bp, synthetic construct; identical to SEQ ID NO: 43147
  misc_feature 1..80: note = Artificially Synthesized Probe
  source 1..80: mol_type = other DNA

SEQ ID NO: 137250 - DNA, 80 bp, synthetic construct
  misc_feature 1..80: note = Artificially Synthesized Probe
  source 1..80: mol_type = other DNA
agacggaattttaaaaacgtgaatgtgctccagtcattatcctgccaaaagtccttcaatgaatactcactgcctacagc

SEQ ID NO: 137251 - DNA, 80 bp, synthetic construct
  misc_feature 1..80: note = Artificially Synthesized Probe
  source 1..80: mol_type = other DNA
gaagcctaacatttaaaattggtactcacatatgtatataatattctggggatacaggcttaaaaattatccaagtgaaa

SEQ ID NO: 137252 - DNA, 80 bp, synthetic construct
  misc_feature 1..80: note = Artificially Synthesized Probe
  source 1..80: mol_type = other DNA
ggtttcaaggctcttccatgttgtagcatgaatgggtactttattccttttaatggctgagtaatattcccttgtatgga

SEQ ID NO: 137253 - DNA, 80 bp, synthetic construct
  misc_feature 1..80: note = Artificially Synthesized Probe
  source 1..80: mol_type = other DNA
caggcccctgtaatcccagctgctcaggaggctgacacaggagaatcacttgaacccaggaggcagaggttgcagtgagc

SEQ ID NO: 137254 - DNA, 80 bp, synthetic construct; identical to SEQ ID NO: 43148
  misc_feature 1..80: note = Artificially Synthesized Probe
  source 1..80: mol_type = other DNA

SEQ ID NO: 137255 - DNA, 80 bp, synthetic construct
  misc_feature 1..80: note = Artificially Synthesized Probe
  source 1..80: mol_type = other DNA
agaaaaaaagcatttcactgaaaggcatgtggtctccaaaaaaactggcaacgataagcctagaggacagagatcctcca

SEQ ID NO: 137256 - DNA, 80 bp, synthetic construct
  misc_feature 1..80: note = Artificially Synthesized Probe
  source 1..80: mol_type = other DNA
cgagagattgtagaaagacacgaaactaagaagtagtaggaaagacagctgggcccggggcaccactaccaccaatgcac

SEQ ID NO: 137257 - DNA, 80 bp, synthetic construct
  misc_feature 1..80: note = Artificially Synthesized Probe
  source 1..80: mol_type = other DNA
cagagagggaggacagcagacgtcagcattttttctttgcacttatcagaaagatcaaagactttaacactttcactaat

SEQ ID NO: 137258 - DNA, 80 bp, synthetic construct; identical to SEQ ID NO: 43149
  misc_feature 1..80: note = Artificially Synthesized Probe
  source 1..80: mol_type = other DNA

SEQ ID NO: 137259 - DNA, 80 bp, synthetic construct
  misc_feature 1..80: note = Artificially Synthesized Probe
  source 1..80: mol_type = other DNA
aatgattgataatatccatatacaatcatctctatatcctatttctattataactctacttatttaactattttctttat

SEQ ID NO: 137260 - DNA, 80 bp, synthetic construct
  misc_feature 1..80: note = Artificially Synthesized Probe
  source 1..80: mol_type = other DNA
catcaggtctcagcttagagggaaccacctcacagagaacttcccgttaagcccctttatttaaaggaccctccgcagca

SEQ ID NO: 137261 - DNA, 80 bp, synthetic construct; identical to SEQ ID NO: 43150
  misc_feature 1..80: note = Artificially Synthesized Probe
  source 1..80: mol_type = other DNA

SEQ ID NO: 137262 - DNA, 80 bp, synthetic construct
  misc_feature 1..80: note = Artificially Synthesized Probe
  source 1..80: mol_type = other DNA
gacggcattcgccagggtctcccaccacttgatcctgcacacctcaagggcatggactggaccttatcatctctgcaccc

SEQ ID NO: 137263 - DNA, 80 bp, synthetic construct
  misc_feature 1..80: note = Artificially Synthesized Probe
  source 1..80: mol_type = other DNA
caccctgtcacccagcctgaaggtacagtggcgcaatcttggctcactgcaatctctgcctcccaggttcaagtgattct

SEQ ID NO: 137264 - DNA, 80 bp, synthetic construct
  misc_feature 1..80: note = Artificially Synthesized Probe
  source 1..80: mol_type = other DNA
gtaagaaaatccatctccacaggaaaatcaccggacaaaaaataataaaacgtgaagtctaaaaatctgtatcttgaggc

SEQ ID NO: 137265 - DNA, 80 bp, synthetic construct
  misc_feature 1..80: note = Artificially Synthesized Probe
  source 1..80: mol_type = other DNA
ccagctactcaggaggctgaggcagaagaatcgcctgaacccaggaggcagacgttgcagtgagccgagaccgcgccatt

SEQ ID NO: 137266 - DNA, 80 bp, synthetic construct
  misc_feature 1..80: note = Artificially Synthesized Probe
  source 1..80: mol_type = other DNA
tttccactttcaatttacagcagaaaatttgggaggactctcacaacctaagagtacaattattaataatatgttcacta

SEQ ID NO: 137267 - DNA, 80 bp, synthetic construct; identical to SEQ ID NO: 43151
  misc_feature 1..80: note = Artificially Synthesized Probe
  source 1..80: mol_type = other DNA

SEQ ID NO: 137268 - DNA, 80 bp, synthetic construct
  misc_feature 1..80: note = Artificially Synthesized Probe
  source 1..80: mol_type = other DNA
agcagatggatcacctgaggtcaggtctctactaaaaataaaaacttggctgggtgtggtgttggcgcacacctgtaatc

SEQ ID NO: 137269 - DNA, 80 bp, synthetic construct
  misc_feature 1..80: note = Artificially Synthesized Probe
  source 1..80: mol_type = other DNA
gatcgcttgagctcaggagttggagactggcctgggcaacatggtgaaaccacatctctacaaaaaaaaattagctgggt

SEQ ID NO: 137270 - DNA, 80 bp, synthetic construct; identical to SEQ ID NO: 43152
  misc_feature 1..80: note = Artificially Synthesized Probe
  source 1..80: mol_type = other DNA

SEQ ID NO: 137271 - DNA, 80 bp, synthetic construct
  misc_feature 1..80: note = Artificially Synthesized Probe
  source 1..80: mol_type = other DNA
agctgaagccttctaccacatcaagaggaggtggatgagaagaaagtgaagatgttttctttttaaaatgttcagcattg

SEQ ID NO: 137272 - DNA, 80 bp, synthetic construct
  misc_feature 1..80: note = Artificially Synthesized Probe
  source 1..80: mol_type = other DNA
ttgctctcagtttctgtattcctctcacgactcctaggttttagtgctgtcctaggttttaaattgttttcatgtaacaa

SEQ ID NO: 137273 - DNA, 80 bp, synthetic construct
  misc_feature 1..80: note = Artificially Synthesized Probe
  source 1..80: mol_type = other DNA
gtgcagtagcgcgatcttggttcactacaagctccacctcccaggttcatgccattctcctgtctcagcctcttgagaag

SEQ ID NO: 137274 - DNA, 80 bp, synthetic construct; identical to SEQ ID NO: 43153
  misc_feature 1..80: note = Artificially Synthesized Probe
  source 1..80: mol_type = other DNA

SEQ ID NO: 137275 - DNA, 80 bp, synthetic construct; identical to SEQ ID NO: 42956
  misc_feature 1..80: note = Artificially Synthesized Probe
  source 1..80: mol_type = other DNA

SEQ ID NO: 137276 - DNA, 80 bp, synthetic construct
  misc_feature 1..80: note = Artificially Synthesized Probe
  source 1..80: mol_type = other DNA
tagctgagattacgggcacctgccaccatgcccagctaaatttttgtatttttaggagagacggggtttcaccatgttgg

SEQ ID NO: 137277 - DNA, 80 bp, synthetic construct
  misc_feature 1..80: note = Artificially Synthesized Probe
  source 1..80: mol_type = other DNA
ttcctgactcctcacacatcactactctttacaagtatgctactacagaatttcattcagagtgctaaagtaagaaaaaa

SEQ ID NO: 137278 - DNA, 80 bp, synthetic construct
  misc_feature 1..80: note = Artificially Synthesized Probe
  source 1..80: mol_type = other DNA
tgttgaaacaaacaaaagaaatagcaaaaatgtgcttttctgatacctgtcaaccaaacagtaactgactgcattattct

SEQ ID NO: 137279 - DNA, 80 bp, synthetic construct; identical to SEQ ID NO: 43154
  misc_feature 1..80: note = Artificially Synthesized Probe
  source 1..80: mol_type = other DNA

SEQ ID NO: 137280 - DNA, 80 bp, synthetic construct
  misc_feature 1..80: note = Artificially Synthesized Probe
  source 1..80: mol_type = other DNA
ttaaataaggcataatggaattgtccatttcctcaatcataaatccctttcttaaatcatataacttcatgacaattcct

SEQ ID NO: 137281 - DNA, 80 bp, synthetic construct
  misc_feature 1..80: note = Artificially Synthesized Probe
  source 1..80: mol_type = other DNA
catggtgaaacccggtctctactaaaaatacaaaaattagctaggcatggtagcggttgcctgtagtcccagctactcag

SEQ ID NO: 137282 - DNA, 80 bp, synthetic construct
  misc_feature 1..80: note = Artificially Synthesized Probe
  source 1..80: mol_type = other DNA
tagccttaaaaactcaataaacttgcaaaggcaagagttcctgcaggcagggccgcgcgtggtggctcacgcctgtaatc

SEQ ID NO: 137283 - DNA, 80 bp, synthetic construct
  misc_feature 1..80: note = Artificially Synthesized Probe
  source 1..80: mol_type = other DNA
ggtggcgtgcgcctgtaatcacagctactcaggaggctgagacaggagaatcgcttgaactcgggaggcggaggtcgcag

SEQ ID NO: 137284 - DNA, 80 bp, synthetic construct; identical to SEQ ID NO: 43155
  misc_feature 1..80: note = Artificially Synthesized Probe
  source 1..80: mol_type = other DNA

SEQ ID NO: 137285 - DNA, 80 bp, synthetic construct
  misc_feature 1..80: note = Artificially Synthesized Probe
  source 1..80: mol_type = other DNA
aaaaccaccagaacccccagccctcgccaaagacaatcaaagcctagaaagggttctctttcctttccttctgattcaga

SEQ ID NO: 137286 - DNA, 80 bp, synthetic construct
  misc_feature 1..80: note = Artificially Synthesized Probe
  source 1..80: mol_type = other DNA
atccaattacccagcactatttactgaaaagactctctttgaatgatgccactttggtcataaatcaagtatctacacat

SEQ ID NO: 137287 - DNA, 80 bp, synthetic construct
  misc_feature 1..80: note = Artificially Synthesized Probe
  source 1..80: mol_type = other DNA
cgatggccagctgcacctcgggcgtgagctgcagcacggcttccagctcctccacgaactccagttcctcctcctccatc

SEQ ID NO: 137288 - DNA, 80 bp, synthetic construct
  misc_feature 1..80: note = Artificially Synthesized Probe
  source 1..80: mol_type = other DNA
ggcacttccgggaccggggaactgtgggatcacggcggactgagactggcggcgttcctgtcacgtcaggtgtctcccgg

SEQ ID NO: 137289 - DNA, 80 bp, synthetic construct
  misc_feature 1..80: note = Artificially Synthesized Probe
  source 1..80: mol_type = other DNA
gccaaccgcagcccacagcctccgcgggcagcgcagcggcgacctctcagctcccggggccccctcggtcagtggcagcg

SEQ ID NO: 137290 - DNA, 80 bp, synthetic construct; identical to SEQ ID NO: 43156
  misc_feature 1..80: note = Artificially Synthesized Probe
  source 1..80: mol_type = other DNA

SEQ ID NO: 137291 - DNA, 80 bp, synthetic construct
  misc_feature 1..80: note = Artificially Synthesized Probe
  source 1..80: mol_type = other DNA
cctcgtgatccgcccgcctcggcctcccaaagtgctgggatgacaggcgtgagctactgcgcccggccagaaacgttttt

SEQ ID NO: 137292 - DNA, 80 bp, synthetic construct
  misc_feature 1..80: note = Artificially Synthesized Probe
  source 1..80: mol_type = other DNA
atgtaaattcaagctggtaatacaggaaatagtgaggtgcccagcccttacccccacaaaggaacaaataagccagatca

SEQ ID NO: 137293 - DNA, 80 bp, synthetic construct
  misc_feature 1..80: note = Artificially Synthesized Probe
  source 1..80: mol_type = other DNA
ccactgaacttttttttgttgttgttatcagagttgctcaaagtaaaaaataggagcagtatgattttttcttttatttt

SEQ ID NO: 137294 - DNA, 80 bp, synthetic construct; identical to SEQ ID NO: 43157
  misc_feature 1..80: note = Artificially Synthesized Probe
  source 1..80: mol_type = other DNA

SEQ ID NO: 137295 - DNA, 80 bp, synthetic construct
  misc_feature 1..80: note = Artificially Synthesized Probe
  source 1..80: mol_type = other DNA
aagcaaaatgtataatttcatttaaaaaatgcatagcatggtcccagctttgtgtgtattctgtgccaataaagctcaca

SEQ ID NO: 137296 - DNA, 80 bp, synthetic construct
  misc_feature 1..80: note = Artificially Synthesized Probe
  source 1..80: mol_type = other DNA
ctccaattctgttctaagattattttggctgttgtcttctgtattttcatctaacttttaaaatcagcatatcaattcac

SEQ ID NO: 137297 - DNA, 80 bp, synthetic construct; identical to SEQ ID NO: 42936
  misc_feature 1..80: note = Artificially Synthesized Probe
  source 1..80: mol_type = other DNA

SEQ ID NO: 137298 - DNA, 80 bp, synthetic construct
  misc_feature 1..80: note = Artificially Synthesized Probe
  source 1..80: mol_type = other DNA
tcctttaaaaaattaagatatttacatacagtaaaatttactcttgcaatttatgatgcagtgagttttgataaatgtgt

SEQ ID NO: 137299 - DNA, 80 bp, synthetic construct
  misc_feature 1..80: note = Artificially Synthesized Probe
  source 1..80: mol_type = other DNA
ctatctactaaaaatacaaaacgtagctggccgtggtggtgcacagaatcacttgaacccgagaggtggaggttgcagtg

SEQ ID NO: 137300 - DNA, 80 bp, synthetic construct; identical to SEQ ID NO: 43158
  misc_feature 1..80: note = Artificially Synthesized Probe
  source 1..80: mol_type = other DNA

SEQ ID NO: 137301 - DNA, 80 bp, synthetic construct
  misc_feature 1..80: note = Artificially Synthesized Probe
  source 1..80: mol_type = other DNA
tttgtatttttagtagagacagggtttcatcatgttgcccaggatggtctcaaactcctgacctcaggtgatctgccagc

SEQ ID NO: 137302 - DNA, 80 bp, synthetic construct
  misc_feature 1..80: note = Artificially Synthesized Probe
  source 1..80: mol_type = other DNA
catgttgttgcatgtatctgtggttcatgtcttcttgctggtattccactagatgaatacaccactatttgtttatctag

SEQ ID NO: 137303 - DNA, 80 bp, synthetic construct
  misc_feature 1..80: note = Artificially Synthesized Probe
  source 1..80: mol_type = other DNA
taactttctaagaaactggtaaactgttttccaaagtggctgtatcactttcacattgctaccagcaatgtatgagagtt

SEQ ID NO: 137304 - DNA, 80 bp, synthetic construct; identical to SEQ ID NO: 43159
  misc_feature 1..80: note = Artificially Synthesized Probe
  source 1..80: mol_type = other DNA

SEQ ID NO: 137305 - DNA, 80 bp, synthetic construct
  misc_feature 1..80: note = Artificially Synthesized Probe
  source 1..80: mol_type = other DNA
atataattgtgatagatccgataaaagagaagtaaagcacatgttgagagactatatggttagagttctgattggattag

SEQ ID NO: 137306 - DNA, 80 bp, synthetic construct
  misc_feature 1..80: note = Artificially Synthesized Probe
  source 1..80: mol_type = other DNA
cagcctcctgagtagctgggattacaggcatacgccaccacacccggctaatttttgtatttttagtagagacggggttt

SEQ ID NO: 137307 - DNA, 80 bp, synthetic construct
  misc_feature 1..80: note = Artificially Synthesized Probe
  source 1..80: mol_type = other DNA
agataacacatagataaaaggaacagaatgtgcaaaagccatgagtatgaaaagagtcggccagggtgatggaagtttga

SEQ ID NO: 137308 - DNA, 80 bp, synthetic construct
  misc_feature 1..80: note = Artificially Synthesized Probe
  source 1..80: mol_type = other DNA
gcctcctcagccagagcaggctcagaaagactccatatgtatttctttttgagtctttcttatcaatgaacatgagctat

SEQ ID NO: 137309 - DNA, 80 bp, synthetic construct; identical to SEQ ID NO: 43160
  misc_feature 1..80: note = Artificially Synthesized Probe
  source 1..80: mol_type = other DNA

SEQ ID NO: 137310 - DNA, 80 bp, synthetic construct
  misc_feature 1..80: note = Artificially Synthesized Probe
  source 1..80: mol_type = other DNA
gctactaataatataagtttgagtttaggagagttatgcagtacaaagaagtaaaggaagttaaaagagcagagagatag

SEQ ID NO: 137311 - DNA, 80 bp, synthetic construct
  misc_feature 1..80: note = Artificially Synthesized Probe
  source 1..80: mol_type = other DNA
agaaatttgggtatgaaaataaggagcacgtgatattttcacaaatgagctgggctcaaaaaaaacaacttccaggctgg

SEQ ID NO: 137312 - DNA, 80 bp, synthetic construct
  misc_feature 1..80: note = Artificially Synthesized Probe
  source 1..80: mol_type = other DNA
ctgtaatcccaactactcaggaggctgaggcaggagaatcacttgaacccgggaggtggaggttgcagtgagccaagatt

SEQ ID NO: 137313 - DNA, 80 bp, synthetic construct
  misc_feature 1..80: note = Artificially Synthesized Probe
  source 1..80: mol_type = other DNA
ggtgggcacctgtaatcccagctactcaggaggctgagacaggacaatctcttgaacctgggaggcagaggttgcagtga

SEQ ID NO: 137314 - DNA, 80 bp, synthetic construct; identical to SEQ ID NO: 43161
  misc_feature 1..80: note = Artificially Synthesized Probe
  source 1..80: mol_type = other DNA

SEQ ID NO: 137315 - DNA, 80 bp, synthetic construct
  misc_feature 1..80: note = Artificially Synthesized Probe
  source 1..80: mol_type = other DNA
taggctgtgtaggagatggggagaggaattggaagggagtatacagtaggctgtgagggaggtggggaggatggattggg

SEQ ID NO: 137316 - DNA, 80 bp, synthetic construct; identical to SEQ ID NO: 42957
  misc_feature 1..80: note = Artificially Synthesized Probe
  source 1..80: mol_type = other DNA

SEQ ID NO: 137317 - DNA, 80 bp, synthetic construct
  misc_feature 1..80: note = Artificially Synthesized Probe
  source 1..80: mol_type = other DNA
taggagatggggaggatggattgggagtatacagtcggctgtgagggagttgggggaggatggattgaaagggagtatgc

SEQ ID NO: 137318 - DNA, 80 bp, synthetic construct
  misc_feature 1..80: note = Artificially Synthesized Probe
  source 1..80: mol_type = other DNA
gggaggatggattggaagggagtatacagtaggctgtgtaggagttgggggagcatggattggaagggagtatacagtag

SEQ ID NO: 137319 - DNA, 80 bp, synthetic construct; identical to SEQ ID NO: 43162
  misc_feature 1..80: note = Artificially Synthesized Probe
  source 1..80: mol_type = other DNA

SEQ ID NO: 137320 - DNA, 80 bp, synthetic construct
  misc_feature 1..80: note = Artificially Synthesized Probe
  source 1..80: mol_type = other DNA
agcttccctctctgtaaggaccttctccaaaatagctgagccttctgtaaaactgcttgtgaaaaaagaattgcaggacg

SEQ ID NO: 137321 - DNA, 80 bp, synthetic construct
  misc_feature 1..80: note = Artificially Synthesized Probe
  source 1..80: mol_type = other DNA
ccaggccaacttgtagtggaggaatagggtataatttccccttgaaatcagctcaaaatgttctcttggtgcttctttat

SEQ ID NO: 137322 - DNA, 80 bp, synthetic construct
  misc_feature 1..80: note = Artificially Synthesized Probe
  source 1..80: mol_type = other DNA
gatggcttgagcccacgaattgagactgcagtgagctatgattgtgccactgtactcactccagcctgggcaatacagca

SEQ ID NO: 137323 - DNA, 80 bp, synthetic construct
  misc_feature 1..80: note = Artificially Synthesized Probe
  source 1..80: mol_type = other DNA
tggagtgcagtggcgcaatctcagctcactgcaacctcccaggttcaagcagttctcccaggttcaagcaattctcctgc

SEQ ID NO: 137324 - DNA, 80 bp, synthetic construct
  misc_feature 1..80: note = Artificially Synthesized Probe
  source 1..80: mol_type = other DNA
agggtgtaagccactgcacccggcctgctaaatttatattctaacagtttatctgtagatccttttagatttattactca

SEQ ID NO: 137325 - DNA, 80 bp, synthetic construct; identical to SEQ ID NO: 42958
  misc_feature 1..80: note = Artificially Synthesized Probe
  source 1..80: mol_type = other DNA

SEQ ID NO: 137326 - DNA, 80 bp, synthetic construct
  misc_feature 1..80: note = Artificially Synthesized Probe
  source 1..80: mol_type = other DNA
gactctggggcccaaagataaagaactcactttatatagtactcagagaacaaagagcagaaaaatgtctcccatcccat

SEQ ID NO: 137327 - DNA, 80 bp, synthetic construct
  misc_feature 1..80: note = Artificially Synthesized Probe
  source 1..80: mol_type = other DNA
gtctatgaacactgctgagttaacttgattctgatggttctgctgcctgagtgaacacgcctgcagctacatggctgctt

SEQ ID NO: 137328 - DNA, 80 bp, synthetic construct
  misc_feature 1..80: note = Artificially Synthesized Probe
  source 1..80: mol_type = other DNA
ctggggtctgattaagtaaaactccagttccagcagatggttttctcatccacacctcaaaacggaagtaaacataggat

SEQ ID NO: 137329 - DNA, 80 bp, synthetic construct
  misc_feature 1..80: note = Artificially Synthesized Probe
  source 1..80: mol_type = other DNA
gctttgggtctgagcttactataatcattaaaagactctttttttttttgtggggcagatggtgtcttactctgttgccc

SEQ ID NO: 137330 - DNA, 80 bp, synthetic construct; identical to SEQ ID NO: 42959
  misc_feature 1..80: note = Artificially Synthesized Probe
  source 1..80: mol_type = other DNA

SEQ ID NO: 137331 - DNA, 80 bp, synthetic construct
  misc_feature 1..80: note = Artificially Synthesized Probe
  source 1..80: mol_type = other DNA
tcctctggcctccgagctagccagctgctgatccaaagctctggatcctttagggctgtgcaaagatgtgacaggcatgg

SEQ ID NO: 137332 - DNA, 80 bp, synthetic construct
  misc_feature 1..80: note = Artificially Synthesized Probe
  source 1..80: mol_type = other DNA
ttttttttttttttttttttgagatggagtttcgctcttgttgcccaggctggagtacagtggtgtgatctcagctcact

SEQ ID NO: 137333 - DNA, 80 bp, synthetic construct
  misc_feature 1..80: note = Artificially Synthesized Probe
  source 1..80: mol_type = other DNA
tccgcctgcctgggcctcccaaagtgctaggattacagacgtgagccaccatgcccggccaatattccaagttttttgct

SEQ ID NO: 137334 - DNA, 80 bp, synthetic construct
  misc_feature 1..80: note = Artificially Synthesized Probe
  source 1..80: mol_type = other DNA
ttttgtatttttagtagagatgggatttcaccatgttggccaggctgctctcaaattccttaccccaggtgatctgcctg

SEQ ID NO: 137335 - DNA, 80 bp, synthetic construct; identical to SEQ ID NO: 42934
  misc_feature 1..80: note = Artificially Synthesized Probe
  source 1..80: mol_type = other DNA

SEQ ID NO: 137336 - DNA, 80 bp, synthetic construct; identical to SEQ ID NO: 42960
  misc_feature 1..80: note = Artificially Synthesized Probe
  source 1..80: mol_type = other DNA

SEQ ID NO: 137337 - DNA, 80 bp, synthetic construct
  misc_feature 1..80: note = Artificially Synthesized Probe
  source 1..80: mol_type = other DNA
ggagctgtggataaaaaagaagtgacaaattaggcttattctctcttgaggaaagaaatgcaaaaactttaaggttccac

SEQ ID NO: 137338 - DNA, 80 bp, synthetic construct
  misc_feature 1..80: note = Artificially Synthesized Probe
  source 1..80: mol_type = other DNA
tctaactattctcagctcgtcagagcacagcattcctttggtgactgttgtttgtcctgagagggaatatgatcgaagct

SEQ ID NO: 137339 - DNA, 80 bp, synthetic construct; identical to SEQ ID NO: 42961
  misc_feature 1..80: note = Artificially Synthesized Probe
  source 1..80: mol_type = other DNA

SEQ ID NO: 137340 - DNA, 80 bp, synthetic construct
  misc_feature 1..80: note = Artificially Synthesized Probe
  source 1..80: mol_type = other DNA
tccaccctcacatctaacctagttcattatgctcatttgcttacatgtctattttgcttcacctgactattaaggcaaac

SEQ ID NO: 137341 - DNA, 80 bp, synthetic construct
  misc_feature 1..80: note = Artificially Synthesized Probe
  source 1..80: mol_type = other DNA
tggctcactgcaacctctgcctcctgggttcaagcaattctggtgcctcagcctcctgagtagctgggactacaggcacg

SEQ ID NO: 137342 - DNA, 80 bp, synthetic construct
  misc_feature 1..80: note = Artificially Synthesized Probe
  source 1..80: mol_type = other DNA
gtgtaaacagatgttttctttatatagcatttgatatgtattccatttgccttctaaagccctccagtggctgctccagt

SEQ ID NO: 137343 - DNA, 80 bp, synthetic construct
  misc_feature 1..80: note = Artificially Synthesized Probe
  source 1..80: mol_type = other DNA
ctttttgaatgtcagcttggtatcagcactttaccaggaagttaatatgtgacttctcattttatcttcccaaccactat

SEQ ID NO: 137344 - DNA, 80 bp, synthetic construct
  misc_feature 1..80: note = Artificially Synthesized Probe
  source 1..80: mol_type = other DNA
ggaaaggctgctattgcttaagacagcaaacgaggtaaaaggaaacatctatggttttgcaggggtggggtagaaaggaa

SEQ ID NO: 137345 - DNA, 80 bp, synthetic construct; identical to SEQ ID NO: 42962
  misc_feature 1..80: note = Artificially Synthesized Probe
  source 1..80: mol_type = other DNA

SEQ ID NO: 137346 - DNA, 80 bp, synthetic construct
  misc_feature 1..80: note = Artificially Synthesized Probe
  source 1..80: mol_type = other DNA
tctctacaaaaaatagaaaaatgagctaggccgggtggcgagcgcctgtaatcccagctattcaggaggctgaggtggga

SEQ ID NO: 137347 - DNA, 80 bp, synthetic construct
  misc_feature 1..80: note = Artificially Synthesized Probe
  source 1..80: mol_type = other DNA
ccctgaactggctctctatactagtctacaggtggcgatggggggagtatgaggacctgacacacgtcctgtggggaaaa

SEQ ID NO: 137348 - DNA, 80 bp, synthetic construct; identical to SEQ ID NO: 42963
  misc_feature 1..80: note = Artificially Synthesized Probe
  source 1..80: mol_type = other DNA

SEQ ID NO: 137349 - DNA, 80 bp, synthetic construct
  misc_feature 1..80: note = Artificially Synthesized Probe
  source 1..80: mol_type = other DNA
atgtaagctcaatcatatgactgagcagggagacgccgggactggctaagtcaacagactcctccttcactttaatgtaa

SEQ ID NO: 137350 - DNA, 80 bp, synthetic construct
  misc_feature 1..80: note = Artificially Synthesized Probe
  source 1..80: mol_type = other DNA
gtaaatttttacagagacactgcttctaccagcagttatggggagcgtcacgatgtgatttatcagcaacatttctaaca

SEQ ID NO: 137351 - DNA, 80 bp, synthetic construct
  misc_feature 1..80: note = Artificially Synthesized Probe
  source 1..80: mol_type = other DNA
ttcatttgtgaggtacagggaaactgggagagattgggggaagacagaaacttggagtcctgaatcaccagctggggcct

SEQ ID NO: 137352 - DNA, 80 bp, synthetic construct; identical to SEQ ID NO: 42964
  misc_feature 1..80: note = Artificially Synthesized Probe
  source 1..80: mol_type = other DNA

SEQ ID NO: 137353 - DNA, 80 bp, synthetic construct
  misc_feature 1..80: note = Artificially Synthesized Probe
  source 1..80: mol_type = other DNA
caaaagaaacagaaccgatggctcctacccttaagaggcatttattaagccagtcagagaaacaaaatgcatatatgaaa

SEQ ID NO: 137354 - DNA, 80 bp, synthetic construct
  misc_feature 1..80: note = Artificially Synthesized Probe
  source 1..80: mol_type = other DNA
actgcaaatacttttcttggccctggaagtagagggaagtttgttgagaagctgttcttaatttctcacttgttgaaaaa

SEQ ID NO: 137355 - DNA, 80 bp, synthetic construct
  misc_feature 1..80: note = Artificially Synthesized Probe
  source 1..80: mol_type = other DNA
tttatgattatgcttcttttgtgtacaaattaaaatcagtactgcaggcaccagaacaaaccgcagctggatggtgggga

SEQ ID NO: 137356 - DNA, 80 bp, synthetic construct
  misc_feature 1..80: note = Artificially Synthesized Probe
  source 1..80: mol_type = other DNA
gcgacgtcagagtccgggtgataatgacgtgttgatgcaggttcatccactgtaacgaatgtgccactttgtgtgtgggg

SEQ ID NO: 137357 - DNA, 80 bp, synthetic construct; identical to SEQ ID NO: 42965
  misc_feature 1..80: note = Artificially Synthesized Probe
  source 1..80: mol_type = other DNA

SEQ ID NO: 137358 - DNA, 80 bp, synthetic construct
  misc_feature 1..80: note = Artificially Synthesized Probe
  source 1..80: mol_type = other DNA
gtcacagctttggtatcccaggaatcaggcccttttgtcctggggagtttcttattcgttctgtagggactgatactcag

SEQ ID NO: 137359 - DNA, 80 bp, synthetic construct
  misc_feature 1..80: note = Artificially Synthesized Probe
  source 1..80: mol_type = other DNA
ggactgcagcagaacggggagggacaccgactcccaagctgaccggcagcctgggagatgagagaggtggctggactaag

SEQ ID NO: 137360 - DNA, 80 bp, synthetic construct
  misc_feature 1..80: note = Artificially Synthesized Probe
  source 1..80: mol_type = other DNA
atcgtgaagctgagtgacaggtacatagaggctgaccacactgtttcctctacttttgaatatattcaaaaatttccata

SEQ ID NO: 137361 - DNA, 80 bp, synthetic construct; identical to SEQ ID NO: 42966
  misc_feature 1..80: note = Artificially Synthesized Probe
  source 1..80: mol_type = other DNA

SEQ ID NO: 137362 - DNA, 80 bp, synthetic construct
  misc_feature 1..80: note = Artificially Synthesized Probe
  source 1..80: mol_type = other DNA
tcctagcctgccccgggctggcagggaagggcattctaatcccgaagagtgggaatggtctggagggttctgctgagtca

SEQ ID NO: 137363 - DNA, 80 bp, synthetic construct
  misc_feature 1..80: note = Artificially Synthesized Probe
  source 1..80: mol_type = other DNA
aaggaagtcagtagttctgaggccctgatgtctctggcaagaaaacactatttttacagagctcttggggaaaggaaaaa

SEQ ID NO: 137364 - DNA, 80 bp, synthetic construct
  misc_feature 1..80: note = Artificially Synthesized Probe
  source 1..80: mol_type = other DNA
agggacctccatcttcatttcacagataagaaagccaaggcccagaaacatgaagagtcttatgcaaggtttcataacca

SEQ ID NO: 137365 - DNA, 80 bp, synthetic construct
  misc_feature 1..80: note = Artificially Synthesized Probe
  source 1..80: mol_type = other DNA
tctttttccatttgattttgaagatttgacccatccaaacaatgagcatcctgggtgattttaaatgagctcatagggtg

SEQ ID NO: 137366 - DNA, 80 bp, synthetic construct
  misc_feature 1..80: note = Artificially Synthesized Probe
  source 1..80: mol_type = other DNA
acaccctcaaaggggacagacagaaacagaaaggaacttttgggctgattataaggattcagctggccttgggaaaagtc

SEQ ID NO: 137367 - DNA, 80 bp, synthetic construct; identical to SEQ ID NO: 42967
  misc_feature 1..80: note = Artificially Synthesized Probe
  source 1..80: mol_type = other DNA

SEQ ID NO: 137368 - DNA, 80 bp, synthetic construct
  misc_feature 1..80: note = Artificially Synthesized Probe
  source 1..80: mol_type = other DNA
atttgctttaatactctggtcagtcatgactccattggtcaagctaaaagaagtattagcaaaggccaagtggattcatg

SEQ ID NO: 137369 - DNA, 80 bp, synthetic construct
  misc_feature 1..80: note = Artificially Synthesized Probe
  source 1..80: mol_type = other DNA
ggttggggctgcagggagctgtgattgtaccactgcactccagcctcagatggctgatgcttgccatcatcccccatggg

SEQ ID NO: 137370 - DNA, 80 bp, synthetic construct
  misc_feature 1..80: note = Artificially Synthesized Probe
  source 1..80: mol_type = other DNA
aaaaagctcaaagagatttggtatcttgcacaaaatttcacagctgggacaaccacgtctatctaaagcccaaaccaggt

SEQ ID NO: 137371 - DNA, 80 bp, synthetic construct; identical to SEQ ID NO: 42968
  misc_feature 1..80: note = Artificially Synthesized Probe
  source 1..80: mol_type = other DNA

SEQ ID NO: 137372 - DNA, 80 bp, synthetic construct
  misc_feature 1..80: note = Artificially Synthesized Probe
  source 1..80: mol_type = other DNA
caagtagctgggaccacaggtgtacactaccatgctcagctaattaaaaaaatatatttttttcttttttactttttgta

SEQ ID NO: 137373 - DNA, 80 bp, synthetic construct
  misc_feature 1..80: note = Artificially Synthesized Probe
  source 1..80: mol_type = other DNA
agaactctttcaaaaaaggaaacaaacagtaccttgcattggaagaacaaacatcatgaaaagccatcagtagaaatgag

SEQ ID NO: 137374 - DNA, 80 bp, synthetic construct; identical to SEQ ID NO: 42969
  misc_feature 1..80: note = Artificially Synthesized Probe
  source 1..80: mol_type = other DNA

SEQ ID NO: 137375 - DNA, 80 bp, synthetic construct
  misc_feature 1..80: note = Artificially Synthesized Probe
  source 1..80: mol_type = other DNA
agcgctccacaactagcttcagtggatcttgttttttcctattgctataggaagcttggaaagaggtttcttgaaaatgt

SEQ ID NO: 137376 - DNA, 80 bp, synthetic construct
  misc_feature 1..80: note = Artificially Synthesized Probe
  source 1..80: mol_type = other DNA
gctcactctcactctgatgcctggtggggctttcactcccgcagcatctgctatatttataggtaccttcggcaagtgca

SEQ ID NO: 137377 - DNA, 80 bp, synthetic construct; identical to SEQ ID NO: 42937
  misc_feature 1..80: note = Artificially Synthesized Probe
  source 1..80: mol_type = other DNA

SEQ ID NO: 137378 - DNA, 80 bp, synthetic construct
  misc_feature 1..80: note = Artificially Synthesized Probe
  source 1..80: mol_type = other DNA
tatcaagcacctactacgcactgaaggaatgtttatcaagcacctaccatgcaccaggcactgaaggaacgtttatcaag

SEQ ID NO: 137379 - DNA, 80 bp, synthetic construct; identical to SEQ ID NO: 42970
  misc_feature 1..80: note = Artificially Synthesized Probe
  source 1..80: mol_type = other DNA

SEQ ID NO: 137380 - DNA, 80 bp, synthetic construct
  misc_feature 1..80: note = Artificially Synthesized Probe
  source 1..80: mol_type = other DNA
tcaaggacctaccacgcaccaggggctgaaggaatgtttatcaagcacgtactacgcactgaaggaatgtttatcaagca

SEQ ID NO: 137381 - DNA, 80 bp, synthetic construct
  misc_feature 1..80: note = Artificially Synthesized Probe
  source 1..80: mol_type = other DNA
cgcactgaaggaacgtttctcaagcacctactacgcactgggcgctgaaggaacgtttatcaagcacctaccacgtaaca

SEQ ID NO: 137382 - DNA, 80 bp, synthetic construct
  misc_feature 1..80: note = Artificially Synthesized Probe
  source 1..80: mol_type = other DNA
cagcgagtgacctgcctaaggaagcgtaactgctaagttagcaggaaaggtcattaagatggtacttaagatgctgaaat

SEQ ID NO: 137383 - DNA, 80 bp, synthetic construct; identical to SEQ ID NO: 42971
  misc_feature 1..80: note = Artificially Synthesized Probe
  source 1..80: mol_type = other DNA

SEQ ID NO: 137384 - DNA, 80 bp, synthetic construct
  misc_feature 1..80: note = Artificially Synthesized Probe
  source 1..80: mol_type = other DNA
gcaggtggatcacttgaggccaggaattcgagaccagcctggccaacactgtgaaaccccgtctctaccaaaaatacaaa

SEQ ID NO: 137385 - DNA, 80 bp, synthetic construct
  misc_feature 1..80: note = Artificially Synthesized Probe
  source 1..80: mol_type = other DNA
aaaaaatctgcatttttctaaaatggaagtgatttagttttgtcataatgggaaaaatcttttttatgaaaaagaaagct

SEQ ID NO: 137386 - DNA, 80 bp, synthetic construct
  misc_feature 1..80: note = Artificially Synthesized Probe
  source 1..80: mol_type = other DNA
ttccatggtccttctgaaacagatctgcattttaatgactgaggaaaatgagaacagacttgagaactcttctacctgtt

SEQ ID NO: 137387 - DNA, 80 bp, synthetic construct; identical to SEQ ID NO: 42972
  misc_feature 1..80: note = Artificially Synthesized Probe
  source 1..80: mol_type = other DNA

SEQ ID NO: 137388 - DNA, 80 bp, synthetic construct
  misc_feature 1..80: note = Artificially Synthesized Probe
  source 1..80: mol_type = other DNA
cagaatcaggagaactagttttacttctagcttcactattataagttatatggctttgggcataatatgaagaagagaag

SEQ ID NO: 137389 - DNA, 80 bp, synthetic construct
  misc_feature 1..80: note = Artificially Synthesized Probe
  source 1..80: mol_type = other DNA
agctgccaggggaaggggatactgctcagtcttttaaaactctcgtgtaagcttgatattacagtcatgacctaaaaagg

SEQ ID NO: 137390 - DNA, 80 bp, synthetic construct
  misc_feature 1..80: note = Artificially Synthesized Probe
  source 1..80: mol_type = other DNA
aggaaggaagggagagtgggaggaagggaggaacggagagagggaggaagggagggagggagggagtgaggaaggcaggg

SEQ ID NO: 137391 - DNA, 80 bp, synthetic construct
  misc_feature 1..80: note = Artificially Synthesized Probe
  source 1..80: mol_type = other DNA
gctggagatgaatatacaccatgatgatggtgaatgcttgaagaactcataatcatatcagcatgaacactcgtgtggac

SEQ ID NO: 137392 - DNA, 80 bp, synthetic construct; identical to SEQ ID NO: 42973
  misc_feature 1..80: note = Artificially Synthesized Probe
  source 1..80: mol_type = other DNA

SEQ ID NO: 137393 - DNA, 80 bp, synthetic construct
  misc_feature 1..80: note = Artificially Synthesized Probe
  source 1..80: mol_type = other DNA
aatagcatagccatctgatgaatttattgttagaatgaaattaattgggttccaattcctggtaagtgctcagtaaatag

SEQ ID NO: 137394 - DNA, 80 bp, synthetic construct
  misc_feature 1..80: note = Artificially Synthesized Probe
  source 1..80: mol_type = other DNA
tcaggagtttgagactggcctgggcaacatagcaagacctcatctctactaaaaatcaagaaaattagccaggtgtggtg

SEQ ID NO: 137395 - DNA, 80 bp, synthetic construct
  misc_feature 1..80: note = Artificially Synthesized Probe
  source 1..80: mol_type = other DNA
gaaggaaacgtggtctagaagttaattttgctgtaactcatcagcaacactactggaatctcaaagtcagagtttcagag

SEQ ID NO: 137396 - DNA, 80 bp, synthetic construct
  misc_feature 1..80: note = Artificially Synthesized Probe
  source 1..80: mol_type = other DNA
ttcccacatctcttcaatcggctccaggatgccacctgctgaagtcagaagcccttctgctatcaggtgccattgaggag

SEQ ID NO: 137397 - DNA, 80 bp, synthetic construct; identical to SEQ ID NO: 42974
  misc_feature 1..80: note = Artificially Synthesized Probe
  source 1..80: mol_type = other DNA

SEQ ID NO: 137398 - DNA, 80 bp, synthetic construct
  misc_feature 1..80: note = Artificially Synthesized Probe
  source 1..80: mol_type = other DNA
cttgaaagagaaataaatatgctctggctgaggcaagaaatgctgacattgtaagggacctagaagagccaaaacagtgt

SEQ ID NO: 137399 - DNA, 80 bp, synthetic construct
  misc_feature 1..80: note = Artificially Synthesized Probe
  source 1..80: mol_type = other DNA
attttttacgagggtatcaagatcatccaatgtgaaaagaatagtcgtttcaacaaatagtgctgggaaagctgagtatc

SEQ ID NO: 137400 - DNA, 80 bp, synthetic construct
  misc_feature 1..80: note = Artificially Synthesized Probe
  source 1..80: mol_type = other DNA
gcaagtgcatatagcccggtcttgtgtgaccttcacagccaatattcattataatcccctctcaccaatattgaaaatgg

SEQ ID NO: 137401 - DNA, 80 bp, synthetic construct
  misc_feature 1..80: note = Artificially Synthesized Probe
  source 1..80: mol_type = other DNA
ggcaatggtatcttagatatctcacacacacacacacacacacacacacacacacacacacacacacacgatataccaac

SEQ ID NO: 137402 - DNA, 80 bp, synthetic construct; identical to SEQ ID NO: 42975
  misc_feature 1..80: note = Artificially Synthesized Probe
  source 1..80: mol_type = other DNA

SEQ ID NO: 137403 - DNA, 80 bp, synthetic construct
  misc_feature 1..80: note = Artificially Synthesized Probe
  source 1..80: mol_type = other DNA
aacagtgtggcactttctcaaaatgttaaacataaattgaccatacggctctttcagttccattccttaggtcccttaga

SEQ ID NO: 137404 - DNA, 80 bp, synthetic construct
  misc_feature 1..80: note = Artificially Synthesized Probe
  source 1..80: mol_type = other DNA
taccacacccggctaatttttgtatttttattagagacagggtttcgccatgttggccaggctggtcttgaactcctgac

SEQ ID NO: 137405 - DNA, 80 bp, synthetic construct
  misc_feature 1..80: note = Artificially Synthesized Probe
  source 1..80: mol_type = other DNA
catgaatgttcacagcattattcaaaattagaaagtagaaataactcaaacgtccaatagacgaatgaataaacaaaatg

SEQ ID NO: 137406 - DNA, 80 bp, synthetic construct; identical to SEQ ID NO: 42976
  misc_feature 1..80: note = Artificially Synthesized Probe
  source 1..80: mol_type = other DNA

SEQ ID NO: 137407 - DNA, 80 bp, synthetic construct
  misc_feature 1..80: note = Artificially Synthesized Probe
  source 1..80: mol_type = other DNA
gctcactacaacctcggcctcccaggttcaagagattctcctacctcagcctcctgagtagctgggactataggtgtgtg

SEQ ID NO: 137408 - DNA, 80 bp, synthetic construct
  misc_feature 1..80: note = Artificially Synthesized Probe
  source 1..80: mol_type = other DNA
tatatgaattatacctcaggtttttaaatggggacagacatttgaacttgatcttaaaggacgtgctccttgggcagacg

SEQ ID NO: 137409 - DNA, 80 bp, synthetic construct; identical to SEQ ID NO: 42977
  misc_feature 1..80: note = Artificially Synthesized Probe
  source 1..80: mol_type = other DNA

SEQ ID NO: 137410 - DNA, 80 bp, synthetic construct
  misc_feature 1..80: note = Artificially Synthesized Probe
  source 1..80: mol_type = other DNA
tacactccactttggccagccaacagtccttctggaatcatccaatgactacactccactttggccagccaacagtcctt

SEQ ID NO: 137411 - DNA, 80 bp, synthetic construct; identical to SEQ ID NO: 42938
  misc_feature 1..80: note = Artificially Synthesized Probe
  source 1..80: mol_type = other DNA

SEQ ID NO: 137412 - DNA, 80 bp, synthetic construct
  misc_feature 1..80: note = Artificially Synthesized Probe
  source 1..80: mol_type = other DNA
acgactacactccactttggccagccaacagtccttctgacatttataagatacacttatttacagtattggttgttctc

SEQ ID NO: 137413 - DNA, 80 bp, synthetic construct
  misc_feature 1..80: note = Artificially Synthesized Probe
  source 1..80: mol_type = other DNA
tttgaaccaagctctttagcttccctaacctctctttactcatgttttcaccctgtttgaactgccctactaatcacaaa

SEQ ID NO: 137414 - DNA, 80 bp, synthetic construct; identical to SEQ ID NO: 42978
  misc_feature 1..80: note = Artificially Synthesized Probe
  source 1..80: mol_type = other DNA

SEQ ID NO: 137415 - DNA, 80 bp, synthetic construct
  misc_feature 1..80: note = Artificially Synthesized Probe
  source 1..80: mol_type = other DNA
agaatgtgtgttgaatcaatttgtgaccacttggcttgtttatttccatcacatggattttattttgctagaactccaga

SEQ ID NO: 137416 - DNA, 80 bp, synthetic construct
  misc_feature 1..80: note = Artificially Synthesized Probe
  source 1..80: mol_type = other DNA
aaatccaccgaacgaaccgacagttcgtataagcaacacttgcagtgttaaaccccttccaaccgtgattttattgaaaa

SEQ ID NO: 137417 - DNA, 80 bp, synthetic construct
  misc_feature 1..80: note = Artificially Synthesized Probe
  source 1..80: mol_type = other DNA
aaacgaatcctctaagcagatggactggcctcactttgcctgctcagagtgttctcctgtgaatgctgagaatactggaa

SEQ ID NO: 137418 - DNA, 80 bp, synthetic construct; identical to SEQ ID NO: 42979
  misc_feature 1..80: note = Artificially Synthesized Probe
  source 1..80: mol_type = other DNA

SEQ ID NO: 137419 - DNA, 80 bp, synthetic construct
  misc_feature 1..80: note = Artificially Synthesized Probe
  source 1..80: mol_type = other DNA
tggcccagacaggtgaatcatttgctcaacaccccaaaggaaaccctggaggagttaggtctgtctgactctaaagttag

SEQ ID NO: 137420 - DNA, 80 bp, synthetic construct
  misc_feature 1..80: note = Artificially Synthesized Probe
  source 1..80: mol_type = other DNA
cagacagtaaatatttaatttttttagctttgtgggctagtctctgttgcaatggctcaattctaccactatattgcaaa

SEQ ID NO: 137421 - DNA, 80 bp, synthetic construct
  misc_feature 1..80: note = Artificially Synthesized Probe
  source 1..80: mol_type = other DNA
tagcataacaaaggcccatttccaacttaattaacaaaaatgaatctcccatattcaagactacaagagagataaaagag

SEQ ID NO: 137422 - DNA, 80 bp, synthetic construct; identical to SEQ ID NO: 42980
  misc_feature 1..80: note = Artificially Synthesized Probe
  source 1..80: mol_type = other DNA

SEQ ID NO: 137423 - DNA, 80 bp, synthetic construct
  misc_feature 1..80: note = Artificially Synthesized Probe
  source 1..80: mol_type = other DNA
caaccagctactaaggaaacaggatggactcatgcgtgcaggagagaaatcactaaaggacacaagacttcccaaagagt

SEQ ID NO: 137424 - DNA, 80 bp, synthetic construct
  misc_feature 1..80: note = Artificially Synthesized Probe
  source 1..80: mol_type = other DNA
aatgaatctcccatattcaagactacatgagagataaaagaggggtgaaagacatggtctgtgcacttacggaattgaca

SEQ ID NO: 137425 - DNA, 80 bp, synthetic construct
  misc_feature 1..80: note = Artificially Synthesized Probe
  source 1..80: mol_type = other DNA
cttgacgccaggagttcaggaccagcctgggcaacatagcaagactcttagctctacaaaaaatttaaaaagtagttgga

SEQ ID NO: 137426 - DNA, 80 bp, synthetic construct
  misc_feature 1..80: note = Artificially Synthesized Probe
  source 1..80: mol_type = other DNA
cagacaacatctcctttagactcatcaaacacatttacttcgtctcttttttttttgccatcctccaatactgtgatgct

SEQ ID NO: 137427 - DNA, 80 bp, synthetic construct
  misc_feature 1..80: note = Artificially Synthesized Probe
  source 1..80: mol_type = other DNA
tggagaagctacagacaagggccagtagaagccaccttgggctgctctcgttagtttgtaggatgccatttcccaagacc

SEQ ID NO: 137428 - DNA, 80 bp, synthetic construct; identical to SEQ ID NO: 42981
  misc_feature 1..80: note = Artificially Synthesized Probe
  source 1..80: mol_type = other DNA

SEQ ID NO: 137429 - DNA, 80 bp, synthetic construct
  misc_feature 1..80: note = Artificially Synthesized Probe
  source 1..80: mol_type = other DNA
tatccctgttcacatcttcctcccaaagaacctgcttcccaaaaatgtttaagtcagaactgaagaaaataaaaagctaa

SEQ ID NO: 137430 - DNA, 80 bp, synthetic construct
  misc_feature 1..80: note = Artificially Synthesized Probe
  source 1..80: mol_type = other DNA
ctggcccatgcctgtctcatttaatggcagtggaacagaaactgaccacaacaaaaataccacaaggtcctaacagggaa

SEQ ID NO: 137431 - DNA, 80 bp, synthetic construct
  misc_feature 1..80: note = Artificially Synthesized Probe
  source 1..80: mol_type = other DNA
tctattttgtatagagggaatccaatgtaaaattttgtcccataaatttgaaaactgctggtgaagtacaaaaggcatgg

SEQ ID NO: 137432 - DNA, 80 bp, synthetic construct; identical to SEQ ID NO: 42982
  misc_feature 1..80: note = Artificially Synthesized Probe
  source 1..80: mol_type = other DNA

SEQ ID NO: 137433 - DNA, 80 bp, synthetic construct
  misc_feature 1..80: note = Artificially Synthesized Probe
  source 1..80: mol_type = other DNA
gtgtacaaggtatatacgtgccgcacgctgctgtgtagtggagaaagggcaggcagtgagcaagcgtgtacaaggtatat

SEQ ID NO: 137434 - DNA, 80 bp, synthetic construct
  misc_feature 1..80: note = Artificially Synthesized Probe
  source 1..80: mol_type = other DNA
agggaaggttcacaggatagaaattcacagggcaagtagggttccaagtcagaagcaaaacactttacacaacattacag

SEQ ID NO: 137435 - DNA, 80 bp, synthetic construct
  misc_feature 1..80: note = Artificially Synthesized Probe
  source 1..80: mol_type = other DNA
agggcaggcagtgagcaagcgtgtacaaggtatatacgtgccgcacgctgctgtgtagtggagaaagggcaggcagtgag

SEQ ID NO: 137436 - DNA, 80 bp, synthetic construct
  misc_feature 1..80: note = Artificially Synthesized Probe
  source 1..80: mol_type = other DNA
cgtgtccatctctccagtcagattgattcgttcaatcagacttacatccactttttctttgagtttttcttctagctgtt

SEQ ID NO: 137437 - DNA, 80 bp, synthetic construct; identical to SEQ ID NO: 42983
  misc_feature 1..80: note = Artificially Synthesized Probe
  source 1..80: mol_type = other DNA

SEQ ID NO: 137438 - DNA, 80 bp, synthetic construct
  misc_feature 1..80: note = Artificially Synthesized Probe
  source 1..80: mol_type = other DNA
ccaaagtgctgagattacaagtgtgagccactgtgcctggccaatcttacaaccttatgaggaagattctattattatca

SEQ ID NO: 137439 - DNA, 80 bp, synthetic construct
  misc_feature 1..80: note = Artificially Synthesized Probe
  source 1..80: mol_type = other DNA
accacacatcaataattcacatcaactcattctgaaaagacgctgattttaagatactccctgccccatgaactacagac

SEQ ID NO: 137440 - DNA, 80 bp, synthetic construct
  misc_feature 1..80: note = Artificially Synthesized Probe
  source 1..80: mol_type = other DNA
acagaaacactcaacacgctcctggcgctcaaagaaaaataacgggaccaagacttgtaaatacttggagatatccctgg

SEQ ID NO: 137441 - DNA, 80 bp, synthetic construct
  misc_feature 1..80: note = Artificially Synthesized Probe
  source 1..80: mol_type = other DNA
attctcctgcctcagcctcccgagtagctgggactacaggcgtgcatcaccatgtccggctaatttcgtatttttagtag

SEQ ID NO: 137442 - DNA, 80 bp, synthetic construct; identical to SEQ ID NO: 42984
  misc_feature 1..80: note = Artificially Synthesized Probe
  source 1..80: mol_type = other DNA

SEQ ID NO: 137443 - DNA, 80 bp, synthetic construct
  misc_feature 1..80: note = Artificially Synthesized Probe
  source 1..80: mol_type = other DNA
gagagcccgctttgttcaggctgtgtaacagaataagagagttatttagtgaacaaaacagatcaatactgttctcataa

SEQ ID NO: 137444 - DNA, 80 bp, synthetic construct
  misc_feature 1..80: note = Artificially Synthesized Probe
  source 1..80: mol_type = other DNA
tgccactttccaccttgcctgctaggcttcagttacactggccttttaaatttctgggagacaccagggtccttcgccct

SEQ ID NO: 137445 - DNA, 80 bp, synthetic construct
  misc_feature 1..80: note = Artificially Synthesized Probe
  source 1..80: mol_type = other DNA
ttctgtcagcagtaaggaaatacattctagcaaatgacatccagtaatgctttaattaactgcagtattttgtgctccaa

SEQ ID NO: 137446 - DNA, 80 bp, synthetic construct
  misc_feature 1..80: note = Artificially Synthesized Probe
  source 1..80: mol_type = other DNA
acctcgtgatctacccgcctcagcctcccaaagtgctgggattacagacgtgagccaccacgcccggccctaatttttgt

SEQ ID NO: 137447 - DNA, 80 bp, synthetic construct; identical to SEQ ID NO: 42985
  misc_feature 1..80: note = Artificially Synthesized Probe
  source 1..80: mol_type = other DNA

SEQ ID NO: 137448 - DNA, 80 bp, synthetic construct
  misc_feature 1..80: note = Artificially Synthesized Probe
  source 1..80: mol_type = other DNA
agggcaaacaacacagtttctttaagaaaagattgcagagggggcaaagggaaatggaagaagaaaccagagacttaata

SEQ ID NO: 137449 - DNA, 80 bp, synthetic construct
  misc_feature 1..80: note = Artificially Synthesized Probe
  source 1..80: mol_type = other DNA
ctctacaaaaaataaaaaaatactggccaggcatggtggcaggtgcctgaagtcccagtgtagtcccagccacttgggag

SEQ ID NO: 137450 - DNA, 80 bp, synthetic construct
  misc_feature 1..80: note = Artificially Synthesized Probe
  source 1..80: mol_type = other DNA
ttattggttcattaattgtaacaaatatttcatatcaatgttaataatatgggaaactgggtaagtggtatatgggaacc

SEQ ID NO: 137451 - DNA, 80 bp, synthetic construct; identical to SEQ ID NO: 42986
  misc_feature 1..80: note = Artificially Synthesized Probe
  source 1..80: mol_type = other DNA

SEQ ID NO: 137452 - DNA, 80 bp, synthetic construct
  misc_feature 1..80: note = Artificially Synthesized Probe
  source 1..80: mol_type = other DNA
agataataaggaagtaagccagccgagacgtaacttcggttttgtggtgttaggaaataaatttggcagtgctggaataa

SEQ ID NO: 137453 - DNA, 80 bp, synthetic construct
  misc_feature 1..80: note = Artificially Synthesized Probe
  source 1..80: mol_type = other DNA
cttttagtagagacggggttttgccatgttgacgagactggtcttaaactcctgacctcaagtgatccaccctcctcagc

SEQ ID NO: 137454 - DNA, 80 bp, synthetic construct; identical to SEQ ID NO: 42987
  misc_feature 1..80: note = Artificially Synthesized Probe
  source 1..80: mol_type = other DNA

SEQ ID NO: 137455 - DNA, 80 bp, synthetic construct
  misc_feature 1..80: note = Artificially Synthesized Probe
  source 1..80: mol_type = other DNA
acacttcaacccactatatctccctgggtcctcttgagatgacactaatagtctttgatatttttcttgctttttgtgta

SEQ ID NO: 137456 - DNA, 80 bp, synthetic construct
  misc_feature 1..80: note = Artificially Synthesized Probe
  source 1..80: mol_type = other DNA
ctaaataaaaaataattggccacttgtatcatcagtcatcaaaatggtcttcaacttatttctagaacttctaagagtct

SEQ ID NO: 137457 - DNA, 80 bp, synthetic construct; identical to SEQ ID NO: 42939
  misc_feature 1..80: note = Artificially Synthesized Probe
  source 1..80: mol_type = other DNA

SEQ ID NO: 137458 - DNA, 80 bp, synthetic construct
  misc_feature 1..80: note = Artificially Synthesized Probe
  source 1..80: mol_type = other DNA
ctcccaggctcaagcgatcctccaacctcagcttcccaagtagctgagaccacaggcatgtaccaccacactcaactaac

SEQ ID NO: 137459 - DNA, 80 bp, synthetic construct
  misc_feature 1..80: note = Artificially Synthesized Probe
  source 1..80: mol_type = other DNA
ctgggcatggtggctcacgcctataatcccagcactttggaaggccaaggtgagtggatcacgaggtcaggagattgaga

SEQ ID NO: 137460 - DNA, 80 bp, synthetic construct; identical to SEQ ID NO: 42988
  misc_feature 1..80: note = Artificially Synthesized Probe
  source 1..80: mol_type = other DNA

SEQ ID NO: 137461 - DNA, 80 bp, synthetic construct
  misc_feature 1..80: note = Artificially Synthesized Probe
  source 1..80: mol_type = other DNA
tgtttcaaaaaaaaagcaaaatttgaagcactataaacaacgatcagggatgcttgctaaataagttatggtacaaggcc

SEQ ID NO: 137462 - DNA, 80 bp, synthetic construct
  misc_feature 1..80: note = Artificially Synthesized Probe
  source 1..80: mol_type = other DNA
atctataatcccagctactcaggaggctgaggcagaagaattgcttgaacctgggaggtggaggctgcaatgagccaaga

SEQ ID NO: 137463 - DNA, 80 bp, synthetic construct
  misc_feature 1..80: note = Artificially Synthesized Probe
  source 1..80: mol_type = other DNA
tatcattataatgacaggagaaatgctaatgctatgtatgacactaacaataaaaggatataacagtgaattaagattgt

SEQ ID NO: 137464 - DNA, 80 bp, synthetic construct; identical to SEQ ID NO: 42989
  misc_feature 1..80: note = Artificially Synthesized Probe
  source 1..80: mol_type = other DNA

SEQ ID NO: 137465 - DNA, 80 bp, synthetic construct
  misc_feature 1..80: note = Artificially Synthesized Probe
  source 1..80: mol_type = other DNA
gccttggtagacacacttcctatttgacctgctatattgctgccctggcacacaggagctccaagctgggctgtctgaac

SEQ ID NO: 137466 - DNA, 80 bp, synthetic construct
  misc_feature 1..80: note = Artificially Synthesized Probe
  source 1..80: mol_type = other DNA
caagtgtgaaaaggacttctaattccatgtttaaggctgaatcaaaggttattctgggtcttccttctgctccatcagtt

SEQ ID NO: 137467 - DNA, 80 bp, synthetic construct; identical to SEQ ID NO: 42990
  misc_feature 1..80: note = Artificially Synthesized Probe
  source 1..80: mol_type = other DNA

SEQ ID NO: 137468 - DNA, 80 bp, synthetic construct
  misc_feature 1..80: note = Artificially Synthesized Probe
  source 1..80: mol_type = other DNA
aaggaatcccatttccagcaggttattccgagtgctcttcctagggaaggaatctcatttccagcaggttattccgagtg

SEQ ID NO: 137469 - DNA, 80 bp, synthetic construct
  misc_feature 1..80: note = Artificially Synthesized Probe
  source 1..80: mol_type = other DNA
cttatggctggacactgagctttcctctgtggcaggccaactggtctgacccaaggttgtctgtggccatgttaggacgt

SEQ ID NO: 137470 - DNA, 80 bp, synthetic construct
  misc_feature 1..80: note = Artificially Synthesized Probe
  source 1..80: mol_type = other DNA
acttctgagccctccttttccttgaggaggctgctgatagtcagtcctccactgctggttgtggttctgaagaaaaggaa

SEQ ID NO: 137471 - DNA, 80 bp, synthetic construct
  misc_feature 1..80: note = Artificially Synthesized Probe
  source 1..80: mol_type = other DNA
taggaagagatgattcctattttagttaatctgaatcatcagcaggccattagtcacattaactaggatggtctaatatc

SEQ ID NO: 137472 - DNA, 80 bp, synthetic construct; identical to SEQ ID NO: 42991
  misc_feature 1..80: note = Artificially Synthesized Probe
  source 1..80: mol_type = other DNA

SEQ ID NO: 137473 - DNA, 80 bp, synthetic construct
  misc_feature 1..80: note = Artificially Synthesized Probe
  source 1..80: mol_type = other DNA
acacatcctcctgtgactacaggttttggggcagccccagctactgagtgagttctatggtagtaaccactacccactca

SEQ ID NO: 137474 - DNA, 80 bp, synthetic construct
  misc_feature 1..80: note = Artificially Synthesized Probe
  source 1..80: mol_type = other DNA
taatacacgtgggaaaatgctcccacgatgaagttaaacggtagctgcagggaataaagctataagcagtatagccccaa

SEQ ID NO: 137475 - DNA, 80 bp, synthetic construct
  misc_feature 1..80: note = Artificially Synthesized Probe
  source 1..80: mol_type = other DNA
tgcccaggctggagtgcaatggcacaatctcggctcagcgcaacctccgcctcccgggttcaagtgattctcctgcctca

SEQ ID NO: 137476 - DNA, 80 bp, synthetic construct; identical to SEQ ID NO: 42992
  misc_feature 1..80: note = Artificially Synthesized Probe
  source 1..80: mol_type = other DNA

SEQ ID NO: 137477 - DNA, 80 bp, synthetic construct
  misc_feature 1..80: note = Artificially Synthesized Probe
  source 1..80: mol_type = other DNA
aactgcttaagctatttatcagttatttccaccacaacctcactttttttgtatgtgccaagtatctatagctgaatcca

SEQ ID NO: 137478 - DNA, 80 bp, synthetic construct
  misc_feature 1..80: note = Artificially Synthesized Probe
  source 1..80: mol_type = other DNA
gctttcctccttgatactcttggtggtttagtaaacaacttcagagtggatttccttaagattcccatatttaggtctat

SEQ ID NO: 137479 - DNA, 80 bp, synthetic construct
  misc_feature 1..80: note = Artificially Synthesized Probe
  source 1..80: mol_type = other DNA
atttccagcaggttattccgagtgctcttcctagcgaaggaatcccatttccagcaggttattccgagtgctcttcctag

SEQ ID NO: 137480 - DNA, 80 bp, synthetic construct
  misc_feature 1..80: note = Artificially Synthesized Probe
  source 1..80: mol_type = other DNA
gtagacaaagaggtcggcgcagctggggagcacggcacccccttcatcagtgttgggcttaggtggcccctgggctttga

SEQ ID NO: 137481 - DNA, 80 bp, synthetic construct
  misc_feature 1..80: note = Artificially Synthesized Probe
  source 1..80: mol_type = other DNA
aaaatcggatcgattttaatcaatatcatcattcactaccaccaccactcctacaacagcagtaataaaatctgacatat

SEQ ID NO: 137482 - DNA, 80 bp, synthetic construct; identical to SEQ ID NO: 42993
  misc_feature 1..80: note = Artificially Synthesized Probe
  source 1..80: mol_type = other DNA

SEQ ID NO: 137483 - DNA, 80 bp, synthetic construct
  misc_feature 1..80: note = Artificially Synthesized Probe
  source 1..80: mol_type = other DNA
tgcagcggcatgatcttggcccactgcaacctccatcttcagggttcaagcaattctcctgcgtcagcctcccatgtagc

SEQ ID NO: 137484 - DNA, 80 bp, synthetic construct
  misc_feature 1..80: note = Artificially Synthesized Probe
  source 1..80: mol_type = other DNA
gcgcccagctcatttactttttacaataaacttacatagtatgtattattactatcctcattttcaaagagttaagtaca

SEQ ID NO: 137485 - DNA, 80 bp, synthetic construct; identical to SEQ ID NO: 42994
  misc_feature 1..80: note = Artificially Synthesized Probe
  source 1..80: mol_type = other DNA

SEQ ID NO: 137486 - DNA, 80 bp, synthetic construct
  misc_feature 1..80: note = Artificially Synthesized Probe
  source 1..80: mol_type = other DNA
ggcaaaaccccgtctctactaaaaatacaaaaattagccgggtgtgggccgggtgcggtggctcatgcctgtaatcccaa

SEQ ID NO: 137487 - DNA, 80 bp, synthetic construct
  misc_feature 1..80: note = Artificially Synthesized Probe
  source 1..80: mol_type = other DNA
aggcaggcggatcacaaggtcaggagatcaagaccatcctaacacgttgaaaccccgtctctactaaaaatacaaaaaaa

SEQ ID NO: 137488 - DNA, 80 bp, synthetic construct
  misc_feature 1..80: note = Artificially Synthesized Probe
  source 1..80: mol_type = other DNA
aaaaaaaaaaaaaattagctgggggtggtggcgcatgcctgtaatcccagctacttggaaggctgagacctgaggcagag

SEQ ID NO: 137489 - DNA, 80 bp, synthetic construct; identical to SEQ ID NO: 42995
  misc_feature 1..80: note = Artificially Synthesized Probe
  source 1..80: mol_type = other DNA

SEQ ID NO: 137490 - DNA, 80 bp, synthetic construct
  misc_feature 1..80: note = Artificially Synthesized Probe
  source 1..80: mol_type = other DNA
ggttattccgagtgctcttcctagcgaaggaatcccatttccagcaggttattccgagtgctcttcctagcgaaggaacc

SEQ ID NO: 137491 - DNA, 80 bp, synthetic construct
  misc_feature 1..80: note = Artificially Synthesized Probe
  source 1..80: mol_type = other DNA
aaaagacaagaaccacacataccaccaattagcaggaataggagaaaattgacattttactcaaaggcttttgttattga

SEQ ID NO: 137492 - DNA, 80 bp, synthetic construct
  misc_feature 1..80: note = Artificially Synthesized Probe
  source 1..80: mol_type = other DNA
cccgtcttcactaaaaacacaaaaaattagccaggcgtggtggcgggtgcctgtaatcccagctactcgggaggctgagg

SEQ ID NO: 137493 - DNA, 80 bp, synthetic construct
  misc_feature 1..80: note = Artificially Synthesized Probe
  source 1..80: mol_type = other DNA
aaagaaaagaaaaagaaagtctattatatccagatacaaccactctgccctcaaagagcttctggcctaggctaagtctc

SEQ ID NO: 137494 - DNA, 80 bp, synthetic construct; identical to SEQ ID NO: 42996
  misc_feature 1..80: note = Artificially Synthesized Probe
  source 1..80: mol_type = other DNA

SEQ ID NO: 137495 - DNA, 80 bp, synthetic construct
  misc_feature 1..80: note = Artificially Synthesized Probe
  source 1..80: mol_type = other DNA
ttcaagaaataaccggccgggcgcggtggctcacgcctgtaatcccagcactttgggaggccgaggcgggcggatcacga

SEQ ID NO: 137496 - DNA, 80 bp, synthetic construct
  misc_feature 1..80: note = Artificially Synthesized Probe
  source 1..80: mol_type = other DNA
gagccgagatcccgccactgcactccagcctgggcgacagagcgagactccgtctcaaaaaaaaaaaaaaaaaaagaaag

SEQ ID NO: 137497 - DNA, 80 bp, synthetic construct
  misc_feature 1..80: note = Artificially Synthesized Probe
  source 1..80: mol_type = other DNA
tagaatcatctgtttcgtgcctgttaacacaagctccctgagaggaggaatgacgtttatgctggttctgctgcccccgg

SEQ ID NO: 137498 - DNA, 80 bp, synthetic construct; identical to SEQ ID NO: 42997
  misc_feature 1..80: note = Artificially Synthesized Probe
  source 1..80: mol_type = other DNA

SEQ ID NO: 137499 - DNA, 80 bp, synthetic construct
  misc_feature 1..80: note = Artificially Synthesized Probe
  source 1..80: mol_type = other DNA
tgagtagctgggactaccggcacacaccaccacaaccggctaatttttgcttttttttttagtagagatggggtttcacc

SEQ ID NO: 137500 - DNA, 80 bp, synthetic construct
  misc_feature 1..80: note = Artificially Synthesized Probe
  source 1..80: mol_type = other DNA
atcactcacctgttcccctagaagatggatacttacttacttgcttcctatttcagagccaccccaatgagtaagattat

SEQ ID NO: 137501 - DNA, 80 bp, synthetic construct
  misc_feature 1..80: note = Artificially Synthesized Probe
  source 1..80: mol_type = other DNA
agtgctcttcctaggtaaggaatcccatttccagcaggttattctgagtgctcttcctagccaaggaatcccatttccag

SEQ ID NO: 137502 - DNA, 80 bp, synthetic construct
  misc_feature 1..80: note = Artificially Synthesized Probe
  source 1..80: mol_type = other DNA
ttccatctttcaccctgcatcagcatgctttgatgccacatgagacattagaaaatcagtagccagtatttcacagaaca

SEQ ID NO: 137503 - DNA, 80 bp, synthetic construct
  misc_feature 1..80: note = Artificially Synthesized Probe
  source 1..80: mol_type = other DNA
cctcccaggctcaagcaattctcctgcctcagcctcccaagtagctgggactacaggcgtccatcaccatgcatggctag

SEQ ID NO: 137504 - DNA, 80 bp, synthetic construct; identical to SEQ ID NO: 42998
  misc_feature 1..80: note = Artificially Synthesized Probe
  source 1..80: mol_type = other DNA

SEQ ID NO: 137505 - DNA, 80 bp, synthetic construct
  misc_feature 1..80: note = Artificially Synthesized Probe
  source 1..80: mol_type = other DNA
atccatggatggccaaggccatttctctggtgggcctgcagtcagcattcacagaaacaatattctaattggaatgtcaa

SEQ ID NO: 137506 - DNA, 80 bp, synthetic construct
  misc_feature 1..80: note = Artificially Synthesized Probe
  source 1..80: mol_type = other DNA
cacagcttactgcaacttctgcctcccaggctccagcaatcctcccaccccagcctcctgagtagctgggactacaggtg

SEQ ID NO: 137507 - DNA, 80 bp, synthetic construct
  misc_feature 1..80: note = Artificially Synthesized Probe
  source 1..80: mol_type = other DNA
tagagcttcttaattcaagggtactcccactaatttgcatcccttcctcttcctttttgctggggctgaggatgttgctc

SEQ ID NO: 137508 - DNA, 80 bp, synthetic construct; identical to SEQ ID NO: 42999
  misc_feature 1..80: note = Artificially Synthesized Probe
  source 1..80: mol_type = other DNA

SEQ ID NO: 137509 - DNA, 80 bp, synthetic construct
  misc_feature 1..80: note = Artificially Synthesized Probe
  source 1..80: mol_type = other DNA
atgtcatcctccaccaaaggaacaagaaatgcctggggaaatggacgactccagggctgggatacaaaagtacaggataa

SEQ ID NO: 137510 - DNA, 80 bp, synthetic construct
  misc_feature 1..80: note = Artificially Synthesized Probe
  source 1..80: mol_type = other DNA
acactaatggaaaaactggtgaagttcaaacacggtgtgcaggttattaaatagtaatgtaccaatgttaacttgccagt

SEQ ID NO: 137511 - DNA, 80 bp, synthetic construct; identical to SEQ ID NO: 43000
  misc_feature 1..80: note = Artificially Synthesized Probe
  source 1..80: mol_type = other DNA

SEQ ID NO: 137512 - DNA, 80 bp, synthetic construct; identical to SEQ ID NO: 42940
  misc_feature 1..80: note = Artificially Synthesized Probe
  source 1..80: mol_type = other DNA

SEQ ID NO: 137513 - DNA, 80 bp, synthetic construct
  misc_feature 1..80: note = Artificially Synthesized Probe
  source 1..80: mol_type = other DNA
gtctctactaaaaatacaaaaaaattagctgggcatggtggcgagcatctataatcccagctacttgggaggctgaggca

SEQ ID NO: 137514 - DNA, 80 bp, synthetic construct
  misc_feature 1..80: note = Artificially Synthesized Probe
  source 1..80: mol_type = other DNA
attgataaagtttcaaggtttctcccaacacttattaataaatagagatacccagtagagacaacatctacaccaagtaa

SEQ ID NO: 137515 - DNA, 80 bp, synthetic construct
  misc_feature 1..80: note = Artificially Synthesized Probe
  source 1..80: mol_type = other DNA
aaaaccctgtctctactaaaaaaaagacaaaaattagctgggtgcagtggcgggtacctgtaatcccagctactcaggag

SEQ ID NO: 137516 - DNA, 80 bp, synthetic construct; identical to SEQ ID NO: 43001
  misc_feature 1..80: note = Artificially Synthesized Probe
  source 1..80: mol_type = other DNA

SEQ ID NO: 137517 - DNA, 80 bp, synthetic construct
  misc_feature 1..80: note = Artificially Synthesized Probe
  source 1..80: mol_type = other DNA
aacaaacaaacaacctgcgatctgagagctattcaaacaaataaactaacaacctgtgatcctagggctattcaaacagg

SEQ ID NO: 137518 - DNA, 80 bp, synthetic construct
  misc_feature 1..80: note = Artificially Synthesized Probe
  source 1..80: mol_type = other DNA
cctgatgtggacagttgtactgtggttatgtagaaaccttgtttctaagaaatatatattgaagtattaaggagtagtgg

SEQ ID NO: 137519 - DNA, 80 bp, synthetic construct
  misc_feature 1..80: note = Artificially Synthesized Probe
  source 1..80: mol_type = other DNA
acaaaaaaacaaaaattagactgatgtgatggcctgtgcctgtagtctcagttactctagaggctgaagtaggaggaggg

SEQ ID NO: 137520 - DNA, 80 bp, synthetic construct; identical to SEQ ID NO: 43002
  misc_feature 1..80: note = Artificially Synthesized Probe
  source 1..80: mol_type = other DNA

SEQ ID NO: 137521 - DNA, 80 bp, synthetic construct; identical to SEQ ID NO: 22875
  misc_feature 1..80: note = Artificially Synthesized Probe
  source 1..80: mol_type = other DNA

SEQ ID NO: 137522 - DNA, 80 bp, synthetic construct
  misc_feature 1..80: note = Artificially Synthesized Probe
  source 1..80: mol_type = other DNA
gcaggggcgtgatctcggctcgctacaacctccacctcccagccgcctgccttggcctcccaaagtgcccagagtgcagc

SEQ ID NO: 137523 - DNA, 80 bp, synthetic construct
  misc_feature 1..80: note = Artificially Synthesized Probe
  source 1..80: mol_type = other DNA
tcccggccgccatcccatctaggaagtgaggagcgtctctgcccggccgcccatcgtctgagatgtggggagcgcctttg

SEQ ID NO: 137524 - DNA, 80 bp, synthetic construct
  misc_feature 1..80: note = Artificially Synthesized Probe
  source 1..80: mol_type = other DNA
gctctttgttcttcgagagaggaaggagtggcggtagttagcttcaatccctgagctgggtttggagatcagaacacctt

SEQ ID NO: 137525 - DNA, 80 bp, synthetic construct
  misc_feature 1..80: note = Artificially Synthesized Probe
  source 1..80: mol_type = other DNA
agccgccccgtctgagaagtgaggagcgtctccgccgggcagccaccccgtccgggagggaggtgggggggtcagccccc

SEQ ID NO: 137526 - DNA, 80 bp, synthetic construct; identical to SEQ ID NO: 43003
  misc_feature 1..80: note = Artificially Synthesized Probe
  source 1..80: mol_type = other DNA

SEQ ID NO: 137527 - DNA, 80 bp, synthetic construct
  misc_feature 1..80: note = Artificially Synthesized Probe
  source 1..80: mol_type = other DNA
cagcatgctcgttaagagtcatcaccactccctaatctcaagtacccagggacacaaacactgcggaaggcctcagggtc

SEQ ID NO: 137528 - DNA, 80 bp, synthetic construct
  misc_feature 1..80: note = Artificially Synthesized Probe
  source 1..80: mol_type = other DNA
attagtttacagacagatgctaggctctagaaaagcatgagttctagtctaacaaaagttattagagggaactcaggaga

SEQ ID NO: 137529 - DNA, 80 bp, synthetic construct
  misc_feature 1..80: note = Artificially Synthesized Probe
  source 1..80: mol_type = other DNA
taaaaattgagaaagccatttaaaggatgtaaggacggcttagcccaacctgctagtggccatccccacttcctgcctcc

SEQ ID NO: 137530 - DNA, 80 bp, synthetic construct
  misc_feature 1..80: note = Artificially Synthesized Probe
  source 1..80: mol_type = other DNA
acccacataggagtcctgaaaaagatgagagggatggcagggcaggcactgttcctgagcaccatttactgtgtgctgaa

SEQ ID NO: 137531 - DNA, 80 bp, synthetic construct; identical to SEQ ID NO: 43004
  misc_feature 1..80: note = Artificially Synthesized Probe
  source 1..80: mol_type = other DNA

SEQ ID NO: 137532 - DNA, 80 bp, synthetic construct
  misc_feature 1..80: note = Artificially Synthesized Probe
  source 1..80: mol_type = other DNA
ggttcttaaaaaggatctatgactttaaaatggttaataacgagtgcgttgggcattattttgtctgactatctctcttg

SEQ ID NO: 137533 - DNA, 80 bp, synthetic construct
  misc_feature 1..80: note = Artificially Synthesized Probe
  source 1..80: mol_type = other DNA
catttttcacaggaaaatggagagtccccaaggaagggaggcctggctccttgcccaaagtatcatgaacaatgagtata

SEQ ID NO: 137534 - DNA, 80 bp, synthetic construct; identical to SEQ ID NO: 43005
  misc_feature 1..80: note = Artificially Synthesized Probe
  source 1..80: mol_type = other DNA

SEQ ID NO: 137535 - DNA, 80 bp, synthetic construct
  misc_feature 1..80: note = Artificially Synthesized Probe
  source 1..80: mol_type = other DNA
ttcaaagttgttttttggtttttaaaggggctacagaaaatggactgaggggaaggaatgggcacaatatctaggtctag

SEQ ID NO: 137536 - DNA, 80 bp, synthetic construct
  misc_feature 1..80: note = Artificially Synthesized Probe
  source 1..80: mol_type = other DNA
ggtggtgtgtgcctgtagtctcagctacttgagaggctgagtaggaaagactgctgaaacccaggaggttgaggctacag

SEQ ID NO: 137537 - DNA, 80 bp, synthetic construct
  misc_feature 1..80: note = Artificially Synthesized Probe
  source 1..80: mol_type = other DNA
ccaggggggttcctcaaagacctgtgactctaataggcaaataaccaatcctttttcctgcccctcaggggtgtcttagt

SEQ ID NO: 137538 - DNA, 80 bp, synthetic construct
  misc_feature 1..80: note = Artificially Synthesized Probe
  source 1..80: mol_type = other DNA
cttgcctttggtggtgggctgatggggagacttccatttgatgatggagaagctactgggcaagttcattttctgagatt

SEQ ID NO: 137539 - DNA, 80 bp, synthetic construct; identical to SEQ ID NO: 43006
  misc_feature 1..80: note = Artificially Synthesized Probe
  source 1..80: mol_type = other DNA

SEQ ID NO: 137540 - DNA, 80 bp, synthetic construct; identical to SEQ ID NO: 42941
  misc_feature 1..80: note = Artificially Synthesized Probe
  source 1..80: mol_type = other DNA

SEQ ID NO: 137541 - DNA, 80 bp, synthetic construct
  misc_feature 1..80: note = Artificially Synthesized Probe
  source 1..80: mol_type = other DNA
aatctccctcagaacctaatgcgttcccagagaaccttcctcagaacctcaatgcattcccagagaacttccctcagaac

SEQ ID NO: 137542 - DNA, 80 bp, synthetic construct
  misc_feature 1..80: note = Artificially Synthesized Probe
  source 1..80: mol_type = other DNA
taatgcggtcccagaagacttccctcaggacctaatgcgttcctagaaaactctcagaacctaatgcgttcccagagaac

SEQ ID NO: 137543 - DNA, 80 bp, synthetic construct
  misc_feature 1..80: note = Artificially Synthesized Probe
  source 1..80: mol_type = other DNA
cctccctcacaacctaacgcgttctcagagaacttcactcaggaccaaatgagttccgaaaaaccaccccagaacctcaa

SEQ ID NO: 137544 - DNA, 80 bp, synthetic construct; identical to SEQ ID NO: 43007
  misc_feature 1..80: note = Artificially Synthesized Probe
  source 1..80: mol_type = other DNA

SEQ ID NO: 137545 - DNA, 80 bp, synthetic construct
  misc_feature 1..80: note = Artificially Synthesized Probe
  source 1..80: mol_type = other DNA
atgcattcccagaaaacatacctcagaacctaatgcattcccagagaatctccctcagcacctaatgtgttcccagagaa

SEQ ID NO: 137546 - DNA, 80 bp, synthetic construct
  misc_feature 1..80: note = Artificially Synthesized Probe
  source 1..80: mol_type = other DNA
tcctgcctcacccccttactagtcacatatcaaatcctggctcactcgtcactagtcacatatcaaatcctggctggctc

SEQ ID NO: 137547 - DNA, 80 bp, synthetic construct
  misc_feature 1..80: note = Artificially Synthesized Probe
  source 1..80: mol_type = other DNA
ccaaagatcctccctcagaatctaatgcgttcccagaaaaatttcttcagaacctaatgcattcccagagaacctccctc

SEQ ID NO: 137548 - DNA, 80 bp, synthetic construct
  misc_feature 1..80: note = Artificially Synthesized Probe
  source 1..80: mol_type = other DNA
ctcagaacctaaagcgttcacagagaacctccctcagaacctaatgcgttcccagaaaacctccctcagaacctcaatgc

SEQ ID NO: 137549 - DNA, 80 bp, synthetic construct; identical to SEQ ID NO: 43008
  misc_feature 1..80: note = Artificially Synthesized Probe
  source 1..80: mol_type = other DNA

SEQ ID NO: 137550 - DNA, 80 bp, synthetic construct
  misc_feature 1..80: note = Artificially Synthesized Probe
  source 1..80: mol_type = other DNA
cgcctggctaattttgtatttttagtaaagacagggtttcaccatgtcggccaggctggtctcgaactcctgacctcaca

SEQ ID NO: 137551 - DNA, 80 bp, synthetic construct
  misc_feature 1..80: note = Artificially Synthesized Probe
  source 1..80: mol_type = other DNA
tccctcaggacctcaatgcgttcccagagaacatccctccaaacctaatgcgttaccacagagcctccctcagaacctaa

SEQ ID NO: 137552 - DNA, 80 bp, synthetic construct
  misc_feature 1..80: note = Artificially Synthesized Probe
  source 1..80: mol_type = other DNA
atgcattcccaaagaacttcctttaggacctcaatgcgttcccagagaatctccctcacaaagtaatgcatttcgaggca

SEQ ID NO: 137553 - DNA, 80 bp, synthetic construct
  misc_feature 1..80: note = Artificially Synthesized Probe
  source 1..80: mol_type = other DNA
aacctccctcagaatctcagtgcattaccagagaaccaccctcaggacctaatgtggtcccagagaacatccctcagaac

SEQ ID NO: 137554 - DNA, 80 bp, synthetic construct; identical to SEQ ID NO: 43009
  misc_feature 1..80: note = Artificially Synthesized Probe
  source 1..80: mol_type = other DNA

SEQ ID NO: 137555 - DNA, 80 bp, synthetic construct
  misc_feature 1..80: note = Artificially Synthesized Probe
  source 1..80: mol_type = other DNA
gagatgctccctcagaatttaatgcgttcccagagaaattctctcagaacctaatgcgttcctagagaacctccctcaga

SEQ ID NO: 137556 - DNA, 80 bp, synthetic construct; identical to SEQ ID NO: 43011
  misc_feature 1..80: note = Artificially Synthesized Probe
  source 1..80: mol_type = other DNA

SEQ ID NO: 137557 - DNA, 80 bp, synthetic construct
  misc_feature 1..80: note = Artificially Synthesized Probe
  source 1..80: mol_type = other DNA
cctagagaacccccaacagaatctcagtgcattaccagaaaacctcccgcaggacctaatgcggtcccagagaacatccc

SEQ ID NO: 137558 - DNA, 80 bp, synthetic construct
  misc_feature 1..80: note = Artificially Synthesized Probe
  source 1..80: mol_type = other DNA
ctcaggacctaatgcggtcccagagaacctccctcagaacctcagtgcattaccagagaaccttcctcaggacctaatgc

SEQ ID NO: 137559 - DNA, 80 bp, synthetic construct
  misc_feature 1..80: note = Artificially Synthesized Probe
  source 1..80: mol_type = other DNA
attcctagagaacttccctcagaacctaatgcgttcccagagatcctccctcagaatttaatgcgttcccagagaaattc

SEQ ID NO: 137560 - DNA, 80 bp, synthetic construct
  misc_feature 1..80: note = Artificially Synthesized Probe
  source 1..80: mol_type = other DNA
tccctcacaatctcagtgcattcccagagaacttccctcaggacctcaatgtgttctcagagatcctccctcatgaccta

SEQ ID NO: 137561 - DNA, 80 bp, synthetic construct
  misc_feature 1..80: note = Artificially Synthesized Probe
  source 1..80: mol_type = other DNA
gcattacaggtgtgatgccacagtacccggcctagggtgcccctttgatacgttatttttgaagtgatgttaataaataa

SEQ ID NO: 137562 - DNA, 80 bp, synthetic construct
  misc_feature 1..80: note = Artificially Synthesized Probe
  source 1..80: mol_type = other DNA
aattccttcccagagaacctccgtcagaacctgagtgcattaacagagaaccaccctcaggacctaatgcgttcccaggg

SEQ ID NO: 137563 - DNA, 80 bp, synthetic construct; identical to SEQ ID NO: 43010
  misc_feature 1..80: note = Artificially Synthesized Probe
  source 1..80: mol_type = other DNA

SEQ ID NO: 137564 - DNA, 80 bp, synthetic construct
  misc_feature 1..80: note = Artificially Synthesized Probe
  source 1..80: mol_type = other DNA
aactaatgcgttcccagagatcctccctcagaatttaatgcgttcccagagaaattccctcagaacctaatgcgttccca

SEQ ID NO: 137565 - DNA, 80 bp, synthetic construct
  misc_feature 1..80: note = Artificially Synthesized Probe
  source 1..80: mol_type = other DNA
ccagagaacctccctcagaacctaatgcattcccagagaacttccctcagaacctaattccttcccagagaacctccctc

SEQ ID NO: 137566 - DNA, 80 bp, synthetic construct
  misc_feature 1..80: note = Artificially Synthesized Probe
  source 1..80: mol_type = other DNA
cagaatctaatgcgttcgcagagaaattccctcagaacctgatgcattaccagagaacttcccttaggacctcaatgcgt

SEQ ID NO: 137567 - DNA, 80 bp, synthetic construct
  misc_feature 1..80: note = Artificially Synthesized Probe
  source 1..80: mol_type = other DNA
gagaacctcccacagaacctaatgcgttcccagataacctccctcagaacttaatgcattcccagagaccttccctcaca

SEQ ID NO: 137568 - DNA, 80 bp, synthetic construct; identical to SEQ ID NO: 43012
  misc_feature 1..80: note = Artificially Synthesized Probe
  source 1..80: mol_type = other DNA

SEQ ID NO: 137569 - DNA, 80 bp, synthetic construct
  misc_feature 1..80: note = Artificially Synthesized Probe
  source 1..80: mol_type = other DNA
aggtcacagaggaccttcctcagaacctaatgcattcccagagaacttccctcaaaacctaatgcattccctgagaatct

SEQ ID NO: 137570 - DNA, 80 bp, synthetic construct
  misc_feature 1..80: note = Artificially Synthesized Probe
  source 1..80: mol_type = other DNA
tccctaaggacgtaatgcattcacagaggacttccctcagaacctaatgcatccccggaaaaccttcctcagaacctaat

SEQ ID NO: 137571 - DNA, 80 bp, synthetic construct
  misc_feature 1..80: note = Artificially Synthesized Probe
  source 1..80: mol_type = other DNA
agtacattcgcagacaacctcccttggaacctcagtgcattcccagataacctccctgaggacctcaatgtgttcccaga

SEQ ID NO: 137572 - DNA, 80 bp, synthetic construct; identical to SEQ ID NO: 43013
  misc_feature 1..80: note = Artificially Synthesized Probe
  source 1..80: mol_type = other DNA

SEQ ID NO: 137573 - DNA, 80 bp, synthetic construct
  misc_feature 1..80: note = Artificially Synthesized Probe
  source 1..80: mol_type = other DNA
cactgcaacctccgcctcccggattcaactgattcccctgcctcagcctcccaagtagctgggattacaggcacccgcca

SEQ ID NO: 137574 - DNA, 80 bp, synthetic construct
  misc_feature 1..80: note = Artificially Synthesized Probe
  source 1..80: mol_type = other DNA
ctgaggacctaatgcattcccagagaacctccctcagaacccaatgtgtccccagagaacctccctcacaacccagtgcg

SEQ ID NO: 137575 - DNA, 80 bp, synthetic construct
  misc_feature 1..80: note = Artificially Synthesized Probe
  source 1..80: mol_type = other DNA
gttcccagagaacctccttcagacgctaatgtgttcccagggaacttccctcagaacctcaacgcagtcccagagaaact

SEQ ID NO: 137576 - DNA, 80 bp, synthetic construct
  misc_feature 1..80: note = Artificially Synthesized Probe
  source 1..80: mol_type = other DNA
tccctcagaatctccatgcattctcagaggacttccctcagaacctaatgtgttcccagagaacttccctcaggacctaa

SEQ ID NO: 137577 - DNA, 80 bp, synthetic construct; identical to SEQ ID NO: 43014
  misc_feature 1..80: note = Artificially Synthesized Probe
  source 1..80: mol_type = other DNA

SEQ ID NO: 137578 - DNA, 80 bp, synthetic construct
  misc_feature 1..80: note = Artificially Synthesized Probe
  source 1..80: mol_type = other DNA
gaacctccctcagaacctcagtgtgttcccagagaacctccctgaggacataatgcattcccacagaacctccctcagaa

SEQ ID NO: 137579 - DNA, 80 bp, synthetic construct
  misc_feature 1..80: note = Artificially Synthesized Probe
  source 1..80: mol_type = other DNA
acttcaatacattcccagagaactttcctcagaacctaatgcgttcccagggaacttccatcagaacctaatgcattccc

SEQ ID NO: 137580 - DNA, 80 bp, synthetic construct
  misc_feature 1..80: note = Artificially Synthesized Probe
  source 1..80: mol_type = other DNA
ccatagaacctccctcagaatctaatgtgttcccagagaacttccctcaggacctcaatgcattcccagagaacctcctt

SEQ ID NO: 137581 - DNA, 80 bp, synthetic construct; identical to SEQ ID NO: 43015
  misc_feature 1..80: note = Artificially Synthesized Probe
  source 1..80: mol_type = other DNA

SEQ ID NO: 137582 - DNA, 80 bp, synthetic construct
  misc_feature 1..80: note = Artificially Synthesized Probe
  source 1..80: mol_type = other DNA
tgtctccagtcatctcgttacaatcatcttgacctttccaaaacctgccttccaacgtggaagggcttggctgcggacaa

SEQ ID NO: 137583 - DNA, 80 bp, synthetic construct
  misc_feature 1..80: note = Artificially Synthesized Probe
  source 1..80: mol_type = other DNA
ctttataaaaatatttggaggctacaagtttgtgaaaagcatatagtatattttgtttgcttttcttttctttttttctt

SEQ ID NO: 137584 - DNA, 80 bp, synthetic construct; identical to SEQ ID NO: 42942
  misc_feature 1..80: note = Artificially Synthesized Probe
  source 1..80: mol_type = other DNA

SEQ ID NO: 137585 - DNA, 80 bp, synthetic construct
  misc_feature 1..80: note = Artificially Synthesized Probe
  source 1..80: mol_type = other DNA
ataaagatgaggtttcagcatgttgcccaggctggtcttgaatcctgggctcaagagctcctcctaccttggcctcccaa

SEQ ID NO: 137586 - DNA, 80 bp, synthetic construct
  misc_feature 1..80: note = Artificially Synthesized Probe
  source 1..80: mol_type = other DNA
attagtaaatgtagaagaaatgatgaaaatagacaatcgacatttggcaaatgccacagaaacaacgcttccgtcaggaa

SEQ ID NO: 137587 - DNA, 80 bp, synthetic construct; identical to SEQ ID NO: 43016
  misc_feature 1..80: note = Artificially Synthesized Probe
  source 1..80: mol_type = other DNA

SEQ ID NO: 137588 - DNA, 80 bp, synthetic construct
  misc_feature 1..80: note = Artificially Synthesized Probe
  source 1..80: mol_type = other DNA
gggtggatcatttgagcccaggagttccagaccagcctgggcaacacagggagacagaatctctactaaaaatagagggt

SEQ ID NO: 137589 - DNA, 80 bp, synthetic construct
  misc_feature 1..80: note = Artificially Synthesized Probe
  source 1..80: mol_type = other DNA
aaaagatgaggaactactcaagattaaaggagaccaagatcaaagagatctgacaacgaaatgcatgattattgggtcct

SEQ ID NO: 137590 - DNA, 80 bp, synthetic construct
  misc_feature 1..80: note = Artificially Synthesized Probe
  source 1..80: mol_type = other DNA
gataaattatacttgaaaacatatatattagagactaggctttcttccaatacccagtgcctgacactgtaaagctttgt

SEQ ID NO: 137591 - DNA, 80 bp, synthetic construct; identical to SEQ ID NO: 43017
  misc_feature 1..80: note = Artificially Synthesized Probe
  source 1..80: mol_type = other DNA

SEQ ID NO: 137592 - DNA, 80 bp, synthetic construct
  misc_feature 1..80: note = Artificially Synthesized Probe
  source 1..80: mol_type = other DNA
aaaacacttggaaacaatgccatgaaatggattgtctggggctttaggcttctttggctgtaaaaacaaagaaaaataaa

SEQ ID NO: 137593 - DNA, 80 bp, synthetic construct
  misc_feature 1..80: note = Artificially Synthesized Probe
  source 1..80: mol_type = other DNA
acttttaaacctgtatgccaggccccatccaaacttactgactcaaaatctccgggcatctgtttttttgtttgttttga

SEQ ID NO: 137594 - DNA, 80 bp, synthetic construct
  misc_feature 1..80: note = Artificially Synthesized Probe
  source 1..80: mol_type = other DNA
taactcacttgctctggacgatgaaagacatactgctacctggataacatatgtgttttgaatctggaagcaagtcatca

SEQ ID NO: 137595 - DNA, 80 bp, synthetic construct; identical to SEQ ID NO: 43018
  misc_feature 1..80: note = Artificially Synthesized Probe
  source 1..80: mol_type = other DNA

SEQ ID NO: 137596 - DNA, 80 bp, synthetic construct
  misc_feature 1..80: note = Artificially Synthesized Probe
  source 1..80: mol_type = other DNA
taccacgagttcctaaaaaaaaaacaaataaagggtttttttgtttgctttttgagacagagtctccctctgtcacccag

SEQ ID NO: 137597 - DNA, 80 bp, synthetic construct
  misc_feature 1..80: note = Artificially Synthesized Probe
  source 1..80: mol_type = other DNA
ggccaggctagtctcgaactcttggcctcaagtgatccacccacctctacctcccaaagtgctgggcttataggcatgag

SEQ ID NO: 137598 - DNA, 80 bp, synthetic construct
  misc_feature 1..80: note = Artificially Synthesized Probe
  source 1..80: mol_type = other DNA
ttattttttgctttaggccactgcaacactagatgagcgctggttcccaggctgttacttggaagccactgataaagaag

SEQ ID NO: 137599 - DNA, 80 bp, synthetic construct; identical to SEQ ID NO: 43019
  misc_feature 1..80: note = Artificially Synthesized Probe
  source 1..80: mol_type = other DNA

SEQ ID NO: 137600 - DNA, 80 bp, synthetic construct
  misc_feature 1..80: note = Artificially Synthesized Probe
  source 1..80: mol_type = other DNA
acattttaaaagccctacataattaatgtatacatcttgatgcgtttgaggataagtacacacccacaaagccctcacca

SEQ ID NO: 137601 - DNA, 80 bp, synthetic construct
  misc_feature 1..80: note = Artificially Synthesized Probe
  source 1..80: mol_type = other DNA
gagttcaagaccagcatggccaatatggtgaaaccctgtctctactaaaaaaatacaaaaattagcaggttgtggtggtg

SEQ ID NO: 137602 - DNA, 80 bp, synthetic construct
  misc_feature 1..80: note = Artificially Synthesized Probe
  source 1..80: mol_type = other DNA
tacttaacataagatctaccctcttgaactgcttatatattttaataaatactggaagagataagccctaatgacagaaa

SEQ ID NO: 137603 - DNA, 80 bp, synthetic construct
  misc_feature 1..80: note = Artificially Synthesized Probe
  source 1..80: mol_type = other DNA
tgcacgccaccacaccccggtaatttttgtattttttgtagagatggggtttcaccatattggcaaggatggtctcaatt

SEQ ID NO: 137604 - DNA, 80 bp, synthetic construct
  misc_feature 1..80: note = Artificially Synthesized Probe
  source 1..80: mol_type = other DNA
ttagacacatctactcaatcttgtacttaaccctcttccctttttacctttcaggagttccatgtctttcattttttggc

SEQ ID NO: 137605 - DNA, 80 bp, synthetic construct; identical to SEQ ID NO: 43020
  misc_feature 1..80: note = Artificially Synthesized Probe
  source 1..80: mol_type = other DNA

SEQ ID NO: 137606 - DNA, 80 bp, synthetic construct
  misc_feature 1..80: note = Artificially Synthesized Probe
  source 1..80: mol_type = other DNA
actagatatcatggattcagatttggaaaacatggctactacaaacagatatctttttattaattaaataataatgataa

SEQ ID NO: 137607 - DNA, 80 bp, synthetic construct
  misc_feature 1..80: note = Artificially Synthesized Probe
  source 1..80: mol_type = other DNA
tgaacatgtatattttgtattcagctttactgacttactaatttatgtgtactttcccaactactgacaatattttatca

SEQ ID NO: 137608 - DNA, 80 bp, synthetic construct
  misc_feature 1..80: note = Artificially Synthesized Probe
  source 1..80: mol_type = other DNA
aatatatactaaaatatttaggggtaaaggacattatgtctacaacttacaaattgttctaaaggtcgggggggagtggg

SEQ ID NO: 137609 - DNA, 80 bp, synthetic construct; identical to SEQ ID NO: 43021
  misc_feature 1..80: note = Artificially Synthesized Probe
  source 1..80: mol_type = other DNA

SEQ ID NO: 137610 - DNA, 80 bp, synthetic construct
  misc_feature 1..80: note = Artificially Synthesized Probe
  source 1..80: mol_type = other DNA
gtgaagaaagtcattggtagcttgatggggatggcattgaatctgtaaattaccttgggcagtatggccattttcacgat

SEQ ID NO: 137611 - DNA, 80 bp, synthetic construct
  misc_feature 1..80: note = Artificially Synthesized Probe
  source 1..80: mol_type = other DNA
gggagttcactcatgatttggctctctgtttgtctgttgttggtgtataagaatgctcgtgatttttgtacattgatttt

SEQ ID NO: 137612 - DNA, 80 bp, synthetic construct
  misc_feature 1..80: note = Artificially Synthesized Probe
  source 1..80: mol_type = other DNA
gccctggccagaacttccaacactatgttgaataggagtggtgagagagggcatccctgtcttgtgccagttttcaaagg

SEQ ID NO: 137613 - DNA, 80 bp, synthetic construct; identical to SEQ ID NO: 43022
  misc_feature 1..80: note = Artificially Synthesized Probe
  source 1..80: mol_type = other DNA

SEQ ID NO: 137614 - DNA, 80 bp, synthetic construct
  misc_feature 1..80: note = Artificially Synthesized Probe
  source 1..80: mol_type = other DNA
ggtatcaggatgatgctggcctcataaaatgagttagagaggattccctctttttctattgattggaatagtttcagaag

SEQ ID NO: 137615 - DNA, 80 bp, synthetic construct
  misc_feature 1..80: note = Artificially Synthesized Probe
  source 1..80: mol_type = other DNA
ccatcaaggagacatttaacagaaactcctactgacatccattggttccttggggattactgacaatgtaacaaatcaag

SEQ ID NO: 137616 - DNA, 80 bp, synthetic construct
  misc_feature 1..80: note = Artificially Synthesized Probe
  source 1..80: mol_type = other DNA
agagtgtatgtgtcgaggaatttatccatttcttctagattttctggtttatttgcatagaggtgtttgtagtattctct

SEQ ID NO: 137617 - DNA, 80 bp, synthetic construct; identical to SEQ ID NO: 43023
  misc_feature 1..80: note = Artificially Synthesized Probe
  source 1..80: mol_type = other DNA

SEQ ID NO: 137618 - DNA, 80 bp, synthetic construct
  misc_feature 1..80: note = Artificially Synthesized Probe
  source 1..80: mol_type = other DNA
tcgttggtttcaaagaacatctttatttctgccttcatttcgttatgtacccagtagtcattcaggagcaggttgttcag

SEQ ID NO: 137619 - DNA, 80 bp, synthetic construct
  misc_feature 1..80: note = Artificially Synthesized Probe
  source 1..80: mol_type = other DNA
tgctgaaaaaaatgtatattctgttgatttggggtggagagttgatttggggtggagagttctgtagatgtctattaggt

SEQ ID NO: 137620 - DNA, 80 bp, synthetic construct
  misc_feature 1..80: note = Artificially Synthesized Probe
  source 1..80: mol_type = other DNA
gggtgctcctgtattgggtgcatatatatttaggatagttagctcttgttgaattgatccctttaccattaagtaatggc

SEQ ID NO: 137621 - DNA, 80 bp, synthetic construct
  misc_feature 1..80: note = Artificially Synthesized Probe
  source 1..80: mol_type = other DNA
gaatacagcacactgatgggtcttgactctttatccaatttgccagtctgtgtcttttaattggagcatttagtccattt

SEQ ID NO: 137622 - DNA, 80 bp, synthetic construct; identical to SEQ ID NO: 43024
  misc_feature 1..80: note = Artificially Synthesized Probe
  source 1..80: mol_type = other DNA

SEQ ID NO: 137623 - DNA, 80 bp, synthetic construct
  misc_feature 1..80: note = Artificially Synthesized Probe
  source 1..80: mol_type = other DNA
aacccgacctttctctctggctgcccctgacattttttccttcatttcaaccttggtgaatctgacaattatgtgtcttg

SEQ ID NO: 137624 - DNA, 80 bp, synthetic construct
  misc_feature 1..80: note = Artificially Synthesized Probe
  source 1..80: mol_type = other DNA
tctgtacacaaacgccaggagtgacaagaaccaggtgcaggagtccactggctttcccagctctcctgggttgaggacag

SEQ ID NO: 137625 - DNA, 80 bp, synthetic construct; identical to SEQ ID NO: 39876
  misc_feature 1..80: note = Artificially Synthesized Probe
  source 1..80: mol_type = other DNA

SEQ ID NO: 137626 - DNA, 80 bp, synthetic construct
  misc_feature 1..80: note = Artificially Synthesized Probe
  source 1..80: mol_type = other DNA
aacaccaaaagcaatggcaacaaaagacaaaattgaccaatgggatctaattaaactaaagagcttctgcacagcaaaag

SEQ ID NO: 137627 - DNA, 80 bp, synthetic construct
  misc_feature 1..80: note = Artificially Synthesized Probe
  source 1..80: mol_type = other DNA
agacacttctcaaaagaagacatttatgcagccaaaaaacacatgaaaaaatgctcaccatcactggccatcagagaaat

SEQ ID NO: 137628 - DNA, 80 bp, synthetic construct; identical to SEQ ID NO: 43025
  misc_feature 1..80: note = Artificially Synthesized Probe
  source 1..80: mol_type = other DNA

SEQ ID NO: 137629 - DNA, 80 bp, synthetic construct
  misc_feature 1..80: note = Artificially Synthesized Probe
  source 1..80: mol_type = other DNA
gatgagttcgcgtcctttgtagggacatggatgaaattggaaatcatcattctcagtaaactatcgcaagaacaaaaaac

SEQ ID NO: 137630 - DNA, 80 bp, synthetic construct
  misc_feature 1..80: note = Artificially Synthesized Probe
  source 1..80: mol_type = other DNA
ttgtgggtgcagcgcaccagcatggcacatgtatacatatgtaactaacctgcacattgtgcacatgtaccctaaaactt

SEQ ID NO: 137631 - DNA, 80 bp, synthetic construct
  misc_feature 1..80: note = Artificially Synthesized Probe
  source 1..80: mol_type = other DNA
aggaagctgggagatgggaaggggtctggatcaatttcctggtttaatgatgcactctagtgtcccccctggaggaagct

SEQ ID NO: 137632 - DNA, 80 bp, synthetic construct; identical to SEQ ID NO: 43027
  misc_feature 1..80: note = Artificially Synthesized Probe
  source 1..80: mol_type = other DNA

SEQ ID NO: 137633 - DNA, 80 bp, synthetic construct
  misc_feature 1..80: note = Artificially Synthesized Probe
  source 1..80: mol_type = other DNA
gatgcactctagtgccccaccctggaggaagctgggagatgggaaggggtctggatcaatttcctggtttgatgatgcac

SEQ ID NO: 137634 - DNA, 80 bp, synthetic construct
  misc_feature 1..80: note = Artificially Synthesized Probe
  source 1..80: mol_type = other DNA
gaagctgggagatgggaaggggtctggatcaatttcctcgtttgatgatgcactctagtgccctgccctggaggaagctg

SEQ ID NO: 137635 - DNA, 80 bp, synthetic construct; identical to SEQ ID NO: 42943
  misc_feature 1..80: note = Artificially Synthesized Probe
  source 1..80: mol_type = other DNA

SEQ ID NO: 137636 - DNA, 80 bp, synthetic construct; identical to SEQ ID NO: 43026
  misc_feature 1..80: note = Artificially Synthesized Probe
  source 1..80: mol_type = other DNA

SEQ ID NO: 137637 - DNA, 80 bp, synthetic construct
  misc_feature 1..80: note = Artificially Synthesized Probe
  source 1..80: mol_type = other DNA
tgcactctagtgccccccctggaggaagctgggagatgggaaggggtctggatcaatttcctggtttgatgatgcactct

SEQ ID NO: 137638 - DNA, 80 bp, synthetic construct
  misc_feature 1..80: note = Artificially Synthesized Probe
  source 1..80: mol_type = other DNA
gctgggagatgggaaggggtctggatcaatttcctcgtttgatgatgcactctagtgtccccctggaggaagctgggaga

SEQ ID NO: 137639 - DNA, 80 bp, synthetic construct
  misc_feature 1..80: note = Artificially Synthesized Probe
  source 1..80: mol_type = other DNA
ggttcagaagatgtggacctgcatgtgaagaagttttagaaatatctttatttattttgcctatagtttcctttttatgt

SEQ ID NO: 137640 - DNA, 80 bp, synthetic construct
  misc_feature 1..80: note = Artificially Synthesized Probe
  source 1..80: mol_type = other DNA
tgacgtcccacaggtcctgcccttgatgaggccccacaggacactcagaaagctgcatgaccaggcagtgccagggttcc

SEQ ID NO: 137641 - DNA, 80 bp, synthetic construct
  misc_feature 1..80: note = Artificially Synthesized Probe
  source 1..80: mol_type = other DNA
aaatcctggctcacccctcactagtcacatatcaaatcctggctgaccccttactagtcacgtatcgaatcctggctgac

SEQ ID NO: 137642 - DNA, 80 bp, synthetic construct; identical to SEQ ID NO: 43028
  misc_feature 1..80: note = Artificially Synthesized Probe
  source 1..80: mol_type = other DNA

SEQ ID NO: 137643 - DNA, 80 bp, synthetic construct
  misc_feature 1..80: note = Artificially Synthesized Probe
  source 1..80: mol_type = other DNA
ctgagtgtgtgaattctgtccaaaagctgaagatgtttaagctatttcctcctggagtttggtggaataataaaaggtta

SEQ ID NO: 137644 - DNA, 80 bp, synthetic construct
  misc_feature 1..80: note = Artificially Synthesized Probe
  source 1..80: mol_type = other DNA
tctgttatgctttcagtgtccctcaggctcctttcagatgtcagtttttatcattgggaatatcttggcaactgattgct

SEQ ID NO: 137645 - DNA, 80 bp, synthetic construct
  misc_feature 1..80: note = Artificially Synthesized Probe
  source 1..80: mol_type = other DNA
ctgcagccatgaaatgggttaggtcacccacagagccggcagagaccttccctccaaccacctctggctgatttcaccac

SEQ ID NO: 137646 - DNA, 80 bp, synthetic construct; identical to SEQ ID NO: 43029
  misc_feature 1..80: note = Artificially Synthesized Probe
  source 1..80: mol_type = other DNA

SEQ ID NO: 137647 - DNA, 80 bp, synthetic construct
  misc_feature 1..80: note = Artificially Synthesized Probe
  source 1..80: mol_type = other DNA
aattttgtatttttagtatggtttcaccatgttgtttagtatggtttcaacatagtttcaccatgttggtcaggctggtt

SEQ ID NO: 137648 - DNA, 80 bp, synthetic construct
  misc_feature 1..80: note = Artificially Synthesized Probe
  source 1..80: mol_type = other DNA
gggatgaggaaatcaggtttccaggcagatttccaaaccttattcctactgtacggctgttacaagttttatggatttta

SEQ ID NO: 137649 - DNA, 80 bp, synthetic construct
  misc_feature 1..80: note = Artificially Synthesized Probe
  source 1..80: mol_type = other DNA
agctctccctctccctctccctctccccacggtctccctctccctctctttccacggtctccctctcatgctgagccgaa

SEQ ID NO: 137650 - DNA, 80 bp, synthetic construct
  misc_feature 1..80: note = Artificially Synthesized Probe
  source 1..80: mol_type = other DNA
cctaaccgcaagtgatccgccagcctcggcctcccgaggtgccgggattgcagacggagtctcgttcactcagtgctcaa

SEQ ID NO: 137651 - DNA, 80 bp, synthetic construct; identical to SEQ ID NO: 43030
  misc_feature 1..80: note = Artificially Synthesized Probe
  source 1..80: mol_type = other DNA

SEQ ID NO: 137652 - DNA, 80 bp, synthetic construct
  misc_feature 1..80: note = Artificially Synthesized Probe
  source 1..80: mol_type = other DNA
tgaggagcatttctgcccggccgccccgtctgagaagtgaggagaccctctgcccggcaaccgccccgtctgagaagtga

SEQ ID NO: 137653 - DNA, 80 bp, synthetic construct
  misc_feature 1..80: note = Artificially Synthesized Probe
  source 1..80: mol_type = other DNA
gggaggtgaggggcgcctctgcccagccgcccctactgggaagtgaggagcccctctgccaggccagccgccccgtccgg

SEQ ID NO: 137654 - DNA, 80 bp, synthetic construct
  misc_feature 1..80: note = Artificially Synthesized Probe
  source 1..80: mol_type = other DNA
cggccagccgccccgcccgggaggtgaggggcgcctctgcccggccgcccctactgggaagtgaggagcccctctgcccg

SEQ ID NO: 137655 - DNA, 80 bp, synthetic construct; identical to SEQ ID NO: 43031
  misc_feature 1..80: note = Artificially Synthesized Probe
  source 1..80: mol_type = other DNA

SEQ ID NO: 137656 - DNA, 80 bp, synthetic construct
  misc_feature 1..80: note = Artificially Synthesized Probe
  source 1..80: mol_type = other DNA
gtcctctgcctaggaaaaccagagacctttgttcacttgtttatctgctgaccttccctccactattgtcctatgaccct

SEQ ID NO: 137657 - DNA, 80 bp, synthetic construct
  misc_feature 1..80: note = Artificially Synthesized Probe
  source 1..80: mol_type = other DNA
caccaaggaatacagtttgaaaaccattagctctcactaaagacaagctagggaagtctaaagagagaataacctactga

SEQ ID NO: 137658 - DNA, 80 bp, synthetic construct
  misc_feature 1..80: note = Artificially Synthesized Probe
  source 1..80: mol_type = other DNA
cttggtccttacaacagtaacttcaagctttcataggaggaaaaagttccaagaaaaaggaaaattacattttacctggc

SEQ ID NO: 137659 - DNA, 80 bp, synthetic construct
  misc_feature 1..80: note = Artificially Synthesized Probe
  source 1..80: mol_type = other DNA
cgccatgacacccggctaattttttttatttttagttgagacagggtttcgccatgttgggcaggctggtctcgaattcc

SEQ ID NO: 137660 - DNA, 80 bp, synthetic construct
  misc_feature 1..80: note = Artificially Synthesized Probe
  source 1..80: mol_type = other DNA
tttaataacatccagagatgactagcgaaaagaataacttttcctggcaacactgcaagcatctgagtgtttaactgcac

SEQ ID NO: 137661 - DNA, 80 bp, synthetic construct; identical to SEQ ID NO: 43032
  misc_feature 1..80: note = Artificially Synthesized Probe
  source 1..80: mol_type = other DNA

SEQ ID NO: 137662 - DNA, 80 bp, synthetic construct
  misc_feature 1..80: note = Artificially Synthesized Probe
  source 1..80: mol_type = other DNA
atgtcctctactcttcaatgagacatgagtccatcaacaaaatagcactgggaaaggaattctagtttctgacattgaga

SEQ ID NO: 137663 - DNA, 80 bp, synthetic construct
  misc_feature 1..80: note = Artificially Synthesized Probe
  source 1..80: mol_type = other DNA
aaagtgtgagtatccattctattacaatcatttaatcaagggaccagacacatttgattgcatcatttcagaactgctcc

SEQ ID NO: 137664 - DNA, 80 bp, synthetic construct
  misc_feature 1..80: note = Artificially Synthesized Probe
  source 1..80: mol_type = other DNA
ttggtggtgtctggagcaaaacaataccgtaaaataatcctccagcagccaagtgtagacaattaaaaacagggatcact

SEQ ID NO: 137665 - DNA, 80 bp, synthetic construct; identical to SEQ ID NO: 43033
  misc_feature 1..80: note = Artificially Synthesized Probe
  source 1..80: mol_type = other DNA

SEQ ID NO: 137666 - DNA, 80 bp, synthetic construct
  misc_feature 1..80: note = Artificially Synthesized Probe
  source 1..80: mol_type = other DNA
tgctgaatgaggcagagcagaactctcctggccccaccacagtggctaatgaagcttgtgtgtgtcctggaggcggggct

SEQ ID NO: 137667 - DNA, 80 bp, synthetic construct
  misc_feature 1..80: note = Artificially Synthesized Probe
  source 1..80: mol_type = other DNA
aaacgcacattgggtaggttacccgtggtgacgcaaaccagacttacttgatctaaatctcctttctccgttgccagttc

SEQ ID NO: 137668 - DNA, 80 bp, synthetic construct
  misc_feature 1..80: note = Artificially Synthesized Probe
  source 1..80: mol_type = other DNA
gaagtcatgcacgctatctgataaagaagaactgaggcaacccagaccacattcttgcctccgggccttcacagtgcttt

SEQ ID NO: 137669 - DNA, 80 bp, synthetic construct; identical to SEQ ID NO: 43034
  misc_feature 1..80: note = Artificially Synthesized Probe
  source 1..80: mol_type = other DNA

SEQ ID NO: 137670 - DNA, 80 bp, synthetic construct
  misc_feature 1..80: note = Artificially Synthesized Probe
  source 1..80: mol_type = other DNA
aagtaagccccattacaacaaccacaacagaaatctccttgagaaaatcgacttctcagcttccaaatatgaccactatt

SEQ ID NO: 137671 - DNA, 80 bp, synthetic construct; identical to SEQ ID NO: 42944
  misc_feature 1..80: note = Artificially Synthesized Probe
  source 1..80: mol_type = other DNA

SEQ ID NO: 137672 - DNA, 80 bp, synthetic construct
  misc_feature 1..80: note = Artificially Synthesized Probe
  source 1..80: mol_type = other DNA
tggaggatcaaatgtgaaaccctagaagcagcacatgatacacacaagggtcactgatgacgttaattccagtacaacta

SEQ ID NO: 137673 - DNA, 80 bp, synthetic construct; identical to SEQ ID NO: 43035
  misc_feature 1..80: note = Artificially Synthesized Probe
  source 1..80: mol_type = other DNA

SEQ ID NO: 137674 - DNA, 80 bp, synthetic construct
  misc_feature 1..80: note = Artificially Synthesized Probe
  source 1..80: mol_type = other DNA
gctgaggcggcggatcacttgaggtcaggagttcaagaccagcctgaacaacatggtgaaagcctgtctctactaaaaat

SEQ ID NO: 137675 - DNA, 80 bp, synthetic construct
  misc_feature 1..80: note = Artificially Synthesized Probe
  source 1..80: mol_type = other DNA
aaaatacaataaaataaatacattgcacaaaagcactacacctgcgtctggtttttggtttaagacaatactgctaacag

SEQ ID NO: 137676 - DNA, 80 bp, synthetic construct
  misc_feature 1..80: note = Artificially Synthesized Probe
  source 1..80: mol_type = other DNA
ggtctaacacccaagcaagtatttcacatttgcacactccaaactttggcttctttacctaacatgagagaaaaaaaatc

SEQ ID NO: 137677 - DNA, 80 bp, synthetic construct
  misc_feature 1..80: note = Artificially Synthesized Probe
  source 1..80: mol_type = other DNA
gactcctgattccactggcttaacagtgggctctgggattatgctgttgagctgagtcactatgattctaagtcttttgg

SEQ ID NO: 137678 - DNA, 80 bp, synthetic construct; identical to SEQ ID NO: 43036
  misc_feature 1..80: note = Artificially Synthesized Probe
  source 1..80: mol_type = other DNA

SEQ ID NO: 137679 - DNA, 80 bp, synthetic construct
  misc_feature 1..80: note = Artificially Synthesized Probe
  source 1..80: mol_type = other DNA
tactctcgctggcgtaaagcatcaagaaaacgcagagggtaggaagaagttgaacctactctcgccggtgtaaagcatca

SEQ ID NO: 137680 - DNA, 80 bp, synthetic construct
  misc_feature 1..80: note = Artificially Synthesized Probe
  source 1..80: mol_type = other DNA
tgcacatcaccacacccaagtaatttttgtattttttgtagagatgggattttgccatgttgcctgggctggtctgaaac

SEQ ID NO: 137681 - DNA, 80 bp, synthetic construct; identical to SEQ ID NO: 43037
  misc_feature 1..80: note = Artificially Synthesized Probe
  source 1..80: mol_type = other DNA

SEQ ID NO: 137682 - DNA, 80 bp, synthetic construct
  misc_feature 1..80: note = Artificially Synthesized Probe
  source 1..80: mol_type = other DNA
ggtttcaagggaaccgagtgaatcagggttaacggcttgatatgctgccattctctggatgcaggatgacatgagaggtc

SEQ ID NO: 137683 - DNA, 80 bp, synthetic construct
  misc_feature 1..80: note = Artificially Synthesized Probe
  source 1..80: mol_type = other DNA
cgtgcaacagagggccgcagccgtccctaaagaaaagatgtctgagccagagctgaaggatgcctcagagtgaaatatat

SEQ ID NO: 137684 - DNA, 80 bp, synthetic construct
  misc_feature 1..80: note = Artificially Synthesized Probe
  source 1..80: mol_type = other DNA
gagtgggatgagctggggatgagggtgggaaagtgcttctacacacagggtcatcagaaaaggtctctgaggagatgacg

SEQ ID NO: 137685 - DNA, 80 bp, synthetic construct
  misc_feature 1..80: note = Artificially Synthesized Probe
  source 1..80: mol_type = other DNA
ggtgaatcagggatggaaaggaagatgggggcctggggtaagaggggtggcgggagtcccatcatattggtgagtcaggg

SEQ ID NO: 137686 - DNA, 80 bp, synthetic construct
  misc_feature 1..80: note = Artificially Synthesized Probe
  source 1..80: mol_type = other DNA
tattggtgagtcagggacggaaacgaagatgggggcctggggtaagaggggtggcaagagtcgcatcatattggtgagtc

SEQ ID NO: 137687 - DNA, 80 bp, synthetic construct; identical to SEQ ID NO: 43038
  misc_feature 1..80: note = Artificially Synthesized Probe
  source 1..80: mol_type = other DNA

SEQ ID NO: 137688 - DNA, 80 bp, synthetic construct
  misc_feature 1..80: note = Artificially Synthesized Probe
  source 1..80: mol_type = other DNA
ggtgagggaatgaaaggagtgaagggacagtcactttctggtctgagcaactgcacggctgatgttgcccttaactgaga

SEQ ID NO: 137689 - DNA, 80 bp, synthetic construct
  misc_feature 1..80: note = Artificially Synthesized Probe
  source 1..80: mol_type = other DNA
tgtgaagggataggaatacctacctcgtatggctgccatgaggatgggatgaggcatgcgtgtcaggcgtgagctacaca

SEQ ID NO: 137690 - DNA, 80 bp, synthetic construct; identical to SEQ ID NO: 43039
  misc_feature 1..80: note = Artificially Synthesized Probe
  source 1..80: mol_type = other DNA

SEQ ID NO: 137691 - DNA, 80 bp, synthetic construct
  misc_feature 1..80: note = Artificially Synthesized Probe
  source 1..80: mol_type = other DNA
cccacccccacccccacctctggaaaaactgtcttccacaaaaccagtccctggtgccaaaaaggttggggacagctgga

SEQ ID NO: 137692 - DNA, 80 bp, synthetic construct
  misc_feature 1..80: note = Artificially Synthesized Probe
  source 1..80: mol_type = other DNA
ttgagcagtaattaatagggtgagctacgaaacaaggcaaaactgttgtgcttctcttaataaagcagctcacagaaaac

SEQ ID NO: 137693 - DNA, 80 bp, synthetic construct
  misc_feature 1..80: note = Artificially Synthesized Probe
  source 1..80: mol_type = other DNA
cacaggaacacatcactgggatgctgcacatcacctttgctatttcagatgacgctggaaagtgctgtggacctgaaggt

SEQ ID NO: 137694 - DNA, 80 bp, synthetic construct
  misc_feature 1..80: note = Artificially Synthesized Probe
  source 1..80: mol_type = other DNA
ctttcttccccagtctacaacaacgcacataccaccctcctccctgttgataaaagtcctaaaaccctaaggtgtggata

SEQ ID NO: 137695 - DNA, 80 bp, synthetic construct
  misc_feature 1..80: note = Artificially Synthesized Probe
  source 1..80: mol_type = other DNA
agatcacgcttctcaggcttgctttgcagctgtcacaggccacagagaattacaactttggggttagattgtcagtaact

SEQ ID NO: 137696 - DNA, 80 bp, synthetic construct; identical to SEQ ID NO: 43040
  misc_feature 1..80: note = Artificially Synthesized Probe
  source 1..80: mol_type = other DNA

SEQ ID NO: 137697 - DNA, 80 bp, synthetic construct
  misc_feature 1..80: note = Artificially Synthesized Probe
  source 1..80: mol_type = other DNA
ttaagactcttcctttccctagaggggaaagctttcgcttgtgagatgaaagttcctcagtttctgcatttctcactcca

SEQ ID NO: 137698 - DNA, 80 bp, synthetic construct
  misc_feature 1..80: note = Artificially Synthesized Probe
  source 1..80: mol_type = other DNA
aacagttatgtacagacttctttctcctactagaccctaagtgccttcccgatccaatttctcatcttttccaaagccct

SEQ ID NO: 137699 - DNA, 80 bp, synthetic construct; identical to SEQ ID NO: 43041
  misc_feature 1..80: note = Artificially Synthesized Probe
  source 1..80: mol_type = other DNA

SEQ ID NO: 137700 - DNA, 80 bp, synthetic construct
  misc_feature 1..80: note = Artificially Synthesized Probe
  source 1..80: mol_type = other DNA
ccatggttgctattgaaaagctggatgccatgttgatttctgatccttggtatatgacttgttattttctatctgaaagt

SEQ ID NO: 137701 - DNA, 80 bp, synthetic construct
  misc_feature 1..80: note = Artificially Synthesized Probe
  source 1..80: mol_type = other DNA
ccagatactcgggaggctgacgtgggaggactgattgagcctgggaggtggaggtggcagtgagctgtgatcgcactact

SEQ ID NO: 137702 - DNA, 80 bp, synthetic construct; identical to SEQ ID NO: 43173
  misc_feature 1..80: note = Artificially Synthesized Probe
  source 1..80: mol_type = other DNA

SEQ ID NO: 137703 - DNA, 80 bp, synthetic construct
  misc_feature 1..80: note = Artificially Synthesized Probe
  source 1..80: mol_type = other DNA
tcagtgtccacttggactcctgcactcctgtctctgatctttcctgctgcctaaactttgttttctagaagggccctggc

SEQ ID NO: 137704 - DNA, 80 bp, synthetic construct
  misc_feature 1..80: note = Artificially Synthesized Probe
  source 1..80: mol_type = other DNA
tcccaacactcgggaggctgaggcaggagaattgtttgaacctgggaggcggaggttgcagtgagccgagatagcgccac

SEQ ID NO: 137705 - DNA, 80 bp, synthetic construct
  misc_feature 1..80: note = Artificially Synthesized Probe
  source 1..80: mol_type = other DNA
cgcccagcagcttcagtaaatgctggttggctttttatttttcctttctttccctttccttttccatcttgctcgcttcc

SEQ ID NO: 137706 - DNA, 80 bp, synthetic construct; identical to SEQ ID NO: 43164
  misc_feature 1..80: note = Artificially Synthesized Probe
  source 1..80: mol_type = other DNA

SEQ ID NO: 137707 - DNA, 80 bp, synthetic construct
  misc_feature 1..80: note = Artificially Synthesized Probe
  source 1..80: mol_type = other DNA
tgcaacctccgcctcccgggtttaagcgattctcctgcctcagcctcccgagtagctgggattacagatgcccgccacca

SEQ ID NO: 137708 - DNA, 80 bp, synthetic construct; identical to SEQ ID NO: 43174
  misc_feature 1..80: note = Artificially Synthesized Probe
  source 1..80: mol_type = other DNA

SEQ ID NO: 137709 - DNA, 80 bp, synthetic construct
  misc_feature 1..80: note = Artificially Synthesized Probe
  source 1..80: mol_type = other DNA
cgagtggcagccgcttacattttctttttcgctaccagttgcgtcacctagcgaggtccacgctgattggctgtctgagc

SEQ ID NO: 137710 - DNA, 80 bp, synthetic construct
  misc_feature 1..80: note = Artificially Synthesized Probe
  source 1..80: mol_type = other DNA
ctttgggaggccaaggcgggaggattgcttgaggccaggagttcaagaccagcctgggcaacatcgtgagaccgcccatc

SEQ ID NO: 137711 - DNA, 80 bp, synthetic construct; identical to SEQ ID NO: 43175
  misc_feature 1..80: note = Artificially Synthesized Probe
  source 1..80: mol_type = other DNA

SEQ ID NO: 137712 - DNA, 80 bp, synthetic construct
  misc_feature 1..80: note = Artificially Synthesized Probe
  source 1..80: mol_type = other DNA
aaggaggctgaggcgggaggatcacctgagcccggggaggttgagtctgcagtgaaccatgagagccatgattgcgccac

SEQ ID NO: 137713 - DNA, 80 bp, synthetic construct
  misc_feature 1..80: note = Artificially Synthesized Probe
  source 1..80: mol_type = other DNA
tttctaggaaaagttgaagacctcagtcagttgggataggaccacctcagtgctgcctgattctaggctgctgttgggga

SEQ ID NO: 137714 - DNA, 80 bp, synthetic construct
  misc_feature 1..80: note = Artificially Synthesized Probe
  source 1..80: mol_type = other DNA
ccccaagaatgcaagacctgggcagaaagctgtcctcctgagccccgtgagcctgtcctctggctgtctgagcttttcct

SEQ ID NO: 137715 - DNA, 80 bp, synthetic construct; identical to SEQ ID NO: 43176
  misc_feature 1..80: note = Artificially Synthesized Probe
  source 1..80: mol_type = other DNA

SEQ ID NO: 137716 - DNA, 80 bp, synthetic construct
  misc_feature 1..80: note = Artificially Synthesized Probe
  source 1..80: mol_type = other DNA
tgtagtcccagctacacgggaggctgaggcaggagaatcgcttgaacccgggaggcggaggttgcagtgagccgagatcg

SEQ ID NO: 137717 - DNA, 80 bp, synthetic construct
  misc_feature 1..80: note = Artificially Synthesized Probe
  source 1..80: mol_type = other DNA
aacatagagaaaccttgtctctactaaaaatacaaaaattagccaggtgtggtggcacacgcctgtaatctcagctactc

SEQ ID NO: 137718 - DNA, 80 bp, synthetic construct
  misc_feature 1..80: note = Artificially Synthesized Probe
  source 1..80: mol_type = other DNA
cggatcacctgaggtcaggtgttgagaccagcctgaccaacatggtgaaaccctgtctctactaaaaatataaaattagc

SEQ ID NO: 137719 - DNA, 80 bp, synthetic construct
  misc_feature 1..80: note = Artificially Synthesized Probe
  source 1..80: mol_type = other DNA
gaataaataaaataaaaaagaagattgtgctttcatttggtggtaatcgtccccagctatgccctctgctcctcatcctc

SEQ ID NO: 137720 - DNA, 80 bp, synthetic construct; identical to SEQ ID NO: 43177
  misc_feature 1..80: note = Artificially Synthesized Probe
  source 1..80: mol_type = other DNA

SEQ ID NO: 137721 - DNA, 80 bp, synthetic construct
  misc_feature 1..80: note = Artificially Synthesized Probe
  source 1..80: mol_type = other DNA
tactagggagcctgaggtgggaggatcacttgagccctggaggtcaaggctgcagtgagctatgatcacaccactgtact

SEQ ID NO: 137722 - DNA, 80 bp, synthetic construct
  misc_feature 1..80: note = Artificially Synthesized Probe
  source 1..80: mol_type = other DNA
tctccctttctctccagtttgccgtggtaggcgtttttggaaagaccccagagccagctgtggcagttgatgcaaccagc

SEQ ID NO: 137723 - DNA, 80 bp, synthetic construct
  misc_feature 1..80: note = Artificially Synthesized Probe
  source 1..80: mol_type = other DNA
ccagagggttttcctcagtgtgactttgaagacaacgcccatcccttctgtgactgggtccagacttccggggatggtgg

SEQ ID NO: 137724 - DNA, 80 bp, synthetic construct; identical to SEQ ID NO: 43178
  misc_feature 1..80: note = Artificially Synthesized Probe
  source 1..80: mol_type = other DNA

SEQ ID NO: 137725 - DNA, 80 bp, synthetic construct
  misc_feature 1..80: note = Artificially Synthesized Probe
  source 1..80: mol_type = other DNA
gggaagattgcttgagcccaggagtctgagctcagcctgggcaacatagtgagaaccccatctctagaaaaaaaaatttt

SEQ ID NO: 137726 - DNA, 80 bp, synthetic construct
  misc_feature 1..80: note = Artificially Synthesized Probe
  source 1..80: mol_type = other DNA
attaaaaataaaaaaataggccaggcatggtggctcacgcctttaattccagcactttgggaggccgaggcaggtggatc

SEQ ID NO: 137727 - DNA, 80 bp, synthetic construct
  misc_feature 1..80: note = Artificially Synthesized Probe
  source 1..80: mol_type = other DNA
tgcagtgagctgagatcgcaccactgcactccatccggggcaacagagtaagattctgtcttaaaaatatataaaaagag

SEQ ID NO: 137728 - DNA, 80 bp, synthetic construct
  misc_feature 1..80: note = Artificially Synthesized Probe
  source 1..80: mol_type = other DNA
gtcccagctactcgggaggctgaggcaggagaatggcgtgagcccgggaggcagagcttgcagtgagccgagatcacgcc

SEQ ID NO: 137729 - DNA, 80 bp, synthetic construct
  misc_feature 1..80: note = Artificially Synthesized Probe
  source 1..80: mol_type = other DNA
agaaatgatggatgtcttggtgtcctgcagtgtgtttgggagaatttgaacaagtagaacttcaacaacaacaaaaaaca

SEQ ID NO: 137730 - DNA, 80 bp, synthetic construct; identical to SEQ ID NO: 43179
  misc_feature 1..80: note = Artificially Synthesized Probe
  source 1..80: mol_type = other DNA

SEQ ID NO: 137731 - DNA, 80 bp, synthetic construct
  misc_feature 1..80: note = Artificially Synthesized Probe
  source 1..80: mol_type = other DNA
gagatcgtgtcactgcactccagcctgggcaacagagcgagactccatctcaaaaaaacaacacacacacacacacacac

SEQ ID NO: 137732 - DNA, 80 bp, synthetic construct
  misc_feature 1..80: note = Artificially Synthesized Probe
  source 1..80: mol_type = other DNA
aattctcctgcctcagactcccgagtagctgggactccaggcacgggccaccacgcccagctaatttttgtatttttagt

SEQ ID NO: 137733 - DNA, 80 bp, synthetic construct; identical to SEQ ID NO: 43180
  misc_feature 1..80: note = Artificially Synthesized Probe
  source 1..80: mol_type = other DNA

SEQ ID NO: 137734 - DNA, 80 bp, synthetic construct
  misc_feature 1..80: note = Artificially Synthesized Probe
  source 1..80: mol_type = other DNA
tgcgtggagttcgcataccacatgtatggccttggggagggtactatgctcgaactcctcctgggaagtcctgcggggag

SEQ ID NO: 137735 - DNA, 80 bp, synthetic construct
  misc_feature 1..80: note = Artificially Synthesized Probe
  source 1..80: mol_type = other DNA
ggcgccaccagtgctgaagaggtggaaagctggaaagagagccgagaaaaggggaacttcgtgttacagaaagtgagaaa

SEQ ID NO: 137736 - DNA, 80 bp, synthetic construct
  misc_feature 1..80: note = Artificially Synthesized Probe
  source 1..80: mol_type = other DNA
cgacattttggcagagaacagattctatgcccagtggaatcacagagttgctggagattcatttttgtttctctctccgt

SEQ ID NO: 137737 - DNA, 80 bp, synthetic construct
  misc_feature 1..80: note = Artificially Synthesized Probe
  source 1..80: mol_type = other DNA
agttctctctatgaactgcttaaaatgtgagtcctccctggagcccgaattctcacccagctggctttgttttccatctt

SEQ ID NO: 137738 - DNA, 80 bp, synthetic construct
  misc_feature 1..80: note = Artificially Synthesized Probe
  source 1..80: mol_type = other DNA
gatccagaactccttcctctgcagtcttgaaggctggacccatatcctattcatttctggcataatatctgacatatatt

SEQ ID NO: 137739 - DNA, 80 bp, synthetic construct
  misc_feature 1..80: note = Artificially Synthesized Probe
  source 1..80: mol_type = other DNA
ataaaaaataaaaataaattagctgggcgtggtggcatgctcctgtagtcccagctactggggaggttgaggtgggagga

SEQ ID NO: 137740 - DNA, 80 bp, synthetic construct; identical to SEQ ID NO: 43181
  misc_feature 1..80: note = Artificially Synthesized Probe
  source 1..80: mol_type = other DNA

SEQ ID NO: 137741 - DNA, 80 bp, synthetic construct
  misc_feature 1..80: note = Artificially Synthesized Probe
  source 1..80: mol_type = other DNA
caccattccttcagaaaaacccaacatgccctcagaaaaacccaccattccctcagaaaaacccaccatcctcacagaaa

SEQ ID NO: 137742 - DNA, 80 bp, synthetic construct
  misc_feature 1..80: note = Artificially Synthesized Probe
  source 1..80: mol_type = other DNA
tacagaaaaacccagcatccccacggaaaaacccaccatctccatggaagagactatcatctccacagaaaaacccacca

SEQ ID NO: 137743 - DNA, 80 bp, synthetic construct
  misc_feature 1..80: note = Artificially Synthesized Probe
  source 1..80: mol_type = other DNA
ccaccatctccccagaaaaacccaccacccccacagaaaaacccaccatctccccagaaaaactcaccatccccacagaa

SEQ ID NO: 137744 - DNA, 80 bp, synthetic construct; identical to SEQ ID NO: 43182
  misc_feature 1..80: note = Artificially Synthesized Probe
  source 1..80: mol_type = other DNA

SEQ ID NO: 137745 - DNA, 80 bp, synthetic construct
  misc_feature 1..80: note = Artificially Synthesized Probe
  source 1..80: mol_type = other DNA
caccatccccattgaagagactaccatctccacagaaaaactcaccatccccacagaaaaacccaccatctccccagaaa

SEQ ID NO: 137746 - DNA, 80 bp, synthetic construct
  misc_feature 1..80: note = Artificially Synthesized Probe
  source 1..80: mol_type = other DNA
cagaaaaactcaccatccccacagaaaaacccaccatctccacggaaaaacccaccatccccacggaaaaacttaccatc

SEQ ID NO: 137747 - DNA, 80 bp, synthetic construct
  misc_feature 1..80: note = Artificially Synthesized Probe
  source 1..80: mol_type = other DNA
gcactaccacaacctccagatccagtacaggtatgaggtggatggagcgtgggccaaggctgaaagtcagagacaatgac

SEQ ID NO: 137748 - DNA, 80 bp, synthetic construct; identical to SEQ ID NO: 43183
  misc_feature 1..80: note = Artificially Synthesized Probe
  source 1..80: mol_type = other DNA

SEQ ID NO: 137749 - DNA, 80 bp, synthetic construct
  misc_feature 1..80: note = Artificially Synthesized Probe
  source 1..80: mol_type = other DNA
tagtgagaccctgtctccactttaaaattaaaaaaaaaaaaaaattagctgggtgtggtggcgcacgcctgtagtcccag

SEQ ID NO: 137750 - DNA, 80 bp, synthetic construct
  misc_feature 1..80: note = Artificially Synthesized Probe
  source 1..80: mol_type = other DNA
gtatattcctaaggttgtgcaaccatcatcactttctaatccaaacactttcatcactccaaaaagaaatcctataccta

SEQ ID NO: 137751 - DNA, 80 bp, synthetic construct; identical to SEQ ID NO: 43165
  misc_feature 1..80: note = Artificially Synthesized Probe
  source 1..80: mol_type = other DNA

SEQ ID NO: 137752 - DNA, 80 bp, synthetic construct; identical to SEQ ID NO: 43184
  misc_feature 1..80: note = Artificially Synthesized Probe
  source 1..80: mol_type = other DNA

SEQ ID NO: 137753 - DNA, 80 bp, synthetic construct
  misc_feature 1..80: note = Artificially Synthesized Probe
  source 1..80: mol_type = other DNA
gaggcaggagaatggcgtgaacccgggaggcagagcttgcagtgagccgagatcatgccaccgcactccagcctgggtga

SEQ ID NO: 137754 - DNA, 80 bp, synthetic construct
  misc_feature 1..80: note = Artificially Synthesized Probe
  source 1..80: mol_type = other DNA
ctcaagcaactatcctgcctcagcctcctgagtagctggggccacaggcctgcaccaccacgactggctaatttttgtat

SEQ ID NO: 137755 - DNA, 80 bp, synthetic construct
  misc_feature 1..80: note = Artificially Synthesized Probe
  source 1..80: mol_type = other DNA
ccctgttagccaggctgttcttgaactcctggcctcaagtgatctgtccgcctcggtttaccaaagtgctgggattacag

SEQ ID NO: 137756 - DNA, 80 bp, synthetic construct
  misc_feature 1..80: note = Artificially Synthesized Probe
  source 1..80: mol_type = other DNA
gcacccagccttcaggcctttttatggctaaataatatggtcctgtttcctagagaagaacttgagtttgggggtagagg

SEQ ID NO: 137757 - DNA, 80 bp, synthetic construct; identical to SEQ ID NO: 43185
  misc_feature 1..80: note = Artificially Synthesized Probe
  source 1..80: mol_type = other DNA

SEQ ID NO: 137758 - DNA, 80 bp, synthetic construct
  misc_feature 1..80: note = Artificially Synthesized Probe
  source 1..80: mol_type = other DNA
ccaaggggtcagctcagaagcaatggttacatgatggcgaagttattcattcaatcttttctttttttttgagacagggt

SEQ ID NO: 137759 - DNA, 80 bp, synthetic construct
  misc_feature 1..80: note = Artificially Synthesized Probe
  source 1..80: mol_type = other DNA
tgccaccatgcccagctaatttttgtatttttggtagagacagggtttcaccacgttgcccaggctggtcttgaaatcct

SEQ ID NO: 137760 - DNA, 80 bp, synthetic construct
  misc_feature 1..80: note = Artificially Synthesized Probe
  source 1..80: mol_type = other DNA
agctcactacaacctccacctcccgggttcaagcaattctctgcctcagccccgcaagtagctgggataacaggctcacg

SEQ ID NO: 137761 - DNA, 80 bp, synthetic construct
  misc_feature 1..80: note = Artificially Synthesized Probe
  source 1..80: mol_type = other DNA
caattacttaataagtgttaattattatcattagcaatttatgataaatatatgcaacctattaattaaaagtgcattaa

SEQ ID NO: 137762 - DNA, 80 bp, synthetic construct
  misc_feature 1..80: note = Artificially Synthesized Probe
  source 1..80: mol_type = other DNA
tcccctccgggcatcagccaggactacaaaatgtgtcctgccaggccaagtccagccctccaacctcagttcatgacccc

SEQ ID NO: 137763 - DNA, 80 bp, synthetic construct; identical to SEQ ID NO: 43186
  misc_feature 1..80: note = Artificially Synthesized Probe
  source 1..80: mol_type = other DNA

SEQ ID NO: 137764 - DNA, 80 bp, synthetic construct
  misc_feature 1..80: note = Artificially Synthesized Probe
  source 1..80: mol_type = other DNA
aggcatgtattcacttttgtttttttttttttgacaaactattcactcacagttctctattgatgcaaaaaccattctag

SEQ ID NO: 137765 - DNA, 80 bp, synthetic construct
  misc_feature 1..80: note = Artificially Synthesized Probe
  source 1..80: mol_type = other DNA
caccacgcccagctaattttgtatttttggtagagatggggtttcttcatgttagtaaggctggtcttgaactcccgacc

SEQ ID NO: 137766 - DNA, 80 bp, synthetic construct
  misc_feature 1..80: note = Artificially Synthesized Probe
  source 1..80: mol_type = other DNA
ttttttttttggtagagatggggtctggctctgttgcccaggctggtctatgaactcctgggctcaacccatcctcccac

SEQ ID NO: 137767 - DNA, 80 bp, synthetic construct; identical to SEQ ID NO: 43187
  misc_feature 1..80: note = Artificially Synthesized Probe
  source 1..80: mol_type = other DNA

SEQ ID NO: 137768 - DNA, 80 bp, synthetic construct; identical to SEQ ID NO: 43163
  misc_feature 1..80: note = Artificially Synthesized Probe
  source 1..80: mol_type = other DNA

SEQ ID NO: 137769 - DNA, 80 bp, synthetic construct
  misc_feature 1..80: note = Artificially Synthesized Probe
  source 1..80: mol_type = other DNA
agctactctggaggctgaggcaggagaatcgcttgaacgctgaaggcggaggttgcagtgagccaagatcacgccacttc

SEQ ID NO: 137770 - DNA, 80 bp, synthetic construct
  misc_feature 1..80: note = Artificially Synthesized Probe
  source 1..80: mol_type = other DNA
gcctaggcaacacagcaagactccatctctccaaaacgttaaaaaaaaaaaaaaaaaaaagtcgggcatggtggcatgtg

SEQ ID NO: 137771 - DNA, 80 bp, synthetic construct
  misc_feature 1..80: note = Artificially Synthesized Probe
  source 1..80: mol_type = other DNA
ataaataaatgaaaaagaaaggcaaagggagaagtactctaggagctatatgactgtgtgacctcacatccctttctccc

SEQ ID NO: 137772 - DNA, 80 bp, synthetic construct
  misc_feature 1..80: note = Artificially Synthesized Probe
  source 1..80: mol_type = other DNA
atgctgtccctgcctgccagccagttggagtagacgtgacgccaggatcccaatccctcgcttgagcagaggattggggg

SEQ ID NO: 137773 - DNA, 80 bp, synthetic construct; identical to SEQ ID NO: 43188
  misc_feature 1..80: note = Artificially Synthesized Probe
  source 1..80: mol_type = other DNA

SEQ ID NO: 137774 - DNA, 80 bp, synthetic construct
  misc_feature 1..80: note = Artificially Synthesized Probe
  source 1..80: mol_type = other DNA
aggccaggcacagtgactcacactggtaacctcagcactttgggaggctgaggcaggaggatcacttgaatccaggagat

SEQ ID NO: 137775 - DNA, 80 bp, synthetic construct
  misc_feature 1..80: note = Artificially Synthesized Probe
  source 1..80: mol_type = other DNA
cagcctgggcaacatagtaagactccatctccacaaaaaacagacgagcaatttctgctctggaccccaaggctttgcaa

SEQ ID NO: 137776 - DNA, 80 bp, synthetic construct
  misc_feature 1..80: note = Artificially Synthesized Probe
  source 1..80: mol_type = other DNA
atggtgaaaccccgtctctactaaaaatataaaaaattagccaggcttggtggcaggcacctgtaatcccagctacttgg

SEQ ID NO: 137777 - DNA, 80 bp, synthetic construct
  misc_feature 1..80: note = Artificially Synthesized Probe
  source 1..80: mol_type = other DNA
cctatagtcccagctagtcgggaggatgaggcaggaggatcgcttgagcccaagagttggaggctgcagtgagctatgat

SEQ ID NO: 137778 - DNA, 80 bp, synthetic construct; identical to SEQ ID NO: 43189
  misc_feature 1..80: note = Artificially Synthesized Probe
  source 1..80: mol_type = other DNA

SEQ ID NO: 137779 - DNA, 80 bp, synthetic construct
  misc_feature 1..80: note = Artificially Synthesized Probe
  source 1..80: mol_type = other DNA
gacaggaaggcgtgtcctgcctgagcaaagtctacgtgaccctgcccgagagcaccgtcaccctgcttaagggcagacgc

SEQ ID NO: 137780 - DNA, 80 bp, synthetic construct
  misc_feature 1..80: note = Artificially Synthesized Probe
  source 1..80: mol_type = other DNA
ggccaggagtttgaagccagcctgggcaagatagcaagaccctgtctcttaaaaaatagaaaaaattagcctggtgtggt

SEQ ID NO: 137781 - DNA, 80 bp, synthetic construct
  misc_feature 1..80: note = Artificially Synthesized Probe
  source 1..80: mol_type = other DNA
gtggtgaggaagctccagtccactcctggtggatgagattgttaggccgctgtggatggtgtcctgcctcccagctatgg

SEQ ID NO: 137782 - DNA, 80 bp, synthetic construct; identical to SEQ ID NO: 43190
  misc_feature 1..80: note = Artificially Synthesized Probe
  source 1..80: mol_type = other DNA

SEQ ID NO: 137783 - DNA, 80 bp, synthetic construct
  misc_feature 1..80: note = Artificially Synthesized Probe
  source 1..80: mol_type = other DNA
caggagaaaatggtttcggggcatgtgatagatagcaggatggatgtacatgctttgggaatgtgctagaaggagcacta

SEQ ID NO: 137784 - DNA, 80 bp, synthetic construct
  misc_feature 1..80: note = Artificially Synthesized Probe
  source 1..80: mol_type = other DNA
tatctcggctcactgcaacctctgcctcccaggttcagcaattctcctgcctcagcctcccaagtagctgggattacagg

SEQ ID NO: 137785 - DNA, 80 bp, synthetic construct; identical to SEQ ID NO: 43191
  misc_feature 1..80: note = Artificially Synthesized Probe
  source 1..80: mol_type = other DNA

SEQ ID NO: 137786 - DNA, 80 bp, synthetic construct
  misc_feature 1..80: note = Artificially Synthesized Probe
  source 1..80: mol_type = other DNA
cacccggctgatttcatggcagctttctctaagtgtagcaatcttgctacttccctctccctgtgtggctctgggccctg

SEQ ID NO: 137787 - DNA, 80 bp, synthetic construct
  misc_feature 1..80: note = Artificially Synthesized Probe
  source 1..80: mol_type = other DNA
gaggccgaagcaagaggatcacttgaggccaggagttccagaccagcctggacaacatagtgagatcctgtctcttaaaa

SEQ ID NO: 137788 - DNA, 80 bp, synthetic construct
  misc_feature 1..80: note = Artificially Synthesized Probe
  source 1..80: mol_type = other DNA
aaataaaaaaataaataaataatttggccaggcacggtggctgacacctgtaatcccagcactctgggaggccaaggcag

SEQ ID NO: 137789 - DNA, 80 bp, synthetic construct
  misc_feature 1..80: note = Artificially Synthesized Probe
  source 1..80: mol_type = other DNA
agtgagccgaggttgcaccactgccctctagcctaggtgacggagagagactccatctgaaaaaaaggataaataaataa

SEQ ID NO: 137790 - DNA, 80 bp, synthetic construct; identical to SEQ ID NO: 43192
  misc_feature 1..80: note = Artificially Synthesized Probe
  source 1..80: mol_type = other DNA

SEQ ID NO: 137791 - DNA, 80 bp, synthetic construct
  misc_feature 1..80: note = Artificially Synthesized Probe
  source 1..80: mol_type = other DNA
ggggaacagctggcagacggaccaggacgaggaccaggagtgagcaaggagccctcccaccggggccctgggaaggttcc

SEQ ID NO: 137792 - DNA, 80 bp, synthetic construct
  misc_feature 1..80: note = Artificially Synthesized Probe
  source 1..80: mol_type = other DNA
ggattacaggcacctgccaccacacacagctaattttagtatttttgtagagatggggtttcaccatgctggccaggctg

SEQ ID NO: 137793 - DNA, 80 bp, synthetic construct
  misc_feature 1..80: note = Artificially Synthesized Probe
  source 1..80: mol_type = other DNA
cacgatcgtggcttactgcagcctcaaactcctgagctcaagcaatcctcccttctctgcctcccaagtagcttggacta

SEQ ID NO: 137794 - DNA, 80 bp, synthetic construct
  misc_feature 1..80: note = Artificially Synthesized Probe
  source 1..80: mol_type = other DNA
cagctcactgaaacctctgcctcctgggctcaagtgattctcacgcctcaatcccaatgagattataggcacatgccacc

SEQ ID NO: 137795 - DNA, 80 bp, synthetic construct
  misc_feature 1..80: note = Artificially Synthesized Probe
  source 1..80: mol_type = other DNA
gactgggttcgagccagtgggccctctcccaccggctccaccggggcccccggggggtaccctaacggaggtgaggggct

SEQ ID NO: 137796 - DNA, 80 bp, synthetic construct; identical to SEQ ID NO: 43193
  misc_feature 1..80: note = Artificially Synthesized Probe
  source 1..80: mol_type = other DNA

SEQ ID NO: 137797 - DNA, 80 bp, synthetic construct
  misc_feature 1..80: note = Artificially Synthesized Probe
  source 1..80: mol_type = other DNA
cgccatatgaaatatgaaataaataatttcatatttatttttaaagagatgggatctcagtgtgttacccaggctggcct

SEQ ID NO: 137798 - DNA, 80 bp, synthetic construct
  misc_feature 1..80: note = Artificially Synthesized Probe
  source 1..80: mol_type = other DNA
ggaagcgagctttgtctttagggagtttggggtgggtctcttgcaggtgtcagaagtaccaggtggtgaattccccgtct

SEQ ID NO: 137799 - DNA, 80 bp, synthetic construct; identical to SEQ ID NO: 43194
  misc_feature 1..80: note = Artificially Synthesized Probe
  source 1..80: mol_type = other DNA

SEQ ID NO: 137800 - DNA, 80 bp, synthetic construct
  misc_feature 1..80: note = Artificially Synthesized Probe
  source 1..80: mol_type = other DNA
cacacctataatcccagcactttgggagtccgaggcaggtggatcatgagatcaggagtttgggaccagcctggccaaca

SEQ ID NO: 137801 - DNA, 80 bp, synthetic construct
  misc_feature 1..80: note = Artificially Synthesized Probe
  source 1..80: mol_type = other DNA
agccgagattgcgccactgcactccagcctgggcgacagagtgagactccatctcaaaaaataaaataaaataaataaat

SEQ ID NO: 137802 - DNA, 80 bp, synthetic construct
  misc_feature 1..80: note = Artificially Synthesized Probe
  source 1..80: mol_type = other DNA
gattgcaccactgcactccagcctgggtgacagaatgagactccatctcaaaaaataataaaaataataaataaataaat

SEQ ID NO: 137803 - DNA, 80 bp, synthetic construct; identical to SEQ ID NO: 43195
  misc_feature 1..80: note = Artificially Synthesized Probe
  source 1..80: mol_type = other DNA

SEQ ID NO: 137804 - DNA, 80 bp, synthetic construct
  misc_feature 1..80: note = Artificially Synthesized Probe
  source 1..80: mol_type = other DNA
ggggcatgtctacacagcagcgctgccagtggtgggtccatctgctcccaccataggtctatctaagtctctcagggccg

SEQ ID NO: 137805 - DNA, 80 bp, synthetic construct; identical to SEQ ID NO: 43166
  misc_feature 1..80: note = Artificially Synthesized Probe
  source 1..80: mol_type = other DNA

SEQ ID NO: 137806 - DNA, 80 bp, synthetic construct
  misc_feature 1..80: note = Artificially Synthesized Probe
  source 1..80: mol_type = other DNA
ctccttctcacccaagcttctccctccaccagcaatggcctgcccgcccaacagcaagtactccctgtgtgcgaagccat

SEQ ID NO: 137807 - DNA, 80 bp, synthetic construct
  misc_feature 1..80: note = Artificially Synthesized Probe
  source 1..80: mol_type = other DNA
cggctgcgtggacctctcagccctgcagctagaaagggcctgctccctgctctcacaccccctgcaagctctttcttttc

SEQ ID NO: 137808 - DNA, 80 bp, synthetic construct
  misc_feature 1..80: note = Artificially Synthesized Probe
  source 1..80: mol_type = other DNA
caccatgcccagctaattcttgtatttttagtagagacggggtagggggcggtttcaccatgttggccaggatggtcttg

SEQ ID NO: 137809 - DNA, 80 bp, synthetic construct; identical to SEQ ID NO: 43196
  misc_feature 1..80: note = Artificially Synthesized Probe
  source 1..80: mol_type = other DNA

SEQ ID NO: 137810 - DNA, 80 bp, synthetic construct
  misc_feature 1..80: note = Artificially Synthesized Probe
  source 1..80: mol_type = other DNA
cctggcctcggatagatcaattttggttgaaatgatgaacagacccagaaatgatgtagtgactgaaaaaacgaatggat

SEQ ID NO: 137811 - DNA, 80 bp, synthetic construct
  misc_feature 1..80: note = Artificially Synthesized Probe
  source 1..80: mol_type = other DNA
agcaaaaaaaaacactttctcttccttccctgctgtcttccccaggtaggggagcggtggtacaagccaggctgcaaaga

SEQ ID NO: 137812 - DNA, 80 bp, synthetic construct
  misc_feature 1..80: note = Artificially Synthesized Probe
  source 1..80: mol_type = other DNA
gtggaaggtgagctgggggctgcccaggcaacaccaggcaaggtgatgggtcctgcccaaagcagcttccccagacagct

SEQ ID NO: 137813 - DNA, 80 bp, synthetic construct; identical to SEQ ID NO: 43197
  misc_feature 1..80: note = Artificially Synthesized Probe
  source 1..80: mol_type = other DNA

SEQ ID NO: 137814 - DNA, 80 bp, synthetic construct
  misc_feature 1..80: note = Artificially Synthesized Probe
  source 1..80: mol_type = other DNA
agaaccgcggggggatcctggaggtctcctacatcaaagccgtccacgtgacagtctttgacctcagcatctcactgctc

SEQ ID NO: 137815 - DNA, 80 bp, synthetic construct
  misc_feature 1..80: note = Artificially Synthesized Probe
  source 1..80: mol_type = other DNA
ctggactccctcctccctctgtgaaatacccaccagcaccagcccctcctgctcccagttttttgccgtttttttttttt

SEQ ID NO: 137816 - DNA, 80 bp, synthetic construct
  misc_feature 1..80: note = Artificially Synthesized Probe
  source 1..80: mol_type = other DNA
tggaaacactggaacacccagagaccctcctggatgctcaccaccgtcactgtgcccgcagggttcaccctgcccacccg

SEQ ID NO: 137817 - DNA, 80 bp, synthetic construct; identical to SEQ ID NO: 43198
  misc_feature 1..80: note = Artificially Synthesized Probe
  source 1..80: mol_type = other DNA

SEQ ID NO: 137818 - DNA, 80 bp, synthetic construct
  misc_feature 1..80: note = Artificially Synthesized Probe
  source 1..80: mol_type = other DNA
tgaccataaggctcagcagcaacctcgtcctcctctacacgaactttgggctccaagttcgctacgacgggagccacttg

SEQ ID NO: 137819 - DNA, 80 bp, synthetic construct
  misc_feature 1..80: note = Artificially Synthesized Probe
  source 1..80: mol_type = other DNA
cccaacatctctgtgaggtgttctaagtacttgtcaactgactaattcgttgaggacattaggcatgaaggtaggagtta

SEQ ID NO: 137820 - DNA, 80 bp, synthetic construct
  misc_feature 1..80: note = Artificially Synthesized Probe
  source 1..80: mol_type = other DNA
aaattagccaggcatggtggtgcatgcctttaatcccagctatttgggaggctgacgcgggagaatcgcttgaacctggg

SEQ ID NO: 137821 - DNA, 80 bp, synthetic construct; identical to SEQ ID NO: 43199
  misc_feature 1..80: note = Artificially Synthesized Probe
  source 1..80: mol_type = other DNA

SEQ ID NO: 137822 - DNA, 80 bp, synthetic construct
  misc_feature 1..80: note = Artificially Synthesized Probe
  source 1..80: mol_type = other DNA
ctgtgtgtccccactccctctgtgctgtacctcccaactggcaggaaactggcaatctctcctgtttagactctccaaga

SEQ ID NO: 137823 - DNA, 80 bp, synthetic construct
  misc_feature 1..80: note = Artificially Synthesized Probe
  source 1..80: mol_type = other DNA
ttcctgctgcatctccttgccttgctacttgagggcaccgttttgtcctcttctcctgtatccctctctctttccctgtc

SEQ ID NO: 137824 - DNA, 80 bp, synthetic construct
  misc_feature 1..80: note = Artificially Synthesized Probe
  source 1..80: mol_type = other DNA
tatcctgcctcagcctcccaagtagctgggattacaggcactcgccaccacgcccggctaatttttgtatttttatttga

SEQ ID NO: 137825 - DNA, 80 bp, synthetic construct; identical to SEQ ID NO: 43200
  misc_feature 1..80: note = Artificially Synthesized Probe
  source 1..80: mol_type = other DNA

SEQ ID NO: 137826 - DNA, 80 bp, synthetic construct
  misc_feature 1..80: note = Artificially Synthesized Probe
  source 1..80: mol_type = other DNA
gactataggcacatgccaccacgcccggctaatttttaaaaattttgtgtagagataggatctcactatgttgcccaggc

SEQ ID NO: 137827 - DNA, 80 bp, synthetic construct
  misc_feature 1..80: note = Artificially Synthesized Probe
  source 1..80: mol_type = other DNA
aacagcatggcagacgcctggaacaagaactgtgcgatcttaataaaccctcagggtaagacatgtccctgctggccctt

SEQ ID NO: 137828 - DNA, 80 bp, synthetic construct
  misc_feature 1..80: note = Artificially Synthesized Probe
  source 1..80: mol_type = other DNA
gggtccccttatcctcttgcagctgatgtttgagggaacacggggtagcactgcctacctggacatcgccctggatgccc

SEQ ID NO: 137829 - DNA, 80 bp, synthetic construct
  misc_feature 1..80: note = Artificially Synthesized Probe
  source 1..80: mol_type = other DNA
gtcaccttcttgggacctatgactgatgggtctgtatttgtgtctcaggcagtagataaatccgggatttcttttttttt

SEQ ID NO: 137830 - DNA, 80 bp, synthetic construct
  misc_feature 1..80: note = Artificially Synthesized Probe
  source 1..80: mol_type = other DNA
tgggcctggtgacgggcacctgtagtcccagctacttgggaggctgaggcagaagaatcgctttaacctgggaggcagag

SEQ ID NO: 137831 - DNA, 80 bp, synthetic construct; identical to SEQ ID NO: 43201
  misc_feature 1..80: note = Artificially Synthesized Probe
  source 1..80: mol_type = other DNA

SEQ ID NO: 137832 - DNA, 80 bp, synthetic construct
  misc_feature 1..80: note = Artificially Synthesized Probe
  source 1..80: mol_type = other DNA
atgcaccaccatgcccaactaattttttttttctcactctgttgcccaggctggagtgcaatggtgtgatctcagctcac

SEQ ID NO: 137833 - DNA, 80 bp, synthetic construct
  misc_feature 1..80: note = Artificially Synthesized Probe
  source 1..80: mol_type = other DNA
atgatccacctgccttggcctcccaaagtgctggtattaaaggcatgagccatcatgcctggcctaatttttaaatattt

SEQ ID NO: 137834 - DNA, 80 bp, synthetic construct; identical to SEQ ID NO: 43202
  misc_feature 1..80: note = Artificially Synthesized Probe
  source 1..80: mol_type = other DNA

SEQ ID NO: 137835 - DNA, 80 bp, synthetic construct
  misc_feature 1..80: note = Artificially Synthesized Probe
  source 1..80: mol_type = other DNA
ggagtgcaatggcacaatctcagctcactgccacctttgcctcctgggttcaagagattctcctgccccaacctcccgag

SEQ ID NO: 137836 - DNA, 80 bp, synthetic construct
  misc_feature 1..80: note = Artificially Synthesized Probe
  source 1..80: mol_type = other DNA
ctgtgcctggcgggaaaatccaggttttgactgaagtggatgtcgaatcagccccagggaagccacatggccctgttcct

SEQ ID NO: 137837 - DNA, 80 bp, synthetic construct
  misc_feature 1..80: note = Artificially Synthesized Probe
  source 1..80: mol_type = other DNA
tacgcgtccctgtgtgcccaggctggccaggcccctgcctggcggaacagaaccttctgccgtgagtgactggccacctg

SEQ ID NO: 137838 - DNA, 80 bp, synthetic construct
  misc_feature 1..80: note = Artificially Synthesized Probe
  source 1..80: mol_type = other DNA
gatgggtgaatcacctgaggtcaggagttggagaccagcctggtcaacatggtgaaaccccgtctctattaaaaatacaa

SEQ ID NO: 137839 - DNA, 80 bp, synthetic construct
  misc_feature 1..80: note = Artificially Synthesized Probe
  source 1..80: mol_type = other DNA
gcggatcacgaggtcaagagatagagacctttctggttaacacggtgaagccccgtctctactaaaaatacaaaaaatta

SEQ ID NO: 137840 - DNA, 80 bp, synthetic construct; identical to SEQ ID NO: 43203
  misc_feature 1..80: note = Artificially Synthesized Probe
  source 1..80: mol_type = other DNA

SEQ ID NO: 137841 - DNA, 80 bp, synthetic construct
  misc_feature 1..80: note = Artificially Synthesized Probe
  source 1..80: mol_type = other DNA
gcgtggtggtgggcgcctgtagtcccagctactcgggaggctgaagcaggagaatggcgtgaatctgggaggtggagctt

SEQ ID NO: 137842 - DNA, 80 bp, synthetic construct
  misc_feature 1..80: note = Artificially Synthesized Probe
  source 1..80: mol_type = other DNA
ggagtgcagtggtctgacctcgcctcattgcaacctctgcctctcaggttcaagagattctcgtgtctcagccacccaag

SEQ ID NO: 137843 - DNA, 80 bp, synthetic construct; identical to SEQ ID NO: 43204
  misc_feature 1..80: note = Artificially Synthesized Probe
  source 1..80: mol_type = other DNA

SEQ ID NO: 137844 - DNA, 80 bp, synthetic construct
  misc_feature 1..80: note = Artificially Synthesized Probe
  source 1..80: mol_type = other DNA
ctgtgaatgtcagaaaggccacatcttgagtggaacctcctgcgtgccccttggccagtgtggctgcactgacccagcgg

SEQ ID NO: 137845 - DNA, 80 bp, synthetic construct
  misc_feature 1..80: note = Artificially Synthesized Probe
  source 1..80: mol_type = other DNA
tgcacccagcttcaactggggcgttggcccatctcccaattccaactttctgttggctcagctgatccctgtggcccaca

SEQ ID NO: 137846 - DNA, 80 bp, synthetic construct
  misc_feature 1..80: note = Artificially Synthesized Probe
  source 1..80: mol_type = other DNA
tcaactctcataattttaatttcccagagcttttctgtgtttctctgttcattcttcatggcatccttggaaggatgcca

SEQ ID NO: 137847 - DNA, 80 bp, synthetic construct
  misc_feature 1..80: note = Artificially Synthesized Probe
  source 1..80: mol_type = other DNA
gtgatggggggactccacagccctgaggcccactctcccaactccccaacagactccctgctgcctgtagcactgggttt

SEQ ID NO: 137848 - DNA, 80 bp, synthetic construct
  misc_feature 1..80: note = Artificially Synthesized Probe
  source 1..80: mol_type = other DNA
ggctcacacttgtaatctcagcactttggaaggccaaggcgggtggatcacttgagaccagaagttcaagaccagcctga

SEQ ID NO: 137849 - DNA, 80 bp, synthetic construct; identical to SEQ ID NO: 43205
  misc_feature 1..80: note = Artificially Synthesized Probe
  source 1..80: mol_type = other DNA

SEQ ID NO: 137850 - DNA, 80 bp, synthetic construct
  misc_feature 1..80: note = Artificially Synthesized Probe
  source 1..80: mol_type = other DNA
tgagcccaggaattagagtctgcatgccagcctgggtaacagaacaagaccctgtctctaaaaaaaattttttttaatta

SEQ ID NO: 137851 - DNA, 80 bp, synthetic construct; identical to SEQ ID NO: 43167
  misc_feature 1..80: note = Artificially Synthesized Probe
  source 1..80: mol_type = other DNA

SEQ ID NO: 137852 - DNA, 80 bp, synthetic construct
  misc_feature 1..80: note = Artificially Synthesized Probe
  source 1..80: mol_type = other DNA
aaaaaatccttcctccaaagaatcatgcccctcctccacccgtaaacctcaccacgcctcctagccctggccctggggtt

SEQ ID NO: 137853 - DNA, 80 bp, synthetic construct
  misc_feature 1..80: note = Artificially Synthesized Probe
  source 1..80: mol_type = other DNA
accacaccctaatttttttgtattttttttagtagagacgggtttttaccatgttggtcaggctggtatcaaaccagccc

SEQ ID NO: 137854 - DNA, 80 bp, synthetic construct; identical to SEQ ID NO: 43206
  misc_feature 1..80: note = Artificially Synthesized Probe
  source 1..80: mol_type = other DNA

SEQ ID NO: 137855 - DNA, 80 bp, synthetic construct
  misc_feature 1..80: note = Artificially Synthesized Probe
  source 1..80: mol_type = other DNA
tctacattgacatctacgatgcccaggtcaccctgcagaagggccaccgtgtgctagtgagctgggtgtggtgaccgggg

SEQ ID NO: 137856 - DNA, 80 bp, synthetic construct
  misc_feature 1..80: note = Artificially Synthesized Probe
  source 1..80: mol_type = other DNA
agatcggggtgcaagtcaagtttgacgggaatcatctcttagagattgaaatccccacaacctactatggaaaggtgagg

SEQ ID NO: 137857 - DNA, 80 bp, synthetic construct; identical to SEQ ID NO: 43207
  misc_feature 1..80: note = Artificially Synthesized Probe
  source 1..80: mol_type = other DNA

SEQ ID NO: 137858 - DNA, 80 bp, synthetic construct
  misc_feature 1..80: note = Artificially Synthesized Probe
  source 1..80: mol_type = other DNA
cctgggaggcggatagtgaagtgagctgagatcatgccactgcactccaggctgggtgacaagagtgaaacttgaaggaa

SEQ ID NO: 137859 - DNA, 80 bp, synthetic construct
  misc_feature 1..80: note = Artificially Synthesized Probe
  source 1..80: mol_type = other DNA
acgaactaatgatgcccagcgatgaagtagcaaatagtgacagtgaatttgtgaacagttggaaagataaggacattgac

SEQ ID NO: 137860 - DNA, 80 bp, synthetic construct
  misc_feature 1..80: note = Artificially Synthesized Probe
  source 1..80: mol_type = other DNA
ttttttttttttttttttttttttgagacggagtcttgctctgtcgcccaggccggactgcggactgcagtggcgcaatc

SEQ ID NO: 137861 - DNA, 80 bp, synthetic construct; identical to SEQ ID NO: 43208
  misc_feature 1..80: note = Artificially Synthesized Probe
  source 1..80: mol_type = other DNA

SEQ ID NO: 137862 - DNA, 80 bp, synthetic construct
  misc_feature 1..80: note = Artificially Synthesized Probe
  source 1..80: mol_type = other DNA
cgcctggctactttttgtagtttttagcagagacggggtttcaccatattggccaggctggtctcgagctcctgacctca

SEQ ID NO: 137863 - DNA, 80 bp, synthetic construct
  misc_feature 1..80: note = Artificially Synthesized Probe
  source 1..80: mol_type = other DNA
ttatttatttatttgagacggaatttcactcttgtcacccaggctggagtgtagtggcacgatctcggctcactgcaact

SEQ ID NO: 137864 - DNA, 80 bp, synthetic construct
  misc_feature 1..80: note = Artificially Synthesized Probe
  source 1..80: mol_type = other DNA
tgcttccggggttcaagcaattctcgtgcctcaacctcccgagtagctgggattacaggtgcacaccaccacgccccacg

SEQ ID NO: 137865 - DNA, 80 bp, synthetic construct
  misc_feature 1..80: note = Artificially Synthesized Probe
  source 1..80: mol_type = other DNA
agcaacatgagctagggagccagactgtagggcacacctggggcaggaagaccagaatgttccttttttcttcttcaatt

SEQ ID NO: 137866 - DNA, 80 bp, synthetic construct; identical to SEQ ID NO: 43209
  misc_feature 1..80: note = Artificially Synthesized Probe
  source 1..80: mol_type = other DNA

SEQ ID NO: 137867 - DNA, 80 bp, synthetic construct
  misc_feature 1..80: note = Artificially Synthesized Probe
  source 1..80: mol_type = other DNA
gcaagaccccatctttacaaaaaaattaaaaacaaaaattagccagccatggtggcacatgcctgtagtcccagctattt

SEQ ID NO: 137868 - DNA, 80 bp, synthetic construct
  misc_feature 1..80: note = Artificially Synthesized Probe
  source 1..80: mol_type = other DNA
tcgtgaggccaatgtgggaggattgcttgagcctaggagtttgagaccagcctgggcaacatagcaagacctcatctcta

SEQ ID NO: 137869 - DNA, 80 bp, synthetic construct
  misc_feature 1..80: note = Artificially Synthesized Probe
  source 1..80: mol_type = other DNA
gcaaaaaaggaaatctgagagaagacgaggccgatggaagattggccagagctcagaccagcttccctgtgaacaccaga

SEQ ID NO: 137870 - DNA, 80 bp, synthetic construct; identical to SEQ ID NO: 43210
  misc_feature 1..80: note = Artificially Synthesized Probe
  source 1..80: mol_type = other DNA

SEQ ID NO: 137871 - DNA, 80 bp, synthetic construct
  misc_feature 1..80: note = Artificially Synthesized Probe
  source 1..80: mol_type = other DNA
gtaatcccggctactcgggaggctgaggcaggagaatcgcttgaacccgggaggcggaggtctcagtgagccaagattgc

SEQ ID NO: 137872 - DNA, 80 bp, synthetic construct
  misc_feature 1..80: note = Artificially Synthesized Probe
  source 1..80: mol_type = other DNA
gtgagctgagactgttgcattgcactccagcctgggtgacagagcaagactccccctaaagaaaaaaaaattttgtgtca

SEQ ID NO: 137873 - DNA, 80 bp, synthetic construct
  misc_feature 1..80: note = Artificially Synthesized Probe
  source 1..80: mol_type = other DNA
gctccgggctcctgtgtgggcccagtgcgcctcccgcatagacctcacgcccttcctggtggactgtgcaaacaccctct

SEQ ID NO: 137874 - DNA, 80 bp, synthetic construct
  misc_feature 1..80: note = Artificially Synthesized Probe
  source 1..80: mol_type = other DNA
actcacctcagcctcccaaaatgctgggattacaggagttaagtcaccgtgccaagaactttttaaaaattagctcggca

SEQ ID NO: 137875 - DNA, 80 bp, synthetic construct; identical to SEQ ID NO: 43211
  misc_feature 1..80: note = Artificially Synthesized Probe
  source 1..80: mol_type = other DNA

SEQ ID NO: 137876 - DNA, 80 bp, synthetic construct
  misc_feature 1..80: note = Artificially Synthesized Probe
  source 1..80: mol_type = other DNA
gcctggccaacatggtgaaaccccatcctactaaaaatacaaaattagccgggtgtggtggcacatgcctgtaatcccag

SEQ ID NO: 137877 - DNA, 80 bp, synthetic construct
  misc_feature 1..80: note = Artificially Synthesized Probe
  source 1..80: mol_type = other DNA
ccatcactactatataacgccagaaacttttacaatttaaaacaggaattcaatagagttttttttaataggtaacacat

SEQ ID NO: 137878 - DNA, 80 bp, synthetic construct
  misc_feature 1..80: note = Artificially Synthesized Probe
  source 1..80: mol_type = other DNA
cctgggcaacatagtgagacccaatctctacaaaaaattaccaaactagctgggtatggtggtgcatgcctgtggtccca

SEQ ID NO: 137879 - DNA, 80 bp, synthetic construct; identical to SEQ ID NO: 43212
  misc_feature 1..80: note = Artificially Synthesized Probe
  source 1..80: mol_type = other DNA

SEQ ID NO: 137880 - DNA, 80 bp, synthetic construct
  misc_feature 1..80: note = Artificially Synthesized Probe
  source 1..80: mol_type = other DNA
actatatgctctgtgcttttggagttttgccaatctgagaattgaaaaacaacgtcttattatttttttgccagtgtttc

SEQ ID NO: 137881 - DNA, 80 bp, synthetic construct
  misc_feature 1..80: note = Artificially Synthesized Probe
  source 1..80: mol_type = other DNA
tgggttcaagagattctcctgcctcagcctcccaagtagctgggactgcaggcacgcaccaccacacccaggtaattttt

SEQ ID NO: 137882 - DNA, 80 bp, synthetic construct
  misc_feature 1..80: note = Artificially Synthesized Probe
  source 1..80: mol_type = other DNA
ccggccaagaaagtttatttttctttaaaacactctcgcgttccaggagcaaagcagaggtgcagggggtgctgcagagc

SEQ ID NO: 137883 - DNA, 80 bp, synthetic construct; identical to SEQ ID NO: 43213
  misc_feature 1..80: note = Artificially Synthesized Probe
  source 1..80: mol_type = other DNA

SEQ ID NO: 137884 - DNA, 80 bp, synthetic construct
  misc_feature 1..80: note = Artificially Synthesized Probe
  source 1..80: mol_type = other DNA
cagctaatttttgtatttttagtagagacggggtttcaccatattggccaggctggtcttgaactcctcacctcaggtga

SEQ ID NO: 137885 - DNA, 80 bp, synthetic construct; identical to SEQ ID NO: 43168
  misc_feature 1..80: note = Artificially Synthesized Probe
  source 1..80: mol_type = other DNA

SEQ ID NO: 137886 - DNA, 80 bp, synthetic construct
  misc_feature 1..80: note = Artificially Synthesized Probe
  source 1..80: mol_type = other DNA
atctgctcttatccagtcaccatttttccattgagtcgttggtctttactgaactatttcatggaagtcctttatctgtt

SEQ ID NO: 137887 - DNA, 80 bp, synthetic construct
  misc_feature 1..80: note = Artificially Synthesized Probe
  source 1..80: mol_type = other DNA
gctataaatgctagccccacagaagctacaaaagagtttgctgattctttgctctagaaattttgtttgtttgagacaga

SEQ ID NO: 137888 - DNA, 80 bp, synthetic construct
  misc_feature 1..80: note = Artificially Synthesized Probe
  source 1..80: mol_type = other DNA
ggggtttcaccatgttggccaggctggtctcaaactcctggcctcaagtgatctgcccgcctcgtcctccccaagtgctg

SEQ ID NO: 137889 - DNA, 80 bp, synthetic construct; identical to SEQ ID NO: 43214
  misc_feature 1..80: note = Artificially Synthesized Probe
  source 1..80: mol_type = other DNA

SEQ ID NO: 137890 - DNA, 80 bp, synthetic construct
  misc_feature 1..80: note = Artificially Synthesized Probe
  source 1..80: mol_type = other DNA
tccatctgtatttgcatgtagcagtaacacaaagtcgtaatcactgaaaatttaaaatgagctttgggctgggcgctgtg

SEQ ID NO: 137891 - DNA, 80 bp, synthetic construct
  misc_feature 1..80: note = Artificially Synthesized Probe
  source 1..80: mol_type = other DNA
tagctgggcgtgctagtatgtgcctgtaatcccagctactcaggaggctgagaaaggagaattgcttgaacctgggaggt

SEQ ID NO: 137892 - DNA, 80 bp, synthetic construct; identical to SEQ ID NO: 43215
  misc_feature 1..80: note = Artificially Synthesized Probe
  source 1..80: mol_type = other DNA

SEQ ID NO: 137893 - DNA, 80 bp, synthetic construct
  misc_feature 1..80: note = Artificially Synthesized Probe
  source 1..80: mol_type = other DNA
ggcacatgcctgtaatcccagctacctgggaggctgaagtaggagaatctctggaaccagggaggcagaggctgcagtga

SEQ ID NO: 137894 - DNA, 80 bp, synthetic construct
  misc_feature 1..80: note = Artificially Synthesized Probe
  source 1..80: mol_type = other DNA
ttgagatcacattaaatgtgtacattcactgaggcagaactaacatcaccatgttgctgaaccttcttatccatgaacat

SEQ ID NO: 137895 - DNA, 80 bp, synthetic construct
  misc_feature 1..80: note = Artificially Synthesized Probe
  source 1..80: mol_type = other DNA
ctctgtgcctccatcatgccttgtatgctcttgctgtcaacacacctactgatcatacacatcaaggtcctgctgccgtt

SEQ ID NO: 137896 - DNA, 80 bp, synthetic construct
  misc_feature 1..80: note = Artificially Synthesized Probe
  source 1..80: mol_type = other DNA
ctgcctcagcctcctgagtagctgggactacaggcgcccaccaccacgcttggctaattgttgtatttttagtagagatg

SEQ ID NO: 137897 - DNA, 80 bp, synthetic construct
  misc_feature 1..80: note = Artificially Synthesized Probe
  source 1..80: mol_type = other DNA
gggacggtctgtcatgaacacctacagcttcaagcctcttaccagctcaagtttcacgcaagaagctgatttcaagcacc

SEQ ID NO: 137898 - DNA, 80 bp, synthetic construct; identical to SEQ ID NO: 43216
  misc_feature 1..80: note = Artificially Synthesized Probe
  source 1..80: mol_type = other DNA

SEQ ID NO: 137899 - DNA, 80 bp, synthetic construct
  misc_feature 1..80: note = Artificially Synthesized Probe
  source 1..80: mol_type = other DNA
cccctctgcctgcgctgagggctgcatttgtcagcccggctatgtgctgagtgaagacaagtgtgtccccagaagtcagt

SEQ ID NO: 137900 - DNA, 80 bp, synthetic construct
  misc_feature 1..80: note = Artificially Synthesized Probe
  source 1..80: mol_type = other DNA
tgtgagtggcacattgatctccagccaggtctgggctgatggcacatggtttgggttttggatctgaggaatccaaacaa

SEQ ID NO: 137901 - DNA, 80 bp, synthetic construct; identical to SEQ ID NO: 43217
  misc_feature 1..80: note = Artificially Synthesized Probe
  source 1..80: mol_type = other DNA

SEQ ID NO: 137902 - DNA, 80 bp, synthetic construct
  misc_feature 1..80: note = Artificially Synthesized Probe
  source 1..80: mol_type = other DNA
tttgaatttttagtagagattgggtttcaccatgttggccaggctggtctcgaactcctgacctcaagtgatctgcccgc

SEQ ID NO: 137903 - DNA, 80 bp, synthetic construct
  misc_feature 1..80: note = Artificially Synthesized Probe
  source 1..80: mol_type = other DNA
tggccctcccctcttcactcttttttttttttttcttgagacagagtctcgctctgttgcccaggctggaatgcagtggt

SEQ ID NO: 137904 - DNA, 80 bp, synthetic construct
  misc_feature 1..80: note = Artificially Synthesized Probe
  source 1..80: mol_type = other DNA
aactcctgacctcaggtgatccacccgtctcggcctcccaaagtgttgggattacaggcgtgagccgccgcgcccagccc

SEQ ID NO: 137905 - DNA, 80 bp, synthetic construct
  misc_feature 1..80: note = Artificially Synthesized Probe
  source 1..80: mol_type = other DNA
aacagcaattgtgtctcagacagtaaggggagcgaccggggaggttggagaggggagcacctgtggccagggcggaggtg

SEQ ID NO: 137906 - DNA, 80 bp, synthetic construct; identical to SEQ ID NO: 43218
  misc_feature 1..80: note = Artificially Synthesized Probe
  source 1..80: mol_type = other DNA

SEQ ID NO: 137907 - DNA, 80 bp, synthetic construct
  misc_feature 1..80: note = Artificially Synthesized Probe
  source 1..80: mol_type = other DNA
ggggtcttgctatgttgcccaagatgggcttgaactcatgggctcatgtgttcctcctgcctcagcctcctaaagtgttg

SEQ ID NO: 137908 - DNA, 80 bp, synthetic construct
  misc_feature 1..80: note = Artificially Synthesized Probe
  source 1..80: mol_type = other DNA
cctctccctctccctctccctctccctctccctctccctctccctctccctctccctctccctctccctctccttctcct

SEQ ID NO: 137909 - DNA, 80 bp, synthetic construct
  misc_feature 1..80: note = Artificially Synthesized Probe
  source 1..80: mol_type = other DNA
ccaggaatttaacaccaacctggccaacataggaagaccctgtccctacaaaaaattttaaaattttaaaaaattagtta

SEQ ID NO: 137910 - DNA, 80 bp, synthetic construct; identical to SEQ ID NO: 43219
  misc_feature 1..80: note = Artificially Synthesized Probe
  source 1..80: mol_type = other DNA

SEQ ID NO: 137911 - DNA, 80 bp, synthetic construct
  misc_feature 1..80: note = Artificially Synthesized Probe
  source 1..80: mol_type = other DNA
ttagctaggggtggtggtgcgcacctaaagtcccagctactcaggaggatcactcgagaccaggaggtggaggctgcagt

SEQ ID NO: 137912 - DNA, 80 bp, synthetic construct
  misc_feature 1..80: note = Artificially Synthesized Probe
  source 1..80: mol_type = other DNA
gtggccacaggggatgccaccgtgggggagggactctggggactgtcacacctgggcagggtcccttctcagtcttttgt

SEQ ID NO: 137913 - DNA, 80 bp, synthetic construct
  misc_feature 1..80: note = Artificially Synthesized Probe
  source 1..80: mol_type = other DNA
gcctaccaagtagctgggattacaggcacgcaccaccacacctggctaatttttgtatttttagtagagacagggtttca

SEQ ID NO: 137914 - DNA, 80 bp, synthetic construct; identical to SEQ ID NO: 43220
  misc_feature 1..80: note = Artificially Synthesized Probe
  source 1..80: mol_type = other DNA

SEQ ID NO: 137915 - DNA, 80 bp, synthetic construct
  misc_feature 1..80: note = Artificially Synthesized Probe
  source 1..80: mol_type = other DNA
tgggtgtggggaggcagctggaccaggtaggccacctggagtagaagtcagggatccctgttccctgggatgtttgtggc

SEQ ID NO: 137916 - DNA, 80 bp, synthetic construct
  misc_feature 1..80: note = Artificially Synthesized Probe
  source 1..80: mol_type = other DNA
aaatgagctggatatgggggcgcacacctgtagttccagctattgggcaggcttaggctggaggatcacttgagcccagg

SEQ ID NO: 137917 - DNA, 80 bp, synthetic construct
  misc_feature 1..80: note = Artificially Synthesized Probe
  source 1..80: mol_type = other DNA
gagcgtgaggtgtgtgaaggtcaatcctgggctgaagaaccaatggcatccactacaccaatgtatttttattttttgag

SEQ ID NO: 137918 - DNA, 80 bp, synthetic construct
  misc_feature 1..80: note = Artificially Synthesized Probe
  source 1..80: mol_type = other DNA
tcctgcctcaacctcccaagtagctgagactgcaggcgtgcaccaccatgcccggctaatttttgtatttttggtacaga

SEQ ID NO: 137919 - DNA, 80 bp, synthetic construct
  misc_feature 1..80: note = Artificially Synthesized Probe
  source 1..80: mol_type = other DNA
gtagagacgtggtttccccatgttggccaggctggtctggaactcctgacctcaagtgatccgcccgactcggcctccca

SEQ ID NO: 137920 - DNA, 80 bp, synthetic construct; identical to SEQ ID NO: 43221
  misc_feature 1..80: note = Artificially Synthesized Probe
  source 1..80: mol_type = other DNA

SEQ ID NO: 137921 - DNA, 80 bp, synthetic construct
  misc_feature 1..80: note = Artificially Synthesized Probe
  source 1..80: mol_type = other DNA
ggggaaagaagagcaaaagggccatttctgggaagtgggagggaaaatcctatttaagacaggcaaatcctggtgagcag

SEQ ID NO: 137922 - DNA, 80 bp, synthetic construct
  misc_feature 1..80: note = Artificially Synthesized Probe
  source 1..80: mol_type = other DNA
agaagctcaagaccagcctggggaacatagtgagacccccgtctctacaaaaaaaattttaaaggccgtgcacagtggct

SEQ ID NO: 137923 - DNA, 80 bp, synthetic construct
  misc_feature 1..80: note = Artificially Synthesized Probe
  source 1..80: mol_type = other DNA
gatgctgaggcaggagaatcgcttgaacgtgggaggcggaggttgcagtgagctgagatcgtgccactgcactccagcct

SEQ ID NO: 137924 - DNA, 80 bp, synthetic construct; identical to SEQ ID NO: 43222
  misc_feature 1..80: note = Artificially Synthesized Probe
  source 1..80: mol_type = other DNA

SEQ ID NO: 137925 - DNA, 80 bp, synthetic construct
  misc_feature 1..80: note = Artificially Synthesized Probe
  source 1..80: mol_type = other DNA
tgggaggccgaggcaggcagatcacgaggtcaggagatcgagaccatcctggctaacacggtgagaccctgtctctactg

SEQ ID NO: 137926 - DNA, 80 bp, synthetic construct
  misc_feature 1..80: note = Artificially Synthesized Probe
  source 1..80: mol_type = other DNA
tcaaaaaaaaaaaaaaaaagttaattaaaaaaaagagtgagggctaggcgcggtggctcatgcctgtaatcccagcactc

SEQ ID NO: 137927 - DNA, 80 bp, synthetic construct
  misc_feature 1..80: note = Artificially Synthesized Probe
  source 1..80: mol_type = other DNA
ttgaaaccaggaggcggaggttgcagtgagccaagatcacacaactgcactccagcctgggcaacagagcaagactgtct

SEQ ID NO: 137928 - DNA, 80 bp, synthetic construct; identical to SEQ ID NO: 43169
  misc_feature 1..80: note = Artificially Synthesized Probe
  source 1..80: mol_type = other DNA

SEQ ID NO: 137929 - DNA, 80 bp, synthetic construct; identical to SEQ ID NO: 43223
  misc_feature 1..80: note = Artificially Synthesized Probe
  source 1..80: mol_type = other DNA

SEQ ID NO: 137930 - DNA, 80 bp, synthetic construct
  misc_feature 1..80: note = Artificially Synthesized Probe
  source 1..80: mol_type = other DNA
cccgctcaatggaaatctctctctgtgcccctgccctgccctcagcctgccttcccagttatttttccttcttccttctt

SEQ ID NO: 137931 - DNA, 80 bp, synthetic construct
  misc_feature 1..80: note = Artificially Synthesized Probe
  source 1..80: mol_type = other DNA
cctcagcctcccaagtagctgggactacaggcatgggccaccacgctcagctaatgttcgtatttttagtagagacaggg

SEQ ID NO: 137932 - DNA, 80 bp, synthetic construct
  misc_feature 1..80: note = Artificially Synthesized Probe
  source 1..80: mol_type = other DNA
ctctgttacccaggctggagtgcagtggcgtgatcttggctcactgcagtttccacctcctgggctcaagtcatcctcct

SEQ ID NO: 137933 - DNA, 80 bp, synthetic construct; identical to SEQ ID NO: 43224
  misc_feature 1..80: note = Artificially Synthesized Probe
  source 1..80: mol_type = other DNA

SEQ ID NO: 137934 - DNA, 80 bp, synthetic construct
  misc_feature 1..80: note = Artificially Synthesized Probe
  source 1..80: mol_type = other DNA
tgtgtggttcactcctccgttctccctgtggcctaatttccttgtgaccctcactggacaccgactgatgtctttctgtt

SEQ ID NO: 137935 - DNA, 80 bp, synthetic construct
  misc_feature 1..80: note = Artificially Synthesized Probe
  source 1..80: mol_type = other DNA
caagagagcaagaggagctgcgttgccaggtcctcagtgggtacgccatcctctgccaggaggcgggcgctgccctggct

SEQ ID NO: 137936 - DNA, 80 bp, synthetic construct; identical to SEQ ID NO: 43225
  misc_feature 1..80: note = Artificially Synthesized Probe
  source 1..80: mol_type = other DNA

SEQ ID NO: 137937 - DNA, 80 bp, synthetic construct
  misc_feature 1..80: note = Artificially Synthesized Probe
  source 1..80: mol_type = other DNA
cactggctcacgcctgtaatcccagcgctttgggaagctgagacgggaggatcacctcaagtgatctgcccactttggcc

SEQ ID NO: 137938 - DNA, 80 bp, synthetic construct
  misc_feature 1..80: note = Artificially Synthesized Probe
  source 1..80: mol_type = other DNA
ggctggaggatggcttgagcccaggagttccagccaggctgcagtgaaccatgaccgcacaccaccacactccagcctgg

SEQ ID NO: 137939 - DNA, 80 bp, synthetic construct
  misc_feature 1..80: note = Artificially Synthesized Probe
  source 1..80: mol_type = other DNA
attgaatccaagagtttgagaccggcctggggaaccagtgagaccccatctctataaaaatcttaacaaattggccgggt

SEQ ID NO: 137940 - DNA, 80 bp, synthetic construct
  misc_feature 1..80: note = Artificially Synthesized Probe
  source 1..80: mol_type = other DNA
taaaaaataaaaaaaagaccctagatgaagctgcaacacgttctagcttcctgcctatatgcaacgctgagtgtttttgt

SEQ ID NO: 137941 - DNA, 80 bp, synthetic construct
  misc_feature 1..80: note = Artificially Synthesized Probe
  source 1..80: mol_type = other DNA
gctcatttttgtatttttagcagagatggggtttcaccatgttggccaggctggtcttgaactcctgacttcaggtgatc

SEQ ID NO: 137942 - DNA, 80 bp, synthetic construct; identical to SEQ ID NO: 43226
  misc_feature 1..80: note = Artificially Synthesized Probe
  source 1..80: mol_type = other DNA

SEQ ID NO: 137943 - DNA, 80 bp, synthetic construct
  misc_feature 1..80: note = Artificially Synthesized Probe
  source 1..80: mol_type = other DNA
ccctggggagcagaggcgccaaggagagccagaccagggatggaactggaacgtctcctcctggcccttcccctttctag

SEQ ID NO: 137944 - DNA, 80 bp, synthetic construct
  misc_feature 1..80: note = Artificially Synthesized Probe
  source 1..80: mol_type = other DNA
gttccaagctgccccatgccctggggcgtccatggaccaaggatcgtcccctccttgtcctcaggactcttccacattga

SEQ ID NO: 137945 - DNA, 80 bp, synthetic construct; identical to SEQ ID NO: 43227
  misc_feature 1..80: note = Artificially Synthesized Probe
  source 1..80: mol_type = other DNA

SEQ ID NO: 137946 - DNA, 80 bp, synthetic construct
  misc_feature 1..80: note = Artificially Synthesized Probe
  source 1..80: mol_type = other DNA
ctcagctacttggaagctgaggtgggaagatcacttaagcccaagaaattgaggctacagtgagctataattgtgccact

SEQ ID NO: 137947 - DNA, 80 bp, synthetic construct
  misc_feature 1..80: note = Artificially Synthesized Probe
  source 1..80: mol_type = other DNA
aggaaaggaggaagaaaggaagagaggaaggaagagatgaaagagtttcaaaggaaggaagtttccccaaagcccagggc

SEQ ID NO: 137948 - DNA, 80 bp, synthetic construct
  misc_feature 1..80: note = Artificially Synthesized Probe
  source 1..80: mol_type = other DNA
agggcccccctcccacaaccctctctgtccttgcagaaagcccgtgtctgcagaacccctgtcagaatgacgggcagtgt

SEQ ID NO: 137949 - DNA, 80 bp, synthetic construct
  misc_feature 1..80: note = Artificially Synthesized Probe
  source 1..80: mol_type = other DNA
tgattctcctacctcagcctcctaagtaactgggactacaggtgtacaccaccacgcccagctaatttttgtgtttttag

SEQ ID NO: 137950 - DNA, 80 bp, synthetic construct
  misc_feature 1..80: note = Artificially Synthesized Probe
  source 1..80: mol_type = other DNA
gtaccctcacaacctcttcctggccgacaaccacagaatgattctatatgtattatattcacatatagaatgatatgtat

SEQ ID NO: 137951 - DNA, 80 bp, synthetic construct; identical to SEQ ID NO: 43228
  misc_feature 1..80: note = Artificially Synthesized Probe
  source 1..80: mol_type = other DNA

SEQ ID NO: 137952 - DNA, 80 bp, synthetic construct
  misc_feature 1..80: note = Artificially Synthesized Probe
  source 1..80: mol_type = other DNA
ggaggctgaggcaggagaatcacttgaacctgggaggtggaggttgcagtgagccaagatcaagccactgcactccagcc

SEQ ID NO: 137953 - DNA, 80 bp, synthetic construct
  misc_feature 1..80: note = Artificially Synthesized Probe
  source 1..80: mol_type = other DNA
actgcgctccagcctgggcgaccaagactccatctcaaaaaaaacaaaaaacaaaaaccaaaaacaaaacaaaaaactag

SEQ ID NO: 137954 - DNA, 80 bp, synthetic construct; identical to SEQ ID NO: 43229
  misc_feature 1..80: note = Artificially Synthesized Probe
  source 1..80: mol_type = other DNA

SEQ ID NO: 137955 - DNA, 80 bp, synthetic construct
  misc_feature 1..80: note = Artificially Synthesized Probe
  source 1..80: mol_type = other DNA
gattctcctgtctcagcctcctgagtagctgggattacaggcgccggccaccacgcccggctatttttgtatttttagta

SEQ ID NO: 137956 - DNA, 80 bp, synthetic construct
  misc_feature 1..80: note = Artificially Synthesized Probe
  source 1..80: mol_type = other DNA
tctgcattttcaacaagggcccaggaaactatggaagtgactccagggctactctttgagaaatgctggctgagatgaca

SEQ ID NO: 137957 - DNA, 80 bp, synthetic construct
  misc_feature 1..80: note = Artificially Synthesized Probe
  source 1..80: mol_type = other DNA
accccatctctacaaaaaatcacgaaaattaaccgggtgtggtggcatgtgcccatagtcccagctacttggaaagcagg

SEQ ID NO: 137958 - DNA, 80 bp, synthetic construct; identical to SEQ ID NO: 43230
  misc_feature 1..80: note = Artificially Synthesized Probe
  source 1..80: mol_type = other DNA

SEQ ID NO: 137959 - DNA, 80 bp, synthetic construct
  misc_feature 1..80: note = Artificially Synthesized Probe
  source 1..80: mol_type = other DNA
agttaccgattttaaataggctggtcagagtaggtcacattcaggacacatttgagcacgaacttgaaaaaggtgaggta

SEQ ID NO: 137960 - DNA, 80 bp, synthetic construct
  misc_feature 1..80: note = Artificially Synthesized Probe
  source 1..80: mol_type = other DNA
tgcatttacagaacgaggaggaagaggtgagtcctgggaaggagagaggaagggcgggtggggtgtgcaaaccgggaagc

SEQ ID NO: 137961 - DNA, 80 bp, synthetic construct
  misc_feature 1..80: note = Artificially Synthesized Probe
  source 1..80: mol_type = other DNA
gtaatgataaaccagggtcagctgagggtggctgtaaggaatatggaaggacagagctggagggggcgagcaggctaact

SEQ ID NO: 137962 - DNA, 80 bp, synthetic construct
  misc_feature 1..80: note = Artificially Synthesized Probe
  source 1..80: mol_type = other DNA
tacatggttttcttgctttctcctcagatactgttctggactgtgcctgttaagttgctcagttttgagctgtcttcaga

SEQ ID NO: 137963 - DNA, 80 bp, synthetic construct; identical to SEQ ID NO: 43170
  misc_feature 1..80: note = Artificially Synthesized Probe
  source 1..80: mol_type = other DNA

SEQ ID NO: 137964 - DNA, 80 bp, synthetic construct
  misc_feature 1..80: note = Artificially Synthesized Probe
  source 1..80: mol_type = other DNA
ccctgcggccttccgcagtgtttgtgtccctgattacttgagattagggattggtgatgactcttaacgagcatgctgcc

SEQ ID NO: 137965 - DNA, 80 bp, synthetic construct
  misc_feature 1..80: note = Artificially Synthesized Probe
  source 1..80: mol_type = other DNA
aaagtctcccatgtctacttctttctacacagacacggcaaccatccgatttctcaatcttttccccacctttcccgcct

SEQ ID NO: 137966 - DNA, 80 bp, synthetic construct
  misc_feature 1..80: note = Artificially Synthesized Probe
  source 1..80: mol_type = other DNA
gggcggggggctgaccccccccacctccctcccggatggggcggctggccggtcggggggctgaccccccacctccctcc

SEQ ID NO: 137967 - DNA, 80 bp, synthetic construct
  misc_feature 1..80: note = Artificially Synthesized Probe
  source 1..80: mol_type = other DNA
cccccccacctccctcgcggacggggcagctggccgggcagaggggctcctcacttcccagtaggggcggccgggcagag

SEQ ID NO: 137968 - DNA, 80 bp, synthetic construct
  misc_feature 1..80: note = Artificially Synthesized Probe
  source 1..80: mol_type = other DNA
ccctcgcggacggggcggctggccgggcagaggggctcctcacttcccagtaggggtggccgggcagaggcgcccctcac

SEQ ID NO: 137969 - DNA, 80 bp, synthetic construct
  misc_feature 1..80: note = Artificially Synthesized Probe
  source 1..80: mol_type = other DNA
ggcggctggccgggcagaggggctcctctcttcccagtaggggcggccgggcagaggcgcccctcacctcccagacgggg

SEQ ID NO: 137970 - DNA, 80 bp, synthetic construct
  misc_feature 1..80: note = Artificially Synthesized Probe
  source 1..80: mol_type = other DNA
tccctcccggatggcacggctggccgggcggggggctgaccccccacctccctcccggatggggcggctggccgggcggg

SEQ ID NO: 137971 - DNA, 80 bp, synthetic construct
  misc_feature 1..80: note = Artificially Synthesized Probe
  source 1..80: mol_type = other DNA
gccaggcagagggtctcctcacttctcagacggggcggccgggcagagacgctcctcacctcccagacggggtctcggcc

SEQ ID NO: 137972 - DNA, 80 bp, synthetic construct; identical to SEQ ID NO: 43171
  misc_feature 1..80: note = Artificially Synthesized Probe
  source 1..80: mol_type = other DNA

SEQ ID NO: 137973 - DNA, 80 bp, synthetic construct
  misc_feature 1..80: note = Artificially Synthesized Probe
  source 1..80: mol_type = other DNA
gtggtggtgtgcacctgtagtcccagctacccaggaggctgaggcaggagaatcgcttgaacctgggaggcggagtttgc

SEQ ID NO: 137974 - DNA, 80 bp, synthetic construct
  misc_feature 1..80: note = Artificially Synthesized Probe
  source 1..80: mol_type = other DNA
tccgtctgcaatcccggcacctcgggaggccgaggttggcggatcactcgcggttaggggctggagacccgcccggccaa

SEQ ID NO: 137975 - DNA, 80 bp, synthetic construct
  misc_feature 1..80: note = Artificially Synthesized Probe
  source 1..80: mol_type = other DNA
accgtggggagagggagacggagacggagacgagggagagggagggggagggggacggggacgatctgacttatttttta

SEQ ID NO: 137976 - DNA, 80 bp, synthetic construct
  misc_feature 1..80: note = Artificially Synthesized Probe
  source 1..80: mol_type = other DNA
atggcacgatctcagctcactgcaacctctgccttccgggttcaagcgattctcctgcctcagcctcccgagtagctggg

SEQ ID NO: 137977 - DNA, 80 bp, synthetic construct; identical to SEQ ID NO: 43172
  misc_feature 1..80: note = Artificially Synthesized Probe
  source 1..80: mol_type = other DNA

SEQ ID NO: 137978 - DNA, 80 bp, synthetic construct
  misc_feature 1..80: note = Artificially Synthesized Probe
  source 1..80: mol_type = other DNA
tagagggttctgctccctaatttcctgagtttataattcttatttttgaatttaaaaaaatgtttttaaaaactaggcca

SEQ ID NO: 137979 - DNA, 80 bp, synthetic construct; identical to SEQ ID NO: 43231
  misc_feature 1..80: note = Artificially Synthesized Probe
  source 1..80: mol_type = other DNA

SEQ ID NO: 137980 - DNA, 80 bp, synthetic construct
  misc_feature 1..80: note = Artificially Synthesized Probe
  source 1..80: mol_type = other DNA
tttttttggagacagaatttctgtcgcccgagctgaagtgcagtggcacgatctttgctcactgcaacctctgtctctcg

SEQ ID NO: 137981 - DNA, 80 bp, synthetic construct
  misc_feature 1..80: note = Artificially Synthesized Probe
  source 1..80: mol_type = other DNA
ctcccaaagtgctgagattacaggcctgagccaccacacccagctggatattaacttatcagatatggcttgcaaatgct

SEQ ID NO: 137982 - DNA, 80 bp, synthetic construct
  misc_feature 1..80: note = Artificially Synthesized Probe
  source 1..80: mol_type = other DNA
tcatttcaaaaaaagttattgccgagaccaatatcaacaaggtttttccatatgttttcttcatgagttttaagatttca

SEQ ID NO: 137983 - DNA, 80 bp, synthetic construct; identical to SEQ ID NO: 43242
  misc_feature 1..80: note = Artificially Synthesized Probe
  source 1..80: mol_type = other DNA

SEQ ID NO: 137984 - DNA, 80 bp, synthetic construct
  misc_feature 1..80: note = Artificially Synthesized Probe
  source 1..80: mol_type = other DNA
gattgattgctcaggttattaaaagtcgtttaaggttacacctaaattttacaattgtgttttctattagtgtgaaaaat

SEQ ID NO: 137985 - DNA, 80 bp, synthetic construct
  misc_feature 1..80: note = Artificially Synthesized Probe
  source 1..80: mol_type = other DNA
tgttttttatgtcatttggttaaatttattttgattaactttcttatttttatactattgcaaatggaaatggtttctat

SEQ ID NO: 137986 - DNA, 80 bp, synthetic construct
  misc_feature 1..80: note = Artificially Synthesized Probe
  source 1..80: mol_type = other DNA
agtacaggagtttgagataagcctgggcaatagagtgaggccctgtctcaaaaaaaaaaaaatcccaacaagcatctata

SEQ ID NO: 137987 - DNA, 80 bp, synthetic construct; identical to SEQ ID NO: 43243
  misc_feature 1..80: note = Artificially Synthesized Probe
  source 1..80: mol_type = other DNA

SEQ ID NO: 137988 - DNA, 80 bp, synthetic construct
  misc_feature 1..80: note = Artificially Synthesized Probe
  source 1..80: mol_type = other DNA
aagggtgctgctgggtctgctgtggggtctgcctttgatgattgtattaccagagatttggacagtcatggattatttct

SEQ ID NO: 137989 - DNA, 80 bp, synthetic construct
  misc_feature 1..80: note = Artificially Synthesized Probe
  source 1..80: mol_type = other DNA
ctgagaaacatcccttccctgcaccctgctgccagcccccacccaatgctaacccactcctgagcccgcccattgggcat

SEQ ID NO: 137990 - DNA, 80 bp, synthetic construct
  misc_feature 1..80: note = Artificially Synthesized Probe
  source 1..80: mol_type = other DNA
atatgatgggccaaataccaggtgtatgaatgggtttggcttctactgacaacctgggaacagtttccacacttttctct

SEQ ID NO: 137991 - DNA, 80 bp, synthetic construct; identical to SEQ ID NO: 43244
  misc_feature 1..80: note = Artificially Synthesized Probe
  source 1..80: mol_type = other DNA

SEQ ID NO: 137992 - DNA, 80 bp, synthetic construct
  misc_feature 1..80: note = Artificially Synthesized Probe
  source 1..80: mol_type = other DNA
ctacttaaaatattgtataaaaatggaatcatgcattgtcactttgttagcgtcttatttcactaaaataatggcctcag

SEQ ID NO: 137993 - DNA, 80 bp, synthetic construct
  misc_feature 1..80: note = Artificially Synthesized Probe
  source 1..80: mol_type = other DNA
gtccccattcaaatctcatgtcaaatgtaatccctattgttggaggtggggccttgagggagatgattggatcgtagggt

SEQ ID NO: 137994 - DNA, 80 bp, synthetic construct
  misc_feature 1..80: note = Artificially Synthesized Probe
  source 1..80: mol_type = other DNA
aagctccacctcacgggttcatgccattctcctgcctcaacctccagagtagctgggattacaggtgcttgccaccatgc

SEQ ID NO: 137995 - DNA, 80 bp, synthetic construct; identical to SEQ ID NO: 43245
  misc_feature 1..80: note = Artificially Synthesized Probe
  source 1..80: mol_type = other DNA

SEQ ID NO: 137996 - DNA, 80 bp, synthetic construct
  misc_feature 1..80: note = Artificially Synthesized Probe
  source 1..80: mol_type = other DNA
tctcggctcactgcaatgtccgcctcccaggttcaacttattctcctgcctcagcctcccgagtagctgggactacaggt

SEQ ID NO: 137997 - DNA, 80 bp, synthetic construct
  misc_feature 1..80: note = Artificially Synthesized Probe
  source 1..80: mol_type = other DNA
cttccatatacttgttgaagtataaaatgtaagtgccttacaattttctttcctcctaaaacataagcactgagtttgag

SEQ ID NO: 137998 - DNA, 80 bp, synthetic construct
  misc_feature 1..80: note = Artificially Synthesized Probe
  source 1..80: mol_type = other DNA
caaagcaggtcatcaatagccccgtaatgtgttgctggtgaacctttctttcaggtgtctcagcctgctcaaattagaca

SEQ ID NO: 137999 - DNA, 80 bp, synthetic construct; identical to SEQ ID NO: 43246
  misc_feature 1..80: note = Artificially Synthesized Probe
  source 1..80: mol_type = other DNA

SEQ ID NO: 138000 - DNA, 80 bp, synthetic construct
  misc_feature 1..80: note = Artificially Synthesized Probe
  source 1..80: mol_type = other DNA
agatggagacaatcctggccaacatggtgaaaccccatctctactaaaaatacaaaaaattagccgggcgtggtggtggg

SEQ ID NO: 138001 - DNA, 80 bp, synthetic construct
  misc_feature 1..80: note = Artificially Synthesized Probe
  source 1..80: mol_type = other DNA
cacccaggcttttggaccacctgatcctaatctcctctgcctttatgggctcaggaatcagttagagcttagccctgcct

SEQ ID NO: 138002 - DNA, 80 bp, synthetic construct
  misc_feature 1..80: note = Artificially Synthesized Probe
  source 1..80: mol_type = other DNA
ccgtctcaaaaaaaaagaggaaggtgggagagggagaaggcagaatggagaatggcaaaatcagattcaggattggagaa

SEQ ID NO: 138003 - DNA, 80 bp, synthetic construct
  misc_feature 1..80: note = Artificially Synthesized Probe
  source 1..80: mol_type = other DNA
ggtatttctttgcaataagcgtttcttgcggatcacaaaggattggagagaccttagtcatagctatttaccaagattca

SEQ ID NO: 138004 - DNA, 80 bp, synthetic construct
  misc_feature 1..80: note = Artificially Synthesized Probe
  source 1..80: mol_type = other DNA
tgtgagtagttttatcaaattattaaatttgagggagggagttagggaagcccatgatttatagtcagttgctcagaagt

SEQ ID NO: 138005 - DNA, 80 bp, synthetic construct; identical to SEQ ID NO: 43247
  misc_feature 1..80: note = Artificially Synthesized Probe
  source 1..80: mol_type = other DNA

SEQ ID NO: 138006 - DNA, 80 bp, synthetic construct
  misc_feature 1..80: note = Artificially Synthesized Probe
  source 1..80: mol_type = other DNA
agctacttgggggactgagtctggaggattgcttgaaccctcagaggtcaaggctgctgtgacctgagatcatgccagtg

SEQ ID NO: 138007 - DNA, 80 bp, synthetic construct
  misc_feature 1..80: note = Artificially Synthesized Probe
  source 1..80: mol_type = other DNA
cgtccaggctggagtgcagtggcgagatctcggctcactgcaacctccacctcctgaattcaagtgattttcctgcctca

SEQ ID NO: 138008 - DNA, 80 bp, synthetic construct; identical to SEQ ID NO: 43248
  misc_feature 1..80: note = Artificially Synthesized Probe
  source 1..80: mol_type = other DNA

SEQ ID NO: 138009 - DNA, 80 bp, synthetic construct
  misc_feature 1..80: note = Artificially Synthesized Probe
  source 1..80: mol_type = other DNA
atggccgtgcttctctcatgacaaagcttcactcaggaattgtgctgagagcacctctgcttctagggttttccactaat

SEQ ID NO: 138010 - DNA, 80 bp, synthetic construct
  misc_feature 1..80: note = Artificially Synthesized Probe
  source 1..80: mol_type = other DNA
ggtgaatatctagagcactaaccagtccttttaccaactgtgcactgatcctcacccatggttcttgatagcaccttttc

SEQ ID NO: 138011 - DNA, 80 bp, synthetic construct
  misc_feature 1..80: note = Artificially Synthesized Probe
  source 1..80: mol_type = other DNA
gaaataagaggcttaatcctcacattggaaaataaagagtatttactctcctcccttttcttaaaacctttgatttagaa

SEQ ID NO: 138012 - DNA, 80 bp, synthetic construct
  misc_feature 1..80: note = Artificially Synthesized Probe
  source 1..80: mol_type = other DNA
caacgttagtgagttcaagaccatgcctttagacctgcctgttgtaggaccaaatacaaatcagaagaggcttaatgctt

SEQ ID NO: 138013 - DNA, 80 bp, synthetic construct
  misc_feature 1..80: note = Artificially Synthesized Probe
  source 1..80: mol_type = other DNA
gagatttttaaaatataaaatatattactataaaattcccagaactgcttttgttacattcatttttatatattatgatt

SEQ ID NO: 138014 - DNA, 80 bp, synthetic construct; identical to SEQ ID NO: 43249
  misc_feature 1..80: note = Artificially Synthesized Probe
  source 1..80: mol_type = other DNA

SEQ ID NO: 138015 - DNA, 80 bp, synthetic construct
  misc_feature 1..80: note = Artificially Synthesized Probe
  source 1..80: mol_type = other DNA
tttaatcgttatattcttttgacaaattagcctcatcactatataatgaagtttttttaatgacgaatttttttctttat

SEQ ID NO: 138016 - DNA, 80 bp, synthetic construct
  misc_feature 1..80: note = Artificially Synthesized Probe
  source 1..80: mol_type = other DNA
gggattacaggtgcccaccatcacgtctggctaatttttgtatttttagtagagacagggtttcaccatgttggccaggc

SEQ ID NO: 138017 - DNA, 80 bp, synthetic construct
  misc_feature 1..80: note = Artificially Synthesized Probe
  source 1..80: mol_type = other DNA
ttggcatggaatattcttttcatttttgaatcgttaacctatgtatttccttaaatctacagtaagtctctagtttgcag

SEQ ID NO: 138018 - DNA, 80 bp, synthetic construct; identical to SEQ ID NO: 43250
  misc_feature 1..80: note = Artificially Synthesized Probe
  source 1..80: mol_type = other DNA

SEQ ID NO: 138019 - DNA, 80 bp, synthetic construct
  misc_feature 1..80: note = Artificially Synthesized Probe
  source 1..80: mol_type = other DNA
catctctactaaaatgacaaaaactagccgggtgcggtggcggctgcctgtaatcccagctactcaggaggctgaggcag

SEQ ID NO: 138020 - DNA, 80 bp, synthetic construct
  misc_feature 1..80: note = Artificially Synthesized Probe
  source 1..80: mol_type = other DNA
ttcttaaaggcctcacttcttatttgtttgtttgttttttgagacagagtcttgttctgtcacccaggctggagtacagt

SEQ ID NO: 138021 - DNA, 80 bp, synthetic construct
  misc_feature 1..80: note = Artificially Synthesized Probe
  source 1..80: mol_type = other DNA
cttgacctcgtgatcctcccgcctcagcctcccaaagtgctggaattagaggtgtgagccaccgcacccgaccaaggcct

SEQ ID NO: 138022 - DNA, 80 bp, synthetic construct; identical to SEQ ID NO: 43251
  misc_feature 1..80: note = Artificially Synthesized Probe
  source 1..80: mol_type = other DNA

SEQ ID NO: 138023 - DNA, 80 bp, synthetic construct
  misc_feature 1..80: note = Artificially Synthesized Probe
  source 1..80: mol_type = other DNA
ttcacagttgagtgcagcctcaacctttgtgggctcaagcaatcctcccatctcagcctcttgagtagctggaactacaa

SEQ ID NO: 138024 - DNA, 80 bp, synthetic construct
  misc_feature 1..80: note = Artificially Synthesized Probe
  source 1..80: mol_type = other DNA
ggacatggaaactattgctttgaaatgtgcatagcaagaatatataacctattccgcaatttctgtagcagagtaggagg

SEQ ID NO: 138025 - DNA, 80 bp, synthetic construct
  misc_feature 1..80: note = Artificially Synthesized Probe
  source 1..80: mol_type = other DNA
tttttttaaaagattgaatagctttctgagatctttattttatttatgtatttattttagagacagcgtcctgctatatt

SEQ ID NO: 138026 - DNA, 80 bp, synthetic construct
  misc_feature 1..80: note = Artificially Synthesized Probe
  source 1..80: mol_type = other DNA
ggttcttgctatagagattttaagcttcataaaactgaatgtctattttccttccaagattgggaaaatttaagacatta

SEQ ID NO: 138027 - DNA, 80 bp, synthetic construct; identical to SEQ ID NO: 43252
  misc_feature 1..80: note = Artificially Synthesized Probe
  source 1..80: mol_type = other DNA

SEQ ID NO: 138028 - DNA, 80 bp, synthetic construct
  misc_feature 1..80: note = Artificially Synthesized Probe
  source 1..80: mol_type = other DNA
gaagtgctgggattacaggcatgagccaccatgcctggcctcattctttaagttttaattaggaactttcaaatgactta

SEQ ID NO: 138029 - DNA, 80 bp, synthetic construct
  misc_feature 1..80: note = Artificially Synthesized Probe
  source 1..80: mol_type = other DNA
ctcttgtcacccagactggagtgcaatggcacgatcttggctgactgcaacctctacctcccgagttcaagtgattctcc

SEQ ID NO: 138030 - DNA, 80 bp, synthetic construct
  misc_feature 1..80: note = Artificially Synthesized Probe
  source 1..80: mol_type = other DNA
tacaggtgtgagccattgtgcccagctctccttcttttttataactcattttgttcatgcattgttgcaaaaaaaaatta

SEQ ID NO: 138031 - DNA, 80 bp, synthetic construct
  misc_feature 1..80: note = Artificially Synthesized Probe
  source 1..80: mol_type = other DNA
tcccaagtagctaagattacaggaatgtgccaccacacctggctaatttttgtatttttagtagagacggtttcaccatg

SEQ ID NO: 138032 - DNA, 80 bp, synthetic construct; identical to SEQ ID NO: 43253
  misc_feature 1..80: note = Artificially Synthesized Probe
  source 1..80: mol_type = other DNA

SEQ ID NO: 138033 - DNA, 80 bp, synthetic construct
  misc_feature 1..80: note = Artificially Synthesized Probe
  source 1..80: mol_type = other DNA
ggtctacagtgaagttaatgcttggcagacctgttatttaagcatcagacagttgaggattccattttctgaggagactg

SEQ ID NO: 138034 - DNA, 80 bp, synthetic construct
  misc_feature 1..80: note = Artificially Synthesized Probe
  source 1..80: mol_type = other DNA
acaggtttctagatgaccgttactgagcgttgatcacagctgagagggtgtgaaactaattcatagggctgcttcaggat

SEQ ID NO: 138035 - DNA, 80 bp, synthetic construct
  misc_feature 1..80: note = Artificially Synthesized Probe
  source 1..80: mol_type = other DNA
gtcaagtcttctacttgagagctaattatggtgactttctttgttttggcagtctcttagtagactgcctgtaatgcaca

SEQ ID NO: 138036 - DNA, 80 bp, synthetic construct; identical to SEQ ID NO: 43254
  misc_feature 1..80: note = Artificially Synthesized Probe
  source 1..80: mol_type = other DNA

SEQ ID NO: 138037 - DNA, 80 bp, synthetic construct
  misc_feature 1..80: note = Artificially Synthesized Probe
  source 1..80: mol_type = other DNA
gggtaattcagagatcacagacagaagcaacatctaaaggcctttcacctgagacacaggacattatgaatcctcctaag

SEQ ID NO: 138038 - DNA, 80 bp, synthetic construct
  misc_feature 1..80: note = Artificially Synthesized Probe
  source 1..80: mol_type = other DNA
tacacatggattccaaagttgccgtaaaggttgttttgtcagggcttaactgctgcatttttgttactgtagaaagtgtg

SEQ ID NO: 138039 - DNA, 80 bp, synthetic construct
  misc_feature 1..80: note = Artificially Synthesized Probe
  source 1..80: mol_type = other DNA
gcattttattaattattgaaatgcatttgcttttattgcggcgcatggcatgtcaaagattcaaaatgccagctcttcat

SEQ ID NO: 138040 - DNA, 80 bp, synthetic construct
  misc_feature 1..80: note = Artificially Synthesized Probe
  source 1..80: mol_type = other DNA
gtttttaatcttcatatttgtatggtaattttcaactttgtaccttttatgaccatgtattgtttaattccaataaaaat

SEQ ID NO: 138041 - DNA, 80 bp, synthetic construct; identical to SEQ ID NO: 43255
  misc_feature 1..80: note = Artificially Synthesized Probe
  source 1..80: mol_type = other DNA

SEQ ID NO: 138042 - DNA, 80 bp, synthetic construct
  misc_feature 1..80: note = Artificially Synthesized Probe
  source 1..80: mol_type = other DNA
catcttaaacattttcaagtacagtctagtggagctaagtacatttacattattttgcaatggatctttagattaatttt

SEQ ID NO: 138043 - DNA, 80 bp, synthetic construct
  misc_feature 1..80: note = Artificially Synthesized Probe
  source 1..80: mol_type = other DNA
ataattatataatgtctctttttgactattttttttaacggaatgatctcaggctttgtttttgtaagatgtgtcagaat

SEQ ID NO: 138044 - DNA, 80 bp, synthetic construct; identical to SEQ ID NO: 43233
  misc_feature 1..80: note = Artificially Synthesized Probe
  source 1..80: mol_type = other DNA

SEQ ID NO: 138045 - DNA, 80 bp, synthetic construct
  misc_feature 1..80: note = Artificially Synthesized Probe
  source 1..80: mol_type = other DNA
cacgacaggccccggtgtgtgacgttccccaccctgtgtttgagtgttctcattgttcaattcccacctgtgagtgagaa

SEQ ID NO: 138046 - DNA, 80 bp, synthetic construct; identical to SEQ ID NO: 43256
  misc_feature 1..80: note = Artificially Synthesized Probe
  source 1..80: mol_type = other DNA

SEQ ID NO: 138047 - DNA, 80 bp, synthetic construct
  misc_feature 1..80: note = Artificially Synthesized Probe
  source 1..80: mol_type = other DNA
cgagtctgcgaacggagtccccgctgccgccgctcagccctggggcctcagtaccctccggtgagggacctgggctcctg

SEQ ID NO: 138048 - DNA, 80 bp, synthetic construct
  misc_feature 1..80: note = Artificially Synthesized Probe
  source 1..80: mol_type = other DNA
ccacatcctctccagcacctgttgtttcctgactttttaatgattgccattctaactggtgtgagatggtatctcattgt

SEQ ID NO: 138049 - DNA, 80 bp, synthetic construct
  misc_feature 1..80: note = Artificially Synthesized Probe
  source 1..80: mol_type = other DNA
ttgtagattctggttattagccctttgttggatgggtagattgtaaaaattttctcccattctgtaggttgcctgttcac

SEQ ID NO: 138050 - DNA, 80 bp, synthetic construct
  misc_feature 1..80: note = Artificially Synthesized Probe
  source 1..80: mol_type = other DNA
tttatggttataggtctaacatttaagtctttaatccatcttgaattaatttttgtataaggcgtaaggaagggatccaa

SEQ ID NO: 138051 - DNA, 80 bp, synthetic construct
  misc_feature 1..80: note = Artificially Synthesized Probe
  source 1..80: mol_type = other DNA
ctctgttttggtaccagtaccatgctgttttggttactgtagccttgtagcatgatttgaagtcaggtagcgtgatgcct

SEQ ID NO: 138052 - DNA, 80 bp, synthetic construct; identical to SEQ ID NO: 43257
  misc_feature 1..80: note = Artificially Synthesized Probe
  source 1..80: mol_type = other DNA

SEQ ID NO: 138053 - DNA, 80 bp, synthetic construct
  misc_feature 1..80: note = Artificially Synthesized Probe
  source 1..80: mol_type = other DNA
tgattttgtgtcctgagactttgctgaagttgcttatcagcttgagattttgggctgagacgatggggttttctaaatac

SEQ ID NO: 138054 - DNA, 80 bp, synthetic construct
  misc_feature 1..80: note = Artificially Synthesized Probe
  source 1..80: mol_type = other DNA
aaagggaatgcttcctgcccgggcgcagtgggttacgcctgtaatcctagcactttgggaggccaaggcgggcagatcat

SEQ ID NO: 138055 - DNA, 80 bp, synthetic construct; identical to SEQ ID NO: 43258
  misc_feature 1..80: note = Artificially Synthesized Probe
  source 1..80: mol_type = other DNA

SEQ ID NO: 138056 - DNA, 80 bp, synthetic construct
  misc_feature 1..80: note = Artificially Synthesized Probe
  source 1..80: mol_type = other DNA
gccaatgatcttcagatctgacactgattcagaaatcatggggcccataaatccagcgaggttcacacatgtgcattgat

SEQ ID NO: 138057 - DNA, 80 bp, synthetic construct
  misc_feature 1..80: note = Artificially Synthesized Probe
  source 1..80: mol_type = other DNA
ttgagacaatcatgtggtttttgttgatggttctgtttatgtgatggattacgtttattgatttgtgtatgttgaaccag

SEQ ID NO: 138058 - DNA, 80 bp, synthetic construct
  misc_feature 1..80: note = Artificially Synthesized Probe
  source 1..80: mol_type = other DNA
ttggtatcagaatgatgctggcctcataaaatgagttagggaggagtccctctttttctattgattgaaatagtttcaga

SEQ ID NO: 138059 - DNA, 80 bp, synthetic construct
  misc_feature 1..80: note = Artificially Synthesized Probe
  source 1..80: mol_type = other DNA
ggagggtgtatgtgtccaggaatttatccatttcttctagattttctactttatttgcatagaggtatttataatattct

SEQ ID NO: 138060 - DNA, 80 bp, synthetic construct
  misc_feature 1..80: note = Artificially Synthesized Probe
  source 1..80: mol_type = other DNA
ctgcagagcggcaaatattgctgcctgatccttcctctggaagctttgtcccagagggtcacctgcctgtatgaggtgtc

SEQ ID NO: 138061 - DNA, 80 bp, synthetic construct; identical to SEQ ID NO: 43259
  misc_feature 1..80: note = Artificially Synthesized Probe
  source 1..80: mol_type = other DNA

SEQ ID NO: 138062 - DNA, 80 bp, synthetic construct
  misc_feature 1..80: note = Artificially Synthesized Probe
  source 1..80: mol_type = other DNA
aggcgtgggatataatctcctggtgtgccgtttgctaagaccattggaaaaacacagtatttgggcaggagatcccgatt

SEQ ID NO: 138063 - DNA, 80 bp, synthetic construct
  misc_feature 1..80: note = Artificially Synthesized Probe
  source 1..80: mol_type = other DNA
acctcagttggaagtgcagaaatcacccgtcttttacgtcagtcacgctgtgagctgcaaaccagagccgttcctattca

SEQ ID NO: 138064 - DNA, 80 bp, synthetic construct; identical to SEQ ID NO: 43260
  misc_feature 1..80: note = Artificially Synthesized Probe
  source 1..80: mol_type = other DNA

SEQ ID NO: 138065 - DNA, 80 bp, synthetic construct
  misc_feature 1..80: note = Artificially Synthesized Probe
  source 1..80: mol_type = other DNA
gtaatcaattttcctagcaccaattattgaaaagactgtctttttccaaatgtgtgttcttgacatctttgttgaaaatc

SEQ ID NO: 138066 - DNA, 80 bp, synthetic construct
  misc_feature 1..80: note = Artificially Synthesized Probe
  source 1..80: mol_type = other DNA
acctttgctatttgggggtctttggttggtcctggttaattttaagcttgtttattccattgctgtgaaaaaagtctttg

SEQ ID NO: 138067 - DNA, 80 bp, synthetic construct
  misc_feature 1..80: note = Artificially Synthesized Probe
  source 1..80: mol_type = other DNA
tttaattacgagaccaagtgatgtgttaaaatgagaccacagtcctaccgttcccctctttgaactgtttgtcttttgaa

SEQ ID NO: 138068 - DNA, 80 bp, synthetic construct
  misc_feature 1..80: note = Artificially Synthesized Probe
  source 1..80: mol_type = other DNA
caccctgttgcccaggctggagtgcaatggcacaatatcagtgcaccacaacctctgcctcctgggttcaaatgattctc

SEQ ID NO: 138069 - DNA, 80 bp, synthetic construct; identical to SEQ ID NO: 43261
  misc_feature 1..80: note = Artificially Synthesized Probe
  source 1..80: mol_type = other DNA

SEQ ID NO: 138070 - DNA, 80 bp, synthetic construct
  misc_feature 1..80: note = Artificially Synthesized Probe
  source 1..80: mol_type = other DNA
gactgcacctggttaatttttgtatttttaggagagacagtgtttcgccatgttgaccaggctggtcttgagctctggac

SEQ ID NO: 138071 - DNA, 80 bp, synthetic construct
  misc_feature 1..80: note = Artificially Synthesized Probe
  source 1..80: mol_type = other DNA
caatacagtaaagaccctatatgacagattaatagctgatatcatactggataggaaagagcagaaatcttctttttttg

SEQ ID NO: 138072 - DNA, 80 bp, synthetic construct
  misc_feature 1..80: note = Artificially Synthesized Probe
  source 1..80: mol_type = other DNA
tttatgagttgtttacttgttctgtttatgtgtgttcaatggtggttttgaatagtcattgaaatcctcctaattttact

SEQ ID NO: 138073 - DNA, 80 bp, synthetic construct
  misc_feature 1..80: note = Artificially Synthesized Probe
  source 1..80: mol_type = other DNA
tggagtctcactctgtcacccaggctggagtgcagtggtgcgatatcagttcactgcaacctctgcctcccaggttcaag

SEQ ID NO: 138074 - DNA, 80 bp, synthetic construct; identical to SEQ ID NO: 43262
  misc_feature 1..80: note = Artificially Synthesized Probe
  source 1..80: mol_type = other DNA

SEQ ID NO: 138075 - DNA, 80 bp, synthetic construct
  misc_feature 1..80: note = Artificially Synthesized Probe
  source 1..80: mol_type = other DNA
atatgtttatcttgcaaggctaacactcatacacattaaacaactacctactttttctgttttctggccctttacaaaaa

SEQ ID NO: 138076 - DNA, 80 bp, synthetic construct
  misc_feature 1..80: note = Artificially Synthesized Probe
  source 1..80: mol_type = other DNA
cagtaatgtttcatttttttaaaggattttttttttgagacagagtcttgctctgtcacccagtcagaatgtaagtgcag

SEQ ID NO: 138077 - DNA, 80 bp, synthetic construct; identical to SEQ ID NO: 43234
  misc_feature 1..80: note = Artificially Synthesized Probe
  source 1..80: mol_type = other DNA

SEQ ID NO: 138078 - DNA, 80 bp, synthetic construct
  misc_feature 1..80: note = Artificially Synthesized Probe
  source 1..80: mol_type = other DNA
ctcgaacacctgacctcaagcgatccacctgtctcggcctcccaaactgctgggattacaggcatgagccaccatgcctg

SEQ ID NO: 138079 - DNA, 80 bp, synthetic construct; identical to SEQ ID NO: 43263
  misc_feature 1..80: note = Artificially Synthesized Probe
  source 1..80: mol_type = other DNA

SEQ ID NO: 138080 - DNA, 80 bp, synthetic construct
  misc_feature 1..80: note = Artificially Synthesized Probe
  source 1..80: mol_type = other DNA
tctggagattgcattaaggaatttagacatcttctttttaggcaaaattgttttatactgctttcaagtcttctattcct

SEQ ID NO: 138081 - DNA, 80 bp, synthetic construct
  misc_feature 1..80: note = Artificially Synthesized Probe
  source 1..80: mol_type = other DNA
acacacacacattaatatatgtatacccacatttatcatgggttctaagtaaatgaacttgtttattattgtttaatgtc

SEQ ID NO: 138082 - DNA, 80 bp, synthetic construct
  misc_feature 1..80: note = Artificially Synthesized Probe
  source 1..80: mol_type = other DNA
gaaatgtcttctttcatcttgcctttttcagtctcctttaatcattagacctcaagtgactcttgtagaaaaacaagttg

SEQ ID NO: 138083 - DNA, 80 bp, synthetic construct; identical to SEQ ID NO: 43264
  misc_feature 1..80: note = Artificially Synthesized Probe
  source 1..80: mol_type = other DNA

SEQ ID NO: 138084 - DNA, 80 bp, synthetic construct
  misc_feature 1..80: note = Artificially Synthesized Probe
  source 1..80: mol_type = other DNA
tgggttcaagcgattctcctgcctcagcctcctgagtagctgggactacaggcacacgccaccatgcccagctaattttt

SEQ ID NO: 138085 - DNA, 80 bp, synthetic construct
  misc_feature 1..80: note = Artificially Synthesized Probe
  source 1..80: mol_type = other DNA
ttgaattgcatttgaaaattcttcctctttacatctgccctgaatgttgttattgatgtcactaatcatatttttttgct

SEQ ID NO: 138086 - DNA, 80 bp, synthetic construct
  misc_feature 1..80: note = Artificially Synthesized Probe
  source 1..80: mol_type = other DNA
tcatattttttttcttgcatcctgttattttcaatggaagatagttcagcatttttttttataaggcaggtgttgtgcta

SEQ ID NO: 138087 - DNA, 80 bp, synthetic construct; identical to SEQ ID NO: 43265
  misc_feature 1..80: note = Artificially Synthesized Probe
  source 1..80: mol_type = other DNA

SEQ ID NO: 138088 - DNA, 80 bp, synthetic construct
  misc_feature 1..80: note = Artificially Synthesized Probe
  source 1..80: mol_type = other DNA
cgctctgtcgccaggctggggtgcagtggtgcgatctcggctcactgcaacctccgcctcccaggttcaagcaattctcc

SEQ ID NO: 138089 - DNA, 80 bp, synthetic construct
  misc_feature 1..80: note = Artificially Synthesized Probe
  source 1..80: mol_type = other DNA
ggaatgcagtggcacaatcttggctcactgcaagctccgcctcccaggttcacaccattctcctgcctcagcctcccgca

SEQ ID NO: 138090 - DNA, 80 bp, synthetic construct
  misc_feature 1..80: note = Artificially Synthesized Probe
  source 1..80: mol_type = other DNA
accatgcctggccacatctttttttaacttttgaaaatttctcaggcattatttttgtatttttcacctccatgtttttt

SEQ ID NO: 138091 - DNA, 80 bp, synthetic construct
  misc_feature 1..80: note = Artificially Synthesized Probe
  source 1..80: mol_type = other DNA
tctcattctgtcacccaggctggagtgcaatggtgcaatcttggctcactgcaacctccacctcccgggttcaagcaatt

SEQ ID NO: 138092 - DNA, 80 bp, synthetic construct; identical to SEQ ID NO: 43266
  misc_feature 1..80: note = Artificially Synthesized Probe
  source 1..80: mol_type = other DNA

SEQ ID NO: 138093 - DNA, 80 bp, synthetic construct
  misc_feature 1..80: note = Artificially Synthesized Probe
  source 1..80: mol_type = other DNA
accatgttagccaagatggtctctatctcctgacctcgtgatccacccgcctcagcctcccaaagtgctgggattacagg

SEQ ID NO: 138094 - DNA, 80 bp, synthetic construct
  misc_feature 1..80: note = Artificially Synthesized Probe
  source 1..80: mol_type = other DNA
tgaaaccaattgtccttgatagagattatggtaacctctcatacatgttctaaggatgtgtcctctctggaattttgtgt

SEQ ID NO: 138095 - DNA, 80 bp, synthetic construct
  misc_feature 1..80: note = Artificially Synthesized Probe
  source 1..80: mol_type = other DNA
agcactctgtggtattggagacagaaaccaggttttgtaaagacactcaaaagccagaagtaaggatatgtgtatcagta

SEQ ID NO: 138096 - DNA, 80 bp, synthetic construct; identical to SEQ ID NO: 43267
  misc_feature 1..80: note = Artificially Synthesized Probe
  source 1..80: mol_type = other DNA

SEQ ID NO: 138097 - DNA, 80 bp, synthetic construct
  misc_feature 1..80: note = Artificially Synthesized Probe
  source 1..80: mol_type = other DNA
ttcagctatgtgttctcatttcacccaagaccattggccagtgcagggcatagaagattcattccacaaacttatactga

SEQ ID NO: 138098 - DNA, 80 bp, synthetic construct
  misc_feature 1..80: note = Artificially Synthesized Probe
  source 1..80: mol_type = other DNA
agagcaaaatacttcagtgtaaagcaagtgtcaaagttgttagtaaattttcaaattcaaacaaacgtaagacaagacat

SEQ ID NO: 138099 - DNA, 80 bp, synthetic construct
  misc_feature 1..80: note = Artificially Synthesized Probe
  source 1..80: mol_type = other DNA
gcgtgagccaccgtgcccagcctgttttgtgagttttgatgccattatgtgaatggctattcattgacagaagagaagtt

SEQ ID NO: 138100 - DNA, 80 bp, synthetic construct; identical to SEQ ID NO: 43268
  misc_feature 1..80: note = Artificially Synthesized Probe
  source 1..80: mol_type = other DNA

SEQ ID NO: 138101 - DNA, 80 bp, synthetic construct
  misc_feature 1..80: note = Artificially Synthesized Probe
  source 1..80: mol_type = other DNA
ataagcgaattcatactggagagaaaccctacaaatgtgaagaatgtggcaaagcctttaataggtccacaacccttact

SEQ ID NO: 138102 - DNA, 80 bp, synthetic construct
  misc_feature 1..80: note = Artificially Synthesized Probe
  source 1..80: mol_type = other DNA
aaatgtgatgaatgtggcaaagcctttggacggtccagggtcctgaatgaacataaaaaaattcatactggagagaaacc

SEQ ID NO: 138103 - DNA, 80 bp, synthetic construct
  misc_feature 1..80: note = Artificially Synthesized Probe
  source 1..80: mol_type = other DNA
attttcgctcctgagtcaacataagaaaattcatactgtagataaaccctacaaatgtaaagattgtgacaaagccttta

SEQ ID NO: 138104 - DNA, 80 bp, synthetic construct
  misc_feature 1..80: note = Artificially Synthesized Probe
  source 1..80: mol_type = other DNA
tactgtagagaaaccctggaaatgtgaagaacgtggcaaagttctttacctcattctcaaaccttgataaacataagaga

SEQ ID NO: 138105 - DNA, 80 bp, synthetic construct; identical to SEQ ID NO: 43269
  misc_feature 1..80: note = Artificially Synthesized Probe
  source 1..80: mol_type = other DNA

SEQ ID NO: 138106 - DNA, 80 bp, synthetic construct
  misc_feature 1..80: note = Artificially Synthesized Probe
  source 1..80: mol_type = other DNA
acgtaagtgaattcatgctggagcaaaatgcttcacatgcgaagaatgtggcacagtctttaccacatcctcaaactttg

SEQ ID NO: 138107 - DNA, 80 bp, synthetic construct
  misc_feature 1..80: note = Artificially Synthesized Probe
  source 1..80: mol_type = other DNA
ctacaaatgtgaaaaacgtggcagagccttcagaccatccacaaacctttatgaaaattcatatttgagagtagaagatt

SEQ ID NO: 138108 - DNA, 80 bp, synthetic construct; identical to SEQ ID NO: 43270
  misc_feature 1..80: note = Artificially Synthesized Probe
  source 1..80: mol_type = other DNA

SEQ ID NO: 138109 - DNA, 80 bp, synthetic construct
  misc_feature 1..80: note = Artificially Synthesized Probe
  source 1..80: mol_type = other DNA
ggaaatgcaaaaaatgtggcaggatttttaccaatgctcatctttttgcacatgatatcctttatattcgagaaaagtta

SEQ ID NO: 138110 - DNA, 80 bp, synthetic construct
  misc_feature 1..80: note = Artificially Synthesized Probe
  source 1..80: mol_type = other DNA
aatataaagagggttgtagtacctgtacttctctcatggattttgttgtacacattttataataggggaaaacactgaag

SEQ ID NO: 138111 - DNA, 80 bp, synthetic construct
  misc_feature 1..80: note = Artificially Synthesized Probe
  source 1..80: mol_type = other DNA
ggaatcaaatttctcttgggcaggcttagaaaagacaaaaccgaaagtacttagtgacatagagagcagaagcctagggc

SEQ ID NO: 138112 - DNA, 80 bp, synthetic construct
  misc_feature 1..80: note = Artificially Synthesized Probe
  source 1..80: mol_type = other DNA
gagtatgtaaacatcagaggatttacagtagaaagaactaaggaactaacactttagacactgcagtaaatcagagtatt

SEQ ID NO: 138113 - DNA, 80 bp, synthetic construct; identical to SEQ ID NO: 43271
  misc_feature 1..80: note = Artificially Synthesized Probe
  source 1..80: mol_type = other DNA

SEQ ID NO: 138114 - DNA, 80 bp, synthetic construct
  misc_feature 1..80: note = Artificially Synthesized Probe
  source 1..80: mol_type = other DNA
cagagaggcttttttgtagttgacaatattgagtgatgcatgaggtaggtgttcagagtaatattcttctgcattatagt

SEQ ID NO: 138115 - DNA, 80 bp, synthetic construct
  misc_feature 1..80: note = Artificially Synthesized Probe
  source 1..80: mol_type = other DNA
tcattatgccaccaacttaaacctatcccaccttactcaatggtgtaggtaaaagatggtaacaatggtaacatagttga

SEQ ID NO: 138116 - DNA, 80 bp, synthetic construct
  misc_feature 1..80: note = Artificially Synthesized Probe
  source 1..80: mol_type = other DNA
tacaggcatacaacatgtaatataccagagtaaatgagttattcatcacctcaagcattcatcctttgtattacacacaa

SEQ ID NO: 138117 - DNA, 80 bp, synthetic construct
  misc_feature 1..80: note = Artificially Synthesized Probe
  source 1..80: mol_type = other DNA
ctttagttccatttacatgaagttaagtatgtaaatgtgttgctgtaaagataaaccttaggtgtaagaaaattatagag

SEQ ID NO: 138118 - DNA, 80 bp, synthetic construct; identical to SEQ ID NO: 43272
  misc_feature 1..80: note = Artificially Synthesized Probe
  source 1..80: mol_type = other DNA

SEQ ID NO: 138119 - DNA, 80 bp, synthetic construct
  misc_feature 1..80: note = Artificially Synthesized Probe
  source 1..80: mol_type = other DNA
tttaatttaagaaccctatataagctgttttctttagttattgttcctttcagtttttgtaattgacataaatgagttta

SEQ ID NO: 138120 - DNA, 80 bp, synthetic construct
  misc_feature 1..80: note = Artificially Synthesized Probe
  source 1..80: mol_type = other DNA
attgaaaataatctgtggcgaacaaatggcattaattgtgcatgtggagaggacgtctgttctcaggctgcagaaccaac

SEQ ID NO: 138121 - DNA, 80 bp, synthetic construct; identical to SEQ ID NO: 43235
  misc_feature 1..80: note = Artificially Synthesized Probe
  source 1..80: mol_type = other DNA

SEQ ID NO: 138122 - DNA, 80 bp, synthetic construct; identical to SEQ ID NO: 43273
  misc_feature 1..80: note = Artificially Synthesized Probe
  source 1..80: mol_type = other DNA

SEQ ID NO: 138123 - DNA, 80 bp, synthetic construct
  misc_feature 1..80: note = Artificially Synthesized Probe
  source 1..80: mol_type = other DNA
tatgaagaaacatcagaattttgaaatttcttaagaggaaatatatcttagaaataaaatttttaggccaggtggcggtg

SEQ ID NO: 138124 - DNA, 80 bp, synthetic construct
  misc_feature 1..80: note = Artificially Synthesized Probe
  source 1..80: mol_type = other DNA
ggaagctgaggcaggagaatcgcttgaacccaggatgcagaggttgcagtgagctgatgttgtgccactgcagtgcagcc

SEQ ID NO: 138125 - DNA, 80 bp, synthetic construct
  misc_feature 1..80: note = Artificially Synthesized Probe
  source 1..80: mol_type = other DNA
tacaaaatcttctatttatttatttattttagatggagccccactctgtcaccaggctggagtgcagtggtgcaatctca

SEQ ID NO: 138126 - DNA, 80 bp, synthetic construct
  misc_feature 1..80: note = Artificially Synthesized Probe
  source 1..80: mol_type = other DNA
acctcatgatctgcctgccttggcctcctgaagtactgggattacaggcatgagccaccgtgcctggccagaatattata

SEQ ID NO: 138127 - DNA, 80 bp, synthetic construct; identical to SEQ ID NO: 43274
  misc_feature 1..80: note = Artificially Synthesized Probe
  source 1..80: mol_type = other DNA

SEQ ID NO: 138128 - DNA, 80 bp, synthetic construct
  misc_feature 1..80: note = Artificially Synthesized Probe
  source 1..80: mol_type = other DNA
ggattacaggtgcccaccaccacacccagctaatttttgtatttttaatagagatgaggtttcactctgttggccaggct

SEQ ID NO: 138129 - DNA, 80 bp, synthetic construct
  misc_feature 1..80: note = Artificially Synthesized Probe
  source 1..80: mol_type = other DNA
tcacgaagtggccaattttgggacctttagcatcacttgcccttttagtgtcttacatatgtatgattaccatcagcact

SEQ ID NO: 138130 - DNA, 80 bp, synthetic construct
  misc_feature 1..80: note = Artificially Synthesized Probe
  source 1..80: mol_type = other DNA
ggctggagtacagtggtgcgatctcagctcactgcaacctccgcctctcaggttcaggcgattctcctgcctcagcctcc

SEQ ID NO: 138131 - DNA, 80 bp, synthetic construct; identical to SEQ ID NO: 43275
  misc_feature 1..80: note = Artificially Synthesized Probe
  source 1..80: mol_type = other DNA

SEQ ID NO: 138132 - DNA, 80 bp, synthetic construct
  misc_feature 1..80: note = Artificially Synthesized Probe
  source 1..80: mol_type = other DNA
actttctttggctctctcccatctatttatatttagctattattctatacatttttttaaaaagtcaggggaaacagaaa

SEQ ID NO: 138133 - DNA, 80 bp, synthetic construct
  misc_feature 1..80: note = Artificially Synthesized Probe
  source 1..80: mol_type = other DNA
taattctagctgcttaacaaatacttcaccacacataattacttttgggataagagctcataacattgactgtgttagca

SEQ ID NO: 138134 - DNA, 80 bp, synthetic construct
  misc_feature 1..80: note = Artificially Synthesized Probe
  source 1..80: mol_type = other DNA
tgtaaatacccaagcatctggtaaccagcattctactctctggcttatttcacttagcatagtgtcttccacatttatcc

SEQ ID NO: 138135 - DNA, 80 bp, synthetic construct; identical to SEQ ID NO: 43276
  misc_feature 1..80: note = Artificially Synthesized Probe
  source 1..80: mol_type = other DNA

SEQ ID NO: 138136 - DNA, 80 bp, synthetic construct
  misc_feature 1..80: note = Artificially Synthesized Probe
  source 1..80: mol_type = other DNA
aaaattagctgggtgtggtgtcaggcgcctgtaatcccagctactcaagaggttgaggcaggagaatcagttgaacctgg

SEQ ID NO: 138137 - DNA, 80 bp, synthetic construct
  misc_feature 1..80: note = Artificially Synthesized Probe
  source 1..80: mol_type = other DNA
tagagaaaaatgacttgctcacaacacaggcaactttgactctagagataacacttattacagtaaaatccctcttcaga

SEQ ID NO: 138138 - DNA, 80 bp, synthetic construct
  misc_feature 1..80: note = Artificially Synthesized Probe
  source 1..80: mol_type = other DNA
tatttaaaccatataaactctagaattgcccttcgatactgacgtacttgggaacagctttcctttcaactgtccttcac

SEQ ID NO: 138139 - DNA, 80 bp, synthetic construct; identical to SEQ ID NO: 43277
  misc_feature 1..80: note = Artificially Synthesized Probe
  source 1..80: mol_type = other DNA

SEQ ID NO: 138140 - DNA, 80 bp, synthetic construct
  misc_feature 1..80: note = Artificially Synthesized Probe
  source 1..80: mol_type = other DNA
ctaggaacctcagccgagcagtcagaactcacagctctgaccaaacccctagaactaagaaagaaccaaaaagttactat

SEQ ID NO: 138141 - DNA, 80 bp, synthetic construct
  misc_feature 1..80: note = Artificially Synthesized Probe
  source 1..80: mol_type = other DNA
gctgggactaacaggtgcgccccaccacgcctgaaaaatttttgtatttttagtagagacggggtttcaccatgttggcc

SEQ ID NO: 138142 - DNA, 80 bp, synthetic construct
  misc_feature 1..80: note = Artificially Synthesized Probe
  source 1..80: mol_type = other DNA
acccctattaaatatgggtcacagatttttaccctagtccagcctatccacctaccacagaaagtagctgtagttcattg

SEQ ID NO: 138143 - DNA, 80 bp, synthetic construct
  misc_feature 1..80: note = Artificially Synthesized Probe
  source 1..80: mol_type = other DNA
tgacatacatctgagcacatattacatgccccataaagatggcattaatgcagatgcacatgttgtttttcagatacaga

SEQ ID NO: 138144 - DNA, 80 bp, synthetic construct
  misc_feature 1..80: note = Artificially Synthesized Probe
  source 1..80: mol_type = other DNA
cactgcaagctccacctcccaggttcacgccattctcctgcctcagcctcccaagtagctgggactacaggcacctgcta

SEQ ID NO: 138145 - DNA, 80 bp, synthetic construct; identical to SEQ ID NO: 43278
  misc_feature 1..80: note = Artificially Synthesized Probe
  source 1..80: mol_type = other DNA

SEQ ID NO: 138146 - DNA, 80 bp, synthetic construct
  misc_feature 1..80: note = Artificially Synthesized Probe
  source 1..80: mol_type = other DNA
aaatcataaatagtcaacaaatgcaaaaaatgcaaagaatttgtaggtatgattagtgcattataggtgttttcaaattt

SEQ ID NO: 138147 - DNA, 80 bp, synthetic construct
  misc_feature 1..80: note = Artificially Synthesized Probe
  source 1..80: mol_type = other DNA
attctcaaaaaaatcttgctcctatttcagaagtgtcactccagccccttgaaggtccaggaaacctggctgagtagtgt

SEQ ID NO: 138148 - DNA, 80 bp, synthetic construct; identical to SEQ ID NO: 43279
  misc_feature 1..80: note = Artificially Synthesized Probe
  source 1..80: mol_type = other DNA

SEQ ID NO: 138149 - DNA, 80 bp, synthetic construct
  misc_feature 1..80: note = Artificially Synthesized Probe
  source 1..80: mol_type = other DNA
cttccatctctatgacaacaagcccattttagctttctggagaatagcatctgagaaaagccaaagtgcctcagtttaca

SEQ ID NO: 138150 - DNA, 80 bp, synthetic construct
  misc_feature 1..80: note = Artificially Synthesized Probe
  source 1..80: mol_type = other DNA
ttataagttagtaatatatacacccattaaagacaggatctcaggacagattgatcacaaataacctgcaaatgcttgcc

SEQ ID NO: 138151 - DNA, 80 bp, synthetic construct
  misc_feature 1..80: note = Artificially Synthesized Probe
  source 1..80: mol_type = other DNA
gggagcagggaacctaaagccagttaacgtgaacttcctacatctaaaccaaaaggaaagacctcatctacacccgagta

SEQ ID NO: 138152 - DNA, 80 bp, synthetic construct
  misc_feature 1..80: note = Artificially Synthesized Probe
  source 1..80: mol_type = other DNA
atccttcattcagataaggggtagctgataggaacctcaaaaggagtacttaaaacccagaaaacattgtaaccgggtcc

SEQ ID NO: 138153 - DNA, 80 bp, synthetic construct; identical to SEQ ID NO: 43280
  misc_feature 1..80: note = Artificially Synthesized Probe
  source 1..80: mol_type = other DNA

SEQ ID NO: 138154 - DNA, 80 bp, synthetic construct
  misc_feature 1..80: note = Artificially Synthesized Probe
  source 1..80: mol_type = other DNA
ctaactgagtggtactataatgggtctagagggaggagcgtcagcattaacaggagacttgctgtaaaaagctaattcat

SEQ ID NO: 138155 - DNA, 80 bp, synthetic construct
  misc_feature 1..80: note = Artificially Synthesized Probe
  source 1..80: mol_type = other DNA
tccttgtttaccatctgatatttgaaaagaagaggaacccctgagaaaggaggcagaggctggttaggaagatagggagg

SEQ ID NO: 138156 - DNA, 80 bp, synthetic construct
  misc_feature 1..80: note = Artificially Synthesized Probe
  source 1..80: mol_type = other DNA
ttaacttgacccagctccttataatgttactaacatgacataaatattttggttttagcttcactctttccacctgctgt

SEQ ID NO: 138157 - DNA, 80 bp, synthetic construct; identical to SEQ ID NO: 43281
  misc_feature 1..80: note = Artificially Synthesized Probe
  source 1..80: mol_type = other DNA

SEQ ID NO: 138158 - DNA, 80 bp, synthetic construct
  misc_feature 1..80: note = Artificially Synthesized Probe
  source 1..80: mol_type = other DNA
agctgtggtctggggatcccgtccctgctttaccctgttcggaatgagatcgaggccccatcaaaacagagttcatgtga

SEQ ID NO: 138159 - DNA, 80 bp, synthetic construct; identical to SEQ ID NO: 43236
  misc_feature 1..80: note = Artificially Synthesized Probe
  source 1..80: mol_type = other DNA

SEQ ID NO: 138160 - DNA, 80 bp, synthetic construct
  misc_feature 1..80: note = Artificially Synthesized Probe
  source 1..80: mol_type = other DNA
tatctcctgatccaaggctgagaccttattttttaaaatcagttccttgcgtggttaaaaaagtattaaaaaagttcctt

SEQ ID NO: 138161 - DNA, 80 bp, synthetic construct
  misc_feature 1..80: note = Artificially Synthesized Probe
  source 1..80: mol_type = other DNA
ccttatgttttaaaatcagttccttgcatgattctacagcaaggccagggtgaagcatgagggcttccagatactttagt

SEQ ID NO: 138162 - DNA, 80 bp, synthetic construct
  misc_feature 1..80: note = Artificially Synthesized Probe
  source 1..80: mol_type = other DNA
actgcgttgaaagttattttatcagataatcccagtcagtcacatgtcagaactagcgctctcaactcatttcacctgta

SEQ ID NO: 138163 - DNA, 80 bp, synthetic construct
  misc_feature 1..80: note = Artificially Synthesized Probe
  source 1..80: mol_type = other DNA
tatggtgaaaccccgtctctactaaaaatacaaaaaatcagctgggcgtggtggcgggcacatgtagtcccagctacttg

SEQ ID NO: 138164 - DNA, 80 bp, synthetic construct; identical to SEQ ID NO: 43237
  misc_feature 1..80: note = Artificially Synthesized Probe
  source 1..80: mol_type = other DNA

SEQ ID NO: 138165 - DNA, 80 bp, synthetic construct
  misc_feature 1..80: note = Artificially Synthesized Probe
  source 1..80: mol_type = other DNA
cctgggaacttttatgttttatctttacataaaccttctcttttcttgagctaatttgagtccttcactctaggttagtg

SEQ ID NO: 138166 - DNA, 80 bp, synthetic construct
  misc_feature 1..80: note = Artificially Synthesized Probe
  source 1..80: mol_type = other DNA
ggattaattttctagaatcttccataatatctctattctgcttagcgtagtactaggttggtaattggagaatccccatc

SEQ ID NO: 138167 - DNA, 80 bp, synthetic construct; identical to SEQ ID NO: 43238
  misc_feature 1..80: note = Artificially Synthesized Probe
  source 1..80: mol_type = other DNA

SEQ ID NO: 138168 - DNA, 80 bp, synthetic construct
  misc_feature 1..80: note = Artificially Synthesized Probe
  source 1..80: mol_type = other DNA
caggagaatcacttgaacccaggaggcggaggttgcagtgagccaagatcacaccactgcactccagcctggtgacagag

SEQ ID NO: 138169 - DNA, 80 bp, synthetic construct
  misc_feature 1..80: note = Artificially Synthesized Probe
  source 1..80: mol_type = other DNA
ttttctttagtgatctccctttaagtttacagggagagctaatgtccactttatcgcttataaggggctgcatgatgtga

SEQ ID NO: 138170 - DNA, 80 bp, synthetic construct
  misc_feature 1..80: note = Artificially Synthesized Probe
  source 1..80: mol_type = other DNA
cctccgcgtggctgttcctgagtggcatcttttagaatacgctagtgtgggcgcgcacagcgcttcgctgagttctgtga

SEQ ID NO: 138171 - DNA, 80 bp, synthetic construct
  misc_feature 1..80: note = Artificially Synthesized Probe
  source 1..80: mol_type = other DNA
gacatagtgggatttggttcagaaatcccaggaacaccaaggacagatgttgcctcttttctacttagtgttttttaatc

SEQ ID NO: 138172 - DNA, 80 bp, synthetic construct
  misc_feature 1..80: note = Artificially Synthesized Probe
  source 1..80: mol_type = other DNA
tataaactcgtttgtaatgtaaactctatatgtgcaaattttgaaattataatatagtttaaagcatggatttccaacat

SEQ ID NO: 138173 - DNA, 80 bp, synthetic construct; identical to SEQ ID NO: 43239
  misc_feature 1..80: note = Artificially Synthesized Probe
  source 1..80: mol_type = other DNA

SEQ ID NO: 138174 - DNA, 80 bp, synthetic construct
  misc_feature 1..80: note = Artificially Synthesized Probe
  source 1..80: mol_type = other DNA
ggttggaaaccactggattaaagtatctactcaccttctatatttcttaaatgcactgtatcattaacaagcataaatgt

SEQ ID NO: 138175 - DNA, 80 bp, synthetic construct
  misc_feature 1..80: note = Artificially Synthesized Probe
  source 1..80: mol_type = other DNA
tgagatgtatctctctgtagctatataaaaatgtgtgtctcacacacacacctatataacttatttaagtgtgtagtaaa

SEQ ID NO: 138176 - DNA, 80 bp, synthetic construct
  misc_feature 1..80: note = Artificially Synthesized Probe
  source 1..80: mol_type = other DNA
tggcatatagcaacattatttcatttaacaatgcagtttttaagaacctaatttgaacattaagtgaggacttactgtac

SEQ ID NO: 138177 - DNA, 80 bp, synthetic construct
  misc_feature 1..80: note = Artificially Synthesized Probe
  source 1..80: mol_type = other DNA
tgaagaaatctattacttcacctagataaccattttgtttggtagtaagaacacttaaggcctactgttgtagcaaattt

SEQ ID NO: 138178 - DNA, 80 bp, synthetic construct; identical to SEQ ID NO: 43240
  misc_feature 1..80: note = Artificially Synthesized Probe
  source 1..80: mol_type = other DNA

SEQ ID NO: 138179 - DNA, 80 bp, synthetic construct
  misc_feature 1..80: note = Artificially Synthesized Probe
  source 1..80: mol_type = other DNA
ccccccatatattggctactgtaaacggtactacaataaacatggaggggaagatagttctttgaggtactaattttatt

SEQ ID NO: 138180 - DNA, 80 bp, synthetic construct
  misc_feature 1..80: note = Artificially Synthesized Probe
  source 1..80: mol_type = other DNA
gcaattctcctgcctcagcctccgaagtagctggaattacaggcatgtaccaccatgcctggctaattttgtatttttaa

SEQ ID NO: 138181 - DNA, 80 bp, synthetic construct
  misc_feature 1..80: note = Artificially Synthesized Probe
  source 1..80: mol_type = other DNA
gcccaggctggagtacagtggcaggatctcggctcactgcaagctccgcctcctgggttcacgccattctcctgcctcag

SEQ ID NO: 138182 - DNA, 80 bp, synthetic construct; identical to SEQ ID NO: 43232
  misc_feature 1..80: note = Artificially Synthesized Probe
  source 1..80: mol_type = other DNA

SEQ ID NO: 138183 - DNA, 80 bp, synthetic construct; identical to SEQ ID NO: 43241
  misc_feature 1..80: note = Artificially Synthesized Probe
  source 1..80: mol_type = other DNA

SEQ ID NO: 138184 - DNA, 80 bp, synthetic construct; identical to SEQ ID NO: 43282
  misc_feature 1..80: note = Artificially Synthesized Probe
  source 1..80: mol_type = other DNA

SEQ ID NO: 138185 - DNA, 80 bp, synthetic construct; identical to SEQ ID NO: 43390
  misc_feature 1..80: note = Artificially Synthesized Probe
  source 1..80: mol_type = other DNA

SEQ ID NO: 138186 - DNA, 80 bp, synthetic construct
  misc_feature 1..80: note = Artificially Synthesized Probe
  source 1..80: mol_type = other DNA
cttctgcagttaagaaaatatgagccatttagaaacattctatctagtgattcaataaagcagaactttaagtgtacatt

SEQ ID NO: 138187 - DNA, 80 bp, synthetic construct
  misc_feature 1..80: note = Artificially Synthesized Probe
  source 1..80: mol_type = other DNA
tgtttgatgtttgcatcttttagactgagcaatctctgatgtttgataggagtactccgtatgtgtgtgggagtgagggg

SEQ ID NO: 138188 - DNA, 80 bp, synthetic construct
  misc_feature 1..80: note = Artificially Synthesized Probe
  source 1..80: mol_type = other DNA
tgagaattgtagcatagtatggtgagattattcctggaaacatgcccaaagtttcttgaggtcacagaggtagcacctga

SEQ ID NO: 138189 - DNA, 80 bp, synthetic construct
  misc_feature 1..80: note = Artificially Synthesized Probe
  source 1..80: mol_type = other DNA
aaaattcgaatttgttgtttttggtagtgtgccctttaaaaagagattttctctaatcgaaaagcagtgaagaacaccta

SEQ ID NO: 138190 - DNA, 80 bp, synthetic construct; identical to SEQ ID NO: 43391
  misc_feature 1..80: note = Artificially Synthesized Probe
  source 1..80: mol_type = other DNA

SEQ ID NO: 138191 - DNA, 80 bp, synthetic construct
  misc_feature 1..80: note = Artificially Synthesized Probe
  source 1..80: mol_type = other DNA
cccagagtagctattttggagaagatagttgtaacctgagctgtgtctaagggattttagacagttttgagactttaaaa

SEQ ID NO: 138192 - DNA, 80 bp, synthetic construct
  misc_feature 1..80: note = Artificially Synthesized Probe
  source 1..80: mol_type = other DNA
tactgtcctgcttgctggccttggtccttaatttgctagatttggacaaatctaagcagacattttccatttgttttata

SEQ ID NO: 138193 - DNA, 80 bp, synthetic construct; identical to SEQ ID NO: 43392
  misc_feature 1..80: note = Artificially Synthesized Probe
  source 1..80: mol_type = other DNA

SEQ ID NO: 138194 - DNA, 80 bp, synthetic construct
  misc_feature 1..80: note = Artificially Synthesized Probe
  source 1..80: mol_type = other DNA
tactttgaaataattttagaaaaaagaattgcaaaaatagtctagaaagttcctatgtatataccttttggccagcatct

SEQ ID NO: 138195 - DNA, 80 bp, synthetic construct
  misc_feature 1..80: note = Artificially Synthesized Probe
  source 1..80: mol_type = other DNA
actatgtttcgttgaatggaaaatattttgttctactttgtgaggtttattaaatttaatattctgctattttctaaatc

SEQ ID NO: 138196 - DNA, 80 bp, synthetic construct
  misc_feature 1..80: note = Artificially Synthesized Probe
  source 1..80: mol_type = other DNA
tctttaggtcaagactgtctttactgctttctaataagatggtagaaagctgctgaacatgtgcttttcgcaaagagtat

SEQ ID NO: 138197 - DNA, 80 bp, synthetic construct
  misc_feature 1..80: note = Artificially Synthesized Probe
  source 1..80: mol_type = other DNA
tctcgattaaagttcattcttctcagccttaactttattctataaaatagtttctgtgatgacagaggagacttagtccc

SEQ ID NO: 138198 - DNA, 80 bp, synthetic construct; identical to SEQ ID NO: 43393
  misc_feature 1..80: note = Artificially Synthesized Probe
  source 1..80: mol_type = other DNA

SEQ ID NO: 138199 - DNA, 80 bp, synthetic construct
  misc_feature 1..80: note = Artificially Synthesized Probe
  source 1..80: mol_type = other DNA
gcatgcacacttgtcctcacatggcagagagaccagggttccagcatagttgggttctggtgaaggctcgcccaggcttg

SEQ ID NO: 138200 - DNA, 80 bp, synthetic construct
  misc_feature 1..80: note = Artificially Synthesized Probe
  source 1..80: mol_type = other DNA
tgttgagcatctcatcgcaaagaaataactattattgcaaactgtgagttagcaacttctttcaaagattggtcatcctg

SEQ ID NO: 138201 - DNA, 80 bp, synthetic construct
  misc_feature 1..80: note = Artificially Synthesized Probe
  source 1..80: mol_type = other DNA
cttgcttccttctggtaatcaccgaggcctcacttcccccaactaccatggaaggtaactattacagttaattttttatt

SEQ ID NO: 138202 - DNA, 80 bp, synthetic construct; identical to SEQ ID NO: 43394
  misc_feature 1..80: note = Artificially Synthesized Probe
  source 1..80: mol_type = other DNA

SEQ ID NO: 138203 - DNA, 80 bp, synthetic construct
  misc_feature 1..80: note = Artificially Synthesized Probe
  source 1..80: mol_type = other DNA
aaatatctataacggagacatgcctgcgaatattctatttttgaatgctcttctaatgaggtattagatcagaggtggca

SEQ ID NO: 138204 - DNA, 80 bp, synthetic construct
  misc_feature 1..80: note = Artificially Synthesized Probe
  source 1..80: mol_type = other DNA
atgcacgggtcagtttttccaatcaagtacacttttggtgtttacaatggaagttacccaaaatatataatttaataggg

SEQ ID NO: 138205 - DNA, 80 bp, synthetic construct; identical to SEQ ID NO: 43292
  misc_feature 1..80: note = Artificially Synthesized Probe
  source 1..80: mol_type = other DNA

SEQ ID NO: 138206 - DNA, 80 bp, synthetic construct
  misc_feature 1..80: note = Artificially Synthesized Probe
  source 1..80: mol_type = other DNA
attctgctttgagtagaaaaagactgtaaggcatgtggatatttttgaaaatattaaatattttgagttctaaattgaga

SEQ ID NO: 138207 - DNA, 80 bp, synthetic construct
  misc_feature 1..80: note = Artificially Synthesized Probe
  source 1..80: mol_type = other DNA
gcacacatagatacatgtacatatacactgatacatagacatgtacatgggtatattacaagcagttggctatacgcagt

SEQ ID NO: 138208 - DNA, 80 bp, synthetic construct; identical to SEQ ID NO: 43395
  misc_feature 1..80: note = Artificially Synthesized Probe
  source 1..80: mol_type = other DNA

SEQ ID NO: 138209 - DNA, 80 bp, synthetic construct
  misc_feature 1..80: note = Artificially Synthesized Probe
  source 1..80: mol_type = other DNA
actagatgtgtaaggaaagagaattctgagaaatgtagttcacagcctagatgagacgacccattacagagctaccacag

SEQ ID NO: 138210 - DNA, 80 bp, synthetic construct
  misc_feature 1..80: note = Artificially Synthesized Probe
  source 1..80: mol_type = other DNA
tcctgcctcagcctccagagtagctgggattacaggtatacaccaccacacccagctaattttgtatttttagtagagat

SEQ ID NO: 138211 - DNA, 80 bp, synthetic construct; identical to SEQ ID NO: 43396
  misc_feature 1..80: note = Artificially Synthesized Probe
  source 1..80: mol_type = other DNA

SEQ ID NO: 138212 - DNA, 80 bp, synthetic construct
  misc_feature 1..80: note = Artificially Synthesized Probe
  source 1..80: mol_type = other DNA
tttattttttatttttttgcatctcacagatagtcattcatgtcatgaagttaatgacatagaagtacagtaatgttcca

SEQ ID NO: 138213 - DNA, 80 bp, synthetic construct
  misc_feature 1..80: note = Artificially Synthesized Probe
  source 1..80: mol_type = other DNA
ctgattttgtaaatgatgaagctcatcagctccattcctccctaaatcttctggtaaaccaggccatcgctgcgcttcgt

SEQ ID NO: 138214 - DNA, 80 bp, synthetic construct
  misc_feature 1..80: note = Artificially Synthesized Probe
  source 1..80: mol_type = other DNA
aacggggaaaatgaagggaaaaaggccggttcagtagagtttaactgtaactatcaggtctgtggagcttgacacagatc

SEQ ID NO: 138215 - DNA, 80 bp, synthetic construct
  misc_feature 1..80: note = Artificially Synthesized Probe
  source 1..80: mol_type = other DNA
catggaaatcatttacataaatgacatcttgatgggaagcataagtttgaattttgtcgcttaagttgcgtgctctttgc

SEQ ID NO: 138216 - DNA, 80 bp, synthetic construct
  misc_feature 1..80: note = Artificially Synthesized Probe
  source 1..80: mol_type = other DNA
caggcgggtcttgaactcctaacctcaagtgatccgcctgccttggcctctcaaagtgctgggattacaggtgtaagcca

SEQ ID NO: 138217 - DNA, 80 bp, synthetic construct; identical to SEQ ID NO: 43397
  misc_feature 1..80: note = Artificially Synthesized Probe
  source 1..80: mol_type = other DNA

SEQ ID NO: 138218 - DNA, 80 bp, synthetic construct
  misc_feature 1..80: note = Artificially Synthesized Probe
  source 1..80: mol_type = other DNA
tgctgagtttcttccacaggaggttaatggaggattgataaatatagacatggtgttttgacttgagaaaaatacatttt

SEQ ID NO: 138219 - DNA, 80 bp, synthetic construct
  misc_feature 1..80: note = Artificially Synthesized Probe
  source 1..80: mol_type = other DNA
aaagcccacgataaatcagtggcagcatgcacactgactggccatctctgatttggttgaataggactgtctttggaaat

SEQ ID NO: 138220 - DNA, 80 bp, synthetic construct
  misc_feature 1..80: note = Artificially Synthesized Probe
  source 1..80: mol_type = other DNA
tctattccacatctatagctttatgaatatgtattggtagattagactttttgaatatagctcgctctattttgaatgta

SEQ ID NO: 138221 - DNA, 80 bp, synthetic construct; identical to SEQ ID NO: 43398
  misc_feature 1..80: note = Artificially Synthesized Probe
  source 1..80: mol_type = other DNA

SEQ ID NO: 138222 - DNA, 80 bp, synthetic construct
  misc_feature 1..80: note = Artificially Synthesized Probe
  source 1..80: mol_type = other DNA
ctgaagtagagccaagtatctcattctatttccttctccactgtctcttcccccttcttaagggtattcatatacatatc

SEQ ID NO: 138223 - DNA, 80 bp, synthetic construct
  misc_feature 1..80: note = Artificially Synthesized Probe
  source 1..80: mol_type = other DNA
gttcactgtcttttctgctatttactagacttttgttcaaagctttcacttttgttttggaaaaaacaggaatcgctttt

SEQ ID NO: 138224 - DNA, 80 bp, synthetic construct; identical to SEQ ID NO: 43399
  misc_feature 1..80: note = Artificially Synthesized Probe
  source 1..80: mol_type = other DNA

SEQ ID NO: 138225 - DNA, 80 bp, synthetic construct
  misc_feature 1..80: note = Artificially Synthesized Probe
  source 1..80: mol_type = other DNA
tgaagaaaaataaagcaaagggattgagagtgattggggatagggatggttcttattttgggtagggtacttgtagaatt

SEQ ID NO: 138226 - DNA, 80 bp, synthetic construct
  misc_feature 1..80: note = Artificially Synthesized Probe
  source 1..80: mol_type = other DNA
ttcttatgcactttatggcttttccctcagctgcactgttcattccacaggggcaaagacagcagctttttttttttttt

SEQ ID NO: 138227 - DNA, 80 bp, synthetic construct
  misc_feature 1..80: note = Artificially Synthesized Probe
  source 1..80: mol_type = other DNA
acaggggtgaaatcatgtccttctcagtgcatcatatgaggaggtatgtgatatagatatgtcttcttctggtgaacgtg

SEQ ID NO: 138228 - DNA, 80 bp, synthetic construct
  misc_feature 1..80: note = Artificially Synthesized Probe
  source 1..80: mol_type = other DNA
taatttttatatttttagtagagacaaggttttaccatgttggtcaggcagttcttgtactctggacttcaagtgatccg

SEQ ID NO: 138229 - DNA, 80 bp, synthetic construct; identical to SEQ ID NO: 43400
  misc_feature 1..80: note = Artificially Synthesized Probe
  source 1..80: mol_type = other DNA

SEQ ID NO: 138230 - DNA, 80 bp, synthetic construct
  misc_feature 1..80: note = Artificially Synthesized Probe
  source 1..80: mol_type = other DNA
ttagagatgctcagcttgtatttcaaggaatcaggtgttcattactttctttagaaagactttcttgtcccattaaaacc

SEQ ID NO: 138231 - DNA, 80 bp, synthetic construct
  misc_feature 1..80: note = Artificially Synthesized Probe
  source 1..80: mol_type = other DNA
tcttctttacccatctgtatctcctacatctggtgctgtgctgccacaggtgatgcattcaaaaaatatttattgaatga

SEQ ID NO: 138232 - DNA, 80 bp, synthetic construct
  misc_feature 1..80: note = Artificially Synthesized Probe
  source 1..80: mol_type = other DNA
acaattttcttgttggtaaattactattgtgcatgatgtcatctaaaaatagcagttaggatttcatcatggttaaataa

SEQ ID NO: 138233 - DNA, 80 bp, synthetic construct
  misc_feature 1..80: note = Artificially Synthesized Probe
  source 1..80: mol_type = other DNA
cttaggcttataatgtatcattatactatactgaggcatatgtagtcattacatcatatcacacacaggcatgtataggt

SEQ ID NO: 138234 - DNA, 80 bp, synthetic construct; identical to SEQ ID NO: 43401
  misc_feature 1..80: note = Artificially Synthesized Probe
  source 1..80: mol_type = other DNA

SEQ ID NO: 138235 - DNA, 80 bp, synthetic construct
  misc_feature 1..80: note = Artificially Synthesized Probe
  source 1..80: mol_type = other DNA
cccgcacgcggcttgattggtgaggatttacatgtgtgctaattagagtggaataaatgattggctgtttgctgcattgc

SEQ ID NO: 138236 - DNA, 80 bp, synthetic construct
  misc_feature 1..80: note = Artificially Synthesized Probe
  source 1..80: mol_type = other DNA
aatcgtcccctatgatttagtgtcttacttggtgaaagtgaaagacctcaaaataatgccttggcaacagaatttttgat

SEQ ID NO: 138237 - DNA, 80 bp, synthetic construct
  misc_feature 1..80: note = Artificially Synthesized Probe
  source 1..80: mol_type = other DNA
ctttaaaaattgcatacgtatcagtcttttaggttgaattaagccatgttaaaaccactcatgcatatatctgatagaag

SEQ ID NO: 138238 - DNA, 80 bp, synthetic construct; identical to SEQ ID NO: 43402
  misc_feature 1..80: note = Artificially Synthesized Probe
  source 1..80: mol_type = other DNA

SEQ ID NO: 138239 - DNA, 80 bp, synthetic construct
  misc_feature 1..80: note = Artificially Synthesized Probe
  source 1..80: mol_type = other DNA
actgtggggtatttcatatcttgagaaggtttgttattatttattagaaccaaacatagcaggggagaggtaaaggctta

SEQ ID NO: 138240 - DNA, 80 bp, synthetic construct
  misc_feature 1..80: note = Artificially Synthesized Probe
  source 1..80: mol_type = other DNA
gcgttattcaatctctgtgctcctctgagatgtcagtgcgatagcattgattcttaggtttgatactgtgccgcacttga

SEQ ID NO: 138241 - DNA, 80 bp, synthetic construct
  misc_feature 1..80: note = Artificially Synthesized Probe
  source 1..80: mol_type = other DNA
atcaacaagcatcatgtgtttcctccaactttgttatatgtacttctagaagcaacattctgtggagggaatgaagtttt

SEQ ID NO: 138242 - DNA, 80 bp, synthetic construct; identical to SEQ ID NO: 43403
  misc_feature 1..80: note = Artificially Synthesized Probe
  source 1..80: mol_type = other DNA

SEQ ID NO: 138243 - DNA, 80 bp, synthetic construct
  misc_feature 1..80: note = Artificially Synthesized Probe
  source 1..80: mol_type = other DNA
ctctctagtgtagcatgaggcttctcatttttattttttctcatgtaggggtattgactttcactttaatattttcactt

SEQ ID NO: 138244 - DNA, 80 bp, synthetic construct
  misc_feature 1..80: note = Artificially Synthesized Probe
  source 1..80: mol_type = other DNA
tgttataaggtttgactgaatgtaagttcttccccctagcctttctaggtacctgcccattccttttcccacagatactg

SEQ ID NO: 138245 - DNA, 80 bp, synthetic construct
  misc_feature 1..80: note = Artificially Synthesized Probe
  source 1..80: mol_type = other DNA
aactagcagtaaagggctgcaagttttagtaatttcttcttagtatctaatacatgttttcagatcttcatgagttccca

SEQ ID NO: 138246 - DNA, 80 bp, synthetic construct
  misc_feature 1..80: note = Artificially Synthesized Probe
  source 1..80: mol_type = other DNA
tatttctctaatgtcctgtcagaatgagacaacagtttaaaatgaatgatgaatcaattcactctgtccattctccatgg

SEQ ID NO: 138247 - DNA, 80 bp, synthetic construct; identical to SEQ ID NO: 43404
  misc_feature 1..80: note = Artificially Synthesized Probe
  source 1..80: mol_type = other DNA

SEQ ID NO: 138248 - DNA, 80 bp, synthetic construct
  misc_feature 1..80: note = Artificially Synthesized Probe
  source 1..80: mol_type = other DNA
ccataaatgtggaagaggctccgtaagagaaggtatgatgacacaatgtgagaaggacttgattccgcatagctggtttc

SEQ ID NO: 138249 - DNA, 80 bp, synthetic construct
  misc_feature 1..80: note = Artificially Synthesized Probe
  source 1..80: mol_type = other DNA
ttactgacaccttgattttagctcagtcattcctgggctggacttcagaactgcaggtctgtaagataataaatatgtgt

SEQ ID NO: 138250 - DNA, 80 bp, synthetic construct
  misc_feature 1..80: note = Artificially Synthesized Probe
  source 1..80: mol_type = other DNA
ccgcctctcaggttcaagcgattctcctgcctcagcctcctgggtagctgggattacaggcacgtgccaccacacccgat

SEQ ID NO: 138251 - DNA, 80 bp, synthetic construct; identical to SEQ ID NO: 43293
  misc_feature 1..80: note = Artificially Synthesized Probe
  source 1..80: mol_type = other DNA

SEQ ID NO: 138252 - DNA, 80 bp, synthetic construct; identical to SEQ ID NO: 43405
  misc_feature 1..80: note = Artificially Synthesized Probe
  source 1..80: mol_type = other DNA

SEQ ID NO: 138253 - DNA, 80 bp, synthetic construct
  misc_feature 1..80: note = Artificially Synthesized Probe
  source 1..80: mol_type = other DNA
tcatgtcctagcgcctatgtcttagttactggaaaatgggattagtttcttcatttaaaattagaaaaatgctgcttctt

SEQ ID NO: 138254 - DNA, 80 bp, synthetic construct
  misc_feature 1..80: note = Artificially Synthesized Probe
  source 1..80: mol_type = other DNA
gtccttttcccagtagtcatggcgaagccatccaagtggtcacatctcccacccctgagatttgtatgtgagaaacagaa

SEQ ID NO: 138255 - DNA, 80 bp, synthetic construct
  misc_feature 1..80: note = Artificially Synthesized Probe
  source 1..80: mol_type = other DNA
actggctagctgagcaggttctgcagtggggaaagagtatgaatttgtagaagcattgaggttttgctgtcagttggcta

SEQ ID NO: 138256 - DNA, 80 bp, synthetic construct; identical to SEQ ID NO: 43406
  misc_feature 1..80: note = Artificially Synthesized Probe
  source 1..80: mol_type = other DNA

SEQ ID NO: 138257 - DNA, 80 bp, synthetic construct
  misc_feature 1..80: note = Artificially Synthesized Probe
  source 1..80: mol_type = other DNA
aggaaaggaacacaccaggggtttggaataaaggaactccaagactcctccaatctttaaaataaatgacatgggcaatt

SEQ ID NO: 138258 - DNA, 80 bp, synthetic construct
  misc_feature 1..80: note = Artificially Synthesized Probe
  source 1..80: mol_type = other DNA
tagtttcatttaaattttaaatcattaaataacagagatttaaaaaatagattttaaataattatttcttagatatcctc

SEQ ID NO: 138259 - DNA, 80 bp, synthetic construct
  misc_feature 1..80: note = Artificially Synthesized Probe
  source 1..80: mol_type = other DNA
actataatatctcccaaattttgtaatacgtgtacaaacagaccgtgctatagagaatagcctatattccttactgtttt

SEQ ID NO: 138260 - DNA, 80 bp, synthetic construct; identical to SEQ ID NO: 43407
  misc_feature 1..80: note = Artificially Synthesized Probe
  source 1..80: mol_type = other DNA

SEQ ID NO: 138261 - DNA, 80 bp, synthetic construct
  misc_feature 1..80: note = Artificially Synthesized Probe
  source 1..80: mol_type = other DNA
cttgcctctttttaataatgtagaatagtcataagcagtagcttcatttattgttggaaaaaatgtaattgcaaaaatta

SEQ ID NO: 138262 - DNA, 80 bp, synthetic construct
  misc_feature 1..80: note = Artificially Synthesized Probe
  source 1..80: mol_type = other DNA
ataaaaaaaaggtatacttgtttagagcacttaccatgatggagcttgtgggactggaagttgctctgggtgagtcagtg

SEQ ID NO: 138263 - DNA, 80 bp, synthetic construct
  misc_feature 1..80: note = Artificially Synthesized Probe
  source 1..80: mol_type = other DNA
cttgtggttatatgaaagacacatttatgaattttgcagatcactgtcatttttgcattcatattttctcttgctttgtt

SEQ ID NO: 138264 - DNA, 80 bp, synthetic construct
  misc_feature 1..80: note = Artificially Synthesized Probe
  source 1..80: mol_type = other DNA
tactgtcttctggcatgatgctttcaactttatttttaaatcaaagaatttttaaaaattgcatagccattgtattattg

SEQ ID NO: 138265 - DNA, 80 bp, synthetic construct; identical to SEQ ID NO: 43408
  misc_feature 1..80: note = Artificially Synthesized Probe
  source 1..80: mol_type = other DNA

SEQ ID NO: 138266 - DNA, 80 bp, synthetic construct
  misc_feature 1..80: note = Artificially Synthesized Probe
  source 1..80: mol_type = other DNA
agttacctttaccagtcatcttccacgtcccgctgccttactttctttttacttgtacttacagtatccccttttcctgg

SEQ ID NO: 138267 - DNA, 80 bp, synthetic construct
  misc_feature 1..80: note = Artificially Synthesized Probe
  source 1..80: mol_type = other DNA
ttaaagaaatcagttcacatatttactgaaatgtgactctacgctgggtattgtgccagactctggcatattgtggcgaa

SEQ ID NO: 138268 - DNA, 80 bp, synthetic construct
  misc_feature 1..80: note = Artificially Synthesized Probe
  source 1..80: mol_type = other DNA
ggacagccacagagtgttccagagggcctcctgtcccagcagttactgaatagatggtttgttgaattgaactacatgct

SEQ ID NO: 138269 - DNA, 80 bp, synthetic construct; identical to SEQ ID NO: 43409
  misc_feature 1..80: note = Artificially Synthesized Probe
  source 1..80: mol_type = other DNA

SEQ ID NO: 138270 - DNA, 80 bp, synthetic construct
  misc_feature 1..80: note = Artificially Synthesized Probe
  source 1..80: mol_type = other DNA
gctgggtttgagtagagtagggaacttagagactctcccttattcagagtactgaagtgcaaacatagttttttcaaata

SEQ ID NO: 138271 - DNA, 80 bp, synthetic construct
  misc_feature 1..80: note = Artificially Synthesized Probe
  source 1..80: mol_type = other DNA
tattgtttcagttgctctcatgacatgatgtgacctgttttgccttattgtgggaatgtttttaggtggtttatgtttta

SEQ ID NO: 138272 - DNA, 80 bp, synthetic construct; identical to SEQ ID NO: 43410
  misc_feature 1..80: note = Artificially Synthesized Probe
  source 1..80: mol_type = other DNA

SEQ ID NO: 138273 - DNA, 80 bp, synthetic construct
  misc_feature 1..80: note = Artificially Synthesized Probe
  source 1..80: mol_type = other DNA
agctccgttgtaatgatagggaaccatcatcatgtatgtggtccattgttgaccaaaacatcattaggtagtgcatgact

SEQ ID NO: 138274 - DNA, 80 bp, synthetic construct
  misc_feature 1..80: note = Artificially Synthesized Probe
  source 1..80: mol_type = other DNA
tcgaaataatcaacaataaattacctctaatttatgacataaagaaagcaatgtatcggtaatgtttgtttgtagttcag

SEQ ID NO: 138275 - DNA, 80 bp, synthetic construct
  misc_feature 1..80: note = Artificially Synthesized Probe
  source 1..80: mol_type = other DNA
atcgcaaatatgtgtaccatgtgtaatgtgtttatatacagagagagtgtggtatagtatgtgttgttattagtattctc

SEQ ID NO: 138276 - DNA, 80 bp, synthetic construct
  misc_feature 1..80: note = Artificially Synthesized Probe
  source 1..80: mol_type = other DNA
tgacaataaaagtcaagttattctgtttcatactgtgcaattaattatttgtgacaagtcctgttaaggaggaggctgtt

SEQ ID NO: 138277 - DNA, 80 bp, synthetic construct; identical to SEQ ID NO: 43411
  misc_feature 1..80: note = Artificially Synthesized Probe
  source 1..80: mol_type = other DNA

SEQ ID NO: 138278 - DNA, 80 bp, synthetic construct
  misc_feature 1..80: note = Artificially Synthesized Probe
  source 1..80: mol_type = other DNA
aaacaaacaaacaaaacaccacccaaactagaaactttaaaaaaaatgtaacttgcttatataagttgaatgtcccttct

SEQ ID NO: 138279 - DNA, 80 bp, synthetic construct
  misc_feature 1..80: note = Artificially Synthesized Probe
  source 1..80: mol_type = other DNA
aaaaaaatttcagattttagagtggtttggtttttggattttcagattagggatactaacctgtatttgcaaattttttc

SEQ ID NO: 138280 - DNA, 80 bp, synthetic construct
  misc_feature 1..80: note = Artificially Synthesized Probe
  source 1..80: mol_type = other DNA
tctgacaattctatacacctctgaaaccattgacgaatacagataaaagaacgttcctgtttcctcaaaagattcctgtg

SEQ ID NO: 138281 - DNA, 80 bp, synthetic construct
  misc_feature 1..80: note = Artificially Synthesized Probe
  source 1..80: mol_type = other DNA
tttacaaaaaggaaaaaaaaatagctagttgtgctggtgcgtgcctatagtcccagctacttgggaggctgaggtggaag

SEQ ID NO: 138282 - DNA, 80 bp, synthetic construct; identical to SEQ ID NO: 43412
  misc_feature 1..80: note = Artificially Synthesized Probe
  source 1..80: mol_type = other DNA

SEQ ID NO: 138283 - DNA, 80 bp, synthetic construct
  misc_feature 1..80: note = Artificially Synthesized Probe
  source 1..80: mol_type = other DNA
ctcttaagaattttcttcgttaagtaatttcgtatctcctatgaaaggaaataactttatctgtatcttatctttatgcc

SEQ ID NO: 138284 - DNA, 80 bp, synthetic construct
  misc_feature 1..80: note = Artificially Synthesized Probe
  source 1..80: mol_type = other DNA
ttgcctttattgtattttttaaattgacatattaattgtacatattcttaggggacattaatgatgcttggaaacataaa

SEQ ID NO: 138285 - DNA, 80 bp, synthetic construct; identical to SEQ ID NO: 43294
  misc_feature 1..80: note = Artificially Synthesized Probe
  source 1..80: mol_type = other DNA

SEQ ID NO: 138286 - DNA, 80 bp, synthetic construct; identical to SEQ ID NO: 43413
  misc_feature 1..80: note = Artificially Synthesized Probe
  source 1..80: mol_type = other DNA

SEQ ID NO: 138287 - DNA, 80 bp, synthetic construct
  misc_feature 1..80: note = Artificially Synthesized Probe
  source 1..80: mol_type = other DNA
tcagtctcccgagtacctgggaccacaggcacccgccaccacgcccggctaatttttttttgtattttttagtagagacg

SEQ ID NO: 138288 - DNA, 80 bp, synthetic construct
  misc_feature 1..80: note = Artificially Synthesized Probe
  source 1..80: mol_type = other DNA
gaatttaactttctgtttctggcttatttcacttaacttaagttcttcctgttccatctatgttgctgagaatagcagga

SEQ ID NO: 138289 - DNA, 80 bp, synthetic construct
  misc_feature 1..80: note = Artificially Synthesized Probe
  source 1..80: mol_type = other DNA
ttcctttggatgaatgtccagcagtgggattgctgcatcgcatggttgatctatttgtattttttttttgaagaagaaga

SEQ ID NO: 138290 - DNA, 80 bp, synthetic construct
  misc_feature 1..80: note = Artificially Synthesized Probe
  source 1..80: mol_type = other DNA
gtggttttgatttgcatttccctgatgattagtgatgttgaacagtttttcttatatttggtggccattcattaaaatgt

SEQ ID NO: 138291 - DNA, 80 bp, synthetic construct; identical to SEQ ID NO: 43414
  misc_feature 1..80: note = Artificially Synthesized Probe
  source 1..80: mol_type = other DNA

SEQ ID NO: 138292 - DNA, 80 bp, synthetic construct
  misc_feature 1..80: note = Artificially Synthesized Probe
  source 1..80: mol_type = other DNA
aatgaatatcagatatgcagttttgccagcatcgtcaatgagtgttcttgaagtctttgtcaaaaaaatcaactctgtac

SEQ ID NO: 138293 - DNA, 80 bp, synthetic construct
  misc_feature 1..80: note = Artificially Synthesized Probe
  source 1..80: mol_type = other DNA
cgataccttcagcttttttttttttctttttctttttctcaggattgctttgactattcagggtcttttgtggtttcatt

SEQ ID NO: 138294 - DNA, 80 bp, synthetic construct
  misc_feature 1..80: note = Artificially Synthesized Probe
  source 1..80: mol_type = other DNA
cttccctttctttcatcactgatttgcagttttccttgtagaggtctttcacctccttggttaaatttattcctaggcat

SEQ ID NO: 138295 - DNA, 80 bp, synthetic construct; identical to SEQ ID NO: 43415
  misc_feature 1..80: note = Artificially Synthesized Probe
  source 1..80: mol_type = other DNA

SEQ ID NO: 138296 - DNA, 80 bp, synthetic construct
  misc_feature 1..80: note = Artificially Synthesized Probe
  source 1..80: mol_type = other DNA
catgattgtggagctgtgtaatctaacagtattcaagtagatggattgccacattagctttacttttaaccatcccccat

SEQ ID NO: 138297 - DNA, 80 bp, synthetic construct
  misc_feature 1..80: note = Artificially Synthesized Probe
  source 1..80: mol_type = other DNA
tgagtctcttgtagctagcacatactttggtcttttgatgcagtctgagaatctcttctttttcacttagtgtttattac

SEQ ID NO: 138298 - DNA, 80 bp, synthetic construct
  misc_feature 1..80: note = Artificially Synthesized Probe
  source 1..80: mol_type = other DNA
tatagttttgctggatggagagttcttgattgatactttgaccgtgttattcttctgacttctaccttccattgtttgtc

SEQ ID NO: 138299 - DNA, 80 bp, synthetic construct
  misc_feature 1..80: note = Artificially Synthesized Probe
  source 1..80: mol_type = other DNA
tatgtcatttggcatactcactgtgcttcatttagtacagcaatcttgtgtagtaggaattattccctttttacaaactg

SEQ ID NO: 138300 - DNA, 80 bp, synthetic construct
  misc_feature 1..80: note = Artificially Synthesized Probe
  source 1..80: mol_type = other DNA
tgtttatgtttcttgatgttgaacttttatctgtagattactgtgtttcatcaaatttgaggaactttcagccattaatt

SEQ ID NO: 138301 - DNA, 80 bp, synthetic construct; identical to SEQ ID NO: 43416
  misc_feature 1..80: note = Artificially Synthesized Probe
  source 1..80: mol_type = other DNA

SEQ ID NO: 138302 - DNA, 80 bp, synthetic construct
  misc_feature 1..80: note = Artificially Synthesized Probe
  source 1..80: mol_type = other DNA
cttcctcaccttggcacagagctccagttttttgtttcagtcttgtgtcagtaaaattaccattctgcctctccaagttg

SEQ ID NO: 138303 - DNA, 80 bp, synthetic construct
  misc_feature 1..80: note = Artificially Synthesized Probe
  source 1..80: mol_type = other DNA
agttttatacttatttttgagatctgttgacctctttttgtggccaaacctgcacgtttctcagtgagccattacctctc

SEQ ID NO: 138304 - DNA, 80 bp, synthetic construct
  misc_feature 1..80: note = Artificially Synthesized Probe
  source 1..80: mol_type = other DNA
tggatgatttttattgatgtcttcaaatttattgattctttactttgtcatattcatttaagtattaaagcccttgtaaa

SEQ ID NO: 138305 - DNA, 80 bp, synthetic construct; identical to SEQ ID NO: 43417
  misc_feature 1..80: note = Artificially Synthesized Probe
  source 1..80: mol_type = other DNA

SEQ ID NO: 138306 - DNA, 80 bp, synthetic construct
  misc_feature 1..80: note = Artificially Synthesized Probe
  source 1..80: mol_type = other DNA
tccagataggtaattacccatttaggtaattaccatttgaggacgttcgttttcctgtactttcccaatgcttaactctt

SEQ ID NO: 138307 - DNA, 80 bp, synthetic construct
  misc_feature 1..80: note = Artificially Synthesized Probe
  source 1..80: mol_type = other DNA
tttctgatagttaagctttaattgccatctgccttctctcttccttgttcctacatgctttaggtgttctgagtttattc

SEQ ID NO: 138308 - DNA, 80 bp, synthetic construct
  misc_feature 1..80: note = Artificially Synthesized Probe
  source 1..80: mol_type = other DNA
ctttggacatcttcaggataaagccatcaaataaaagtgaggagggtttggatatatttgcatcatggtttgcttcatgg

SEQ ID NO: 138309 - DNA, 80 bp, synthetic construct
  misc_feature 1..80: note = Artificially Synthesized Probe
  source 1..80: mol_type = other DNA
agtctctagtatatttattaaaaatagttctcactattattcccaaggcattatatgtttattgtgagaaactgggagaa

SEQ ID NO: 138310 - DNA, 80 bp, synthetic construct
  misc_feature 1..80: note = Artificially Synthesized Probe
  source 1..80: mol_type = other DNA
ggggatatagtttgatgtttaaatacatgtgtacatggtgaaatgttcaaagcagggtaatcagtaaatccctacttgaa

SEQ ID NO: 138311 - DNA, 80 bp, synthetic construct; identical to SEQ ID NO: 43418
  misc_feature 1..80: note = Artificially Synthesized Probe
  source 1..80: mol_type = other DNA

SEQ ID NO: 138312 - DNA, 80 bp, synthetic construct
  misc_feature 1..80: note = Artificially Synthesized Probe
  source 1..80: mol_type = other DNA
atgtgggaagtgctttcctatgccattcaatattcttggtagatagttttatggcagtgtaacattccatctgtatggag

SEQ ID NO: 138313 - DNA, 80 bp, synthetic construct
  misc_feature 1..80: note = Artificially Synthesized Probe
  source 1..80: mol_type = other DNA
catcaggatagattcctagaagtagaatattgggtttcaaagttaatagtaatgtttaaagttgttattacacacaatta

SEQ ID NO: 138314 - DNA, 80 bp, synthetic construct
  misc_feature 1..80: note = Artificially Synthesized Probe
  source 1..80: mol_type = other DNA
gggtaaatttttacatctcttcattttcaaatgagctgtttgtgttctgtacctattaagtatgccttttttttcttttg

SEQ ID NO: 138315 - DNA, 80 bp, synthetic construct; identical to SEQ ID NO: 43419
  misc_feature 1..80: note = Artificially Synthesized Probe
  source 1..80: mol_type = other DNA

SEQ ID NO: 138316 - DNA, 80 bp, synthetic construct
  misc_feature 1..80: note = Artificially Synthesized Probe
  source 1..80: mol_type = other DNA
attgagtatcttcatgtgtgttacatcttgtcatctgccttgcaatccaaagtttgtaaaaactggtggaaagtaaccaa

SEQ ID NO: 138317 - DNA, 80 bp, synthetic construct
  misc_feature 1..80: note = Artificially Synthesized Probe
  source 1..80: mol_type = other DNA
atgaaaaattgctttcttttcatttttatgttttcatgtgtagcttgacatttgagcaggtgatgttatgtatctgaaag

SEQ ID NO: 138318 - DNA, 80 bp, synthetic construct
  misc_feature 1..80: note = Artificially Synthesized Probe
  source 1..80: mol_type = other DNA
aagcagctgggattaaggtgcccactaccacaccgggctaatttctgctttttttttaagtagagatgggggtttcacca

SEQ ID NO: 138319 - DNA, 80 bp, synthetic construct
  misc_feature 1..80: note = Artificially Synthesized Probe
  source 1..80: mol_type = other DNA
aatgtttttgatattgccttgagagttagggagaatggcagggagattttacttctgtgatatttctgtagacacattgt

SEQ ID NO: 138320 - DNA, 80 bp, synthetic construct; identical to SEQ ID NO: 43420
  misc_feature 1..80: note = Artificially Synthesized Probe
  source 1..80: mol_type = other DNA

SEQ ID NO: 138321 - DNA, 80 bp, synthetic construct
  misc_feature 1..80: note = Artificially Synthesized Probe
  source 1..80: mol_type = other DNA
tacttttgataataaaactgtaaaacagaacaaaatattaagatgcataaaccaatttacatagaaatatgaaacagcaa

SEQ ID NO: 138322 - DNA, 80 bp, synthetic construct
  misc_feature 1..80: note = Artificially Synthesized Probe
  source 1..80: mol_type = other DNA
atggcccactaagcaatcctaattcagctagacattgaattatgaatcataggttactaaattagtacacattagttttc

SEQ ID NO: 138323 - DNA, 80 bp, synthetic construct
  misc_feature 1..80: note = Artificially Synthesized Probe
  source 1..80: mol_type = other DNA
tgagaagatctttagacattttctaagatagtcaatctgtggacaagtatagggcttttttgcattttttccatgtctta

SEQ ID NO: 138324 - DNA, 80 bp, synthetic construct; identical to SEQ ID NO: 43421
  misc_feature 1..80: note = Artificially Synthesized Probe
  source 1..80: mol_type = other DNA

SEQ ID NO: 138325 - DNA, 80 bp, synthetic construct
  misc_feature 1..80: note = Artificially Synthesized Probe
  source 1..80: mol_type = other DNA
atccaggttctgctggttatttgttttttgggttttgtgaagattatatatcgtttgcgttgagtattagataacagtag

SEQ ID NO: 138326 - DNA, 80 bp, synthetic construct
  misc_feature 1..80: note = Artificially Synthesized Probe
  source 1..80: mol_type = other DNA
tcagaattgtgaataagggattatgaaccttccccgaatatatgttaggagggagatgagagcaaaggtatatgcagata

SEQ ID NO: 138327 - DNA, 80 bp, synthetic construct; identical to SEQ ID NO: 43422
  misc_feature 1..80: note = Artificially Synthesized Probe
  source 1..80: mol_type = other DNA

SEQ ID NO: 138328 - DNA, 80 bp, synthetic construct
  misc_feature 1..80: note = Artificially Synthesized Probe
  source 1..80: mol_type = other DNA
ggtttgagaaaggctatatattcttctaatatacattagaaaaaactgcaggatttggccataagagggcttggataaga

SEQ ID NO: 138329 - DNA, 80 bp, synthetic construct
  misc_feature 1..80: note = Artificially Synthesized Probe
  source 1..80: mol_type = other DNA
ttcaaagtgaataattcagagactgtttcagaagttagtagtagggagagagatgagggtgttaggtttgggctatttga

SEQ ID NO: 138330 - DNA, 80 bp, synthetic construct
  misc_feature 1..80: note = Artificially Synthesized Probe
  source 1..80: mol_type = other DNA
tacagtttgcaaataaccttccaaatgttcatgtgaaattttccaattttttgtctcaatgagagagcagaataaacctc

SEQ ID NO: 138331 - DNA, 80 bp, synthetic construct
  misc_feature 1..80: note = Artificially Synthesized Probe
  source 1..80: mol_type = other DNA
ctggcagtaactagctttacctgctttttacctagctttttcaccttaaagattatgatgtgcctgctgagattccttct

SEQ ID NO: 138332 - DNA, 80 bp, synthetic construct
  misc_feature 1..80: note = Artificially Synthesized Probe
  source 1..80: mol_type = other DNA
cgacctgaaaggcctgtgtgcttctgactctcttagatggtggcggaaggcttggcagtgaatgcagttaccagtggaga

SEQ ID NO: 138333 - DNA, 80 bp, synthetic construct; identical to SEQ ID NO: 43423
  misc_feature 1..80: note = Artificially Synthesized Probe
  source 1..80: mol_type = other DNA

SEQ ID NO: 138334 - DNA, 80 bp, synthetic construct
  misc_feature 1..80: note = Artificially Synthesized Probe
  source 1..80: mol_type = other DNA
aatttgttgcttctactaaaatgaggggcaggtagtactattatggagtgatggtccgtggaagagaacaatatacttat

SEQ ID NO: 138335 - DNA, 80 bp, synthetic construct
  misc_feature 1..80: note = Artificially Synthesized Probe
  source 1..80: mol_type = other DNA
gattttttaataagccttttctccactagaggaatggtttacatagtatggattctcatgtgctagatgctccagagaag

SEQ ID NO: 138336 - DNA, 80 bp, synthetic construct; identical to SEQ ID NO: 43424
  misc_feature 1..80: note = Artificially Synthesized Probe
  source 1..80: mol_type = other DNA

SEQ ID NO: 138337 - DNA, 80 bp, synthetic construct
  misc_feature 1..80: note = Artificially Synthesized Probe
  source 1..80: mol_type = other DNA
aatatagacagaggtaatttgatcatagaatttggcagtgatgcattatatagtcaataacttgaagtattgaacagctt

SEQ ID NO: 138338 - DNA, 80 bp, synthetic construct
  misc_feature 1..80: note = Artificially Synthesized Probe
  source 1..80: mol_type = other DNA
tcatgttcatgatcatggtacctgctcttcaatgctgtggaaggaaattgtgcatggaaattggtttggaattttcagtg

SEQ ID NO: 138339 - DNA, 80 bp, synthetic construct
  misc_feature 1..80: note = Artificially Synthesized Probe
  source 1..80: mol_type = other DNA
gccatcctctttaaaaaattagcacgatgacaggtcatttaaccccttcctgttgatacttggatgtttcacttttcctc

SEQ ID NO: 138340 - DNA, 80 bp, synthetic construct; identical to SEQ ID NO: 43425
  misc_feature 1..80: note = Artificially Synthesized Probe
  source 1..80: mol_type = other DNA

SEQ ID NO: 138341 - DNA, 80 bp, synthetic construct; identical to SEQ ID NO: 43295
  misc_feature 1..80: note = Artificially Synthesized Probe
  source 1..80: mol_type = other DNA

SEQ ID NO: 138342 - DNA, 80 bp, synthetic construct
  misc_feature 1..80: note = Artificially Synthesized Probe
  source 1..80: mol_type = other DNA
gagcattttgttcagctggtcatgaagtaaaagcataaggaggatataaaagtccaatcatcccccttaagaatttttga

SEQ ID NO: 138343 - DNA, 80 bp, synthetic construct
  misc_feature 1..80: note = Artificially Synthesized Probe
  source 1..80: mol_type = other DNA
ctttagaaggagagaagaatattttttatcttgatttttcttgaaactctgtaggctctcctgtgtttttggcattgatt

SEQ ID NO: 138344 - DNA, 80 bp, synthetic construct
  misc_feature 1..80: note = Artificially Synthesized Probe
  source 1..80: mol_type = other DNA
ctcatggattgtactagtcgaattccatcccatctgattctatgatctgataatcctgtgggttggctagtcatgaattt

SEQ ID NO: 138345 - DNA, 80 bp, synthetic construct
  misc_feature 1..80: note = Artificially Synthesized Probe
  source 1..80: mol_type = other DNA
taattaggagtaatgaagtcagaaaactttaattttgacatcttggattttgagaagatgagtgtagtaagcactgctaa

SEQ ID NO: 138346 - DNA, 80 bp, synthetic construct; identical to SEQ ID NO: 43426
  misc_feature 1..80: note = Artificially Synthesized Probe
  source 1..80: mol_type = other DNA

SEQ ID NO: 138347 - DNA, 80 bp, synthetic construct
  misc_feature 1..80: note = Artificially Synthesized Probe
  source 1..80: mol_type = other DNA
gagttaaagcctcagagaggtaaagagaccaaaatagcttatacaaagtaacctaggtaggttttcagttatatcagaac

SEQ ID NO: 138348 - DNA, 80 bp, synthetic construct
  misc_feature 1..80: note = Artificially Synthesized Probe
  source 1..80: mol_type = other DNA
aacttactggtgtagactgtcttgtgtttcccaagcttagtttgttttgttgtgtttttcctgctttctgtaagaccagg

SEQ ID NO: 138349 - DNA, 80 bp, synthetic construct; identical to SEQ ID NO: 43427
  misc_feature 1..80: note = Artificially Synthesized Probe
  source 1..80: mol_type = other DNA

SEQ ID NO: 138350 - DNA, 80 bp, synthetic construct
  misc_feature 1..80: note = Artificially Synthesized Probe
  source 1..80: mol_type = other DNA
tgaataataacctcctatttccccccaaaatcgaaataactaagtctgtcagatagtttttctacctatcatagtgttca

SEQ ID NO: 138351 - DNA, 80 bp, synthetic construct
  misc_feature 1..80: note = Artificially Synthesized Probe
  source 1..80: mol_type = other DNA
tcagtcagtctaaacattgaagcagtctaaaagttaaataagatttaatattctttgattggagttacacatagacatgg

SEQ ID NO: 138352 - DNA, 80 bp, synthetic construct
  misc_feature 1..80: note = Artificially Synthesized Probe
  source 1..80: mol_type = other DNA
gttagtatccagcagggtgactacaaatcagtaagaacaacagaaaaggggacaaatgacctaagtaggcatttcacaga

SEQ ID NO: 138353 - DNA, 80 bp, synthetic construct
  misc_feature 1..80: note = Artificially Synthesized Probe
  source 1..80: mol_type = other DNA
ttatgcacttcattagcttatagaaaaattgaaatgctgcaataattgtaaattacagtatgtaatctgtgcctgaacct

SEQ ID NO: 138354 - DNA, 80 bp, synthetic construct
  misc_feature 1..80: note = Artificially Synthesized Probe
  source 1..80: mol_type = other DNA
gaagtactactatacaatccatgtctaattttaaaaaatgttattgctattccattttatctgtttcttatcatttgatt

SEQ ID NO: 138355 - DNA, 80 bp, synthetic construct; identical to SEQ ID NO: 43428
  misc_feature 1..80: note = Artificially Synthesized Probe
  source 1..80: mol_type = other DNA

SEQ ID NO: 138356 - DNA, 80 bp, synthetic construct
  misc_feature 1..80: note = Artificially Synthesized Probe
  source 1..80: mol_type = other DNA
tgctcgttgctcagtccctggcatctttttttttctgagaagccttaggcccttcaaatttactggttattttttttctc

SEQ ID NO: 138357 - DNA, 80 bp, synthetic construct
  misc_feature 1..80: note = Artificially Synthesized Probe
  source 1..80: mol_type = other DNA
ttccagcagtatgcagaaggaaaccagtaaatcctcaatgtcacgccactcattgagacttggttgctctttttactcta

SEQ ID NO: 138358 - DNA, 80 bp, synthetic construct
  misc_feature 1..80: note = Artificially Synthesized Probe
  source 1..80: mol_type = other DNA
cacttgaaaaggtagaccttgtacctcaatcggctcacgaatactgttgggacacctgtgaaaacttagttgttttaggt

SEQ ID NO: 138359 - DNA, 80 bp, synthetic construct; identical to SEQ ID NO: 43429
  misc_feature 1..80: note = Artificially Synthesized Probe
  source 1..80: mol_type = other DNA

SEQ ID NO: 138360 - DNA, 80 bp, synthetic construct
  misc_feature 1..80: note = Artificially Synthesized Probe
  source 1..80: mol_type = other DNA
tctaggttgacatgtacaaacaaggctgacatttagttgagatgtttcttcgagtgcaggaatctcagtgagattactta

SEQ ID NO: 138361 - DNA, 80 bp, synthetic construct
  misc_feature 1..80: note = Artificially Synthesized Probe
  source 1..80: mol_type = other DNA
tgtcctttacatattgactagttacagtgaaagaacattggttgaaatgaaattagaatttttctttagcagctagcaac

SEQ ID NO: 138362 - DNA, 80 bp, synthetic construct
  misc_feature 1..80: note = Artificially Synthesized Probe
  source 1..80: mol_type = other DNA
atattgttgggaggacaggaaacaactggaatgcttatatacagctggtggaagtgataggctgcctttgggagtatcta

SEQ ID NO: 138363 - DNA, 80 bp, synthetic construct
  misc_feature 1..80: note = Artificially Synthesized Probe
  source 1..80: mol_type = other DNA
ttttatgctgtgtgatatttgtagaatattttccaagacctgttatgttgtttttccacgcctagtagctgatacagtta

SEQ ID NO: 138364 - DNA, 80 bp, synthetic construct
  misc_feature 1..80: note = Artificially Synthesized Probe
  source 1..80: mol_type = other DNA
actttaattactggctgccgtaatgtttcctatccataactgtctacacaatggactgtttctgagcagagggtatggcc

SEQ ID NO: 138365 - DNA, 80 bp, synthetic construct; identical to SEQ ID NO: 43430
  misc_feature 1..80: note = Artificially Synthesized Probe
  source 1..80: mol_type = other DNA

SEQ ID NO: 138366 - DNA, 80 bp, synthetic construct
  misc_feature 1..80: note = Artificially Synthesized Probe
  source 1..80: mol_type = other DNA
agtctttggctagtttgtattggcaaactctatgtactcctggaataaatgtgaacttgcagaatgcaaggaaaaggtca

SEQ ID NO: 138367 - DNA, 80 bp, synthetic construct
  misc_feature 1..80: note = Artificially Synthesized Probe
  source 1..80: mol_type = other DNA
ttagattacagcaatggagagcttgctgtgttttgcactcaattatattgtgggtgggttttttgagatagcaaaatatt

SEQ ID NO: 138368 - DNA, 80 bp, synthetic construct
  misc_feature 1..80: note = Artificially Synthesized Probe
  source 1..80: mol_type = other DNA
cttaaattttaggttttagcttgctttagacttattacctagtgggcttcattgagtcctagaatgcattgattttcact

SEQ ID NO: 138369 - DNA, 80 bp, synthetic construct; identical to SEQ ID NO: 43431
  misc_feature 1..80: note = Artificially Synthesized Probe
  source 1..80: mol_type = other DNA

SEQ ID NO: 138370 - DNA, 80 bp, synthetic construct
  misc_feature 1..80: note = Artificially Synthesized Probe
  source 1..80: mol_type = other DNA
ctcattaggagagaaaaatagtccaggctcctaaaagtatcttcatgagaagtatcagctcctaattagcagtgactgta

SEQ ID NO: 138371 - DNA, 80 bp, synthetic construct
  misc_feature 1..80: note = Artificially Synthesized Probe
  source 1..80: mol_type = other DNA
gcttgcacaagctttttaaaatatcattgctgccactgaatacatctataatttatttattcaagaatgttggaggcatt

SEQ ID NO: 138372 - DNA, 80 bp, synthetic construct
  misc_feature 1..80: note = Artificially Synthesized Probe
  source 1..80: mol_type = other DNA
ttttgaaaatactatcttactctggagaaatgtaacacaccattgtgctttgctaaaagctaaactaatcaatacataat

SEQ ID NO: 138373 - DNA, 80 bp, synthetic construct
  misc_feature 1..80: note = Artificially Synthesized Probe
  source 1..80: mol_type = other DNA
tgggccaggtttctgactgtcaagccctgtagggaatgtgatgctaaaatatgaaaggtattaccctagagaaactcatg

SEQ ID NO: 138374 - DNA, 80 bp, synthetic construct; identical to SEQ ID NO: 43432
  misc_feature 1..80: note = Artificially Synthesized Probe
  source 1..80: mol_type = other DNA

SEQ ID NO: 138375 - DNA, 80 bp, synthetic construct
  misc_feature 1..80: note = Artificially Synthesized Probe
  source 1..80: mol_type = other DNA
agtaaaaataagtattgtcatttataatattaatcatgagaatcttgctatattttgttatatttatgaacatttaaatg

SEQ ID NO: 138376 - DNA, 80 bp, synthetic construct
  misc_feature 1..80: note = Artificially Synthesized Probe
  source 1..80: mol_type = other DNA
tggtaatcatgtcatatgtgcactgtcttttctatattcactgttcaattaaaaaggggacgttgggccaggtgcggtgg

SEQ ID NO: 138377 - DNA, 80 bp, synthetic construct; identical to SEQ ID NO: 43433
  misc_feature 1..80: note = Artificially Synthesized Probe
  source 1..80: mol_type = other DNA

SEQ ID NO: 138378 - DNA, 80 bp, synthetic construct
  misc_feature 1..80: note = Artificially Synthesized Probe
  source 1..80: mol_type = other DNA
taatgaaaccttgtctctacttgaaatacaaaaacttagctgggtgtggtggtgtgctcctgtagtcccagctacctgtg

SEQ ID NO: 138379 - DNA, 80 bp, synthetic construct
  misc_feature 1..80: note = Artificially Synthesized Probe
  source 1..80: mol_type = other DNA
agagttcatcctgactgaatgaacactggaggaggaatactgggatttctgaaaccattttcatatgtatcatagaatag

SEQ ID NO: 138380 - DNA, 80 bp, synthetic construct
  misc_feature 1..80: note = Artificially Synthesized Probe
  source 1..80: mol_type = other DNA
ttttaaagaatattatatctcagtgttaggagctgcttgattagcttttttttagtgccagtaaattttttcatgccaca

SEQ ID NO: 138381 - DNA, 80 bp, synthetic construct
  misc_feature 1..80: note = Artificially Synthesized Probe
  source 1..80: mol_type = other DNA
tccagttgggagtgcttagaacttttgctttttcataattagtaatgtcctctcccacagaagccactgccagaggtggg

SEQ ID NO: 138382 - DNA, 80 bp, synthetic construct; identical to SEQ ID NO: 43434
  misc_feature 1..80: note = Artificially Synthesized Probe
  source 1..80: mol_type = other DNA

SEQ ID NO: 138383 - DNA, 80 bp, synthetic construct; identical to SEQ ID NO: 43296
  misc_feature 1..80: note = Artificially Synthesized Probe
  source 1..80: mol_type = other DNA

SEQ ID NO: 138384 - DNA, 80 bp, synthetic construct
  misc_feature 1..80: note = Artificially Synthesized Probe
  source 1..80: mol_type = other DNA
agctgggctaatatttttgaaaggaggtacatgattataagcaaacgtataaccttacctccaaaaatacactatgaagg

SEQ ID NO: 138385 - DNA, 80 bp, synthetic construct
  misc_feature 1..80: note = Artificially Synthesized Probe
  source 1..80: mol_type = other DNA
aataacccaacttgtatgacattctgagcacggaattaggggaaattctatacaagtaaaaaatatatgcccagaacctc

SEQ ID NO: 138386 - DNA, 80 bp, synthetic construct; identical to SEQ ID NO: 43435
  misc_feature 1..80: note = Artificially Synthesized Probe
  source 1..80: mol_type = other DNA

SEQ ID NO: 138387 - DNA, 80 bp, synthetic construct
  misc_feature 1..80: note = Artificially Synthesized Probe
  source 1..80: mol_type = other DNA
agtctgcctctctgataaggactcttatgactgcatttattttagagctcaccaaggtaattcaggtaaatcttctgatg

SEQ ID NO: 138388 - DNA, 80 bp, synthetic construct
  misc_feature 1..80: note = Artificially Synthesized Probe
  source 1..80: mol_type = other DNA
tgcatgtttagtccaaagtactagaaagaaattgcacccacccttgtctctttacgtgcacaggggagtacagtgattgg

SEQ ID NO: 138389 - DNA, 80 bp, synthetic construct
  misc_feature 1..80: note = Artificially Synthesized Probe
  source 1..80: mol_type = other DNA
ctgttgcttcatcacaggtggacctttagatttccctgctgggaggtaagtagttactagaccagggtctagacgaaccc

SEQ ID NO: 138390 - DNA, 80 bp, synthetic construct; identical to SEQ ID NO: 43436
  misc_feature 1..80: note = Artificially Synthesized Probe
  source 1..80: mol_type = other DNA

SEQ ID NO: 138391 - DNA, 80 bp, synthetic construct
  misc_feature 1..80: note = Artificially Synthesized Probe
  source 1..80: mol_type = other DNA
tacatatatacacacatacatacacacacttatgtggacttatgttcacgctcgtgtgtgaatgtgtgtatatgtgtatc

SEQ ID NO: 138392 - DNA, 80 bp, synthetic construct
  misc_feature 1..80: note = Artificially Synthesized Probe
  source 1..80: mol_type = other DNA
gactgtaatgaaaaacagctagaatctaaatgatttataagctctctgaataaaattgatgaaaggatggtgttctatgt

SEQ ID NO: 138393 - DNA, 80 bp, synthetic construct
  misc_feature 1..80: note = Artificially Synthesized Probe
  source 1..80: mol_type = other DNA
aagaaaaacaagtgatacatgcaagactcaagtcggtggataactgtataagaaggaaggtgatgggaacacagagggac

SEQ ID NO: 138394 - DNA, 80 bp, synthetic construct
  misc_feature 1..80: note = Artificially Synthesized Probe
  source 1..80: mol_type = other DNA
cagatatacatacctaagcttggtgacaagaagggatactccttggcatgaaaaccgcccctcagatatcagtcatagaa

SEQ ID NO: 138395 - DNA, 80 bp, synthetic construct; identical to SEQ ID NO: 43437
  misc_feature 1..80: note = Artificially Synthesized Probe
  source 1..80: mol_type = other DNA

SEQ ID NO: 138396 - DNA, 80 bp, synthetic construct
  misc_feature 1..80: note = Artificially Synthesized Probe
  source 1..80: mol_type = other DNA
atattctcacagaacatgcttttaatgaaggaactattacataagggagtcttgtctttccctcttcctgtaacatttaa

SEQ ID NO: 138397 - DNA, 80 bp, synthetic construct
  misc_feature 1..80: note = Artificially Synthesized Probe
  source 1..80: mol_type = other DNA
cttcagttgctttttttctgtaagaactgcagttttatttggttcaaactaatatttttcagagatagtttgaatcatgc

SEQ ID NO: 138398 - DNA, 80 bp, synthetic construct
  misc_feature 1..80: note = Artificially Synthesized Probe
  source 1..80: mol_type = other DNA
ttacttgtagaatgtagctgcagtagctcaaagtatccatttgctcacatttttctcctgtgtactccaagagcagtgat

SEQ ID NO: 138399 - DNA, 80 bp, synthetic construct
  misc_feature 1..80: note = Artificially Synthesized Probe
  source 1..80: mol_type = other DNA
ccaattaggatactttttttaatagtccagcaatagatagggaaacccttaggtaatgaaccagcaaaggcggtggatgg

SEQ ID NO: 138400 - DNA, 80 bp, synthetic construct; identical to SEQ ID NO: 43438
  misc_feature 1..80: note = Artificially Synthesized Probe
  source 1..80: mol_type = other DNA

SEQ ID NO: 138401 - DNA, 80 bp, synthetic construct
  misc_feature 1..80: note = Artificially Synthesized Probe
  source 1..80: mol_type = other DNA
aagatgtctcgattcttgcttaatggtttggttctttagttgtaagataatatgatggtaatgtctaactttcatattta

SEQ ID NO: 138402 - DNA, 80 bp, synthetic construct
  misc_feature 1..80: note = Artificially Synthesized Probe
  source 1..80: mol_type = other DNA
tgtcatgttttaagatctgtgaagttccctaattggtattcatacaggtatttttaatggaaataacttcttgcaatcta

SEQ ID NO: 138403 - DNA, 80 bp, synthetic construct
  misc_feature 1..80: note = Artificially Synthesized Probe
  source 1..80: mol_type = other DNA
atttttgaaattgtgatgtgttttagagttaattggtacattaatttgttttttcttttaaaacttttagaaaagctttt

SEQ ID NO: 138404 - DNA, 80 bp, synthetic construct
  misc_feature 1..80: note = Artificially Synthesized Probe
  source 1..80: mol_type = other DNA
tttctgtttgtgtgaaaaagatttgatggagatggagagacaggttcttggaggaatgtgatagaacttaactcttcagt

SEQ ID NO: 138405 - DNA, 80 bp, synthetic construct; identical to SEQ ID NO: 43439
  misc_feature 1..80: note = Artificially Synthesized Probe
  source 1..80: mol_type = other DNA

SEQ ID NO: 138406 - DNA, 80 bp, synthetic construct
  misc_feature 1..80: note = Artificially Synthesized Probe
  source 1..80: mol_type = other DNA
gattgatggcttatgacctttgacctgactcatggcctagtcaacttttctttgtgctagcctgggtttgctttgtgctt

SEQ ID NO: 138407 - DNA, 80 bp, synthetic construct
  misc_feature 1..80: note = Artificially Synthesized Probe
  source 1..80: mol_type = other DNA
agacttaggagtgattttagtaggggagaaaacaagtttgtggacaggaccaaaatacttggaagttgatggatttagca

SEQ ID NO: 138408 - DNA, 80 bp, synthetic construct
  misc_feature 1..80: note = Artificially Synthesized Probe
  source 1..80: mol_type = other DNA
caaaaacaaaccacactaggcaatgtattagtgtgtaatacattactaatgtactaagcagtgtattagtgtgaaatgct

SEQ ID NO: 138409 - DNA, 80 bp, synthetic construct; identical to SEQ ID NO: 43440
  misc_feature 1..80: note = Artificially Synthesized Probe
  source 1..80: mol_type = other DNA

SEQ ID NO: 138410 - DNA, 80 bp, synthetic construct
  misc_feature 1..80: note = Artificially Synthesized Probe
  source 1..80: mol_type = other DNA
aaggcaacttaataattggttatcttgtggagaatcataaatgtacacctaggatatgaattaaaaagttcctaggattg

SEQ ID NO: 138411 - DNA, 80 bp, synthetic construct
  misc_feature 1..80: note = Artificially Synthesized Probe
  source 1..80: mol_type = other DNA
atctcacctgacaaatgtgaagatcagatgtgaaggatttggaaaatactgtaaatttagatgctgttaaagcataaagt

SEQ ID NO: 138412 - DNA, 80 bp, synthetic construct
  misc_feature 1..80: note = Artificially Synthesized Probe
  source 1..80: mol_type = other DNA
ctttaacatactttctccatcaattttgggaaaacagaacaaaatgctgcaggtggtgaggatatatgaggaatatcaat

SEQ ID NO: 138413 - DNA, 80 bp, synthetic construct
  misc_feature 1..80: note = Artificially Synthesized Probe
  source 1..80: mol_type = other DNA
tctgtctgtgtatagcagcctgggatttcttgcatatctcttctttattagttggtttatcactccaacttaaatacagt

SEQ ID NO: 138414 - DNA, 80 bp, synthetic construct
  misc_feature 1..80: note = Artificially Synthesized Probe
  source 1..80: mol_type = other DNA
cgagtttatatgccattaaatgaatgaagattgcatcttgcagtgactctgtggggtaggcgttattaataagtgttatc

SEQ ID NO: 138415 - DNA, 80 bp, synthetic construct
  misc_feature 1..80: note = Artificially Synthesized Probe
  source 1..80: mol_type = other DNA
agttgcaaacaataggacagttccattggtaccttttaagcagagcaaagtggctccacttcaaaaacactggttcttgc

SEQ ID NO: 138416 - DNA, 80 bp, synthetic construct; identical to SEQ ID NO: 43441
  misc_feature 1..80: note = Artificially Synthesized Probe
  source 1..80: mol_type = other DNA

SEQ ID NO: 138417 - DNA, 80 bp, synthetic construct
  misc_feature 1..80: note = Artificially Synthesized Probe
  source 1..80: mol_type = other DNA
aaattcaatttaaaattttttcttttttaataaactgtatcttactgcaagtttttcactttatgaactattttttaaag

SEQ ID NO: 138418 - DNA, 80 bp, synthetic construct
  misc_feature 1..80: note = Artificially Synthesized Probe
  source 1..80: mol_type = other DNA
tttattgttttacttttaaaacttttttgttaaaaactgtgacacaaacacattagcttaggcctacacagggtaaggat

SEQ ID NO: 138419 - DNA, 80 bp, synthetic construct
  misc_feature 1..80: note = Artificially Synthesized Probe
  source 1..80: mol_type = other DNA
aaggacctgcctgaagctgttttacacttaacttaaaaaaaaaaacgataagtaaaaggagtacactctaaagtaatgac

SEQ ID NO: 138420 - DNA, 80 bp, synthetic construct; identical to SEQ ID NO: 43442
  misc_feature 1..80: note = Artificially Synthesized Probe
  source 1..80: mol_type = other DNA

SEQ ID NO: 138421 - DNA, 80 bp, synthetic construct
  misc_feature 1..80: note = Artificially Synthesized Probe
  source 1..80: mol_type = other DNA
tttttatttcttgttgcaaaggaacatatcattaacaattaagtatttacctgcttaaacagaaaacagaaccgtgattt

SEQ ID NO: 138422 - DNA, 80 bp, synthetic construct
  misc_feature 1..80: note = Artificially Synthesized Probe
  source 1..80: mol_type = other DNA
gaaaaattatttcctcataatgacttgacttggttgatttatggttaaatgtcatttagtacaaccattgagaggctttc

SEQ ID NO: 138423 - DNA, 80 bp, synthetic construct; identical to SEQ ID NO: 43443
  misc_feature 1..80: note = Artificially Synthesized Probe
  source 1..80: mol_type = other DNA

SEQ ID NO: 138424 - DNA, 80 bp, synthetic construct
  misc_feature 1..80: note = Artificially Synthesized Probe
  source 1..80: mol_type = other DNA
atacatttatatacacgtatgtttttgggtagaattttaaaatgaatctaagtgaagtttaatggtttgtaacattgaag

SEQ ID NO: 138425 - DNA, 80 bp, synthetic construct; identical to SEQ ID NO: 43297
  misc_feature 1..80: note = Artificially Synthesized Probe
  source 1..80: mol_type = other DNA

SEQ ID NO: 138426 - DNA, 80 bp, synthetic construct
  misc_feature 1..80: note = Artificially Synthesized Probe
  source 1..80: mol_type = other DNA
tatgttcaactattttaatgctataaagtttcttttcccaggttaagctcttgtgattaggcatgactcagggcttgcaa

SEQ ID NO: 138427 - DNA, 80 bp, synthetic construct
  misc_feature 1..80: note = Artificially Synthesized Probe
  source 1..80: mol_type = other DNA
agtcaaattcttgaggactcctaatatatatctggacaacactgatcagaaaaagcttgggttttactattgagaacatg

SEQ ID NO: 138428 - DNA, 80 bp, synthetic construct
  misc_feature 1..80: note = Artificially Synthesized Probe
  source 1..80: mol_type = other DNA
ctgcttcagttttatcccttttgactttaaaagccaaagggaaaaatttcttccaatcactttcaatctatagaaaatga

SEQ ID NO: 138429 - DNA, 80 bp, synthetic construct; identical to SEQ ID NO: 43444
  misc_feature 1..80: note = Artificially Synthesized Probe
  source 1..80: mol_type = other DNA

SEQ ID NO: 138430 - DNA, 80 bp, synthetic construct
  misc_feature 1..80: note = Artificially Synthesized Probe
  source 1..80: mol_type = other DNA
aagccagtttgtgttgtggagttctagatgaggtcttcatgggtgctgaccataaaaagttcatcaaagtaatgaggcga

SEQ ID NO: 138431 - DNA, 80 bp, synthetic construct
  misc_feature 1..80: note = Artificially Synthesized Probe
  source 1..80: mol_type = other DNA
aacattcagcccacaaaactctcatttgttagccattgccactgtaccatgcaaaatagcttccatctcagtcaattttc

SEQ ID NO: 138432 - DNA, 80 bp, synthetic construct; identical to SEQ ID NO: 43445
  misc_feature 1..80: note = Artificially Synthesized Probe
  source 1..80: mol_type = other DNA

SEQ ID NO: 138433 - DNA, 80 bp, synthetic construct
  misc_feature 1..80: note = Artificially Synthesized Probe
  source 1..80: mol_type = other DNA
cagagatgtcagaaaaaaattcctgtatttattgtttgagatgccttaccacaaatttcagaatttattggctcccgaat

SEQ ID NO: 138434 - DNA, 80 bp, synthetic construct
  misc_feature 1..80: note = Artificially Synthesized Probe
  source 1..80: mol_type = other DNA
atacaggaggcaaaggaaattaaagaagtatgataagttattggagatgtatcttattggaaactataaaaattagaaga

SEQ ID NO: 138435 - DNA, 80 bp, synthetic construct
  misc_feature 1..80: note = Artificially Synthesized Probe
  source 1..80: mol_type = other DNA
tgtaagcttctcagactggtttacattttctcacacttttcttctcttccaggaatatcatccttctcatggaaatccta

SEQ ID NO: 138436 - DNA, 80 bp, synthetic construct
  misc_feature 1..80: note = Artificially Synthesized Probe
  source 1..80: mol_type = other DNA
ctttcagttcattagaaagtggtagtgtcctcccacaagattctggaaatcatacttctttgcttaggcaatttcttgct

SEQ ID NO: 138437 - DNA, 80 bp, synthetic construct
  misc_feature 1..80: note = Artificially Synthesized Probe
  source 1..80: mol_type = other DNA
gtgaactttaaaataaaacctaaatgagtggtgcagtatgttctttttcagctgagggaaagtcatttactttttaactt

SEQ ID NO: 138438 - DNA, 80 bp, synthetic construct; identical to SEQ ID NO: 43446
  misc_feature 1..80: note = Artificially Synthesized Probe
  source 1..80: mol_type = other DNA

SEQ ID NO: 138439 - DNA, 80 bp, synthetic construct
  misc_feature 1..80: note = Artificially Synthesized Probe
  source 1..80: mol_type = other DNA
cttgctagcagtgtatgaatttttgaatttctctgtatcctcaacaagacttgttgtttgtctttttgattatagctcac

SEQ ID NO: 138440 - DNA, 80 bp, synthetic construct
  misc_feature 1..80: note = Artificially Synthesized Probe
  source 1..80: mol_type = other DNA
tttttattgagttttctgaaatttttattctggatattgtctttttaatttattgattgtgtcctttgaagcacaaactt

SEQ ID NO: 138441 - DNA, 80 bp, synthetic construct; identical to SEQ ID NO: 43447
  misc_feature 1..80: note = Artificially Synthesized Probe
  source 1..80: mol_type = other DNA

SEQ ID NO: 138442 - DNA, 80 bp, synthetic construct
  misc_feature 1..80: note = Artificially Synthesized Probe
  source 1..80: mol_type = other DNA
ctctcccctccccccaccacacgacaggcccccatgtgtgatgttccccaccctgtgtccaagtgttctcattgttcaat

SEQ ID NO: 138443 - DNA, 80 bp, synthetic construct
  misc_feature 1..80: note = Artificially Synthesized Probe
  source 1..80: mol_type = other DNA
ttaatccagtctatcattgatggacatctgggttagtaccaagtctttgctattgtgaatagtgccgcagtagacataca

SEQ ID NO: 138444 - DNA, 80 bp, synthetic construct
  misc_feature 1..80: note = Artificially Synthesized Probe
  source 1..80: mol_type = other DNA
aaaagtgttcctatttctccatatcctctccagcacctgttgttgcctgactttttaaatgattgccattctgactggtg

SEQ ID NO: 138445 - DNA, 80 bp, synthetic construct; identical to SEQ ID NO: 43448
  misc_feature 1..80: note = Artificially Synthesized Probe
  source 1..80: mol_type = other DNA

SEQ ID NO: 138446 - DNA, 80 bp, synthetic construct
  misc_feature 1..80: note = Artificially Synthesized Probe
  source 1..80: mol_type = other DNA
atgaagtccttgcccatgcctatgtcctgaatggtagtgcctaggttttcttctagggtttttatggttttaggtctaac

SEQ ID NO: 138447 - DNA, 80 bp, synthetic construct
  misc_feature 1..80: note = Artificially Synthesized Probe
  source 1..80: mol_type = other DNA
agatggttgtagacgtgtggtattatttctgagggctctgttctgttccattggtttatatctctgttttggtaccagta

SEQ ID NO: 138448 - DNA, 80 bp, synthetic construct
  misc_feature 1..80: note = Artificially Synthesized Probe
  source 1..80: mol_type = other DNA
ttgaacttaacatgtataggaaaaacaaaaagatgactctagaagtcaaattacctctcctgtgaagccaaacagcactg

SEQ ID NO: 138449 - DNA, 80 bp, synthetic construct
  misc_feature 1..80: note = Artificially Synthesized Probe
  source 1..80: mol_type = other DNA
gtcattggtggcttgatggggatggcattgaatctataaattaccttgggcagtatggccattttcatggtattgattct

SEQ ID NO: 138450 - DNA, 80 bp, synthetic construct; identical to SEQ ID NO: 43449
  misc_feature 1..80: note = Artificially Synthesized Probe
  source 1..80: mol_type = other DNA

SEQ ID NO: 138451 - DNA, 80 bp, synthetic construct
  misc_feature 1..80: note = Artificially Synthesized Probe
  source 1..80: mol_type = other DNA
tgaataggagtggtgagagagggcatccttgtcttgtgccagttttcaaagggcatgcttccagtttttgcccattcagt

SEQ ID NO: 138452 - DNA, 80 bp, synthetic construct
  misc_feature 1..80: note = Artificially Synthesized Probe
  source 1..80: mol_type = other DNA
tgtttatatgatggattacgtttattgatttgtgtatgttgaaccagccttgcatcccagggatgaagccaacttgatcg

SEQ ID NO: 138453 - DNA, 80 bp, synthetic construct
  misc_feature 1..80: note = Artificially Synthesized Probe
  source 1..80: mol_type = other DNA
tgagttagggaggattctctctttttctattgattggaatggtttcagaaggaatgataacagctcctctttgtagaatt

SEQ ID NO: 138454 - DNA, 80 bp, synthetic construct
  misc_feature 1..80: note = Artificially Synthesized Probe
  source 1..80: mol_type = other DNA
ttttctagtttatttgtgtagaggtgtttatagtattctctgatggtagtttgtatttctgtgggattggtggtgctatc

SEQ ID NO: 138455 - DNA, 80 bp, synthetic construct; identical to SEQ ID NO: 43450
  misc_feature 1..80: note = Artificially Synthesized Probe
  source 1..80: mol_type = other DNA

SEQ ID NO: 138456 - DNA, 80 bp, synthetic construct
  misc_feature 1..80: note = Artificially Synthesized Probe
  source 1..80: mol_type = other DNA
ttttgttatgtacccagtagtcattcaggagcaggttgttcagtttccatgtagttgtgtggtttcgagtgtgtttctta

SEQ ID NO: 138457 - DNA, 80 bp, synthetic construct
  misc_feature 1..80: note = Artificially Synthesized Probe
  source 1..80: mol_type = other DNA
cgatgtgatgctgagaagaatgtatattctgttgattcggggtggagagttctgtagatgtctattagatccgcttggtg

SEQ ID NO: 138458 - DNA, 80 bp, synthetic construct; identical to SEQ ID NO: 43451
  misc_feature 1..80: note = Artificially Synthesized Probe
  source 1..80: mol_type = other DNA

SEQ ID NO: 138459 - DNA, 80 bp, synthetic construct; identical to SEQ ID NO: 43298
  misc_feature 1..80: note = Artificially Synthesized Probe
  source 1..80: mol_type = other DNA

SEQ ID NO: 138460 - DNA, 80 bp, synthetic construct
  misc_feature 1..80: note = Artificially Synthesized Probe
  source 1..80: mol_type = other DNA
cgatgggtcttgattctttgtccagtttgcccgtctgtgtcttttaattggaggatttagcccatttacatttaaggtta

SEQ ID NO: 138461 - DNA, 80 bp, synthetic construct
  misc_feature 1..80: note = Artificially Synthesized Probe
  source 1..80: mol_type = other DNA
tcattgatgtatctttccctctctccctccctcccttccttcttccttccttccttcctcctttctggtttttttttttt

SEQ ID NO: 138462 - DNA, 80 bp, synthetic construct
  misc_feature 1..80: note = Artificially Synthesized Probe
  source 1..80: mol_type = other DNA
ttctttctttctttctttctctctctctctttccttccttctttcattcattcgttcattcattcctccctccctccctt

SEQ ID NO: 138463 - DNA, 80 bp, synthetic construct
  misc_feature 1..80: note = Artificially Synthesized Probe
  source 1..80: mol_type = other DNA
gctattcttctgcctcagcctccttagtagctgggattgcaggtgcgcaccaccacacccggctgatttttgtattttta

SEQ ID NO: 138464 - DNA, 80 bp, synthetic construct; identical to SEQ ID NO: 43452
  misc_feature 1..80: note = Artificially Synthesized Probe
  source 1..80: mol_type = other DNA

SEQ ID NO: 138465 - DNA, 80 bp, synthetic construct
  misc_feature 1..80: note = Artificially Synthesized Probe
  source 1..80: mol_type = other DNA
gtcttctgcttcttgtagtgaagttttaaagttttcaatgtatgtcttccacttctattggtaaatttacttctaagtat

SEQ ID NO: 138466 - DNA, 80 bp, synthetic construct
  misc_feature 1..80: note = Artificially Synthesized Probe
  source 1..80: mol_type = other DNA
cctgtcatctgtgaatatgtctttgtagaaggtttttttgactcttcattcagttgctttacttgttatagctctataca

SEQ ID NO: 138467 - DNA, 80 bp, synthetic construct; identical to SEQ ID NO: 43453
  misc_feature 1..80: note = Artificially Synthesized Probe
  source 1..80: mol_type = other DNA

SEQ ID NO: 138468 - DNA, 80 bp, synthetic construct
  misc_feature 1..80: note = Artificially Synthesized Probe
  source 1..80: mol_type = other DNA
attcgtttattttattttatttattatttttaaggaagtcaaatgaggcagtaagaatggagactttctttttttaatat

SEQ ID NO: 138469 - DNA, 80 bp, synthetic construct
  misc_feature 1..80: note = Artificially Synthesized Probe
  source 1..80: mol_type = other DNA
acacatatttgttaatctcccaaatttccttttgttatttgacttctaattttattgtatatgactaaaggaaataaaag

SEQ ID NO: 138470 - DNA, 80 bp, synthetic construct
  misc_feature 1..80: note = Artificially Synthesized Probe
  source 1..80: mol_type = other DNA
caaataaggtaataagaagcctaatagggaaaagaattgtttaacatagttggagtaatgccagtctaaccatcaaatgt

SEQ ID NO: 138471 - DNA, 80 bp, synthetic construct
  misc_feature 1..80: note = Artificially Synthesized Probe
  source 1..80: mol_type = other DNA
ttcaaatcttcctttcattgtttatgtttcacattaagtctatttattactgaaaatgggcttttcaagtctccaaatct

SEQ ID NO: 138472 - DNA, 80 bp, synthetic construct; identical to SEQ ID NO: 43454
  misc_feature 1..80: note = Artificially Synthesized Probe
  source 1..80: mol_type = other DNA

SEQ ID NO: 138473 - DNA, 80 bp, synthetic construct
  misc_feature 1..80: note = Artificially Synthesized Probe
  source 1..80: mol_type = other DNA
caggatttacacgtgctattttgtgtttttctacatgtctttatgccttttttgttatggtattttactgtttcttctta

SEQ ID NO: 138474 - DNA, 80 bp, synthetic construct
  misc_feature 1..80: note = Artificially Synthesized Probe
  source 1..80: mol_type = other DNA
cgaataccaacttaatttcaatactgtataaaagctcctacatacattatttcctcaccccctactttgtcctgttactg

SEQ ID NO: 138475 - DNA, 80 bp, synthetic construct
  misc_feature 1..80: note = Artificially Synthesized Probe
  source 1..80: mol_type = other DNA
ggctggagtgcagtggcatgatctcggctcactggaacctctgtctcctgagttcaagcgattctcctgcctcagccttc

SEQ ID NO: 138476 - DNA, 80 bp, synthetic construct; identical to SEQ ID NO: 43455
  misc_feature 1..80: note = Artificially Synthesized Probe
  source 1..80: mol_type = other DNA

SEQ ID NO: 138477 - DNA, 80 bp, synthetic construct
  misc_feature 1..80: note = Artificially Synthesized Probe
  source 1..80: mol_type = other DNA
atatctcctttgttttcatttgtactgttttgctgatacagaaatttagatgacagtaattttttttcaacactttgaat

SEQ ID NO: 138478 - DNA, 80 bp, synthetic construct
  misc_feature 1..80: note = Artificially Synthesized Probe
  source 1..80: mol_type = other DNA
tgtggacatgtttgagtttttcctatgtggtaattattgagtctcttggatgttaagactaatgttttgcatcagatttg

SEQ ID NO: 138479 - DNA, 80 bp, synthetic construct
  misc_feature 1..80: note = Artificially Synthesized Probe
  source 1..80: mol_type = other DNA
catgaattatggatcagagtttgatatatgattattggatcacttataaaatgaggaatagcagttacaggagtgcatgt

SEQ ID NO: 138480 - DNA, 80 bp, synthetic construct
  misc_feature 1..80: note = Artificially Synthesized Probe
  source 1..80: mol_type = other DNA
caccttcattttgtttctcagactggatcagaaagaccttgctgtattttctgtgactattttcttctgccagttcaaat

SEQ ID NO: 138481 - DNA, 80 bp, synthetic construct
  misc_feature 1..80: note = Artificially Synthesized Probe
  source 1..80: mol_type = other DNA
ttatattttccttttttttttttgaacatttttatgatgctagttgagttagtgtttttgtctagcagtcttatctggga

SEQ ID NO: 138482 - DNA, 80 bp, synthetic construct; identical to SEQ ID NO: 43456
  misc_feature 1..80: note = Artificially Synthesized Probe
  source 1..80: mol_type = other DNA

SEQ ID NO: 138483 - DNA, 80 bp, synthetic construct
  misc_feature 1..80: note = Artificially Synthesized Probe
  source 1..80: mol_type = other DNA
agttatcaactctacctttaccttctttttctacctgtgcaaaggcttaatgttagccagagatgctatggaagattatt

SEQ ID NO: 138484 - DNA, 80 bp, synthetic construct
  misc_feature 1..80: note = Artificially Synthesized Probe
  source 1..80: mol_type = other DNA
tttatgctcagacagctatggtggtaaacagttgcttctgtggttttttgtttgttttttccattgctactgacagttgc

SEQ ID NO: 138485 - DNA, 80 bp, synthetic construct; identical to SEQ ID NO: 43457
  misc_feature 1..80: note = Artificially Synthesized Probe
  source 1..80: mol_type = other DNA

SEQ ID NO: 138486 - DNA, 80 bp, synthetic construct
  misc_feature 1..80: note = Artificially Synthesized Probe
  source 1..80: mol_type = other DNA
cactttcccattctggctgtccctcctctcatggtgattatctatttaggcaaaaatatctgaaaatgcattagacttcc

SEQ ID NO: 138487 - DNA, 80 bp, synthetic construct
  misc_feature 1..80: note = Artificially Synthesized Probe
  source 1..80: mol_type = other DNA
aaaggagcattgtacaataaatgttgcagaagttattgtcagtttgatagggtgagagacatttttatattttgtgtagt

SEQ ID NO: 138488 - DNA, 80 bp, synthetic construct
  misc_feature 1..80: note = Artificially Synthesized Probe
  source 1..80: mol_type = other DNA
tttacaaagcacattgtctgaaaatatttattaattggtttgatattacaagatgtaaaagttacatgttttagagatat

SEQ ID NO: 138489 - DNA, 80 bp, synthetic construct; identical to SEQ ID NO: 43458
  misc_feature 1..80: note = Artificially Synthesized Probe
  source 1..80: mol_type = other DNA

SEQ ID NO: 138490 - DNA, 80 bp, synthetic construct
  misc_feature 1..80: note = Artificially Synthesized Probe
  source 1..80: mol_type = other DNA
atctgttttcatgtatctgtctgtatacttttgtcatgtgtagcttctcctccaaatttcaaattgctagtatttgtagg

SEQ ID NO: 138491 - DNA, 80 bp, synthetic construct
  misc_feature 1..80: note = Artificially Synthesized Probe
  source 1..80: mol_type = other DNA
gattttcaatatgggtggtgttctactgtatttcactgtaacaacctaggatttcaagatggtaggtcagagctatgttt

SEQ ID NO: 138492 - DNA, 80 bp, synthetic construct
  misc_feature 1..80: note = Artificially Synthesized Probe
  source 1..80: mol_type = other DNA
aacttaggcttttccaggtagttgcttgacagtgttaccatccctctgcttgcaagatatttactgtttatcctttcgta

SEQ ID NO: 138493 - DNA, 80 bp, synthetic construct
  misc_feature 1..80: note = Artificially Synthesized Probe
  source 1..80: mol_type = other DNA
aaggtaaagaagagcaaaaaataaacatatatcttacttgtgtatgagtgtataatgcctgaaaaatgaatattttctaa

SEQ ID NO: 138494 - DNA, 80 bp, synthetic construct; identical to SEQ ID NO: 43459
  misc_feature 1..80: note = Artificially Synthesized Probe
  source 1..80: mol_type = other DNA

SEQ ID NO: 138495 - DNA, 80 bp, synthetic construct
  misc_feature 1..80: note = Artificially Synthesized Probe
  source 1..80: mol_type = other DNA
tgttgttgttgtatattgatagttaattcctcattattgctgagcagaattacattgtttctttatccctttgtttatcc

SEQ ID NO: 138496 - DNA, 80 bp, synthetic construct
  misc_feature 1..80: note = Artificially Synthesized Probe
  source 1..80: mol_type = other DNA
atgtttaaggttttaccagagaatagtaccagtttacatatccaccagaagagttttaactttcctatttttctacgtaa

SEQ ID NO: 138497 - DNA, 80 bp, synthetic construct
  misc_feature 1..80: note = Artificially Synthesized Probe
  source 1..80: mol_type = other DNA
ttcttctttggtgaagggtctatgaaaaaaatcttttgtctatttaaaaaattgtgttgtttgttttcttcttattgagc

SEQ ID NO: 138498 - DNA, 80 bp, synthetic construct; identical to SEQ ID NO: 43460
  misc_feature 1..80: note = Artificially Synthesized Probe
  source 1..80: mol_type = other DNA

SEQ ID NO: 138499 - DNA, 80 bp, synthetic construct
  misc_feature 1..80: note = Artificially Synthesized Probe
  source 1..80: mol_type = other DNA
tttttttttttttgagacggagtctcgctctgtcgcccaggctggagggcagtggcgcgatctcggctcactgcaagctc

SEQ ID NO: 138500 - DNA, 80 bp, synthetic construct; identical to SEQ ID NO: 43299
  misc_feature 1..80: note = Artificially Synthesized Probe
  source 1..80: mol_type = other DNA

SEQ ID NO: 138501 - DNA, 80 bp, synthetic construct
  misc_feature 1..80: note = Artificially Synthesized Probe
  source 1..80: mol_type = other DNA
cgcccgcctcggcctcccaaagtgctgggattacaggcgtgagccaccgcgcccggccatctttgatcttttgtatataa

SEQ ID NO: 138502 - DNA, 80 bp, synthetic construct
  misc_feature 1..80: note = Artificially Synthesized Probe
  source 1..80: mol_type = other DNA
gttccaccttgtatttttggacattccaatgataccatttgaaattggccaacaactaatttgttttcatttttaaaaac

SEQ ID NO: 138503 - DNA, 80 bp, synthetic construct; identical to SEQ ID NO: 43461
  misc_feature 1..80: note = Artificially Synthesized Probe
  source 1..80: mol_type = other DNA

SEQ ID NO: 138504 - DNA, 80 bp, synthetic construct
  misc_feature 1..80: note = Artificially Synthesized Probe
  source 1..80: mol_type = other DNA
cttgaacaatgtggaagtgaggggctccaacctcccttgcaggtgaaaatctgtgtataactttaactgcccccagactc

SEQ ID NO: 138505 - DNA, 80 bp, synthetic construct
  misc_feature 1..80: note = Artificially Synthesized Probe
  source 1..80: mol_type = other DNA
tccttataaaagtcttcattctcattatcttcacattaagtaggctgaggagaaggaaagcaggagggtttggtcttcct

SEQ ID NO: 138506 - DNA, 80 bp, synthetic construct
  misc_feature 1..80: note = Artificially Synthesized Probe
  source 1..80: mol_type = other DNA
cccaggaataccaagggacgggtgtacttatcttttgattatgttttgtgtatttatagtaattgttttattgttcccta

SEQ ID NO: 138507 - DNA, 80 bp, synthetic construct
  misc_feature 1..80: note = Artificially Synthesized Probe
  source 1..80: mol_type = other DNA
ataaatattcttgacccttgttctgagattgcagttaatttacatgaaaatgatttttttgctttgcttttaagcaggat

SEQ ID NO: 138508 - DNA, 80 bp, synthetic construct; identical to SEQ ID NO: 43462
  misc_feature 1..80: note = Artificially Synthesized Probe
  source 1..80: mol_type = other DNA

SEQ ID NO: 138509 - DNA, 80 bp, synthetic construct
  misc_feature 1..80: note = Artificially Synthesized Probe
  source 1..80: mol_type = other DNA
tttcatacattttttggatttttttttaatcaatgggaaggataaaactggttctgattactctatcttctaaaccccaa

SEQ ID NO: 138510 - DNA, 80 bp, synthetic construct
  misc_feature 1..80: note = Artificially Synthesized Probe
  source 1..80: mol_type = other DNA
tagagatgtgggagcacagtggaagttacggctgattgatggtggggagtggtgaaagcttcttgcaggatatgtgattt

SEQ ID NO: 138511 - DNA, 80 bp, synthetic construct
  misc_feature 1..80: note = Artificially Synthesized Probe
  source 1..80: mol_type = other DNA
agaaatttggtctcatgcaacaatgggagctttttaactagtctctgtaaggcgttgtcatcacatctgatgttggacct

SEQ ID NO: 138512 - DNA, 80 bp, synthetic construct
  misc_feature 1..80: note = Artificially Synthesized Probe
  source 1..80: mol_type = other DNA
tagctagatttataaatgattggcattgtctgtaattctcttgttttacaaatgtggaagtaatagcactagggatgctt

SEQ ID NO: 138513 - DNA, 80 bp, synthetic construct; identical to SEQ ID NO: 43463
  misc_feature 1..80: note = Artificially Synthesized Probe
  source 1..80: mol_type = other DNA

SEQ ID NO: 138514 - DNA, 80 bp, synthetic construct
  misc_feature 1..80: note = Artificially Synthesized Probe
  source 1..80: mol_type = other DNA
tcatgttactgagccccatctttgtaaggcgtatttaatctctaactaaagaaaaaaagaagatacacttctagccaaca

SEQ ID NO: 138515 - DNA, 80 bp, synthetic construct
  misc_feature 1..80: note = Artificially Synthesized Probe
  source 1..80: mol_type = other DNA
acatattattttagatgataaggggactaaaactgggaaataaactaatcccaacaatttttatttttttaaatttcttc

SEQ ID NO: 138516 - DNA, 80 bp, synthetic construct
  misc_feature 1..80: note = Artificially Synthesized Probe
  source 1..80: mol_type = other DNA
ctaatttttgtatttttagtagagacagggttttgccatgttgatcaggctggcctcgatctcctgacctcaggtgatcc

SEQ ID NO: 138517 - DNA, 80 bp, synthetic construct; identical to SEQ ID NO: 43464
  misc_feature 1..80: note = Artificially Synthesized Probe
  source 1..80: mol_type = other DNA

SEQ ID NO: 138518 - DNA, 80 bp, synthetic construct
  misc_feature 1..80: note = Artificially Synthesized Probe
  source 1..80: mol_type = other DNA
atacaagacacagaggatatattatctgcatatatatctcatgttattttcctgctaaatatgttcagaattagattgta

SEQ ID NO: 138519 - DNA, 80 bp, synthetic construct
  misc_feature 1..80: note = Artificially Synthesized Probe
  source 1..80: mol_type = other DNA
aggcgcctgccaccacgcctggctaatttttttttttttttttttgtatttttagtagagacggggtttcaccgtgtttg

SEQ ID NO: 138520 - DNA, 80 bp, synthetic construct
  misc_feature 1..80: note = Artificially Synthesized Probe
  source 1..80: mol_type = other DNA
ggtgggtaccttcaattcattttcacataaattacaacttgaatatacctatttgccaaatagtatttttaaagcattaa

SEQ ID NO: 138521 - DNA, 80 bp, synthetic construct; identical to SEQ ID NO: 43465
  misc_feature 1..80: note = Artificially Synthesized Probe
  source 1..80: mol_type = other DNA

SEQ ID NO: 138522 - DNA, 80 bp, synthetic construct
  misc_feature 1..80: note = Artificially Synthesized Probe
  source 1..80: mol_type = other DNA
ccttgacaggaacaccctcatgtgttttagctcctgcacatttaatcaataaggacaataccagaattatatgcttggat

SEQ ID NO: 138523 - DNA, 80 bp, synthetic construct
  misc_feature 1..80: note = Artificially Synthesized Probe
  source 1..80: mol_type = other DNA
caccgttgttatattccagtaggcctcaattttctcatttataagttgaggctagtaataccgtaatgtgtatctactac

SEQ ID NO: 138524 - DNA, 80 bp, synthetic construct
  misc_feature 1..80: note = Artificially Synthesized Probe
  source 1..80: mol_type = other DNA
aggttatgttttgcagactcccttgcagctaagcagatatgagtggaagtgatagatgccacttaagcatcaaggctttt

SEQ ID NO: 138525 - DNA, 80 bp, synthetic construct
  misc_feature 1..80: note = Artificially Synthesized Probe
  source 1..80: mol_type = other DNA
ttttatcctggaaggatgaaaatgatatttatagagtcctgtcagccagtgcaatgctacagtgtgtgttctgtctgcca

SEQ ID NO: 138526 - DNA, 80 bp, synthetic construct
  misc_feature 1..80: note = Artificially Synthesized Probe
  source 1..80: mol_type = other DNA
ggctaacaattccagaggaattactgtgctaggcactacagtaagtcttcgccttacctcatctcatttaatcttcatag

SEQ ID NO: 138527 - DNA, 80 bp, synthetic construct; identical to SEQ ID NO: 43466
  misc_feature 1..80: note = Artificially Synthesized Probe
  source 1..80: mol_type = other DNA

SEQ ID NO: 138528 - DNA, 80 bp, synthetic construct
  misc_feature 1..80: note = Artificially Synthesized Probe
  source 1..80: mol_type = other DNA
atgataaccattcataaacatgtctcatagagtttgtttttgattcccctgctggagatttcaattggtcatggcaattc

SEQ ID NO: 138529 - DNA, 80 bp, synthetic construct
  misc_feature 1..80: note = Artificially Synthesized Probe
  source 1..80: mol_type = other DNA
aagcgcctagactagatgcgggttttcaactctagactggagcatttttcactgaacttctactatctgtgtctcaaact

SEQ ID NO: 138530 - DNA, 80 bp, synthetic construct
  misc_feature 1..80: note = Artificially Synthesized Probe
  source 1..80: mol_type = other DNA
tgggctttgaggagacagcctggggcacattctgactctgccacttaggagcttgcagtctttgggggcttaatggatat

SEQ ID NO: 138531 - DNA, 80 bp, synthetic construct; identical to SEQ ID NO: 43467
  misc_feature 1..80: note = Artificially Synthesized Probe
  source 1..80: mol_type = other DNA

SEQ ID NO: 138532 - DNA, 80 bp, synthetic construct
  misc_feature 1..80: note = Artificially Synthesized Probe
  source 1..80: mol_type = other DNA
aaacaaacaaaagctacagaacaacccagagcttggcagtctccctcttttccaacgaaaaaaaacaagaataaaataac

SEQ ID NO: 138533 - DNA, 80 bp, synthetic construct
  misc_feature 1..80: note = Artificially Synthesized Probe
  source 1..80: mol_type = other DNA
cattaagtggcaatggaattgacccttgaaataaagcagtacaaccttgctgaatagcttcatttgctccgggaaattgt

SEQ ID NO: 138534 - DNA, 80 bp, synthetic construct
  misc_feature 1..80: note = Artificially Synthesized Probe
  source 1..80: mol_type = other DNA
gcctggagcagaatgtttgctgaccaggaatacctgccttttcaagagtgagataaaaacttttatcacaggctgggcgc

SEQ ID NO: 138535 - DNA, 80 bp, synthetic construct
  misc_feature 1..80: note = Artificially Synthesized Probe
  source 1..80: mol_type = other DNA
aggtgtgaaatttaagaaaagtttatttcttatgaataagcaaaaaattctaacttttgtctcttcatagagattttcat

SEQ ID NO: 138536 - DNA, 80 bp, synthetic construct
  misc_feature 1..80: note = Artificially Synthesized Probe
  source 1..80: mol_type = other DNA
tggtggattctgtatggtaattaaaaccaaaagcggtataacattcaagggaattgtgtcagaatatatttgagaaataa

SEQ ID NO: 138537 - DNA, 80 bp, synthetic construct; identical to SEQ ID NO: 43468
  misc_feature 1..80: note = Artificially Synthesized Probe
  source 1..80: mol_type = other DNA

SEQ ID NO: 138538 - DNA, 80 bp, synthetic construct
  misc_feature 1..80: note = Artificially Synthesized Probe
  source 1..80: mol_type = other DNA
tagtatgccccaggtttctgacactttaaaaataaaatatatttattttgattttgtttatgataaaactggtgcaatct

SEQ ID NO: 138539 - DNA, 80 bp, synthetic construct
  misc_feature 1..80: note = Artificially Synthesized Probe
  source 1..80: mol_type = other DNA
tgtgtatacttaatcccagcaaatcttaaaaaaaaatctctatgcttatatcaattactagatttgtcattcattagctt

SEQ ID NO: 138540 - DNA, 80 bp, synthetic construct; identical to SEQ ID NO: 43469
  misc_feature 1..80: note = Artificially Synthesized Probe
  source 1..80: mol_type = other DNA

SEQ ID NO: 138541 - DNA, 80 bp, synthetic construct
  misc_feature 1..80: note = Artificially Synthesized Probe
  source 1..80: mol_type = other DNA
cttatagaaaaacaaccctataaatcatctaaatctaaatcccatgtcagagtgaatttggttgatgttggcttcttttc

SEQ ID NO: 138542 - DNA, 80 bp, synthetic construct
  misc_feature 1..80: note = Artificially Synthesized Probe
  source 1..80: mol_type = other DNA
attgaacttttaggttgctttcacttttcagttggattgtagctttttatcttttatttcatattatttttggagtgcat

SEQ ID NO: 138543 - DNA, 80 bp, synthetic construct
  misc_feature 1..80: note = Artificially Synthesized Probe
  source 1..80: mol_type = other DNA
attagctgcttgtggtggcgcacgcctgtagtcccagctactcgggaggctgagacaggagaattgcttgaacccggggg

SEQ ID NO: 138544 - DNA, 80 bp, synthetic construct
  misc_feature 1..80: note = Artificially Synthesized Probe
  source 1..80: mol_type = other DNA
tggagtgaattgtatgggagagtgccttgtagctgtggtactcagacataatggtttgaactagttcatttaaaatggaa

SEQ ID NO: 138545 - DNA, 80 bp, synthetic construct; identical to SEQ ID NO: 43470
  misc_feature 1..80: note = Artificially Synthesized Probe
  source 1..80: mol_type = other DNA

SEQ ID NO: 138546 - DNA, 80 bp, synthetic construct
  misc_feature 1..80: note = Artificially Synthesized Probe
  source 1..80: mol_type = other DNA
ccaagttattagagagcttaaagaagaaattgacaatagtatgaaagaggaagtgatcagaagtggtttggaactatcag

SEQ ID NO: 138547 - DNA, 80 bp, synthetic construct
  misc_feature 1..80: note = Artificially Synthesized Probe
  source 1..80: mol_type = other DNA
tggaactatcagtggaagccaagttactagagagcttaaagaagtagtaagtaacacctttacactaaagttttatgcga

SEQ ID NO: 138548 - DNA, 80 bp, synthetic construct
  misc_feature 1..80: note = Artificially Synthesized Probe
  source 1..80: mol_type = other DNA
acagttgaaatcctctgtgtatatttccttctgtgcccacaatgtatgtgtttgtttgtatattcatttatttcctagct

SEQ ID NO: 138549 - DNA, 80 bp, synthetic construct; identical to SEQ ID NO: 43471
  misc_feature 1..80: note = Artificially Synthesized Probe
  source 1..80: mol_type = other DNA

SEQ ID NO: 138550 - DNA, 80 bp, synthetic construct
  misc_feature 1..80: note = Artificially Synthesized Probe
  source 1..80: mol_type = other DNA
ctatcaaagaatgctagctaactaaaatagaaggaatgatagaacattggtattttgtagccttcagaataatcgagtta

SEQ ID NO: 138551 - DNA, 80 bp, synthetic construct
  misc_feature 1..80: note = Artificially Synthesized Probe
  source 1..80: mol_type = other DNA
tcaagtttagcataatggaatgtgaacctgacgttacttttatcctgatactatgtaattggaagtacccaacattcgta

SEQ ID NO: 138552 - DNA, 80 bp, synthetic construct; identical to SEQ ID NO: 43300
  misc_feature 1..80: note = Artificially Synthesized Probe
  source 1..80: mol_type = other DNA

SEQ ID NO: 138553 - DNA, 80 bp, synthetic construct
  misc_feature 1..80: note = Artificially Synthesized Probe
  source 1..80: mol_type = other DNA
gacgtgacgaaacacagtgagtgtgtcttatagactgtgtagtagatattactgagtcagtattttcttgagtgtgatct

SEQ ID NO: 138554 - DNA, 80 bp, synthetic construct; identical to SEQ ID NO: 43472
  misc_feature 1..80: note = Artificially Synthesized Probe
  source 1..80: mol_type = other DNA

SEQ ID NO: 138555 - DNA, 80 bp, synthetic construct
  misc_feature 1..80: note = Artificially Synthesized Probe
  source 1..80: mol_type = other DNA
gaaggtttctacttggattattattagtttttctttacctattttgtcccatgtcagtattatctattccactccaccct

SEQ ID NO: 138556 - DNA, 80 bp, synthetic construct
  misc_feature 1..80: note = Artificially Synthesized Probe
  source 1..80: mol_type = other DNA
cagtactttgtaatcaaattctgatgatgtcaactgcaagtgcagtatgtggtaatctgagtagacattatcagatagtt

SEQ ID NO: 138557 - DNA, 80 bp, synthetic construct
  misc_feature 1..80: note = Artificially Synthesized Probe
  source 1..80: mol_type = other DNA
tggctataaagaaatacctgacgctgagtaatttataaagaaaggaggtttaattggctcatggttctgcagcctgtaga

SEQ ID NO: 138558 - DNA, 80 bp, synthetic construct
  misc_feature 1..80: note = Artificially Synthesized Probe
  source 1..80: mol_type = other DNA
gcgagctctctacagtaccgaggctgacgctaaactgctcgttagaaatctgcctccgtgaccaatcaccacccaccagg

SEQ ID NO: 138559 - DNA, 80 bp, synthetic construct; identical to SEQ ID NO: 43473
  misc_feature 1..80: note = Artificially Synthesized Probe
  source 1..80: mol_type = other DNA

SEQ ID NO: 138560 - DNA, 80 bp, synthetic construct
  misc_feature 1..80: note = Artificially Synthesized Probe
  source 1..80: mol_type = other DNA
cctgaagccacagttctagtagatgttttctatgacagaaatatttagtggtccggtaagattagaaaatactatgcaga

SEQ ID NO: 138561 - DNA, 80 bp, synthetic construct
  misc_feature 1..80: note = Artificially Synthesized Probe
  source 1..80: mol_type = other DNA
atccataggaaactgtttggcacaagagaaacacagccaaacccccatgcagtaaaaaatccaagtataagttttgactc

SEQ ID NO: 138562 - DNA, 80 bp, synthetic construct; identical to SEQ ID NO: 43474
  misc_feature 1..80: note = Artificially Synthesized Probe
  source 1..80: mol_type = other DNA

SEQ ID NO: 138563 - DNA, 80 bp, synthetic construct
  misc_feature 1..80: note = Artificially Synthesized Probe
  source 1..80: mol_type = other DNA
gaaaataagtaattgaagacttgtgatcccatctgtgaaaggttgccagcaatggggaaagaactgttgttgttgttttt

SEQ ID NO: 138564 - DNA, 80 bp, synthetic construct
  misc_feature 1..80: note = Artificially Synthesized Probe
  source 1..80: mol_type = other DNA
attgaaataattttgtagtgataaaacctaaaggactgaagaaataggtctttattatatggtatgtagtgtacaagaat

SEQ ID NO: 138565 - DNA, 80 bp, synthetic construct
  misc_feature 1..80: note = Artificially Synthesized Probe
  source 1..80: mol_type = other DNA
tttttatttaaaggtgttccttcagatgattagatgcttgcaaatggatgacttgagcaagagcagttctagcatggatc

SEQ ID NO: 138566 - DNA, 80 bp, synthetic construct
  misc_feature 1..80: note = Artificially Synthesized Probe
  source 1..80: mol_type = other DNA
ccaatccatatagaaatttggttagctctgattacaaatatatatcccaaatctgaccacgtcttcactgctagcctttg

SEQ ID NO: 138567 - DNA, 80 bp, synthetic construct
  misc_feature 1..80: note = Artificially Synthesized Probe
  source 1..80: mol_type = other DNA
actttgggacttctaggcaggaggattccttgagccctggagtttgagaccaacttgggcaacatagtgagacccctgtc

SEQ ID NO: 138568 - DNA, 80 bp, synthetic construct; identical to SEQ ID NO: 43475
  misc_feature 1..80: note = Artificially Synthesized Probe
  source 1..80: mol_type = other DNA

SEQ ID NO: 138569 - DNA, 80 bp, synthetic construct
  misc_feature 1..80: note = Artificially Synthesized Probe
  source 1..80: mol_type = other DNA
gttgctggtccttattccttggcaggcaccgtgccttcatcctctttactcataggtctcattcctgagccacccaaatg

SEQ ID NO: 138570 - DNA, 80 bp, synthetic construct
  misc_feature 1..80: note = Artificially Synthesized Probe
  source 1..80: mol_type = other DNA
tttgttttagtcacctgtgcatcacagctgcctagaactgttccttgcataatagtagatccttaataaatatgtaaatt

SEQ ID NO: 138571 - DNA, 80 bp, synthetic construct; identical to SEQ ID NO: 43476
  misc_feature 1..80: note = Artificially Synthesized Probe
  source 1..80: mol_type = other DNA

SEQ ID NO: 138572 - DNA, 80 bp, synthetic construct
  misc_feature 1..80: note = Artificially Synthesized Probe
  source 1..80: mol_type = other DNA
gtgttagtgtggagtagcctaccttcagtaaccacatatggctgtcaatattatgtccatatgggtcagtaatttaatgc

SEQ ID NO: 138573 - DNA, 80 bp, synthetic construct
  misc_feature 1..80: note = Artificially Synthesized Probe
  source 1..80: mol_type = other DNA
aagctccgcctcccgggttcacgccattctcctgcctcaacctccccagcagctgggactacaggtgcccgccaccacac

SEQ ID NO: 138574 - DNA, 80 bp, synthetic construct
  misc_feature 1..80: note = Artificially Synthesized Probe
  source 1..80: mol_type = other DNA
tgagccaccgcgcccggtcagcttatatatttttttaaccgaggatgattttgaggcttttaccttatttgtactttaag

SEQ ID NO: 138575 - DNA, 80 bp, synthetic construct
  misc_feature 1..80: note = Artificially Synthesized Probe
  source 1..80: mol_type = other DNA
atagttttaattgtttacattttaatgggacaggaggaacagttatcttttgtcaatgggtgattgttactggtgaattc

SEQ ID NO: 138576 - DNA, 80 bp, synthetic construct; identical to SEQ ID NO: 43477
  misc_feature 1..80: note = Artificially Synthesized Probe
  source 1..80: mol_type = other DNA

SEQ ID NO: 138577 - DNA, 80 bp, synthetic construct
  misc_feature 1..80: note = Artificially Synthesized Probe
  source 1..80: mol_type = other DNA
gtgctttgcagctttgggtttttaacctttgctctttgctattagctttatgtttttttaattatagacaatggaggaca

SEQ ID NO: 138578 - DNA, 80 bp, synthetic construct
  misc_feature 1..80: note = Artificially Synthesized Probe
  source 1..80: mol_type = other DNA
tcattttagtgattgatgttggtaccagttgtttatagttgtaaagtgtgtattgtccatagttgttattacctaatatt

SEQ ID NO: 138579 - DNA, 80 bp, synthetic construct
  misc_feature 1..80: note = Artificially Synthesized Probe
  source 1..80: mol_type = other DNA
agttgttttgcttttggcttttgtcacaagtcttttctgcaaggatacagtactttacagtcttatgtggctcatttgtg

SEQ ID NO: 138580 - DNA, 80 bp, synthetic construct
  misc_feature 1..80: note = Artificially Synthesized Probe
  source 1..80: mol_type = other DNA
tttcatgtacatatgcaaatagatgctgttgcctttcagctattagtaattaactttatgaaggacagctgtaatacata

SEQ ID NO: 138581 - DNA, 80 bp, synthetic construct; identical to SEQ ID NO: 43478
  misc_feature 1..80: note = Artificially Synthesized Probe
  source 1..80: mol_type = other DNA

SEQ ID NO: 138582 - DNA, 80 bp, synthetic construct
  misc_feature 1..80: note = Artificially Synthesized Probe
  source 1..80: mol_type = other DNA
tttaaaaacctctcttcaagttattaccatgtttttaaggaagctccatgaaagctattctttttctcttttacggtcct

SEQ ID NO: 138583 - DNA, 80 bp, synthetic construct
  misc_feature 1..80: note = Artificially Synthesized Probe
  source 1..80: mol_type = other DNA
ctcactgttagtgtatccaagtcaaaactgaaccagtcaatttagatgtagacttcttttgaagtcctacagtatattta

SEQ ID NO: 138584 - DNA, 80 bp, synthetic construct; identical to SEQ ID NO: 43479
  misc_feature 1..80: note = Artificially Synthesized Probe
  source 1..80: mol_type = other DNA

SEQ ID NO: 138585 - DNA, 80 bp, synthetic construct
  misc_feature 1..80: note = Artificially Synthesized Probe
  source 1..80: mol_type = other DNA
atattttaattaaaacttgagtctagaagtagttgaaagcatttggaggactttgaatttgtgaaacaaccttgaaatac

SEQ ID NO: 138586 - DNA, 80 bp, synthetic construct
  misc_feature 1..80: note = Artificially Synthesized Probe
  source 1..80: mol_type = other DNA
tttgaaacttcttagtacagagacatagctgtactaggaaaggtataattttcagtaaaccttcagttgaagataaagct

SEQ ID NO: 138587 - DNA, 80 bp, synthetic construct
  misc_feature 1..80: note = Artificially Synthesized Probe
  source 1..80: mol_type = other DNA
agaagaaatacatcttgtgtcatcccccaaataatactacagttgccatgtcatgaaaaataacactacaattattatgt

SEQ ID NO: 138588 - DNA, 80 bp, synthetic construct
  misc_feature 1..80: note = Artificially Synthesized Probe
  source 1..80: mol_type = other DNA
aaactggtataagcattagtactttccttaaagtcaggatagattttcagcttccctcagattctccaaggtaggatcca

SEQ ID NO: 138589 - DNA, 80 bp, synthetic construct; identical to SEQ ID NO: 43480
  misc_feature 1..80: note = Artificially Synthesized Probe
  source 1..80: mol_type = other DNA

SEQ ID NO: 138590 - DNA, 80 bp, synthetic construct
  misc_feature 1..80: note = Artificially Synthesized Probe
  source 1..80: mol_type = other DNA
tttgagatggagtcttcctctgtcgcccaggctggagtgcagtggcatatgttagctcactgcaagctccacctctcgga

SEQ ID NO: 138591 - DNA, 80 bp, synthetic construct
  misc_feature 1..80: note = Artificially Synthesized Probe
  source 1..80: mol_type = other DNA
ttacaggcttgagcgaccgtgcccggcctatttcccttatctttctttgtaacattgtatttaataattgcagcaaaaat

SEQ ID NO: 138592 - DNA, 80 bp, synthetic construct
  misc_feature 1..80: note = Artificially Synthesized Probe
  source 1..80: mol_type = other DNA
gctttcacatgcattatctcagtccttctttgaccttattagcagtacattattattccagttttatagatctaaggact

SEQ ID NO: 138593 - DNA, 80 bp, synthetic construct
  misc_feature 1..80: note = Artificially Synthesized Probe
  source 1..80: mol_type = other DNA
atatttttaatttaactacatcattttggtttttacttagaaatttttttaaaagttgaagaattgttcatattgtttca

SEQ ID NO: 138594 - DNA, 80 bp, synthetic construct; identical to SEQ ID NO: 43481
  misc_feature 1..80: note = Artificially Synthesized Probe
  source 1..80: mol_type = other DNA

SEQ ID NO: 138595 - DNA, 80 bp, synthetic construct
  misc_feature 1..80: note = Artificially Synthesized Probe
  source 1..80: mol_type = other DNA
ttgtttttccttttaaaaattctttgagaggacttcttgtttttgacgtctgcttatatggcactctctcctgttacaga

SEQ ID NO: 138596 - DNA, 80 bp, synthetic construct
  misc_feature 1..80: note = Artificially Synthesized Probe
  source 1..80: mol_type = other DNA
ggaagcaaacccttcgtcagtatgctggaccatcagtctgggcacaactgttctctaaattaagttaaatatttttctta

SEQ ID NO: 138597 - DNA, 80 bp, synthetic construct; identical to SEQ ID NO: 43301
  misc_feature 1..80: note = Artificially Synthesized Probe
  source 1..80: mol_type = other DNA

SEQ ID NO: 138598 - DNA, 80 bp, synthetic construct
  misc_feature 1..80: note = Artificially Synthesized Probe
  source 1..80: mol_type = other DNA
gctgtgacaattaaattaataatgcattttgtttgcaagtatttaggccttgtgctttgactgatatatgcaaaaattat

SEQ ID NO: 138599 - DNA, 80 bp, synthetic construct; identical to SEQ ID NO: 43482
  misc_feature 1..80: note = Artificially Synthesized Probe
  source 1..80: mol_type = other DNA

SEQ ID NO: 138600 - DNA, 80 bp, synthetic construct
  misc_feature 1..80: note = Artificially Synthesized Probe
  source 1..80: mol_type = other DNA
gccaaagcatctttatgactctttgaattgactaatagtaatctagaaaacgagcttatctacaattatcacaattggaa

SEQ ID NO: 138601 - DNA, 80 bp, synthetic construct
  misc_feature 1..80: note = Artificially Synthesized Probe
  source 1..80: mol_type = other DNA
gggaaatgattcgtgtagagctttgcatttgatccattgcttttgtggtgtcagagatgctgtcaggacatatctgcact

SEQ ID NO: 138602 - DNA, 80 bp, synthetic construct
  misc_feature 1..80: note = Artificially Synthesized Probe
  source 1..80: mol_type = other DNA
cttccagtgcagccatttttgtcggagtctgtgaagtttcttaccctcagtgcatttttgttagcatagctgttgggtgt

SEQ ID NO: 138603 - DNA, 80 bp, synthetic construct
  misc_feature 1..80: note = Artificially Synthesized Probe
  source 1..80: mol_type = other DNA
accattgatcttattgatgagtcaaatctttaccccacctaatgtaattgcggagagatgtctcagagccctgatgctta

SEQ ID NO: 138604 - DNA, 80 bp, synthetic construct; identical to SEQ ID NO: 43483
  misc_feature 1..80: note = Artificially Synthesized Probe
  source 1..80: mol_type = other DNA

SEQ ID NO: 138605 - DNA, 80 bp, synthetic construct
  misc_feature 1..80: note = Artificially Synthesized Probe
  source 1..80: mol_type = other DNA
tcctagtttgattcttctctttctcatctcctttaagaaggtggtttgtatcccagatagtgagaagaagcctagtttct

SEQ ID NO: 138606 - DNA, 80 bp, synthetic construct
  misc_feature 1..80: note = Artificially Synthesized Probe
  source 1..80: mol_type = other DNA
acatggcacacacgatgtcactcacatggcacacatgatgtgtgcagttgtgactgatgcttcacagggttgtttacaag

SEQ ID NO: 138607 - DNA, 80 bp, synthetic construct
  misc_feature 1..80: note = Artificially Synthesized Probe
  source 1..80: mol_type = other DNA
acttctaagttgttcttgttgcatatatttcattttattaaagggaaaacagttttcctctattcctccatagtgagttt

SEQ ID NO: 138608 - DNA, 80 bp, synthetic construct
  misc_feature 1..80: note = Artificially Synthesized Probe
  source 1..80: mol_type = other DNA
tctcccctttacccactacttattagtctttcccttatttcttattttttttccatagttagcaatattttttctttttc

SEQ ID NO: 138609 - DNA, 80 bp, synthetic construct; identical to SEQ ID NO: 43484
  misc_feature 1..80: note = Artificially Synthesized Probe
  source 1..80: mol_type = other DNA

SEQ ID NO: 138610 - DNA, 80 bp, synthetic construct
  misc_feature 1..80: note = Artificially Synthesized Probe
  source 1..80: mol_type = other DNA
atccatatccacacaccacacacatccatatccacgcaccatacacatccatatccacacaccacacgcatccatatcca

SEQ ID NO: 138611 - DNA, 80 bp, synthetic construct
  misc_feature 1..80: note = Artificially Synthesized Probe
  source 1..80: mol_type = other DNA
ggctcactgtgacctccgcctcccgggttcaagcaattctcctgcctcaggttactgaataattgggattacatgcaccc

SEQ ID NO: 138612 - DNA, 80 bp, synthetic construct
  misc_feature 1..80: note = Artificially Synthesized Probe
  source 1..80: mol_type = other DNA
aagatttaatagtgcgatagtcctgctagatcaatttgttctgcatggaaagacagctagaagtcatatcaattcatcta

SEQ ID NO: 138613 - DNA, 80 bp, synthetic construct
  misc_feature 1..80: note = Artificially Synthesized Probe
  source 1..80: mol_type = other DNA
ctgggatttggaagtatttctaaattctatgggtaattctttgggtaatgtagatgatctgtggttgcttcgtcagcaat

SEQ ID NO: 138614 - DNA, 80 bp, synthetic construct; identical to SEQ ID NO: 43485
  misc_feature 1..80: note = Artificially Synthesized Probe
  source 1..80: mol_type = other DNA

SEQ ID NO: 138615 - DNA, 80 bp, synthetic construct
  misc_feature 1..80: note = Artificially Synthesized Probe
  source 1..80: mol_type = other DNA
ttgactccgctcatttagcacacagctatgacaatgacttaaatttaagactgttttaagaagtaacctcataaaagtta

SEQ ID NO: 138616 - DNA, 80 bp, synthetic construct
  misc_feature 1..80: note = Artificially Synthesized Probe
  source 1..80: mol_type = other DNA
ttgagttttcctctttatgtttactgttgggaagctcatggccaaaattgtgatccatctctagtcagcaggatagcctt

SEQ ID NO: 138617 - DNA, 80 bp, synthetic construct; identical to SEQ ID NO: 43486
  misc_feature 1..80: note = Artificially Synthesized Probe
  source 1..80: mol_type = other DNA

SEQ ID NO: 138618 - DNA, 80 bp, synthetic construct
  misc_feature 1..80: note = Artificially Synthesized Probe
  source 1..80: mol_type = other DNA
ggaaaggaaagggaaggattcctttccttttataccaggagtccttgctctctagctgtataaaaaatactgtttctttt

SEQ ID NO: 138619 - DNA, 80 bp, synthetic construct
  misc_feature 1..80: note = Artificially Synthesized Probe
  source 1..80: mol_type = other DNA
ttttaatctaggaagtttctgtgtatcctgagtattattttatttataaaataaatataaaatatcaataaaataaatat

SEQ ID NO: 138620 - DNA, 80 bp, synthetic construct
  misc_feature 1..80: note = Artificially Synthesized Probe
  source 1..80: mol_type = other DNA
tctctcaataaacattgactactatgttcgaagacttaggtgatctatagtgtttgaagatgacacagcctctgttctca

SEQ ID NO: 138621 - DNA, 80 bp, synthetic construct
  misc_feature 1..80: note = Artificially Synthesized Probe
  source 1..80: mol_type = other DNA
acacgcatccatatccacacaccacacatatccatatccacacagcacacacatccatatccacacacatccatatccac

SEQ ID NO: 138622 - DNA, 80 bp, synthetic construct; identical to SEQ ID NO: 43487
  misc_feature 1..80: note = Artificially Synthesized Probe
  source 1..80: mol_type = other DNA

SEQ ID NO: 138623 - DNA, 80 bp, synthetic construct
  misc_feature 1..80: note = Artificially Synthesized Probe
  source 1..80: mol_type = other DNA
gaggagaatatgggcatatcaggatgaacctgggaactgggttggaatccagctgaacaggctgtggctgctgtgccagt

SEQ ID NO: 138624 - DNA, 80 bp, synthetic construct
  misc_feature 1..80: note = Artificially Synthesized Probe
  source 1..80: mol_type = other DNA
ggtttactacctggtctcttctcttccccagtcactaatttagtttctttctgttcaagttcatattgcagaccagcctg

SEQ ID NO: 138625 - DNA, 80 bp, synthetic construct
  misc_feature 1..80: note = Artificially Synthesized Probe
  source 1..80: mol_type = other DNA
atttcaagtcccagtctgatgccctggccactgtcttctgtgagtccttttcttgtttactgtatctctaattggtcttc

SEQ ID NO: 138626 - DNA, 80 bp, synthetic construct
  misc_feature 1..80: note = Artificially Synthesized Probe
  source 1..80: mol_type = other DNA
accagttcaatgagttattagaccagagatatatggttagtactcttataatctttactaaaatgacaattatttcattc

SEQ ID NO: 138627 - DNA, 80 bp, synthetic construct; identical to SEQ ID NO: 43488
  misc_feature 1..80: note = Artificially Synthesized Probe
  source 1..80: mol_type = other DNA

SEQ ID NO: 138628 - DNA, 80 bp, synthetic construct
  misc_feature 1..80: note = Artificially Synthesized Probe
  source 1..80: mol_type = other DNA
atgttcactgtagtcttcaattatgcctaattaccaacttggatacagtttcattatacagtactgactttttgtgagca

SEQ ID NO: 138629 - DNA, 80 bp, synthetic construct
  misc_feature 1..80: note = Artificially Synthesized Probe
  source 1..80: mol_type = other DNA
ctacggagctatgataggacacaggaagtgtttacataggttatttctacaacagggtttcccccaattcttggtcttag

SEQ ID NO: 138630 - DNA, 80 bp, synthetic construct; identical to SEQ ID NO: 43489
  misc_feature 1..80: note = Artificially Synthesized Probe
  source 1..80: mol_type = other DNA

SEQ ID NO: 138631 - DNA, 80 bp, synthetic construct
  misc_feature 1..80: note = Artificially Synthesized Probe
  source 1..80: mol_type = other DNA
aatttaatccagttttttattgttttgtgaataatgatttcttagacatagcattgggcagtaagcctatcgtggaagaa

SEQ ID NO: 138632 - DNA, 80 bp, synthetic construct; identical to SEQ ID NO: 43302
  misc_feature 1..80: note = Artificially Synthesized Probe
  source 1..80: mol_type = other DNA

SEQ ID NO: 138633 - DNA, 80 bp, synthetic construct
  misc_feature 1..80: note = Artificially Synthesized Probe
  source 1..80: mol_type = other DNA
ttttcaagggtcagattttttctcacttattctgtgatgccttccctagattccattccaaatagtcacatcttaccact

SEQ ID NO: 138634 - DNA, 80 bp, synthetic construct
  misc_feature 1..80: note = Artificially Synthesized Probe
  source 1..80: mol_type = other DNA
tttgaagaaggggattcacactcagtaagtactgctagatttaggatactaaaatcttcattgagagttttctttttcat

SEQ ID NO: 138635 - DNA, 80 bp, synthetic construct; identical to SEQ ID NO: 43490
  misc_feature 1..80: note = Artificially Synthesized Probe
  source 1..80: mol_type = other DNA

SEQ ID NO: 138636 - DNA, 80 bp, synthetic construct
  misc_feature 1..80: note = Artificially Synthesized Probe
  source 1..80: mol_type = other DNA
gaaagtttttatttaaattagacccaaattttctttgaagttaattaaaacaataatttctcctttcattgtcactgtgc

SEQ ID NO: 138637 - DNA, 80 bp, synthetic construct
  misc_feature 1..80: note = Artificially Synthesized Probe
  source 1..80: mol_type = other DNA
gataataaaatatcgaacattaggagaaattttaattaatggcgtgaccccaatgcttatttttaaaattaatacttata

SEQ ID NO: 138638 - DNA, 80 bp, synthetic construct
  misc_feature 1..80: note = Artificially Synthesized Probe
  source 1..80: mol_type = other DNA
tacgtggaacataactgtgtgaaatcaataaaagccaggctgctctggttgaagctggaagagggtcacaaagacacgtc

SEQ ID NO: 138639 - DNA, 80 bp, synthetic construct; identical to SEQ ID NO: 43491
  misc_feature 1..80: note = Artificially Synthesized Probe
  source 1..80: mol_type = other DNA

SEQ ID NO: 138640 - DNA, 80 bp, synthetic construct
  misc_feature 1..80: note = Artificially Synthesized Probe
  source 1..80: mol_type = other DNA
tagaaatacaagtttggcataaatcaatgtctggagtgtaatatttttagttttcaggtttggtgttaaattcacaagtg

SEQ ID NO: 138641 - DNA, 80 bp, synthetic construct
  misc_feature 1..80: note = Artificially Synthesized Probe
  source 1..80: mol_type = other DNA
cagtaaaggagaaaagtttgttgaatgttgaaagatggttctcttgttggatgttatgaatgtaaagtgtgactttcagc

SEQ ID NO: 138642 - DNA, 80 bp, synthetic construct
  misc_feature 1..80: note = Artificially Synthesized Probe
  source 1..80: mol_type = other DNA
cagttggcagaagagggaacatcaactgaccatgttgtcgggaagcattttcccgggaggaaagaccttcttagaggaga

SEQ ID NO: 138643 - DNA, 80 bp, synthetic construct
  misc_feature 1..80: note = Artificially Synthesized Probe
  source 1..80: mol_type = other DNA
tttctttatatacttttataaagcctttctctgtcttttatgacatttttgaagactgcagttccctccaccttttttct

SEQ ID NO: 138644 - DNA, 80 bp, synthetic construct; identical to SEQ ID NO: 43492
  misc_feature 1..80: note = Artificially Synthesized Probe
  source 1..80: mol_type = other DNA

SEQ ID NO: 138645 - DNA, 80 bp, synthetic construct
  misc_feature 1..80: note = Artificially Synthesized Probe
  source 1..80: mol_type = other DNA
tccggccaactccatcatctgccattgtcttcgttttggtgccttaggttgatgttagccagtaaggatgtactcaagac

SEQ ID NO: 138646 - DNA, 80 bp, synthetic construct
  misc_feature 1..80: note = Artificially Synthesized Probe
  source 1..80: mol_type = other DNA
ggctttttaaaggtctctgttcatattccttgcaaatatcattggcttactttatttaatttgtcctaacgctacgttgc

SEQ ID NO: 138647 - DNA, 80 bp, synthetic construct
  misc_feature 1..80: note = Artificially Synthesized Probe
  source 1..80: mol_type = other DNA
ttcataacttcaccttttttggtaaaaatgaactatgatttcatagttctttggtaaagctatgctttctcatgagagat

SEQ ID NO: 138648 - DNA, 80 bp, synthetic construct
  misc_feature 1..80: note = Artificially Synthesized Probe
  source 1..80: mol_type = other DNA
tgaatatatttgtttaaatgaacaagaaaatgcttgtttttagtcttcagcttattactgtcaaacttttctaatgatga

SEQ ID NO: 138649 - DNA, 80 bp, synthetic construct; identical to SEQ ID NO: 43493
  misc_feature 1..80: note = Artificially Synthesized Probe
  source 1..80: mol_type = other DNA

SEQ ID NO: 138650 - DNA, 80 bp, synthetic construct
  misc_feature 1..80: note = Artificially Synthesized Probe
  source 1..80: mol_type = other DNA
aatcaatatatttgagaaactttattcaagctattactcatctattgacattacagcattggaaaaaatcatattagaaa

SEQ ID NO: 138651 - DNA, 80 bp, synthetic construct
  misc_feature 1..80: note = Artificially Synthesized Probe
  source 1..80: mol_type = other DNA
ttgacatcacacttgtatgtgggaaaaatagacaagcatgtaaattatgaactaaaccaccagttcagttctgggcattc

SEQ ID NO: 138652 - DNA, 80 bp, synthetic construct; identical to SEQ ID NO: 43494
  misc_feature 1..80: note = Artificially Synthesized Probe
  source 1..80: mol_type = other DNA

SEQ ID NO: 138653 - DNA, 80 bp, synthetic construct
  misc_feature 1..80: note = Artificially Synthesized Probe
  source 1..80: mol_type = other DNA
aatcggctgctcttttctccctcaggtggcagacttagtctgtgtgcagatggtatttagtatattttttaatgtgttat

SEQ ID NO: 138654 - DNA, 80 bp, synthetic construct
  misc_feature 1..80: note = Artificially Synthesized Probe
  source 1..80: mol_type = other DNA
ttatatcttcagtatattaatggctttaaacaaaataaatagctctttgtgcatgactgatagagcgttaggttttgtta

SEQ ID NO: 138655 - DNA, 80 bp, synthetic construct
  misc_feature 1..80: note = Artificially Synthesized Probe
  source 1..80: mol_type = other DNA
gttgattttgatcatacaggcaaggtgttgccagtttatccactggacagttactgagattgtttttcccttgtaactaa

SEQ ID NO: 138656 - DNA, 80 bp, synthetic construct
  misc_feature 1..80: note = Artificially Synthesized Probe
  source 1..80: mol_type = other DNA
tgtcgaaggacgcaaaatggtggggaatgttccagtctgaagcattgtcatcttttctcctaatgagcctaaaattctag

SEQ ID NO: 138657 - DNA, 80 bp, synthetic construct
  misc_feature 1..80: note = Artificially Synthesized Probe
  source 1..80: mol_type = other DNA
gattaaaaatgcacgctcgaagcttgttctctgggtttgaacgtaattctatttaaactgtaaaacatggtgtcatcatt

SEQ ID NO: 138658 - DNA, 80 bp, synthetic construct; identical to SEQ ID NO: 43495
  misc_feature 1..80: note = Artificially Synthesized Probe
  source 1..80: mol_type = other DNA

SEQ ID NO: 138659 - DNA, 80 bp, synthetic construct
  misc_feature 1..80: note = Artificially Synthesized Probe
  source 1..80: mol_type = other DNA
aatagattcagtctgcgtggccttcaaggggctccagaactgaaagctctctgatatgtgaagtgacactgttttatatt

SEQ ID NO: 138660 - DNA, 80 bp, synthetic construct
  misc_feature 1..80: note = Artificially Synthesized Probe
  source 1..80: mol_type = other DNA
ggtagatgataaactccaacagatgacaggctgtcgacagagagaatgaaactgaatctgaaaatcttataatgtgacac

SEQ ID NO: 138661 - DNA, 80 bp, synthetic construct
  misc_feature 1..80: note = Artificially Synthesized Probe
  source 1..80: mol_type = other DNA
ttaaggatttttaaaaaggtctttcgtattattaaaggttcaggtttcacaaaatgagccagtggctagctgaaaagccc

SEQ ID NO: 138662 - DNA, 80 bp, synthetic construct; identical to SEQ ID NO: 43496
  misc_feature 1..80: note = Artificially Synthesized Probe
  source 1..80: mol_type = other DNA

SEQ ID NO: 138663 - DNA, 80 bp, synthetic construct
  misc_feature 1..80: note = Artificially Synthesized Probe
  source 1..80: mol_type = other DNA
tacaaaccagtacataaatttctggccagagacattgcatggaacagtaaaaatgaaaggttttacaggtattctttctt

SEQ ID NO: 138664 - DNA, 80 bp, synthetic construct
  misc_feature 1..80: note = Artificially Synthesized Probe
  source 1..80: mol_type = other DNA
cttttctatctccagcactccctccatttttaccagttgcccctcagccttctgctacaaacagagccatccttttgctc

SEQ ID NO: 138665 - DNA, 80 bp, synthetic construct
  misc_feature 1..80: note = Artificially Synthesized Probe
  source 1..80: mol_type = other DNA
attgtaaagcagactgcatgattcagagttggtttattaaaattgagaaacagtgaaaaaaaggaaggcaaggaagaata

SEQ ID NO: 138666 - DNA, 80 bp, synthetic construct; identical to SEQ ID NO: 43497
  misc_feature 1..80: note = Artificially Synthesized Probe
  source 1..80: mol_type = other DNA

SEQ ID NO: 138667 - DNA, 80 bp, synthetic construct
  misc_feature 1..80: note = Artificially Synthesized Probe
  source 1..80: mol_type = other DNA
tttcttgctttcaaacttaattttatttttgcaaaagaaattgttttctctttgaactcccagaagactgacagaatctt

SEQ ID NO: 138668 - DNA, 80 bp, synthetic construct
  misc_feature 1..80: note = Artificially Synthesized Probe
  source 1..80: mol_type = other DNA
agttaaaggctatttcagtctataaaactttgattactagaatttagctgtggttttatgagttttcccatatgattgcc

SEQ ID NO: 138669 - DNA, 80 bp, synthetic construct
  misc_feature 1..80: note = Artificially Synthesized Probe
  source 1..80: mol_type = other DNA
aaattcagtattttccatgaactgtttcccataggacagaaacagtctcagcactgtgggcataggaaaaccttccatta

SEQ ID NO: 138670 - DNA, 80 bp, synthetic construct
  misc_feature 1..80: note = Artificially Synthesized Probe
  source 1..80: mol_type = other DNA
atcatgtaacattgatttatgttagatattacctgttgtcccaagaattgcataacctgaaaacattaaaaggagtaagt

SEQ ID NO: 138671 - DNA, 80 bp, synthetic construct; identical to SEQ ID NO: 43498
  misc_feature 1..80: note = Artificially Synthesized Probe
  source 1..80: mol_type = other DNA

SEQ ID NO: 138672 - DNA, 80 bp, synthetic construct
  misc_feature 1..80: note = Artificially Synthesized Probe
  source 1..80: mol_type = other DNA
gtccatcttgatcattcatttcactgatgagtcctggctttcaataacttgaataacaatagaatatttttcatctttga

SEQ ID NO: 138673 - DNA, 80 bp, synthetic construct
  misc_feature 1..80: note = Artificially Synthesized Probe
  source 1..80: mol_type = other DNA
tgctttttgtaattcttggtcttaatgcttctattgtagttttgttattcttatgctaattttgtgcattcccctgcttt

SEQ ID NO: 138674 - DNA, 80 bp, synthetic construct
  misc_feature 1..80: note = Artificially Synthesized Probe
  source 1..80: mol_type = other DNA
tttttgcttgctttcttgtagatttgcttaacggaaatgaacgtttaacctcttgcctcttaaaattcatattctccttg

SEQ ID NO: 138675 - DNA, 80 bp, synthetic construct
  misc_feature 1..80: note = Artificially Synthesized Probe
  source 1..80: mol_type = other DNA
tggctcctgtgtctttgtgctttcttttttttctttaaagcatttccctactttctgccgtaagatgctccaagcttacc

SEQ ID NO: 138676 - DNA, 80 bp, synthetic construct; identical to SEQ ID NO: 43499
  misc_feature 1..80: note = Artificially Synthesized Probe
  source 1..80: mol_type = other DNA

SEQ ID NO: 138677 - DNA, 80 bp, synthetic construct
  misc_feature 1..80: note = Artificially Synthesized Probe
  source 1..80: mol_type = other DNA
ataccgtttttttttaaactctataaaatgtttcaaagagtctcttccataaatttaaagcaatcctagacatttaggca

SEQ ID NO: 138678 - DNA, 80 bp, synthetic construct
  misc_feature 1..80: note = Artificially Synthesized Probe
  source 1..80: mol_type = other DNA
ttttctcttgagtatgattaatgattgtgtacctgaaaaatgtaaaacattcagtttgtcacattcctttgtcaaggtat

SEQ ID NO: 138679 - DNA, 80 bp, synthetic construct
  misc_feature 1..80: note = Artificially Synthesized Probe
  source 1..80: mol_type = other DNA
atacttcgagtatcacaaacgtgggccatgaaaatggcaatgtaatggtatcagtgaaactgattgaaatagaatgttcc

SEQ ID NO: 138680 - DNA, 80 bp, synthetic construct; identical to SEQ ID NO: 43500
  misc_feature 1..80: note = Artificially Synthesized Probe
  source 1..80: mol_type = other DNA

SEQ ID NO: 138681 - DNA, 80 bp, synthetic construct
  misc_feature 1..80: note = Artificially Synthesized Probe
  source 1..80: mol_type = other DNA
taaattgatgctactcactgtgaacatgacaaaaggagagtgtgaattactctgtatgaacaataaacattccagaaatc

SEQ ID NO: 138682 - DNA, 80 bp, synthetic construct
  misc_feature 1..80: note = Artificially Synthesized Probe
  source 1..80: mol_type = other DNA
acgtgaatatgaaggataaaataaatagaatctcaaatcttttcactgaaagtcactgttagctttctgtaatgtccctc

SEQ ID NO: 138683 - DNA, 80 bp, synthetic construct
  misc_feature 1..80: note = Artificially Synthesized Probe
  source 1..80: mol_type = other DNA
tgtcaatttgtaaatgtgagtttacataattttagtggccttttaacctattgtttatgtgaatcatgatgttactagtt

SEQ ID NO: 138684 - DNA, 80 bp, synthetic construct; identical to SEQ ID NO: 43501
  misc_feature 1..80: note = Artificially Synthesized Probe
  source 1..80: mol_type = other DNA

SEQ ID NO: 138685 - DNA, 80 bp, synthetic construct
  misc_feature 1..80: note = Artificially Synthesized Probe
  source 1..80: mol_type = other DNA
agtgtttgacaaatagtggatatccagtggaagaaaacagtaacactaaatatatttaaattgcatatttttatgtcgct

SEQ ID NO: 138686 - DNA, 80 bp, synthetic construct
  misc_feature 1..80: note = Artificially Synthesized Probe
  source 1..80: mol_type = other DNA
tttttgttgttgtttttttctttttttttaactttgccagtgtgtaggaatttcagggtatctcaggccatatagaattc

SEQ ID NO: 138687 - DNA, 80 bp, synthetic construct; identical to SEQ ID NO: 43303
  misc_feature 1..80: note = Artificially Synthesized Probe
  source 1..80: mol_type = other DNA

SEQ ID NO: 138688 - DNA, 80 bp, synthetic construct
  misc_feature 1..80: note = Artificially Synthesized Probe
  source 1..80: mol_type = other DNA
ccctgtaacagccttgtatttcagtgcttcactcaatcctgagctaactggagtgaggggaagacctgtttgctcccgtg

SEQ ID NO: 138689 - DNA, 80 bp, synthetic construct; identical to SEQ ID NO: 43502
  misc_feature 1..80: note = Artificially Synthesized Probe
  source 1..80: mol_type = other DNA

SEQ ID NO: 138690 - DNA, 80 bp, synthetic construct
  misc_feature 1..80: note = Artificially Synthesized Probe
  source 1..80: mol_type = other DNA
ttcgaaaaggcagattttaaagaatgggtcagtcttaccagaaaacatacaagcttattctgattgcgcatgaaagagaa

SEQ ID NO: 138691 - DNA, 80 bp, synthetic construct
  misc_feature 1..80: note = Artificially Synthesized Probe
  source 1..80: mol_type = other DNA
ttaatactttctggagcatggtttcaaaaaggtcaggaatgacggagcgaaaaatgttcacgagaatgctttacaacgtg

SEQ ID NO: 138692 - DNA, 80 bp, synthetic construct
  misc_feature 1..80: note = Artificially Synthesized Probe
  source 1..80: mol_type = other DNA
gggacctgcagtgggaggattggctgaggacttattttggttgaagttagacatatttcattgtctttttttttttcctt

SEQ ID NO: 138693 - DNA, 80 bp, synthetic construct; identical to SEQ ID NO: 43503
  misc_feature 1..80: note = Artificially Synthesized Probe
  source 1..80: mol_type = other DNA

SEQ ID NO: 138694 - DNA, 80 bp, synthetic construct
  misc_feature 1..80: note = Artificially Synthesized Probe
  source 1..80: mol_type = other DNA
atgacttcagagaagtctttcgttaatcagcacatggatcttggttatttgtacccttttgggaaaatttcacactcaga

SEQ ID NO: 138695 - DNA, 80 bp, synthetic construct
  misc_feature 1..80: note = Artificially Synthesized Probe
  source 1..80: mol_type = other DNA
tttctgagaagttagcttttgtaccacaacctaccatgattatctgatattctccggaaggttagccgagttgtttccta

SEQ ID NO: 138696 - DNA, 80 bp, synthetic construct; identical to SEQ ID NO: 43504
  misc_feature 1..80: note = Artificially Synthesized Probe
  source 1..80: mol_type = other DNA

SEQ ID NO: 138697 - DNA, 80 bp, synthetic construct
  misc_feature 1..80: note = Artificially Synthesized Probe
  source 1..80: mol_type = other DNA
aaaaatgaggtagtcattattctccattgcttcaataacgtttagagatgttttttaaagcttcccattcagtcacctct

SEQ ID NO: 138698 - DNA, 80 bp, synthetic construct
  misc_feature 1..80: note = Artificially Synthesized Probe
  source 1..80: mol_type = other DNA
ggaggtgcatttttgtatgatgaaagactattttagaacatagtcacacaccttgatgaaggtgtttcctttttcttttt

SEQ ID NO: 138699 - DNA, 80 bp, synthetic construct
  misc_feature 1..80: note = Artificially Synthesized Probe
  source 1..80: mol_type = other DNA
tctgctttctgctcctaaattctccagttgaactgtcacaatagtctgatttacacttttctatttatagttgtagtgat

SEQ ID NO: 138700 - DNA, 80 bp, synthetic construct
  misc_feature 1..80: note = Artificially Synthesized Probe
  source 1..80: mol_type = other DNA
aagaatgttatcaatacatttatgatactttggagtagagacctgacttctgttaaactgaaccaaagttttcctgttgc

SEQ ID NO: 138701 - DNA, 80 bp, synthetic construct; identical to SEQ ID NO: 43505
  misc_feature 1..80: note = Artificially Synthesized Probe
  source 1..80: mol_type = other DNA

SEQ ID NO: 138702 - DNA, 80 bp, synthetic construct; identical to SEQ ID NO: 43283
  misc_feature 1..80: note = Artificially Synthesized Probe
  source 1..80: mol_type = other DNA

SEQ ID NO: 138703 - DNA, 80 bp, synthetic construct
  misc_feature 1..80: note = Artificially Synthesized Probe
  source 1..80: mol_type = other DNA
aaaataatactaaacgagtaagattatactttgtagaactccaagccatcacgtgtgcacttaggtttcctgccaaatct

SEQ ID NO: 138704 - DNA, 80 bp, synthetic construct
  misc_feature 1..80: note = Artificially Synthesized Probe
  source 1..80: mol_type = other DNA
atcttatctcagaaagtctgtggcagttgtaaactctcaagcttttgacagtggcacagtgtgatatgttgggaagttga

SEQ ID NO: 138705 - DNA, 80 bp, synthetic construct
  misc_feature 1..80: note = Artificially Synthesized Probe
  source 1..80: mol_type = other DNA
gctttatttccatggacatagctttttgactctcagagccttagtttcattttctggaaagcagatatgataagatgtgg

SEQ ID NO: 138706 - DNA, 80 bp, synthetic construct
  misc_feature 1..80: note = Artificially Synthesized Probe
  source 1..80: mol_type = other DNA
atcctgtcacctccattttattaactgatgcaatttgtccgagttacttaacctctgaaactccgtttattcaactaaaa

SEQ ID NO: 138707 - DNA, 80 bp, synthetic construct; identical to SEQ ID NO: 43506
  misc_feature 1..80: note = Artificially Synthesized Probe
  source 1..80: mol_type = other DNA

SEQ ID NO: 138708 - DNA, 80 bp, synthetic construct
  misc_feature 1..80: note = Artificially Synthesized Probe
  source 1..80: mol_type = other DNA
atttgcaagaagtaatgcaaagagagtccctgtattctgaggctgagtaggaacgtgaatgatgagaaaggcagcattaa

SEQ ID NO: 138709 - DNA, 80 bp, synthetic construct
  misc_feature 1..80: note = Artificially Synthesized Probe
  source 1..80: mol_type = other DNA
cttcgttgtgcatggatattcatgggaaggttttcacagggcaagcaagactttgaacagtcacactagttatgctatag

SEQ ID NO: 138710 - DNA, 80 bp, synthetic construct
  misc_feature 1..80: note = Artificially Synthesized Probe
  source 1..80: mol_type = other DNA
ttttctcttttctaaatatacttaaaactcagatccttgatacctaataatttatgttccatatgtcttgaggcttgata

SEQ ID NO: 138711 - DNA, 80 bp, synthetic construct; identical to SEQ ID NO: 43507
  misc_feature 1..80: note = Artificially Synthesized Probe
  source 1..80: mol_type = other DNA

SEQ ID NO: 138712 - DNA, 80 bp, synthetic construct
  misc_feature 1..80: note = Artificially Synthesized Probe
  source 1..80: mol_type = other DNA
agtacatactcacggacacatacattgatgtaaggtttttttaattgttttatttttaaaaaataaaagatgaggtctta

SEQ ID NO: 138713 - DNA, 80 bp, synthetic construct
  misc_feature 1..80: note = Artificially Synthesized Probe
  source 1..80: mol_type = other DNA
gcgatctcggcacaccgcaacttccgcctccgaggttcagatgattctcctacctcagtctcccgagtagctgggattac

SEQ ID NO: 138714 - DNA, 80 bp, synthetic construct
  misc_feature 1..80: note = Artificially Synthesized Probe
  source 1..80: mol_type = other DNA
gcacttagcattttttatattttagtatctttgctcataaagctctaagtgttaaaaatgtgtagaaaggattattgtaa

SEQ ID NO: 138715 - DNA, 80 bp, synthetic construct
  misc_feature 1..80: note = Artificially Synthesized Probe
  source 1..80: mol_type = other DNA
gaaagtctaatggaaaataatggtaaatgtaaatgttactgagatactataattgtggggcttacaaatagagttctaat

SEQ ID NO: 138716 - DNA, 80 bp, synthetic construct; identical to SEQ ID NO: 43508
  misc_feature 1..80: note = Artificially Synthesized Probe
  source 1..80: mol_type = other DNA

SEQ ID NO: 138717 - DNA, 80 bp, synthetic construct
  misc_feature 1..80: note = Artificially Synthesized Probe
  source 1..80: mol_type = other DNA
agaccgaaccgtgggtaaataagagtgctctttttcttacctcgcatagtaaaactgcagatagggtatgatttataaca

SEQ ID NO: 138718 - DNA, 80 bp, synthetic construct
  misc_feature 1..80: note = Artificially Synthesized Probe
  source 1..80: mol_type = other DNA
catttagaagtgatatctttggttgataattgttcgggattcacaaggcaaaaaattgttaagcaaaagttattgtcact

SEQ ID NO: 138719 - DNA, 80 bp, synthetic construct
  misc_feature 1..80: note = Artificially Synthesized Probe
  source 1..80: mol_type = other DNA
aaggtttttcttataatgatggtttctttggtgtcccagtggttttttccactttggagcaaggtagatgatgggcaaga

SEQ ID NO: 138720 - DNA, 80 bp, synthetic construct; identical to SEQ ID NO: 43509
  misc_feature 1..80: note = Artificially Synthesized Probe
  source 1..80: mol_type = other DNA

SEQ ID NO: 138721 - DNA, 80 bp, synthetic construct
  misc_feature 1..80: note = Artificially Synthesized Probe
  source 1..80: mol_type = other DNA
gtttattttccccagatttacgttttggaagtactatttttttccctgtatttcctggaacaaaacccaaatccattatt

SEQ ID NO: 138722 - DNA, 80 bp, synthetic construct
  misc_feature 1..80: note = Artificially Synthesized Probe
  source 1..80: mol_type = other DNA
gaattatgtggatgtgatggtgcctttaactgagatgcaaaagactgtgagaggaactcattttgagcagtctttgctaa

SEQ ID NO: 138723 - DNA, 80 bp, synthetic construct
  misc_feature 1..80: note = Artificially Synthesized Probe
  source 1..80: mol_type = other DNA
atcagaagcactgaaactagtgggaaagggagagagagatgaggaccaaccttttggagctcatttagtggtcaagaaga

SEQ ID NO: 138724 - DNA, 80 bp, synthetic construct; identical to SEQ ID NO: 43510
  misc_feature 1..80: note = Artificially Synthesized Probe
  source 1..80: mol_type = other DNA

SEQ ID NO: 138725 - DNA, 80 bp, synthetic construct
  misc_feature 1..80: note = Artificially Synthesized Probe
  source 1..80: mol_type = other DNA
gttttgagagtccttttgtttgttgcctcatagttagtttttaaatttcagaaatatcgccgcatatctacaactatctg

SEQ ID NO: 138726 - DNA, 80 bp, synthetic construct
  misc_feature 1..80: note = Artificially Synthesized Probe
  source 1..80: mol_type = other DNA
ttagacctaaaaccataaaaaccctagaagaaaacctaggcattgccattcaggacataggcatgggcaaggacttcatg

SEQ ID NO: 138727 - DNA, 80 bp, synthetic construct
  misc_feature 1..80: note = Artificially Synthesized Probe
  source 1..80: mol_type = other DNA
aacctactcatctgacaaagggctaatatccagaatctacaatgaactctaacaaatttacaagaaaaaaacaaacaacc

SEQ ID NO: 138728 - DNA, 80 bp, synthetic construct; identical to SEQ ID NO: 43511
  misc_feature 1..80: note = Artificially Synthesized Probe
  source 1..80: mol_type = other DNA

SEQ ID NO: 138729 - DNA, 80 bp, synthetic construct
  misc_feature 1..80: note = Artificially Synthesized Probe
  source 1..80: mol_type = other DNA
ttcacaatagcaaagacttggaaccaacccaaatgtccaacaatgatagactggattaagaaaatgtggcacatatacac

SEQ ID NO: 138730 - DNA, 80 bp, synthetic construct
  misc_feature 1..80: note = Artificially Synthesized Probe
  source 1..80: mol_type = other DNA
ggacacaggaaggggaacatcacactctgagggctgttgtggggtaaggggaagggggaggggggagggatagcattagg

SEQ ID NO: 138731 - DNA, 80 bp, synthetic construct; identical to SEQ ID NO: 43512
  misc_feature 1..80: note = Artificially Synthesized Probe
  source 1..80: mol_type = other DNA

SEQ ID NO: 138732 - DNA, 80 bp, synthetic construct; identical to SEQ ID NO: 43304
  misc_feature 1..80: note = Artificially Synthesized Probe
  source 1..80: mol_type = other DNA

SEQ ID NO: 138733 - DNA, 80 bp, synthetic construct
  misc_feature 1..80: note = Artificially Synthesized Probe
  source 1..80: mol_type = other DNA
acacaaactacttagcaaattgcttacaatgacttctttactctgtttcacatatactaccttcaatgtaatccccctct

SEQ ID NO: 138734 - DNA, 80 bp, synthetic construct
  misc_feature 1..80: note = Artificially Synthesized Probe
  source 1..80: mol_type = other DNA
ttgtctttggttttcaacacattgattataatgtgaagtgagagtgagagagagaaagttgtgtgagcgtgtgtgtgtgt

SEQ ID NO: 138735 - DNA, 80 bp, synthetic construct
  misc_feature 1..80: note = Artificially Synthesized Probe
  source 1..80: mol_type = other DNA
cattttcgacctctgtgtggatcccacgtgtctctcatgctatgatctgttctcgttgttccttctccttactctttagt

SEQ ID NO: 138736 - DNA, 80 bp, synthetic construct; identical to SEQ ID NO: 43513
  misc_feature 1..80: note = Artificially Synthesized Probe
  source 1..80: mol_type = other DNA

SEQ ID NO: 138737 - DNA, 80 bp, synthetic construct
  misc_feature 1..80: note = Artificially Synthesized Probe
  source 1..80: mol_type = other DNA
aagacttggtccctgtgtggtttgtccctgtggacatcctgtgtttttgattgagcttggacaggtgggcatagcttctc

SEQ ID NO: 138738 - DNA, 80 bp, synthetic construct
  misc_feature 1..80: note = Artificially Synthesized Probe
  source 1..80: mol_type = other DNA
ggccacagaacacttcgctctgcgtcacccccttcaccccacacccaccacctcatcaaagccagtgtcgtgggaagacc

SEQ ID NO: 138739 - DNA, 80 bp, synthetic construct
  misc_feature 1..80: note = Artificially Synthesized Probe
  source 1..80: mol_type = other DNA
gtggcatctgttcatagcttagctccaagggcccctttgtccgcctcctcctctaattcgtcttgttctggtagctccca

SEQ ID NO: 138740 - DNA, 80 bp, synthetic construct
  misc_feature 1..80: note = Artificially Synthesized Probe
  source 1..80: mol_type = other DNA
ctttaaaattgtatggaaaaaattcttagtaagtggaatagtagaaggaaagtgatgtaagtggatgtcccattatctgc

SEQ ID NO: 138741 - DNA, 80 bp, synthetic construct; identical to SEQ ID NO: 43514
  misc_feature 1..80: note = Artificially Synthesized Probe
  source 1..80: mol_type = other DNA

SEQ ID NO: 138742 - DNA, 80 bp, synthetic construct
  misc_feature 1..80: note = Artificially Synthesized Probe
  source 1..80: mol_type = other DNA
cctctaatgatcctcctgcctcagcctcccacagtgctgtagttacaggcattagtcaccgctcccagccactactcttt

SEQ ID NO: 138743 - DNA, 80 bp, synthetic construct
  misc_feature 1..80: note = Artificially Synthesized Probe
  source 1..80: mol_type = other DNA
ccagtgccctgactgcattgtggatagtatatgagaaacagaagaagataaacatatttttttatcaggaagggagagga

SEQ ID NO: 138744 - DNA, 80 bp, synthetic construct
  misc_feature 1..80: note = Artificially Synthesized Probe
  source 1..80: mol_type = other DNA
ttataaattcttgaaaataaagggtctaatggaaaacttaatgagaaaggaggggctctatcacatgtcacctcccccac

SEQ ID NO: 138745 - DNA, 80 bp, synthetic construct; identical to SEQ ID NO: 43515
  misc_feature 1..80: note = Artificially Synthesized Probe
  source 1..80: mol_type = other DNA

SEQ ID NO: 138746 - DNA, 80 bp, synthetic construct
  misc_feature 1..80: note = Artificially Synthesized Probe
  source 1..80: mol_type = other DNA
aaaataaaataaatggatcatattttatcagtagaatttttggtaggattataacctaccaaacaaagaaaatggattat

SEQ ID NO: 138747 - DNA, 80 bp, synthetic construct
  misc_feature 1..80: note = Artificially Synthesized Probe
  source 1..80: mol_type = other DNA
tgttttaagaatttcccaacagtgtcttatgaaaatgtcactgacgcatctctgctacccaagtagcacagtgtcggccc

SEQ ID NO: 138748 - DNA, 80 bp, synthetic construct
  misc_feature 1..80: note = Artificially Synthesized Probe
  source 1..80: mol_type = other DNA
taatctccaggagaaaatgagttttgttttattttgggggcttatccctctgtttatgtcatacactagcaatatgggat

SEQ ID NO: 138749 - DNA, 80 bp, synthetic construct; identical to SEQ ID NO: 43516
  misc_feature 1..80: note = Artificially Synthesized Probe
  source 1..80: mol_type = other DNA

SEQ ID NO: 138750 - DNA, 80 bp, synthetic construct
  misc_feature 1..80: note = Artificially Synthesized Probe
  source 1..80: mol_type = other DNA
gttgttccaatctctatgtaaaatgtatctaagtatggactgcgtttacttctccagcacgattcgtttggacttgggat

SEQ ID NO: 138751 - DNA, 80 bp, synthetic construct
  misc_feature 1..80: note = Artificially Synthesized Probe
  source 1..80: mol_type = other DNA
ttctggttactttggctgatgttgactttgaggtgaaaaattagatatttcaccttctgattcaacccctctggttcatt

SEQ ID NO: 138752 - DNA, 80 bp, synthetic construct
  misc_feature 1..80: note = Artificially Synthesized Probe
  source 1..80: mol_type = other DNA
gattttcacttgccctgtctactctttatttgtagtccattttgtcataagaattgggtacttcccttaggaaaaattct

SEQ ID NO: 138753 - DNA, 80 bp, synthetic construct
  misc_feature 1..80: note = Artificially Synthesized Probe
  source 1..80: mol_type = other DNA
tagtgatacaattggatatgacatttgtcatttaaattgatatccataaaattcaatacacaaagtattattctaataag

SEQ ID NO: 138754 - DNA, 80 bp, synthetic construct; identical to SEQ ID NO: 43517
  misc_feature 1..80: note = Artificially Synthesized Probe
  source 1..80: mol_type = other DNA

SEQ ID NO: 138755 - DNA, 80 bp, synthetic construct
  misc_feature 1..80: note = Artificially Synthesized Probe
  source 1..80: mol_type = other DNA
aaatcccatttctctgtagctgtaaagaaaattcattataatgtctttagttgtacgagatggtttcatcgtgattagtt

SEQ ID NO: 138756 - DNA, 80 bp, synthetic construct
  misc_feature 1..80: note = Artificially Synthesized Probe
  source 1..80: mol_type = other DNA
gtttagttggtagtgaggctcacagctcaagtagggatatcatgctggttttataggagaaacatgttacaggtaaaaca

SEQ ID NO: 138757 - DNA, 80 bp, synthetic construct
  misc_feature 1..80: note = Artificially Synthesized Probe
  source 1..80: mol_type = other DNA
atagttcctcttgctgagataaagtttatgttgttcattttataaacagctcccacacatccccttgtttgctttgtggt

SEQ ID NO: 138758 - DNA, 80 bp, synthetic construct
  misc_feature 1..80: note = Artificially Synthesized Probe
  source 1..80: mol_type = other DNA
tagttataaattagtctcaaaattactatgacactatttaagatatttgtttttcaataaatgagtatctatttttgcat

SEQ ID NO: 138759 - DNA, 80 bp, synthetic construct
  misc_feature 1..80: note = Artificially Synthesized Probe
  source 1..80: mol_type = other DNA
ttaagtgtgaccatgaggtgtttttttgtggaccattttaaagccaatgataggttctaaagcaatctcaacctgagtga

SEQ ID NO: 138760 - DNA, 80 bp, synthetic construct; identical to SEQ ID NO: 43518
  misc_feature 1..80: note = Artificially Synthesized Probe
  source 1..80: mol_type = other DNA

SEQ ID NO: 138761 - DNA, 80 bp, synthetic construct
  misc_feature 1..80: note = Artificially Synthesized Probe
  source 1..80: mol_type = other DNA
aacctgtgactgcttgtccatgggtcaagttgtctcatatttgatttattaaaatgagttgttcttctattctggacatg

SEQ ID NO: 138762 - DNA, 80 bp, synthetic construct
  misc_feature 1..80: note = Artificially Synthesized Probe
  source 1..80: mol_type = other DNA
ctacttgaagatttttattttagcttatccagtgaaatttgttcactgtccttcttttgactaaaataagcgaagctcct

SEQ ID NO: 138763 - DNA, 80 bp, synthetic construct; identical to SEQ ID NO: 43519
  misc_feature 1..80: note = Artificially Synthesized Probe
  source 1..80: mol_type = other DNA

SEQ ID NO: 138764 - DNA, 80 bp, synthetic construct
  misc_feature 1..80: note = Artificially Synthesized Probe
  source 1..80: mol_type = other DNA
tgactcttgataaatcataaagaaaacaatttttctctctgtctccctcctgcccttctgcgctgagacatgtcacagct

SEQ ID NO: 138765 - DNA, 80 bp, synthetic construct
  misc_feature 1..80: note = Artificially Synthesized Probe
  source 1..80: mol_type = other DNA
tgagcctctgtaaaagttcattattgaaactgtagggagtttactatggaaaaggccggaaaaaaaatagctgtagatat

SEQ ID NO: 138766 - DNA, 80 bp, synthetic construct
  misc_feature 1..80: note = Artificially Synthesized Probe
  source 1..80: mol_type = other DNA
tagtctttaaatacagaatgtataatatccggtgagggtgataggccttcctaatccaaggatatggaagtttaacagtg

SEQ ID NO: 138767 - DNA, 80 bp, synthetic construct
  misc_feature 1..80: note = Artificially Synthesized Probe
  source 1..80: mol_type = other DNA
aaacccagacaattagatggaaatgccaataaagcattggttttaaaaatattttttgagtggagaatatattacatttt

SEQ ID NO: 138768 - DNA, 80 bp, synthetic construct
  misc_feature 1..80: note = Artificially Synthesized Probe
  source 1..80: mol_type = other DNA
ggggcatggcattcctaggacgggacctgtgctctttcttttgttcctccctgtgtcctttggctgtcataatccctagc

SEQ ID NO: 138769 - DNA, 80 bp, synthetic construct; identical to SEQ ID NO: 43520
  misc_feature 1..80: note = Artificially Synthesized Probe
  source 1..80: mol_type = other DNA

SEQ ID NO: 138770 - DNA, 80 bp, synthetic construct
  misc_feature 1..80: note = Artificially Synthesized Probe
  source 1..80: mol_type = other DNA
agagtattacagaagaagaaaggagggatcaggataatgaagacagtggcttaactttgggaagagttttgtgcaagtgt

SEQ ID NO: 138771 - DNA, 80 bp, synthetic construct
  misc_feature 1..80: note = Artificially Synthesized Probe
  source 1..80: mol_type = other DNA
caggcaactgcccagggatccatgatgtctagtagccatttgggttggtgagcagccctacagactgcagagagctgtcc

SEQ ID NO: 138772 - DNA, 80 bp, synthetic construct
  misc_feature 1..80: note = Artificially Synthesized Probe
  source 1..80: mol_type = other DNA
ctgttttggtgcaaagtgaaagactgcagtgctggggactactgcttgatcaacttctgttagctgacattgtgaagtag

SEQ ID NO: 138773 - DNA, 80 bp, synthetic construct; identical to SEQ ID NO: 43521
  misc_feature 1..80: note = Artificially Synthesized Probe
  source 1..80: mol_type = other DNA

SEQ ID NO: 138774 - DNA, 80 bp, synthetic construct
  misc_feature 1..80: note = Artificially Synthesized Probe
  source 1..80: mol_type = other DNA
agacagcaccagtcgtaggcagaaggctaagaatgcttatgcatgtgtgttctttctcaacccctgatttcttcagagat

SEQ ID NO: 138775 - DNA, 80 bp, synthetic construct
  misc_feature 1..80: note = Artificially Synthesized Probe
  source 1..80: mol_type = other DNA
tgcaccaacctagtattttgcaaagtcttaattgagaagttttagacttagttttcaaggcattgagaagctatgcagta

SEQ ID NO: 138776 - DNA, 80 bp, synthetic construct; identical to SEQ ID NO: 43522
  misc_feature 1..80: note = Artificially Synthesized Probe
  source 1..80: mol_type = other DNA

SEQ ID NO: 138777 - DNA, 80 bp, synthetic construct
  misc_feature 1..80: note = Artificially Synthesized Probe
  source 1..80: mol_type = other DNA
ggacatttgggttggttccaagtctttgctattgtgaatagtgccgcaataaacatatgtgtgcatgtgtctttatagta

SEQ ID NO: 138778 - DNA, 80 bp, synthetic construct; identical to SEQ ID NO: 43305
  misc_feature 1..80: note = Artificially Synthesized Probe
  source 1..80: mol_type = other DNA

SEQ ID NO: 138779 - DNA, 80 bp, synthetic construct
  misc_feature 1..80: note = Artificially Synthesized Probe
  source 1..80: mol_type = other DNA
catcctctccagcatctgttgtttcctgactttttaatgattgcccatgataactggtgtgagatggtacctcattgtgg

SEQ ID NO: 138780 - DNA, 80 bp, synthetic construct
  misc_feature 1..80: note = Artificially Synthesized Probe
  source 1..80: mol_type = other DNA
ctggatattagccctctgtcagatggatagattgcaaaatttttctcccattctgtaggttgcgtgttcacaatgatggt

SEQ ID NO: 138781 - DNA, 80 bp, synthetic construct; identical to SEQ ID NO: 43523
  misc_feature 1..80: note = Artificially Synthesized Probe
  source 1..80: mol_type = other DNA

SEQ ID NO: 138782 - DNA, 80 bp, synthetic construct
  misc_feature 1..80: note = Artificially Synthesized Probe
  source 1..80: mol_type = other DNA
ggtaccagtaccatgctattttggttagtgtagccttgtagtataatttgaagtcaggtagcatgatgccttcagctttg

SEQ ID NO: 138783 - DNA, 80 bp, synthetic construct
  misc_feature 1..80: note = Artificially Synthesized Probe
  source 1..80: mol_type = other DNA
aatattgattcttcctatccataagcatagaatatttttccatttgtttgtgtcctctcttatttccttgagcattggtt

SEQ ID NO: 138784 - DNA, 80 bp, synthetic construct
  misc_feature 1..80: note = Artificially Synthesized Probe
  source 1..80: mol_type = other DNA
acataagcgaaggagaaataaaatcctctacagacatgcaaatgctgagagatttttgtcaccaccagggctgccttaca

SEQ ID NO: 138785 - DNA, 80 bp, synthetic construct
  misc_feature 1..80: note = Artificially Synthesized Probe
  source 1..80: mol_type = other DNA
ataacaatattaaccttaaatgtaaaagggctaaatgccccaattaaaaaacacagactggcaagttggatgcagagtca

SEQ ID NO: 138786 - DNA, 80 bp, synthetic construct; identical to SEQ ID NO: 43524
  misc_feature 1..80: note = Artificially Synthesized Probe
  source 1..80: mol_type = other DNA

SEQ ID NO: 138787 - DNA, 80 bp, synthetic construct
  misc_feature 1..80: note = Artificially Synthesized Probe
  source 1..80: mol_type = other DNA
ttgaactcagctctggaccaagcagacctaatagacatctatagagctctccaccccaaatcaacagaatatacattctt

SEQ ID NO: 138788 - DNA, 80 bp, synthetic construct
  misc_feature 1..80: note = Artificially Synthesized Probe
  source 1..80: mol_type = other DNA
actacatggaaactgaacaaccttctcctgagtgactactggataaataacgaaatgaaggcagaaataaagatgttctt

SEQ ID NO: 138789 - DNA, 80 bp, synthetic construct
  misc_feature 1..80: note = Artificially Synthesized Probe
  source 1..80: mol_type = other DNA
gatgtttgaaatataacatgtgtgtcctctggaatagaaacgatattctattccgacatgagtgagaattttactatact

SEQ ID NO: 138790 - DNA, 80 bp, synthetic construct; identical to SEQ ID NO: 43525
  misc_feature 1..80: note = Artificially Synthesized Probe
  source 1..80: mol_type = other DNA

SEQ ID NO: 138791 - DNA, 80 bp, synthetic construct
  misc_feature 1..80: note = Artificially Synthesized Probe
  source 1..80: mol_type = other DNA
aaaatgataaagggatatcaccaccaatcccacagaaatacaaactaccatcagagaatactataaacacctctacacaa

SEQ ID NO: 138792 - DNA, 80 bp, synthetic construct
  misc_feature 1..80: note = Artificially Synthesized Probe
  source 1..80: mol_type = other DNA
cggattcacagccgaattctaccagaggtaccaagaagagctggtacctttccttctgaaactattccaaagaatataaa

SEQ ID NO: 138793 - DNA, 80 bp, synthetic construct
  misc_feature 1..80: note = Artificially Synthesized Probe
  source 1..80: mol_type = other DNA
tcaaaaagcttatccgctacgatcaagtcgccttcatacctgggatgcaaggctagttccaaatacacaaatcaataaat

SEQ ID NO: 138794 - DNA, 80 bp, synthetic construct
  misc_feature 1..80: note = Artificially Synthesized Probe
  source 1..80: mol_type = other DNA
atcaatagaacacatttatgacaaaccaacagccattatcatgctgaatgggcaaaaactggaagcattccctttgtaaa

SEQ ID NO: 138795 - DNA, 80 bp, synthetic construct; identical to SEQ ID NO: 43526
  misc_feature 1..80: note = Artificially Synthesized Probe
  source 1..80: mol_type = other DNA

SEQ ID NO: 138796 - DNA, 80 bp, synthetic construct
  misc_feature 1..80: note = Artificially Synthesized Probe
  source 1..80: mol_type = other DNA
tgtgtggtcttggttttgtcaggttttgcctttctatattttaaatgagaggcttatgatgtattgattcttatgtgatc

SEQ ID NO: 138797 - DNA, 80 bp, synthetic construct
  misc_feature 1..80: note = Artificially Synthesized Probe
  source 1..80: mol_type = other DNA
gacttgcactaagctagcacaaagcatctgtctataagagctcacctaaccacatacactaaactgtttggctacagaat

SEQ ID NO: 138798 - DNA, 80 bp, synthetic construct
  misc_feature 1..80: note = Artificially Synthesized Probe
  source 1..80: mol_type = other DNA
ttaaattagaggaataaagttgccctcaatgaaggtatttcttcaagtctgtatgcaggtaagtctagacatgtggttgt

SEQ ID NO: 138799 - DNA, 80 bp, synthetic construct; identical to SEQ ID NO: 43527
  misc_feature 1..80: note = Artificially Synthesized Probe
  source 1..80: mol_type = other DNA

SEQ ID NO: 138800 - DNA, 80 bp, synthetic construct
  misc_feature 1..80: note = Artificially Synthesized Probe
  source 1..80: mol_type = other DNA
ttgtcagtaattttaatattttcctccgaagccaaacagagaattcctgcatccactggaatgtctgatttacccttatt

SEQ ID NO: 138801 - DNA, 80 bp, synthetic construct
  misc_feature 1..80: note = Artificially Synthesized Probe
  source 1..80: mol_type = other DNA
gaggcccctaagcttgaaggcctcctgccaggtgaaggtgctaggcttctgtagcataagtggccagagaactgggactc

SEQ ID NO: 138802 - DNA, 80 bp, synthetic construct
  misc_feature 1..80: note = Artificially Synthesized Probe
  source 1..80: mol_type = other DNA
tgtgctgtggaacagggcagacaagatcattttcaaactccctgtattctgaatgaatgtttttagactttgtattgaat

SEQ ID NO: 138803 - DNA, 80 bp, synthetic construct; identical to SEQ ID NO: 43528
  misc_feature 1..80: note = Artificially Synthesized Probe
  source 1..80: mol_type = other DNA

SEQ ID NO: 138804 - DNA, 80 bp, synthetic construct
  misc_feature 1..80: note = Artificially Synthesized Probe
  source 1..80: mol_type = other DNA
tactttcacccacttggtttagtgtccattgatgtttctagcctgaattagtgctataatggttgccaaatatagacttt

SEQ ID NO: 138805 - DNA, 80 bp, synthetic construct
  misc_feature 1..80: note = Artificially Synthesized Probe
  source 1..80: mol_type = other DNA
gggagcctcatcaagccacctcatgtgtccttttgatgtgtctccattattcttgaagcacttctttctttgctgaaatc

SEQ ID NO: 138806 - DNA, 80 bp, synthetic construct
  misc_feature 1..80: note = Artificially Synthesized Probe
  source 1..80: mol_type = other DNA
acaaagctgcgaggtttgcacacatttacatctgtgtgtatttctaagtctgtcttaatgtgttgacaaccattaggtca

SEQ ID NO: 138807 - DNA, 80 bp, synthetic construct
  misc_feature 1..80: note = Artificially Synthesized Probe
  source 1..80: mol_type = other DNA
ttaatatttgtttgttgtttgttttttaaccctatacatagctgatttctggtgctgccggtctgcctcgctactcaggt

SEQ ID NO: 138808 - DNA, 80 bp, synthetic construct; identical to SEQ ID NO: 43529
  misc_feature 1..80: note = Artificially Synthesized Probe
  source 1..80: mol_type = other DNA

SEQ ID NO: 138809 - DNA, 80 bp, synthetic construct
  misc_feature 1..80: note = Artificially Synthesized Probe
  source 1..80: mol_type = other DNA
ctttttctcatgttctcagccaagttagcaatgctgtggccaggaaaagtttccacatagctgttactctcctgggaggc

SEQ ID NO: 138810 - DNA, 80 bp, synthetic construct
  misc_feature 1..80: note = Artificially Synthesized Probe
  source 1..80: mol_type = other DNA
aataatgatgaatgtctaccagaagcattcatttgtttttagcactgcttatgggaacctgttctttccaccactgtata

SEQ ID NO: 138811 - DNA, 80 bp, synthetic construct
  misc_feature 1..80: note = Artificially Synthesized Probe
  source 1..80: mol_type = other DNA
caatgtgatacttactagtgggttatctgtggtgagttatgtaaactctctgattgtattttcctaatgcataaaagggg

SEQ ID NO: 138812 - DNA, 80 bp, synthetic construct; identical to SEQ ID NO: 43530
  misc_feature 1..80: note = Artificially Synthesized Probe
  source 1..80: mol_type = other DNA

SEQ ID NO: 138813 - DNA, 80 bp, synthetic construct
  misc_feature 1..80: note = Artificially Synthesized Probe
  source 1..80: mol_type = other DNA
tctattcaacgaatgcctccatccaaaatgagcggatttttcaggaaacgttaagatatttctccatttccatataaatc

SEQ ID NO: 138814 - DNA, 80 bp, synthetic construct
  misc_feature 1..80: note = Artificially Synthesized Probe
  source 1..80: mol_type = other DNA
ttgctttatgcttttctgagtagcctgtagtcagaatgcactgtttagtaatgtagaatcatttgtaataggcattcagt

SEQ ID NO: 138815 - DNA, 80 bp, synthetic construct
  misc_feature 1..80: note = Artificially Synthesized Probe
  source 1..80: mol_type = other DNA
ttgaaaagaaagctggcagagactttcaaagcaatgttcagcatttctgtaggtctaatttgggtgagtgaaggggaaca

SEQ ID NO: 138816 - DNA, 80 bp, synthetic construct
  misc_feature 1..80: note = Artificially Synthesized Probe
  source 1..80: mol_type = other DNA
tgctttttttatattaggttttatagcatctttaagatgtgaggtttctggatcacatttgaaaaactgctaattctggt

SEQ ID NO: 138817 - DNA, 80 bp, synthetic construct
  misc_feature 1..80: note = Artificially Synthesized Probe
  source 1..80: mol_type = other DNA
aaggaatttattggaaggctatagatggctttcagaattgatgggaaggctggggaactggattcagaaaataggcagca

SEQ ID NO: 138818 - DNA, 80 bp, synthetic construct; identical to SEQ ID NO: 43531
  misc_feature 1..80: note = Artificially Synthesized Probe
  source 1..80: mol_type = other DNA

SEQ ID NO: 138819 - DNA, 80 bp, synthetic construct
  misc_feature 1..80: note = Artificially Synthesized Probe
  source 1..80: mol_type = other DNA
tgtttaagccacccagtctgtggtattttgttacggcagccctagcacactaatgtacacccacattttaacctttttta

SEQ ID NO: 138820 - DNA, 80 bp, synthetic construct
  misc_feature 1..80: note = Artificially Synthesized Probe
  source 1..80: mol_type = other DNA
accatgcctggctaatttttgtttgtttgttttttgtcaatatggggttttgatacattgtccaggcaggtcttgcactt

SEQ ID NO: 138821 - DNA, 80 bp, synthetic construct
  misc_feature 1..80: note = Artificially Synthesized Probe
  source 1..80: mol_type = other DNA
tttgatgtaatgtatggcgtatgtatggtgtaatgtatgtagtgtatggtgtaatgtatattatgtatggtgatcagatc

SEQ ID NO: 138822 - DNA, 80 bp, synthetic construct; identical to SEQ ID NO: 43532
  misc_feature 1..80: note = Artificially Synthesized Probe
  source 1..80: mol_type = other DNA

SEQ ID NO: 138823 - DNA, 80 bp, synthetic construct
  misc_feature 1..80: note = Artificially Synthesized Probe
  source 1..80: mol_type = other DNA
ggctgaatagtatttcattgtgtatgtatatataccatgttttccttatccgttcttctgctgttggacacctaggttga

SEQ ID NO: 138824 - DNA, 80 bp, synthetic construct
  misc_feature 1..80: note = Artificially Synthesized Probe
  source 1..80: mol_type = other DNA
ctcttgaactgttttcttcttgcaaaatggaaactgtgtatcctttaaacagtaactctctgtttttttccttcagccca

SEQ ID NO: 138825 - DNA, 80 bp, synthetic construct; identical to SEQ ID NO: 43306
  misc_feature 1..80: note = Artificially Synthesized Probe
  source 1..80: mol_type = other DNA

SEQ ID NO: 138826 - DNA, 80 bp, synthetic construct; identical to SEQ ID NO: 43533
  misc_feature 1..80: note = Artificially Synthesized Probe
  source 1..80: mol_type = other DNA

SEQ ID NO: 138827 - DNA, 80 bp, synthetic construct
  misc_feature 1..80: note = Artificially Synthesized Probe
  source 1..80: mol_type = other DNA
gtgtgtggaggggcctccctgtgctcctgacgccctttacctcccaccctccgtgtgctgtggccctgggcacagttact

SEQ ID NO: 138828 - DNA, 80 bp, synthetic construct
  misc_feature 1..80: note = Artificially Synthesized Probe
  source 1..80: mol_type = other DNA
gagagtcttcatgtggggagatgattcactcaactctgagtgtgtttgtgctgggttcttacaccttgaggcatgatttt

SEQ ID NO: 138829 - DNA, 80 bp, synthetic construct
  misc_feature 1..80: note = Artificially Synthesized Probe
  source 1..80: mol_type = other DNA
gtaaaatgatcaaccttgtgatgtgttgattttgacattctctctagttatacgtgaggggaagcaacctgagagtaact

SEQ ID NO: 138830 - DNA, 80 bp, synthetic construct; identical to SEQ ID NO: 43534
  misc_feature 1..80: note = Artificially Synthesized Probe
  source 1..80: mol_type = other DNA

SEQ ID NO: 138831 - DNA, 80 bp, synthetic construct
  misc_feature 1..80: note = Artificially Synthesized Probe
  source 1..80: mol_type = other DNA
tggattgtcttttatgactttatgacctgtttcttacacacatatgtgcaacacacatactacattttccatgaagctat

SEQ ID NO: 138832 - DNA, 80 bp, synthetic construct
  misc_feature 1..80: note = Artificially Synthesized Probe
  source 1..80: mol_type = other DNA
ctacactggtggtgttccatgatcacgaacacaagctttctatatatttgctgttccctcaggatagtttgggcatttta

SEQ ID NO: 138833 - DNA, 80 bp, synthetic construct
  misc_feature 1..80: note = Artificially Synthesized Probe
  source 1..80: mol_type = other DNA
gatgagcttggcaccactgtaggtgctgaggacacagttaaaaatgagaaagaccagattcctgttctctagtgagatta

SEQ ID NO: 138834 - DNA, 80 bp, synthetic construct
  misc_feature 1..80: note = Artificially Synthesized Probe
  source 1..80: mol_type = other DNA
acctgcaggatgcaaaggtgccagcactgcacagagaggtgtaggtggataggctgggaagcatacttgagcctgtggag

SEQ ID NO: 138835 - DNA, 80 bp, synthetic construct; identical to SEQ ID NO: 43535
  misc_feature 1..80: note = Artificially Synthesized Probe
  source 1..80: mol_type = other DNA

SEQ ID NO: 138836 - DNA, 80 bp, synthetic construct
  misc_feature 1..80: note = Artificially Synthesized Probe
  source 1..80: mol_type = other DNA
gactgtgaggtaggatctcatattcctttttgaacacttagtactgagaagccttttagacaccagagtggagatagcaa

SEQ ID NO: 138837 - DNA, 80 bp, synthetic construct
  misc_feature 1..80: note = Artificially Synthesized Probe
  source 1..80: mol_type = other DNA
cgagacaactcactgccctctggctgtgggcagcagcccccagctcctcactggctctgagtcggaggcctcatttcctt

SEQ ID NO: 138838 - DNA, 80 bp, synthetic construct
  misc_feature 1..80: note = Artificially Synthesized Probe
  source 1..80: mol_type = other DNA
atttgttcagtagcagtaaaacaaaatcaccgattaacccttatgtggcgcagatgaatgtctttaagccagcttgcaaa

SEQ ID NO: 138839 - DNA, 80 bp, synthetic construct; identical to SEQ ID NO: 43536
  misc_feature 1..80: note = Artificially Synthesized Probe
  source 1..80: mol_type = other DNA

SEQ ID NO: 138840 - DNA, 80 bp, synthetic construct
  misc_feature 1..80: note = Artificially Synthesized Probe
  source 1..80: mol_type = other DNA
atatttccatagaacaaatcatacatggaaacttctggatgaagccagtcagatatatttgatgacctctacacccacca

SEQ ID NO: 138841 - DNA, 80 bp, synthetic construct
  misc_feature 1..80: note = Artificially Synthesized Probe
  source 1..80: mol_type = other DNA
agatgccttccagagttcatagttcaccagtatgactttggctttgagtgatctttggatcaaacatgactttctgctgc

SEQ ID NO: 138842 - DNA, 80 bp, synthetic construct
  misc_feature 1..80: note = Artificially Synthesized Probe
  source 1..80: mol_type = other DNA
agctgtcattccacattccagggtcctgtgataggcaggttaggccactttccagctcatagtctttttcctgacctggg

SEQ ID NO: 138843 - DNA, 80 bp, synthetic construct
  misc_feature 1..80: note = Artificially Synthesized Probe
  source 1..80: mol_type = other DNA
aagggaagacggttcagttcactgagcgttgcttgagccacttgcacagaaggcccagtggtcagtgttgcacaaggtgt

SEQ ID NO: 138844 - DNA, 80 bp, synthetic construct; identical to SEQ ID NO: 43537
  misc_feature 1..80: note = Artificially Synthesized Probe
  source 1..80: mol_type = other DNA

SEQ ID NO: 138845 - DNA, 80 bp, synthetic construct
  misc_feature 1..80: note = Artificially Synthesized Probe
  source 1..80: mol_type = other DNA
aaataaaattgtaaatatgaaactgagggagagtctgccttcaggaagctgacattctaggagacaagtgagatcagctc

SEQ ID NO: 138846 - DNA, 80 bp, synthetic construct
  misc_feature 1..80: note = Artificially Synthesized Probe
  source 1..80: mol_type = other DNA
attagggcacaattagatgtgtgcttctagaagcttcgtgggacccagtattatgtaaggagttaagaagttttaaatga

SEQ ID NO: 138847 - DNA, 80 bp, synthetic construct; identical to SEQ ID NO: 43538
  misc_feature 1..80: note = Artificially Synthesized Probe
  source 1..80: mol_type = other DNA

SEQ ID NO: 138848 - DNA, 80 bp, synthetic construct
  misc_feature 1..80: note = Artificially Synthesized Probe
  source 1..80: mol_type = other DNA
tacaaacagctccgtactcaagaggaggggaattgggctccatcctttaaagggaatgtcaaaagaactcatttaaacca

SEQ ID NO: 138849 - DNA, 80 bp, synthetic construct
  misc_feature 1..80: note = Artificially Synthesized Probe
  source 1..80: mol_type = other DNA
tttctggcactggtccagatctggcctgggctttgccctgcagcttccctgtgcccagtgtaactgactcagaaggaggg

SEQ ID NO: 138850 - DNA, 80 bp, synthetic construct
  misc_feature 1..80: note = Artificially Synthesized Probe
  source 1..80: mol_type = other DNA
taatcctaacaacacgactgtgagttagatatcattgtcatcatgtgcttcctagaggtgaagtcactgtggcttgacca

SEQ ID NO: 138851 - DNA, 80 bp, synthetic construct
  misc_feature 1..80: note = Artificially Synthesized Probe
  source 1..80: mol_type = other DNA
ggctgtcccacattagattctgaatttccttccagaagaggtcattttcctgaggataaatagtgggacaaaagacaatt

SEQ ID NO: 138852 - DNA, 80 bp, synthetic construct; identical to SEQ ID NO: 43539
  misc_feature 1..80: note = Artificially Synthesized Probe
  source 1..80: mol_type = other DNA

SEQ ID NO: 138853 - DNA, 80 bp, synthetic construct
  misc_feature 1..80: note = Artificially Synthesized Probe
  source 1..80: mol_type = other DNA
tattgttacattaaagcaagatgaaatatcaaccacttctaatattattcatcaggatgctaagagtaacatgcgctcat

SEQ ID NO: 138854 - DNA, 80 bp, synthetic construct
  misc_feature 1..80: note = Artificially Synthesized Probe
  source 1..80: mol_type = other DNA
ctaatctcgttcactgcagccaccacatcctgggctcaagcagtcctcccacctcagccttctgagtagctgagacttac

SEQ ID NO: 138855 - DNA, 80 bp, synthetic construct
  misc_feature 1..80: note = Artificially Synthesized Probe
  source 1..80: mol_type = other DNA
atttgtgtaactttaaaaatacacaaaactagtccaggtctccctttactgttcactacattttttcaacattattactt

SEQ ID NO: 138856 - DNA, 80 bp, synthetic construct; identical to SEQ ID NO: 43540
  misc_feature 1..80: note = Artificially Synthesized Probe
  source 1..80: mol_type = other DNA

SEQ ID NO: 138857 - DNA, 80 bp, synthetic construct
  misc_feature 1..80: note = Artificially Synthesized Probe
  source 1..80: mol_type = other DNA
cttacaggatggtttggttttatgccactgtggtctttttcttttcttcatttccccctctcttttcatatctacattct

SEQ ID NO: 138858 - DNA, 80 bp, synthetic construct
  misc_feature 1..80: note = Artificially Synthesized Probe
  source 1..80: mol_type = other DNA
attggcagtgacctctaatatataaagcatagttttttccacagtacactatagttgttggaattccttactcagtgaac

SEQ ID NO: 138859 - DNA, 80 bp, synthetic construct
  misc_feature 1..80: note = Artificially Synthesized Probe
  source 1..80: mol_type = other DNA
cacgtggtgaaattgcctccactgttatctagtgaatggttttttagggtgttgtatactctcttctcgtggatgagttt

SEQ ID NO: 138860 - DNA, 80 bp, synthetic construct
  misc_feature 1..80: note = Artificially Synthesized Probe
  source 1..80: mol_type = other DNA
tatctatttttaaatggtttataatttatatacttctgtttcctgtgccattaatttcactattattgagtagactgtct

SEQ ID NO: 138861 - DNA, 80 bp, synthetic construct
  misc_feature 1..80: note = Artificially Synthesized Probe
  source 1..80: mol_type = other DNA
tttaatattgtatttaagaaataatttcattggtgcacatctctattagtagggaaaacaattgccattgtacattcaaa

SEQ ID NO: 138862 - DNA, 80 bp, synthetic construct; identical to SEQ ID NO: 43541
  misc_feature 1..80: note = Artificially Synthesized Probe
  source 1..80: mol_type = other DNA

SEQ ID NO: 138863 - DNA, 80 bp, synthetic construct
  misc_feature 1..80: note = Artificially Synthesized Probe
  source 1..80: mol_type = other DNA
ctctccaggttactaaatgtaactgacaagaatccattgaaaatgcattgccagttgctaagcagtgtggatacccacac

SEQ ID NO: 138864 - DNA, 80 bp, synthetic construct
  misc_feature 1..80: note = Artificially Synthesized Probe
  source 1..80: mol_type = other DNA
caggaagagtcaaaaaacagaaaacaccgttagactctataaagcacggaagaggacctaaggaagcaagtgaagaattt

SEQ ID NO: 138865 - DNA, 80 bp, synthetic construct; identical to SEQ ID NO: 43542
  misc_feature 1..80: note = Artificially Synthesized Probe
  source 1..80: mol_type = other DNA

SEQ ID NO: 138866 - DNA, 80 bp, synthetic construct
  misc_feature 1..80: note = Artificially Synthesized Probe
  source 1..80: mol_type = other DNA
caggtttgcctcattttcttaggggtcttacccagtgctgtggctgtcagtggtctctgtgggccaagaactctcaagtt

SEQ ID NO: 138867 - DNA, 80 bp, synthetic construct
  misc_feature 1..80: note = Artificially Synthesized Probe
  source 1..80: mol_type = other DNA
tcgtttattcttcaccacctcaccatccctcccaccccaatccacaagtgcttgcctctcttacagattttattttattt

SEQ ID NO: 138868 - DNA, 80 bp, synthetic construct
  misc_feature 1..80: note = Artificially Synthesized Probe
  source 1..80: mol_type = other DNA
ttcctgtttacataggccatagcctttgtagtcatcctggacttctgcctctcatagctcacatcctatctatcatgttc

SEQ ID NO: 138869 - DNA, 80 bp, synthetic construct
  misc_feature 1..80: note = Artificially Synthesized Probe
  source 1..80: mol_type = other DNA
tcatttgcgcagagctcctccctggtgcctcagttctcttagagaaaacccagtgatgaggtctctgttgtcacctctca

SEQ ID NO: 138870 - DNA, 80 bp, synthetic construct; identical to SEQ ID NO: 43307
  misc_feature 1..80: note = Artificially Synthesized Probe
  source 1..80: mol_type = other DNA

SEQ ID NO: 138871 - DNA, 80 bp, synthetic construct; identical to SEQ ID NO: 43543
  misc_feature 1..80: note = Artificially Synthesized Probe
  source 1..80: mol_type = other DNA

SEQ ID NO: 138872 - DNA, 80 bp, synthetic construct
  misc_feature 1..80: note = Artificially Synthesized Probe
  source 1..80: mol_type = other DNA
gaatttaaagttggcggtactcccaaacctcctcaccctgctctgttgtttccagcagcacttgttatttttaaacatgc

SEQ ID NO: 138873 - DNA, 80 bp, synthetic construct
  misc_feature 1..80: note = Artificially Synthesized Probe
  source 1..80: mol_type = other DNA
tgccaggtactaagagagaaagggatttgtttgtgtgttttgttttagagcaacactgatgaatttgagccatgtgcata

SEQ ID NO: 138874 - DNA, 80 bp, synthetic construct
  misc_feature 1..80: note = Artificially Synthesized Probe
  source 1..80: mol_type = other DNA
aatccttcatgttatctcctacgtttgtaccttattactaacgttgcagtcctaaaattgtgaactttctttttcgtgaa

SEQ ID NO: 138875 - DNA, 80 bp, synthetic construct; identical to SEQ ID NO: 43544
  misc_feature 1..80: note = Artificially Synthesized Probe
  source 1..80: mol_type = other DNA

SEQ ID NO: 138876 - DNA, 80 bp, synthetic construct
  misc_feature 1..80: note = Artificially Synthesized Probe
  source 1..80: mol_type = other DNA
atttcactttctttgtgttggcccataaatttacagcctctttgaaactccattataacattgttaagtgcacttctcat

SEQ ID NO: 138877 - DNA, 80 bp, synthetic construct
  misc_feature 1..80: note = Artificially Synthesized Probe
  source 1..80: mol_type = other DNA
atcctcgtattgttccttgttaggtcattagtttgtttttgaaaaacagtgacgcctttttgaccctggaagtttttccc

SEQ ID NO: 138878 - DNA, 80 bp, synthetic construct
  misc_feature 1..80: note = Artificially Synthesized Probe
  source 1..80: mol_type = other DNA
gctctgttgcccaggatggagtgcagtgttggaatctcggctcattgcaacttctgcctcctgggttcaagtgattctca

SEQ ID NO: 138879 - DNA, 80 bp, synthetic construct; identical to SEQ ID NO: 43545
  misc_feature 1..80: note = Artificially Synthesized Probe
  source 1..80: mol_type = other DNA

SEQ ID NO: 138880 - DNA, 80 bp, synthetic construct
  misc_feature 1..80: note = Artificially Synthesized Probe
  source 1..80: mol_type = other DNA
cagctcgcagggggcttgtgggcagccctgcctgtccggccttgccctgcgaggagcagggaatccagttctgctggagg

SEQ ID NO: 138881 - DNA, 80 bp, synthetic construct
  misc_feature 1..80: note = Artificially Synthesized Probe
  source 1..80: mol_type = other DNA
atataaataaaacatatgtaagttctaaactttctatatttctagatcgtttatatttattcagtcatattaagattaca

SEQ ID NO: 138882 - DNA, 80 bp, synthetic construct
  misc_feature 1..80: note = Artificially Synthesized Probe
  source 1..80: mol_type = other DNA
attacagaagataacagcacaatgaaagaattctcttacctatatgcttcctatgcatgggactagcaaatctgatctta

SEQ ID NO: 138883 - DNA, 80 bp, synthetic construct; identical to SEQ ID NO: 43546
  misc_feature 1..80: note = Artificially Synthesized Probe
  source 1..80: mol_type = other DNA

SEQ ID NO: 138884 - DNA, 80 bp, synthetic construct
  misc_feature 1..80: note = Artificially Synthesized Probe
  source 1..80: mol_type = other DNA
aatatagatgaaagtgttgaatttcaggaaaaattgatgtaaaacaattaggctgtaaatactctcaagtctcaagcact

SEQ ID NO: 138885 - DNA, 80 bp, synthetic construct
  misc_feature 1..80: note = Artificially Synthesized Probe
  source 1..80: mol_type = other DNA
tgagcttctcagaatcctcccctgagtttccgcagttggacggtgaacccctctgtgagctggagcacccttgagcacaa

SEQ ID NO: 138886 - DNA, 80 bp, synthetic construct
  misc_feature 1..80: note = Artificially Synthesized Probe
  source 1..80: mol_type = other DNA
gaatgatatatttaatatgcatctgtattattgatctaataatggctttttaaatagtaagttaaattaatacttgtatt

SEQ ID NO: 138887 - DNA, 80 bp, synthetic construct; identical to SEQ ID NO: 43547
  misc_feature 1..80: note = Artificially Synthesized Probe
  source 1..80: mol_type = other DNA

SEQ ID NO: 138888 - DNA, 80 bp, synthetic construct
  misc_feature 1..80: note = Artificially Synthesized Probe
  source 1..80: mol_type = other DNA
ctgaaagtgaaataccagaaggaagaagagccaggtgatcctgattgatgattccggagtaaagcgtgtggctcaggcca

SEQ ID NO: 138889 - DNA, 80 bp, synthetic construct
  misc_feature 1..80: note = Artificially Synthesized Probe
  source 1..80: mol_type = other DNA
tcagtgaagttactgtgggcctggtgacaatgtcacactgcctgcatgacgaatttgggtgaatctaggaagggcgaagg

SEQ ID NO: 138890 - DNA, 80 bp, synthetic construct
  misc_feature 1..80: note = Artificially Synthesized Probe
  source 1..80: mol_type = other DNA
attgaaaagaaagcactgtgatatgttggtgatgctaaagttctcctccttgagtttatgtttgctttaaatgtgtttgg

SEQ ID NO: 138891 - DNA, 80 bp, synthetic construct
  misc_feature 1..80: note = Artificially Synthesized Probe
  source 1..80: mol_type = other DNA
taacctttttcattatagtaaggattattgatatcgcaagccattagaaatgaagaatactttttattcccatttaattt

SEQ ID NO: 138892 - DNA, 80 bp, synthetic construct
  misc_feature 1..80: note = Artificially Synthesized Probe
  source 1..80: mol_type = other DNA
aaatatacaatgaagttttgcaaggaaaagattgagtttaactgtacagcatgagctaattcttccagaaggtgttatct

SEQ ID NO: 138893 - DNA, 80 bp, synthetic construct; identical to SEQ ID NO: 43548
  misc_feature 1..80: note = Artificially Synthesized Probe
  source 1..80: mol_type = other DNA

SEQ ID NO: 138894 - DNA, 80 bp, synthetic construct
  misc_feature 1..80: note = Artificially Synthesized Probe
  source 1..80: mol_type = other DNA
aacttcatgcctcactagaaattatttttgagagatgctagtgaatcaggaggaaatgtgaacattcaaaatggtctatt

SEQ ID NO: 138895 - DNA, 80 bp, synthetic construct
  misc_feature 1..80: note = Artificially Synthesized Probe
  source 1..80: mol_type = other DNA
atacagtgttggaaaagcattgtattaataaaccttttctaacaatgtctgaactgggatgttaaaacgtcttttttttt

SEQ ID NO: 138896 - DNA, 80 bp, synthetic construct; identical to SEQ ID NO: 43549
  misc_feature 1..80: note = Artificially Synthesized Probe
  source 1..80: mol_type = other DNA

SEQ ID NO: 138897 - DNA, 80 bp, synthetic construct
  misc_feature 1..80: note = Artificially Synthesized Probe
  source 1..80: mol_type = other DNA
aggccgaggctggcggaacacgaggtcaggagttcgagaccagcctggccaacatggtgaaacactgccttgactaaaaa

SEQ ID NO: 138898 - DNA, 80 bp, synthetic construct
  misc_feature 1..80: note = Artificially Synthesized Probe
  source 1..80: mol_type = other DNA
aaaaaaaaaagtggtttacatgaagtttttctgtttgcacttttgctatttgctcaaaatgattctcttaggatgttcta

SEQ ID NO: 138899 - DNA, 80 bp, synthetic construct; identical to SEQ ID NO: 43308
  misc_feature 1..80: note = Artificially Synthesized Probe
  source 1..80: mol_type = other DNA

SEQ ID NO: 138900 - DNA, 80 bp, synthetic construct
  misc_feature 1..80: note = Artificially Synthesized Probe
  source 1..80: mol_type = other DNA
aacagtgtttccccctacaatccacaagcataaacattaaggaacacagctttgaagggtgtttatatgggacagtgttt

SEQ ID NO: 138901 - DNA, 80 bp, synthetic construct
  misc_feature 1..80: note = Artificially Synthesized Probe
  source 1..80: mol_type = other DNA
aatttcagttcaaaagctctttgctttaaagttataagggtctaggttttcatgattctcatcaagagtcaaaatcttac

SEQ ID NO: 138902 - DNA, 80 bp, synthetic construct; identical to SEQ ID NO: 43550
  misc_feature 1..80: note = Artificially Synthesized Probe
  source 1..80: mol_type = other DNA

SEQ ID NO: 138903 - DNA, 80 bp, synthetic construct
  misc_feature 1..80: note = Artificially Synthesized Probe
  source 1..80: mol_type = other DNA
tcatccaagatacacctttttttcctctcatgtaaggctattgtcgtgtgtgtatactgactagttttttcagctggact

SEQ ID NO: 138904 - DNA, 80 bp, synthetic construct
  misc_feature 1..80: note = Artificially Synthesized Probe
  source 1..80: mol_type = other DNA
tatttcattgaaacatgtctgaggaccataaactacagcttaataatgatatgaattgagaaacgttgagaagaactgag

SEQ ID NO: 138905 - DNA, 80 bp, synthetic construct
  misc_feature 1..80: note = Artificially Synthesized Probe
  source 1..80: mol_type = other DNA
aaggtacaggaagtaaggccagtgcttacactgggttgtgacggatgctttatgtctacatgggcatgtgggcaagatga

SEQ ID NO: 138906 - DNA, 80 bp, synthetic construct; identical to SEQ ID NO: 43551
  misc_feature 1..80: note = Artificially Synthesized Probe
  source 1..80: mol_type = other DNA

SEQ ID NO: 138907 - DNA, 80 bp, synthetic construct
  misc_feature 1..80: note = Artificially Synthesized Probe
  source 1..80: mol_type = other DNA
gcctttgtttttgtgatgtatgcgtgaatattagattgtcatcaaagtctgtttcacagtcaattctagcttgaaaattc

SEQ ID NO: 138908 - DNA, 80 bp, synthetic construct
  misc_feature 1..80: note = Artificially Synthesized Probe
  source 1..80: mol_type = other DNA
gtcactcaggctggagtgcagtggcgcaatctcggctcactgcaacctccgcctcccggtttcaagcaattctcctgcct

SEQ ID NO: 138909 - DNA, 80 bp, synthetic construct; identical to SEQ ID NO: 43552
  misc_feature 1..80: note = Artificially Synthesized Probe
  source 1..80: mol_type = other DNA

SEQ ID NO: 138910 - DNA, 80 bp, synthetic construct
  misc_feature 1..80: note = Artificially Synthesized Probe
  source 1..80: mol_type = other DNA
tgtgtgtgtgaatgagtgcatgtgagtgaagatatgtgtgtatctgtatcagtgtgtgagtgcgtgtgtatctgagtgcg

SEQ ID NO: 138911 - DNA, 80 bp, synthetic construct
  misc_feature 1..80: note = Artificially Synthesized Probe
  source 1..80: mol_type = other DNA
acagtagcggtgccctgtccgctgcacctccgtgctcttcagtctttagtgcattcctgcctacacctgtgcacctgctt

SEQ ID NO: 138912 - DNA, 80 bp, synthetic construct
  misc_feature 1..80: note = Artificially Synthesized Probe
  source 1..80: mol_type = other DNA
attgaaatctcctgtttatgtactgtggaatattgaaaagttggctgtgtagagtttgatttccatttagtgcatgtaag

SEQ ID NO: 138913 - DNA, 80 bp, synthetic construct
  misc_feature 1..80: note = Artificially Synthesized Probe
  source 1..80: mol_type = other DNA
ttatacctgaagctgtggaataggtgaatggtacattgtttctttgattgtgtctcttttgttggaagttaaagggtttt

SEQ ID NO: 138914 - DNA, 80 bp, synthetic construct
  misc_feature 1..80: note = Artificially Synthesized Probe
  source 1..80: mol_type = other DNA
atggttaatggatagatttctttgttgcccaattttcctcttctttcctttgatttgtttctcctaaaaaacttgagatg

SEQ ID NO: 138915 - DNA, 80 bp, synthetic construct; identical to SEQ ID NO: 43553
  misc_feature 1..80: note = Artificially Synthesized Probe
  source 1..80: mol_type = other DNA

SEQ ID NO: 138916 - DNA, 80 bp, synthetic construct
  misc_feature 1..80: note = Artificially Synthesized Probe
  source 1..80: mol_type = other DNA
ttgcttgatttttcttcatagcactgaccttcgtgttccgtattatgtttattcagtttttccaaccactaataaagaac

SEQ ID NO: 138917 - DNA, 80 bp, synthetic construct
  misc_feature 1..80: note = Artificially Synthesized Probe
  source 1..80: mol_type = other DNA
cccctgataaggattctttttgcctgtctgctgttacttacggtgttctttggtttgcatggaaaactatggttctcctt

SEQ ID NO: 138918 - DNA, 80 bp, synthetic construct; identical to SEQ ID NO: 43554
  misc_feature 1..80: note = Artificially Synthesized Probe
  source 1..80: mol_type = other DNA

SEQ ID NO: 138919 - DNA, 80 bp, synthetic construct
  misc_feature 1..80: note = Artificially Synthesized Probe
  source 1..80: mol_type = other DNA
acacatttatgtattatacttatatatgttcatttgaagtattttacattatcagaaacttgggagtatggccacctgaa

SEQ ID NO: 138920 - DNA, 80 bp, synthetic construct
  misc_feature 1..80: note = Artificially Synthesized Probe
  source 1..80: mol_type = other DNA
tgatttattttattccactggccagcagatttagatgaatgagttctcatcataaacattctgagaaaaatcgccagagg

SEQ ID NO: 138921 - DNA, 80 bp, synthetic construct
  misc_feature 1..80: note = Artificially Synthesized Probe
  source 1..80: mol_type = other DNA
aaaaacattagggcatcttgaacaaaagttagagcagtctatcaagaaaggaatgtgcaactctgattatggagagggtg

SEQ ID NO: 138922 - DNA, 80 bp, synthetic construct
  misc_feature 1..80: note = Artificially Synthesized Probe
  source 1..80: mol_type = other DNA
tgagactgcgtgtttgagtgcaagtgtgagtgcgtgagggtaagtgcatgtgtgaaactgcatgtgtgagtgtgagtgcg

SEQ ID NO: 138923 - DNA, 80 bp, synthetic construct; identical to SEQ ID NO: 43555
  misc_feature 1..80: note = Artificially Synthesized Probe
  source 1..80: mol_type = other DNA

SEQ ID NO: 138924 - DNA, 80 bp, synthetic construct
  misc_feature 1..80: note = Artificially Synthesized Probe
  source 1..80: mol_type = other DNA
aggaaatatgcataacttttgaggggagggaatagtatttatacctaaaaaagaactgtgacacatgtcaaattgacaac

SEQ ID NO: 138925 - DNA, 80 bp, synthetic construct
  misc_feature 1..80: note = Artificially Synthesized Probe
  source 1..80: mol_type = other DNA
ttgagctctgtaatttagagtatctggtagagttttgtaataatagctacacattaaacatgatttcatttcttcacttt

SEQ ID NO: 138926 - DNA, 80 bp, synthetic construct
  misc_feature 1..80: note = Artificially Synthesized Probe
  source 1..80: mol_type = other DNA
ctgaaaaatgagttgtaagtcataaccgaggcttcataaaaaatcaattgcaaatgattttttcaaggtttgtgatgtga

SEQ ID NO: 138927 - DNA, 80 bp, synthetic construct; identical to SEQ ID NO: 43556
  misc_feature 1..80: note = Artificially Synthesized Probe
  source 1..80: mol_type = other DNA

SEQ ID NO: 138928 - DNA, 80 bp, synthetic construct
  misc_feature 1..80: note = Artificially Synthesized Probe
  source 1..80: mol_type = other DNA
tgctcctagccactactgttgtctttgtatcatttcataaatattgtgatttctgagcatacttctatggcattcatgtt

SEQ ID NO: 138929 - DNA, 80 bp, synthetic construct
  misc_feature 1..80: note = Artificially Synthesized Probe
  source 1..80: mol_type = other DNA
ctgacttgtctgagtggccagacatcctgagattggggccagagttgtcttctttgcatcgttaggctttacgattatag

SEQ ID NO: 138930 - DNA, 80 bp, synthetic construct
  misc_feature 1..80: note = Artificially Synthesized Probe
  source 1..80: mol_type = other DNA
ccagcatgttatctttgttgctttacttgtctgtgttgctgctctctgtttgttcatctgtccatccccactgtgtaccc

SEQ ID NO: 138931 - DNA, 80 bp, synthetic construct
  misc_feature 1..80: note = Artificially Synthesized Probe
  source 1..80: mol_type = other DNA
gcatctttgtgaccttttttgccaagccactgtagttgtcagggagcagagagatggagagagatggtctttatccctcg

SEQ ID NO: 138932 - DNA, 80 bp, synthetic construct
  misc_feature 1..80: note = Artificially Synthesized Probe
  source 1..80: mol_type = other DNA
aaagaattgggattttgttttcggatcagtgggaagccactggacaaattttaatgacttcatggcagaatttattgatc

SEQ ID NO: 138933 - DNA, 80 bp, synthetic construct; identical to SEQ ID NO: 43557
  misc_feature 1..80: note = Artificially Synthesized Probe
  source 1..80: mol_type = other DNA

SEQ ID NO: 138934 - DNA, 80 bp, synthetic construct
  misc_feature 1..80: note = Artificially Synthesized Probe
  source 1..80: mol_type = other DNA
tgtcatgcatgccgccctagcgtgtgaaatggtttcatttgactgaaataattgtttctcaaattcttcccgaaatgcct

SEQ ID NO: 138935 - DNA, 80 bp, synthetic construct
  misc_feature 1..80: note = Artificially Synthesized Probe
  source 1..80: mol_type = other DNA
tctaatcagcatagtatgagctacctacatggagacaaataagcatctcttacaaaattcatacttttgctgtaacaagt

SEQ ID NO: 138936 - DNA, 80 bp, synthetic construct
  misc_feature 1..80: note = Artificially Synthesized Probe
  source 1..80: mol_type = other DNA
aaaaataatctccccctttaaaaatatttattgagattggattgtttttctcaattcctttttttaataatcaaatattt

SEQ ID NO: 138937 - DNA, 80 bp, synthetic construct; identical to SEQ ID NO: 43558
  misc_feature 1..80: note = Artificially Synthesized Probe
  source 1..80: mol_type = other DNA

SEQ ID NO: 138938 - DNA, 80 bp, synthetic construct
  misc_feature 1..80: note = Artificially Synthesized Probe
  source 1..80: mol_type = other DNA
gtaaatggaaatgacttaataactcaacctataaataagttgtgcttagtttcactgatgctttagaatttgggctctgg

SEQ ID NO: 138939 - DNA, 80 bp, synthetic construct
  misc_feature 1..80: note = Artificially Synthesized Probe
  source 1..80: mol_type = other DNA
ttgaaaacacattaactttatcatgctaaagctttgttgatgcttattgctaaagaaggattttcaaaatgtgatccata

SEQ ID NO: 138940 - DNA, 80 bp, synthetic construct
  misc_feature 1..80: note = Artificially Synthesized Probe
  source 1..80: mol_type = other DNA
ataatgtgaaattactattacttttagtgtttcataaatttcaaaataatttaaaagaataacaatatgaataaaatgtt

SEQ ID NO: 138941 - DNA, 80 bp, synthetic construct; identical to SEQ ID NO: 43559
  misc_feature 1..80: note = Artificially Synthesized Probe
  source 1..80: mol_type = other DNA

SEQ ID NO: 138942 - DNA, 80 bp, synthetic construct
  misc_feature 1..80: note = Artificially Synthesized Probe
  source 1..80: mol_type = other DNA
tcccttttgtttacaacacttacatgtcttggcgattagaactttccctttcttctctgaataaaattgttttgttcgga

SEQ ID NO: 138943 - DNA, 80 bp, synthetic construct
  misc_feature 1..80: note = Artificially Synthesized Probe
  source 1..80: mol_type = other DNA
atgtaaataatatggaatacagcttgagttacccagtcagccttggcaaaagcatttgtcacaacgcatcatctaaggag

SEQ ID NO: 138944 - DNA, 80 bp, synthetic construct
  misc_feature 1..80: note = Artificially Synthesized Probe
  source 1..80: mol_type = other DNA
ctatgcttctgctggtgaggacaattagtatctttataaagccagaaatgtagaacctggggatgcagctgagggttttt

SEQ ID NO: 138945 - DNA, 80 bp, synthetic construct
  misc_feature 1..80: note = Artificially Synthesized Probe
  source 1..80: mol_type = other DNA
catggactttgttttgtgacagtttctgggtgaattaataatttataggtagaaatgaagataataaagctacatggagc

SEQ ID NO: 138946 - DNA, 80 bp, synthetic construct
  misc_feature 1..80: note = Artificially Synthesized Probe
  source 1..80: mol_type = other DNA
gaataatgttttaaatgcaatcattgtcaagtttgaacaatgtaatttatcaagagagcagtttgtactatataataagt

SEQ ID NO: 138947 - DNA, 80 bp, synthetic construct; identical to SEQ ID NO: 43560
  misc_feature 1..80: note = Artificially Synthesized Probe
  source 1..80: mol_type = other DNA

SEQ ID NO: 138948 - DNA, 80 bp, synthetic construct
  misc_feature 1..80: note = Artificially Synthesized Probe
  source 1..80: mol_type = other DNA
ctattcacaggcacttcagaggctgatattcgacgtgtttcagatggctaacacagcactgattaatgtgatttatgaat

SEQ ID NO: 138949 - DNA, 80 bp, synthetic construct
  misc_feature 1..80: note = Artificially Synthesized Probe
  source 1..80: mol_type = other DNA
taattccttgaatttattgagcacctgttaggtgctaggcactaggctaggctctggggaaatctgtaactcataaataa

SEQ ID NO: 138950 - DNA, 80 bp, synthetic construct
  misc_feature 1..80: note = Artificially Synthesized Probe
  source 1..80: mol_type = other DNA
catagtttgtaattatgtgaaaattatgagttcataaagtagcttttttttaaattaatgaagtactgagtacttgaatc

SEQ ID NO: 138951 - DNA, 80 bp, synthetic construct; identical to SEQ ID NO: 43561
  misc_feature 1..80: note = Artificially Synthesized Probe
  source 1..80: mol_type = other DNA

SEQ ID NO: 138952 - DNA, 80 bp, synthetic construct
  misc_feature 1..80: note = Artificially Synthesized Probe
  source 1..80: mol_type = other DNA
tctctccctcccttccctccctccttctttccttttttcctgccttcctgcctgccttcctcatgacagaaataatgaat

SEQ ID NO: 138953 - DNA, 80 bp, synthetic construct
  misc_feature 1..80: note = Artificially Synthesized Probe
  source 1..80: mol_type = other DNA
tatagaaagcatctactttgtacagccaaatggtagccatactacctatcctgaaaaatagtcactggctggctttttag

SEQ ID NO: 138954 - DNA, 80 bp, synthetic construct
  misc_feature 1..80: note = Artificially Synthesized Probe
  source 1..80: mol_type = other DNA
ctgtgacctttctgccctgttcagtcatcttccacttttccttattgatctcaatgtttcatgtagttctttcaaaattg

SEQ ID NO: 138955 - DNA, 80 bp, synthetic construct
  misc_feature 1..80: note = Artificially Synthesized Probe
  source 1..80: mol_type = other DNA
gttaaaggagatcaggaaaggacaatcagacacattaacaatttcagattgttctgcatttttccctttttgcccttttt

SEQ ID NO: 138956 - DNA, 80 bp, synthetic construct; identical to SEQ ID NO: 43562
  misc_feature 1..80: note = Artificially Synthesized Probe
  source 1..80: mol_type = other DNA

SEQ ID NO: 138957 - DNA, 80 bp, synthetic construct; identical to SEQ ID NO: 43309
  misc_feature 1..80: note = Artificially Synthesized Probe
  source 1..80: mol_type = other DNA

SEQ ID NO: 138958 - DNA, 80 bp, synthetic construct
  misc_feature 1..80: note = Artificially Synthesized Probe
  source 1..80: mol_type = other DNA
gaaacaaatgaaaaagactagaaatacattatagtgttaggcagtcagacgttttcagctaaatgttagtatttaacgtg

SEQ ID NO: 138959 - DNA, 80 bp, synthetic construct
  misc_feature 1..80: note = Artificially Synthesized Probe
  source 1..80: mol_type = other DNA
agataattaaggaggaagcaaatcttttcatgagaaagtataggataggtttcacagcgttgtcctgagaaggagaattg

SEQ ID NO: 138960 - DNA, 80 bp, synthetic construct; identical to SEQ ID NO: 43563
  misc_feature 1..80: note = Artificially Synthesized Probe
  source 1..80: mol_type = other DNA

SEQ ID NO: 138961 - DNA, 80 bp, synthetic construct
  misc_feature 1..80: note = Artificially Synthesized Probe
  source 1..80: mol_type = other DNA
gtggctaacgcctgtaatctcaacattttgggagatcgaggctggaggattgcttgagcccaggagtttgagaccagcct

SEQ ID NO: 138962 - DNA, 80 bp, synthetic construct
  misc_feature 1..80: note = Artificially Synthesized Probe
  source 1..80: mol_type = other DNA
cagcaaagcaagaccccatctcttaaaaaaaacgaagaagaagaagaagaagaagaaaattcataggtctccatcaccca

SEQ ID NO: 138963 - DNA, 80 bp, synthetic construct
  misc_feature 1..80: note = Artificially Synthesized Probe
  source 1..80: mol_type = other DNA
gtcttagacaagcaaaaaatgaaatcgtctattttcagcaagttcataatatttatacagatacaatttactcattatct

SEQ ID NO: 138964 - DNA, 80 bp, synthetic construct
  misc_feature 1..80: note = Artificially Synthesized Probe
  source 1..80: mol_type = other DNA
gtaggttaattaataccagatgactttttcagcattctttcatctcagtgttacggttttttaggactgtgataagtcat

SEQ ID NO: 138965 - DNA, 80 bp, synthetic construct; identical to SEQ ID NO: 43564
  misc_feature 1..80: note = Artificially Synthesized Probe
  source 1..80: mol_type = other DNA

SEQ ID NO: 138966 - DNA, 80 bp, synthetic construct
  misc_feature 1..80: note = Artificially Synthesized Probe
  source 1..80: mol_type = other DNA
tctggttcatgataagctttcagttcatgtttgttgagtgaatgacatgaaatctgcctcagaaaaatgaggccttaaac

SEQ ID NO: 138967 - DNA, 80 bp, synthetic construct
  misc_feature 1..80: note = Artificially Synthesized Probe
  source 1..80: mol_type = other DNA
cagtcttcaggaatggtggggaatggcctatttatgtaatcagatactaaacctgggaggaagctgtcaggcacattctt

SEQ ID NO: 138968 - DNA, 80 bp, synthetic construct
  misc_feature 1..80: note = Artificially Synthesized Probe
  source 1..80: mol_type = other DNA
agaaggcccagataaggctatgttagtgtcagtcactcattccttgattggcaaggagataaataggaatttactcgacg

SEQ ID NO: 138969 - DNA, 80 bp, synthetic construct
  misc_feature 1..80: note = Artificially Synthesized Probe
  source 1..80: mol_type = other DNA
gcccaaagggtatcttctttgaattcttaggatgtttgtactgctatatatatttagttatttcattgacttttatattc

SEQ ID NO: 138970 - DNA, 80 bp, synthetic construct; identical to SEQ ID NO: 43565
  misc_feature 1..80: note = Artificially Synthesized Probe
  source 1..80: mol_type = other DNA

SEQ ID NO: 138971 - DNA, 80 bp, synthetic construct
  misc_feature 1..80: note = Artificially Synthesized Probe
  source 1..80: mol_type = other DNA
ataattcctttgttaactacaaataatggatggaaacattgttggttattttaagcagtgaggaaacctaggtcctagag

SEQ ID NO: 138972 - DNA, 80 bp, synthetic construct
  misc_feature 1..80: note = Artificially Synthesized Probe
  source 1..80: mol_type = other DNA
gtagccagatatgtctgggagcagccaaatgtttttctgagaattttaacaacagtgataggagagaaataaaaaaaaat

SEQ ID NO: 138973 - DNA, 80 bp, synthetic construct
  misc_feature 1..80: note = Artificially Synthesized Probe
  source 1..80: mol_type = other DNA
gctgtagctatctttttgttttgtttgccgaagtaccaagatataaaatgcatttatgtagtactgtatcgaagttattt

SEQ ID NO: 138974 - DNA, 80 bp, synthetic construct; identical to SEQ ID NO: 43566
  misc_feature 1..80: note = Artificially Synthesized Probe
  source 1..80: mol_type = other DNA

SEQ ID NO: 138975 - DNA, 80 bp, synthetic construct
  misc_feature 1..80: note = Artificially Synthesized Probe
  source 1..80: mol_type = other DNA
attgcaacctccgcctcccaggctcaagtgattctcctgcctcagcctcccaagtagctgggattacaggcacacaccac

SEQ ID NO: 138976 - DNA, 80 bp, synthetic construct
  misc_feature 1..80: note = Artificially Synthesized Probe
  source 1..80: mol_type = other DNA
ttctaggtatttcatacttccacctcttctgcttgtaagtgacattgtatgtattccttagtgcttgattgcgtattatt

SEQ ID NO: 138977 - DNA, 80 bp, synthetic construct; identical to SEQ ID NO: 43567
  misc_feature 1..80: note = Artificially Synthesized Probe
  source 1..80: mol_type = other DNA

SEQ ID NO: 138978 - DNA, 80 bp, synthetic construct
  misc_feature 1..80: note = Artificially Synthesized Probe
  source 1..80: mol_type = other DNA
gagatacctattaaaccactctgcatccctgcttactgatgtcattctagttctggaccgtattacttaaactcttacac

SEQ ID NO: 138979 - DNA, 80 bp, synthetic construct
  misc_feature 1..80: note = Artificially Synthesized Probe
  source 1..80: mol_type = other DNA
ttaataattgagcacctactgtatgtaagcatgatggaacctaattggggtgttggctacagcatgtattctctattctt

SEQ ID NO: 138980 - DNA, 80 bp, synthetic construct
  misc_feature 1..80: note = Artificially Synthesized Probe
  source 1..80: mol_type = other DNA
aaacctctgtctcctgcaagtcaggtctctttattcctgaggataattaaatagcatttggagtgcatgtagactctatg

SEQ ID NO: 138981 - DNA, 80 bp, synthetic construct
  misc_feature 1..80: note = Artificially Synthesized Probe
  source 1..80: mol_type = other DNA
cttcagaagtttgagagtcgtactacaccttatcctaggactggatttggtataaggttagtggaaattagaattatagg

SEQ ID NO: 138982 - DNA, 80 bp, synthetic construct; identical to SEQ ID NO: 43568
  misc_feature 1..80: note = Artificially Synthesized Probe
  source 1..80: mol_type = other DNA

SEQ ID NO: 138983 - DNA, 80 bp, synthetic construct
  misc_feature 1..80: note = Artificially Synthesized Probe
  source 1..80: mol_type = other DNA
gaaaataattgaagtgttaatgtttatgaggcagtgttgtatcaacttgtgagtggcaaataagatcacaataagatgag

SEQ ID NO: 138984 - DNA, 80 bp, synthetic construct
  misc_feature 1..80: note = Artificially Synthesized Probe
  source 1..80: mol_type = other DNA
agaagattctttaattgtaatgaacaatatctataattagctgtcagctccatagggggatgtattaatatgagttccct

SEQ ID NO: 138985 - DNA, 80 bp, synthetic construct
  misc_feature 1..80: note = Artificially Synthesized Probe
  source 1..80: mol_type = other DNA
agagctgaccctggtgtcactttcactgcttttccttctcagagccaaaagaggagttgtcatttgtgtgtgtgtaattt

SEQ ID NO: 138986 - DNA, 80 bp, synthetic construct; identical to SEQ ID NO: 43569
  misc_feature 1..80: note = Artificially Synthesized Probe
  source 1..80: mol_type = other DNA

SEQ ID NO: 138987 - DNA, 80 bp, synthetic construct
  misc_feature 1..80: note = Artificially Synthesized Probe
  source 1..80: mol_type = other DNA
aattagtataaatgatctatatccagtatttattgatgtctatctgaatttatcttttcaaaataacttagaatatatga

SEQ ID NO: 138988 - DNA, 80 bp, synthetic construct
  misc_feature 1..80: note = Artificially Synthesized Probe
  source 1..80: mol_type = other DNA
ctctagttttatttgtgtttcattgccagttacctcaaagacattgcttagtggaggcatgtgtcagaaacagtgaaaaa

SEQ ID NO: 138989 - DNA, 80 bp, synthetic construct
  misc_feature 1..80: note = Artificially Synthesized Probe
  source 1..80: mol_type = other DNA
gaccagctgccagttttctaagtcagtctgtggtagaaagccagtgccgtggccctctggatggctgagagctttcttac

SEQ ID NO: 138990 - DNA, 80 bp, synthetic construct
  misc_feature 1..80: note = Artificially Synthesized Probe
  source 1..80: mol_type = other DNA
ctgcatgtcagaatattatgatttagagcaggctgtgatctatgtcgggttctactgtgtctatgttgaattggtctact

SEQ ID NO: 138991 - DNA, 80 bp, synthetic construct; identical to SEQ ID NO: 43570
  misc_feature 1..80: note = Artificially Synthesized Probe
  source 1..80: mol_type = other DNA

SEQ ID NO: 138992 - DNA, 80 bp, synthetic construct
  misc_feature 1..80: note = Artificially Synthesized Probe
  source 1..80: mol_type = other DNA
gcaaacatagcgtatttgattgtatatcagttgtatgagtctatgaaacacttctgggtattaccagaatcaattttgtg

SEQ ID NO: 138993 - DNA, 80 bp, synthetic construct
  misc_feature 1..80: note = Artificially Synthesized Probe
  source 1..80: mol_type = other DNA
catttattattttattcattgatatttagtgtaaaagtgggccttgtggcatgtacctgtagtcccagctactccggctg

SEQ ID NO: 138994 - DNA, 80 bp, synthetic construct
  misc_feature 1..80: note = Artificially Synthesized Probe
  source 1..80: mol_type = other DNA
agtgatggttgtcatcccttaactaatgtcccaaggtcagagagttaaatacactggtgtcagttaatggttctaacagg

SEQ ID NO: 138995 - DNA, 80 bp, synthetic construct
  misc_feature 1..80: note = Artificially Synthesized Probe
  source 1..80: mol_type = other DNA
tggcacgaattgctggcaagaaactatgactttcttattgctgttttaaacagtttgtggaatagttatcttaatttata

SEQ ID NO: 138996 - DNA, 80 bp, synthetic construct; identical to SEQ ID NO: 43571
  misc_feature 1..80: note = Artificially Synthesized Probe
  source 1..80: mol_type = other DNA

SEQ ID NO: 138997 - DNA, 80 bp, synthetic construct
  misc_feature 1..80: note = Artificially Synthesized Probe
  source 1..80: mol_type = other DNA
ttccttactagggcttttccaaactctgcatatcagtttcctgatgagttagactgtgataataagttgaattgggacag

SEQ ID NO: 138998 - DNA, 80 bp, synthetic construct
  misc_feature 1..80: note = Artificially Synthesized Probe
  source 1..80: mol_type = other DNA
ccatcgtagttatatttgttaattcattctaatgctgtgaatagtcatcttaaaataatgtcatcttaaaagttattaaa

SEQ ID NO: 138999 - DNA, 80 bp, synthetic construct; identical to SEQ ID NO: 43572
  misc_feature 1..80: note = Artificially Synthesized Probe
  source 1..80: mol_type = other DNA

SEQ ID NO: 139000 - DNA, 80 bp, synthetic construct; identical to SEQ ID NO: 43310
  misc_feature 1..80: note = Artificially Synthesized Probe
  source 1..80: mol_type = other DNA

SEQ ID NO: 139001 - DNA, 80 bp, synthetic construct
  misc_feature 1..80: note = Artificially Synthesized Probe
  source 1..80: mol_type = other DNA
gccaaacttctttaattatcaagaacattttaatctgacttttaaaattgtgcaacttgattgctcgtcctatgtagcct

SEQ ID NO: 139002 - DNA, 80 bp, synthetic construct
  misc_feature 1..80: note = Artificially Synthesized Probe
  source 1..80: mol_type = other DNA
ttcaactatttcaatctatgtgtattgaccctttttctgaacagcttttagagctttttcaaaagtcccacatactgtgg

SEQ ID NO: 139003 - DNA, 80 bp, synthetic construct
  misc_feature 1..80: note = Artificially Synthesized Probe
  source 1..80: mol_type = other DNA
ttggttgatagagaagtagctgaactataataatttgaagatggttaggattgtgtagtaaatgtccaaagattgaaatt

SEQ ID NO: 139004 - DNA, 80 bp, synthetic construct
  misc_feature 1..80: note = Artificially Synthesized Probe
  source 1..80: mol_type = other DNA
tccttacataaatccagtggctttttacctaacctgaagcaataaaatttcatttagctcagactagagaactgtggcag

SEQ ID NO: 139005 - DNA, 80 bp, synthetic construct; identical to SEQ ID NO: 43573
  misc_feature 1..80: note = Artificially Synthesized Probe
  source 1..80: mol_type = other DNA

SEQ ID NO: 139006 - DNA, 80 bp, synthetic construct
  misc_feature 1..80: note = Artificially Synthesized Probe
  source 1..80: mol_type = other DNA
ttttttaggggcagaagtggggggatttgaactttcatccaatccagcaattggtaaactgcagcttccaggccagagta

SEQ ID NO: 139007 - DNA, 80 bp, synthetic construct
  misc_feature 1..80: note = Artificially Synthesized Probe
  source 1..80: mol_type = other DNA
aaccccgatctaagatactattgtgctggtgagtattggatgcatagtgtgtggtatattggggaaaatttcagctaaaa

SEQ ID NO: 139008 - DNA, 80 bp, synthetic construct; identical to SEQ ID NO: 43574
  misc_feature 1..80: note = Artificially Synthesized Probe
  source 1..80: mol_type = other DNA

SEQ ID NO: 139009 - DNA, 80 bp, synthetic construct
  misc_feature 1..80: note = Artificially Synthesized Probe
  source 1..80: mol_type = other DNA
tctagcctgttaattaggctaattatcacctgttcagggcaaaaatgtgctcaagactcttggcttaagtaggaggctcc

SEQ ID NO: 139010 - DNA, 80 bp, synthetic construct
  misc_feature 1..80: note = Artificially Synthesized Probe
  source 1..80: mol_type = other DNA
acaaggaactctcaaagtctagtctaacttaaatgatctagatattagtattatcatggaacatttttggtgtctggatg

SEQ ID NO: 139011 - DNA, 80 bp, synthetic construct
  misc_feature 1..80: note = Artificially Synthesized Probe
  source 1..80: mol_type = other DNA
taatttagaaattcagttgtgaaataacaaatgtggaaacttttttccttttgttttagaattcttggagccattattta

SEQ ID NO: 139012 - DNA, 80 bp, synthetic construct
  misc_feature 1..80: note = Artificially Synthesized Probe
  source 1..80: mol_type = other DNA
ttgggaaatttttattttccatctaacgttgcatgttgaatttaagcacgatatatagtattttgaaactccatagaaat

SEQ ID NO: 139013 - DNA, 80 bp, synthetic construct; identical to SEQ ID NO: 43575
  misc_feature 1..80: note = Artificially Synthesized Probe
  source 1..80: mol_type = other DNA

SEQ ID NO: 139014 - DNA, 80 bp, synthetic construct
  misc_feature 1..80: note = Artificially Synthesized Probe
  source 1..80: mol_type = other DNA
ctgaagaaattcaggtgggaacccttctaggcaaagaccacttcattttcattccctctcttagtatattatcatataat

SEQ ID NO: 139015 - DNA, 80 bp, synthetic construct
  misc_feature 1..80: note = Artificially Synthesized Probe
  source 1..80: mol_type = other DNA
attttgtttattcaaaaggataagcaatacctgtcagtttttttttaacattagtgtagttttacagtaatttttagtca

SEQ ID NO: 139016 - DNA, 80 bp, synthetic construct
  misc_feature 1..80: note = Artificially Synthesized Probe
  source 1..80: mol_type = other DNA
atttgaaaagactggtccaagttatcatatagagaagttaagaaatatttgattgtcttaattaaaatattttgaattac

SEQ ID NO: 139017 - DNA, 80 bp, synthetic construct
  misc_feature 1..80: note = Artificially Synthesized Probe
  source 1..80: mol_type = other DNA
tgcttcctgggttcaagcgattctcctgcctcagcctcctgagtagctgggactacagttacgtgccaccatgcctagct

SEQ ID NO: 139018 - DNA, 80 bp, synthetic construct; identical to SEQ ID NO: 43576
  misc_feature 1..80: note = Artificially Synthesized Probe
  source 1..80: mol_type = other DNA

SEQ ID NO: 139019 - DNA, 80 bp, synthetic construct
  misc_feature 1..80: note = Artificially Synthesized Probe
  source 1..80: mol_type = other DNA
attccattctgtgattaaattcattgtttgtctactcacaacctgacggatatttaagattgtttaaattttaatggggg

SEQ ID NO: 139020 - DNA, 80 bp, synthetic construct
  misc_feature 1..80: note = Artificially Synthesized Probe
  source 1..80: mol_type = other DNA
taaatacaaaaaattagccaggcgtggtggtacgtgcttctagtcccagctacttgggaggctgaagcaggggaatcgct

SEQ ID NO: 139021 - DNA, 80 bp, synthetic construct
  misc_feature 1..80: note = Artificially Synthesized Probe
  source 1..80: mol_type = other DNA
ttttattaaaatacctgtgtctttatatatgtgagatgtgtgcctatttttcattaagtttttaatagcagaattaatac

SEQ ID NO: 139022 - DNA, 80 bp, synthetic construct; identical to SEQ ID NO: 43577
  misc_feature 1..80: note = Artificially Synthesized Probe
  source 1..80: mol_type = other DNA

SEQ ID NO: 139023 - DNA, 80 bp, synthetic construct
  misc_feature 1..80: note = Artificially Synthesized Probe
  source 1..80: mol_type = other DNA
aatgtggtggtgtgtgttccctttatgtatttggaaagtggaactcctgctggtgcctagtgaaagggacagtcgtgcac

SEQ ID NO: 139024 - DNA, 80 bp, synthetic construct
  misc_feature 1..80: note = Artificially Synthesized Probe
  source 1..80: mol_type = other DNA
tcattttgactctgttatcaatcatataatgagagaatttcagagaaggaataccttggcatgtgctgaacaccctggct

SEQ ID NO: 139025 - DNA, 80 bp, synthetic construct
  misc_feature 1..80: note = Artificially Synthesized Probe
  source 1..80: mol_type = other DNA
atattttgagaatactagaaaaagtgcttagaattttaggaaccccttatttaatttagaaatcctgccaggtgaggtgg

SEQ ID NO: 139026 - DNA, 80 bp, synthetic construct
  misc_feature 1..80: note = Artificially Synthesized Probe
  source 1..80: mol_type = other DNA
ctaactcgtaattgacttccatggcatagctacgtgcatgagaaggggccttattccaagtttagcataacagacatctc

SEQ ID NO: 139027 - DNA, 80 bp, synthetic construct
  misc_feature 1..80: note = Artificially Synthesized Probe
  source 1..80: mol_type = other DNA
ttgtgactttgtttccttttgaaacctttaagatctctttatatccaagagaaacatctagtgaagcccaaggaaaggga

SEQ ID NO: 139028 - DNA, 80 bp, synthetic construct; identical to SEQ ID NO: 43578
  misc_feature 1..80: note = Artificially Synthesized Probe
  source 1..80: mol_type = other DNA

SEQ ID NO: 139029 - DNA, 80 bp, synthetic construct
  misc_feature 1..80: note = Artificially Synthesized Probe
  source 1..80: mol_type = other DNA
tactgtaaattcagttatgcaagaaatctctcaggaaagtccaccatgtggggatagaaaagcatttaaaacattgaatc

SEQ ID NO: 139030 - DNA, 80 bp, synthetic construct
  misc_feature 1..80: note = Artificially Synthesized Probe
  source 1..80: mol_type = other DNA
ccgtctctgataccctcccagctagctctgcatttccagttgtcacctgtttttaaatgtctaaattaaatgccacctct

SEQ ID NO: 139031 - DNA, 80 bp, synthetic construct
  misc_feature 1..80: note = Artificially Synthesized Probe
  source 1..80: mol_type = other DNA
gcctgcaatttccttgaaagccaaacctgactcctctcttcgtttgatttctctgtgctatgtggaacagtgtgttgggg

SEQ ID NO: 139032 - DNA, 80 bp, synthetic construct; identical to SEQ ID NO: 43579
  misc_feature 1..80: note = Artificially Synthesized Probe
  source 1..80: mol_type = other DNA

SEQ ID NO: 139033 - DNA, 80 bp, synthetic construct
  misc_feature 1..80: note = Artificially Synthesized Probe
  source 1..80: mol_type = other DNA
ggtcttagttctttgttatctggcttttgtcatttcacgacaggcacaagctttagtttaacatttttattacataggaa

SEQ ID NO: 139034 - DNA, 80 bp, synthetic construct; identical to SEQ ID NO: 43311
  misc_feature 1..80: note = Artificially Synthesized Probe
  source 1..80: mol_type = other DNA

SEQ ID NO: 139035 - DNA, 80 bp, synthetic construct
  misc_feature 1..80: note = Artificially Synthesized Probe
  source 1..80: mol_type = other DNA
tttcttgtaggagaaggttagagccacaataaatacatgaggaaataagtagataggggaatttatcttggaaataagat

SEQ ID NO: 139036 - DNA, 80 bp, synthetic construct
  misc_feature 1..80: note = Artificially Synthesized Probe
  source 1..80: mol_type = other DNA
catgttaacgggtgtaaatatagtatctctttacatatatagataaataaattggcaattttaatattaatgaagcattt

SEQ ID NO: 139037 - DNA, 80 bp, synthetic construct; identical to SEQ ID NO: 43580
  misc_feature 1..80: note = Artificially Synthesized Probe
  source 1..80: mol_type = other DNA

SEQ ID NO: 139038 - DNA, 80 bp, synthetic construct
  misc_feature 1..80: note = Artificially Synthesized Probe
  source 1..80: mol_type = other DNA
atgctaaaatttatgatagccaacccagcttgccagacactatctttgtggcatcgtgcttgtcaactcgttataatatt

SEQ ID NO: 139039 - DNA, 80 bp, synthetic construct
  misc_feature 1..80: note = Artificially Synthesized Probe
  source 1..80: mol_type = other DNA
gatcaaacagaggaagtattcaaggttctgttggtggttcagagttcctttattattaaaggtattgaaaggtcttaaat

SEQ ID NO: 139040 - DNA, 80 bp, synthetic construct
  misc_feature 1..80: note = Artificially Synthesized Probe
  source 1..80: mol_type = other DNA
tacccacatggtcacacagaaggacccctggttcaggaaacacctttggggtttgccttttcttccctgcagcgtagtgc

SEQ ID NO: 139041 - DNA, 80 bp, synthetic construct
  misc_feature 1..80: note = Artificially Synthesized Probe
  source 1..80: mol_type = other DNA
aggtgaaatctattctcacttttgcctcaggggtgactggactgtaacagaatttttcaaacccgttgggcccaaccgca

SEQ ID NO: 139042 - DNA, 80 bp, synthetic construct; identical to SEQ ID NO: 43581
  misc_feature 1..80: note = Artificially Synthesized Probe
  source 1..80: mol_type = other DNA

SEQ ID NO: 139043 - DNA, 80 bp, synthetic construct
  misc_feature 1..80: note = Artificially Synthesized Probe
  source 1..80: mol_type = other DNA
ctgggcagaggtagactgggtggactgtgggaacagaggcattaattatcccatcttcatagtaatcaatggaaatgatg

SEQ ID NO: 139044 - DNA, 80 bp, synthetic construct
  misc_feature 1..80: note = Artificially Synthesized Probe
  source 1..80: mol_type = other DNA
tgttctaggctcttgggatatatggctggataaaataaatcatgtctttacagtctagcgtgtagagacagaaaataaac

SEQ ID NO: 139045 - DNA, 80 bp, synthetic construct
  misc_feature 1..80: note = Artificially Synthesized Probe
  source 1..80: mol_type = other DNA
gtatatatatatttgtatgtgtttaacatgtctttttagaagatctttatagaaggtcatatggagagattaagttttca

SEQ ID NO: 139046 - DNA, 80 bp, synthetic construct
  misc_feature 1..80: note = Artificially Synthesized Probe
  source 1..80: mol_type = other DNA
ttgatacaaatacttggataattgatacaaagacactaatccgcatttagctactataatttttttggaaagttattaaa

SEQ ID NO: 139047 - DNA, 80 bp, synthetic construct; identical to SEQ ID NO: 43284
  misc_feature 1..80: note = Artificially Synthesized Probe
  source 1..80: mol_type = other DNA

SEQ ID NO: 139048 - DNA, 80 bp, synthetic construct; identical to SEQ ID NO: 43582
  misc_feature 1..80: note = Artificially Synthesized Probe
  source 1..80: mol_type = other DNA

SEQ ID NO: 139049 - DNA, 80 bp, synthetic construct
  misc_feature 1..80: note = Artificially Synthesized Probe
  source 1..80: mol_type = other DNA
acaccctcgctcgttcgctcacgctgcctcgccgccctcctcccccaggccccagctgccgccctgccctctcacccgct

SEQ ID NO: 139050 - DNA, 80 bp, synthetic construct
  misc_feature 1..80: note = Artificially Synthesized Probe
  source 1..80: mol_type = other DNA
attgttagaaattataggttaaaagttcttctcaagcagtttgtgggaagcccaggcctccttagcttccttgacaaggg

SEQ ID NO: 139051 - DNA, 80 bp, synthetic construct
  misc_feature 1..80: note = Artificially Synthesized Probe
  source 1..80: mol_type = other DNA
cttggctggatcaataatatagatttttgttgttaggtcttgtagtctgcaccataatgagagataggggacagtggctg

SEQ ID NO: 139052 - DNA, 80 bp, synthetic construct; identical to SEQ ID NO: 43583
  misc_feature 1..80: note = Artificially Synthesized Probe
  source 1..80: mol_type = other DNA

SEQ ID NO: 139053 - DNA, 80 bp, synthetic construct
  misc_feature 1..80: note = Artificially Synthesized Probe
  source 1..80: mol_type = other DNA
gagaatcaactcacatagaaaattaataattttgtctttttgtatgtataaatcttaaaatagggaaaggaataaaaata

SEQ ID NO: 139054 - DNA, 80 bp, synthetic construct
  misc_feature 1..80: note = Artificially Synthesized Probe
  source 1..80: mol_type = other DNA
agattgctctttcctcattagaaattttgcttattgaatgatatggcacaaacactcccactagcacacaccaccagatg

SEQ ID NO: 139055 - DNA, 80 bp, synthetic construct
  misc_feature 1..80: note = Artificially Synthesized Probe
  source 1..80: mol_type = other DNA
cagtgttatttaattgataatacagctagttagaaagatttatttcaaattgattaaataattaaatgagtgattataat

SEQ ID NO: 139056 - DNA, 80 bp, synthetic construct
  misc_feature 1..80: note = Artificially Synthesized Probe
  source 1..80: mol_type = other DNA
taggaaataagattaagcgtaatttggttaaaactctctttaagtatatgtgttcgttgaaagtagaaaagccagtaatg

SEQ ID NO: 139057 - DNA, 80 bp, synthetic construct
  misc_feature 1..80: note = Artificially Synthesized Probe
  source 1..80: mol_type = other DNA
ataaaacaaccaaattaagaaacagccaaaagactaacaaagcacattaaaaagtattcagtgccatcactaggcatcag

SEQ ID NO: 139058 - DNA, 80 bp, synthetic construct; identical to SEQ ID NO: 43584
  misc_feature 1..80: note = Artificially Synthesized Probe
  source 1..80: mol_type = other DNA

SEQ ID NO: 139059 - DNA, 80 bp, synthetic construct
  misc_feature 1..80: note = Artificially Synthesized Probe
  source 1..80: mol_type = other DNA
actgcctgaatatgctgcagtgggaagatagattgcatttataaacttagggcacatgttagcttgtgtgaaaatgctta

SEQ ID NO: 139060 - DNA, 80 bp, synthetic construct
  misc_feature 1..80: note = Artificially Synthesized Probe
  source 1..80: mol_type = other DNA
aaagcgagaaacataaacagcattgaattgctactggtactaatatagattttattgttacttgggatcttcagcatgtt

SEQ ID NO: 139061 - DNA, 80 bp, synthetic construct; identical to SEQ ID NO: 43585
  misc_feature 1..80: note = Artificially Synthesized Probe
  source 1..80: mol_type = other DNA

SEQ ID NO: 139062 - DNA, 80 bp, synthetic construct
  misc_feature 1..80: note = Artificially Synthesized Probe
  source 1..80: mol_type = other DNA
catttgacatatttacatggaaacatttgattggaggaattagtaaccctgaaagccttgatagatatgttttaatgatc

SEQ ID NO: 139063 - DNA, 80 bp, synthetic construct
  misc_feature 1..80: note = Artificially Synthesized Probe
  source 1..80: mol_type = other DNA
gagaggacggcaagacaccccagcctcaattcttgatgtcatcatttactttcctttttaatttttataacatctgtgca

SEQ ID NO: 139064 - DNA, 80 bp, synthetic construct
  misc_feature 1..80: note = Artificially Synthesized Probe
  source 1..80: mol_type = other DNA
gttaagtagaagtaaaacagcaggttggcttccaaagcccagatacaggagactatcttctctgtccgcaaatctctgcc

SEQ ID NO: 139065 - DNA, 80 bp, synthetic construct; identical to SEQ ID NO: 43586
  misc_feature 1..80: note = Artificially Synthesized Probe
  source 1..80: mol_type = other DNA

SEQ ID NO: 139066 - DNA, 80 bp, synthetic construct
  misc_feature 1..80: note = Artificially Synthesized Probe
  source 1..80: mol_type = other DNA
gagactgggcaatttacaaaagaaagcagtttattggacttaacagttccacgtggctcaggaagacctcacaatcatgg

SEQ ID NO: 139067 - DNA, 80 bp, synthetic construct
  misc_feature 1..80: note = Artificially Synthesized Probe
  source 1..80: mol_type = other DNA
agtacaggcactttgaaaatcagtcaggcagtttctcataaagttggacgtccatctgccctataacgcagcagtatcaa

SEQ ID NO: 139068 - DNA, 80 bp, synthetic construct
  misc_feature 1..80: note = Artificially Synthesized Probe
  source 1..80: mol_type = other DNA
ggtctctcccacaacatgtgggaatttaagatgagatttgggtggcaacacagcaaaaccatatcaggaacacttacaga

SEQ ID NO: 139069 - DNA, 80 bp, synthetic construct
  misc_feature 1..80: note = Artificially Synthesized Probe
  source 1..80: mol_type = other DNA
aatgtgtcctagttcagatgataagtcacttgatgacaaaattggtaataaatgtcctacttctcttaggtctcatgaga

SEQ ID NO: 139070 - DNA, 80 bp, synthetic construct
  misc_feature 1..80: note = Artificially Synthesized Probe
  source 1..80: mol_type = other DNA
cttgatatgttgtatttaacagttaggtacaggtagcttctgtgcccaatatggcatttgcaagatcaatgcaagctaat

SEQ ID NO: 139071 - DNA, 80 bp, synthetic construct; identical to SEQ ID NO: 43587
  misc_feature 1..80: note = Artificially Synthesized Probe
  source 1..80: mol_type = other DNA

SEQ ID NO: 139072 - DNA, 80 bp, synthetic construct
  misc_feature 1..80: note = Artificially Synthesized Probe
  source 1..80: mol_type = other DNA
tttcacttttaatcagtgctcaaattgttactgtttaaatgccattgaagttcaccttgtcccacctggtatggccccag

SEQ ID NO: 139073 - DNA, 80 bp, synthetic construct
  misc_feature 1..80: note = Artificially Synthesized Probe
  source 1..80: mol_type = other DNA
gctggcacaactttatattttatgtcaggtccagaggctccttattactttgctattaactttataccatataggacagt

SEQ ID NO: 139074 - DNA, 80 bp, synthetic construct
  misc_feature 1..80: note = Artificially Synthesized Probe
  source 1..80: mol_type = other DNA
aaaatatttaagcaacacacaacctttttcccccaaggccagacttgtatggtgcatttgaaatctatatttctctgacg

SEQ ID NO: 139075 - DNA, 80 bp, synthetic construct; identical to SEQ ID NO: 43588
  misc_feature 1..80: note = Artificially Synthesized Probe
  source 1..80: mol_type = other DNA

SEQ ID NO: 139076 - DNA, 80 bp, synthetic construct
  misc_feature 1..80: note = Artificially Synthesized Probe
  source 1..80: mol_type = other DNA
ctgagatgcagtatgtttcttaatggtgatttgagccaagattactgcttgtaacggaaagtgtgaaaagcaaaacaatt

SEQ ID NO: 139077 - DNA, 80 bp, synthetic construct
  misc_feature 1..80: note = Artificially Synthesized Probe
  source 1..80: mol_type = other DNA
attgaggtcactggtgtgtatgtcatgtgactcccgcagaatattatctcagtgcacgagtgtgttggtgtcactacagt

SEQ ID NO: 139078 - DNA, 80 bp, synthetic construct
  misc_feature 1..80: note = Artificially Synthesized Probe
  source 1..80: mol_type = other DNA
gcctttaaaatgacaaaggatttcaaagcagcacttttgccaatatgcaccaaacctgtttgatcagtctgccatcagtt

SEQ ID NO: 139079 - DNA, 80 bp, synthetic construct
  misc_feature 1..80: note = Artificially Synthesized Probe
  source 1..80: mol_type = other DNA
ctagaagtcaggtctatatttttgtctgcatattgagactaacaaacacaaaactccttctatatttctgtagtatattt

SEQ ID NO: 139080 - DNA, 80 bp, synthetic construct; identical to SEQ ID NO: 43589
  misc_feature 1..80: note = Artificially Synthesized Probe
  source 1..80: mol_type = other DNA

SEQ ID NO: 139081 - DNA, 80 bp, synthetic construct
  misc_feature 1..80: note = Artificially Synthesized Probe
  source 1..80: mol_type = other DNA
agagaatatatatgacattattccttagaaggactgtttttaaatttaaattttgtcacataaagattttcatgtaagtt

SEQ ID NO: 139082 - DNA, 80 bp, synthetic construct
  misc_feature 1..80: note = Artificially Synthesized Probe
  source 1..80: mol_type = other DNA
ggagttcatgatgtcatccttttaccccacttcaaatatcagcagaatctatgaaaaatgaatagtttgaagacacctac

SEQ ID NO: 139083 - DNA, 80 bp, synthetic construct
  misc_feature 1..80: note = Artificially Synthesized Probe
  source 1..80: mol_type = other DNA
aagtataagatttatactacctacctaagtcttattatacagcaaccataatcataatagtatcttgggggtataatgat

SEQ ID NO: 139084 - DNA, 80 bp, synthetic construct; identical to SEQ ID NO: 43590
  misc_feature 1..80: note = Artificially Synthesized Probe
  source 1..80: mol_type = other DNA

SEQ ID NO: 139085 - DNA, 80 bp, synthetic construct
  misc_feature 1..80: note = Artificially Synthesized Probe
  source 1..80: mol_type = other DNA
atgaaatccttctggtgttggcatcaagacagacaaatgtttattagtggaagagaatggagattgcagaaatagacgtg

SEQ ID NO: 139086 - DNA, 80 bp, synthetic construct
  misc_feature 1..80: note = Artificially Synthesized Probe
  source 1..80: mol_type = other DNA
tactacatggggaagtgttttttctgcaaaggagtaaaggcaatttagtcttttcaacattctatgttggagcagttggc

SEQ ID NO: 139087 - DNA, 80 bp, synthetic construct
  misc_feature 1..80: note = Artificially Synthesized Probe
  source 1..80: mol_type = other DNA
tttgatatgacatcagtagcctgatttataaaataaaaaataaccggaaaaattatgttgataagttgaaaactttataa

SEQ ID NO: 139088 - DNA, 80 bp, synthetic construct; identical to SEQ ID NO: 43591
  misc_feature 1..80: note = Artificially Synthesized Probe
  source 1..80: mol_type = other DNA

SEQ ID NO: 139089 - DNA, 80 bp, synthetic construct; identical to SEQ ID NO: 43312
  misc_feature 1..80: note = Artificially Synthesized Probe
  source 1..80: mol_type = other DNA

SEQ ID NO: 139090 - DNA, 80 bp, synthetic construct
  misc_feature 1..80: note = Artificially Synthesized Probe
  source 1..80: mol_type = other DNA
atcatactccaggatttacccaagggatgttcatataatgactgcatatgaaggctcagagaaggtttgtttgtggtagt

SEQ ID NO: 139091 - DNA, 80 bp, synthetic construct
  misc_feature 1..80: note = Artificially Synthesized Probe
  source 1..80: mol_type = other DNA
tagcatggatgagccagaagataattatgctgagagaaagagtccagacaatagagaattcataccataagtatctaggt

SEQ ID NO: 139092 - DNA, 80 bp, synthetic construct
  misc_feature 1..80: note = Artificially Synthesized Probe
  source 1..80: mol_type = other DNA
cttatcaaatggaagtttttgtgtatcaattatgcctcactgaagctgtttaaaatgctttatacatttggcctcatacg

SEQ ID NO: 139093 - DNA, 80 bp, synthetic construct
  misc_feature 1..80: note = Artificially Synthesized Probe
  source 1..80: mol_type = other DNA
ttataaatgttttcaaatatgctatgtgtggatgttcatatgatttcatgatacagaatattctgtgtcaaatttgaata

SEQ ID NO: 139094 - DNA, 80 bp, synthetic construct; identical to SEQ ID NO: 43592
  misc_feature 1..80: note = Artificially Synthesized Probe
  source 1..80: mol_type = other DNA

SEQ ID NO: 139095 - DNA, 80 bp, synthetic construct
  misc_feature 1..80: note = Artificially Synthesized Probe
  source 1..80: mol_type = other DNA
attttatgtttgctagctgttcatctttttcctggttatgagctcttgatgagaagcatttgtgtgcttctttcatcttt

SEQ ID NO: 139096 - DNA, 80 bp, synthetic construct
  misc_feature 1..80: note = Artificially Synthesized Probe
  source 1..80: mol_type = other DNA
atcctcacaatcaccctgcatgtttggtggtattattctcttgatcttgttcaaagggtctaacaggtagcaagtgaaat

SEQ ID NO: 139097 - DNA, 80 bp, synthetic construct; identical to SEQ ID NO: 43593
  misc_feature 1..80: note = Artificially Synthesized Probe
  source 1..80: mol_type = other DNA

SEQ ID NO: 139098 - DNA, 80 bp, synthetic construct
  misc_feature 1..80: note = Artificially Synthesized Probe
  source 1..80: mol_type = other DNA
aaatttgccaggaaaaatgttgagaaaaatattactatacatttttttttgagaacaggggagtgaggtattctctaaat

SEQ ID NO: 139099 - DNA, 80 bp, synthetic construct
  misc_feature 1..80: note = Artificially Synthesized Probe
  source 1..80: mol_type = other DNA
cattattaacaatatttttatcataatctttgtactacgattttgaaatttggtattttacaatttagaacatctcaatt

SEQ ID NO: 139100 - DNA, 80 bp, synthetic construct
  misc_feature 1..80: note = Artificially Synthesized Probe
  source 1..80: mol_type = other DNA
attaaaattaaatatccttgttttcagtgcctatcagccaatgcagctagtggaattaaaagccgataagactccatgat

SEQ ID NO: 139101 - DNA, 80 bp, synthetic construct
  misc_feature 1..80: note = Artificially Synthesized Probe
  source 1..80: mol_type = other DNA
tctctgggcctctttttctctccacttttctcctctcctttgttttatcctcaacttataatgcccctccttgtgctatg

SEQ ID NO: 139102 - DNA, 80 bp, synthetic construct; identical to SEQ ID NO: 43594
  misc_feature 1..80: note = Artificially Synthesized Probe
  source 1..80: mol_type = other DNA

SEQ ID NO: 139103 - DNA, 80 bp, synthetic construct
  misc_feature 1..80: note = Artificially Synthesized Probe
  source 1..80: mol_type = other DNA
ttgtaccccaggaggaataggctacaccatctaggtaggtgtgtagtaggttgtttcgtctaggtttgtgtaagtgcatg

SEQ ID NO: 139104 - DNA, 80 bp, synthetic construct
  misc_feature 1..80: note = Artificially Synthesized Probe
  source 1..80: mol_type = other DNA
ttttaatgtggtattaaatattctaaatatttctttgggtcctctttttactcggcttaatacagtatattttttgttgc

SEQ ID NO: 139105 - DNA, 80 bp, synthetic construct
  misc_feature 1..80: note = Artificially Synthesized Probe
  source 1..80: mol_type = other DNA
atccttggttttaacctctctaagatttttgtaatggctctgatgtaacatggtttattaaaccattctaaatacagtgc

SEQ ID NO: 139106 - DNA, 80 bp, synthetic construct
  misc_feature 1..80: note = Artificially Synthesized Probe
  source 1..80: mol_type = other DNA
cattgaatcatattcttgacatttcatggaaataaatgttttttaaattgtcaataccaggtttattccttcatttccag

SEQ ID NO: 139107 - DNA, 80 bp, synthetic construct; identical to SEQ ID NO: 43595
  misc_feature 1..80: note = Artificially Synthesized Probe
  source 1..80: mol_type = other DNA

SEQ ID NO: 139108 - DNA, 80 bp, synthetic construct
  misc_feature 1..80: note = Artificially Synthesized Probe
  source 1..80: mol_type = other DNA
acttttttaaagtggtttcaggttcacaataaaattgagaggatggtagagaaatgagtcgtgtatcccctaccccacac

SEQ ID NO: 139109 - DNA, 80 bp, synthetic construct
  misc_feature 1..80: note = Artificially Synthesized Probe
  source 1..80: mol_type = other DNA
tatctgccattataatatcatgcataatttagttactgtttaaaaaacataacattcttttccattttctataatcttaa

SEQ ID NO: 139110 - DNA, 80 bp, synthetic construct
  misc_feature 1..80: note = Artificially Synthesized Probe
  source 1..80: mol_type = other DNA
agtatagcactcatttatggcaatgaagatgatacaagaaaggtttcctgcctttaaggatatagcataaaaagtgactc

SEQ ID NO: 139111 - DNA, 80 bp, synthetic construct; identical to SEQ ID NO: 43596
  misc_feature 1..80: note = Artificially Synthesized Probe
  source 1..80: mol_type = other DNA

SEQ ID NO: 139112 - DNA, 80 bp, synthetic construct
  misc_feature 1..80: note = Artificially Synthesized Probe
  source 1..80: mol_type = other DNA
tgtgatcttgaccagaagcagctgccctgggttggacaatgtatctgttttaagcaatgtattgtctcgatgtctcatct

SEQ ID NO: 139113 - DNA, 80 bp, synthetic construct
  misc_feature 1..80: note = Artificially Synthesized Probe
  source 1..80: mol_type = other DNA
gtagtggaagatcaggtggagcacagagcttgcagccaggtcacattgtgcctgaagcctgcaagagtgagattggaccc

SEQ ID NO: 139114 - DNA, 80 bp, synthetic construct
  misc_feature 1..80: note = Artificially Synthesized Probe
  source 1..80: mol_type = other DNA
aatgcagcccacttttgttgaatattatgtatgttaagcctgaaacctttaaaaagttaggtttttgtattcctgtggat

SEQ ID NO: 139115 - DNA, 80 bp, synthetic construct; identical to SEQ ID NO: 43597
  misc_feature 1..80: note = Artificially Synthesized Probe
  source 1..80: mol_type = other DNA

SEQ ID NO: 139116 - DNA, 80 bp, synthetic construct
  misc_feature 1..80: note = Artificially Synthesized Probe
  source 1..80: mol_type = other DNA
ccattcagtttttactctatgcataaggtttttattactgttgttggcgggggatttttttgtttcagtatatattttat

SEQ ID NO: 139117 - DNA, 80 bp, synthetic construct
  misc_feature 1..80: note = Artificially Synthesized Probe
  source 1..80: mol_type = other DNA
ctacccacttataagtagatttaatcattataatctatatttacttattgtaacattaaaaatagcacaagactgttttg

SEQ ID NO: 139118 - DNA, 80 bp, synthetic construct
  misc_feature 1..80: note = Artificially Synthesized Probe
  source 1..80: mol_type = other DNA
accgcggtcaaactatcgagtgaaatgccactttctgttttgtaaattgtgggttcttagtggaccaacctcataggatt

SEQ ID NO: 139119 - DNA, 80 bp, synthetic construct; identical to SEQ ID NO: 43598
  misc_feature 1..80: note = Artificially Synthesized Probe
  source 1..80: mol_type = other DNA

SEQ ID NO: 139120 - DNA, 80 bp, synthetic construct
  misc_feature 1..80: note = Artificially Synthesized Probe
  source 1..80: mol_type = other DNA
caataatgaatttattaaggctttagacacataggccgttttcaggcttttaccctgaaaatgctcatgcctaagtctgt

SEQ ID NO: 139121 - DNA, 80 bp, synthetic construct
  misc_feature 1..80: note = Artificially Synthesized Probe
  source 1..80: mol_type = other DNA
gtttgaaaatgtattatacgttttactaaggttgagatcatattactcgtccgttattcaagttatctccctgaaatagc

SEQ ID NO: 139122 - DNA, 80 bp, synthetic construct
  misc_feature 1..80: note = Artificially Synthesized Probe
  source 1..80: mol_type = other DNA
aagacttatgacattgaaatccagtgatagctaccagatttccctttgaaatgcttaatgtgcattataaaggagtaatt

SEQ ID NO: 139123 - DNA, 80 bp, synthetic construct; identical to SEQ ID NO: 43599
  misc_feature 1..80: note = Artificially Synthesized Probe
  source 1..80: mol_type = other DNA

SEQ ID NO: 139124 - DNA, 80 bp, synthetic construct; identical to SEQ ID NO: 43313
  misc_feature 1..80: note = Artificially Synthesized Probe
  source 1..80: mol_type = other DNA

SEQ ID NO: 139125 - DNA, 80 bp, synthetic construct
  misc_feature 1..80: note = Artificially Synthesized Probe
  source 1..80: mol_type = other DNA
ggaacaggatcccatatctgcctcacataaatgtatttgttcacagcataaatgaatttgaatatgtattattttcatag

SEQ ID NO: 139126 - DNA, 80 bp, synthetic construct
  misc_feature 1..80: note = Artificially Synthesized Probe
  source 1..80: mol_type = other DNA
cctgtggagtattcctatatttgccattattaacacttaatctgcaggcagcttaccatcattagaaactgaaatattat

SEQ ID NO: 139127 - DNA, 80 bp, synthetic construct
  misc_feature 1..80: note = Artificially Synthesized Probe
  source 1..80: mol_type = other DNA
aattggtcttttgaacctgaggctatttttcaagtttgcattattaatttaggcaatgacatctcattctatttaaatgt

SEQ ID NO: 139128 - DNA, 80 bp, synthetic construct
  misc_feature 1..80: note = Artificially Synthesized Probe
  source 1..80: mol_type = other DNA
gaatattatttctgtagcaaattctttagatttgtttctgcattaaaatgaaaaaaaataacatttttctatgtttttat

SEQ ID NO: 139129 - DNA, 80 bp, synthetic construct; identical to SEQ ID NO: 43600
  misc_feature 1..80: note = Artificially Synthesized Probe
  source 1..80: mol_type = other DNA

SEQ ID NO: 139130 - DNA, 80 bp, synthetic construct
  misc_feature 1..80: note = Artificially Synthesized Probe
  source 1..80: mol_type = other DNA
gaaatggcaagccagactctgacagttttatcatctgcatattgtgtctctattattgaaattgggatagcatcagtgtt

SEQ ID NO: 139131 - DNA, 80 bp, synthetic construct
  misc_feature 1..80: note = Artificially Synthesized Probe
  source 1..80: mol_type = other DNA
tatctcgtggagcagaagaatagaatctgcagtccctgcctcatattgaagatttacctcgtcattttgctaaatttgtt

SEQ ID NO: 139132 - DNA, 80 bp, synthetic construct
  misc_feature 1..80: note = Artificially Synthesized Probe
  source 1..80: mol_type = other DNA
agatagtgatgctcaactagaagtgtgcttacattttgtaatagtctccagtgtctctttgatttcacatctaaacattt

SEQ ID NO: 139133 - DNA, 80 bp, synthetic construct
  misc_feature 1..80: note = Artificially Synthesized Probe
  source 1..80: mol_type = other DNA
gagcatttcctaaggatcctttgcaataccagtctcttgattctttataaacaaagcgttctgtaatcaaataaggttgg

SEQ ID NO: 139134 - DNA, 80 bp, synthetic construct
  misc_feature 1..80: note = Artificially Synthesized Probe
  source 1..80: mol_type = other DNA
attgctggaagcatttttaaggaagttttaagatgcaatgacaaaaaaaattgtatttataattttcatttctcctgaaa

SEQ ID NO: 139135 - DNA, 80 bp, synthetic construct; identical to SEQ ID NO: 43601
  misc_feature 1..80: note = Artificially Synthesized Probe
  source 1..80: mol_type = other DNA

SEQ ID NO: 139136 - DNA, 80 bp, synthetic construct
  misc_feature 1..80: note = Artificially Synthesized Probe
  source 1..80: mol_type = other DNA
caaatgtggttttgcccctgaatacagacaatgagaaaaaatagatcttgatctctgtagcagtatattgtatttgctga

SEQ ID NO: 139137 - DNA, 80 bp, synthetic construct
  misc_feature 1..80: note = Artificially Synthesized Probe
  source 1..80: mol_type = other DNA
ttgagatttgaagcagtttgatcaatgccacaaacctggtttgatcagaacagactttaaatcaaaactatttttgtcat

SEQ ID NO: 139138 - DNA, 80 bp, synthetic construct
  misc_feature 1..80: note = Artificially Synthesized Probe
  source 1..80: mol_type = other DNA
caaacttttcttaggctaataatgattccaaggccttcttcaaattgtgatgaatttctggaagacaaatgtgtcccctg

SEQ ID NO: 139139 - DNA, 80 bp, synthetic construct; identical to SEQ ID NO: 43602
  misc_feature 1..80: note = Artificially Synthesized Probe
  source 1..80: mol_type = other DNA

SEQ ID NO: 139140 - DNA, 80 bp, synthetic construct
  misc_feature 1..80: note = Artificially Synthesized Probe
  source 1..80: mol_type = other DNA
caattctttgcagcagaacttgagttcttcctgaatgaaatatttcctagttttctctgcccatttcattagtgaatttt

SEQ ID NO: 139141 - DNA, 80 bp, synthetic construct
  misc_feature 1..80: note = Artificially Synthesized Probe
  source 1..80: mol_type = other DNA
gtacataggctttttaaaatttttgttttcagcctaagaggctctgtgctgatatagcacaagcatttacactaggtctt

SEQ ID NO: 139142 - DNA, 80 bp, synthetic construct
  misc_feature 1..80: note = Artificially Synthesized Probe
  source 1..80: mol_type = other DNA
tcagttacaaataagttgctttgtttgttgatgtagcttaaataggcattgggatcacagattaattagaagagtcattt

SEQ ID NO: 139143 - DNA, 80 bp, synthetic construct; identical to SEQ ID NO: 43603
  misc_feature 1..80: note = Artificially Synthesized Probe
  source 1..80: mol_type = other DNA

SEQ ID NO: 139144 - DNA, 80 bp, synthetic construct
  misc_feature 1..80: note = Artificially Synthesized Probe
  source 1..80: mol_type = other DNA
tatgtaactatctatatcttccagcaatagaagctcatacagtgtagcttattaggaaaactctctaatctccaggagga

SEQ ID NO: 139145 - DNA, 80 bp, synthetic construct
  misc_feature 1..80: note = Artificially Synthesized Probe
  source 1..80: mol_type = other DNA
ctctttcctttctttttcgagacagggtctcactctgttgcccaggctggaacgcagtggttcagtcgtagctcactgca

SEQ ID NO: 139146 - DNA, 80 bp, synthetic construct
  misc_feature 1..80: note = Artificially Synthesized Probe
  source 1..80: mol_type = other DNA
atcagttttcactaatttggtcagagtgctaagatactagttatttcattttattttcagcttctttgtttccacatatt

SEQ ID NO: 139147 - DNA, 80 bp, synthetic construct; identical to SEQ ID NO: 43604
  misc_feature 1..80: note = Artificially Synthesized Probe
  source 1..80: mol_type = other DNA

SEQ ID NO: 139148 - DNA, 80 bp, synthetic construct
  misc_feature 1..80: note = Artificially Synthesized Probe
  source 1..80: mol_type = other DNA
gaaaaagaactacttctgaggttttgttttgttttggtaaaacaatgttgcactgttgccagctgcagaactgcaagtga

SEQ ID NO: 139149 - DNA, 80 bp, synthetic construct
  misc_feature 1..80: note = Artificially Synthesized Probe
  source 1..80: mol_type = other DNA
cctcattttgtatctttaatattagctagggcaccatttggagatctctgtgtaggtcttgagtgtatgttgattaactt

SEQ ID NO: 139150 - DNA, 80 bp, synthetic construct
  misc_feature 1..80: note = Artificially Synthesized Probe
  source 1..80: mol_type = other DNA
gtctggggggaaaagtggttgacatttgaatttcataaatttgttccaatctaaaaacctcagatatctttgagttaaaa

SEQ ID NO: 139151 - DNA, 80 bp, synthetic construct; identical to SEQ ID NO: 43605
  misc_feature 1..80: note = Artificially Synthesized Probe
  source 1..80: mol_type = other DNA

SEQ ID NO: 139152 - DNA, 80 bp, synthetic construct
  misc_feature 1..80: note = Artificially Synthesized Probe
  source 1..80: mol_type = other DNA
atggatctgtgggcccagtgaatggactgaggggagggtgacagagagctgcacgccatccttcgggtgtgctggtcagg

SEQ ID NO: 139153 - DNA, 80 bp, synthetic construct
  misc_feature 1..80: note = Artificially Synthesized Probe
  source 1..80: mol_type = other DNA
ggaacttgatgtgattgatgttttccttggaaaatgtgaaaaagtgaaacaagaagagaggcaaatagcctgtatgggag

SEQ ID NO: 139154 - DNA, 80 bp, synthetic construct
  misc_feature 1..80: note = Artificially Synthesized Probe
  source 1..80: mol_type = other DNA
tagtacagtagtgagaacagaaaacaggtaagtggagagaagtgcagaaatgataagcttgccttttgcctggtgttcac

SEQ ID NO: 139155 - DNA, 80 bp, synthetic construct
  misc_feature 1..80: note = Artificially Synthesized Probe
  source 1..80: mol_type = other DNA
gatgttttttcacttaaaacagctactcttatataatttatattttctggaacctattctgaaggaatgtatctgaacta

SEQ ID NO: 139156 - DNA, 80 bp, synthetic construct
  misc_feature 1..80: note = Artificially Synthesized Probe
  source 1..80: mol_type = other DNA
caaatgtttaaatgtccattgaaaccgtgaggctgaaaactgcattattcgtgatggctagtacagtgtatacgtgatta

SEQ ID NO: 139157 - DNA, 80 bp, synthetic construct; identical to SEQ ID NO: 43606
  misc_feature 1..80: note = Artificially Synthesized Probe
  source 1..80: mol_type = other DNA

SEQ ID NO: 139158 - DNA, 80 bp, synthetic construct
  misc_feature 1..80: note = Artificially Synthesized Probe
  source 1..80: mol_type = other DNA
gcgttcttacagaagcttgtgttgactgtgtttcactaatttaacaagctgcttgctgctagctaacagtttagtgtaat

SEQ ID NO: 139159 - DNA, 80 bp, synthetic construct
  misc_feature 1..80: note = Artificially Synthesized Probe
  source 1..80: mol_type = other DNA
catttctcttgatgacacctgactcctgcacgtatttacagccgttcaatttgttttcacctatcttttgttcagcttat

SEQ ID NO: 139160 - DNA, 80 bp, synthetic construct
  misc_feature 1..80: note = Artificially Synthesized Probe
  source 1..80: mol_type = other DNA
tcaaattgccggtttttttctagaaatatgtaattctcttggagtgtgtcctacgagaggaatgtgataataaggatcct

SEQ ID NO: 139161 - DNA, 80 bp, synthetic construct; identical to SEQ ID NO: 43607
  misc_feature 1..80: note = Artificially Synthesized Probe
  source 1..80: mol_type = other DNA

SEQ ID NO: 139162 - DNA, 80 bp, synthetic construct
  misc_feature 1..80: note = Artificially Synthesized Probe
  source 1..80: mol_type = other DNA
cttttggcaccatttctgcaagtacaaataaagatggtagaaataatcaccacagtgctcctaaagtaggttacttctag

SEQ ID NO: 139163 - DNA, 80 bp, synthetic construct
  misc_feature 1..80: note = Artificially Synthesized Probe
  source 1..80: mol_type = other DNA
ctgtactaggctagcatagtatttctaagaaaaagagaaccagaagacacagagtgggagtggctgtgatgagcaagtgt

SEQ ID NO: 139164 - DNA, 80 bp, synthetic construct
  misc_feature 1..80: note = Artificially Synthesized Probe
  source 1..80: mol_type = other DNA
ccagctcttcctgagctgtgtgtatgcacttgctttaactacacatgcacacatatattattaccttccttgcatctctt

SEQ ID NO: 139165 - DNA, 80 bp, synthetic construct
  misc_feature 1..80: note = Artificially Synthesized Probe
  source 1..80: mol_type = other DNA
agaccagttggcatggtgtaaggctaggggacagggatcttttagaggctgttgcatttatagtaggttagacatcacag

SEQ ID NO: 139166 - DNA, 80 bp, synthetic construct; identical to SEQ ID NO: 43608
  misc_feature 1..80: note = Artificially Synthesized Probe
  source 1..80: mol_type = other DNA

SEQ ID NO: 139167 - DNA, 80 bp, synthetic construct
  misc_feature 1..80: note = Artificially Synthesized Probe
  source 1..80: mol_type = other DNA
ctgggccggggctcacattaatcagtccccttgttcaacactccagctgacataattacaacctgcgcacagcagttatt

SEQ ID NO: 139168 - DNA, 80 bp, synthetic construct; identical to SEQ ID NO: 43314
  misc_feature 1..80: note = Artificially Synthesized Probe
  source 1..80: mol_type = other DNA

SEQ ID NO: 139169 - DNA, 80 bp, synthetic construct
  misc_feature 1..80: note = Artificially Synthesized Probe
  source 1..80: mol_type = other DNA
agagacttacaagggacaaagggaagcattgtgtgcagggactgaaatgaaccagttattatttttaaatgggttacatg

SEQ ID NO: 139170 - DNA, 80 bp, synthetic construct
  misc_feature 1..80: note = Artificially Synthesized Probe
  source 1..80: mol_type = other DNA
tatgcatttttcgattaatactcagcaactgtagacttagggagctctgtacagcatagagttaaagctagaaaacattt

SEQ ID NO: 139171 - DNA, 80 bp, synthetic construct; identical to SEQ ID NO: 43609
  misc_feature 1..80: note = Artificially Synthesized Probe
  source 1..80: mol_type = other DNA

SEQ ID NO: 139172 - DNA, 80 bp, synthetic construct
  misc_feature 1..80: note = Artificially Synthesized Probe
  source 1..80: mol_type = other DNA
tccggcttgaactctcagaaatattgtgaaacatgatgctgcttcagtaaaaatgttacgtacatcaccttaaatttgaa

SEQ ID NO: 139173 - DNA, 80 bp, synthetic construct
  misc_feature 1..80: note = Artificially Synthesized Probe
  source 1..80: mol_type = other DNA
aatatatttctgtctaccatttttactgtacctaaccactctaaaaaaatgatggcttggatttttggaggttggttagg

SEQ ID NO: 139174 - DNA, 80 bp, synthetic construct; identical to SEQ ID NO: 43610
  misc_feature 1..80: note = Artificially Synthesized Probe
  source 1..80: mol_type = other DNA

SEQ ID NO: 139175 - DNA, 80 bp, synthetic construct
  misc_feature 1..80: note = Artificially Synthesized Probe
  source 1..80: mol_type = other DNA
caactttgaaaaaatgttttggtagtcacatatgtttgggagatactctccatattgtatcccctatccagtcccttcac

SEQ ID NO: 139176 - DNA, 80 bp, synthetic construct
  misc_feature 1..80: note = Artificially Synthesized Probe
  source 1..80: mol_type = other DNA
gaggcaaccactaaagtctgctgcatgtttttagctcagagactttagcatgttcgttcttcatctgctcccattgtaag

SEQ ID NO: 139177 - DNA, 80 bp, synthetic construct
  misc_feature 1..80: note = Artificially Synthesized Probe
  source 1..80: mol_type = other DNA
aaacagttaaggaaatgtattattttttctctttggggctaaagaaaaagaatcagggagaaatccaggttctccagggc

SEQ ID NO: 139178 - DNA, 80 bp, synthetic construct; identical to SEQ ID NO: 43611
  misc_feature 1..80: note = Artificially Synthesized Probe
  source 1..80: mol_type = other DNA

SEQ ID NO: 139179 - DNA, 80 bp, synthetic construct
  misc_feature 1..80: note = Artificially Synthesized Probe
  source 1..80: mol_type = other DNA
atgttagtacttcatttttaattttatttttatttattatattttcagagacaaggtctctgtctctgtctcccaggctg

SEQ ID NO: 139180 - DNA, 80 bp, synthetic construct
  misc_feature 1..80: note = Artificially Synthesized Probe
  source 1..80: mol_type = other DNA
agtgtaactctgggtgaaaatctcatatgataaatatatctgaagcagtggcatatcaatatgtaagtttactgttaaca

SEQ ID NO: 139181 - DNA, 80 bp, synthetic construct
  misc_feature 1..80: note = Artificially Synthesized Probe
  source 1..80: mol_type = other DNA
tttatgcagtacagcacagctttttgttactgctcttaacatacacaactcttttgtcttgtaaaatcatatcctcgttg

SEQ ID NO: 139182 - DNA, 80 bp, synthetic construct
  misc_feature 1..80: note = Artificially Synthesized Probe
  source 1..80: mol_type = other DNA
ttaaattatttgtcttctgaagtgcctatgattgggtctgaaaggctggccttgctcccagacgtttagaaaagcagcta

SEQ ID NO: 139183 - DNA, 80 bp, synthetic construct; identical to SEQ ID NO: 43612
  misc_feature 1..80: note = Artificially Synthesized Probe
  source 1..80: mol_type = other DNA

SEQ ID NO: 139184 - DNA, 80 bp, synthetic construct
  misc_feature 1..80: note = Artificially Synthesized Probe
  source 1..80: mol_type = other DNA
taatggaaattatcccattcaataaatagctaccagttataataaaggaaaataaaattcataagatttagagcaaggtg

SEQ ID NO: 139185 - DNA, 80 bp, synthetic construct
  misc_feature 1..80: note = Artificially Synthesized Probe
  source 1..80: mol_type = other DNA
ttttaaatatctagtttacttaaattctcctgacatttaccagttttgtacgttattattactatttggagtcagagtct

SEQ ID NO: 139186 - DNA, 80 bp, synthetic construct
  misc_feature 1..80: note = Artificially Synthesized Probe
  source 1..80: mol_type = other DNA
catctggtgtttgtaaagaataaagaagttagctccattctccaccacaccctctcctctcttccctgttttgattatag

SEQ ID NO: 139187 - DNA, 80 bp, synthetic construct; identical to SEQ ID NO: 43613
  misc_feature 1..80: note = Artificially Synthesized Probe
  source 1..80: mol_type = other DNA

SEQ ID NO: 139188 - DNA, 80 bp, synthetic construct
  misc_feature 1..80: note = Artificially Synthesized Probe
  source 1..80: mol_type = other DNA
ataaatgtatgtattttccatgtatacattttatctgtatatgtatgtgcatatatttcatatatctgtgggtgtatata

SEQ ID NO: 139189 - DNA, 80 bp, synthetic construct
  misc_feature 1..80: note = Artificially Synthesized Probe
  source 1..80: mol_type = other DNA
gtgccatagatgtatatgtgtgtgcacacacactgtatgtgtatatgcatatgtgtgcacacatactttatgtgtatatg

SEQ ID NO: 139190 - DNA, 80 bp, synthetic construct
  misc_feature 1..80: note = Artificially Synthesized Probe
  source 1..80: mol_type = other DNA
gtgtcgaactactgcacccaagccatcctccctccttgtccttcaaaagcattgggattgtaggcatgagctaccgtgcc

SEQ ID NO: 139191 - DNA, 80 bp, synthetic construct
  misc_feature 1..80: note = Artificially Synthesized Probe
  source 1..80: mol_type = other DNA
tattctatttaatggcttttatacaacaagtaaggttgaatgcccagatagtacacacaccaagctttcttccacagggt

SEQ ID NO: 139192 - DNA, 80 bp, synthetic construct
  misc_feature 1..80: note = Artificially Synthesized Probe
  source 1..80: mol_type = other DNA
ctggggaagtgtctggctcttacgctgtgggacttttaagcttcacaactggagaagatccagctcctccatgcctctga

SEQ ID NO: 139193 - DNA, 80 bp, synthetic construct; identical to SEQ ID NO: 43614
  misc_feature 1..80: note = Artificially Synthesized Probe
  source 1..80: mol_type = other DNA

SEQ ID NO: 139194 - DNA, 80 bp, synthetic construct
  misc_feature 1..80: note = Artificially Synthesized Probe
  source 1..80: mol_type = other DNA
tcaaaagcttttgctaacttacaccattaccagaggtatatcattttcccttaccattacttaatatgatcaaacttatt

SEQ ID NO: 139195 - DNA, 80 bp, synthetic construct
  misc_feature 1..80: note = Artificially Synthesized Probe
  source 1..80: mol_type = other DNA
taatcaatggaacccattttggaatccgtattaatcaccagtttttgtatatgttgcatagttttactccttttctttgc

SEQ ID NO: 139196 - DNA, 80 bp, synthetic construct
  misc_feature 1..80: note = Artificially Synthesized Probe
  source 1..80: mol_type = other DNA
gtaatttggtttccttatgttaaaattttttaatccaaatggtatttatttttgtatggtgtaggacaataagtcactta

SEQ ID NO: 139197 - DNA, 80 bp, synthetic construct; identical to SEQ ID NO: 43615
  misc_feature 1..80: note = Artificially Synthesized Probe
  source 1..80: mol_type = other DNA

SEQ ID NO: 139198 - DNA, 80 bp, synthetic construct
  misc_feature 1..80: note = Artificially Synthesized Probe
  source 1..80: mol_type = other DNA
taaattgtgaaacaagctccgagtttatatattggagcacattcttccaacctacagtgagctttaaagcaacatatatg

SEQ ID NO: 139199 - DNA, 80 bp, synthetic construct
  misc_feature 1..80: note = Artificially Synthesized Probe
  source 1..80: mol_type = other DNA
ttaatttacataaagattttcttcggattattctatatgcattttggaatcatattacaaagatacagtagaaaccccct

SEQ ID NO: 139200 - DNA, 80 bp, synthetic construct; identical to SEQ ID NO: 43616
  misc_feature 1..80: note = Artificially Synthesized Probe
  source 1..80: mol_type = other DNA

SEQ ID NO: 139201 - DNA, 80 bp, synthetic construct
  misc_feature 1..80: note = Artificially Synthesized Probe
  source 1..80: mol_type = other DNA
catgatggcattctgaggtacatgttgttctaccatagagcaactgaaaaagaaaatgttctgtagtcaaaaaatttgag

SEQ ID NO: 139202 - DNA, 80 bp, synthetic construct
  misc_feature 1..80: note = Artificially Synthesized Probe
  source 1..80: mol_type = other DNA
tggatatatgtttttgcttctcttggttgtgtatacctccaagtagaattactgtgctatatgctagcaccatgtttaat

SEQ ID NO: 139203 - DNA, 80 bp, synthetic construct
  misc_feature 1..80: note = Artificially Synthesized Probe
  source 1..80: mol_type = other DNA
tttcctgaacacggatctcctcacacttgtacttacggtttttcttaacatcttttagcatcttcagaaataatattttt

SEQ ID NO: 139204 - DNA, 80 bp, synthetic construct
  misc_feature 1..80: note = Artificially Synthesized Probe
  source 1..80: mol_type = other DNA
tatgtttgaataaatggcagagtttttcctttctaaaaaagtatttccagaagaggaatttatgtatttctcttgttgta

SEQ ID NO: 139205 - DNA, 80 bp, synthetic construct
  misc_feature 1..80: note = Artificially Synthesized Probe
  source 1..80: mol_type = other DNA
gagtcaaaatatgctgtatctcaaactgaaggagggactgacaatattgtactctagaaaactgttaggagatcacagaa

SEQ ID NO: 139206 - DNA, 80 bp, synthetic construct; identical to SEQ ID NO: 43617
  misc_feature 1..80: note = Artificially Synthesized Probe
  source 1..80: mol_type = other DNA

SEQ ID NO: 139207 - DNA, 80 bp, synthetic construct
  misc_feature 1..80: note = Artificially Synthesized Probe
  source 1..80: mol_type = other DNA
ttatgtgtaatctatccagaatttattgtgaagcctctttaacttatcacggaagaatttaacccgctatgtagtgcctt

SEQ ID NO: 139208 - DNA, 80 bp, synthetic construct
  misc_feature 1..80: note = Artificially Synthesized Probe
  source 1..80: mol_type = other DNA
tgcagtgcttcacttgcatttgtctttcttgtctttggctgtctgtttagtctctttttcccccacttttaaattaaact

SEQ ID NO: 139209 - DNA, 80 bp, synthetic construct
  misc_feature 1..80: note = Artificially Synthesized Probe
  source 1..80: mol_type = other DNA
tcctcatagacctggtgctgtccatactcctgtgtagaattgtaatatgtgtgtgttacatgtatgtataattactttac

SEQ ID NO: 139210 - DNA, 80 bp, synthetic construct; identical to SEQ ID NO: 43618
  misc_feature 1..80: note = Artificially Synthesized Probe
  source 1..80: mol_type = other DNA

SEQ ID NO: 139211 - DNA, 80 bp, synthetic construct
  misc_feature 1..80: note = Artificially Synthesized Probe
  source 1..80: mol_type = other DNA
taactgtatagattcctttagcagcaattgatatatttaacattaagccaacccatacagatatgtggtgtaagtctctg

SEQ ID NO: 139212 - DNA, 80 bp, synthetic construct
  misc_feature 1..80: note = Artificially Synthesized Probe
  source 1..80: mol_type = other DNA
cacacatccacaaaagaaacaattggccaccgcactcaattcaattttcggttcttttagcctcccccttcagctaaact

SEQ ID NO: 139213 - DNA, 80 bp, synthetic construct
  misc_feature 1..80: note = Artificially Synthesized Probe
  source 1..80: mol_type = other DNA
tggagcagcatggaaaacatagagtagtgaagtggggagataagcaaaatggaaagtgggttgcgggaatgagaatgctc

SEQ ID NO: 139214 - DNA, 80 bp, synthetic construct
  misc_feature 1..80: note = Artificially Synthesized Probe
  source 1..80: mol_type = other DNA
gtgggtttgatttgcatttctttagtgactactgatgtagagtatcttttcatatgtgtattatgtatattttctatgaa

SEQ ID NO: 139215 - DNA, 80 bp, synthetic construct; identical to SEQ ID NO: 43619
  misc_feature 1..80: note = Artificially Synthesized Probe
  source 1..80: mol_type = other DNA

SEQ ID NO: 139216 - DNA, 80 bp, synthetic construct
  misc_feature 1..80: note = Artificially Synthesized Probe
  source 1..80: mol_type = other DNA
tgtagttaactctagatttttgccataccagctgacaaccactgtcccgtgagtgattttgtgttggttctgggtgggca

SEQ ID NO: 139217 - DNA, 80 bp, synthetic construct
  misc_feature 1..80: note = Artificially Synthesized Probe
  source 1..80: mol_type = other DNA
aaaggtggcatctcaagtcagtggggaaaatctgactttaacaaatgttattgagagagctgagtagcagtctggatcca

SEQ ID NO: 139218 - DNA, 80 bp, synthetic construct
  misc_feature 1..80: note = Artificially Synthesized Probe
  source 1..80: mol_type = other DNA
caacctaccataagcaaagtcaaaagaaaaaaaatgaaactgaagaaaacaagtctgcaacttctgtcctaaagagccag

SEQ ID NO: 139219 - DNA, 80 bp, synthetic construct; identical to SEQ ID NO: 43620
  misc_feature 1..80: note = Artificially Synthesized Probe
  source 1..80: mol_type = other DNA

SEQ ID NO: 139220 - DNA, 80 bp, synthetic construct
  misc_feature 1..80: note = Artificially Synthesized Probe
  source 1..80: mol_type = other DNA
agaatttatcagaattcatgcccattgacatttgaagcaattccagttgtcatgatgcgattgtcatggcacctggagaa

SEQ ID NO: 139221 - DNA, 80 bp, synthetic construct
  misc_feature 1..80: note = Artificially Synthesized Probe
  source 1..80: mol_type = other DNA
aaatactatgaagctgttaaaaaggagaaaagaaggtaagggtgggagtagagacatgtaggggagataagcgtgccctt

SEQ ID NO: 139222 - DNA, 80 bp, synthetic construct; identical to SEQ ID NO: 43621
  misc_feature 1..80: note = Artificially Synthesized Probe
  source 1..80: mol_type = other DNA

SEQ ID NO: 139223 - DNA, 80 bp, synthetic construct
  misc_feature 1..80: note = Artificially Synthesized Probe
  source 1..80: mol_type = other DNA
tttttgtgtccataggtcataagtgagtgtgtagtactgactaatgattttgtggagttctagaagtacttgtggtgttc

SEQ ID NO: 139224 - DNA, 80 bp, synthetic construct
  misc_feature 1..80: note = Artificially Synthesized Probe
  source 1..80: mol_type = other DNA
ttcaacatgttatattccaaaatttgatttgaagtgcactcttagaatgccttttccatgaaagcgatgcgtgctgtttc

SEQ ID NO: 139225 - DNA, 80 bp, synthetic construct
  misc_feature 1..80: note = Artificially Synthesized Probe
  source 1..80: mol_type = other DNA
tctgtcacgtggagctgtagcagtagagcggagttgagaaaggacagggcagagcttagtattttgctgagagctgcgga

SEQ ID NO: 139226 - DNA, 80 bp, synthetic construct; identical to SEQ ID NO: 43315
  misc_feature 1..80: note = Artificially Synthesized Probe
  source 1..80: mol_type = other DNA

SEQ ID NO: 139227 - DNA, 80 bp, synthetic construct; identical to SEQ ID NO: 43622
  misc_feature 1..80: note = Artificially Synthesized Probe
  source 1..80: mol_type = other DNA

SEQ ID NO: 139228 - DNA, 80 bp, synthetic construct
  misc_feature 1..80: note = Artificially Synthesized Probe
  source 1..80: mol_type = other DNA
atggtcgtctgctgccaggaataagaggaagagggtggggataggactgatcctagtgttggttaggaaactggattgaa

SEQ ID NO: 139229 - DNA, 80 bp, synthetic construct
  misc_feature 1..80: note = Artificially Synthesized Probe
  source 1..80: mol_type = other DNA
atacatgtaaccctttgcatttttctgagaaattggacttctcataaattttcttaaaagaaaaatttattaactctttc

SEQ ID NO: 139230 - DNA, 80 bp, synthetic construct
  misc_feature 1..80: note = Artificially Synthesized Probe
  source 1..80: mol_type = other DNA
aggaatgggcctagtatccttagtttacgtctttttcacccaaggtatctgctgtgcagtgattagtaaagagtgttcga

SEQ ID NO: 139231 - DNA, 80 bp, synthetic construct; identical to SEQ ID NO: 43623
  misc_feature 1..80: note = Artificially Synthesized Probe
  source 1..80: mol_type = other DNA

SEQ ID NO: 139232 - DNA, 80 bp, synthetic construct
  misc_feature 1..80: note = Artificially Synthesized Probe
  source 1..80: mol_type = other DNA
gtgtgtgctggtatggtgaggttgtatgcagcattggttcgaatcgggagtgtgtgtgtgtatgtgtgtgtgtacatgtg

SEQ ID NO: 139233 - DNA, 80 bp, synthetic construct; identical to SEQ ID NO: 43624
  misc_feature 1..80: note = Artificially Synthesized Probe
  source 1..80: mol_type = other DNA

SEQ ID NO: 139234 - DNA, 80 bp, synthetic construct
  misc_feature 1..80: note = Artificially Synthesized Probe
  source 1..80: mol_type = other DNA
ggagtgtgtgtgtgtatgtgtgtgtgtacatgtgtgtgctggtatggtgaagttgtgtgaagcattggttcgaatcggga

SEQ ID NO: 139235 - DNA, 80 bp, synthetic construct
  misc_feature 1..80: note = Artificially Synthesized Probe
  source 1..80: mol_type = other DNA
gtgtgctggtatggtgaggttgtgtgcagcattggttcgaattgggagtgtgtgtgtgtgtgcgtgcatgtgtgtgctgg

SEQ ID NO: 139236 - DNA, 80 bp, synthetic construct
  misc_feature 1..80: note = Artificially Synthesized Probe
  source 1..80: mol_type = other DNA
ggttgtatgcagcattcgttcgaatcgggagtgtgtgtgtgtatgtgtgtgtgtgcatgtgtgtgctggtatggtgagat

SEQ ID NO: 139237 - DNA, 80 bp, synthetic construct
  misc_feature 1..80: note = Artificially Synthesized Probe
  source 1..80: mol_type = other DNA
tattaacgtggaatcaagtggcatttggctgaacattcccatcatggtgtaaagtaaatggaaaatgatatgttttaatt

SEQ ID NO: 139238 - DNA, 80 bp, synthetic construct
  misc_feature 1..80: note = Artificially Synthesized Probe
  source 1..80: mol_type = other DNA
aatgacttaaaaatttattgcttactgaggtaaaggcccatggaggctgagaacctcttcttcttcttggtaactttacc

SEQ ID NO: 139239 - DNA, 80 bp, synthetic construct
  misc_feature 1..80: note = Artificially Synthesized Probe
  source 1..80: mol_type = other DNA
agaattgtgaaaccattactacaagcagtcttagatttttattacccaaagagactccatacacattaacactcactctc

SEQ ID NO: 139240 - DNA, 80 bp, synthetic construct; identical to SEQ ID NO: 43625
  misc_feature 1..80: note = Artificially Synthesized Probe
  source 1..80: mol_type = other DNA

SEQ ID NO: 139241 - DNA, 80 bp, synthetic construct
  misc_feature 1..80: note = Artificially Synthesized Probe
  source 1..80: mol_type = other DNA
cctagatacagccttcttgaaaacaaaataatctgttttccaagttatctctttcttcccttccctgaatgttaggattc

SEQ ID NO: 139242 - DNA, 80 bp, synthetic construct
  misc_feature 1..80: note = Artificially Synthesized Probe
  source 1..80: mol_type = other DNA
ttcctgataaacagtactaattaagtacagtagtagctttttgttttctctccccagtgtcagtaaacaatggtgaattt

SEQ ID NO: 139243 - DNA, 80 bp, synthetic construct
  misc_feature 1..80: note = Artificially Synthesized Probe
  source 1..80: mol_type = other DNA
tttcctgtgttatttcagacatgacccagagctgttactctaaggataattacacatttaagagactctacagtcctatc

SEQ ID NO: 139244 - DNA, 80 bp, synthetic construct
  misc_feature 1..80: note = Artificially Synthesized Probe
  source 1..80: mol_type = other DNA
ctcatcattgtgatatttaccttcttctctgtgaattgtgtagcagtcttgacctcagagggtcatgcttgccttcgaag

SEQ ID NO: 139245 - DNA, 80 bp, synthetic construct; identical to SEQ ID NO: 43626
  misc_feature 1..80: note = Artificially Synthesized Probe
  source 1..80: mol_type = other DNA

SEQ ID NO: 139246 - DNA, 80 bp, synthetic construct
  misc_feature 1..80: note = Artificially Synthesized Probe
  source 1..80: mol_type = other DNA
gtaagtgggcattgcagtatagctgcattaatattttaatgtatttctttctagtctttttcctaggcatagagggattt

SEQ ID NO: 139247 - DNA, 80 bp, synthetic construct
  misc_feature 1..80: note = Artificially Synthesized Probe
  source 1..80: mol_type = other DNA
gtacgagaactcttccagaatatgagatccccactcatgaggaacacgtttgcgtttcagctttgaccagagtctgtagg

SEQ ID NO: 139248 - DNA, 80 bp, synthetic construct
  misc_feature 1..80: note = Artificially Synthesized Probe
  source 1..80: mol_type = other DNA
gatgaggaaattaatgattgacagctggactagaagtggcttttcattggtaaaagagcttgagcacgaatggtgatatg

SEQ ID NO: 139249 - DNA, 80 bp, synthetic construct; identical to SEQ ID NO: 43627
  misc_feature 1..80: note = Artificially Synthesized Probe
  source 1..80: mol_type = other DNA

SEQ ID NO: 139250 - DNA, 80 bp, synthetic construct
  misc_feature 1..80: note = Artificially Synthesized Probe
  source 1..80: mol_type = other DNA
ctaccgtttcctgatcttttttgttcatgggaatctttcttctaagaacatcttgcaggatttttgttattccacaatac

SEQ ID NO: 139251 - DNA, 80 bp, synthetic construct
  misc_feature 1..80: note = Artificially Synthesized Probe
  source 1..80: mol_type = other DNA
atgacaaagacaaaaggaaaacagctccgcgtgtgtattcagaaagagtctagacttgcagtctgtgttgcaaaggatct

SEQ ID NO: 139252 - DNA, 80 bp, synthetic construct
  misc_feature 1..80: note = Artificially Synthesized Probe
  source 1..80: mol_type = other DNA
ccctccgttgcattttccatgccatcactcttatcactcttaaaagcctgtatcatcacagaaaacgccacgggattcac

SEQ ID NO: 139253 - DNA, 80 bp, synthetic construct; identical to SEQ ID NO: 43628
  misc_feature 1..80: note = Artificially Synthesized Probe
  source 1..80: mol_type = other DNA

SEQ ID NO: 139254 - DNA, 80 bp, synthetic construct
  misc_feature 1..80: note = Artificially Synthesized Probe
  source 1..80: mol_type = other DNA
ctcataaggctgatgtattatataagctaattattatatgagtacagcacttaaaatagtaccaaacacatacagacagt

SEQ ID NO: 139255 - DNA, 80 bp, synthetic construct
  misc_feature 1..80: note = Artificially Synthesized Probe
  source 1..80: mol_type = other DNA
ctggcaaacatgaaggagtcaagatgtacaactgtcccaagtgtgactacgggaccaacgtcccggtggagttccggaac

SEQ ID NO: 139256 - DNA, 80 bp, synthetic construct
  misc_feature 1..80: note = Artificially Synthesized Probe
  source 1..80: mol_type = other DNA
agagtatgtgatagtatctgcttcaagacctatagaaaagtacattccagtttgatcccactcaactatgaaaacaggac

SEQ ID NO: 139257 - DNA, 80 bp, synthetic construct
  misc_feature 1..80: note = Artificially Synthesized Probe
  source 1..80: mol_type = other DNA
ttaaaaaatgcttgtgatttgaaatgttatgccctgtttattgacaccatcatcttctagtgaatgcctagaaagaatgt

SEQ ID NO: 139258 - DNA, 80 bp, synthetic construct; identical to SEQ ID NO: 43629
  misc_feature 1..80: note = Artificially Synthesized Probe
  source 1..80: mol_type = other DNA

SEQ ID NO: 139259 - DNA, 80 bp, synthetic construct
  misc_feature 1..80: note = Artificially Synthesized Probe
  source 1..80: mol_type = other DNA
gaataaggcctgttgatcaaggatgtgctttaagcagatgttttgggacctgttagagttgcttttaaaccctgcttctc

SEQ ID NO: 139260 - DNA, 80 bp, synthetic construct
  misc_feature 1..80: note = Artificially Synthesized Probe
  source 1..80: mol_type = other DNA
atctcggctcactgcaagctccgcctcccgggttcacgccattctcctgcctcagcctaccgagtagctgggactacagg

SEQ ID NO: 139261 - DNA, 80 bp, synthetic construct
  misc_feature 1..80: note = Artificially Synthesized Probe
  source 1..80: mol_type = other DNA
gtgaagccaggagagtctaggagtttgaatgaactctccccagtacctgctatgctgctgtaggcatgaacatttatgcc

SEQ ID NO: 139262 - DNA, 80 bp, synthetic construct
  misc_feature 1..80: note = Artificially Synthesized Probe
  source 1..80: mol_type = other DNA
gactagttttcttaatacacttgacaatacgtggatagaggctcattactgttctttcatatttctcgattgatgttcat

SEQ ID NO: 139263 - DNA, 80 bp, synthetic construct; identical to SEQ ID NO: 43630
  misc_feature 1..80: note = Artificially Synthesized Probe
  source 1..80: mol_type = other DNA

SEQ ID NO: 139264 - DNA, 80 bp, synthetic construct
  misc_feature 1..80: note = Artificially Synthesized Probe
  source 1..80: mol_type = other DNA
gcctcctttccaggtgcaagattgacatatctgtctctctcttccattaccagttacacatgaaaaacggattgttccct

SEQ ID NO: 139265 - DNA, 80 bp, synthetic construct
  misc_feature 1..80: note = Artificially Synthesized Probe
  source 1..80: mol_type = other DNA
aacagttctgcagaaaggggtttgtgtgcaaatgtgctatacccttggtatctctacattggtgtataactgcagttacg

SEQ ID NO: 139266 - DNA, 80 bp, synthetic construct; identical to SEQ ID NO: 43631
  misc_feature 1..80: note = Artificially Synthesized Probe
  source 1..80: mol_type = other DNA

SEQ ID NO: 139267 - DNA, 80 bp, synthetic construct
  misc_feature 1..80: note = Artificially Synthesized Probe
  source 1..80: mol_type = other DNA
aatggttgcacagtttgtttttccctctctagcagaagttgatgatttattgtatttttttcagtcctttttagcaacca

SEQ ID NO: 139268 - DNA, 80 bp, synthetic construct
  misc_feature 1..80: note = Artificially Synthesized Probe
  source 1..80: mol_type = other DNA
ttccaggtagtttgagactttctggttatcttttttttttttttaaactattgaactaataatgcaaatccactaccagc

SEQ ID NO: 139269 - DNA, 80 bp, synthetic construct
  misc_feature 1..80: note = Artificially Synthesized Probe
  source 1..80: mol_type = other DNA
ttacaatgtttagtttgttcactgtgttgttcagattgtcgtattcttagtgctttttaaaatgccggttctgtcagctg

SEQ ID NO: 139270 - DNA, 80 bp, synthetic construct
  misc_feature 1..80: note = Artificially Synthesized Probe
  source 1..80: mol_type = other DNA
tagcaatatctcttgccataattctgcatttcatattggtatacctttcccagattgcttataagcagcttatagttgca

SEQ ID NO: 139271 - DNA, 80 bp, synthetic construct; identical to SEQ ID NO: 43316
  misc_feature 1..80: note = Artificially Synthesized Probe
  source 1..80: mol_type = other DNA

SEQ ID NO: 139272 - DNA, 80 bp, synthetic construct; identical to SEQ ID NO: 43632
  misc_feature 1..80: note = Artificially Synthesized Probe
  source 1..80: mol_type = other DNA

SEQ ID NO: 139273 - DNA, 80 bp, synthetic construct
  misc_feature 1..80: note = Artificially Synthesized Probe
  source 1..80: mol_type = other DNA
ccagtcactgaatgaagtacagtggtctagtaagattctgcttcttaatcccaatactgagacacagttgtgttcagttt

SEQ ID NO: 139274 - DNA, 80 bp, synthetic construct
  misc_feature 1..80: note = Artificially Synthesized Probe
  source 1..80: mol_type = other DNA
tctgtatatacttaaaaaaaaaaacacctttctccacatccaagtttctgaagagcttcatttaggcccaatctaggtct

SEQ ID NO: 139275 - DNA, 80 bp, synthetic construct; identical to SEQ ID NO: 43633
  misc_feature 1..80: note = Artificially Synthesized Probe
  source 1..80: mol_type = other DNA

SEQ ID NO: 139276 - DNA, 80 bp, synthetic construct
  misc_feature 1..80: note = Artificially Synthesized Probe
  source 1..80: mol_type = other DNA
aagaaagagatgtttttttctcatcatttccaagcagcagacttatagttatgccttacggctcaaggagcttgtttatt

SEQ ID NO: 139277 - DNA, 80 bp, synthetic construct
  misc_feature 1..80: note = Artificially Synthesized Probe
  source 1..80: mol_type = other DNA
atttctctctgagaccttaaatgtggtaagtgttgttgtcttttccaaaggtaatgattacaaggtgttctcttttcagg

SEQ ID NO: 139278 - DNA, 80 bp, synthetic construct
  misc_feature 1..80: note = Artificially Synthesized Probe
  source 1..80: mol_type = other DNA
cagagtgataacacttgaaattatcatattctcttcaaaaattggggttcttgtattcttctctaagataagcagtttgg

SEQ ID NO: 139279 - DNA, 80 bp, synthetic construct
  misc_feature 1..80: note = Artificially Synthesized Probe
  source 1..80: mol_type = other DNA
taacgtaaaacagctaaagtcttttgtcttaaccattaccccttatttagcaatatattcaaatttcctacataaaaaaa

SEQ ID NO: 139280 - DNA, 80 bp, synthetic construct; identical to SEQ ID NO: 43634
  misc_feature 1..80: note = Artificially Synthesized Probe
  source 1..80: mol_type = other DNA

SEQ ID NO: 139281 - DNA, 80 bp, synthetic construct
  misc_feature 1..80: note = Artificially Synthesized Probe
  source 1..80: mol_type = other DNA
gtgtggtgatggaaggtgagcagttgccccagtaagatacttcagtgtgggctcatttctgtgaacacgttgagtgggca

SEQ ID NO: 139282 - DNA, 80 bp, synthetic construct
  misc_feature 1..80: note = Artificially Synthesized Probe
  source 1..80: mol_type = other DNA
gatttacaggtctataattttcagcctctcctctctttcgtgttaaccttcagactagattccttgttttccagtgtcct

SEQ ID NO: 139283 - DNA, 80 bp, synthetic construct
  misc_feature 1..80: note = Artificially Synthesized Probe
  source 1..80: mol_type = other DNA
tctgccatagcagtaccctcaatgtccatcatggctcaacacatttggtattttgatagctgatgtttttcttcattccc

SEQ ID NO: 139284 - DNA, 80 bp, synthetic construct
  misc_feature 1..80: note = Artificially Synthesized Probe
  source 1..80: mol_type = other DNA
gcttgttgagaaatcactttttctaccaaagataccatagtatttcttctggagtcaacaatagggtgacatggtgttcc

SEQ ID NO: 139285 - DNA, 80 bp, synthetic construct; identical to SEQ ID NO: 43635
  misc_feature 1..80: note = Artificially Synthesized Probe
  source 1..80: mol_type = other DNA

SEQ ID NO: 139286 - DNA, 80 bp, synthetic construct
  misc_feature 1..80: note = Artificially Synthesized Probe
  source 1..80: mol_type = other DNA
gacttcgagaccagcctggccaatgtagtgaaatcctgtctctactaaaaatacaaaaattagctgggcatggtggtggg

SEQ ID NO: 139287 - DNA, 80 bp, synthetic construct
  misc_feature 1..80: note = Artificially Synthesized Probe
  source 1..80: mol_type = other DNA
ttacatttaatctttttaagaataactatatgccagtattcttcagtacgcatatcttcctttatctgcctaacaccgtg

SEQ ID NO: 139288 - DNA, 80 bp, synthetic construct
  misc_feature 1..80: note = Artificially Synthesized Probe
  source 1..80: mol_type = other DNA
gtaagtagtaatgaagaactctgtttttcatgctatcacattttaccttttcaattacaaagaatcgtaaatagtatctg

SEQ ID NO: 139289 - DNA, 80 bp, synthetic construct
  misc_feature 1..80: note = Artificially Synthesized Probe
  source 1..80: mol_type = other DNA
gtcttacagttacatcaccctgctgtacaggagctttaaaataattgattggcaggttaatgaagttttttcagtggaag

SEQ ID NO: 139290 - DNA, 80 bp, synthetic construct; identical to SEQ ID NO: 43636
  misc_feature 1..80: note = Artificially Synthesized Probe
  source 1..80: mol_type = other DNA

SEQ ID NO: 139291 - DNA, 80 bp, synthetic construct
  misc_feature 1..80: note = Artificially Synthesized Probe
  source 1..80: mol_type = other DNA
ttgttactgctattttaatagtagcaaagtagaaggaaaagactaatgatttttttgcatgtatttcaagttgctattaa

SEQ ID NO: 139292 - DNA, 80 bp, synthetic construct
  misc_feature 1..80: note = Artificially Synthesized Probe
  source 1..80: mol_type = other DNA
aattatttctattatttgtatgttacctatgttgaagaaaaaagccaaactctgttggatgtttaaagatgtttatcctg

SEQ ID NO: 139293 - DNA, 80 bp, synthetic construct; identical to SEQ ID NO: 43637
  misc_feature 1..80: note = Artificially Synthesized Probe
  source 1..80: mol_type = other DNA

SEQ ID NO: 139294 - DNA, 80 bp, synthetic construct
  misc_feature 1..80: note = Artificially Synthesized Probe
  source 1..80: mol_type = other DNA
ttaaaaggtgtcagactgttagttaaatttctgctggatctggagaagacatggaaagggaaggagattctctacagaat

SEQ ID NO: 139295 - DNA, 80 bp, synthetic construct
  misc_feature 1..80: note = Artificially Synthesized Probe
  source 1..80: mol_type = other DNA
gagtctgttttgtcaatcttaagatctctatttcaatgttaatgccgaccagttgtgcctgaactccaaagggaggacct

SEQ ID NO: 139296 - DNA, 80 bp, synthetic construct
  misc_feature 1..80: note = Artificially Synthesized Probe
  source 1..80: mol_type = other DNA
tttacttcacaggttatgagtgccagtgagccgccttagatagaagcatcgtcagcactttattaatgatggatagtgag

SEQ ID NO: 139297 - DNA, 80 bp, synthetic construct
  misc_feature 1..80: note = Artificially Synthesized Probe
  source 1..80: mol_type = other DNA
aaaactgtttttttaaaaagaatatcatcctgaaaaaagtatcctttctactgtatagtttagcgttctgtaaagtcctg

SEQ ID NO: 139298 - DNA, 80 bp, synthetic construct
  misc_feature 1..80: note = Artificially Synthesized Probe
  source 1..80: mol_type = other DNA
tttaacttttttccagaaaaaaactatattctccccttccttgagtgtgctggccaagtgtgatggcctgtatgattcga

SEQ ID NO: 139299 - DNA, 80 bp, synthetic construct; identical to SEQ ID NO: 43638
  misc_feature 1..80: note = Artificially Synthesized Probe
  source 1..80: mol_type = other DNA

SEQ ID NO: 139300 - DNA, 80 bp, synthetic construct
  misc_feature 1..80: note = Artificially Synthesized Probe
  source 1..80: mol_type = other DNA
aactaattcaatataacttacatattttaaaaatttgcacaccctcacacacatattttgacccccacctaaacagcagt

SEQ ID NO: 139301 - DNA, 80 bp, synthetic construct
  misc_feature 1..80: note = Artificially Synthesized Probe
  source 1..80: mol_type = other DNA
ttcagaatatgaagtaatgcacattattactctttgcaatttcatttatttctatttgcagtgaggaaaattactatttc

SEQ ID NO: 139302 - DNA, 80 bp, synthetic construct; identical to SEQ ID NO: 43639
  misc_feature 1..80: note = Artificially Synthesized Probe
  source 1..80: mol_type = other DNA

SEQ ID NO: 139303 - DNA, 80 bp, synthetic construct
  misc_feature 1..80: note = Artificially Synthesized Probe
  source 1..80: mol_type = other DNA
aatagtgtgatgtttactcatgatttaattgaagtcatttaagaaaataccagaagaaatgtgtgctgtgcctggagcac

SEQ ID NO: 139304 - DNA, 80 bp, synthetic construct
  misc_feature 1..80: note = Artificially Synthesized Probe
  source 1..80: mol_type = other DNA
ccacgaaaatagcctatttctccccagtcatttgcccaataattttgacatccattagtttatcctgcctgaataaggtc

SEQ ID NO: 139305 - DNA, 80 bp, synthetic construct
  misc_feature 1..80: note = Artificially Synthesized Probe
  source 1..80: mol_type = other DNA
aataccattgtggcttattttcttactgaaagcactcctgccttaaccactgccccctctttccagtcagctcctgtgcc

SEQ ID NO: 139306 - DNA, 80 bp, synthetic construct; identical to SEQ ID NO: 43640
  misc_feature 1..80: note = Artificially Synthesized Probe
  source 1..80: mol_type = other DNA

SEQ ID NO: 139307 - DNA, 80 bp, synthetic construct; identical to SEQ ID NO: 43317
  misc_feature 1..80: note = Artificially Synthesized Probe
  source 1..80: mol_type = other DNA

SEQ ID NO: 139308 - DNA, 80 bp, synthetic construct
  misc_feature 1..80: note = Artificially Synthesized Probe
  source 1..80: mol_type = other DNA
gtttcttggatgttactccgaaagaacaaataacaaaaggaaaacataagttgaattttatcaaaattaaaaattttgtg

SEQ ID NO: 139309 - DNA, 80 bp, synthetic construct
  misc_feature 1..80: note = Artificially Synthesized Probe
  source 1..80: mol_type = other DNA
gatcaaaataaccatttcccccaaagacgatacacaaatgaccggcaagccatggaaaatatgctcaacaccattactgt

SEQ ID NO: 139310 - DNA, 80 bp, synthetic construct
  misc_feature 1..80: note = Artificially Synthesized Probe
  source 1..80: mol_type = other DNA
tatatggtatatttaactgtctaaaaaaaaaactgttgaactatttttcaaactgtctgtgcatagtatgttcccgccag

SEQ ID NO: 139311 - DNA, 80 bp, synthetic construct; identical to SEQ ID NO: 43641
  misc_feature 1..80: note = Artificially Synthesized Probe
  source 1..80: mol_type = other DNA

SEQ ID NO: 139312 - DNA, 80 bp, synthetic construct
  misc_feature 1..80: note = Artificially Synthesized Probe
  source 1..80: mol_type = other DNA
ttttgatacaatatcttctaaaagctagttgcctaacttgagttacaaagaataatttatatattttcttctagaagctt

SEQ ID NO: 139313 - DNA, 80 bp, synthetic construct
  misc_feature 1..80: note = Artificially Synthesized Probe
  source 1..80: mol_type = other DNA
ctttgttcttttgttgaaagtaagttagcagcatttctctgggtcagtttgtttactctgctaccctagcagtttctgaa

SEQ ID NO: 139314 - DNA, 80 bp, synthetic construct
  misc_feature 1..80: note = Artificially Synthesized Probe
  source 1..80: mol_type = other DNA
aaatgtgtttggcttgtcactggctcttctatgtcctgaatgacttttgacttagcctgatatttgttataaccaatcat

SEQ ID NO: 139315 - DNA, 80 bp, synthetic construct
  misc_feature 1..80: note = Artificially Synthesized Probe
  source 1..80: mol_type = other DNA
gtaaataatactcaccaatttagtattttgcattcactatatttttctcattagctaagaaatatgctttaataaaaaaa

SEQ ID NO: 139316 - DNA, 80 bp, synthetic construct; identical to SEQ ID NO: 43642
  misc_feature 1..80: note = Artificially Synthesized Probe
  source 1..80: mol_type = other DNA

SEQ ID NO: 139317 - DNA, 80 bp, synthetic construct
  misc_feature 1..80: note = Artificially Synthesized Probe
  source 1..80: mol_type = other DNA
atgctattacatggatgaaccttgagaatatgttaagttaaacaagccagtcacacaagatggcttacattgataagtat

SEQ ID NO: 139318 - DNA, 80 bp, synthetic construct
  misc_feature 1..80: note = Artificially Synthesized Probe
  source 1..80: mol_type = other DNA
ctggttgtgcagcagtgtgatggtacttaattaacactgctgaaatgtccacataaaactgattaggatggtaactttta

SEQ ID NO: 139319 - DNA, 80 bp, synthetic construct
  misc_feature 1..80: note = Artificially Synthesized Probe
  source 1..80: mol_type = other DNA
ctattgatgttgtttctctgaaaacagacactgaaaaaacatctgctcaggaaatggtttcccttgatctggaaagagaa

SEQ ID NO: 139320 - DNA, 80 bp, synthetic construct
  misc_feature 1..80: note = Artificially Synthesized Probe
  source 1..80: mol_type = other DNA
tggaagtggggaagagtgaatacaaaaattatactaaatggcttgaccttctgaaatttaatggactaaacatatgttat

SEQ ID NO: 139321 - DNA, 80 bp, synthetic construct; identical to SEQ ID NO: 43643
  misc_feature 1..80: note = Artificially Synthesized Probe
  source 1..80: mol_type = other DNA

SEQ ID NO: 139322 - DNA, 80 bp, synthetic construct
  misc_feature 1..80: note = Artificially Synthesized Probe
  source 1..80: mol_type = other DNA
taaaagcctagcataaatggtttcgtgtttgtgaaggaaaaggcaagattctttcaagggtagtatagatgaatttaatc

SEQ ID NO: 139323 - DNA, 80 bp, synthetic construct
  misc_feature 1..80: note = Artificially Synthesized Probe
  source 1..80: mol_type = other DNA
ataataccagtttccttccagatgttggccaggaatagatttgaactttgctgtcttaaatggaaacaacatcgcaagct

SEQ ID NO: 139324 - DNA, 80 bp, synthetic construct
  misc_feature 1..80: note = Artificially Synthesized Probe
  source 1..80: mol_type = other DNA
tgtcaggagttcaagatcatggccaacatggcaaaaccccgtctctactaaaaatacaaaaattagccggacatggtggc

SEQ ID NO: 139325 - DNA, 80 bp, synthetic construct
  misc_feature 1..80: note = Artificially Synthesized Probe
  source 1..80: mol_type = other DNA
tgataaatgtcttggaatgattaaataagccaatatttgcaaagtacttaaaatagtgcctgccacttattaagtactct

SEQ ID NO: 139326 - DNA, 80 bp, synthetic construct; identical to SEQ ID NO: 43644
  misc_feature 1..80: note = Artificially Synthesized Probe
  source 1..80: mol_type = other DNA

SEQ ID NO: 139327 - DNA, 80 bp, synthetic construct
  misc_feature 1..80: note = Artificially Synthesized Probe
  source 1..80: mol_type = other DNA
ttctcatttatcaggtatctcagtcccatagtttgacattctttatgttggtaactaagtatttattgagtctattgaca

SEQ ID NO: 139328 - DNA, 80 bp, synthetic construct
  misc_feature 1..80: note = Artificially Synthesized Probe
  source 1..80: mol_type = other DNA
ttaattgtaatcaattctttcagcttggaagtgctcttgccatttaaaggagtgttggaaatagtgtgtgctacggggtg

SEQ ID NO: 139329 - DNA, 80 bp, synthetic construct; identical to SEQ ID NO: 43645
  misc_feature 1..80: note = Artificially Synthesized Probe
  source 1..80: mol_type = other DNA

SEQ ID NO: 139330 - DNA, 80 bp, synthetic construct
  misc_feature 1..80: note = Artificially Synthesized Probe
  source 1..80: mol_type = other DNA
actgcagccacaaagcagagagcagctcagcactacatatgcatatcaaacaagcacatgggccacagaaggtcttttcc

SEQ ID NO: 139331 - DNA, 80 bp, synthetic construct
  misc_feature 1..80: note = Artificially Synthesized Probe
  source 1..80: mol_type = other DNA
catgatccagaactcaatcaaagaagtaattttggttttagatataattctgtgatggcacttaatatattttcttttac

SEQ ID NO: 139332 - DNA, 80 bp, synthetic construct
  misc_feature 1..80: note = Artificially Synthesized Probe
  source 1..80: mol_type = other DNA
caattgaaatccagagctatctatttttattatttatggcaggatcagtttgggtgtgtttatcttctaggcattaagat

SEQ ID NO: 139333 - DNA, 80 bp, synthetic construct
  misc_feature 1..80: note = Artificially Synthesized Probe
  source 1..80: mol_type = other DNA
gaccccaaatctgacatgttagtttatgcagacgttttatctgagtgtttgtttagtgagactctgcccctgcgcattta

SEQ ID NO: 139334 - DNA, 80 bp, synthetic construct; identical to SEQ ID NO: 43646
  misc_feature 1..80: note = Artificially Synthesized Probe
  source 1..80: mol_type = other DNA

SEQ ID NO: 139335 - DNA, 80 bp, synthetic construct
  misc_feature 1..80: note = Artificially Synthesized Probe
  source 1..80: mol_type = other DNA
gccgatgatttctgaatcatcattgaaaagctgaattaataattctcaaactttttggtgagagaggttttagaaacttc

SEQ ID NO: 139336 - DNA, 80 bp, synthetic construct
  misc_feature 1..80: note = Artificially Synthesized Probe
  source 1..80: mol_type = other DNA
aaacaaattttggacattttgctcccatgatataaggttgataaagaaaagtgaaaggtgctttaggaaagcacccctga

SEQ ID NO: 139337 - DNA, 80 bp, synthetic construct
  misc_feature 1..80: note = Artificially Synthesized Probe
  source 1..80: mol_type = other DNA
tgaccatatcatacatggtaacaactattttatacaagcaatcactatttgccagatatgaggctgtttttaagagtatc

SEQ ID NO: 139338 - DNA, 80 bp, synthetic construct; identical to SEQ ID NO: 43647
  misc_feature 1..80: note = Artificially Synthesized Probe
  source 1..80: mol_type = other DNA

SEQ ID NO: 139339 - DNA, 80 bp, synthetic construct
  misc_feature 1..80: note = Artificially Synthesized Probe
  source 1..80: mol_type = other DNA
taccatattttatacatatcacatgttggatttgcttagcaaaatacaattttttgatcaccaggcaggggatcaattag

SEQ ID NO: 139340 - DNA, 80 bp, synthetic construct
  misc_feature 1..80: note = Artificially Synthesized Probe
  source 1..80: mol_type = other DNA
tccacaatacccatggctcacatgtgatattattattatctgcataatgctcatattcaggacttctgcagttgtgtttc

SEQ ID NO: 139341 - DNA, 80 bp, synthetic construct
  misc_feature 1..80: note = Artificially Synthesized Probe
  source 1..80: mol_type = other DNA
tcataattgtcttgatatgtctttccacatattagggtgatcttatccccagcatcatgctctgagcacgaattggttac

SEQ ID NO: 139342 - DNA, 80 bp, synthetic construct
  misc_feature 1..80: note = Artificially Synthesized Probe
  source 1..80: mol_type = other DNA
aaaatgttcactcaaaaccaagaacttctaaatcaatagcaaagaatagtgattcaaaaggattacgaaatgtgggaagc

SEQ ID NO: 139343 - DNA, 80 bp, synthetic construct
  misc_feature 1..80: note = Artificially Synthesized Probe
  source 1..80: mol_type = other DNA
ccttttgtaattaagacgctctgtctctttgacacatagtgtacccttttagatcgtcttaattttttttttacctccaa

SEQ ID NO: 139344 - DNA, 80 bp, synthetic construct; identical to SEQ ID NO: 43648
  misc_feature 1..80: note = Artificially Synthesized Probe
  source 1..80: mol_type = other DNA

SEQ ID NO: 139345 - DNA, 80 bp, synthetic construct
  misc_feature 1..80: note = Artificially Synthesized Probe
  source 1..80: mol_type = other DNA
actgaagacagacagctcactctcttgtccttggttaggttataaaagctcaagaagagaaaacagtcattaagagcata

SEQ ID NO: 139346 - DNA, 80 bp, synthetic construct
  misc_feature 1..80: note = Artificially Synthesized Probe
  source 1..80: mol_type = other DNA
gtattcctttatctaaacatgcatacctacaatatcctctagacatttacattccactttactcttactttgttttgtat

SEQ ID NO: 139347 - DNA, 80 bp, synthetic construct
  misc_feature 1..80: note = Artificially Synthesized Probe
  source 1..80: mol_type = other DNA
gcaatgcaataatttgagatcagaagtgaaatgtaaaaatttataacatgtaagacagataacaggattaatatgtattc

SEQ ID NO: 139348 - DNA, 80 bp, synthetic construct; identical to SEQ ID NO: 43649
  misc_feature 1..80: note = Artificially Synthesized Probe
  source 1..80: mol_type = other DNA

SEQ ID NO: 139349 - DNA, 80 bp, synthetic construct
  misc_feature 1..80: note = Artificially Synthesized Probe
  source 1..80: mol_type = other DNA
gagataaacccaattttgaaccaattctgacactttcttgctgtgtgatcttgggaagcttacacaccatgtctcagttt

SEQ ID NO: 139350 - DNA, 80 bp, synthetic construct
  misc_feature 1..80: note = Artificially Synthesized Probe
  source 1..80: mol_type = other DNA
agaaacaagtaggttgacttgctccatgtagggatcaacttatggacagaacatatgtgattgcagtcattgtggagctt

SEQ ID NO: 139351 - DNA, 80 bp, synthetic construct
  misc_feature 1..80: note = Artificially Synthesized Probe
  source 1..80: mol_type = other DNA
tgcagctgagacctgaaggacttgtctgggcactggggtggggctggcccaggaggactttgctggccattagtattatc

SEQ ID NO: 139352 - DNA, 80 bp, synthetic construct; identical to SEQ ID NO: 43650
  misc_feature 1..80: note = Artificially Synthesized Probe
  source 1..80: mol_type = other DNA

SEQ ID NO: 139353 - DNA, 80 bp, synthetic construct
  misc_feature 1..80: note = Artificially Synthesized Probe
  source 1..80: mol_type = other DNA
cttaaaaacactgaagtcataaatcctactttgcggggctgttgtagagaaaatgaaggaagcctctctgctcctgtctg

SEQ ID NO: 139354 - DNA, 80 bp, synthetic construct; identical to SEQ ID NO: 43318
  misc_feature 1..80: note = Artificially Synthesized Probe
  source 1..80: mol_type = other DNA

SEQ ID NO: 139355 - DNA, 80 bp, synthetic construct
  misc_feature 1..80: note = Artificially Synthesized Probe
  source 1..80: mol_type = other DNA
gttgtttgttctataattggggtggtagaacaatgcacataaaatgaactttctttctagacgcttacacagacatcccc

SEQ ID NO: 139356 - DNA, 80 bp, synthetic construct; identical to SEQ ID NO: 43651
  misc_feature 1..80: note = Artificially Synthesized Probe
  source 1..80: mol_type = other DNA

SEQ ID NO: 139357 - DNA, 80 bp, synthetic construct
  misc_feature 1..80: note = Artificially Synthesized Probe
  source 1..80: mol_type = other DNA
tgggcacatttgctccacaggaacctgctttcatgtagctccagcttgtagtaggttttctcaccgatggttcattaatt

SEQ ID NO: 139358 - DNA, 80 bp, synthetic construct
  misc_feature 1..80: note = Artificially Synthesized Probe
  source 1..80: mol_type = other DNA
aagcatgtatgttattcctttctcaagtagcaaatggagttgctgggtcccccttcgtttctttcctgtgcctattggtg

SEQ ID NO: 139359 - DNA, 80 bp, synthetic construct
  misc_feature 1..80: note = Artificially Synthesized Probe
  source 1..80: mol_type = other DNA
ggctcgagttatttcccacctcatatgcagattctccatattctcagagacttctgcaggatggcaggattgtgttagaa

SEQ ID NO: 139360 - DNA, 80 bp, synthetic construct
  misc_feature 1..80: note = Artificially Synthesized Probe
  source 1..80: mol_type = other DNA
gccatgcatttctaaggtattattaatataaactagaggaaaggagcttgtgattcttatgtccaccagaaacttttttg

SEQ ID NO: 139361 - DNA, 80 bp, synthetic construct; identical to SEQ ID NO: 43652
  misc_feature 1..80: note = Artificially Synthesized Probe
  source 1..80: mol_type = other DNA

SEQ ID NO: 139362 - DNA, 80 bp, synthetic construct
  misc_feature 1..80: note = Artificially Synthesized Probe
  source 1..80: mol_type = other DNA
gaagtttaacattttaaagatgttagtcatttcagaaacgtgctttttataaggcagttggtgcctgggcctccagtatg

SEQ ID NO: 139363 - DNA, 80 bp, synthetic construct
  misc_feature 1..80: note = Artificially Synthesized Probe
  source 1..80: mol_type = other DNA
atgcatgtgtttctcatctccagcatcttatgagaatccacttcttttcgaggaatgaaaaagtgttagatcatattgca

SEQ ID NO: 139364 - DNA, 80 bp, synthetic construct
  misc_feature 1..80: note = Artificially Synthesized Probe
  source 1..80: mol_type = other DNA
ccttccaggtaactggggctacaggcacatgccaccatgcctagctgatttttttgtacttttagtagagacggggtctc

SEQ ID NO: 139365 - DNA, 80 bp, synthetic construct
  misc_feature 1..80: note = Artificially Synthesized Probe
  source 1..80: mol_type = other DNA
tgtatatgaaacacttgagaacacagatgaaaacacacgatgcagaatcagtgctgaaacacctggaagcgtgcagcagt
